United States Patent Application Publication US 2004/0214272 A1 - sequence listing, part 45

SEQ ID NO: 194319 - protein, 251 aa, Zea mays
  Clone ID: MRT4577_108802C.1.pep
MEPSSQPQPMMGVGSQPYPAAAPYVPVPGSLAVPPGSQPAAAFPNPTQLSAQHQMVYQQAQQFYQQLQQQQEQQLREFWTTQMDEIKQANDFKIHTLPLARIKKIMKADEDVRMISAEAPVVFAKACEVFILELTLRSWMHTEENKRRTLQKNDIAAAITRTDIYDFLVDIIPRDEMKEEGLGHNPIVGLPPAMGAPADHGSHPYYYVPAQQVQGAGMMYGGQQGHPVTYMWQTPQGQAAEPPEEEQQQSA

SEQ ID NO: 194320 - protein, 162 aa, Zea mays
  Clone ID: MRT4577_108803C.1.pep
MAPPMVLLDREVELCDEEAGICEGPIRSSWGGLPARRSAKGQEKLSDAVAEYLQTFKAQPLVADPPELSSLNIRPPKSAPVPPTSGLESGRISSADKHLVALYAGGYRPGYSLPGSYLIYDASKDSISAIPCIPPDTCRTRAMGYQSAVVMCGATGRRLPSC

SEQ ID NO: 194321 - protein, 441 aa, Zea mays
  unsure (1)..(441): unsure at all Xaa locations
  Clone ID: MRT4577_108804C.1.pep
MASACPLTLRFLFSCILLQTICCSGVSVELSYDSAQVKALSSSAVTEYRVTVTDKRRAYYVFQKPFVCRARAKPCRSSEPIAAAGSFVNEAIAGAKRHEPEANGELAVVAEIEGAGVVPHVKSRVAPSAVAMGSGREKRLLGVLVDVPSPRRELGEARATARDEFSPVSNPATTPVSNPVTVPATNPMPPGFVTVPSTNPGNGIATNPNLPPLYPEPTTPGTMPMPDPTTTPVTVPPAFTNPVAAPNTMPGTAVTNPATTPTQFPGSSPVTNPVTTYPYPQQGGMPATTPPAVYQPPATAMPGTVQPGAPTVAGQAAWCVAKSGLMDTALQDGIDYACGVGGADCSAIQPMGACYNPNTLQAHASYAFNSYFQRNPSAASCDFGGAGMLVNVNPSSGTCVYQTXQQVSAPVTARGRRASVCLAVTLRGCRAPWEGAPAPRC

SEQ ID NO: 194322 - protein, 174 aa, Zea mays
  unsure (1)..(174): unsure at all Xaa locations
  Clone ID: MRT4577_108805C.1.pep
DAKYXGVXYXXCADXTKYXLXFXXEFXXKIERQYMLGLIAKDPEMRKGXVKLYHDTXGKTLFSRLQFIIQLQDWEAVSDVFWLKQGLDLVLAILVENEPITLAANSARVPTLMIAGPVPDRITMPQQVPDAQESMDGTTLSVDSLAARHAQFLNDANKLVVAEIMAPLKEPCFA

SEQ ID NO: 194323 - protein, 82 aa, Zea mays
  Clone ID: MRT4577_108806C.1.pep
AYKRSAGGHVVGDGTACSRANRISGCASGRLRGRLEIDYGQRVGGIDGDDYIGADYFVRLHGWRVDHFVAPEYSGPRSKVSS

SEQ ID NO: 194324 - protein, 105 aa, Zea mays
  Clone ID: MRT4577_108807C.1.pep
RARRSLCPVLTWFSARKRALWARSALIPIVSSTWPIVVVNMERFQELWMEEKVKLHSILISCLTEDFKRRLPPFSQILNKVDNGEQNHYFYYRFYDREIRRMVPV

SEQ ID NO: 194325 - protein, 59 aa, Zea mays
  Clone ID: MRT4577_108808C.1.pep
VRKVGSFRGAAPLILQDIKMEIRCFEYEIVDGEVINIHPFIWYFINFYKKGKRSFLLVQ

SEQ ID NO: 194326 - protein, 131 aa, Zea mays
  Clone ID: MRT4577_108809C.1.pep
LTREQRGGRVFPGWNEGRIYFPPTYKYSNNSDKYAGEDMNQKEKKLVPAWCDLPLWYGRGLSQLSYVRSESRFSDHSPVYSMFIAEVESINHSQIQKMSSWSSQLDIEELLPYSYGYTEIDHYGYTDLNFY

SEQ ID NO: 194327 - protein, 568 aa, Zea mays
  Clone ID: MRT4577_10880C.1.pep
MASSASLQRFLLPSSHAAATAASPSSRLRRTGRARAAVSVPPPAAAGEQVPTERLEPRVEERAGGYWVLKEKYRAGLNPQEKVKLEKEPMALFMEGGIQDLARVPMEQIDAAKLTKDDVDVRLKWLGLFHRRKHQYGRFMMRLKLPNGVTTSEQTRYLASVIEAYGADGCADVTTRQNWQIRGVTLPDVPAILDGLRAVGLTSLQSGMDNVRNPVGNPLAGVDPHEIVDTRPYTNLLSSYVTNNSQGNPTITNLPRKWNVCVIGSHDLYEHPHINDLAYMPAVKDGEFGFNLLVGGFISPKRWAEALPLDAWVAGDDVVPVCKAILEAYRDLGSRGNRQKTRMMWLIDELGMEVFRSEVEKRMPNGVLERAAPEDLVDKRWERRDYLGVHPQKQEGLSYVGLHVPVGRLQAADMFELARLADEYGTGELRLTVEQNIVLPNVSNERLDALLAEPLLQEQRLSPRPSMLLRGLVACTGNQFCGQAIIETKARALQVAREVEKRVAVPRPVRMHWTGCPNSCGQVQVADIGFMGCLTKDSDGKIVEAADIFVGGRVGGAVPRERDEEDEE

SEQ ID NO: 194328 - protein, 100 aa, Zea mays
  unsure (1)..(100): unsure at all Xaa locations
  Clone ID: MRT4577_108810C.1.pep
DHHAPYKVESTSTTRAPLGTKIYSLLMRLALSACVANATLFPRAHKPEXDFXPYLHXMRAPECENPALQPYMLQHALAASNIPLSHSCQHSPDLSLWRTL

SEQ ID NO: 194329 - protein, 65 aa, Zea mays
  Clone ID: MRT4577_108811C.1.pep
LLKYCYDAERLGFGLRILGNNLLVGKGVHGENVNSAFDINSYPIKFCWIDGWILLAPITPSCWRI

SEQ ID NO: 194330 - protein, 113 aa, Zea mays
  unsure (1)..(113): unsure at all Xaa locations
  Clone ID: MRT4577_108812C.1.pep
TWDDPSTSLSPPRYTDWPRSDLLPVDXPTTMPGXKPPFRVLSYGVRPSFGXKXXTNLHCLAWCLPPHFDMXQLQGLANAIVKLWEKSSIAKIALKRGVXAYHSERMXEDIEVS

SEQ ID NO: 194331 - protein, 34 aa, Zea mays
  Clone ID: MRT4577_108813C.1.pep
TGGFLQHHKSGPSASANIQICSMSLSGVRKAYLL

SEQ ID NO: 194332 - protein, 102 aa, Zea mays
  Clone ID: MRT4577_108814C.1.pep
AQGGDPGFTVGPGNGRDAYIPFYRVPQKPNKVGVPAPMWGRGFCFTKQPFFLNPEGVGNNKAGGGEAPPMAHTQVFERGGFPGVQNKGSATAMLGGPEFPRE

SEQ ID NO: 194333 - protein, 273 aa, Zea mays
  unsure (1)..(273): unsure at all Xaa locations
  Clone ID: MRT4577_108815C.1.pep
GAATQFVRGLLFSTFLCSSAQPASSQTSSRLLWPSALPISFLALSLDRVLLSAPLPWSSLCTFWFLLPLLWGPRAPLPHDAVALKLVPRSPWPPSSSSLKLPCARISPFPCSSSPRAPALSMAASSLSSTRPDLPWCVPPAPPCPSRVRPNVPAPCSLPGASSCARAVLSARNSPVVQLIAPGCFSPARSCALYSDSCWPCPLFLRADQVLSGRELSHVRVQPRLLLPTRVPRYLLGFRPCPAVPPLCSLSSMAAVGSPAWSLPWPXWWRALL

SEQ ID NO: 194334 - protein, 189 aa, Zea mays
  Clone ID: MRT4577_108816C.1.pep
MGGGRDNHHVDKGCYPPTVYPPVHSTGSYAFAPPVAYPYSYAQHGSMAPPPLGSYPYPSPMYSSHSGYPPSGYPTYNQSVYPSMGGYPGASLHATQHHGNGYNMGATLIGGAAAAAAATYGVHHLTHGHHPHNHHLGHFGKFKHHYNGHYGKLKHGKFGKHNGLGGKHGLLGWKHHRHGFFGGKYKRWK

SEQ ID NO: 194335 - protein, 84 aa, Zea mays
  Clone ID: MRT4577_108817C.1.pep
QKTRSYTRVTTRQTLLHLAGHTILTIPTSQSRRQLYHMYDRISLCYTMMDPATLIHTLAGIVPKKGKITWIGTSFTKTSNLLRT

SEQ ID NO: 194336 - protein, 93 aa, Zea mays
  Clone ID: MRT4577_108818C.1.pep
LILLLFLFILQGAPFFFFGKKTKPFFKQGLYYKKPSFTAPLQHIHLKSFKANLAKITLLKILTLGFPTNPIIPPKPSLPKNPPGDPTKYPLNI

SEQ ID NO: 194337 - protein, 97 aa, Zea mays
  Clone ID: MRT4577_108819C.1.pep
PLEARTVWHVGRGREAVRRRGRGGRVGVVRAAGWQRRSSSRGRGGRQRFGQLTTQRRAGGSAAGVEEGGDGLTVTTSRDRKKERGWGGERHRGARPR

SEQ ID NO: 194338 - protein, 54 aa, Zea mays
  Clone ID: MRT4577_10881C.1.pep
ECFFSIENLFFMSQYVEASVIKWHIRIQCSTNRHLVGLKNLVYKRVLFRRQPVP

SEQ ID NO: 194339 - protein, 86 aa, Zea mays
  Clone ID: MRT4577_108820C.1.pep
PSGSRAAANGHRDGRGGGEGEGVGLGFRYGAHVPGRRGGSGCGGPGPGAPARGGEEAHPHGLPAPEQTALEAGRPVRRRRGQARLD

SEQ ID NO: 194340 - protein, 92 aa, Zea mays
  Clone ID: MRT4577_108821C.1.pep
KFFPILDPLAFVTSLKFCSKIIPKKKVSKETLYWCPDRLNCKSPQFPSLSLFPRNPIERWPTPVSPQFFKSWPKNQLTKPLSLLKKFLSHVL

SEQ ID NO: 194341 - protein, 44 aa, Zea mays
  Clone ID: MRT4577_108822C.1.pep
EIKGQSNKRKLSYITRKNYRVAHRWPVRENYVTEGASRPGRPRG

SEQ ID NO: 194342 - protein, 45 aa, Zea mays
  Clone ID: MRT4577_108823C.1.pep
RTKQTALIEGAKHHNVFRGPKSNQNQLVPFCSHISKCTDFLISAV

SEQ ID NO: 194343 - protein, 204 aa, Zea mays
  Clone ID: MRT4577_108824C.1.pep
AKKAMSAANLAELALIDPKKAKRIINNRQSAARSKERKMRYIAELERKVQFMQREATALATQLALLQRDTAGLTVENGDLKIRLESTEQQIHLQDALNGALKSEMQRLKMATGQAGNQMMNFAEPPHTFGGANQQVFHHPGQAVPPFLVAMQQQQQLLLPHMNQPLHPLQSQPLHQAATLSIDMAGLPAPPPGQWQWGGDTWSE

SEQ ID NO: 194344 - protein, 35 aa, Zea mays
  Clone ID: MRT4577_108825C.1.pep
LVLNMKHITYNNICFLTLLLTINLIEGSTSDGLLL

SEQ ID NO: 194345 - protein, 50 aa, Zea mays
  Clone ID: MRT4577_108826C.1.pep
RHCPRTFFWCPMRPRSLSVVHNTSSESVAHPHVLKYPYPSQHLVIRRGQA

SEQ ID NO: 194346 - protein, 42 aa, Zea mays
  Clone ID: MRT4577_108827C.1.pep
KSRAGFYSSGVSLHHFNSRMASVPWWREREPYPEVSGKVSSP

SEQ ID NO: 194347 - protein, 106 aa, Zea mays
  Clone ID: MRT4577_108828C.1.pep
GVCWEPPPLWTSAFWPLPKGGQKIKKKGGGFFPKQGFAKTKSLRNLGAGFPSKSTPGKKKNFSPPKWLGGGPPRGLGEKFHKKKRGGGLRVLWGAPGFSPNPWRLF

SEQ ID NO: 194348 - protein, 77 aa, Zea mays
  Clone ID: MRT4577_108829C.1.pep
WRWSNVLQRHAIRGCRWTRQTHRMAPVLFHSSKDAYLRKIEQHQISARSFVGTSMYAVNDMRIERDSILGASCSGSV

SEQ ID NO: 194349 - protein, 47 aa, Zea mays
  Clone ID: MRT4577_10882C.1.pep
TTAVLSKRPVLCPLRSMRWHTRDSSHRHLRGTMVTCDRYYNQSLFLI

SEQ ID NO: 194350 - protein, 133 aa, Zea mays
  Clone ID: MRT4577_108830C.1.pep
MAMMLLQIPPSSSLLSTRNLQIRFFHSSVSASSKKFRCRAVREKAEDIDKNISPPSSSPPPPSAEEVTKKYGLEVGLWKILSSKDDEGSDGDNKKKKSKTDEAKELLAKYGGAYLATSITLSLISFSLCYVLV

SEQ ID NO: 194351 - protein, 50 aa, Zea mays
  Clone ID: MRT4577_108831C.1.pep
KPGRWLPCPKAIIHLHFCRDVKFLRDLESFTQSLALAKRMCLGVLQMNRF

SEQ ID NO: 194352 - protein, 97 aa, Zea mays
  Clone ID: MRT4577_108832C.1.pep
GDWDSRGRPGLGELIRWESQIRNSVAGQPRRPIEETLIHKPANSSSNNYGSGDQLNAPGGTVNKSTGSGNQFPGAAFHGSVSFGSPSPQNPPSEHSK

SEQ ID NO: 194353 - protein, 94 aa, Zea mays
  Clone ID: MRT4577_108833C.1.pep
SARPYKRSKKLTNIQWLVVAVHRDFIVEGTVRQPTRKRTHTDVEQLHGIPSVGVMWRVAPIVVIVEGAGHQPHQSARKPTHPIPRGGAKLSRMK

SEQ ID NO: 194354 - protein, 141 aa, Zea mays
  unsure (1)..(141): unsure at all Xaa locations
  Clone ID: MRT4577_108834C.1.pep
KKKKKKKKKKKKFFKLFKTKKKKQEPQEKIYNRXNPPTLPNPARPTITTFITSLNFHFLALLHILLTRKTQYFPNLIPLALIPLSPPLIITNRPLMFPLPTLCSFFIAHFNPPFIAPFTTPVSLGLISFLFLLSPLYPPIL

SEQ ID NO: 194355 - protein, 71 aa, Zea mays
  Clone ID: MRT4577_108835C.1.pep
ISVTQMLEMYMDATAMFICGPIRKNIFGGLRYFTISWWMQLRNKEIGLMTKACMLIPFIMTVDCTIKCQDF

SEQ ID NO: 194356 - protein, 77 aa, Zea mays
  Clone ID: MRT4577_108836C.1.pep
HGREAGPTPACGLPRSAPSLCAVSARHLLVLHNGQGCVSYGAKLSTLAGDGAGCHWARNSRAGSARGLLDSAVCVGA

SEQ ID NO: 194357 - protein, 53 aa, Zea mays
  Clone ID: MRT4577_108837C.1.pep
KKKKRNGWGVFFLKVKGEIQGFVQDKPQGKLFPRGGPFIKNERLGVENDQKPL

SEQ ID NO: 194358 - protein, 118 aa, Zea mays
  unsure (1)..(118): unsure at all Xaa locations
  Clone ID: MRT4577_108838C.1.pep
VTKVLHGGAGVKCLPLKNVLEPGDIRTLAELGLTELPAMLQDSHPAVGSTLIGGETEPLXTGMNNFAAQFYMHPNKVYKNNTQHSIYDANSSCKNCPXLATRHLSTRDMYEEFKKHAT

SEQ ID NO: 194359 - protein, 217 aa, Zea mays
  Clone ID: MRT4577_108839C.1.pep
MAAARARWRLLALPLALLLAIGSSRGLDAAPKPPVPKAISDLREAIVKGLGLQSEELKVSGFDVRDALVGHAVAYEFDMEVGRKAVPVRLLEDVNRWDFVDLPIFRSQADADDTALAEIGRGSFDPTLPPFQLAGPMELWIQDGDDVRLALPHDVEAGTLKKVVLADGAVVTVKGARAVSLRLPLELPLPLNRTTYKGRLSSLLSIARALRGAARSN

SEQ ID NO: 194360 - protein, 297 aa, Zea mays
  unsure (1)..(297): unsure at all Xaa locations
  Clone ID: MRT4577_10883C.1.pep
MRRCKGWDRRIAHLTGENASKPFLDQSQESSSTALLLAGDDARGDLPAGATSTCFSPCLLPAPPTRPHNPGHVPXWREQLTVRGVAVAAALGALLCVVIHRLNLTVGVIPALNVASGLLAFFLAAAWRAAAGWLGFGRGPPFTRQENTVIQTCAIACAGLAFSGCSASYIFAMDRKTYELVGPDYPGNRAEDVKDPSLGWMISFLFLIALVGPFSIVLLRKVMVIDYKLAFPGGTATALMINSLHGKTDGDLAGXQQEKXHCLXKNMGISXVWSFFKWFFSGVGDSCGXDNFPTFGL

SEQ ID NO: 194361 - protein, 92 aa, Zea mays
  Clone ID: MRT4577_108840C.1.pep
ARRRAALVAESAVRAEWYSPSNSVMVVIAICLQASRDQRSSVGDQVIQFFEFREIEDPEHLFGEGCPHCNHCSGEDEPVEGDFQEFQDYDEF

SEQ ID NO: 194362 - protein, 117 aa, Zea mays
  Clone ID: MRT4577_108841C.1.pep
LTPRTHRNLGTPGSLLPRLHLLLSSGCNADNLHQTDAQDLQSRGTRRTGSLGRQRLIFDPSKLEDRLRSPPRRSSTACTIRRGRRSQRLMLRGDERERTGARETGTRETDGTSRPGR

SEQ ID NO: 194363 - protein, 53 aa, Zea mays
  Clone ID: MRT4577_108842C.1.pep
SSGHLVISRRLLDLSCAPPAPSEARAGADAAAASPPRAPSAPGVIEPARSRSS

SEQ ID NO: 194364 - protein, 1052 aa, Zea mays
  Clone ID: MRT4577_108843C.1.pep
MRTRSGLVNGEGTSQNKANTSNPQSTSALENAVAQLISVGIDHTHLLHELVQRGQWDPNAASTYKEFLDTQPPIFTRAENLLEAEDWLRTIEQKFGLIHCDGVQKTQFAAQQLQGQAGAWWAKYCATQPEGYQVPWVEFCEAFRAHYILKGIMGIKVDEFFNLKQGEGESVMEYLETFNQLSQYAADYVGTEAMKKFYFMRGLNMKLLIAPNVAESYNDVVSQANLVTLFDSGASHTFINRAFVVKYQPPMEERKDTFCIQSPRGRIYTKEMVENVPINLEGHIFPTNLLALQKQDIDVILGMNWLHQHGAIIDTLQRTVQLDSPNDISKLLIRLPTPKRAVERVCAVTIKEIKDIPVVREFPDVFPEDLPGLPPERDVEFVIELQPGTAPISRRSYIMPPKELAELKTQLQDLLDKGFIRPSSSPWGCPAIFVKKKDQTLRLCVDYLPLNEVTIKNKYPLPRIDLLFDQLAGAKVFSKVDLRSGYHQIRICPEDVPKTAFTTRYGLYEYLVMSFGLTNAPAHFMYLMNSVFMPELDKFVVVFIDDILIYSKAKEEHAYHLCIVLTRLREHQLYAKFSKCEFWLDKVQFLGHVLSAEGVVVDPSKVKDILDWKPPTTVHQVRSSLAMAGYHRRFIPDFSRISKPITQLLKNHVKFVWSLECDKAFEKLKKLLTTTPVLAQPDIAKPFDVYCDASVIGIGCVLMQEGHVIAYASRQLKRHEENYPTHDLELAAVVHALKILRHYLLAWKWEDISMDFIVGLPKTSKGYDSIWVIVDRLTKLAHFLPVKTLYPAKAYAELYSARILSLHGVPKTIVSDRGSQFISKFWEHLHKSLGTKLIRSSAYHPQTRGQTERVNQILEDMLRSCVLAYSAKWDECLPLAEFSYNNSSQDSIKMAPFEALYDRRCRTPLNWSERGERCFFAPNLVNEVEEKVQPIQRNLRIAQSRQKSYADQRHRPFVFKVGDYVYLNVSPMKGVNRFGVKGKLPPRYIGPFRIMQQCGPVPYHLQLPEHMSVVHNVFHVSQLKKCFRVPEQAMDVSEVNLEPDLTYSEYPI

SEQ ID NO: 194365 - protein, 74 aa, Zea mays
  Clone ID: MRT4577_108844C.1.pep
GLFSFFALPVFAPLNIHRICFILGPPVLSSFGPPLSLVKLEKYPPPSVCLGPPMPFNFFRCPPPLEKPPPNSFG

SEQ ID NO: 194366 - protein, 152 aa, Zea mays
  Clone ID: MRT4577_108845C.1.pep
MKIEIARYVAKCDICQRVKAVHLKFDGPLQPLPIPAWKWEDISMDFIVGLPKTSKGYDSIWVIVDRLTKLAHFLPVKTLYPAKAYAELYSARILSLHGVPKTIVSDRGSQFISKFWEHLHKSLGTKLIRSSAYHPQIGGQTERVNQILEDML

SEQ ID NO: 194367 - protein, 69 aa, Zea mays
  Clone ID: MRT4577_108846C.1.pep
GDVAGGLSNSRRAWLRNLLLSSAWSGAGSMIEWFGADALCDLGRVRPGVRPRVFISVRGRVGGRVGGEW

SEQ ID NO: 194368 - protein, 685 aa, Zea mays
  unsure (1)..(685): unsure at all Xaa locations
  Clone ID: MRT4577_108847C.1.pep
MRTRSGLVHGEGTSQNKTNTSNPQSTSALENAVAQLISVGIDHTHLLHELVQRGQWDPNAASTYKEFLDTQPPIFTRAENLLEAEDWLRTIEQKFGLIHCDGIQKTQFAAQQLQGQAGAWWAKYCATQPEGYQVPWVEFCEAFRAHYILKGIMGIKVDEFFNLKQGEGESVMEYLETFNQLSQYAADYVGIEAMKKFYFMRGLNMKLQLLIAPNVAESYNDVVSQANLGAPVMMSMFYVANHPALTLFDSGASHTFINRAFVVKYQLPMEERKDTFCIQSPRGRIYTKEMVENVPINLEGHIFPTNLLALQKQDIDVILGMNWLRQHGAIIDTLQRTVQLDSPNDISKLLIRLPTPKRAVEXYVLSQLXEIKDIPVVREFLDVFPEDLPGLPPERDVEFVIELQPGTAPISRRSYRMPPKELAELKTQLQDLLDKGFIRPSSSPWGCPAIFVKKKDQTLRLCVDYLPLNEVTIKNKYPLPRIDLLFDQLAGAKVFSKVDLRSGYHQIRIRPEDVPKTAFTTRYGLYEYLVMSFGLTNAPAHFMYLMNSVFMLELDKFVVVFIDDILIYSKAKEEHVDHLCIVLTRLREHQLYAKFSKCEFWLDKVQFLGHVLTAEGVAVDPSKVKDILDWKPPTTVHQVRSFLAMAGYHHRFIPDFSRISKPITQLLKNHVKFVWSLECDKAFES

SEQ ID NO: 194369 - protein, 53 aa, Zea mays
  unsure (1)..(53): unsure at all Xaa locations
  Clone ID: MRT4577_108848C.1.pep
SRFCARWNITRPYNSNSVCSKLAXTNKYMARPPPTSLVYHIYIIFISLDTPGL

SEQ ID NO: 194370 - protein, 71 aa, Zea mays
  Clone ID: MRT4577_108849C.1.pep
EGSKDNTSAPIKQVQVNLIKSLDIATKMEALSLKALEAYVHLFSNLLSYSHIKALVALFGWTLPKKCGRHG

SEQ ID NO: 194371 - protein, 90 aa, Zea mays
  Clone ID: MRT4577_10884C.1.pep
CSRSGTARSGHETRCPCPRLPARMADVGSGSRTRSQQYGVVGQGRARGARLGVKSRVGRQGAAVNHRQVLVVFVAIAATRDVEKCTRDAL

SEQ ID NO: 194372 - protein, 82 aa, Zea mays
  Clone ID: MRT4577_108850C.1.pep
SRAMRCPVCSAWSLVAAPSRIGYLSVVCRSKSVWSSALVRLQVFGAVAAVMLVSGSVGLDRCSQYKVFSLMQNLSSLYVSNN

SEQ ID NO: 194373 - protein, 96 aa, Zea mays
  Clone ID: MRT4577_108851C.1.pep
LHRLRLQRSASTEGAYHPSASQPWCRSSSPSSVSRCASLDVCLIFPRFLKNLRILFLFHLARYRVGAGGARARATCPPDFGGSVLVSCARVAVRVG

SEQ ID NO: 194374 - protein, 85 aa, Zea mays
  Clone ID: MRT4577_108852C.1.pep
GANLGIGGDFVVDDSVTTRLVSKPDAYGGLPRGLRVECARTGRVLFQGRGEVIAPMLIDLRVIYRVSVRAKNQVARAWIPPPHVR

SEQ ID NO: 194375 - protein, 169 aa, Zea mays
  unsure (1)..(169): unsure at all Xaa locations
  Clone ID: MRT4577_108853C.1.pep
MLTYRDLLSGDELLSDSFYYKELENCVLXWKAQGEWIXRGTVDVDIVVNPSARXGDAYESDDEQGENEYDIVDTFRVHEKTSFDQKTFVSYIPKYLKNLAAVVQPNKADEFNKGVEGANKFLLSQLNDLQIFVVDSMNDDASVVFGYYKDGATNPTFLYFSHGLKEIKR

SEQ ID NO: 194376 - protein, 115 aa, Zea mays
  Clone ID: MRT4577_108854C.1.pep
IFSSTNWVCFFPLQRLFKNNLAYDLLKIEQDVFFCFIIQFDYGRTCGLARDVLSQQCWPDCQEHHANFLMVFSPFNGAVKGLHKPAIGGLSLSRYFEVVFQQCEVRSEALFLFFG

SEQ ID NO: 194377 - protein, 251 aa, Zea mays
  Clone ID: MRT4577_108855C.1.pep
MGVTKQKWRQQPPPKKKMSRKAKVNQLKWYRLKAKKKMKSPNPEVRIRYKLEKAKRKEEWLIEKLRKYEVPRTPEPVHDPEILTEEEKFYLKRTGEKKKNYVPVGRRGVFGGVVLNMHLHWKKHETVKVVCKPCRPGQVYEYAEELTRLSKGTVIDIKPNNTIMFYRGKNYVQPKVMSPPETLSKQKALEKYRYLQSLEHTSQFIEKLEKELEDYKKHVALFKNHNKGVAIEKISNEDPTVDDPATTSDFK

SEQ ID NO: 194378 - protein, 50 aa, Zea mays
  Clone ID: MRT4577_108856C.1.pep
VCIFCPFSSVGATAEASTSARPRKPAPILSYICENEVVGVSAERLGGRVG

SEQ ID NO: 194379 - protein, 68 aa, Zea mays
  unsure (1)..(68): unsure at all Xaa locations
  Clone ID: MRT4577_108857C.1.pep
KAMSIMNSFINDFFXKLGAESPKLGGYNKKPPIPSREIQTWGGLVLPGELPKHPVSEGPKAVTKFPPF

SEQ ID NO: 194380 - protein, 114 aa, Zea mays
  unsure (1)..(114): unsure at all Xaa locations
  Clone ID: MRT4577_108858C.1.pep
EEERPGRADGPGIGIYLGTTDSCIAEWEHHRDENIANGQGNRTTPSDGGFTDSQRLIQRAGRNQRGMNSINTXFDVKRHIDKRPSDACAQSDXELWPSQGRFMGLEEKPSDCWS

SEQ ID NO: 194381 - protein, 75 aa, Zea mays
  Clone ID: MRT4577_108859C.1.pep
LDVLIYLCSARTCMHKHAWLGHMREHRCDCLSIPDRIETESSDEQKQGNLVSSTAITTAHESARASAHASAHATK

SEQ ID NO: 194382 - protein, 191 aa, Zea mays
  unsure (1)..(191): unsure at all Xaa locations
  Clone ID: MRT4577_10885C.1.pep
PERHSFDLDGHSFELSPAPCFRIVADVKSKDAQKRTCRLWPLAHSIQHPRFHRFMYNAQXPPSGDICTEXRMISDXNASTAAYQTSXQSAPTLELLSAHKGLAVRXGIGRAAVYMIPRTAAHXVMKLXISIPMISFALDRVIACLCSLHMEDDECYTLTYPXDAFAVVYTRELILXAEDXPSVSASIFKRC

SEQ ID NO: 194383 - protein, 74 aa, Zea mays
  Clone ID: MRT4577_108860C.1.pep
DPSPRGRKRRGSEPRPDVSMHAQKAVPRFHTCKCVLPSDAAAMLQLGHGITDHCAIQTYESKAHMLNRYQTRES

SEQ ID NO: 194384 - protein, 140 aa, Zea mays
  Clone ID: MRT4577_108861C.1.pep
DEAPIWFGEPRPRPDPRGDGAFVPSLTRSGRDSRTHSCEPRRRLLCLHDPAAARPLLFLAHPPSPVPSSSLRTRRRRLLLALAHLRPAAERGRTAETRSRSAASSACARRPPRRLVHGGAAADEVGLQGQARCCLLSCFS

SEQ ID NO: 194385 - protein, 54 aa, Zea mays
  Clone ID: MRT4577_108862C.1.pep
IVSRIKTSHTQHHIPGFQGEMCVPITKLASREHVPMMRLERAPPLLQPRVDGPG

SEQ ID NO: 194386 - protein, 54 aa, Zea mays
  Clone ID: MRT4577_108863C.1.pep
AAAVVKSGDCILAWPCVVLHRALAGATLLFLYSVMYLQFSDYDHIILWRRCGCV

SEQ ID NO: 194387 - protein, 77 aa, Zea mays
  Clone ID: MRT4577_108864C.1.pep
MTSDKKPTYKRSRCQIFRTVSQAREGDIRGPEHRTLPANSVPASSPHKPGSACPYLILDDSPGPSTLHPPTPLLGLA

SEQ ID NO: 194388 - protein, 172 aa, Zea mays
  unsure (1)..(172): unsure at all Xaa locations
  Clone ID: MRT4577_108865C.1.pep
MGLQTQGSYLFVHYTMHMKLDGGDSEDTVTGFYLPSXNSXRRELXYELLDDRTGQXYMLYTNLMTGXKANLEHIIYLCLXPRHEEASPPTLYRTXYMXVTFIHETXCPIRSFQEHDTLVLWTRDPDTQTIEFYSRLXNPHYCSIRXTIEKTDCASAPFVIYYHSFHMHGCDA

SEQ ID NO: 194389 - protein, 165 aa, Zea mays
  unsure (1)..(165): unsure at all Xaa locations
  Clone ID: MRT4577_108866C.1.pep
MDDLEQAILLASDSPAAAAASPSVRAEALAFCARARDESPPSSLLRLCLSGIASSPHAQVHFWCLQSLHDLLLRRRLVLPDDLALLRSSLLSLAVSSHAASPPFLRNKLAQLVALLVRLDYPHVYPSYFLDLLPPAPPXXGPTDMFARVLISLDDDLLSQDYPRS

SEQ ID NO: 194390 - protein, 94 aa, Zea mays
  Clone ID: MRT4577_108867C.1.pep
HPYPKGVDVSYIYIGGSSQTQLCDMRIWFKMPPSLTWFSSLVRFRSGVGGSSGIQAQYSQSGIIMVSVEEHLRHVMLVVVWLIWEGALHRLRDY

SEQ ID NO: 194391 - protein, 136 aa, Zea mays
  unsure (1)..(136): unsure at all Xaa locations
  Clone ID: MRT4577_108868C.1.pep
VDRTCDRGKGKPATKSERCSSKAGLQLPVXGASTRNLKASXYTEREGDVSAEYLSCDLDQLPDEGLYMSANXAPYNDNNRIVPHHIHLRLLNDEEVSKVLGTETIAIGVEKSNIHQNLLPIKADLQEHIESDSQEL

SEQ ID NO: 194392 - protein, 94 aa, Zea mays
  unsure (1)..(94): unsure at all Xaa locations
  Clone ID: MRT4577_108869C.1.pep
GSPLVMPFFQSRLIHPSSCRVLHHQCCLVFWQIXPQYFPQAIFNMVQSIIRGGPPPPPCGFCGXSPSSSKGGGIFFSSPIPPLNVGLVPLLLPK

SEQ ID NO: 194393 - protein, 75 aa, Zea mays
  unsure (1)..(75): unsure at all Xaa locations
  Clone ID: MRT4577_10886C.1.pep
MAGQWIQTALLYLPKDPPTSCRAGXTREDIFLXGDTLMGARDSPYGGGVVSINSHFPPDYPFEPCTGGPQTRLCH

SEQ ID NO: 194394 - protein, 90 aa, Zea mays
  Clone ID: MRT4577_108870C.1.pep
ISNLPPRAGGEKHLFFFRSPKKKARPLPFVETDLRINNLTFKKRGFAHRGGRALFLNPFPGKGAGDPREGVLFDFDHEKKKDAVNKNHAE

SEQ ID NO: 194395 - protein, 294 aa, Zea mays
  unsure (1)..(294): unsure at all Xaa locations
  Clone ID: MRT4577_108871C.1.pep
MALALVACPRCNITPPQASACGSRGLLRAPRSAASRPPPWRLRRSRAMAVYEGWHSAAAGADTDGGAPAPHVPPSLLVFSGGTAFNGVVEELKKVTTRVAHVLPVSDDGGSTAEIVRVLGGPAVGDIRSRCLRLSDESTAEALSVRKLLGHRLPIDPSEAKLEWYQIVEGDHTLWEGVSRPYRETIRAFLVYFHSEILRRSAEMFCFTNGSIGNFFFAGARIFFQSLDAAIFLFSRVSQIPAESLVLPVISTNDRLTLGCELWDGTIIXQNEISHPSNGRREMSTRIVIHVAHF

SEQ ID NO: 194396 - protein, 59 aa, Zea mays
  unsure (1)..(59): unsure at all Xaa locations
  Clone ID: MRT4577_108872C.1.pep
QRRVRGVFNLTNNFKKISGAYRTKKKKKKQKKKKKKKKKKXEKKKKKKGKKXTGGGNHG

SEQ ID NO: 194397 - protein, 125 aa, Zea mays
  Clone ID: MRT4577_108873C.1.pep
YIHLPLVYYENVTGLSGGRTWANGPAGSFVLDPFTCSCTTIDLDTVTTRSTAPVDAALGEELPTHVAAPNEYTSLGPHHMCFNMHEVAVGTTAARDTAHVHAACDMTLSMENTLDPHDKPRRLRV

SEQ ID NO: 194398 - protein, 238 aa, Zea mays
  unsure (1)..(238): unsure at all Xaa locations
  Clone ID: MRT4577_108874C.1.pep
WVPRGRPGPFCSGLTTDAPRGRDELFGGLLPAGMDRRACRSRYEAWRYYKHFPYAASAHLQSKLHAYEARHRRCAPGTPLYAKAVEQLRSGRSAEGLECTYVVWLPFDGLGNRMLSMVSGFLYALLTGRVFLAAXPAAGSGDLFCEPFPGTTWRLPRGGLPCXTGSRGGKXSSGRTRGSRAXGGVGAAAKXKGVWACLPYVYLQPWGGSSXDPLFFCGEHQQXLRDVNWLLLYSDLYF

SEQ ID NO: 194399 - protein, 54 aa, Zea mays
  Clone ID: MRT4577_108875C.1.pep
PKSSQLQGAESVNFMWIFLIGEAMLAAAQAQPSLQPNQSRQVVCPVSSPRSCSF

SEQ ID NO: 194400 - protein, 241 aa, Zea mays
  Clone ID: MRT4577_108876C.1.pep
MKKPMAAGSGRVNVVPMLLVFCLAYVLGLVSNVTFENFYVHNFLSPLMLPASRLQTPPTTPEAVPCILPPSLPPPEPTPPPPASLERRRMESGSGAMHNMTDEELLWRASMVPRIKSTPKHGIVPKVAFLFLVRGDVPLRPLWDKFFEGHEGLYSIYVHTSPDYTGSAPPDSPFYGRIIPSQRTSWGNINLMDAERRLLGNALLDVANARFALLSESCIPILGFPALYAYLTGSNTSFVDS

SEQ ID NO: 194401 - protein, 245 aa, Zea mays
  unsure (1)..(245): unsure at all Xaa locations
  Clone ID: MRT4577_108877C.1.pep
MERRLSATSRRSAPSAIQRLSHLAQRVGAVNLAEGFPDFPAPPHVKAAAVAAIAADLNQYRHVQGICDILANTMKRDHDLDVDPLTDFVICCGQSEAFAAAIFAIIDQGDEVLIFDPAYETYETSIELARGVPVYVPLDPPSWTLNEEKFLKSFTSRTKALVLNSPHNPTGKVFSKEELLIISQACQKMDCFVITDXGMQERTIITSSLSKTYSVTGWRLGWACAAASIASAIRNIHIKLTDSAP

SEQ ID NO: 194402 - protein, 116 aa, Zea mays
  Clone ID: MRT4577_108878C.1.pep
MERRLSATSRRSAPSAIQRLSHLAQRVGAVNLTEGFPDFPAPPHVTAAAVAAIAADLNQYRHVQGICDILANTMKRDHDLDVDPLTDFVICCGQSEAFAAAIFASSRVQQTTGHSD

SEQ ID NO: 194403 - protein, 399 aa, Zea mays
  Clone ID: MRT4577_108879C.1.pep
MERRLSATSRRSAPSAIQRLSHLAQRVGAVNLAEGFPDFPAPPHVKAAAVAAIAADLNQYRHVQGICDILANTMKRDHDLDVDPLTDFVICCGQSEAFAAAIFAIIDQGDEVLIFDPAYETYETSIELARGVPVYVPLDPPSWTLNEEKFLKSFTSRTKALVLNSPHNPTGKVFSKEELLIISQACQKMDCFVITDEVYEYITYDANKHISLASLPGMQERTIITSSLSKTYSVTGWRLGWACAAASIASAIRNIHIKLTDSAPAPFQEAALIALTSTADYYISLRKDYEVKRDFILLLLKDLGFKISVKPQGSVFVFAELPRSCQLSDVEFVTKLINDAGVVAVPGRGFFHKTCDCESYCHRYVRFAFCKGDDTLKAAAMKMRKLASRQGEPWLTGRQ

SEQ ID NO: 194404 - protein, 112 aa, Zea mays
  Clone ID: MRT4577_10887C.1.pep
MPSASLKDIVHTLLKGYQTETPILQKIIDVFLIYILITGIVQFIYVVLVGTFPFNSFLSGFISTVGCFVLTVSLRMQVDPKNEIKGVSVERAFADYVLCNLILFLVVLNFMG

SEQ ID NO: 194405 - protein, 70 aa, Zea mays
  Clone ID: MRT4577_108880C.1.pep
NNRVFYKWVNGAKHPRASPTNLSEPRSFPFATPTNRFSPRPTESNAQWNMDFRMEKKKGEKKKKEGFTAP

SEQ ID NO: 194406 - protein, 54 aa, Zea mays
  Clone ID: MRT4577_108881C.1.pep
TSAKTKGWSSSDRRLTNTNVVFIPGTRFVLLLMVLSAGGLGLLIGSILLIEDCH

SEQ ID NO: 194407 - protein, 82 aa, Zea mays
  Clone ID: MRT4577_108882C.1.pep
ARVITHGLYRFMRHPGYSGFLIWAVGTQVMLCNPLSTVAFTLVLWRFFSKRIPYEEFFLKQFFGSEYDEYAQRVHSGIPFIK

SEQ ID NO: 194408 - protein, 126 aa, Zea mays
  Clone ID: MRT4577_108883C.1.pep
KLLSSVARAHRHNTGGNVRSSQARGSTTRSARRDVNHEIIYRLSWLSMTCRQSERAERPKVPDPSRTAEPKVQSAASASPHAAAHPLAAVRTRGRRCVALPPRLRKGNSRDLAAPAGLEEPNRPME

SEQ ID NO: 194409 - protein, 38 aa, Zea mays
  unsure (1)..(38): unsure at all Xaa locations
  Clone ID: MRT4577_108884C.1.pep
KTYLSVFXLKKKKKKKKKKKKKKKKKKKKKKKKKKKKK

SEQ ID NO: 194410 - protein, 87 aa, Zea mays
  unsure (1)..(87): unsure at all Xaa locations
  Clone ID: MRT4577_108885C.1.pep
SNNGDQVVFSLLMLIALXTCVGNSIILPQCSQSTIAFFYASYLXNYXATMVKTRALQPYMLDQAIASSNIPLSPLHDQQWPALCLVQ

SEQ ID NO: 194411 - protein, 53 aa, Zea mays
  Clone ID: MRT4577_108886C.1.pep
RLNMRVVSGQDPSRVRALIGRSQQSAPAEPVLHSLHTVYQMHLTAIGRLSHPR

SEQ ID NO: 194412 - protein, 184 aa, Zea mays
  Clone ID: MRT4577_108887C.1.pep
MFSKTLLLSVLSALAAAQSTVLTFTNVPNPITDGQAQAITYATNDTANPVTIILRQGPSGNLQDVETLTTDARNGQFIWTPSTSLPNGNNYALQIKQGDEINYFGPFGVQGASSSASSVSVSASPVPSANSTTSVPEIATPAGTAASACGTGVPECRHTTMSHGTLTGTTSSSRSTVTGSSSDD

SEQ ID NO: 194413 - protein, 49 aa, Zea mays
  unsure (1)..(49): unsure at all Xaa locations
  Clone ID: MRT4577_108888C.1.pep
DYSWEDHGYCLVNXLYPHVAQAIDEKFHIAYNFTYNTMATHKDGDTLML

SEQ ID NO: 194414 - protein, 54 aa, Zea mays
  unsure (1)..(54): unsure at all Xaa locations
  Clone ID: MRT4577_108889C.1.pep
HSYKKIQALCTKPGXGRGRISRRRAQPXXCTNRPDRLYLGTALSTWPKAHWDQN

SEQ ID NO: 194415 - protein, 56 aa, Zea mays
  Clone ID: MRT4577_10888C.1.pep
IHLGNRQKRITEETEPGVVNTKQAPKQACSAAQVPKRMHKDIDGQKKGGRHLHCAT

SEQ ID NO: 194416 - protein, 177 aa, Zea mays
  unsure (1)..(177): unsure at all Xaa locations
  Clone ID: MRT4577_108890C.1.pep
MLFADRVPDMVNVQLMNLLLLXGISLLTAGMVVPYDAFFVPAGSGNGGGGTYAKDKLVHDITVEEWLNTHGANDRTIVQGVKGDPTYLVVEQDKTMVTYGIIAVWTHLGCCVPWNDADNKFICPCRGSHYNNHGKVVLGPTPLLLVLLHADVDDDKDLFVARGETDFMTGQHPRWSV

SEQ ID NO: 194417 - protein, 89 aa, Zea mays
  Clone ID: MRT4577_108891C.1.pep
SWRGIFSRSFFCFRYFWGIKSPLRGTGQTLSPGKKGGDPGLPLPFTRGAPWLKVETGNLNFFGEKMVNPVLKTPQNWMEKLGPCPVLAP

SEQ ID NO: 194418 - protein, 414 aa, Zea mays
  Clone ID: MRT4577_108892C.1.pep
MAQVGIQVNTITFNVWIDGYAKSGQMDQASAAYSEMQARGLVPDSCTFNIIVARAHKFGYAAQLVHDHDMFSSHMSADGLDMLVCRLCWDHRLDDAWELLLGAIEQGVPLRVTGFNALIATYSKEGLHEEASELYRIMNKLGLAPSSSTFNYLIMGLCNQVKLDEAQLLLEHMVSKGYCLSTSFTISLDAYFRDGSQTLSYSYFANSYNQPTELIFLHTADEHLLYHGQLAKKGEQFIDVPYVVKSMDVSFSGILSFIEAAAIEKLKNNECTPADLCYSLQETIFAMLVEITESAMAHCDSKDVLIVGGVGCNERLQEMMKIMCSERGGRLFATDDRYCIDNGAMIAYTGLLAYAHGMTTPLEESTFTQRFRTDEVHAIWREKEMPVLNNTHSDAIAEVSKDEASMATPIVIDY

SEQ ID NO: 194419 - protein, 39 aa, Zea mays
  Clone ID: MRT4577_108893C.1.pep
YKTSGEPLIAFTTIGVNGNHTITYHAQPNRVCSFWNSEP

SEQ ID NO: 194420 - protein, 44 aa, Zea mays
  Clone ID: MRT4577_108894C.1.pep
VGLLFSQLYTITDEVPTYNNSATIRLDALALSHAFGICCSSLIF

SEQ ID NO: 194421 - protein, 67 aa, Zea mays
  Clone ID: MRT4577_108895C.1.pep
GGVFFVVGVVFFFFFFLGTQPDFFFFSTSSQKKGERNTFFRTDGFFLSRKVYISRALRFVTIFLTTC

SEQ ID NO: 194422 - protein, 61 aa, Zea mays
  Clone ID: MRT4577_108896C.1.pep
SVRTRLCSKVMHLLEWSAVESALLLTHTTTRGTDDNIGIATSMLLFTLTWMACARCTTHCS

SEQ ID NO: 194423 - protein, 91 aa, Zea mays
  Clone ID: MRT4577_108897C.1.pep
GQHIQLHFSHEECSRVKKASEKQHCFFFFTTHNLGILHMHKKQLFVFVLPSPVFFFKHCPEPMNFSVFLQKLFFVVKILWNPHTPNGAWGI

SEQ ID NO: 194424 - protein, 100 aa, Zea mays
  Clone ID: MRT4577_108898C.1.pep
LLPSACRSVPVPVCPTSLVGLDLETRCSNLFSFLFFSFLFMTIEADSGLAIDREKAETEISAACMYNDTAQSSQPLSTYIICPFVPSVRRPASSDYKRPR

SEQ ID NO: 194425 - protein, 95 aa, Zea mays
  Clone ID: MRT4577_108899C.1.pep
HPAQGGGGGGLSGNPVGGLGRGGGERFGPLGSTTTRGGSCLGLVFRKGKEKVSIFFPVACNGGPLGERYGPGALNPLDVFIRAGTGNPTLNFWPP

SEQ ID NO: 194426 - protein, 49 aa, Zea mays
  unsure (1)..(49): unsure at all Xaa locations
  Clone ID: MRT4577_10889C.1.pep
LXTQIFKSYLSTKTLTIHLYQTFLYXIFLINTFSFIINLTYIFTQISLF

SEQ ID NO: 194427 - protein, 59 aa, Zea mays
  Clone ID: MRT4577_1088C.1.pep
RVAMTIFGVLAPVVFSGFIVYDTNKLFKRHAFNQYVVAAISLYLGVINLFMGQMAISFQ

SEQ ID NO: 194428 - protein, 95 aa, Zea mays
  unsure (1)..(95): unsure at all Xaa locations
  Clone ID: MRT4577_108900C.1.pep
MSYLLPHLHSGWAVDQAILAEEERLDIIRFEHDXDKNCMQMDQXQAAQAATPRNGAAGDAEDNPPRHAREPDTTQREPREHPQQPPHPHQRHQPP

SEQ ID NO: 194429 - protein, 71 aa, Zea mays
  Clone ID: MRT4577_108901C.1.pep
IKLCRTKISITTCVIHDSNRSNPGLLDSIIDQCTTNYTRETIIDHKYPFVTLKLMWTSPPLNIAHTSLLKL

SEQ ID NO: 194430 - protein, 113 aa, Zea mays
  Clone ID: MRT4577_108902C.1.pep
GERTIPFYHFQCEFFIQFRSILCNSCVGCIGIRTIERAPLFFVGRCILKRQNQLVFPISASYLHTSALLSGHTLVISFNHLSTHVRSNSGGGGEIRKHFPVYIQQCTNSIWQV

SEQ ID NO: 194431 - protein, 53 aa, Zea mays
  Clone ID: MRT4577_108903C.1.pep
RRSHTCLAWKVGSVRGKRLSGGQMMIGRQFPTSRTTSWSFLRAPNLVQACKEE

SEQ ID NO: 194432 - protein, 81 aa, Zea mays
  Clone ID: MRT4577_108904C.1.pep
VRCEGVYARWASPFCSSFTLRVFHFLRARSIESSINWYAEPLYPQDSALLRLARSYWDGSSWRHGEFDLHVIPGAFPVKLH

SEQ ID NO: 194433 - protein, 102 aa, Zea mays
  Clone ID: MRT4577_108905C.1.pep
AKNKRFAMAVSKNKKACRGEADRSSCSHPHTYSYKKARAPGPRRRPGRGGEQDHQDPSRQIIAYLMPLRRIHACKDPNSAPRQRFSRVVVVASEGRGRRRTS

SEQ ID NO: 194434 - protein, 61 aa, Zea mays
  unsure (1)..(61): unsure at all Xaa locations
  Clone ID: MRT4577_108906C.1.pep
SGSTVGAFDGHXKRVLSXDYKTTGPLTIVIGGEHIQPNFYEGPPSKFKHSIRSVVIAGFLT

SEQ ID NO: 194435 - protein, 143 aa, Zea mays
  unsure (1)..(143): unsure at all Xaa locations
  Clone ID: MRT4577_108907C.1.pep
MDCFGCFAPEADEDLRPSKHDDSSGADARRKVVPDVASGYAHSFTFKDLLVAVGYFNEANFIGEGGFGKVYKGKINGQMVAVKQLARDGXFLVEVLMLTVLNHRNLVSLVGFCTXGDERLLXLVYEYMPFGSLESHLFDNPKV

SEQ ID NO: 194436 - protein, 151 aa, Zea mays
  Clone ID: MRT4577_108908C.1.pep
MAMKARLLAAAATCVCLAAAASAFDVPTVAFEEGFSPLFGDGNLVRARDDRAARLLLDRRSGSGFISSDYYLHGFFSASIKLPRDYTAGVVVAFYLSNGDVYEKTHDELDLEFLGSRWGGQWRVQTNVYGNGSTSRGREERYLLPFDPTLE

SEQ ID NO: 194437 - protein, 139 aa, Zea mays
  unsure (1)..(139): unsure at all Xaa locations
  Clone ID: MRT4577_108909C.1.pep
MGCFGCFAPEADEDLRPSKHDDSSGADARRKVAPDVASGYAHSFTFKDLLVATGYFNEANFIGEGGFGKVYKGKINGQQLARDARXEFLVEVLMLTVLNHRNLVSLVGFYAXGREAXLLVYEYMPFGSLESHLFDNPKV

SEQ ID NO: 194438 - protein, 215 aa, Zea mays
  Clone ID: MRT4577_10890C.1.pep
MESGPQSNETRLLSYNIRVQAFPMVANEAPLRPSSDPSIGRGVIGLMRRMTMMSQTAMTLRLDVRVPPNSAWVNQCRRGAGASRMRLGNRWRLWLTPWALPMCIYYPTRLRRKGNPLQDQDVAANLSGGRHNDLGNDLCKNLSEDLAIDSQTHSNQDQASGCCIDSGIDAFICKINRWTEVLLPAPKPSLKTASSQVVNAPRRNRRVAGIGVVRA

SEQ ID NO: 194439 - protein, 376 aa, Zea mays
  Clone ID: MRT4577_108910C.1.pep
MGCFGCFAPEVDEDLRPSKHDDSSGADARRKVAPDVASGYAHSFTFKDLLVATGYFNEANFIGEGGFGKVYKGKINGQMVAVKQLARDGVQGRNEFLVEVLMLTVLNHRNLVSLVGFCAQGDERLLVYEYMPFGSLESHLFDVPLGKKPLDWNTRVRIAVGVAEGVSYLHNVADPPVIYRDMKAANILLGEDFSPRLSDFGLAKVGPVGDRTHVSTRVMGTYGYCAPDYVVSGKLTMKSDIYSFGVLLLELITGRRIYDASRPKPEQSLLTWSRPFLHDKRKFYRLADPALLGCYPSSALNQLVVISIMCLQDQPHVRPIISDVVIGLNHVASQPYTAERPPPASVSSPVGSGSPQLVRTPSRRRGGTGRRSAQCA

SEQ ID NO: 194440 - protein, 63 aa, Zea mays
  Clone ID: MRT4577_108911C.1.pep
RTGWFFQKTPPQNGKAFWKAKRNPFTKNRPWTLWVKPTYSGKMFSKGKIGPKVQPWKWISLSL

SEQ ID NO: 194441 - protein, 75 aa, Zea mays
  Clone ID: MRT4577_108912C.1.pep
TKVLNCPVGLTFFFFSSVHLFITGNNKQDFEEQRFHPPSAGRQKQARLPTEGEGGGVGEKVFTNRLQWEPNILDS

SEQ ID NO: 194442 - protein, 102 aa, Zea mays
  Clone ID: MRT4577_108913C.1.pep
VCRSRRFTKADPKPKQWAAPTRLVRGAEARLRSGSVKASGRAPHRSMVMNADTASTGLPPSRRRQMVAFHRAVAVVAEESGELRRRVPRVARANPSFVAACQ

SEQ ID NO: 194443 - protein, 119 aa, Zea mays
  Clone ID: MRT4577_108914C.1.pep
EENNEADGDSSIWHAVDEALGATHALQGRNLPRLAAAGAASSSRPQRTYVRTRKRSRNAAAQDIGEDDSDAQEDGNATTDAEEQQEQPLEATRDMDQDESESGGGKAAANAFCLDADLL

SEQ ID NO: 194444 - protein, 60 aa, Zea mays
  Clone ID: MRT4577_108915C.1.pep
NMVLVQRILGEIVSKLRDIELSVASCHGFRFLYVARVTQIEPKLHLKEQLGDARDAQWCK

SEQ ID NO: 194445 - protein, 42 aa, Zea mays
  Clone ID: MRT4577_108916C.1.pep
NGCIISNTLKITCILNIFANRMCIVIIHVELHLIQHINTFTL

SEQ ID NO: 194446 - protein, 121 aa, Zea mays
  Clone ID: MRT4577_108917C.1.pep
FQFSPSLASLCVKSSLLFGFTSTRGVLGGLSTPRYTLGSLLIDGAPLERRDLGLLRRRPIRHRGPSESQAWIVRTYAEEESLLRQVANRPGLCHGPCTSMQRAPPDGPFQYLTPRSAPTHY

SEQ ID NO: 194447 - protein, 52 aa, Zea mays
  Clone ID: MRT4577_108918C.1.pep
FTKLKIIKLVYGILYFGYMFLASYAFFVLSGPIGLCACLWFNRLIYSSVKID

SEQ ID NO: 194448 - protein, 236 aa, Zea mays
  unsure (1)..(236): unsure at all Xaa locations
  Clone ID: MRT4577_108919C.1.pep
SVFPPSALKTGGGGRFIIKEIPYQTNKATLVQKIAELVEYKVLEGIREIISGGXRTGMRVVVGLKRSADPAVVLNNLYRHTALQSSFSCNMVAILDGQPKLMGLKEILQAFLDFRCSVIERRARYKLSQALERKHIVEGIVIGLDNLDAVIQIIRETSNHTAATRALVNEFDLSEKQAEALLDITLKKLTSLERKKFVDEAKTMSEEISKLNELLSSKKLILQLIQQEAADLKSKF

SEQ ID NO: 194449 - protein, 162 aa, Zea mays
  unsure (1)..(162): unsure at all Xaa locations
  Clone ID: MRT4577_10891C.1.pep
MMCSCCNEWMPKQLRRSPLFICFTFLGITLREVALQKKRTYVPFPMVEDPFFLIPXVPPTVVPIGGETLAANVASPSATTTXQVASPSAQSGSFEPVAQXSSHDSGSVAPSDTPLQKPQNEPEXETGLRRSQRSRRSTILDVYEVYTRVHKETNEIXMSEDR

SEQ ID NO: 194450 - protein, 169 aa, Zea mays
  Clone ID: MRT4577_108920C.1.pep
VRGALLCSSLGGGVGGFPALLGYFNGGKTFPGFCPWSSTAKRLGAFPSCPLLLLWGGTGLLIPAKPGVLVFFWAPRRLCFLVAYPGVGCPFGEFGGRGPSPFGGYIFPPRPPVPKDFFFFGVLGVGKNFWPKNWPWCFSLNWADGIFLKYLLRPMLPFLISGGPRLFLL

SEQ ID NO: 194451 - protein, 48 aa, Zea mays
  Clone ID: MRT4577_108921C.1.pep
DHLINLITCYASSTKLIFIKLDQPQIEPKAEHQSKSSMLCSFLSLTKS

SEQ ID NO: 194452 - protein, 639 aa, Zea mays
  Clone ID: MRT4577_108922C.1.pep
MRTPAMLRWAAALAVLLAVAAPAAGFYLPGVAPTDFAKGGPLPVKVNKLTSIKTQLPYTYYSLPFCKPDAIVDSAENLGEVLRGDRIENSPYVFKMREPKMCQIVCKAKITEKEAKELKEKIEEEYRVNMILDNLPLVVPVNRQDKNSIAYQGGYHVGLKGVYSGTKNEKYFIHNHLSFTVKYHRDDNSELSRIVGFEVNPLSVKHQIDDKWNGVDTRLSTCDPHASKFVINSDSPQEVEADKEIIFTYDVHFEESEIKWASRWDTYLLMTDDQIHWFSIVNSLMIVLFLSGMVAMIMLRTLYRDISRYNQLETQEEAQEETGWKLVHGDVFRPPTHSDLLCVCVGTGVQFFGMLLVTMIFAVLGFLSPSNRGGLMTAMLLVWVLMGLLAGYSSSRLYKMLKGSEWKKITLQTAFLFPGVAFVIFFILNALIWGEKSSGAVPFTTMFALVLLWFGISVPLVFVGSYLGFKKPAMEPPVKTSKIPRQIPEQAWYMNPLFTILIGGVLPFGAVFIELFFILTSIWLHQFYYIFGFLFLVFVILVITCAEIAVVLCYFQLCSEDYMWWWRSYLTSGSSALYLFLYAAFYFFTKLQITKLVSGILYFGYMFLASYAFFVLTGTIGFCACFWFTRLIYSSVKID

SEQ ID NO: 194453 - protein, 255 aa, Zea mays
  unsure (1)..(255): unsure at all Xaa locations
  Clone ID: MRT4577_108923C.1.pep
MDTRVPPVPMDPATAVMFRLDGQDPDEMEALFARVLSYTHYALPDPPVSVDARLFGLLPHHSVDGFSRLPDVLLRNIVSRLPVKEGARTAVLSRRWRGVWRSAPLVLVDSHILPAAAATAAARGDARRITSAVSRILAAHPGPFRCVHLTSSHMEEFHGLLTRWLRILANKGIQELVLVNRPWXLDLVLPSTFLGMTTLTRLYLGLWKFPDTXGIPSATCLPYLLELGLCSLIMESKDLDSILDRSPVLETLYIH

SEQ ID NO: 194454 - protein, 639 aa, Zea mays
  Clone ID: MRT4577_108924C.1.pep
MRTPAMLRWAAALAVLLAVAAPAAGFYLPGVAPSDFAKGDPLPVKVNKLTSIKTQLPYTYYSLPFCKPDTIVDSAENLGEVLRGDRIENSPYVFKMGEPKMCQIVCRAPITEKEAKELKEKIEDEYRVNMILDNLPLVVPVTRQDKNSIAYQGGYHVGAKGLYSGTKDEKYFIHNHLSFTVKYHKDDNLEHSRIVGFEVNPHSVKHQVDDKWNGVDTRLSTCDPHASKFVINSDSPQEVEVGKEIIFTYDVRFEESEIKWASRWDTYLLMTDDQIHWFSIVNSLMIVLFLSGMVAMIMLRTLYRDISRYNQLETQEEAQEETGWKLVHGDVFRPPTYSDLLCVYVGTGVQFFGMLVVTMIFAVLGFLSPSNRGGLMTAMLLVWVLMGLLAGYSSSRLYKMFKGSEWKKITLQTAFLFPGVAFVIFFILNALIWGEKSSGAVPFTTMFALVLLWFGISVPLVFVGSYLGFKKPAMEPPVKTNKIPRQIPEQAWYMNPLFTILIGGVLPFGAVFIELFFILTSIWLHQFYYIFGFLFLVFVILIITCAEITIVLCYFQLCSEDYMWWWRSYLTSGSSALYLFLYAGFYFFTKLQITKLVSGILYFGYMLLASYAFFVLTGTIGFCACFWFTRLIYSSVKID

SEQ ID NO: 194455 - protein, 53 aa, Zea mays
  Clone ID: MRT4577_108926C.1.pep
SISNLNLYYSFMGHRSFTTHLNRLFVMIRSKYIPPYLPLSKLSYKLFSGRLFF

SEQ ID NO: 194456 - protein, 74 aa, Zea mays
  Clone ID: MRT4577_108927C.1.pep
WVPRSRPGSPRTPQFRITHPTPPPATASSDSLPPHPTVPLTPAQPASLQPSVQQAPAASIHVRRCHSGGLMPAP

SEQ ID NO: 194457 - protein, 95 aa, Zea mays
  Clone ID: MRT4577_108928C.1.pep
STLPPRVEPFSPSPNFFRRPPLHPQDDTMRECVSDPDRSSRYPRGRNARWELYCLEHAILDDAHMPGDKTIGRADDDFLANPREGVVALRLHPWG

SEQ ID NO: 194458 - protein, 134 aa, Zea mays
  unsure (1)..(134): unsure at all Xaa locations
  Clone ID: MRT4577_108929C.1.pep
KNPIHLHPTFPSPTQYPALCFAPAEAGGGCLCLGKGEEGSWARARAKRHRQRXSGTTSTSITITKIRMLTMSSRVEGISIFIYNDNHSVLEIFIYNDIRDRDTYTYNERRKTETAMDMDYAFKLQGRTLYLYGC

SEQ ID NO: 194459 - protein, 134 aa, Zea mays
  unsure (1)..(134): unsure at all Xaa locations
  Clone ID: MRT4577_10892C.1.pep
GLAGVXXLYSIVFYFPLDLIKXXIRFVLSXXAWDXLLENKTAFTTKKDYGREEREAQWATAQRTLHGLQPPEAATRTLFHDKNSYRELSEIAEQAKRRAEIARLRELNTLKGHVESVVKLKGLDIDTIQQNYTV

SEQ ID NO: 194460 - protein, 53 aa, Zea mays
  Clone ID: MRT4577_108930C.1.pep
LFSVNCFQFLFMFSVDMFSVHVFRSCFQFMFLARLDSGHVSVHVSVSVHVICL

SEQ ID NO: 194461 - protein, 53 aa, Zea mays
  unsure (1)..(53): unsure at all Xaa locations
  Clone ID: MRT4577_108931C.1.pep
QHLFXGCSSPAKGRVAPSEMRRRQSPSRGHEREREPRRDRGRARTGDLKQVVK

SEQ ID NO: 194462 - protein, 47 aa, Zea mays
  Clone ID: MRT4577_108932C.1.pep
HLYPLNNFLPPSSAANKPLSLNFILRDRQVLQGCQSYPNWQLRREQT

SEQ ID NO: 194463 - protein, 63 aa, Zea mays
  Clone ID: MRT4577_108933C.1.pep
GKQCSFLPNIGCVLMEGGIRAPMFLINRRHVEVSSLGFMFLCGSAHKGRCEVVACCMVSLCQS

SEQ ID NO: 194464 - protein, 116 aa, Zea mays
  Clone ID: MRT4577_108934C.1.pep
PSLQGLFLHKEPVNWASAFEPHDLHEAPTPEIKGTSKIFFEEGMQGRVALGPPIFICYLCEYAFLEKNKYKLMNRVSALGTYTSFWTNKQYPSVLGAFLKRFSRNKNSDNKFASQL

SEQ ID NO: 194465 - protein, 134 aa, Zea mays
  unsure (1)..(134): unsure at all Xaa locations
  Clone ID: MRT4577_108935C.1.pep
MRKCVWSHSPHPAMQVVYARCRVDCLEYGIHADDHMPGDSTIGTGADDFNCFFTDIGAATYVARDVYAEIEITAIDDAGMATYPRVYNTENVINGNEDEGNNXFLRVRYTIDDDIVELGHDRIIDVADKCYVLQ

SEQ ID NO: 194466 - protein, 123 aa, Zea mays
  unsure (1)..(123): unsure at all Xaa locations
  Clone ID: MRT4577_108936C.1.pep
MAANPADVPSLDLMHXLLRLMKCMSLPHMRLILIGPPGCSKVTLSTIIKDEYRLCHLATGYMLRAAVSFKTPLCIQALQALDQXSLLXDDMVQGIIDEALNKPSCHKGLILDGFPRTDTQALK

SEQ ID NO: 194467 - protein, 66 aa, Zea mays
  Clone ID: MRT4577_108937C.1.pep
KVYLVIFLGLDKHPLTGIFYKERFPWRGLGLEGRGLKFGLKRAPHPNNLLLLQFNPKTHHPKSQGV

SEQ ID NO: 194468 - protein, 34 aa, Zea mays
  Clone ID: MRT4577_108938C.1.pep
SSPSSFSANSLICSTTATHWYLYTKPLTTTYSHF

SEQ ID NO: 194469 - protein, 53 aa, Zea mays
  unsure (1)..(53): unsure at all Xaa locations
  Clone ID: MRT4577_108939C.1.pep
XAWELFFFSGQKKHFLYPLKHQDSHMVPLGVKHPNRDPIEQALFQRRRVFGQE

SEQ ID NO: 194470 - protein, 35 aa, Zea mays
  Clone ID: MRT4577_10893C.1.pep
EIARLRELNTLKGHVESVVKLKGLDIDTIQQNYTV

SEQ ID NO: 194471 - protein, 93 aa, Zea mays
  Clone ID: MRT4577_108940C.1.pep
PHVRAPWATASWTKRKSSGSAAAAASLPADSLQGTLGATKATMLFITYKGFCRDQVTCNKHRQAYYNNWPVPKVLKPFRQRCFRITGLAPGMD

SEQ ID NO: 194472 - protein, 218 aa, Zea mays
  unsure (1)..(218): unsure at all Xaa locations
  Clone ID: MRT4577_108941C.1.pep
TSPLRPKNGVELEVTVLSADSLRLPTSYWPLPRRLRPYVTVSSPDALRSSAYSTAVAPAGGTGTDEHAWGATLVVPVGAGFLEGRADVRVSVLSEPAACCRLVGATPLGWCGIPAADVLDGLRPPRALRRLSYSLRCPRRCGGGGAPGRGHGVVHLAVRVLGLPXPPIQYXATAPLAAATAPVQRGWCRVAMGIPVSGAASAVVGVPLSSWGASATSR

SEQ ID NO: 194473 - protein, 722 aa, Zea mays
  Clone ID: MRT4577_108942C.1.pep
MDDESKSAPKSDVNTDAGAEAAAAAAPLPPSSSETAETEARVEAADGESQVVERLVELVSEIAAISDFRNSYRRQFCNLSRRIRLLVPMLEEAKEAPTPLTVASEAALRRLREALHAARDLLQLGSSGSKIFLVLDREKIMKTFQDVTASLEQALAGISFDELNISDEVREQVELVHTQFKRAKERSDSSDDDLFNELMSLCNSSSSDSVDPDTLRRLSEKLQLVTIYDLNHESLTLHEMASGGDPGAVVEKMSMLLKRIKDFVQTEDPEMGAQASTATISTNDNSACPVIPDDFRCPISLDLMKDPVIVATGQTYERGYIEMWLEAGHDTCPKTQQKLANKSLTPNYVLRSLITQWCEANGIEPPKRPAQLRDAPLSCSAAEHSNVLELLQKLSSQNLEDQRGSAGMLRQLAKRSAENRACIGDAGAIPILVSLLSTTDVSTQEHVVTALLNLSIYEENKARIISSGAVPGIVHVLKRGSMEARENSAATLFSLSIVDENKVTIGCSGAIPALVQLLSNGSQRGKKDAATALFNLCIYQGNKGKAVRAGLVPILLELLMETESGMVDEALAILAILSGHPEGKTAIGAASAIPVLVGVIRNGSPRNKENAAAVMVHLCSGEQQQQHLAEAQEQGIVSLLEELAESGTDRGKRKAVQLLERMNRFLKQQSQAEAEAEAMAQAHAHAQAQAQAQPQILVQAQAHADMQAERSLLPTSSDISDR

SEQ ID NO: 194474 - protein, 86 aa, Zea mays
  Clone ID: MRT4577_108943C.1.pep
GAPPAEFSVSSPWGKFKIYFFLKNFGCFLKVFPNLYRGIGLIFTPAGPWFFVNDLVFQEKKFTLPVPLVPGFTSDCRAFLRLIRVP

SEQ ID NO: 194475 - protein, 66 aa, Zea mays
  Clone ID: MRT4577_108944C.1.pep
RKTRAGNMLKILKGYPLRTTCNVYLFPGDFKNPTPSEWPNSPFFIKRPPTLRGVLKKPPPLSVPDI

SEQ ID NO: 194476 - protein, 99 aa, Zea mays
  unsure (1)..(99): unsure at all Xaa locations
  Clone ID: MRT4577_108945C.1.pep
DXLITXCIXFVVRIWHDCDLCXRIYRYSRGXKIGVVSXARPCLXCFSSQQIIQSXXXXHXSLXILISXLXXSLTQAVXAXXLEQHSRLPMXLSQXRXTC

SEQ ID NO: 194477 - protein, 46 aa, Zea mays
  Clone ID: MRT4577_108946C.1.pep
RPPRLPAHNLSLIWGRRLSAWFGDYQTMSSWKGSAVELSLPLLQEF

SEQ ID NO: 194478 - protein, 75 aa, Zea mays
  Clone ID: MRT4577_108947C.1.pep
MMMTMKSSAKKKKKKKKKKKKKKKKKKKKKKKKKKKKKKKKKKKKKKREKKKKKKNSLPGGPPGGPGLLGYPENF

SEQ ID NO: 194479 - protein, 124 aa, Zea mays
  Clone ID: MRT4577_108948C.1.pep
IKYLDGVELYEPLMSVDWASTSGPCLAHHYSLKITPKGWSKDPSQEKGLMFPSQVRFYYAHCSEASMGSRFSNVSLVHVCPAFSSRPHGVAPLLTTPFGMPVGDYCKRLFFSRVYSTRGGVGFL

SEQ ID NO: 194480 - protein, 189 aa, Zea mays
  Clone ID: MRT4577_108949C.1.pep
MADVEKATPVAAPAEGAGGDVAAGRTGAVAALLRRWRTQDLLDRSGSALRAAAWAFSLLAFLVMACNEHGDWRQFDRYEEYRYIVAIGLLAFVYTTLQLLRHGVRLTGGQDLEPKTGLLVDFAGDQVTAYLMMSALSAAIPITNRMREGADNVFTDSSAASISMAFFAFVCLALSALVSGFKLAKQTYI

SEQ ID NO: 194481 - protein, 115 aa, Zea mays
  Clone ID: MRT4577_108950C.1.pep
KGGHFFLGRGHRDFLVYFQSKQTPKWGHHASLKLEPPHARVEPAVCMEWGLCFGSRSMERCCRFIVPTHTGGVGRRVPPQWIPSEKIQPSLVTRTTHGFPLNRKQGFTPFPTKPP

SEQ ID NO: 194482 - protein, 250 aa, Zea mays
  Clone ID: MRT4577_108951C.1.pep
MELTWDVIVVLAACSFLIPLVFLRNAKKHRRRRAPPGPATVPIIGNLAWLELRHGWMDEMNILRRMHSRFGPLLKVRLGSSEQVNVMDRRLAHALLVERGAAVADRSPLLVSTDRFGVFDSFSIHVSSYGPRWSVLRRNFAAEIVSPARFRQMAASRELALSGLIRKLQLEEGGVVCRDAFQHAMSSLFIAMCFGKVLDDLSVDSIAVAVRDFVLHDDGSETGMAKSLFLPALTTRLFRGFGPEEGNQAP

SEQ ID NO: 194483 - protein, 84 aa, Zea mays
  Clone ID: MRT4577_108952C.1.pep
HFFSPSRSRTPSRGSTVFVRLNEQMEDPHLTCTLPIINDPAQLRHRLTLAQQQLLHLRQDPIVKDHARSVDTYLPPLQLSYLLH

SEQ ID NO: 194484 - protein, 77 aa, Zea mays
  Clone ID: MRT4577_108953C.1.pep
IKLPAIHYKLKPPLKSPPFYSNPKEPPQGEFPITEGGLPITPNQKNFVNLPQFTHLSHLESKPLSRPHLLSGLKHIH

SEQ ID NO: 194485 - protein, 81 aa, Zea mays
  Clone ID: MRT4577_108954C.1.pep
HTYWDPRVHMGRAMRAHPGCTRTISLLYEAYRTRKGGTICRWIKNVANGDHKEQHVHDPHRRAAKKVQRKPAMHEQNLRQL

SEQ ID NO: 194486 - protein, 37 aa, Zea mays
  Clone ID: MRT4577_108955C.1.pep
RLQSWFLSPLMLVMNHYRESPSLPSLELSLPLSPLRE

SEQ ID NO: 194487 - protein, 126 aa, Zea mays
  Clone ID: MRT4577_108956C.1.pep
CRCVQMQVSGTGVQMQVRRDWLRGRRLPCRCVQVQACGAGGEVVDDGRGEMTRRGVRERRGPRRRSGNVHSQFSGYRQAALQLAVGEQVGKKNPKLADWRISPSLRGVGGTVVVDGEDDTRLLVGL

SEQ ID NO: 194488 - protein, 141 aa, Zea mays
  Clone ID: MRT4577_108957C.1.pep
ILIELLRDLGGGGGGLSPTSVLGQYLSGFLFVLHPSSNASSHRRLAPVRYLPLRPPHGHQLHTKSNSVTNDDNNNNVVRPIYPTVSNDHCDSPTLTLPPPSPLSLHPKETPTPTKNTPYRRGEKTRNFRTVTSADDDAEEK

SEQ ID NO: 194489 - protein, 185 aa, Zea mays
  unsure (1)..(185): unsure at all Xaa locations
  Clone ID: MRT4577_108958C.1.pep
DSTMWGALLGASRIHRNSELGRNAAEKIFELEPENAGMYVLLSNIYASSGXKWRDVDKMRLIMHERGVKKVPGFSWIEVQNKVHTFSVGDSVHPEREDIYAFLEDLDIRMKXAGYVSATDMVLHDVEEEEKEHMLKYHSEKLAVAYGILKIPPGRPIRVIKNLRVCRDCHTAXKCISAIEGRLII

SEQ ID NO: 194490 - protein, 169 aa, Zea mays
  unsure (1)..(169): unsure at all Xaa locations
  Clone ID: MRT4577_108959C.1.pep
YPGRSACRQSYTLIAGSYVTVLDGRSLANDVRTXLHYHVHHSNGVHIHTRGTTGRTQWGGCRTRLLCDTDTSRSYHVQRFPAIDNVQHLALDDAYIFPVMNKLXLARQIDKIAAKTLQENADKYWLXRNAESMELIVDASDSDXHHVQGHMIRKATYAHLHKLQQEMSD

SEQ ID NO: 194491 - protein, 122 aa, Zea mays
  Clone ID: MRT4577_10895C.1.pep
QAYVRANSLHLHNSPQIAHNGSWWSPWNKLARSRRKIHESPLEEVVRSSNATSDLSMPMETKSACGLSIMTRKTATKRILAKRNPLKRRRIAMMVLVLPRNLPKSRRENLTKPRTRSGRRQR

SEQ ID NO: 194492 - protein, 96 aa, Zea mays
  unsure (1)..(96): unsure at all Xaa locations
  Clone ID: MRT4577_108960C.1.pep
SRSRPGSHHTRSAGNAGGGGHDDEAGGAGVATVXLPDAFHVAFSFSASPSFFTLFNPRLTNPVSSISTSATNLKQVYQTEQRTCLPRPLFLTPLDN

SEQ ID NO: 194493 - protein, 55 aa, Zea mays
  Clone ID: MRT4577_108961C.1.pep
LLYMGAGAQAGAPNLFCCLEPVDGVLAVIDQLLDERGRPPSTFVFGRDQFLGLAS

SEQ ID NO: 194494 - protein, 132 aa, Zea mays
  Clone ID: MRT4577_108962C.1.pep
TPNMYSTALSTTAVFTLLLAVSASPNPISRSNIGVREAAAAPGPIRIPLNIHDKRQYADDLETRQGWLKQQGKGLRRKYAGHLGEAGKRQLKRDAEDDERDRLAKRASGSATLVDVGTDASYFGQVSIGTPA

SEQ ID NO: 194495 - protein, 80 aa, Zea mays
  Clone ID: MRT4577_108963C.1.pep
GVDELHQLRLGVLRSPAAGGRSCWRVYRKVTMYRRSMEHSLSHDDFYGGIHIIDGTPLGPLAQVQCRRRPGSRAAAWPQG

SEQ ID NO: 194496 - protein, 61 aa, Zea mays
  Clone ID: MRT4577_108965C.1.pep
VYLYSPECMNDTYGIRLILQQRNHNAWNGNAFNLLKLVALIAKRQLSFYCHHSLTYHTQVF

SEQ ID NO: 194497 - protein, 76 aa, Zea mays
  Clone ID: MRT4577_108966C.1.pep
GKEENKTRGRMTALGPPRGNATGGLPRAVEGTSLDTTQGCAAIKLGRGFSRLYRQYYRSIQLSACAKTASTPTSER

SEQ ID NO: 194498 - protein, 87 aa, Zea mays
  Clone ID: MRT4577_108967C.1.pep
EAGVRSGSPRSSEVLRCVQVALLCVQERPDDRPHMAAVFLALGNPSAVLPQPRHPGYCTDRGSASTDGEWSSTCTVNDVTVTIVEGR

SEQ ID NO: 194499 - protein, 185 aa, Zea mays
  Clone ID: MRT4577_108968C.1.pep
MEKLEQQIPVLVSSIRCNIYLFTYHTKLRFEAAHPLAATTNFEVVTRAIDDEGKVYYMAYPSKKNILVDWRVVYKVNPRERLYDPGDAGYVESQIEQEMSKKMRSFARSLLGTRSSSRSEDLVFWGTGSSMSSRREMVQLLPLNDQHDDAEIEPQSRGDAAVGAVVEDAVDDATDVARDDAGDDA

SEQ ID NO: 194500 - protein, 271 aa, Zea mays
  Clone ID: MRT4577_108969C.1.pep
MTAGQCGNIQDQEAAPGADLYAVLGLNRECTDAELRVAYRRLAMIWHPDRCSASGSSARVEEAKERFQEIQGAYSVLSDSNKRLLYDVGVYDSEDDDADLSGMGDFLGEMADMMSQATPTESFEELQQLFVDMFQDDLDGAGFFGGLPTSRSAQGPSSTSLPPSTSPLRPTPPARSKGAQTPSSFNGAGRRGSTAKRPRTGWAGLEPDLGLSGFCFMVSKSKERPAAWACDGGDERSGSKQRLSTSRDVSGSGGGMSRSRGRAKAVETCGQ

SEQ ID NO: 194501 - protein, 94 aa, Zea mays
  Clone ID: MRT4577_108970C.1.pep
SGHFSKRGRVLKKLKLFWGPTLGDVSLVWASAGRYRSGRSGRTRGRSDPASLRVSATVIPKFFSLYHFFPLFSPYFSSLAAVPPKYSPYTPLPL

SEQ ID NO: 194502 - protein, 65 aa, Zea mays
  unsure (1)..(65): unsure at all Xaa locations
  Clone ID: MRT4577_108971C.1.pep
GRGRSPXGNRAPPRSATEYAVAAMPCRYGCTSLIARALLGLRVFPFARCEGQAGEWTHHVSSCRN

SEQ ID NO: 194503 - protein, 54 aa, Zea mays
  Clone ID: MRT4577_108972C.1.pep
ICLMQHLIKETIKRTLSNKMKSTCSITFNSTPQGPGLSQLYISPRGTNHHLNFR

SEQ ID NO: 194504 - protein, 111 aa, Zea mays
  Clone ID: MRT4577_108973C.1.pep
KKKTHAGGKQKPHKDPKHTQHKPKKKKKKIPTRKKKKNRKKKKKKDRKKDQDKKERKTHRINVQERGAKTNTGGEKQHDVTRRNKNPRPKKQGGHDQHRPPGRGERSTPTT

SEQ ID NO: 194505 - protein, 53 aa, Zea mays
  Clone ID: MRT4577_108974C.1.pep
SKVGKKLANIEVEEFKGKDNLLVTPNAKQSNSTQRKTESIDNIKSKLNFSVNK

SEQ ID NO: 194506 - protein, 93 aa, Zea mays
  Clone ID: MRT4577_108975C.1.pep
MAEGRGELSDGVEKGLEQRMGELDWGARGSGAKADARKGDAAALATGEDAAGWRSEQGMDAVARAGGEGLGIRVERMVCSAAGRRGRLEDEPR

SEQ ID NO: 194507 - protein, 54 aa, Zea mays
  unsure (1)..(54): unsure at all Xaa locations
  Clone ID: MRT4577_108976C.1.pep
QNFTNIRWIWMHFGLGCSIKNDELGSSTGLAQSRDLVIHAQRCMYTPVYXRNYR

SEQ ID NO: 194508 - protein, 73 aa, Zea mays
  Clone ID: MRT4577_108977C.1.pep
GSHCTSLYHLRSHYLPLDVNLTDYLERNQHHKNTGENRSLLKVSPLFNLTPILPVGVERPLVISKEAMSSVSL

SEQ ID NO: 194509 - protein, 93 aa, Zea mays
  Clone ID: MRT4577_108978C.1.pep
MAEGRGELSDGVEKGLEQRMGELDWGTRGSGAKADARKGDAAALATGEDAAGWRSEQGMDAVARAGGEGLGIRVERMVCSAAGRRGRLEDEPR

SEQ ID NO: 194510 - protein, 90 aa, Zea mays
  unsure (1)..(90): unsure at all Xaa locations
  Clone ID: MRT4577_108979C.1.pep
MRGLLAALAIQTLAAITTYTHTSGSCSCQPPPPVHIPTAVHLPPAVHLPPPEHIPATVLLPPTVHLPPPVHVPSTIHMTATPXQYPTQPT

SEQ ID NO: 194511 - protein, 75 aa, Zea mays
  Clone ID: MRT4577_10897C.1.pep
FIYKLFFFFCYHGAKPCIHIVPITKLRSHTDNRGVSAPEIAFLICWLQQPNEHLQNIITEIREESMLQLQAAASK

SEQ ID NO: 194512 - protein, 78 aa, Zea mays
  Clone ID: MRT4577_108980C.1.pep
MAEGRGELDWGARGSGAKADARKGDATALATGEDAAGWRSEQGMDAVARAGGEGLGIRVERMVCSAARRRGRLEDEPR

SEQ ID NO: 194513 - protein, 79 aa, Zea mays
  unsure (1)..(79): unsure at all Xaa locations
  Clone ID: MRT4577_108981C.1.pep
KVQNSKNCDHAHFGSRRVNGTTLVAIVGAEAEEEALLVSCSEMPVSNAPTSAFTLLFLAXATTRLXVSSITLLNSPGSC

SEQ ID NO: 194514 - protein, 47 aa, Zea mays
  Clone ID: MRT4577_108982C.1.pep
ERGTARPRPFPAARCLPHVPPSSRLVLLLRTACTDGLTPSRWPPRGS

SEQ ID NO: 194515 - protein, 138 aa, Zea mays
  unsure (1)..(138): unsure at all Xaa locations
  Clone ID: MRT4577_108983C.1.pep
NLARFLVPSVHRPGGGLIRRPLLRCRRTPRRRALSCEGAAVGEILGGASALARRYGVGLRVANCELPTARPRYKSYSSITLCHAFGVSGAIQHLAGMXXDSKVNKDVDAPIFQVADYGVVADLFEVLDELLKQIPKKK

SEQ ID NO: 194516 - protein, 44 aa, Zea mays
  Clone ID: MRT4577_108984C.1.pep
LHQTRIINSAVPSKQFHGKVFLCLLAPGSSYEIMVPRILPAYYQ

SEQ ID NO: 194517 - protein, 122 aa, Zea mays
  unsure (1)..(122): unsure at all Xaa locations
  Clone ID: MRT4577_108985C.1.pep
MFSLFLHLWNIGDWPEKRREGGLDQRQRLPDGSHMDIVXVYPLDAVYDFPEDVKSNKRCAGASNWTVKDIVESVRNEFGSIDILVHSLANGPEDLLFLACSHLDNRTTMTRVSRMDFGDFDI

SEQ ID NO: 194518 - protein, 76 aa, Zea mays
  unsure (1)..(76): unsure at all Xaa locations
  Clone ID: MRT4577_108986C.1.pep
VPKFCQKMPIFCWKKLVAPFKAFFFKGVHRTSGLWNFSIEGPINKVVFGNKKMFLRSYQSIPKKKTFPCXIKKTPK

SEQ ID NO: 194519 - protein, 73 aa, Zea mays
  unsure (1)..(73): unsure at all Xaa locations
  Clone ID: MRT4577_108987C.1.pep
GCIWKPNKSPAAPIMPYFSSYTEDHHNCRLIXISKGFKDXDXCDQSLXHKACCCSHLKYTILRYLESYIYSSD

SEQ ID NO: 194520 - protein, 618 aa, Zea mays
  unsure (1)..(618): unsure at all Xaa locations
  Clone ID: MRT4577_108988C.1.pep
MKSSLRKLRGFALQRQEQRVDRDRGRGHATAAATAADELLAAAQDMADMRSCYDNLLSVAAAIANSAYEFSEALQEMGACLLKRVTPNKDGINDKVLLLLGKSQFELRKLVDSYRVHVLNTITTPSLSLLNELQTVEEMKRQCDEKKRIVRXFMVNAQKEKGRSKNAKGDNGASEQLKQAQEDYQEEATLFLFRLKSLKQGQFRSLFTQAARHHAAQLNLFRKGVKSLEAVEPHVRLAAEQQHIDHQFSALEEEDYVVEDENDDEYNDSHDGELSFDYGENKETEKSGIASRNHTEDFFNSSKEDYSSVPHERQRIVSQSAPLFPEKKLNTEERIKDLRRSATRKLNTYVLPTPNDVRATSQRASGNPTSEPLESKGAFHSSPLHSSADIRDLGDNNLPSPTRLSNVQSVLKDSNTNKXKQGKYSQXDLALPGYYDLKTFDNKKVKRGSFSGPIASRPRPTENIDVISAAPRHSSAHQPVHMRVSPGNSPPPISSPKIKELHELPRPPVNTSKNTTFPSLVAHSAPLAPNPASLTPKVQDHFRAKQMLQRTASPLPTPPPGSIARSFSIPSRGSSDSKETEDQHKGAARMSLSSLPSAQTFLEDRQPLSAAAGSVSKT

SEQ ID NO: 194521 - protein, 137 aa, Zea mays
  Clone ID: MRT4577_108989C.1.pep
MRVSPGNSPPPISSPKIKELHELPRPPVNTSKNIAFPSLVAHSAPLAPNPASLTPKVQDHFRTKQTLQRTASPLPTPPPGSIARSFSIPSRGISDSKETEDQHKGAARMSLSSLPSAQTFLEDRQPLSSAAGSVSKT

SEQ ID NO: 194522 - protein, 177 aa, Zea mays
  unsure (1)..(177): unsure at all Xaa locations
  Clone ID: MRT4577_10898C.1.pep
MPISAELSIVVNPNQLYRARPSLQKPVQGLRLDMGRERDQRRIACHEVSMISADSIPDIXNRKLMNLLILAAIKMPTVGMVXPXNAFFDTVGPDNAINGXIYVNDKLANDITVQAWLNTHDPNDRTLXAQRLKGDPTYLMVEQDQTLATYGINAACTHIDCFVPWNGNEKKXICPCH

SEQ ID NO: 194523 - protein, 123 aa, Zea mays
  Clone ID: MRT4577_108990C.1.pep
QRRVRGQSAPLFPEKKLNTEERIKDLRRSATRKLNTYVLPTPNDVGATSQRASGNPTSEPLESKGAFHSSPLHSSADIRDLGDSNLPSPTRLSNVQSVLKDSNTNKKKKKKKKKKVLCVVTTA

SEQ ID NO: 194524 - protein, 96 aa, Zea mays
  Clone ID: MRT4577_108991C.1.pep
AVGPKMVPVSRENKDKKGICFIDAPTCPPDPQVDLTTGIHEQSFVSAGADQCNENCPLNITPNPASGLEYKFSGKCYERVKKGARPRNVWVKISPK

SEQ ID NO: 194525 - protein, 214 aa, Zea mays
  unsure (1)..(214): unsure at all Xaa locations
  Clone ID: MRT4577_108992C.1.pep
MKSSLRKLRGFALQRQEQRVDRXAAGATPPPPPRXDELLAAAQDMADMRSCYDNLLSVAAAIANSAYEFSEALQEMGTCLLKRVTPNKDGINDKVLLLLGKSQFELRKLLDSYRVHVLNTITTPSLSLLNELQTVEEMKHQCDEKKELYEFMVNAQKEKGRSKNAKGDNGASEQLKQAQEDYQEEATLFLFRLKSLKQGQFRSLFTQAARHHAA

SEQ ID NO: 194526 - protein, 70 aa, Zea mays
  Clone ID: MRT4577_108993C.1.pep
LRTLPIKKRSWHDTCCNSRSSSSSSSLAGTPQRDNGLTRANECLHVARCRLGDDPGGRRLNHVVEQPWLL

SEQ ID NO: 194527 - protein, 59 aa, Zea mays
  Clone ID: MRT4577_108994C.1.pep
CQRDLVPLFATVCCDAVIAHPWSCAGLVFVFAFDSGYSALEVNPLNSRTGGLQGQHQHL

SEQ ID NO: 194528 - protein, 86 aa, Zea mays
  Clone ID: MRT4577_108995C.1.pep
MARSLLRRSLVPGLAAFLSCASVPPSVPLPFLASAAALVRVFASSRAPSCPPCACPLAFGGACSSAIVPARPAVVLPFAVLSSLWV

SEQ ID NO: 194529 - protein, 84 aa, Zea mays
  Clone ID: MRT4577_108996C.1.pep
RPALFFFFFLSFLNGSFFFFFLFVFLFFFIFWAKNFTCFVFSPPSPGGPRFFIKNPREKLLQSAPPQILKNMTGKKKGEGKKTP

SEQ ID NO: 194530 - protein, 141 aa, Zea mays
  unsure (1)..(141): unsure at all Xaa locations
  Clone ID: MRT4577_108997C.1.pep
GHNGVIRGASSYWRSSCKKLAFFAYCTQYQEDEPEAQEWADELSPDELERLLNHDHGWLIANPHQFKVPSWFLNRKKYYKDGRFSQVVSNALDKKLXRDDSRLKKTRNHYGLXHYWGLLVRGQHTKTTKRHGKTIGVSENR

SEQ ID NO: 194531 - protein, 51 aa, Zea mays
  Clone ID: MRT4577_108998C.1.pep
TYYPAFKHISMWSSELIVRYRWHVLCDVVSLFYMPGLPKLVSPSIGVMVSI

SEQ ID NO: 194532 - protein, 64 aa, Zea mays
  Clone ID: MRT4577_108999C.1.pep
SCASCSSSYVFSRELVALHASGSLAFAIFFSFSLIGLRLPRALVASLCMHGCPLIRPWRFLGLP

SEQ ID NO: 194533 - protein, 32 aa, Zea mays
  Clone ID: MRT4577_1089C.1.pep
TQRTVPQMFKIRREWIIVFFLSDDSWLLCAFL

SEQ ID NO: 194534 - protein, 90 aa, Zea mays
  Clone ID: MRT4577_108C.1.pep
GVRIAVACGLLSSHLQHLLGPFSGHEGAPNAQEDGCQLQGGGGSVCAGPPRRPTVGTVISAPTKTSTGPMLRAPSPALPARALTMASSAH

SEQ ID NO: 194535 - protein, 59 aa, Zea mays
  Clone ID: MRT4577_109000C.1.pep
SRTLLIYRCSGSLIINNWIILFLYGCIYPSKGPLLYSLSFLRAGTTLSEGNCVQLTEVA

SEQ ID NO: 194536 - protein, 74 aa, Zea mays
  Clone ID: MRT4577_109001C.1.pep
EKSSPTPLICLVTLSVDFSAATLPLIFTVRHQLSFILICLKLFLPSPADLFLQRPSSSPAFISQEKEKKSHRRS

SEQ ID NO: 194537 - protein, 59 aa, Zea mays
  Clone ID: MRT4577_109002C.1.pep
DIFGIIGGVITNVQGGTTTPKTVKGPSAKDWRGGRASSINIIASSTGIGKAGANWHPLY

SEQ ID NO: 194538 - protein, 137 aa, Zea mays
  unsure (1)..(137): unsure at all Xaa locations
  Clone ID: MRT4577_109003C.1.pep
SKGAAKIVGKVLPKFNGELHDMSFRVPKVYVTDVDLNVNMEKWPSSEKIKKAIKHVFEGPLQGIMGXVKKDLVSRYFFGDSRFSIFQAKAGIARNDGFSKVVXCEDNRWGYSGGEVGLIPDMCKTQDRDIFQPPYRG

SEQ ID NO: 194539 - protein, 84 aa, Zea mays
  Clone ID: MRT4577_109004C.1.pep
PVRTEPLITTETAHVFCCKQSAHDSRKIIFHFFCWFNETHRMGTLIHCMLLFAVSTKPFLFSALYPLVFFDTSYDRSSLFLLIM

SEQ ID NO: 194540 - protein, 309 aa, Zea mays
  unsure (1)..(309): unsure at all Xaa locations
  Clone ID: MRT4577_109005C.1.pep
MTLSLGLLRSGLLNRRINQPANQVLRLHLAFSSASPSPSDPSAAAAGPQTTIREGKVEIFLDESNSVFYNKTQVNNRDISIAVLRSFILKRHEEYAARSRKGPGDTTLSAQAKYKEPKVLEALAASGLRAIRYAVEVDGIGEVTAVDNNEAAVEACKKNIQHNGSLASSKVVPHHADARVYMLTHPKEFDVVDLDPYGSPAAFLDSAVQCVADGGILMCSATDMAVLAGGNAEVCFSKYGSYPLRGKHCHEMALRILLACIESHAIRHKXRYIVPIISVHMDFYIRVFVRIFTLSPASIFFLIHSFPYG

SEQ ID NO: 194541 - protein, 219 aa, Zea mays
  unsure (1)..(219): unsure at all Xaa locations
  Clone ID: MRT4577_109006C.1.pep
MGKMKAVACVACWAALSLINVVMAVDYVVGNPAGGWDGRTDYQSWAAAETFAPGDTLTFKYNSYHSVMEVTKSAFEACTTTDPILYDNSGSTTVALTMPGTRYFICGAPGHCLGGMKMQVQVADRPAPTTPSSPPPPPAHAKQKRHATAPSPTPMPWAPAPTPWSPAPAPAAAPPRRAGHKKKHKKRYCPPXPXAPARAPTPTVQAVEADFPFAAFAPM

SEQ ID NO: 194542 - protein, 121 aa, Zea mays
  Clone ID: MRT4577_109007C.1.pep
LGPVPGDVAAPSTPTVSGATVSSAQAILDATAVPGAAPSAHAVPGTTAIPSVAAPSAQAAGSTPTSAAAPSTRAGPGVAAHSTQAAGDAPSSVAAPSIRAGPGVAPGASASAPTSPDVPAP

SEQ ID NO: 194543 - protein, 66 aa, Zea mays
  Clone ID: MRT4577_109008C.1.pep
LLHLRLRLMLACTSYPTTSLKGLGRELRGHFKKTTETGPVFRKLTVSNANRNLSDVIAYKQAMSFP

SEQ ID NO: 194544 - protein, 99 aa, Zea mays
  unsure (1)..(99): unsure at all Xaa locations
  Clone ID: MRT4577_109009C.1.pep
HRGAGKTPGVPQLNRLAAHPLFPRGGKTKRAPPDRPSKQWPTLKGKGPXPCRGPLSAGGGXVPPRGPVTFARALAPALLVFSPSFFATLAGFPRKALNG

SEQ ID NO: 194545 - protein, 299 aa, Zea mays
  Clone ID: MRT4577_10900C.1.pep
MAPPAAAVAAVHHRSPHLLLRRGGGGLLPSPSGPAALPFSSRGAACTPARLRLPPPRFSLSPVPKSLSAASSSHVPVRSLFTGIVEEVGRVRRLGPPLAPSGGGGGGEAPGLDLEVETKNLLAGTQLGDSVAVDGACLTVAAIDPAASTLTFGVAPETLRRTSLGGRAPGDGVNLERALTPSSRMGGHFVQGHVDGTGEIAAFRPDGDSLWVTVRAPPEILRLLVPKGFVAVDGTSLTVVSVDDEGGWFDFMLVRYTQDNIVLPTKKVGDKVNLEADILGKYVEKLLAGRVEAMAKVDS

SEQ ID NO: 194546 - protein, 109 aa, Zea mays
  unsure (1)..(109): unsure at all Xaa locations
  Clone ID: MRT4577_109010C.1.pep
QRGAGKTPGVPQLNRLAANPLFPSGGKSKRARPDRLSKHLPTLKGKGPXPCSGPLSAGGGGVPPRGPVTFARALAPVLLVFSLSFFARLAGFPRKALNGGLLLGFRLRV

SEQ ID NO: 194547 - protein, 89 aa, Zea mays
  Clone ID: MRT4577_109011C.1.pep
VDIRKDLYGNIVLSGGSTMFPGIADRMSKEITSLAPSSMKIKVVAPPERKYSVWIGGSILASLSTFQQMWISKEEYDESGPAIVHRKCF

SEQ ID NO: 194548 - protein, 254 aa, Zea mays
  unsure (1)..(254): unsure at all Xaa locations
  Clone ID: MRT4577_109012C.1.pep
FYVTLYLAGKSELSIILCVSTGSETCNIQFSEDLQKIVDTYQLSPFTAKSXQVARCCATSKEEWEEQCKLWPTSYHPAHDLGIVRGFQEEELPSIFNCMKAAIQLSKAGNAAIIVDPSSMQIVAKATDHTHKHDTPEEGNTFSEANADVTCSWNASTDDDNNLSLPGSFLPKLNSLNMEIPCINPWGWMKKRTCEQKPSPCDGCSAWHPLRHAPMAAIENAAVRDRTMFPSSISIPSQIQMAVPRTAAMNQQKG

SEQ ID NO: 194549 - protein, 71 aa, Zea mays
  Clone ID: MRT4577_109013C.1.pep
PAGRKLNTQPASNLFFARMQNFHPWQGHQGWIFPYDRRLRTVPALALPTEGRRPLSHRGQWWAPLLGGSRP

SEQ ID NO: 194550 - protein, 114 aa, Zea mays
  unsure (1)..(114): unsure at all Xaa locations
  Clone ID: MRT4577_109014C.1.pep
SLSLIIRASTFLLSLLLRLRLRLIHPRQGSPCXDSEEXHFESKGDXGASQNYPXXVAPVRKTGFIVIKNRPCXVEEVFTSKTGKYGAAKCHFAPIDIFHGKKLEDIVPSSDNCD

SEQ ID NO: 194551 - protein, 145 aa, Zea mays
  Clone ID: MRT4577_109015C.1.pep
TLRSCRVVRTYHKYGSNRLIKLLSWFMAVIQSLLIIASRKHYTVDVVVAWYTVNLVVFFVDNKLPEMADRTNGLSLLPVSTKDKDGRMKEELHKLEKDGRMMDEFHKLLNGNSIDATDWRQRVQMNGKHGEDTSHTVADATSAGT

SEQ ID NO: 194552 - protein, 192 aa, Zea mays
  unsure (1)..(192): unsure at all Xaa locations
  Clone ID: MRT4577_109016C.1.pep
IHKNVKLAEKVADXVVKLEPENTGYYVLLANIYAEAERWEAVKKLKNKIGGRGLRENTGYSWIEVRGKVHVFIAHNRNHPDWNRIAEFLDDVARRMRQEGHDPKKKYALMGADDAVHDEALCGHSSKLAVAFGVLNLPEGRPIRVTKNSKVCSHCHEAAKFISKMCNREIILRDSSRFHRFEGGRCSCRGYL

SEQ ID NO: 194553 - protein, 194 aa, Zea mays
  unsure (1)..(194): unsure at all Xaa locations
  Clone ID: MRT4577_109017C.1.pep
PCSALAALRPLVAARLPWCSWVGWSRWLWPLVLAVPLLSLLRXPCGRAAGAPWGGGSGGLWRAAVRLPAAAPXASGXSAARWRCSXAAASSRXVGAAPRVLGRPARPWASCCRCRPLAAASCSCRGPCPSPFRLVALACVAVXVRVALGPXVLRGVWVFAGVAPXPALLLVGGAXKCLSPLXLRARGSFRXFRG

SEQ ID NO: 194554 - protein, 125 aa, Zea mays
  Clone ID: MRT4577_109018C.1.pep
MVTGSMKHLVQVEPAREAAAEGGAPSAGPTYRCAAGGNAASPPAVPGLECCWDIFRLSVEKCPDNKMLGRREIVHGKAGSYTWLTYKQVYDTVLDVGSAIRSCGVGKGGRCGIYGANSPEWVISM

SEQ ID NO: 194555 - protein, 967 aa, Zea mays
  Clone ID: MRT4577_109019C.1.pep
MAALGAKMERLSSIDAQLRMLVPGKVSEDDKLIEYDALLLDRFLDILQDLHGDDLKEMVQECYEVAAEYETKHDLQKLDELGKMITSLDPGDSIVIAKSFSHMLNLANLAEEVQIAYRRRIKLKKGDFADENSAITESDIEETLKRLVVDLKKSPAEVFDALKSQTVDLVLTAHPTQSVRRSLLQKHSRIRNCLVQLYSKDITPDDKQELDEALQREIQAAFRTDEIRRTQPTPQDEMRAGMSYFHETIWKGVPKFLRRVDTALKNIGINERVPYNAPLIQFSSWMGGDRDGNPRVTPEVTRDVCLLARMMASNLYCSQIEDLMFELSMWRCSDELRMRADVLHLSTKKDAKHYIEFWKKVPPNEPYRVILSDVRDKLYNTRERSRELLSSGHSDIPEEATLTNVEQLLEPLELCYRSLCACGDSVIADGTLLDFLRQVSTFGLSLVRLDIRQESDRHTDVLDAITTYLGIGSYREWTEERRQEWLLSELNGKRPLFGSDLPKTEEISDVLDTFHVIAELPSDNFGAYIISMATAPSDVLAVELLQRECHVKTPLRVVPLFEKLADLEAAPAALARLFSIDWYRQRINGKQEVMIGYSDSGKDAGRLSAAWQLYKAQEELIKVAKDFGVKLTMFHGRGGTVGRGGGPTHLAILSQPPDTIHGSLRVTVQGEVIEQSFGEEHLCFRTLQRFTAATLEHGMHPPNAPKPEWRALLDEMAVVATEEYRSIVFKEPRFVEYFRLATPETEYGRMNIGSRPSKRKPSGGIDSLRAIPWIFAWTQTRFHLPVWLGFGAAFKNVLQKDIRNLHMLQEMYNEWPFFRVTIDLVEMVFAKGNPGIAALYDKLLVSEELHPLGEKLRANYEETQKLLLQVAGHRDLLEGDLYLKQRLRLRDAYITTLNVCQAYTLKRIRDPDYHVALRPHLSKEIMDSTKAAAELVKLNPGSEYAPGLEDTLILTMKGIAAGLQNTG

SEQ ID NO: 194556 - protein, 37 aa, Zea mays
  Clone ID: MRT4577_109020C.1.pep
LREAVIHETDCCLLRRIELAGNVQTVAREAQWRVRPL

SEQ ID NO: 194557 - protein, 93 aa, Zea mays
  unsure (1)..(93): unsure at all Xaa locations
  Clone ID: MRT4577_109021C.1.pep
SYGRLGSSRPAGMTQPPGXLVTWARPLVTTRGLQQLVDPSLPVGYDFEKLAKAAAIASMCVHVEVSHRPFMGEVVQALKLIHSGGSGDGACSG

SEQ ID NO: 194558 - protein, 99 aa, Zea mays
  Clone ID: MRT4577_109022C.1.pep
SRYACCSDKSCCCKSSIGSKDLSCTAVTLKLWKGFYHERCSDILKDSVPQLIFAPNAGVAAYPSWMPTIIQVNPFRQPVAAENNALYVPCYSNCFVFGM

SEQ ID NO: 194559 - protein, 82 aa, Zea mays
  Clone ID: MRT4577_109023C.1.pep
LRLSPPKICVVLWPTQPACNIQERLWQGASQSPSLVHLGGLLVLEVVNGGPHQLVIQPLDGALDAGSDGSQRRRASIPSRAS

SEQ ID NO: 194560 - protein, 119 aa, Zea mays
  unsure (1)..(119): unsure at all Xaa locations
  Clone ID: MRT4577_109024C.1.pep
GFFLPPVLFWGRGHSPFFFLIFFNGLGAFFFQGPRTSRGLSPFLAFACLPLFGEIFAGWALFFVLSRALKFVFLFFWLPFFGPPVGLSFCFFFFGETPVLPPKNPHKKKNFKKGFKAXG

SEQ ID NO: 194561 - protein, 197 aa, Zea mays
  Clone ID: MRT4577_109025C.1.pep
QTPIYDGQDTLCIHYLGPEKELLQLAAFGELRALFPSVQIHIELVGPEVPKSRDGEVVNISRYACCSDKSCCCKSSIGSKDLSCTAVTLKLWKGFYHERCSDILKDSVPQLIFAPNAGVAAYPSWMPTIEMIRQTGIPAIFTDFCEEAAHLASCCISSITGQPLKIPIQVNPFRQPVAAENNALYVPCYSNCFVFGM

SEQ ID NO: 194562 - protein, 92 aa, Zea mays
  unsure (1)..(92): unsure at all Xaa locations
  Clone ID: MRT4577_109026C.1.pep
GYKLQCFRGKKRGPATARKSSGLSGTVXIFGDKXLSPGSFMFGGLASGETRITPFLKGEDVLNTGKAMQAMGAILXKEGETXWIINGVVNGG

SEQ ID NO: 194563 - protein, 131 aa, Zea mays
  Clone ID: MRT4577_109027C.1.pep
PTRPPTRPRTRGVEVSRAQAPGFFRGMPGFEKFADDVEQVLTEADGIVTNSFVEMEPEYVAGYQEARAMKVWTVGPVSLFHQRAATLASRGNTAAIGADECLRWLDGKEADSVVYVNFGSIAHAQAKQVVE

SEQ ID NO: 194564 - protein, 113 aa, Zea mays
  Clone ID: MRT4577_109028C.1.pep
ISIELLTTIAPSSHFSSASPKHSPRQPPGSPTLLFTQWKDLILEWQCSSPHHAGVRRQANSLPSPEYAHCCPCHHRYHRDSEGHPPSRTRKSLLTDPGSISEAATAASRFAYC

SEQ ID NO: 194565 - protein, 238 aa, Zea mays
  Clone ID: MRT4577_109029C.1.pep
PIAVRRVRKEDLRHVAKATGATMVTTFADMEGEETFDPSFLGHADEVVEERISDDEIILVKGTKNTSAVSIILRGANDFMLDEIERSLHDALCIVKRTLESNTVVAGGGAVEAALSVYLENLATTLGSREQLAIAEFAESLLIIPKVLAVNAAKDATDLVAKLRSYHHKAQTNADKQHLSSMGLDLTKGVIRNNLEHGVIEPAMSKVKIIQFATEAAITIVRIDDMIKLDKEESGQEE

SEQ ID NO: 194566 - protein, 68 aa, Zea mays
  Clone ID: MRT4577_10902C.1.pep
SPNVLVCLFTFVCCGGETNPIFSRGTKKNVPLINYPNPSTKCITVYSPGAKIFCMTRLINTGGKHGNV

SEQ ID NO: 194567 - protein, 55 aa, Zea mays
  Clone ID: MRT4577_109030C.1.pep
LIIISYYIVLFDLNLHQNILLNKFYHQTLNFIVHKVQFDNINGSTNEPPLGPTQN

SEQ ID NO: 194568 - protein, 35 aa, Zea mays
  Clone ID: MRT4577_109031C.1.pep
HDSWEIGLTTAMTVQSHDHHHHHHLEFPFLVSFCS

SEQ ID NO: 194569 - protein, 88 aa, Zea mays
  Clone ID: MRT4577_109032C.1.pep
WVPRGRPGWPVDSPLPDSGEGSRNVGGLDEMASAWTRQRRRMWRLRCYEILRGSDIGVACTEYKRPRALARDCLVIRSLHTRPEALRA

SEQ ID NO: 194570 - protein, 47 aa, Zea mays
  Clone ID: MRT4577_109033C.1.pep
NSICVVSQASSVHASTNVFRRFQQLEGMIILPVPLNNACKQAPLEPN

SEQ ID NO: 194571 - protein, 74 aa, Zea mays
  Clone ID: MRT4577_109034C.1.pep
IAISSRNEEAIRVMSVKVSMCSAMEYFSGNEVHAVVCPAHCIDRCGGFRLTCCLSDRDMLLFRRSREEEKKGRP

SEQ ID NO: 194572 - protein, 112 aa, Zea mays
  Clone ID: MRT4577_109035C.1.pep
PSAGEVVCREWKGSRLEPTVCRYRPRAASSVPVDAAGHKPQGQGEPRGESGTSRGKARQHGSRNVLASYACSSSTGIMVVSVSHGSGRAISPDVRPDRSINKRSAGELFLST

SEQ ID NO: 194573 - protein, 119 aa, Zea mays
  Clone ID: MRT4577_109036C.1.pep
HSLYFPENHHGNSGHFFIFFWATTGIQTKKRVLKLGAPYSRRIKYIGLFDFTGKIRFFNSKQDFSTSNTFFLAFTFTTQSWEPPRTGHFFFFPKAKFFTLTRSKFFTLPRRGNPDHGDF

SEQ ID NO: 194574 - protein, 79 aa, Zea mays
  Clone ID: MRT4577_109037C.1.pep
IPRAEAGAHVPPLRRVLVNCGTKKTQSRRARALHAWSFFRSASCKIMPRFFFSFLSLPNPGYSKHFRFFFLLIITLLVR

SEQ ID NO: 194575 - protein, 76 aa, Zea mays
  Clone ID: MRT4577_109038C.1.pep
GPYSEARRCGSGIDLFFEGLRETFEISPYLRAYPFLQAGNSFCYHGRVTGYQGQQGSSCPYSSGLPFILTNNGREA

SEQ ID NO: 194576 - protein, 164 aa, Zea mays
  unsure (1)..(164): unsure at all Xaa locations
  Clone ID: MRT4577_109039C.1.pep
DFHRNGSLHDLLHLSDEYSKPLSWNTRIKIALGSARALEXAGLASFIPDAEFQAAEQSAGYTAPEVDMTGQYTLKSDVYSFGVVMLELLTGRRPFDSSRPRSEQSLVRWATPQLHDIDALDRMVDPALKGLYPAKSLSRFADVLALCVQPEPEFKPPMSEVVQA

SEQ ID NO: 194577 - protein, 125 aa, Zea mays
  Clone ID: MRT4577_109040C.1.pep
KDGRRRTGRNPGRPTFLPRQTNRGRGGETHKTPEDTHNHRKRAEAQRNKRRAGPTLKRDNKSCQPAEKTGDKGASRSMNTRTAGRGRNKDPQKTTGGPQKLGKPRAPSDTKAAQNEPEGMTREET

SEQ ID NO: 194578 - protein, 101 aa, Zea mays
  Clone ID: MRT4577_109041C.1.pep
LCSCSLSLWAWIGRPPPPPPGLRWARRRRRAPTRSTLPSINSLARWFGEPVRPAILQTEAFLTNAKGYPCLSKRHQSLLTGFFKHSVQVLMVVGAGRGPLV

SEQ ID NO: 194579 - protein, 725 aa, Zea mays
  Clone ID: MRT4577_109042C.1.pep
MAIRKSGGGGGVGGVARRLLLLACCCIWPGGRIFTAADTDPNDLNVLNTLFTSLNSPGQLRAWRANGGDPCGQSWQGITCSGSGVTKILLPNLSLAGNLAYNMNNLGSLVELDMSQNNLGGGGQIQYNLPNMKLEKLNLAGNQFGGNLPYSISTMPNLKYLNLNHNQLQGNITDVFSNLYSLSELDLSFNSLTGDLPQSFTGLSSLKRMYLQNNQFTGYINVLANLPLETLNVGNNHFTGWIPSQLKKINNLQTDGNSWSTGPAPPPPPYTAPPPPNHWNGAGQNADGSSSSGGRSGIGGGGVAGIIISLLIVGSVVAFFLIKRRKRKAIMEEQFEQHQPFTSFPSNEVNDMKPIYESTTVDIESLASPASINLKPPPKIEQNKSFDDDDDFSNKTAANRSNITPMKATVYSVADLQMATDSFSFDNLVGEGTFGRVYRAQFNGGKVLAIKKLDITVMPFQSSDDFAELVSNISKLHHPNLNELVGYCMEHGQHLLVYDFHRNGSLHDLRHLSDEYSKALSWNSRIKFALGSARALEYLHEICSPSIIHKNFKASNILLDSEFNPHLSDTGLASFIPGAEFQAAEQSAGYTAPEVDMTGQYTLKSDVYSFGVVMLELLTGRRPFDSSRPRSEQSLVRWAAPQLHDIDALDRMVDPALKGLYPAKSLSRFADVLALCVQPEPEFRPPMSEVVQALVRLVQRANMTKRMLDGGDTSRGPDDQDQYFI

SEQ ID NO: 194580 - protein, 714 aa, Zea mays
  Clone ID: MRT4577_109043C.1.pep
VVRVRRLLLLSLHCCSSIWPGGRIFAAADIDPNDLNVLNTLFTSLNSPGQLTGWQANGGDPCGQSWKGITCSGSGVTKIQLPNLSLTGNLAYNMNNLGSLVELDMSQNNLGGGGQIQYNLPNMKLEKLNLAGNQFGGNLPYSISTMPNLKYLNLNHNQLQGNISDVFSNLYSLSELDLSFNSLTGDLPQSFTGLSSLKKVYLQNNQFTGNINVLANLPLETLNVANNHFTGWIPSQLKKINSLQTDGNSWSTGPAPPPPPYTAPPPPPNHWNADGSSSSSSSGGRSGIGGGGVAGIIISLLVVGSVVAFLVIKRRKRKAAMKEHFEQHQPFTSFPSNEVKDMKPVYEATTVDIESLASPASVNLKPPPKIERNKSFDDDDDFSNKLVAKKSNITPINATVYSVADLQMATDSFSFDNLVGEGTFGRVYRAQFNDGKVLAIKKLDSTVMPFQSSDDFAELVSNISKLHHPNLNELVGYCMEHGQHLLVYDFHRNGSLHDLLHLSDEYSKPLSWNTRIKIALGSARALEYLHEICSPSIIHKNFKSSNILLDSEFNPHLSDAGLASFIPDAEFQAAEQSAGYTAPEVDMTGQYTLKSDVYSFGVVMLELLTGRRPFDSSRPRSEQSLVRWATPQLHDIDALDRMVDPALKGLYPAKSLSRFADVLALCVQPEPEFRPPMSEVVQALVRLVQRANMTKRMLDGDTSRRPDDLDQDFI

SEQ ID NO: 194581 - protein, 78 aa, Zea mays
  Clone ID: MRT4577_109044C.1.pep
PRPHLPSSTFTISSTITIPQPSLTPPSYTNTPSLFNPYHPFFFRNHNFHYFHNLQNIFYSHNLNIQPHPSILPTDTTF

SEQ ID NO: 194582 - protein, 68 aa, Zea mays
  unsure (1)..(68): unsure at all Xaa locations
  Clone ID: MRT4577_109045C.1.pep
RNSARVRIAYMYAKFFXIKSIGKANVPKSIKYGEGPSSPSGIPQLYSAFRDADRIXRRHSTKCPVFLF

SEQ ID NO: 194583 - protein, 68 aa, Zea mays
  Clone ID: MRT4577_109046C.1.pep
RLGVGFLLFLGAGSRLLGRSPATCTMSLLCSFCCLGAGLLYVGTLCGSRALETWGGVAAIVAMRDAPK

SEQ ID NO: 194584 - protein, 271 aa, Zea mays
  Clone ID: MRT4577_109047C.1.pep
TSFRSRAAALHLDFSSDAVFFPCCAPWSSHTRFFPCRSPPMAPGSACPWPSFLGSASISSSSLSLRAFPDARLAPRAGLWCSAAQLPLLATHAQPLPRTRVPLLFPQPRAVLLLCSLVAMAMATELPCRGFLLPRRARSVPSFPAVTPSWCFLARSSPQLPFVVVASRRPSSDSISPTPAPSRRLLGFASLRPAKFTPACSRGFLCTAFLLPGLCRARQHVIHVEAAASIPCVMLTRSSLTSSICAIIFGYRFRRLSIFLFAMVITSAVRI

SEQ ID NO: 194585 - protein, 117 aa, Zea mays
  Clone ID: MRT4577_109048C.1.pep
KTPPGFLALFWGEKPLGLLPPPKKSLGAPPPGLKLFMGGWAPFPPGRFKAPMVSLPPRGSRVGGSQRCQPVPKKIVFVWGNVFFFFPGLFFFKGRRVSLKFVGLPSWSSPKFFPLGS

SEQ ID NO: 194586 - protein, 165 aa, Zea mays
  unsure (1)..(165): unsure at all Xaa locations
  Clone ID: MRT4577_109049C.1.pep
MRPLLALAAACALLVAAGAAAAEQAKNSTNKFRQREASDDMLAYPHLDEDALLKTKCPKHVELRWQTEVSSSIYATPLIADINSDGKLEVVVPSFVHYLEVLEGTDGDKLPGWPAFHQSNVHSSPLLYDIDKDGVREIALATYKRVVNFFKVSGYMMMDKLXVPR

SEQ ID NO: 194587 - protein, 206 aa, Zea mays
  Clone ID: MRT4577_10904C.1.pep
MAATTSAASARGLLLCVLVAFLHRLQFQIPPVAVAAATPKNKTESRDGHGKTLSFTLYQHETINRTGYIVVDGVAGAGVSQTTTPFGTIYVFRDDLTVRADRDSRVAGVAEGTSITTSLDGLQSMSLAKITVHHRGHRGSVSVLGGTYNTKPSDYPVVGGTGDFAYALGYVRSSPVDLRGRTVTYKMELHLYWPPYAHYAPVPRKA

SEQ ID NO: 194588 - protein, 268 aa, Zea mays
  Clone ID: MRT4577_109050C.1.pep
MADTGDVAAAAEASARPAGSSSTQPLAGRVAIVTGASRGIGRAIATHLSSLGASLVLGYAARADEAGALAASLPRAVAVRADVSDEAGARSLFDAADEAFGGAHILVASAGVLDDTYPAVAGTATEAFDRVLAVNLRGAFLCLREAANRLRRGGGGRIVAVTSSVVGSLPPRFGAYTASKAAVEALVRTMAKELGGTRVTANCVAPGATATDMFFKGKSEAMVRHAVETNPMQRLGEPGDIAPVVGFLCTDAAEWVNGQVIRANGGYV

SEQ ID NO: 194589 - protein, 58 aa, Zea mays
  Clone ID: MRT4577_109051C.1.pep
NFKKARLHISHSGMSFNACAWKEPTLQLHPGLRGFLQGDPPSFHEEDMRRTWNIQEAF

SEQ ID NO: 194590 - protein, 135 aa, Zea mays
  unsure (1)..(135): unsure at all Xaa locations
  Clone ID: MRT4577_109052C.1.pep
ETTKRTKKAGXVGKXGTRXGXSXXKQXKKREXXQHPKXXREPXGKPAGKRKAXATRRRQDRGKAQAXGXHTTNTXXAATATSTTRPPREQTEVFFFSRPPPPGTILAQPRQHSSTNGPCSRIPKGCAPTSPPVHR

SEQ ID NO: 194591 - protein, 93 aa, Zea mays
  unsure (1)..(93): unsure at all Xaa locations
  Clone ID: MRT4577_109053C.1.pep
LVPSRKVSFKGRLTTDLRGLFKRPHPAPSPXFTSMLNYSSEQFTTPSYTSAIITNYPICINPHQTAGNNFLKHTTHILFIPRHIIGTTDKNFQ

SEQ ID NO: 194592 - protein, 325 aa, Zea mays
  Clone ID: MRT4577_109054C.1.pep
FKLSSALVSSSSCLRCRTSTDDITRLRLITAVKTPYLPDGRFDLEAYDSLINMQIEGGAEGVIVGGTTGEGHLMSWDEHIMLIGHTVNCFGSRIKVIGNTGSNSTREAVHATEQGFAVGMHAALHINPYYGKTSAEGMISHFEAVLPMGPTIIYNVPSRSAQDIPPEVILAISGYTNMAGVKECVGHERVKHYADKGITIWSGNDDECHDSKWKHGATGVISVTSNLVPGLMHSLMYKGENATLNEKLSPLMKWLFCQPNPIALNTALAQLGVARPVFRLPYVPLPLEKRAEFVRIVESIGRENFVGQKEAQVLDDDDFVLISRY

SEQ ID NO: 194593 - protein, 112 aa, Zea mays
  Clone ID: MRT4577_109055C.1.pep
RVCVPSGPRGRAWVSRSAAGRAVSRPSFPGRFPVRCRRLCSGRGPRSLVRPGLCRVLWVLSWRCGAWVVACRRCWRRLGRPGPARGCWCSGSALSRPLSFCVVARSLGWARL

SEQ ID NO: 194594 - protein, 358 aa, Zea mays
  unsure (1)..(358): unsure at all Xaa locations
  Clone ID: MRT4577_109056C.1.pep
MEDEDAGLGDGGEASPPHHAAASGDRARDLAASPTSSRSVTQTVNGSHRFVIQGYSLAKGMGVGKHIASDTFTVGGYQWAIYFYPDGKNPEDNSGYVSVFIALASDGTDVRALFELTLLDQSGKGKHKXGYKRFFRRNALEQSDFLKDDCLKINCTVGVVVSTMDYSRPHSIEVPESDIGYHFGTLLDTLEGVDVIFSVAGEKFHAHKLVLAARSSFFRSEFFDHESDEEKNETGTGDEIKEIVIDDMDPVVFKAVLHFMYRDNLVNDDELMASSSDCSIFDSLAGKLMAAADKYELPRLRLLCESYLCKHVSVNSVATTLALADRYHAIELKSVCLKFAAENLSGYKTYNMKICLTF

SEQ ID NO: 194595 - protein, 380 aa, Zea mays
  Clone ID: MRT4577_109057C.1.pep
MISPTNLLPARKITPVSNGGAATASPSSPSVAARPRRLPSGLQSVTGRGKVSLAAITLDDYLPMRSTEVKNRTSTDDITRLRLITAVKTPYLPDGRFDLEAYDSLINMQIEGGAEGVIVGGTTGEGHLMSWDEHIMLIGHTVNCFGSRIKVIGNTGSNSTREAVHATEQGFAVGMHAALHINPYYGKTSAEGMISHFEAVLPMGPTIIYNVPSRSAQDIPPEVILAISGYTNMAGVKECVGHERVKHYADKGITIWSGNDDECHDSKWKHGATGVISVTSNLVPGLMHSLMYKGENATLNEKLSPLMKWLFCQPNPIALNTALAQLGVARPVFRLPYVPLPLEKRAEFVRIVESIGRENFVGQKEAQVLDDDDFVLISRY

SEQ ID NO: 194596 - protein, 301 aa, Zea mays
  unsure (1)..(301): unsure at all Xaa locations
  Clone ID: MRT4577_109058C.1.pep
MEDEDAGLGDGGEASPPHHAAASGDRARDLAASPTSSRSVTQTVNGSHRFVIQGYSLAKGMGVGKHIASDTFTVGGYQWAIYFYPDGKNPEDNSGYVSVFIALASDGTDVRALFELTLLDQSGKGKHKVHSHFDRSLESGPYTLKYRGSMWGYKRFFRRNALEQSDFLKDDCLKINCTVGVVVSTMDYSRPHSIEVPESDIGYHFGTLLDTLEGVDVIFSVAGEKFHAHKLVLAARSSFFRSEFFDHESDEEKNETGTGDEIKEIVIDDMDPVVFXAVLHFMYRDNLXNDDELMASSSDCS

SEQ ID NO: 194597 - protein, 76 aa, Zea mays
  Clone ID: MRT4577_109059C.1.pep
FGVNSQQRRTPQKDDRRLTGFLPANELIWCCVQLATEQVEPIPLETRPQVYRLDWGDQEATPYAACGEDRTVEVYF

SEQ ID NO: 194598 - protein, 42 aa, Zea mays
  Clone ID: MRT4577_10905C.1.pep
PKRLGDMSMQLKKCGYRHGTRAHAIRQRFRQTMSLRPFHVLS

SEQ ID NO: 194599 - protein, 41 aa, Zea mays
  Clone ID: MRT4577_109060C.1.pep
PLFEFFFFFFFFFFFFFFFFFFFFFFFLKPKNKQHIGFFKK

SEQ ID NO: 194600 - protein, 65 aa, Zea mays
  Clone ID: MRT4577_109061C.1.pep
MMARAVRVETFVVHEWEDMDGGERMATFVWLIEAGSGNRCRAIATATSLAVYRGSRIPAGLEVPN

SEQ ID NO: 194601 - protein, 428 aa, Zea mays
  Clone ID: MRT4577_109062C.1.pep
MEDEDTGPGDGGEASPPHHVAASSDRARDMVASPTSSRSVTQTVNGSHHFVIQGYSLAKGMGVGKHIASETFTVGGYQWAIYFYPDGKNPEDNSTYVSVFIALASDGTDVRALFELTLLDQSGKGKHKVHSHFDRSLESGPYTLKYRGSMWGYKRFFRRTALEQSDFLKDDCLKINCTVGVVVSTMDYSRPHSIEVPESDIGFHFGTLLDTQEGVDVIFSVAGEKFHAHKLVLAARSPFFRSEFFDHELGEEKNGTDTGDEIKEIVIDDMDPVVFKAVLHFIYRDNLVNDDELSASSSDCSIFDRLSGKLMAAADKYELPRLRLLCESYLCKHISVNSVATTLALADRHHAMELKSVCLKFAAENLSAVIRTEGFDYLKDNCPSLQSEILRTVAGCEEPCSSGLKSQSVWAQLSDGGDTSGRRVRPRV

SEQ ID NO: 194602 - protein, 92 aa, Zea mays
  Clone ID: MRT4577_109063C.1.pep
FGVNSQQRRTPQKDDRRLTGFLPANELIWCCVQLATEQVEPIRYIDQTVGGQVSPIDQVHPPFYPLSIVFSQINYFVDMPHVNSPPYHLLYL

SEQ ID NO: 194603 - protein, 81 aa, Zea mays
  Clone ID: MRT4577_109064C.1.pep
FPFVMYIQAIFPVCFGFPNPQTPSSPSCLVRGLLMLKISRTCMHKVEQPNFSPVFSNLAHVLPDGGVSPTAIALKSAVFFS

SEQ ID NO: 194604 - protein, 87 aa, Zea mays
  unsure (1)..(87): unsure at all Xaa locations
  Clone ID: MRT4577_109065C.1.pep
LPLSSPRKHRFRLDAPTKAPXACSTGSEPNRSPANFPDPLPPSPSMKYDEILAPSHXLIKQSSILHAVIEPSATEIINLMHSLHECY

SEQ ID NO: 194605 - protein, 99 aa, Zea mays
  Clone ID: MRT4577_109066C.1.pep
LVDNGKRSYKEQGAHNGLKEKTFNWEGRTRWGWERKKQRKTETGASGKTAVGGAGTGKTGAAKAGAALVLKMLVLMLGLLKLKLEPGKEGLKAGRDKTA

SEQ ID NO: 194606 - protein, 79 aa, Zea mays
  Clone ID: MRT4577_109067C.1.pep
MPDLAKPATRTAKPAEAPKPKPAAAKPKANTAGANHPPYFEMNKEAITALKERTDSSPQAIAKYEGDKHGAYMAANSKK

SEQ ID NO: 194607 - protein, 66 aa, Zea mays
  Clone ID: MRT4577_109068C.1.pep
GFTAAEQLTRLVALWLLDRLDRTTLSSLSRALPSWKATRVAATTALAVRDSILSGLRVLSDPTIDV

SEQ ID NO: 194608 - protein, 86 aa, Zea mays
  Clone ID: MRT4577_109069C.1.pep
RGGGGGVFFFFFFFFLLRRMRKSYKTKRGRNSRGQAVQPYGDHCWAKGSKRGGGGGGNGGLRQSTIHALAPKKLNRGERGKERWIR

SEQ ID NO: 194609 - protein, 62 aa, Zea mays
  Clone ID: MRT4577_10906C.1.pep
LDLSMFIKDASIAGRGYRHRVYLPCRHALSLRRRSISSRPRRSCLVLAHRSTISVARQSPPF

SEQ ID NO: 194610 - protein, 100 aa, Zea mays
  unsure (1)..(100): unsure at all Xaa locations
  Clone ID: MRT4577_109070C.1.pep
SSSXTPISLIPILIIIETIRLFIXQPIALAVRLTANITAGHLLMHLIGGATLVLIDISPPTATITFIILLXLLTVLEFAVALIQAYVFTLLVSLYLHDST

SEQ ID NO: 194611 - protein, 57 aa, Zea mays
  Clone ID: MRT4577_109071C.1.pep
LLCAHNLDICKYPGARRSPIWLAQPICWVIHLVAITSASTPAVDMHWPIPFNRLTIT

SEQ ID NO: 194612 - protein, 94 aa, Zea mays
  Clone ID: MRT4577_109072C.1.pep
HESKKAKKPALVAKSSILLDVKPWDDETDMAKLEECVRSIQADGLVWGSSKLVPVGYGIKKLQIQCVVEDDKVGTDMLEEQITAFEDYVQSMDV

SEQ ID NO: 194613 - protein, 78 aa, Zea mays
  Clone ID: MRT4577_109073C.1.pep
MDQRFKGALRAGDKTGGSLCILPLGSIHFALAKISYYRIKGRQRPLESWPERTESGKKPPNEGHPGIVSGLGPPPPPG

SEQ ID NO: 194614 - protein, 63 aa, Zea mays
  Clone ID: MRT4577_109074C.1.pep
VHARPSQEERSLSSADRQDAWECVRQQELQRDPGTAKRLSCHINSVDYQLHHMSSRDVHVRQY

SEQ ID NO: 194615 - protein, 110 aa, Zea mays
  unsure (1)..(110): unsure at all Xaa locations
  Clone ID: MRT4577_109075C.1.pep
ASAGTSTTSAEGAASSTRCLAAERAATGRRSRLLVASQSTFSLDSYGARGDGRHDDTHALGRAWEAACFSPRPAVLLVXGGKRYLLKIVALSGPCKXSVTVTVEGTLVAS

SEQ ID NO: 194616 - protein, 77 aa, Zea mays
  Clone ID: MRT4577_109076C.1.pep
QHVLHSMATIRWESASPPPVGGYCSLPSWSLVRVTIFSFLRIVFCTLGAFVCDISLARRGLYRARLKVVADDTLRGV

SEQ ID NO: 194617 - protein, 49 aa, Zea mays
  Clone ID: MRT4577_109077C.1.pep
GRYLPLFGQKDKKRVRSPKKKKKEKKKKKKKKKKKKKKKKKKKKKKKKK

SEQ ID NO: 194618 - protein, 146 aa, Zea mays
  Clone ID: MRT4577_109078C.1.pep
MGEYHRPYRGDLRSPPSSVPDPAFTHANGYFSSSASPNSNNGYFSPVFAKNDAFPGTGAGAGGDRRIEIYTTAPPPHLPPPPGGGRKAGGGGGGASMWCLSDPEMKRRRRVASYKAYSVEGKVKASLRRGLRWFKGKCSEIFHHGW

SEQ ID NO: 194619 - protein, 62 aa, Zea mays
  Clone ID: MRT4577_109079C.1.pep
VSLQLNLGHLKLIKLVITNLPVFICFLPFFSHLVNFSKENITISQPSCFLAHHLSSLVVCQH

SEQ ID NO: 194620 - protein, 184 aa, Zea mays
  Clone ID: MRT4577_10907C.1.pep
MTPFRVSRGDAAVADQTLGESSLVDETEDINMSSDASEHTSINNNSVEDETGTEDVMQFFLTNERIPDQRMKIEMDLSITVNDPHKRLHVAVCWEDSGLDQYNFSSLNSLPEVYKAVLFSRRPQDTCSLYACLEAFIKEEPLGPEDMWYCPGCKEHRQASKKLDLWRLPEILIIHLKKFSYSRY

SEQ ID NO: 194621 - protein, 74 aa, Zea mays
  Clone ID: MRT4577_109080C.1.pep
RPNCLVYIFMVCRPEPRSNIQPPTYQSQLLRWDNITCVLSWTTLMLQHIPTCLSSFSNSCYLTARTWTQNLWSL

SEQ ID NO: 194622 - protein, 172 aa, Zea mays
  Clone ID: MRT4577_109081C.1.pep
MGEYHRPYRGDLRSPPSSVPDPAFTHANGYFSSSASPNSNNGYFSPVFAKNDAFPGTGAGAGGDRRIEIYTTAPPPHLPPPPGHTLALPPPPGWKEGRLGGGGGGGGAGGGRKAGGGGGGASMWCLSDPEMKRRRRVASYKAYSVEGKVKASLRRGLRWFKGKCSEIFHHGW

SEQ ID NO: 194623 - protein, 36 aa, Zea mays
  Clone ID: MRT4577_109082C.1.pep
STCKLQFRILSISISLKSSCNDRWLPVLSLKCSYSA

SEQ ID NO: 194624 - protein, 81 aa, Zea mays
  Clone ID: MRT4577_109083C.1.pep
QRAFLLTGLHVDTHIVHMRHDLVKACTEDYLRSIKISANTHTLHRDRDRMRGIKRHLRTGACQYPAVNAHTNTFRWQCGGP

SEQ ID NO: 194625 - protein, 48 aa, Zea mays
  unsure (1)..(48): unsure at all Xaa locations
  Clone ID: MRT4577_109084C.1.pep
ACFDTAEYVHQPLMDRSFRLELHQXXCSKSKVSXCGLSMYRTRWRRPR

SEQ ID NO: 194626 - protein, 107 aa, Zea mays
  Clone ID: MRT4577_109085C.1.pep
KGGVPLPPNFSKKRISHLHKADKICHTVDEAASWPSSSKHLQQDHPVGHPWRHQILIHTMRSAMARHRAPPRCGEPPRRGAPSRRVDPSRPNRLPLRWNAGYPARPP

SEQ ID NO: 194627 - protein, 381 aa, Zea mays
  Clone ID: MRT4577_109086C.1.pep
MPEAEWNDEHTRIVCELFEEQVRAGNRPNTHLNNIGYRQVAAKFQQRTELLYTKLQLKNKWDKFKNDYITWRKLLVVGKGLPWDTAKGTFVADEEWWKKINKELPGARKFRHGGLHHEDKLNVMFDYITSNGVDPSPPAPESPKNGVNHSPPAATGLPSAPDCTLNGVDHSPVTAHGLPSGPYSPMNGMDQLPLPAHDLRSVQEIPMNGVNLDGLDNNTEDNDDIYQEPVFQYTSNRKKRPISFSATKKNKKNKAETALLMQAHLYRITELAQKAQDTFKKFSSQADLVPWPSIQDVMTLVWGCGARCGSNEHFIATELFVSREQREMFLTMETAEERFQWLRRKYIVKYLSGAGPWVGIARCTADEGIRWGGIVFMQRAS

SEQ ID NO: 194628 - protein, 83 aa, Zea mays
  unsure (1)..(83): unsure at all Xaa locations
  Clone ID: MRT4577_109087C.1.pep
TRLATAAFNKAEDVIMEDMGRRAVLQGARVRKHTKGGRAMPHGKSLRIVTAADVLRWGESSRRNVICREXEVGCSSAFQRHMQ

SEQ ID NO: 194629 - protein, 47 aa, Zea mays
  unsure (1)..(47): unsure at all Xaa locations
  Clone ID: MRT4577_109088C.1.pep
QPEXVTAAQDALLLRAKANSLAQLGKYTSDGEAAEAKEGMFVKNYSY

SEQ ID NO: 194630 - protein, 67 aa, Zea mays
  Clone ID: MRT4577_109089C.1.pep
PGKLGGVLTTRFNKNRMKRVHVFVGHGRMGMHRKHPGGRGNAGGMHHQRILCDKHHSGYLGMDGMRV

SEQ ID NO: 194631 - protein, 83 aa, Zea mays
  Clone ID: MRT4577_10908C.1.pep
WGHCPPQHGFYTLGEYFWPGPFCFGGLLHLEFYIWPYASKMLKNCFLGQGHSNKVSFFKDINLSAVKSPQSLIVGMGFQKSHR

SEQ ID NO: 194632 - protein, 44 aa, Zea mays
  Clone ID: MRT4577_109090C.1.pep
RKGGGQKGKKKKKNWRVRRWVDQMCVGWCVVFFTLHHRLITAHH

SEQ ID NO: 194633 - protein, 73 aa, Zea mays
  Clone ID: MRT4577_109091C.1.pep
IASGRPLVFFWGMMEWFYILIIIITTIDATAELRSRTTTVLSYVWTNSCIDRSNSRVRVNKNTNLARNNRWLS

SEQ ID NO: 194634 - protein, 105 aa, Zea mays
  Clone ID: MRT4577_109092C.1.pep
QRRVLFFFFFFFFFYFFFFSFFSLFSVLVPCKGSQRSAATITWGRAPTGEIHTDADTQTREGACFDTDKPTTQWQQPYKHKHRRANDRCRHSHPAKRPTRQCPHL

SEQ ID NO: 194635 - protein, 799 aa, Zea mays
  Clone ID: MRT4577_109093C.1.pep
MHPFCCAPLVPVSPAASAAPAASSAVAGTQAVMPPPQPPPLPPPPPRNNSATGGERRARAAGVSGGGGGDSSPLEGVKLNEIVGGGISGIMYKWVNYGRGWRPRWFALHEGVLSFYKIHGPDRIILSRETERGAKVIGDDSLRRLNRPSTSSSSHSNGHHHPRNPIGEIHLKVSTVRESRSDDRRFSIFSGTKTLHLRAETREDRAAWLEALRATKDMFPRMSSSEMVGPGDTAAAVAVSTERLRQRLQQEGVSEAAIADSEMIVRAEFEALHKQLVLSKQKHALLLETLRQLETEKVDLENTLVDESQRQSKEYGSASKPRHEKYSEGSATRPDDYNEPQDPAEETDDDENLYFDTRDFLSSSSFKSSGSDFQRSEAGSDDEDDYPMDGIDPSMKSIGISYPYVRRRKKLPDPVEKEKGVSLWSMIKDNIGKDLTKVCLPVYFNEPLSSLQKCFEDLEYSYLIDRASEWGKRGNSLMRILSVAAFAVSGYASTDGRSCKPFNPLLGETYEADYPDKGLRFFSEKVSHHPMVVACHCEGTGWRFWADSNLKSKFWGRSIQLDPVGELTLEFDDGEVFQWSKVTTSIYNLILGKLYCDHYGTMRIQGNREYSCKLKFKEQSIIDRNPHQVQGVVQDRNGRTVATLFGKWDESMHYVMGDCFGKGKGTEQLSEAHLLWKRSKPPKFPTRYNLTQFAITLNELTPGLKEKLPPTDSRLRPDQRCLENGEYERANAEKLRLEQRQRQARKMQESGWKPRWFAKDKATDTYRYVGGYWESREKSSWEGCPDIFGQVPNDLMVTD

SEQ ID NO: 194636 - protein, 143 aa, Zea mays
  Clone ID: MRT4577_109094C.1.pep
EAGGEEFAIGVVLSAKTTLGEEFEGQIVAFDRPSNLLVIQEGVGRAESGERRNVRVLKANYIREFSVLSKGDDPLDPAGCMLDLNSIYAREDAALRKKLQERCCWKEAPFSEEWLRRSSTGILAGRRWIKDCATNVERDVCLF

SEQ ID NO: 194637 - protein, 112 aa, Zea mays
  Clone ID: MRT4577_109095C.1.pep
MICRQAEIEAEKIGVGVTPEAQSIFDALSKTLPVQWDKTDIVVMKEVRVPSPSLPENVNGGPPPANERVKKVVKTWRLTPMFNPLQSWPSKVTNNFWSPLCFWLGLSLPDCL

SEQ ID NO: 194638 - protein, 255 aa, Zea mays
  Clone ID: MRT4577_109096C.1.pep
MKTVSLGASRPSTVNFRMPTRDNLVPIRVDVEVDGQRYRDAFTWNPRDPDSEIISFAKRTAKDLKLPANFVPQMLQSIQGQLAEFRSYEGQEMQIKEKIVPLKIDLRVNNTVIRDQFLWDIGNLDSDPEEFARTLCDDLNITDPEVGPAIAVSIREQLYEIASQSVSVMREKQMSKKGRRAPEFSSNSKAVNNAVDLFKYFGSKGSVIRKRKEWYLYEPVVDVVANDEDGKEEANNSSRPKKRADEEKAASLQSL

SEQ ID NO: 194639 - protein, 182 aa, Zea mays
  Clone ID: MRT4577_109097C.1.pep
MEAGGEEFAIGVVISAKTTLGEEFEGQIVAFDRPSNLLVIQEGVGRAERGERRNVRVLKANYIREFSVVSKGDDPLDPASCMLDLNSIYAREDAALRQAEIEAERIGVGVTPEAQSIFDALSKTLPVQWDKTDIVVMKEVRVRSPYLPENVNGGTAAANERVKKVIDFERKRLHSRVPGQFS

SEQ ID NO: 194640 - protein, 141 aa, Zea mays
  unsure (1)..(141): unsure at all Xaa locations
  Clone ID: MRT4577_109098C.1.pep
GNLDSDPEXFARTLCDDLNITDPEVGPAIAVSIREQLYEIASQSVSVMREKQMSKKGRRAPEFSSNSKAVNNAVDLFKYFGSKGSVIRYMIISSKNLDALMITVVWYFGYDGTGREVPTNNVHSVWTNTLLAYCSLVSKPP

SEQ ID NO: 194641 - protein, 182 aa, Zea mays
  Clone ID: MRT4577_109099C.1.pep
MEAGGEEFAIGVVLSAKTTLGEEFEGQIVAFDRPSNLLVIQEGVGRAESGERRNVRVLKANYIREFSVLSKGDDPLDPAGCMLDLNSIYAREDAALRQAEIEAERIGVGVTPEAQNIFDALSKTLPVQWDKTDIVVMKEVRVRSPYLPENVSGGTAAANERVKKVIDFERKRLHSRAPGQFS

SEQ ID NO: 194642 - protein, 113 aa, Zea mays
  Clone ID: MRT4577_10909C.1.pep
GRSTKTREITRNKKQEAQAQQGAGQGTLKHNPMRNKRNERHGHRAGSGLTEHGESRRGGPKRKGPPGGVPIDHSQKHPMSGGARKPNGMHTQRRGAQTKKERVNRDENHGRGG

SEQ ID NO: 194643 - protein, 63 aa, Zea mays
  Clone ID: MRT4577_1090C.1.pep
ESDTDFVQDCIYEWKSLYYFGASDKYKSELGKMIFSNPEMLLVTTGSCQRHACTQVGWQIRQL

SEQ ID NO: 194644 - protein, 93 aa, Zea mays
  Clone ID: MRT4577_109100C.1.pep
NMGNLRPKIFHRLFGSCTKPGRVFPSKGNLFYKKIPLTLAILGGGPPFKLGINRSVKILRKEKPACVGGQNFSQAFFWRNFFVSRPFLKNLPD

SEQ ID NO: 194645 - protein, 90 aa, Zea mays
  Clone ID: MRT4577_109101C.1.pep
RTKATLSFFPWKGGGPQKPARGSKTPLVRSKVYVGVMFFLSYCKPVSVFTTNDLFLVRPPHPSRGCACPFELWSIGLLSPHNESPRRRAG

SEQ ID NO: 194646 - protein, 552 aa, Zea mays
  Clone ID: MRT4577_109102C.1.pep
SARVIKYMTDGMLLREFLGEPDLASYSVVMVDEAHERTLSTDILFGLVKDISRFRPDLKLLISSATLDAEKFSDYFDSAPIFKIPGRRYPVEIHYTKAPEADYIDAAIVTVLQIHVTQSPGDILVFLTGQEEIETVDEILKHRTRGLGTKISELIICPIYANLPTELQAKIFEPTPEGARKVVLATNIAETSLTIDGIKYVIDPGFCKIKSYNPRTGMESLLINPISKASANQRAGRSGRTGPGKCFRLYTSYNYMHDLEDNTVPEIQRTNLANVVLTLKSLGIHDLVNFDFMDPPPSEALLRALEQLFALSALNSRGELTKTGRRMAEFPLDPMLSKMIVASEKYKCSDEIISIASMLSIGNSIFYRPKDKQVHADNARLNFHTGNVGDHIALLNVYNSWKETDYSTQWCYENYIQVRSMKRARDIRDQLDGLMERVEIEICSNTSDLDAIKKAITSGFFHHSARLQRDGTYKTVKNPQTVHIHPSSGLAEVRPRWVVYHELVLTTKEFMRQVTELKPEWLVEIAPHYYQLKDVEDSGTKKLPKGQGRAAL

SEQ ID NO: 194647 - protein, 129 aa, Zea mays
  Clone ID: MRT4577_109103C.1.pep
SCNPLTKIKKKKKKKKKKKKKKKKKKKKKKKKKKKKKKKKKKKKEGKKKKKGGPQNPGFPPLKRCFPPPGGKRGPWGIPGENVSPGKILKPVKPAAKMEPPGLAKRRGSPKERGCPPWPVCHSETFFGR

SEQ ID NO: 194648 - protein, 62 aa, Zea mays
  Clone ID: MRT4577_109105C.1.pep
RLARVNQQACVSIGIIGWHSTAGKWARVEIISILGRELHVSGSFSSQDGVVLLRKGIKSGIL

SEQ ID NO: 194649 - protein, 73 aa, Zea mays
  Clone ID: MRT4577_109106C.1.pep
HFYVCTPDANLNKHCHLLTTTTTYLFLGKARPKTKVHEQLSPSLCFLIHQSRTHATDHPVVRPMHMEPVATQS

SEQ ID NO: 194650 - protein, 81 aa, Zea mays
  Clone ID: MRT4577_109107C.1.pep
NLAPPTLANCNCMITVLIRSDHLKHTCWLMCCVYRCRSHSVCISVGQTPKASTIKRPLVLSSSQCSMFITTKFSPISMPSQ

SEQ ID NO: 194651 - protein, 89 aa, Zea mays
  Clone ID: MRT4577_109108C.1.pep
THTTHAPNQVRRLLIYADRTPTPGGANNRNGTPPHNLTSFLTTSPVPFHTYLLPDAPHIRTLLLQTHQIHNMIHHDADKFLIPLPHLAP

SEQ ID NO: 194652 - protein, 102 aa, Zea mays
  Clone ID: MRT4577_109109C.1.pep
MAHHFLGNKHHGGEAAKVTDWRKEEKHHKHMEQLGQLGAVAAGAYAMHEKQKAKKDPEHAHSHKIKEGVAAAAAVGSAGFAFHEHHQKKDAKKHRHHGHHHH

SEQ ID NO: 194653 - protein, 95 aa, Zea mays
  Clone ID: MRT4577_10910C.1.pep
MAFAVSFFSAFSLMDVGEGYSVARTVCNIFLDALGCRGRCDDTPCGFSEPGHRHAVPRRLIETRWLPWRHGNGIPSSALASWRDLGAGELGGAHA

SEQ ID NO: 194654 - protein, 57 aa, Zea mays
  Clone ID: MRT4577_109110C.1.pep
NGGFYVRFLGMTLLQKRSVLFTTMSLHNFIRQHNIKDYEFDNIDISNDVQAQHDRAK

SEQ ID NO: 194655 - protein, 38 aa, Zea mays
  Clone ID: MRT4577_109111C.1.pep
HRIDRGTGIDSRPAGEGPNGAIRLSRVSIRNAIGFGGS

SEQ ID NO: 194656 - protein, 90 aa, Zea mays
  unsure (1)..(90): unsure at all Xaa locations
  Clone ID: MRT4577_109112C.1.pep
STSLAPCLTARAAGSDDXGCPAPPRTGRTPRPSPRTTCRRMPACINSRPLLEESRPTNHAPPPVYLVRDLCGLCAQPGPTDSTTHPATHS

SEQ ID NO: 194657 - protein, 55 aa, Zea mays
  Clone ID: MRT4577_109113C.1.pep
FLMGLKCRKLYRLSKENVSDLHLLLKEASISIQLLGCSTNQHHWNVRSSHRSAQH

SEQ ID NO: 194658 - protein, 53 aa, Zea mays
  Clone ID: MRT4577_109114C.1.pep
VYPPLPRVLYTSIGRVTIFLKSVPSVFNPLGSGVLSVQPPRQSSICFYPIYLG

SEQ ID NO: 194659 - protein, 89 aa, Zea mays
  unsure (1)..(89): unsure at all Xaa locations
  Clone ID: MRT4577_109115C.1.pep
SFYSNERNETAALDVVYPCFFLVLSWATDDQFLHNTLTTYGXHFMSIIMLXRQTQKYHDLFINTFFTKEAIHNTIVTINGMWLDSRNIT

SEQ ID NO: 194660 - protein, 60 aa, Zea mays
  Clone ID: MRT4577_109116C.1.pep
NFHMNQGSGLQEAYGGYYSHQARHNGGFMNPAWGSGRRGSPGYDPAHGKLARVLWVVPPV

SEQ ID NO: 194661 - protein, 603 aa, Zea mays
  Clone ID: MRT4577_109117C.1.pep
MAGKLDLLAAEVRKTDVVGNSNIVQNETEKKEHACSSLADVPKLVPAASPVGVANGNNEMKESNGSSSESNSHVKSEGVNSQQSEQSAKQSSKKSSDGVCGKEDHVLSDEEGSSLAAHTKSNATAKLDFDLNEGIPGDDGHQSETTASPVVCSSAIHLTGLLPFTSPTTSGLPPAPITVAAPAKGPFVPPENLLRAKPEIGWKGSAATSAFRPAEPRKILEMPAATRDIPVSHAAGKQSRPTLGFDLNVADDQALEEDIPQSSAQTTCSESGNTRSRDGSSRSAGIELDLNRADEVADNGQFVPSASHRVEVPLLSTRSLHGVFSNAGMNSSRDFDLNSGPGLDDVGTEPAPKSLPSKNTSSIQFLPQVPVRMNSAAMSNISPWLASASPCGPVAIQSFLPTREQPYPIEAAPGAQRIIAPTADAGQFGGDPCRPPVVSTSPAMVFHPPAYQYPGFPFPPSVHLQTPAFSIGSATFNNSASAGVPYFPTVSPSFVGPAGALTPQHLRQYAINLAEGSSSSVRDGNRKWESQGLDLNSGPGSIDLEGKDERMPLPVRQNLIPPLHGFVEDQGRIYQMPVVGTKRKEPDGSWDSERSTYKQLPWQ

SEQ ID NO: 194662 - protein, 93 aa, Zea mays
  unsure (1)..(93): unsure at all Xaa locations
  Clone ID: MRT4577_109118C.1.pep
VNISILNSHHGKTRGMGVGRKLKSHRRNQRWADKAYKKXHLGNEWKKPFAGSSHAKGIILEKIGIEAKQPNSAIRKCXXRVQLVKDGKKIAAF

SEQ ID NO: 194663 - protein, 847 aa, Zea mays
  Clone ID: MRT4577_109119C.1.pep
MNEKGVSETKVGTSFSPMNALIEIKYSEASHSLQAGDDTAMNLLASVAGEISKSELASSPSTSVKKLVCEGVNTGKVKVESDMGPSHPGQADAKKVAMGNEVKNDACLVPKEEQHQTAPSPELADSKAVKSSAKIEIHEGHANKCNSQHASIDSKGENRDGCTAHGKVEDGSTNKDGAMESAFGSQRSLVVSSKNSRLVLAGESSLSAADKQTQGLLKSTNHKHLLSVSDNPGAFDRHDSLAGKLDLMAAEVKKADVVGNSSVLQNDTEKKEHVSPSSADVPKLVPAASPVGVANGNNEMKESNGSSSESNSHVKSEGVNSQQSEQSAKQSSKKSSDGVSGKEDEKEDHVLSDEGSSLAAHTKSNATAKLDFDLNEGIPGDDGHQSEPTISPVVCSSAIHLTGILPFTSPITTGLQPASITVAAPAKGPFVPPENLLRAKPEIGWKGSAATSAFRPAEPRKILEMPAAARDIPVSHAAGKQSRPTLGFDLNVADDQALEEDIPQSSAQTTCSESGNTRSRDGSSRSAGIELDLNRADEVADNGQFVPNASHRVEVPLFSTRSLHRVLSNAGANSSRDFDLNSGPDLYDVGTEPAPRSLPSKNTSSIQFLPQVPVRMNSDAMSNNISPWLVSTSPCGPVAIQSFLPSREQPYPLEAAPGAQRIIAPTADGGQFGGDPCRPPVISTSPAMVFHPPAYQYAGFSFPPSVHLQTPAFSIGSATFNNSASAGVPYFPTLSSSLVGPAGALPSQHSRQYAVNLAEGSSSSVRDGNRKWESQGLDLNSGPGSIDLEGKDERMPLPVRQNLIPPLHGFVEDQGRIYQMPVVGTKRKEPDGSWDSERSTYKQLPWQ

SEQ ID NO: 194664 - protein, 82 aa, Zea mays
  Clone ID: MRT4577_10911C.1.pep
SDLRCAPRRASSNSTNHAARADAAAPCWPPSAQCCTIGRDPGTELRYAMKLGCCHLANNNVARRLWVLAAHAAVRALYIARR

SEQ ID NO: 194665 - protein, 92 aa, Zea mays
  unsure (1)..(92): unsure at all Xaa locations
  Clone ID: MRT4577_109120C.1.pep
MASGELACTYAALILSDDGIAIXTAQKIATTVKAANIKAKSNWPAFLAKFLKNPNVKDLILSVEPGAEPVQVVVAEPAGGAPVVVAPVCKGK

SEQ ID NO: 194666 - protein, 98 aa, Zea mays
  Clone ID: MRT4577_109121C.1.pep
MLSTPPCAFSYTYPATLSFFFFPSSPIPNLMLSLSSEMNVVFFSSMYSTGHLSPYSYTLINTCPEHFVVNVLYCSICHTDIHQSINHLVASKYPIFPF

SEQ ID NO: 194667 - protein, 187 aa, Zea mays
  unsure (1)..(187): unsure at all Xaa locations
  Clone ID: MRT4577_109122C.1.pep
MGIDLVAGGRNKRTKRTAPKSDDVYLKLLVKLYRFLVRRTKSQFNAVILKRLFMSKTNRPPLSLCRLVKFMDGKDNQIAVVVGTITDDKRVYEVPAIKVAALRFTETARARIVNAGGECLTFDQLALRAPLGQNTVLLRGPKNAREAVRHFXKAPGVPRSHTKPYVRSKGRKFERARGRRNSRGFKV

SEQ ID NO: 194668 - protein, 89 aa, Zea mays
  Clone ID: MRT4577_109123C.1.pep
LDKRLHLTSGNRLWVKYSTLLRRTGLLKRISRTMARIFEGVDRIKGSSGSRTFMRLAYRAGTGCCLTHAQNPVCQPQTLGTPLLVQFRY

SEQ ID NO: 194669 - protein, 62 aa, Zea mays
  unsure (1)..(62): unsure at all Xaa locations
  Clone ID: MRT4577_109124C.1.pep
MAASIANLNSVAVLKKLEELVMNRRYMTGYQAVNDDLAVYTXFDXVPSSNNINEGRWFNDID

SEQ ID NO: 194670 - protein, 93 aa, Zea mays
  Clone ID: MRT4577_109125C.1.pep
AGATTVRIRTPATPRSSFYEPWLSCFWLPAPTPPIHAAGEDATHRRLLIYAPPVNMPHRASTAIWGQFHHAVQLSAPDDVPPAGHVRATVIIT

SEQ ID NO: 194671 - protein, 127 aa, Zea mays
  unsure (1)..(127): unsure at all Xaa locations
  Clone ID: MRT4577_109126C.1.pep
LLTFKKGKKKGKKPPPPPRKKHPPKPKPRRQHPXPTRRSPPRKTRTNXPTPPTQRRGESPPPDPKNMASPXPFPAGPQSKQHAPKKRDGTXTKRAGPPPPLKGAPDKNPSRFLHGRPNQRKKRTLNQ

SEQ ID NO: 194672 - protein, 81 aa, Zea mays
  Clone ID: MRT4577_109127C.1.pep
MCVNCASINILSIKIACSDIDFPIQVYGTIVARDCIDYKCVYLFHRDNDHCQLNSSNCCLFVDSGGPNRHSVVDAGTGTTT

SEQ ID NO: 194673 - protein, 84 aa, Zea mays
  Clone ID: MRT4577_109128C.1.pep
PGRPSVRAYACSNMVEQVLPSGGLLIYQSFTATGAATPGSPRSVLHDFAGDIVKPGDSGEADGPCWEADAVDESEEREVKKMKC

SEQ ID NO: 194674 - protein, 235 aa, Zea mays
  Clone ID: MRT4577_109129C.1.pep
MVNFRPSVNLVREALAAGQAKFTLTVIPPPSRNQEYSRNYLELELDFLKDQHAYEEDFPSVLNVSILEPESSKQAPEPVEQSLLSELSCRQAENRLRIASEACYDGESFHWASSSFHINDAARHKSGLKSIGKHKAASESGRPPKSKVQKITELHQEGPIAMSNFLCMPAQLLPSTADFHISDSLSDFGINDYEFNYSEDLLQEFDALEFFPDQGDSGLLGIEELEPLSDFTDIG

SEQ ID NO: 194675 - protein, 70 aa, Zea mays
  Clone ID: MRT4577_10912C.1.pep
KVGKWFEFRWQCKGDRRGMDGGVSLDVLERWALFFVGGVFFFFFFNTVFFFFFFFFYFIPRVRGCVGGRV

SEQ ID NO: 194676 - protein, 54 aa, Zea mays
  Clone ID: MRT4577_109130C.1.pep
RDWHFSFSFSPSPKWDPNLRTLPEVRFALPILATLRQLCFENKLFGFLFVHMLD

SEQ ID NO: 194677 - protein, 163 aa, Zea mays
  unsure (1)..(163): unsure at all Xaa locations
  Clone ID: MRT4577_109131C.1.pep
NLPWAWGGGPPGTLMEASEPAYPFDGGLTLPSTPPWPKLIMFCTRTDLDSVLWGKIGPCLQTFIVRQLASCTTDPRTTETKRRDLLRRVTPFHISFCADLKPLLNLVDACSVLDLFKKPDCGQVPSASIACCNTDXSVVCCDIRPVRYTGPPSCIFQRLTGTL

SEQ ID NO: 194678 - protein, 100 aa, Zea mays
  unsure (1)..(100): unsure at all Xaa locations
  Clone ID: MRT4577_109132C.1.pep
VHDGGYTARTVNDVNPHEFXGAYSDHLKRSSKMELPEWVDIVKTARLMELPPYDPDWYYIRAASVARKIYLRQGIGVGGLQKIYGGRQRNGYRPPHFCKS

SEQ ID NO: 194679 - protein, 49 aa, Zea mays
  Clone ID: MRT4577_109133C.1.pep
KARSAVSPGKWAHSGYMTSSNCQKGVKCGEDLSVFENWEDEKGSSHGLL

SEQ ID NO: 194680 - protein, 52 aa, Zea mays
  Clone ID: MRT4577_109134C.1.pep
FARVTPGGRELLFLGDRARVKLKKPLPKKLLYNFFGKQRLFKAKPKRPPTKG

SEQ ID NO: 194681 - protein, 144 aa, Zea mays
  unsure (1)..(144): unsure at all Xaa locations
  Clone ID: MRT4577_109135C.1.pep
NDSKVDLDRVHMSRLWDQPLTKVDAGQLPHNLHRRRKRHYAAHFYHLLAEPLDIADYHHRRPSIETXGSYMTHGREKRNDLLYRWQEPEGMYERWLLHLFLHVGSVDEDTDIQDIRPNHSRAGFLGMSASSEEGRQERSAYHDK

SEQ ID NO: 194682 - protein, 57 aa, Zea mays
  Clone ID: MRT4577_109136C.1.pep
CLMACRALSSSPAPGPGALYGEHGVERVQHSSMLVMCPGVLCHHPSIIILSIPHLLL

SEQ ID NO: 194683 - protein, 86 aa, Zea mays
  Clone ID: MRT4577_109137C.1.pep
NQGLAIYGVGGALLTLTCTYLGLHDVKRLAHQQLLSCRHTFSCCCPHYYGSSRLICWETRTDSNRSCILDGLSFTHVMGRRFIPSH

SEQ ID NO: 194684 - protein, 96 aa, Zea mays
  unsure (1)..(96): unsure at all Xaa locations
  Clone ID: MRT4577_109138C.1.pep
PPSVRRALPSSGRRFSVGAGLLRWAPWCAPPPRXGGGVSSVWGSPAGRGLSAAGRACGLGAAPRLFCPGVGSPASGAWRPPLPRLWAVLKRFGRWV

SEQ ID NO: 194685 - protein, 58 aa, Zea mays
  Clone ID: MRT4577_109139C.1.pep
AGVTAHYYEDETAPTGTCAVCVVGGERSLIANLSAANCYKSEHLKRPGCTYPEKPEFN

SEQ ID NO: 194686 - protein, 215 aa, Zea mays
  Clone ID: MRT4577_10913C.1.pep
MAFHDEAPLLLRINTARGGHMGGGECDEAENQRWPPWLKPLLATSFFGQCKMHADAHKCECNMYCLDCVNGALCSQCLAYHHGHHAIQIRRSSYHDVIRVSEIQKVLDITGVQTYIINSARVVFLNERPQPRPGKGVTNTCDVCERSLLDTFRFCSLGCKIVGTSGEFRGRKRHAGGKKMKLKLKKAAASDSDDSSTITSGGSDKSSKLLRSSPS

SEQ ID NO: 194687 - protein, 43 aa, Zea mays
  Clone ID: MRT4577_109140C.1.pep
STCPPTWCQEAGMTPIPHSCRKASTDGGTQLAWPQCGAQRYEA

SEQ ID NO: 194688 - protein, 97 aa, Zea mays
  Clone ID: MRT4577_109141C.1.pep
PAAHVTRTFIRTPFSFFLNLKHLRGVPKGGNIYRLDYCVTSHKNPKSSKEETDILNITINNYQPARLKLSTINHPKESPFLREHYKQAFVTNSTKNS

SEQ ID NO: 194689 - protein, 170 aa, Zea mays
  Clone ID: MRT4577_109143C.1.pep
LQRTRARALALSSTQASDLSHLRRRFICEFFRDAQEKVLPYADYIFGNETEAKIFAKVRGWETENIEEIALKISQLPLASGKQKRIAVITQGADPVVVAEDGKVKTFPVILLPKEKLVDTNGAGDAFVGGFLSQLVLGKGIEDCVRAGCYAANVIIQRPGCTYPEKPDFN

SEQ ID NO: 194690 - protein, 101 aa, Zea mays
  unsure (1)..(101): unsure at all Xaa locations
  Clone ID: MRT4577_109146C.1.pep
GPEAQSKAQEDTRTGATGDAGGKGGARGHTAQQEAEQTDQKGNKGRRRRARRQXXEGGKEEREEEGVKFDXXEXDDFLRRLASRYXKCVFPPXLGDXPIRP

SEQ ID NO: 194691 - protein, 59 aa, Zea mays
  Clone ID: MRT4577_109148C.1.pep
VGSGEQPPAMRRCRRRGATADVAVTGGRIRMIHHPASNDPSSTSPTVYVLDFLFLFLRK

SEQ ID NO: 194692 - protein, 406 aa, Zea mays
  unsure (1)..(406): unsure at all Xaa locations
  Clone ID: MRT4577_109149C.1.pep
MHDLVVSSNFLEQEGVSSSACSALFYFTPSALELEPSPSPQTQASDLSHLRRRFVRVEGRREEMAATEGVLLGMGNPLLDISAVVDDAFLTKYDIKLNNAILAEEKHLPMYDELASKSNVEYIAGGATQNSIRVAQWMLQTPGATSYMGCIGKDKFGEEMKKNAQAAGVTAHYYEDETAPTGTCAVCVVGGERSLIANLSAANCYKSEHLKRPENWALVEKAKYIYIAGFFLTVSPDSIQLVAEHAAANNKVFLXMNLSAPFICEFFRDAQEKVLPYADYIFGNETEAKIFAKVRGWETENIEEIALKISQLPLASGKQKRIAVITQGADPVVVAEDGKVKTFPVILLPKEKLVDTNGAGDAFVGGFLSQLVLGKGIEDCVRAGCYAANVIIQRPGCTYPEKPDFN

SEQ ID NO: 194693 - protein, 48 aa, Zea mays
  Clone ID: MRT4577_10914C.1.pep
VFGISVPLHIASPDGWSQHRTVGFSGPSLWIGSVFLVAILNSQLFLVC

SEQ ID NO: 194694 - protein, 59 aa, Zea mays
  Clone ID: MRT4577_109150C.1.pep
SLKIFKLPKRVLIDALIKKPHYGFDIKRFGIQKKNSFPNRGGVPLSEGVVVKNGPLKTF

SEQ ID NO: 194695 - protein, 51 aa, Zea mays
  Clone ID: MRT4577_109151C.1.pep
APRPAGVIGWGTGNNSFVVADPFVFLQRLLPAPFKHNNFSSFVRQLNPYVS

SEQ ID NO: 194696 - protein, 133 aa, Zea mays
  Clone ID: MRT4577_109152C.1.pep
MASIAGFLALSFARPGKEIKKNFLVFSPLRKGKIFLPLEPMAMKFVSWAAKKDTKKKVWEIGKKKFVFPDQTEVWGESKFFELGENSLDTVEIGMSPKEHFKFSGEESRGKKIPKVENPRDLIEKFVVGKGKF

SEQ ID NO: 194697 - protein, 77 aa, Zea mays
  Clone ID: MRT4577_109153C.1.pep
RPCPAGPDRRPRLIRWNSAPHIKTLPATILHFNDLSPSDPNQPGNQTFYDGRTRLTTACVRQGIHTVFPQRDRLAPG

SEQ ID NO: 194698 - protein, 101 aa, Zea mays
  Clone ID: MRT4577_109154C.1.pep
GICAMGRWSLHCWWWGVCSHSRWARTRGGGLGSCGRSAQVGRSGPQLDCSQSSSEKRSSRFLTVLENLVDYQCIGLHILDLSVLQEFSGSMQGSKYRSRSL

SEQ ID NO: 194699 - protein, 105 aa, Zea mays
  unsure (1)..(105): unsure at all Xaa locations
  Clone ID: MRT4577_109155C.1.pep
QVSKMDESIDEIQQDFQESMKELAALRGTLKTVIEDRDLSWQEVKXLRRNISIMXNEVVSLKKKIEALDKDILVKEGEITILQDSIDKPFNIICSPSLMQEFGMA

SEQ ID NO: 194700 - protein, 106 aa, Zea mays
  unsure (1)..(106): unsure at all Xaa locations
  Clone ID: MRT4577_109156C.1.pep
FHSLHKDESIDEIHRDFQESTKELAALRGILKTVIEDRDLSWQEVKXLRRNISIMQNEVVSLKKKIEALNEDILVKEGQITILQDSIDKPFNIICSPSSMQEFDMA

SEQ ID NO: 194701 - protein, 105 aa, Zea mays; identical to SEQ ID NO: 194699
  unsure (1)..(105): unsure at all Xaa locations
  Clone ID: MRT4577_109157C.1.pep

SEQ ID NO: 194702 - protein, 89 aa, Zea mays
  unsure (1)..(89): unsure at all Xaa locations
  Clone ID: MRT4577_109158C.1.pep
PSVRKELAALRGTLKTVMEDRDLXWQEVKXLRRNMSIMQNEVVSLKKKIEALDEDILVKEGQITILQDSIDKPFNIICSPSSMQEFDMA

SEQ ID NO: 194703 - protein, 118 aa, Zea mays
  unsure (1)..(118): unsure at all Xaa locations
  Clone ID: MRT4577_109159C.1.pep
MEGKEEDVRLSAXKFSERQAIRTGAXVTYDKNYNEPPPAHVCELGKLEYWDFNRGDITXVFGTFLFLXICILTVMTISDTSCKRTTICNHGMVRSFRNMILAIVYCNNLLSCQDIHTA

SEQ ID NO: 194704 - protein, 140 aa, Zea mays
  unsure (1)..(140): unsure at all Xaa locations
  Clone ID: MRT4577_10915C.1.pep
MEMFVKMRTXQLIALNAQTSNTFDHXRARSTNKDGMTPHQQRFFFPGKXIEDGCTLADYNISKEPFLFLYVSILSGMRXRKTKTFASLFPHTRMDWKLKVLVLEFYKKKTTXKVNLLRKESLNTDCGAGVFMXQHFDRHY

SEQ ID NO: 194705 - protein, 104 aa, Zea mays
  unsure (1)..(104): unsure at all Xaa locations
  Clone ID: MRT4577_109160C.1.pep
QVSKMDESIDEIQXGFXESTKELAALRGTLKTVIEDRDLSWQEVKXLRRNISIMXNEVVSLKKIEALDKDILVKEGEITILQDNIDKPFNIICSPSSMQEFGMG

SEQ ID NO: 194706 - protein, 85 aa, Zea mays
  Clone ID: MRT4577_109161C.1.pep
DASPVPGCGGKAPHLFLSRWLHQPGMRPTAACWGAPSPCVVYPSTPGSPRSSGSRLGRARWPPPPSPRSTWSLIGSSQVWLARQL

SEQ ID NO: 194707 - protein, 79 aa, Zea mays
  Clone ID: MRT4577_109162C.1.pep
MQIFVKTLAGKSITLEVESSDTVENVKAKIQDKEGIPPDQQRLIFAGKQLDDGRILADYNIQKESTLHLVLRLRGGGGQ

SEQ ID NO: 194708 - protein, 109 aa, Zea mays
  Clone ID: MRT4577_109163C.1.pep
PAPQQPRFGDRPTDHAATLATPESDSACTTPARLSGTVPSLHQAARCTSERPTSASAERRTRTRGARPREAEQTHRHQNRPDARADPRTPDRCAQAHQLCARRLHQSRR

SEQ ID NO: 194709 - protein, 129 aa, Zea mays
  unsure (1)..(129): unsure at all Xaa locations
  Clone ID: MRT4577_109164C.1.pep
FLSSYVHTLFPNSHLSSSPPSSRDHALGCLKGGKLLRKDGAXRHRMALRNNIHGITKHRDLRLKTRIAMKRISGLIYDETRGVLXIFLXENAIRDDVTYTKHARRNTVTAMDADYALKREVRTLYGFGV

SEQ ID NO: 194710 - protein, 77 aa, Zea mays
  Clone ID: MRT4577_109165C.1.pep
LRAPSVAGNTRRRRPHCSPGRPLNGEWSYYAEVAEAGRSYRGRISPGVRNGASGLPKQIGACHIYRCDSGGYASWVG

SEQ ID NO: 194711 - protein, 64 aa, Zea mays
  Clone ID: MRT4577_109166C.1.pep
CGKAVDPYLADYYQNLLMTSPYFIAGIFHKRFVLLFHWRSTKMHRYLPCSICQDTNVQHKQQFR

SEQ ID NO: 194712 - protein, 61 aa, Zea mays
  unsure (1)..(61): unsure at all Xaa locations
  Clone ID: MRT4577_109167C.1.pep
KKNKDKKSPSKGRAKRTDKQQKKKEKKKXKKAKGKERREKKKRKRGKKTGKRKKKNYRGPP

SEQ ID NO: 194713 - protein, 266 aa, Zea mays
  Clone ID: MRT4577_109168C.1.pep
MGSGEEDTGGGGGAVRGAVLKALVVVGGVLLLRRLRRSTTRWDHARAVADALSGEKFSREQARKDPDNFFNLRMLTCPATEMVDGSRVLYFEQAFWRSPEKPFRQRFYMVKPCPKEMKCDVELSSYAIRDAEEYKNFCDRQKDQRPQAEEVIADIAEHLTTIHLSRCGRGKRCLYEGSTPPEGFPNNWSGASYCTSDLSIHKNGEVHIWDKGFDDEGNQVWGTKAGPYEFKPAPKSKYDDMFSPLNFSAPLSLEKKLDKAYVIDDQ

SEQ ID NO: 194714 - protein, 54 aa, Zea mays
  Clone ID: MRT4577_109169C.1.pep
RGAAPSGWFWFFQTTKFPRGKKNLRRGFPCLPPLEKVFFFKTDALFFKSFVILF

SEQ ID NO: 194715 - protein, 84 aa, Zea mays
  Clone ID: MRT4577_10916C.1.pep
VKAVVQRLDLGGEDGKHPFPLVMVGKVLEANKKWDIGKKVIDCVTKNYPGAYPIHPKVEPAVGAALLAWNAIASELDGDIRTVQ

SEQ ID NO: 194716 - protein, 59 aa, Zea mays
  Clone ID: MRT4577_109170C.1.pep
VNFAQIWKSVDSCDQQTAVKSCLQSEHSRPKQDEMGAEGGRPERGRTAPSAGGGCLVPN

SEQ ID NO: 194717 - protein, 53 aa, Zea mays
  Clone ID: MRT4577_109171C.1.pep
KLAFRQTNRKRTSEKLQSSAAFQTVTGHTAALIGHRAALNMIDKMMYLMHECP

SEQ ID NO: 194718 - protein, 203 aa, Zea mays
  unsure (1)..(203): unsure at all Xaa locations
  Clone ID: MRT4577_109172C.1.pep
MEIRTMCLSSTXAFAGKGVNETSCVXLREVSVTNAKTGDXGKTGTATSSRWHGPHRGLYLIPLSGEASTYMSAEIPXDYGXHTELVAMYFHRLTNKRKLXIXIHSRWALLIVLXCXIFTKLLVRNEVXFGEAVWFKAGSQIFSEGGLDYLGNPSLIHAHRILAIXTXQVPLMGAVXGYRISGGPLCEVVHPLYPGDXFDQLGL

SEQ ID NO: 194719 - protein, 97 aa, Zea mays
  Clone ID: MRT4577_109173C.1.pep
GLAWATNNESLENAFAYYGEILYSKVITDRETGRPRGFGLVTFSSENSMLDAIENMNYPELHGHNIPVDHGQPGGSGGGGGGGDYGGCRGGGDYGGG

SEQ ID NO: 194720 - protein, 71 aa, Zea mays
  Clone ID: MRT4577_109174C.1.pep
KQGLQVLELTTDGVNSNGFYSLNGSSFYICSMILATLNCVVWKKLSVKQPLLTFNTSYDFFCYSRYDSLTC

SEQ ID NO: 194721 - protein, 140 aa, Zea mays
  unsure (1)..(140): unsure at all Xaa locations
  Clone ID: MRT4577_109175C.1.pep
ITQGGVHNNAMIFLFLLVLFCXGHGENXSQRASMRKLSGPGGSFDITKLGAFGNGKTHSTKAVQEAWASVCGGTGKQTILIPKGDFLVGQLNFTGPCXGDVTIQVDGILLATTDLIQYKEHGNWIEILRGVNLVITSKGN

SEQ ID NO: 194722 - protein, 90 aa, Zea mays
  Clone ID: MRT4577_109176C.1.pep
LVSHEMITLPGNDSKPNLMHSHNAAFGERKKLGPESTHLHPNQSMNDGVFFRSRSHGRRSSAMAAQTISHHKSLLLKESMVLITPARRMY

SEQ ID NO: 194723 - protein, 194 aa, Zea mays
  Clone ID: MRT4577_109177C.1.pep
MKFASGQEAVEALFHKDKGDGKWKEGTLEASTQRNTKKDGQNERTNQILKDMLRVCALQDKLGWDKRLPYAKFSYNNNYQPSLKMSLLQALYGRSYKTPLHWDQPGEKQVFRPNILLEAEEHVKMVQDNLKIVQLRQRSYVDTRRRELSFEVRDYVYLKVAPIRGVRRFRVKGKLAPRYVGPYQILAKRGEVAY

SEQ ID NO: 194724 - protein, 139 aa, Zea mays
  unsure (1)..(139): unsure at all Xaa locations
  Clone ID: MRT4577_109178C.1.pep
MACSDNAKRALILLVLFCIVHGEKEESKGIDAKAYVPGGYFDITKLGAFGNGMTDSTKAVQEAWASAFGGTGKQTILIPKGDYHVRQLNFTGPRKGDVTIQVDGNLLATTDLSQYKEHGHWIEILRVDNLXITGKGNLD

SEQ ID NO: 194725 - protein, 79 aa, Zea mays
  Clone ID: MRT4577_109179C.1.pep
TDQTFTQHCNFEKHLLHLYIDSSMDTYIPQPAKSATFMPTEDLTHGLIESYITSNTHTYGHFITHSRIELSRMRPRHKP

SEQ ID NO: 194726 - protein, 106 aa, Zea mays
  Clone ID: MRT4577_10917C.1.pep
RRRSSSTTIAASSPSPPLPRPGPRSVVSSINSQKPESWPYICDQSYPLPSGMTPSATTRMTHLEIASRSTTTLSRNRTWTSPRPRGRRLLPPATTGCRRQARSDSL

SEQ ID NO: 194727 - protein, 118 aa, Zea mays
  unsure (1)..(118): unsure at all Xaa locations
  Clone ID: MRT4577_109180C.1.pep
MACTNNAMRALFLLDLLGIEHGEKEESKGIHAKAFGPGGSFYITKLGASGNGKTDSTKAVQEAWAYSCGGTGKQTILIPKGDFLVGQLIFTGPCKGDVTIQLDCNLDATTXLTQSMDH

SEQ ID NO: 194728 - protein, 410 aa, Zea mays
  Clone ID: MRT4577_109181C.1.pep
MACTNNAMRALFLLVLFCIVHGEKEESKGIDAKASGPGGSFDITKLGASGNGKTDSTKAVQEAWASACGGTGKQTILIPKGDFLVGQLNFTGPCKGDVTIQVDGNLLATTDLSQYKDHGNWIEILRVDNLVITGKGNLDGQGPAVWSKNSCTKKYDCKILPNSLVMDFVNNGEVSGVTLLNSKFFHMNMYRCKDMLIKDVTVTAPGDSPNTDGIHMGDSSGITITNTVIGVGDDCISIGPGTSKVNITGVTCGPGHGISIGSLGRYKDEKDVTDINVKDCTLKKTMFGVRIKAYEDAASVLTVSKIHYENIKMEDSANPIFIDMKYCPNKLCTANGASKVTVKDITFKNITGTSSTPEAISLLCTAKVPCTGVTMDDVNVEYSGTNNKTMAICTNAKGSTKGCLKELACF

SEQ ID NO: 194729 - protein, 383 aa, Zea mays
  unsure (1)..(383): unsure at all Xaa locations
  Clone ID: MRT4577_109182C.1.pep
ALFLLVLFCIVHGEKEESKGIDAKASGPGGSFDITKLGASGNGKTDSTKAVQEAWASACGGTGKQTILIPKGDFLVGQLNFTGPCKGDXDHGNWIEILRVDNLVITGKGNLDGQGPAVWSKNSCTKKYDCKILPNSLVMDFVNNGEVSGVTLLNSKFFHMNMYRCKDMLIKDVTVTAPGDSPNTDGIHMGDSSGITITNTVIGVGDDCISIGPGTSKVNITGVTCGPGHGISIGSLGRYKDEKDVTDINVKDCTLKKTMFGVRIKAYEDAASVLTVSKIHYENIKMEDSANPIFIDMKYCPNKLCTANGASKVTVKDVTFKNITGTSSTPEAVSLLCTAKVPCTGVTMDDVNVEYSGTNNKTMAICTNAKGSTKGCLKELACF

SEQ ID NO: 194730 - protein, 410 aa, Zea mays
  unsure (1)..(410): unsure at all Xaa locations
  Clone ID: MRT4577_109183C.1.pep
MACTDNAMRALFLLVLFCIVHGEKEESKGIDAKASGPGGSFDITKLGASGNGKTDSTKAVQEAWASACGGTGKQTILIXKGDFLVGQLNFTGPCKGDVTIQVDGNLLATTDLSQYKEHGNWIEILRVDNLVITGKGNLDGQGPAVWSKNSCTKKYDCKILPNSLVMDFVNNGEVSGVTLLNSKFFHMNMYQCKNMLIKDVTVTAPGDSPNTDGIHMGDSSGITITNTVIGVGDDCISIGPGTSKVNITGVTCGPGHGISIGSLGRYKDEKDVTDINVKDCTLKKTMFGVRIKAYEDAASVLTVSKIHYENIKMEDSANPIFIDMKYCPNKLCTANGASKVTVKDVTFKNITGTSSTPEAISLLCTAKVPCTGVTMDDVNVEYSGTNNKTMAICTNAKGSTKGCLKELACF

SEQ ID NO: 194731 - protein, 58 aa, Zea mays
  Clone ID: MRT4577_109184C.1.pep
YRTAIRSHAGVRKLRSSRPSVLLSFFINRIHFLGLSCSIAPAACLFHRSFVLLLFRFP

SEQ ID NO: 194732 - protein, 410 aa, Zea mays
  Clone ID: MRT4577_109185C.1.pep
MACTDNAMRALFLLVLFCIVHGEKEESKGIDAKASGPGGSFDITKLGASGNGKTDSTKAVQEAWASACGGTGKQTILIPKGDFLVGQLNFTGPCKGDVTIQVDGNLLATTDLSQYKEHGNWIEILRVDNLVITGKGNLDGQGPAVWSKNSCTKKYDCKILPNSLVMDFVNNGEVSGITLLNSKFFHMNMYQCKNMLIKDVTVTAPGDSPNTDGIHMGDSSGITITNTVIGVGDDCISIGPGTSKVNITGVTCGPGHGISIGSLGRYKDEKDVTDINVKDCTLKKTMFGVRIKAYEDAASVLTVSKIHYENIKMEDSANPIFIDMKYCPNKLCTANGASKVTVKDITFKNITGTSSTPEAISLLCTAKVPCTGVTMDDVNVEYSGTNNKTMAICTNAKGSTKGCLKELACF

SEQ ID NO: 194733 - protein, 419 aa, Zea mays
  Clone ID: MRT4577_109186C.1.pep
RYYSDTDSVSACIDNAMRALFLLALFCVVHGEKAKSKDNDAKASGPGGSFDITKLGASGNGKTDSTKAVQEAWASACGGTGKQTILIPKGDFLVGPLNFTGPCKGDVTIQVNGNLLATTDLSQYKDHGNWIEILRVDNLVITGKGKLDGQGPAVWSKNSCVKKYDCKILPNSLVMDFVNNGEVSGITLLNSKFFHMNMYKCKDMLIKDVNVTAPGDSPNTDGIHMGDSSGVTITNTVIGVGDDCISIGPGTSKVNITGVTCGPGHGISIGSLGRYKDEKDVTDINVKDCTLKKTANGVRIKAYEDAASVLTASKIHYENIKMEDSGYPIIIDMKYCPNKLCTANGASKVTVKDVTFKNITGTSSTPEAVNLLCSAKIPCTGVTMDDVNINYSGTNNKTMAVCKNAKGSAKGCLKALACF

SEQ ID NO: 194734 - protein, 29 aa, Zea mays
  Clone ID: MRT4577_109187C.1.pep
PALEPERAPFLGGSLSANKGSGSDYSPEG

SEQ ID NO: 194735 - protein, 411 aa, Zea mays
  unsure (1)..(411): unsure at all Xaa locations
  Clone ID: MRT4577_109188C.1.pep
MACTNNAMRALFLLVLFCIVHGEKEESKGIDAKASGPGGSFDITKLGASGNGKTDSTKAVQEAWASACGGTGKQTILIPKGDFLVGQLNFTGPCKGDVTIQVDGNLLATTDLSQYKDHGNWIEILRVDNLVITGKGNLDGQGPAXVWSKNSCTKKYDXKILPNSLVMDFVNNGEVSGVTLLNSKFFHMNMYRCKDMLIKDVTVTAPGDSPNTDGIHMGDSSGITITNTVIGVGDDCISIGPGTSKVNITGVTCGPGHGISIGSLGRYKDEKDVTDINVKDCTLKKTMFGVRIKAYEDAASVLTVSKIHYENIKMEDSANPIFIDMKYCPNKLCTANGASKVTVKDVTFKNITGTSSTPEAVSLLCTAKVPCTGVTMDDVNVEYSGTNNKTMAICTNAKGSTKGCLKELACF

SEQ ID NO: 194736 - protein, 108 aa, Zea mays
  Clone ID: MRT4577_109189C.1.pep
CCTVCRPINWHSIQVQFIQLFVHSLKSHHFLDESASMAMWHQSILSMQVAGSCMQIVQEYRYGQMHSSHCGLFLVVSMYMPSRFRSPSSTISFRSEVLAFCNSSRPGR

SEQ ID NO: 194737 - protein, 116 aa, Zea mays
  Clone ID: MRT4577_10918C.1.pep
MLGLAPLRSAPLPIRASATACGRNTSQLANGCQLSLLAPEAAEGDTALPENMHKWRMVIAYDGTKFKAIAPHPGVAHFSKWSCKAIKGFDKDEKGAEFFDYPGRLANLEASQCMCF

SEQ ID NO: 194738 - protein, 95 aa, Zea mays
  unsure (1)..(95): unsure at all Xaa locations
  Clone ID: MRT4577_109190C.1.pep
FMKDIVVLPNTYINIPRTIQDYTLKRMRRPNFKVTAQPPLREQVREEIHAAALVKLKPDTLHPPLXEDTLMLIMKGILVGMQNTGYVGALQSPVQ

SEQ ID NO: 194739 - protein, 125 aa, Zea mays
  Clone ID: MRT4577_109191C.1.pep
PESEGAPGPPHFGGRGGPNPRACGGKPHPSGRGEQHRTDAEKPGTQGRPREKDSHQPQAAACGMASWVSYFWSRKGSEPPPFIPPPQKNGWGGQKEVARKTPLPSSKRTVCSVTVDVFYQIKARV

SEQ ID NO: 194740 - protein, 72 aa, Zea mays
  Clone ID: MRT4577_109192C.1.pep
ILFFMVFFYGTGSITTLINTNSQGIMPRRVFMFTGVDKNNFLKLKGKLQGNQNWAMGAPTNFLNTLQKRLLS

SEQ ID NO: 194741 - protein, 94 aa, Zea mays
  Clone ID: MRT4577_109193C.1.pep
INALCMAFYARSEEARQSHATQNFALVIFILCPVSLCCLYLSSATEELNNTMWKNSIVLIFPILLTCFFFVHESCREHLHWKMHYLKDFQLRQK

SEQ ID NO: 194742 - protein, 54 aa, Zea mays
  Clone ID: MRT4577_109194C.1.pep
MKIRKLKLYEQKLIKRHNHLEYMRQGVHREALVTHRDRNVERDDYKTYNGICLM

SEQ ID NO: 194743 - protein, 79 aa, Zea mays
  Clone ID: MRT4577_109195C.1.pep
TRANRIIFTYWDFYGLANLFYINRQGFLHKNWVFFCLSFGATHWHRALWESIFLGPFPIARRFRASPWISRNRWIQNLA

SEQ ID NO: 194744 - protein, 32 aa, Zea mays
  Clone ID: MRT4577_109196C.1.pep
YQLLLVWFLQLNLDFVYREFHKTKQMSKKTIC

SEQ ID NO: 194745 - protein, 69 aa, Zea mays
  Clone ID: MRT4577_109197C.1.pep
SVLLVHWFLDVIDLVVVRASPRNPKRRVKTKLAEWYSPSARHIAWIRKSLPISRIRVSYGNGKLINYSE

SEQ ID NO: 194746 - protein, 198 aa, Zea mays
  unsure (1)..(198): unsure at all Xaa locations
  Clone ID: MRT4577_109198C.1.pep
IADEIYQLVVSKKEKPMFPYSLPPDIENMLSGCFEYDFRXRPLMKDILHAFDSNKDAHHDNIGWHSXRKFNGRQATHGKSHXWLRKNKFQVGDKVRSRKLEISCSLETMEIPNGTVVGVDDDEGRDAYVLVXVYGLHNVLKVRCSMVERXVSYGLVAGNWVTAARKPLCLNLRSFSIYIFTRHSAYLSLVFEHLAIKQ

SEQ ID NO: 194747 - protein, 105 aa, Zea mays
  Clone ID: MRT4577_109199C.1.pep
NRRLVYRSVWERKKNKTSFEHAETENDLDTEYKHYPTPGGSPNRWSSDRYFAGSARRCFPLPSTAVTSGPATLSFTFSSLFLGVSAVSRAFFFTLLYPSPGFFLG

SEQ ID NO: 194748 - protein, 105 aa, Zea mays
  unsure (1)..(105): unsure at all Xaa locations
  Clone ID: MRT4577_10919C.1.pep
LDFSAGVFHGVLLPTAXAGAAGPGVGYPMNRGKWDGATSAVLPYDDGDGDEVFYTVGILRSAVADGYLCRMEEQNAEVARFCEAAGIPCTQDLPSYATQADWAAR

SEQ ID NO: 194749 - protein, 101 aa, Zea mays
  unsure (1)..(101): unsure at all Xaa locations
  Clone ID: MRT4577_1091C.1.pep
RRECIFQGWKEGXFYFPPTYKYSFNSDRYSGVRPKKNRRTHAWWDHIPWXLLQWSYIRGESRFFDHGPVYNLFMAKVGSVPPKRSNLPLFMISSAEGPVID

SEQ ID NO: 194750 - protein, 64 aa, Zea mays
  Clone ID: MRT4577_109200C.1.pep
RTGLPEPPTYDSPSHMTCRPARCKFFMVSLIMLNDALKFMYNADKIGNRIVSIRLVIQGVHICF

SEQ ID NO: 194751 - protein, 356 aa, Zea mays
  Clone ID: MRT4577_109201C.1.pep
MACLTDLVNLNLSDTTEKIIAEYIWIGGSGMDLRSKARTLPGPVTDPSKLPKWNYDGSSTGQAPGEDSEVILYPQAIFKDPFRRGNNILVMCDCYTPAGEPIPTNKRYSAAKIFSSPEVAAEEPWYGIEQEYTLLQKDTNWPLGWPIGGFPGPQGPYYCGIGAEKSFGRDIVDAHYKACLYAGINISGINGEVMPGQWEFQVGPSVGISSGDQVWVARYILERITEIAGVVVTFDPKPIPGDWNGAGAHTNYSTESMRKEGGYEVIKAAIEKLKLRHKEHIAAYGEGNERRLTGRHETADINTFSWGVANRGASVRVGRETEQNGKGYFEDRRPASNMDPYVVTSMIAETTIVWKP

SEQ ID NO: 194752 - protein, 68 aa, Zea mays
  Clone ID: MRT4577_109202C.1.pep
RGPMLILRRGILAVLRNFLSGREMIGWAMAGLWDVSGTTDSCSCVCDHDRVKILLTTMVTAPRPLTST

SEQ ID NO: 194753 - protein, 356 aa, Zea mays
  Clone ID: MRT4577_109203C.1.pep
MACLTDLVNLNLSDNTEKIIAEYIWIGGSGMDLRSKARTLSGPVTDPSKLPKWNYDGSSTGQAPGEDSEVILYPQAIFKDPFRRGNNILVMCDCYTPAGEPIPTNKRYNAAKIFSSPEVAAEEPWYGIEQEYTLLQKDTNWPLGWPIGGFPGPQGPYYCGIGAEKSFGRDIVDAHYKACLYAGINISGINGEVMPGQWEFQVGPSVGISSGDQVWVARYILERITEIAGVVVTFDPKPIPGDWNGAGAHTNYSTESMRKEGGYEVIKAAIEKLKLRHREHIAAYGEGNERRLTGRHETADINTFSWGVANRGASVRVGRETEQNGKGYFEDRRPASNMDPYVVTSMIAETTIIWKP

SEQ ID NO: 194754 - protein, 107 aa, Zea mays
  Clone ID: MRT4577_109204C.1.pep
IVNFSFCGLVWMNKRGKSKREQASSDFYFDDAILETLPELNTSFGILKVLQRKQASSCFCIFSMLSAYVRYYVLFWLNIYYSWVCCSHESHIAITFAAFRLMLCSKN

SEQ ID NO: 194755 - protein, 97 aa, Zea mays
  unsure (1)..(97): unsure at all Xaa locations
  Clone ID: MRT4577_109205C.1.pep
MQIYMTINKLTYLNTKDDVFIPRYEMKAFVKLYHDVATSLDDDICRNCVTXGRKITSLEVCYRIESVDAITLKRFTNGLIFDKDCVIDAMVPFQRLA

SEQ ID NO: 194756 - protein, 60 aa, Zea mays
  Clone ID: MRT4577_109206C.1.pep
WVRGLQKTSAKKGKRNACRVFSTVHFTGILKHFCLNTKPVLVLAEHTGGGGGGRCGNETG

SEQ ID NO: 194757 - protein, 76 aa, Zea mays
  Clone ID: MRT4577_109207C.1.pep
ILLAHSRACRSSRNTVRVTPGITAIQHCLRPSMLHARSDESVLTPAQSRRIYTHVYPRYHLIHEDDDTANEITIVH

SEQ ID NO: 194758 - protein, 71 aa, Zea mays
  Clone ID: MRT4577_109208C.1.pep
RYSYITLGKKTGSPGPERQRHNSDNISKTSTTTAREDYDVVVPRITHIARHHIVISSTCVSSYQATAMSMS

SEQ ID NO: 194759 - protein, 131 aa, Zea mays
  unsure (1)..(131): unsure at all Xaa locations
  Clone ID: MRT4577_109209C.1.pep
MNARIPKRSTQDEAKEQIAXDLAQDWNAVFQRSINTXLLTEMVRGXMLTIRYYXFDTNATINYPDXKGTLXPRFTXEHAIRPYXSGEERCFACKLCKSICTAQAITTDAAERLDCSGXTSRYDIVMINCIY

SEQ ID NO: 194760 - protein, 282 aa, Zea mays
  Clone ID: MRT4577_10920C.1.pep
MAGGGDHSQTNGGHVDQRALEEGRKEEFADQGCAAMVVSVPFIQKIIAEIFGTYFLMFAGCGAVTINASKNGQITFPGVAIVWGLAVMVMVYAVGHISGAHFNPAVTLAFATSGRFPWRQLPAYVLAQMLGATLASGTLRLMFGGRHEHFPGTLPTGSEVQSLVIEIITTFYLMFVISGVATDNRAIGELAGLAVGATILLNVLIAGPVSGASMNPARSVGPALVSGEYTSIWVYVVGPVVGAVAGAWAYNLIRFTNKPLREITKSTSFLKSTSRMNSAASA

SEQ ID NO: 194761 - protein, 109 aa, Zea mays
  unsure (1)..(109): unsure at all Xaa locations
  Clone ID: MRT4577_109210C.1.pep
LILFIETGXXWRVITHERLSQXFTXTKLPXTLILXLXXNLXLLTILXFYQNPLKXXIYXXNLXXNLXNXKXXKLLLXLPYHTLPXXXXNNNNLLXXFHLLKNPPYLSLL

SEQ ID NO: 194762 - protein, 91 aa, Zea mays
  Clone ID: MRT4577_109211C.1.pep
ALFSPAGGRVPHSVDERRHHLGLVLTQATNVDREDGQIDQIEAQASSDRTLNNHVVAGVLIDHSESLGSLNNHCCFITLPNRGYRSHFIKL

SEQ ID NO: 194763 - protein, 242 aa, Zea mays
  unsure (1)..(242): unsure at all Xaa locations
  Clone ID: MRT4577_109212C.1.pep
MTQAAGRRRSMGGASGGDHPQQHGGGDDGHLQQGGGGDMVMPGFRFHPTEEELIDFYLRRRVEGKRFNIELINLVDLYRYDPWDLPALASIGDKEWYFYVPRDRKYRNGDRPNRVTPSGYWKATGADRTVYVEVKRPIGLKKTLVFYVGKAPKGLRSSWIMNEYRLPSGEADRYQKEISLCKVYKRPGIEDXLSPQHHHXRSSGSKAAATMEKKHHRTSASPRMAPVFDGGHSSGYMNKPYT

SEQ ID NO: 194764 - protein, 74 aa, Zea mays
  Clone ID: MRT4577_109213C.1.pep
LGLCFDDLEGKVFIPINIKNFHWYLAIVNAKKNEVHILDSMGPQITDRRDLYTTGFLRSMDGELYGILDRVFFV

SEQ ID NO: 194765 - protein, 133 aa, Zea mays
  unsure (1)..(133): unsure at all Xaa locations
  Clone ID: MRT4577_109214C.1.pep
AVGGGRQLNRGESWRITAPAGTTAARIWARTGCXMSFLPDGGSGCSRGPRCAVDVNARCPAELRQDGVCNNACPVFKKDEYCCVGSAANDCHPTNYSRYFKGQCPDAYSYPKDDATSTFTCPAGTNYKVVFCP

SEQ ID NO: 194766 - protein, 80 aa, Zea mays
  Clone ID: MRT4577_109215C.1.pep
VYRFGPSLYYPFSLITLLDICKGLQPFLALLIICRPILGITQNQFQRVCNFCYLCFFFLSNSYCLLDSSTAKISSYPSIT

SEQ ID NO: 194767 - protein, 184 aa, Zea mays
  Clone ID: MRT4577_109216C.1.pep
MAGSVAIVGIFVALLAVAGEAAVFTVVNQCPFTVWAASVPVGGGRQLNRGESWRITAPAGTTAARIWARTGCQFDASGRGSCRTGDCGGVLQCTGYGRAPNTLAEYALKQFNNLDFFDISPPEPTTRSSSAREAAELASACARRPRTRNKRPRLCMLPAVCSTGAKIKPTKQARVISMSPTLSP

SEQ ID NO: 194768 - protein, 67 aa, Zea mays
  Clone ID: MRT4577_109217C.1.pep
KKKKKKKKKKKKKKKKKKKKNKKEKKLNKHTKKNGRPSKRFHAFISMGGAPQRFQTFLPLSFHWQPF

SEQ ID NO: 194769 - protein, 238 aa, Zea mays
  Clone ID: MRT4577_109218C.1.pep
SALISSYACSIPYNKPFSLAVFVALLAVAGEAAVFTVVNQCPFTVWAASVPVGGGRQLNRGESWRITAPAGTTAARIWARTGCQFDASGRGSCRTGDCGGVLQCTGYGRAPNTLAEYALKRFNNLDFFDISLIDGFNVPMSFLPDGGSGCSRGPRCAVDVNARCPAELRQDGVCNNACPVFKKDEYCCVGSAANNCHPTNYSRYFKGQCPDAYSYPKDDATSTFTCPAGTNYKVVFCP

SEQ ID NO: 194770 - protein, 227 aa, Zea mays
  Clone ID: MRT4577_109219C.1.pep
MAGSVAIVGIFVALLAVAGEAAVFTVVNQCPFTVWAASVPVGGGRQLNRGESWRITAPAGTTAARIWARTGCQFDASGRGSCRTGDCGGVLQCTGYGRAPNTLAEYALKQFNNLDFFDISLIDGFNVPMSFLPDGGSGCSRGPRCAVDVNARCPAELRQDGVCNNACPVFKKDEYCCVGSAANDCHPTNYSRYFKGQCPDAYSYPKDDATSTFTCPAGTNYKVVFCP

SEQ ID NO: 194771 - protein, 121 aa, Zea mays
  unsure (1)..(121): unsure at all Xaa locations
  Clone ID: MRT4577_10921C.1.pep
VTPHIHSSLRTSLRNRILPHYFLKRQKNNSQKGILRTLPSTGGGKSRHSRLSGIEPFHQEGTVLQEFAITHARSPFGRSSLANLSRVGRSLWKRISLVAQSAARERGPRAVARWXTSSRPH

SEQ ID NO: 194772 - protein, 63 aa, Zea mays
  Clone ID: MRT4577_109220C.1.pep
SPSYKAAIKDVTLSICCWKYILNGAENILISIKKNLHNNCINWCDRGKIYPNKPELVLFKLYA

SEQ ID NO: 194773 - protein, 512 aa, Zea mays
  Clone ID: MRT4577_109221C.1.pep
MEQASHYLCLFLALILPLLLLRLLRGRRSDSGVRLPPGPWRLPVIGSLHHLVGKPLVHRAFADLARRLDAPLMYLRLGEVPVVVATSRDAAREVLRTNDVTFATRPWSPTMKIMMQDGLGMVFAPYGDHWRQLRKISILELLSARRVQSFRHVREDEVARLVAAVAATAPGQPVNVSHRIAVLVADSAVRAMIGDRFSRRDEFLVSLEEGLKLVSGFSLGDLFPSSPFMNFLSGTARRAHANHRKNFELMECAIKQHEERRAQAAVNGAAVQEEEAEDLVDVLLRIQKDGGLDMPLTMGIIKAVILDLFSAGSETSATTLNWAMAELMRCPDVMKKAQAELRDSLNGKPKVTEDDLVEMKYLKLIIKETLRLHPAAPLLVPREARDSCKILGYDVPKGTTVFVNAWAIGRDPEYWDDAEEFKPERFECGTVDFKGMDFEYIPFGAGRRICPGMVFAQANIELALAALLYHFDWKLEEGLEPSELDMTEDIGLTVRKKNDMLLHPSVRVPHKY

SEQ ID NO: 194774 - protein, 42 aa, Zea mays
  Clone ID: MRT4577_109222C.1.pep
IHSFLPTTAYVLVTLDLFSPLYFRHKHIFTLSLHPSTRPGRK

SEQ ID NO: 194775 - protein, 147 aa, Zea mays
  Clone ID: MRT4577_109223C.1.pep
GRVGGRVGSSSCLSDELVLGEENNFLGICTQELLARGTELLKRTRKGSLHWKVVSVYINRAGLVMLKMKSRHVGGTITKKKKSVVVDVCRDVAAWPGRHLLDGGEHRRYFGLRTAEQRVIEFECGSQREHEVWTKRVARVLADARKR

SEQ ID NO: 194776 - protein, 375 aa, Zea mays
  Clone ID: MRT4577_109224C.1.pep
MTYTLHSYAYIEVISAGEAQEILKNFMRRAQNEFELKIKKFLAEEGIKHEFSVPYTPQENVIERKNRTLIETARTMLDEYKTLDNYWAKVVNTACHAINHLYLHKIYKNTSYELLAGNDVSPCEAIKKLAIGEVRPQENDEDEELIWMSNEVVHEDARMEDDQNITKANPLTSNQPDQEEVSEPQDILQRDHPIDNILGTIKRGVTTHSRLTIFCEFYTFVSTLEPLKVEEALKDPDLVMAMQEDLNNFIRNEVWSLVERPKKNVIGTRWVFRNKQDEHGVITRNKARLVAQGFTQLEGIDFGETYAPVARLESIRMLITYVTHHDFKLYQMDVKSAFLNGPIQELVFVEQPLGFEDPKKPNQVYQLHKALSRLK

SEQ ID NO: 194777 - protein, 56 aa, Zea mays
  Clone ID: MRT4577_109225C.1.pep
LHVSHDPNLALIICMDIGVVISFQFYPTNFKFPIELGSDPIPIHFYTKIYLPVLTF

SEQ ID NO: 194778 - protein, 149 aa, Zea mays
  Clone ID: MRT4577_109226C.1.pep
AGHGAHELTGDGELGCSPPSGRPRARHRIRTAARTKTTRGGTRRPTDEAHLQHRLHDGRGAPAAAETDLVHTYVPRSKRGQGLAARHSNADFAHAQARGKRDLPTRSNNSDTYLPRKPPTKELADKDQEPQPQPTTRNKGGSPRHPPPP

SEQ ID NO: 194779 - protein, 87 aa, Zea mays
  unsure (1)..(87): unsure at all Xaa locations
  Clone ID: MRT4577_109227C.1.pep
RRRCCXRLGLGWFXGXAXGXXSSLASFSLGXXXPXGXXXXXXXXRPGXXXAVCFXXCACVCVCLRXCPPRXWLAGXAALLCCXSXXX

SEQ ID NO: 194780 - protein, 55 aa, Zea mays
  Clone ID: MRT4577_109228C.1.pep
VHTQASLSHTPAISRGLMPLSRRASARSAIGLLGPHAGRRSSRAGCCKRKPGESG

SEQ ID NO: 194781 - protein, 175 aa, Zea mays
  Clone ID: MRT4577_109229C.1.pep
CPPCAPRRFRRRRDPVLHGPPHDRRPQRHPGRVVLLIAVVPDAPPRSPRHAPPRRATRGPDTATSRILTAALFRAGQPSAAADLLRCMSPLLLDDMRRPRAEGRREGRRVGGRPDHGGFAVGGRIEEGGRIAADAACTGAVARGGCGGRASGSRRSRRARGSGGVCGAGLRADEW

SEQ ID NO: 194782 - protein, 44 aa, Zea mays
  Clone ID: MRT4577_10922C.1.pep
PCRRRPRDPQGVRPPRRGASLATLHPIERRYLRANSPTAKSRDK

SEQ ID NO: 194783 - protein, 75 aa, Zea mays
  Clone ID: MRT4577_109230C.1.pep
TKKLAFWGVSEMLGPPFNFRAVSRSFVPLASSPSTFKTVVFFFKKKPAPAKSKVVFETSDELAKWFGPDRKIFLP

SEQ ID NO: 194784 - protein, 296 aa, Zea mays
  unsure (1)..(296): unsure at all Xaa locations
  Clone ID: MRT4577_109231C.1.pep
LFQVFAIFLIGQNKKRSTYWARVYDFFXRNQNSIMHHWAAIPRRVGKFCGCMSRIEGRNASGKTFENKVXIINVLILVTVLVVLNMHTGNSXFLFGLVQLTNACYLYKAEDKDNKSFQFIHCWNVLRLEPKWNEKMNQLASTKSGSGCKNQSGMKXESISLLQETEGNLNGDATPKGDAPTRPIGRKKAKQLLRRGGADGYIEALDNLWEKKKQADVDKELKKKDSXESLEIEKERLEIERTRIANEQKCMHMKRMLEPRGRIMKVGISGMDADQQSYYRSLRSEINRRRGINFSL

SEQ ID NO: 194785 - protein, 83 aa, Zea mays
  Clone ID: MRT4577_109232C.1.pep
KVPPAINKLAEFGGQLQSVFQQGQQIQASQASASSNMSPEYYQRMSDIYRMGHETSMGILNNIRSDGEWHYNYSTGRDEYQYY

SEQ ID NO: 194786 - protein, 112 aa, Zea mays
  Clone ID: MRT4577_109233C.1.pep
APTRTRSRGRGARFFCAPRPPPWGSWASTPPAGGAPGPQEGIFVKNFSSYFFARPSPGIPPPLREIRVFCSWLSGFSDPFPSPEAMILFFCSLAPAWCSGRSRPCVPDPLLF

SEQ ID NO: 194787 - protein, 111 aa, Zea mays
  Clone ID: MRT4577_109234C.1.pep
NEFLLGDRCDTALNQNKINGEFAVSLLHWSVGSCLSVSSIGEYHLSAILVHRFTVQCHATACRLCITTPFTVPFSSSRGCSTLGSLPLSCTQPLLPTCERRCLLIPVTHGV

SEQ ID NO: 194788 - protein, 53 aa, Zea mays
  Clone ID: MRT4577_109235C.1.pep
YHECYIYVTSCHVRLRCFLAAGNSLIVRRHMGKKNRAPLPASDVTHATGKCNN

SEQ ID NO: 194789 - protein, 481 aa, Zea mays
  Clone ID: MRT4577_109236C.1.pep
MPLFDKKPFSLLEPPKDLDSKEKVFQIRFTKEIFRDYEEYLKRLNLYRQRVWTCNISGKSNLTFEEALVSEHKAMEKAQNLPTELMAQVLRMTQYSPLGLYELVDKIYASLLEEVFEGIELHANKDGNVAPCKILKILDSGGTKMCEVGWIRKGKAITNTSVIKAADLFYRRAPVSRNTLKFFIRDATSQSNPWVIHENLAKKFGITIEPPDSVMKKGRKRQENETVEDGRKKLKTDEEHAYVLIKYPIDDLLVRPNADDPSLFKRPLLATDFRVPRCSVGDLLMVWDFCSSFGRALNLSPFPLTDLENAICHKESNVLLVEIHAALFHLLMKDEGDYFTVPQNKKQKLKVSSVTWAEYLCDFLEMTKNEELSTNIATVRRGYYGLIDTNIKLKILRELVEEAIETSAIREILSDRVDQKQVLNATKRENTRKDKKEQNLNTEIAMKNEENQTDAVQGGHEGVDELVRRKEENDKSNIFSG

SEQ ID NO: 194790 - protein, 57 aa, Zea mays
  Clone ID: MRT4577_109237C.1.pep
FIYLLKFLIIFRFYFDMWLPPNTPRRNINGTDIIFTYLNLIYVKGFTCNLYLSSSIQ

SEQ ID NO: 194791 - protein, 145 aa, Zea mays
  unsure (1)..(145): unsure at all Xaa locations
  Clone ID: MRT4577_109238C.1.pep
MQELYGRNESCALFSSAGRILRQMPLFDKKPFSLLEPPKDLDSKEKVFQIRFTKEIFRDYEEYLKRLNLYRQRVWTCNISGKSNLTFEEALVSEHKAMEKAQNLPTELMAQVLRMTQYSPLXLYELVDKIYASLLEEVFEGIELP

SEQ ID NO: 194792 - protein, 229 aa, Zea mays
  Clone ID: MRT4577_109239C.1.pep
SYRAIGFIEAGRASAIREILSDRVDQKQVLNATKRENTRKDKKEQNLNTEIAMKNEENQTDAVQGGHEGVDELVRRKEENDKSNFSRGRTEVKRHMVQHLETEIEKLSIRSSPLGKDRQYSRYWFFKREGRLFVETADSREWGYYSTKEELDALMDSLNVKGIRERALKRQLEKFYSKISNALEKRSKDIANKTLLEEGVLRRSTRVRAQPKDNPSMAFLKYVNKWRDN

SEQ ID NO: 194793 - protein, 90 aa, Zea mays
  Clone ID: MRT4577_10923C.1.pep
GRSMGLTHIPALRPACQIRRGTRRLVAMPSQFRTGRLLLPSDRLITILSPVRFESMSPAHRAFRLPPTQLVHRVTRRRGSAPRRRDGRGL

SEQ ID NO: 194794 - protein, 143 aa, Zea mays
  unsure (1)..(143): unsure at all Xaa locations
  Clone ID: MRT4577_109240C.1.pep
LQDKSPLEEQAYGLIKYPIDDLLVRPIADDPALSKRPTXATDFRVPRCSVGDLLMVWDFCSSFGRVLNLSPFPLTDLENTICHKESNVLLVEIHAAMKDEGDYFTVLQNKKRKLKVSSVTWAEYLCDFLEMTXNEERSTNIAT

SEQ ID NO: 194795 - protein, 125 aa, Zea mays
  Clone ID: MRT4577_109241C.1.pep
SPPGAKRPKGAFKEHTPAQHKRRKPETRQTDRVNTRTYTPTRKEGQQPTRKKRYSPAHEERHRTKTNPHNSMGRRQKKTPTHQHAKEQKGNPKNGNTHTREDFVESPSATYPGTPAQTPTRACAG

SEQ ID NO: 194796 - protein, 237 aa, Zea mays
  unsure (1)..(237): unsure at all Xaa locations
  Clone ID: MRT4577_109242C.1.pep
MTKNEELSTNIATVRRGYYGLIDTNIKLKILRELVEEAIQISAIKEILSDRVDQKQVLNATKRENTRKDKQEKNLNTEIAMKSQENQTDDVQVGHGGVDELVRRKEENDKSNISRSRTEGKRHLVQHLETEIEKLSIRSSPLGKDRQYNRYWFFKREGRLFVETADSREWGYYNTKEELXRQLEKFYSKISNALEKRSKDIANRMLLEEGVLRRSTRVRAQPKDMAFLKYVNKWKDN

SEQ ID NO: 194797 - protein, 67 aa, Zea mays
  Clone ID: MRT4577_109243C.1.pep
TFIQALVVYTENEAGNLGMSFGPYLFFIRPTEGSIFACFGGNPAHLRRLKLECYMVPCTNKKFISTA

SEQ ID NO: 194798 - protein, 42 aa, Zea mays
  unsure (1)..(42): unsure at all Xaa locations
  Clone ID: MRT4577_109244C.1.pep
PAAVSVRSLPASASFVAVXSLLASARRGEKSRCVLRGFLCLA

SEQ ID NO: 194799 - protein, 88 aa, Zea mays
  unsure (1)..(88): unsure at all Xaa locations
  Clone ID: MRT4577_109245C.1.pep
RTPXARLRTKWIPRAIRMRDQRFPVSRATGGCRPPLCAAGYSPTPSLADRSYLYSTHRSTLLTPRACGGVFISSSSEKNRSNRPRGGG

SEQ ID NO: 194800 - protein, 133 aa, Zea mays
  Clone ID: MRT4577_109246C.1.pep
SDEEADAPNNISNNCENNNAANGATNIQSSRTSVQDENTNLQLYEEENNSRAIASLMQPVEDKSTAMTPVSMETNIIHLADQGESLTFHEQWHAYLDFDDLTASGVKASPNTSLGTAKAAMKTDALTLFKYSK

SEQ ID NO: 194801 - protein, 83 aa, Zea mays
  Clone ID: MRT4577_109247C.1.pep
FSMEGGPVIGSIAPRFVLGGFPRCPGSSGESSRPPFLKIRKGSWNHSPRHPPRFSYGPSWGRFLLSPPLFPLRLFPGLLPFAR

SEQ ID NO: 194802 - protein, 106 aa, Zea mays
  Clone ID: MRT4577_109248C.1.pep
SLNLACHQIMKLVAAPTLPELQECLLETLITLLPPLSKNMLAILVNWFSTFLNGPVPFFLSFFSISFFSFFFFNFSSFFFFFLRKKMSYGDVYIYMNIIHMLAVAS

SEQ ID NO: 194803 - protein, 67 aa, Zea mays
  Clone ID: MRT4577_109249C.1.pep
GYCLGWGHQSLLARLGNRSRIHVTPLMITSAKSPGLAAGSTQSRPYLIDGSISCQYGFESGSWVRLV

SEQ ID NO: 194804 - protein, 129 aa, Zea mays
  Clone ID: MRT4577_10924C.1.pep
MEASAGLVAGSHNRNELVLIRGHEDPKPLRALSGQVCEICGDEVGLTVDGDLFVACNECGFPVCRPCYEYERREGTQNCPQCKTRYKRLKGSPRVAGDDDEEDIDDLEHEFNIDDEKQRQLEGNMQNSQ

SEQ ID NO: 194805 - protein, 76 aa, Zea mays
  unsure (1)..(76): unsure at all Xaa locations
  Clone ID: MRT4577_109250C.1.pep
IVIAKALAYVPVGPEGQLLKKRCCTVLYPLNYGGQTSIKAFKKMPSPVWVSAKKKKKKKKKKKKKKKKKKKKKKKX

SEQ ID NO: 194806 - protein, 294 aa, Zea mays
  Clone ID: MRT4577_109251C.1.pep
STFPHTDKSRELIACNILIFYLFQRRNSSQIHDLLKDIEGNGISLDKTTYDFLVYGFHKSGDINDSVNALDACIAQGIKPSNRSLRIVLSHYCRLGNHEKSLALFHLIERNGWKHGLIIKTTLASCLLSFGRQLEAKSCLNNLSKGEFIGCSSNFDDLIKEFCILGDLKMTLYLLNTMLKKGTLPNEASYSSVIYKLCTLKEFDQALDFLAEMQLASLKSSEISCDALVHGLCAMGRPSDARKVLEMLTTLGSAPSYGMFRVVFDNYCRSSNLQKAAALLHDMQHAGQVANFEM

SEQ ID NO: 194807 - protein, 58 aa, Zea mays
  Clone ID: MRT4577_109252C.1.pep
GIFGDQCQERSMLVTGAGDSIMMSATLIMMVGVNDELVRSTGKPSRAWTIRSQAYSLR

SEQ ID NO: 194808 - protein, 151 aa, Zea mays
  unsure (1)..(151): unsure at all Xaa locations
  Clone ID: MRT4577_109253C.1.pep
MAAAPPPKADELQPHPPKEQLPSVSFCITSPPPWPEAVILGFQHFIVMLGTTVIIPSALVPQMGGGNEEKARVIQTLLFVAGINTLLQTFFGSRLPVVMGGSYTFVAPTISIILAGRYDNETDPHEKFLRTMRGXQGALIIALTIQIILGF

SEQ ID NO: 194809 - protein, 282 aa, Zea mays
  Clone ID: MRT4577_109254C.1.pep
QNQPALEKDRYKIRQAFVAAPGNTLIVADYGQLELRILAHLADCKSMLDAFKAGGDFHSRTAMNMYQHIREAVEEEKVILEWHPQPGQEKPPVPLLKDAFGAERRKAKMLNFSIAYGKTAHGLARDWKVSVKEAKDTLKLWYSDRKEVLAWQMKQKQLAHEKCEVYTLLGRSRRFPNMAHATSGQRGHIERAAINAPVQGSAADVAMCAMLEIDRNTRLKELGWTLLLQVHDEVILEGPSESAELAKSIVVECMSKPFYGTNILKVDLAVDAKCAQNWYAAK

SEQ ID NO: 194810 - protein, 59 aa, Zea mays
  Clone ID: MRT4577_109255C.1.pep
KTPGQGFHFKKADQPPPNWESLMQALALYKGICKPILIFLNSAKLRLLQIHTTIFGQTL

SEQ ID NO: 194811 - protein, 57 aa, Zea mays
  unsure (1)..(57): unsure at all Xaa locations
  Clone ID: MRT4577_109256C.1.pep
DHESSEDHPGTWNLKSQVKNRYHRMRHMEDAAXVFVRGLGHRLPVYFGLLDRCLLTM

SEQ ID NO: 194812 - protein, 112 aa, Zea mays
  unsure (1)..(112): unsure at all Xaa locations
  Clone ID: MRT4577_109257C.1.pep
QLSRPGWGPLLPAPLTWFPMESPTLWLPPVVLXTMASGGVLRPTXTLPAALYAFHYVHRTLVHPVRLARLRRAPAPVPLLIDACALGFNILNAYLHARSFALHSSRQASTFR

SEQ ID NO: 194813 - protein, 96 aa, Zea mays
  Clone ID: MRT4577_109258C.1.pep
IQMTHMLNIHWVIHTCENIIRGYLIISITVPRIPNSTVPVSTLKQGYPLLQYEGRGARAAISSRVVNSTRPHHVDGSGAGTWPEKTIYFKVSTVGS

SEQ ID NO: 194814 - protein, 131 aa, Zea mays
  unsure (1)..(131): unsure at all Xaa locations
  Clone ID: MRT4577_109259C.1.pep
MLGYYDFLYEDXILLCSFSYKEREKGDLWEDEGKCXTQGTVDVDIGVNTSAEGVEDXKXVDDSAVKVAALVDTFRLHELPPSYLKSFVSYFNKYLKNLTAVLQPQXRDEYKKGVEGATKFLLNLXKDLKIF

SEQ ID NO: 194815 - protein, 78 aa, Zea mays
  Clone ID: MRT4577_10925C.1.pep
AIKIIWRITRYTVILADYVRPRQCLYDTQASGSPLGPQPLPTESGMYLLYSHVITLYGSHEYLLHHPAYWIKLCRYRG

SEQ ID NO: 194816 - protein, 99 aa, Zea mays
  unsure (1)..(99): unsure at all Xaa locations
  Clone ID: MRT4577_109261C.1.pep
SDQAIVALFGGPPLGRGPKKRFGFXGAWTPNPLVFSNFFFKEIFSGDKEGLFXLPSDKTLLRAPVFPPLFEKNSVDEKAFFYGYKKGPPQLSQMGVVDA

SEQ ID NO: 194817 - protein, 172 aa, Zea mays
  unsure (1)..(172): unsure at all Xaa locations
  Clone ID: MRT4577_109263C.1.pep
NGGGAPXGKPPPPHPRKKSPPLAWSPPRNPPGKKIFSGGGKKRASQIGGHRKEKPPGPPFYHLEAPPKGFXYLNMGPGPXPGKPPSPPPXGGGPPQAGVPXPTKRLEPPKKKPPPLGGAGKNKGXPSIGGGQXIFPRGPFKTPGPXWGPGRAGGRNKPTGGAPLGRXRGGPP

SEQ ID NO: 194818 - protein, 171 aa, Zea mays
  unsure (1)..(171): unsure at all Xaa locations
  Clone ID: MRT4577_109264C.1.pep
ITLMLRFFPTGAGERMEDEEHFATAFTLARFXSYIPISQLXPWGGGGLNIHALQGILWXGDKXLPCXESGIPLLKRILXELSDSHIITIAFPDDRAWRRLYKHLQHFPMVICNKVXEXEHRIVRFNEGDPRGRHVVLVDDLVQSGSTLIECHKVLAAHVTAMVIAYVTHGI

SEQ ID NO: 194819 - protein, 45 aa, Zea mays
  Clone ID: MRT4577_109265C.1.pep
FIVHDMVTFVIVDTEFNVVFMVFFDQGKFNLSRTLPYYNAMMDQL

SEQ ID NO: 194820 - protein, 45 aa, Zea mays
  Clone ID: MRT4577_109266C.1.pep
NGSPTKPGHPPPVFIGQLVSITKIKDVVKRMYLIFHVVPMQRVSS

SEQ ID NO: 194821 - protein, 166 aa, Zea mays
  Clone ID: MRT4577_109268C.1.pep
LPSTSRLIHALGSRSQLLARSTLARPRSVPLCSAIGFAGCRFSYSLWSSRRLFLSELPRSSAITPSLPVRPYVAAFTSLCHCGLVSILLWYLDRARLNSNETYCHPLQQMEIVTLARQRSSIAILVYAKPQTVKTLWCWPRVTSLTKRNPKGFWSKIETVCLARQP

SEQ ID NO: 194822 - protein, 154 aa, Zea mays
  unsure (1)..(154): unsure at all Xaa locations
  Clone ID: MRT4577_109269C.1.pep
GFLRFKKKKKKGGSPPPRNPGGPPGAGVFCPAPQPFFSFSPKQRGPPNLGFLAKGPPGLGGPPRVSWGPELGPPKCLGNPPPKKPLGGPGAGSPPRGPPNFFFYPGPXSFFGRDHVWGPRLGXFPPLGPPPLRLSWFLSFWVNEKVGPPVYSPG

SEQ ID NO: 194823 - protein, 107 aa, Zea mays
  Clone ID: MRT4577_10926C.1.pep
GPKRSRGPSEAGRPGREKQQERRPNRARTEAPRAPQGLRSATRAGGSILPAPTMKTTRNSDWEKPETAGGVGEDIWEQTLPPPPTLIYYAWPGMRKRTPSLEVLAID

SEQ ID NO: 194824 - protein, 73 aa, Zea mays
  Clone ID: MRT4577_109270C.1.pep
SCTTWKHAMCTIYLEFSSNHTSLVNCLQWVCNISLWFVGSCNSYFDFSSNSADGILNFSQWVCNPSKQCIILY

SEQ ID NO: 194825 - protein, 89 aa, Zea mays
  Clone ID: MRT4577_109271C.1.pep
NNFPDSSLIALLSAPTVLIVHLSFLITYLFLLRPLLIMILPRMHLHYPQLMVIMPHMESSCLTPPYRHLLPGPNHSPTMPAAIDEFWTF

SEQ ID NO: 194826 - protein, 214 aa, Zea mays
  unsure (1)..(214): unsure at all Xaa locations
  Clone ID: MRT4577_109272C.1.pep
STCAVEHLFLKLQRVSKDLQKWGQRKVGNIKLQLEMAKEILHRLEIARDSRSLYNREEWLRKKLKLHCLGLASMERTIARLRSRILYLKEGDANTSFHQQARFRKKKNFIAKLQTETSLAVTQEEKHAAVLEFYETALGTAENRSLTLDLNEIGMQQHDLASLDILFIEEEIWTAVKDLPLDKAPGPDGFTXSFYKEWWSIIKHDLRGSLCYYC

SEQ ID NO: 194827 - protein, 52 aa, Zea mays
  Clone ID: MRT4577_109274C.1.pep
AGHEPWEPRSFTTRPRPGTTKGSFWVGPLNWRPPSPAVYSPSTVPEGPAAHP

SEQ ID NO: 194828 - protein, 66 aa, Zea mays
  Clone ID: MRT4577_109275C.1.pep
LLIEILLSTTDPVESHKWSSRLVEKPVERRYRVPDYVSTPLSKNPSSASGASVSRTHRSTIGCSRP

SEQ ID NO: 194829 - protein, 187 aa, Zea mays
  Clone ID: MRT4577_109276C.1.pep
MAPPPQPELPAAALLVLLLAAAVPARAQQEYEANKQNACYATNASSVLGYTCNATAASTPACESYLIFRSSPSYYNTPVSISYLLNSSPATVAAANAVPTVSPLAASSLVLVPVPCACTPGGYYQHNSSYTIQFQRETYFIIANITYQGLTTCQALIAQNPLHDSRGLVAGNNLTVPLRCACPSPAQ

SEQ ID NO: 194830 - protein, 46 aa, Zea mays
  unsure (1)..(46): unsure at all Xaa locations
  Clone ID: MRT4577_109277C.1.pep
AAELLRLVPRRHAFEXYGRSAHVGGACLMLXXRVYARSGGVGVLWP

SEQ ID NO: 194831 - protein, 445 aa, Zea mays
  unsure (1)..(445): unsure at all Xaa locations
  Clone ID: MRT4577_109278C.1.pep
MAMGLEDGEYGAFMEKFKMLPSXSASAAAPXLHGLTFAIKDIFDIGGRVTGFGNPDWARTHAPAGATSPVVLAALAAGAISIGKTVMDEMAYSINGENAHYGTPTNPCAPDRVPGGSSSGSAVAVAAKLVDFALGTDTGGSVRVPAAYCGIFGLRPSHGLVSTENVIPMSQMFDTXVGWFARDLSMLSCVSNVLLPLAADNTIKQPTHVTIPKDCFEILGSLSDQTYQILNASVAKRFGNDAVDNRNLGEFVSANVPTVGKFISDFSRSEAPSVPALSVISYVMRCLQRSEFKANHGEWVKTVKPNLGPGIRERVHEAIASEDGPMEDFHVLKTEFKSALSALIKDDGILAIPTVPGSPPKLRMEAVALENFRARAFSLLSIAGLSGFCQLSIPLGVRHGVPVSVSLVACHGADRFLLSVAQELYGTLKQETKKAWSWSSSDSSL

SEQ ID NO: 194832 - protein, 120 aa, Zea mays
  Clone ID: MRT4577_109279C.1.pep
PRVRPRVRGRVGAPAPAAKLVRGVSEGGLQEWGRLREQEAAEWANKEDAAAAPATPKKSSNKAKKPPNRIFKKELALACLLLTAATRSLLSKQGLHFYFLLFQGVTFLAVGLDLIGEQVS

SEQ ID NO: 194833 - protein, 42 aa, Zea mays
  Clone ID: MRT4577_10927C.1.pep
TARWNGRWVQVPAWPGTGCGTNASGERQRQLPRAWRPVGRTL

SEQ ID NO: 194834 - protein, 111 aa, Zea mays
  unsure (1)..(111): unsure at all Xaa locations
  Clone ID: MRT4577_109280C.1.pep
MGNDDVIESGAGGGKFTANDXTDALPAPLIDTGELRSWSLYGTLITQLIATLLLLXSTVATVMGYTHQTDPSASGAETXSGGIAVLCIPWAFRRIMFVLVYCTAGISTGHI

SEQ ID NO: 194835 - protein, 87 aa, Zea mays
  unsure (1)..(87): unsure at all Xaa locations
  Clone ID: MRT4577_109281C.1.pep
MAFAPKTSSSSSLSSVLHAAQSPPLLLKRMSSTATPRRKXDAAVVVTTSITAKAAAAAVTVHIAPTQVXRRRSRSLHAQDACYDERQ

SEQ ID NO: 194836 - protein, 141 aa, Zea mays
  Clone ID: MRT4577_109282C.1.pep
HSKGGVAEACSVVKRVGSKLDPVDGACLPLDIICLHLEKAAMDRLSSGEELVGDDDVARALLGVCKGLPGPVLAVYDQLLSDGAIIPSLNLKLRLLRSVLAILREWGISVIAHRLGTTSAGASFFLDGTFSLNQTGAANQD

SEQ ID NO: 194837 - protein, 57 aa, Zea mays
  Clone ID: MRT4577_109283C.1.pep
LLKCRIRTARSICRYMHPRMGLLEVARPASSCYWCSCYRTTSSCDCHSHCLRHRNRS

SEQ ID NO: 194838 - protein, 86 aa, Zea mays
  Clone ID: MRT4577_109284C.1.pep
CARSRRAGGRAGGRLGGRLAGVRGQRGGVRGGRRPWAAHRTFFISMAGGWISSSLLNIVVPRPSASRGDVVSSWVELGDRSLYGRR

SEQ ID NO: 194839 - protein, 84 aa, Zea mays
  Clone ID: MRT4577_109285C.1.pep
PLGSFLFSGLLAGLLYDAEATAVPGGGNTCVGAHCYRLVFLIMALACVVGFGLDVLLCVRTKRVYAKIHESKRLSRSAVAERVG

SEQ ID NO: 194840 - protein, 53 aa, Zea mays
  Clone ID: MRT4577_109286C.1.pep
HSCGHDALVVCIWDRDAIIHGLFTANKVTTILLYRCELLIPVVAVCRTYCRTA

SEQ ID NO: 194841 - protein, 77 aa, Zea mays
  Clone ID: MRT4577_109287C.1.pep
SCALWICGLVGKRKHLFCGPNNGGFELRHLPRLSLVGVGGVIVPAIWRHRRGELASAMQHPQDEKPQATQSEAMHLH

SEQ ID NO: 194842 - protein, 125 aa, Zea mays
  Clone ID: MRT4577_109288C.1.pep
YLPSYTPKGLEDLRKKDLQALPGNGNGRRRGFKRVYNSNLSNNLGNPARNPANKRPVLGGTKQYQYPGRCLTGRPRTKKDPRPEIPKGNNSLPGDRQFWKVKQLTFGATTLRSGLNALLPALRPL

SEQ ID NO: 194843 - protein, 141 aa, Zea mays
  Clone ID: MRT4577_109289C.1.pep
KKIAQFPIGGPVGTPFLGHQLSTQKVFFLAPPVFLAPKVRDFLEKPSFKPRQIFPPPFDFLPKFAQFLFKKKPLAGEEFLSFFFSGQPNFFFPLNFPSLPGGILLGFLCQTDHSQTNGDPRLKKPPPCIVVYTLVLIILTK

SEQ ID NO: 194844 - protein, 51 aa, Zea mays
  Clone ID: MRT4577_10928C.1.pep
MFNEPTPVLMSYIQDPCGTSGPMYHLLKHYRDRLRTRVVHISTPYAISRLK

SEQ ID NO: 194845 - protein, 73 aa, Zea mays
  Clone ID: MRT4577_109290C.1.pep
IVVSSVISGNPLSLKNQAYSLCSLPFFLFHLRYIWIESTRSKLDSSTFSDFALLSDRSLARSTTITLMHAVSN

SEQ ID NO: 194846 - protein, 218 aa, Zea mays
  Clone ID: MRT4577_109291C.1.pep
MEVAPAVKQLLPMAQGPNSPSSSTTSPSPAAPSPPPRQQQSQAPVPRIIDTTPFPTTFVQADTANFKQVVQRLTGSDTPPPAQKPAKTHGHHHHHGGGGVGPKKPAFKLYERRIGKNNLKMIAPLAGPSPRKAAPEVLSPSVLDFPSLALGSPVTPLLADPFNRSASASPGEQDEAEAAAIAQRGFFLHPSPRGVEPPRLLPLFPVTSPKMAPWPSQQ

SEQ ID NO: 194847 - protein, 65 aa, Zea mays
  Clone ID: MRT4577_109292C.1.pep
GPLNLIFKGNTRPRHFIYNFLFAPNQVYPNFQKLNLGEHKRGKPQILLGGGGAPPKHPYFFSHYT

SEQ ID NO: 194848 - protein, 36 aa, Zea mays
  Clone ID: MRT4577_109293C.1.pep
RIRKYELCYTYSGMCSIILVVCLAVISLRECSQDYT

SEQ ID NO: 194849 - protein, 180 aa, Zea mays
  Clone ID: MRT4577_109294C.1.pep
MTGAASQAYGEAWYWDERYRKEPGPFDWYQKYPALAPLLRLYVRPHQRLLLVGCGNSVFGENMVQDGYQDVVNIDISSVVIEQMKKKYHDKPQLKYTKMDVRNMSDFESGSFDAVIDKGTLDSIMCGQNSQEHAAKMLGEVNRILNDKGVYIMITYGDPSYRLNLLKDLQFWTVKLHVID

SEQ ID NO: 194850 - protein, 88 aa, Zea mays
  Clone ID: MRT4577_109295C.1.pep
SALVLAILLILLFQARYLSLCQQVGSPYISVSVLVCIVLFECRVLGNSQLSDRLLFPFDPVGTGWLFLCVVCYSQLCKLSLKCILFYF

SEQ ID NO: 194851 - protein, 392 aa, Zea mays
  unsure (1)..(392): unsure at all Xaa locations
  Clone ID: MRT4577_109296C.1.pep
MRWLVGLLCLALDAVKKTAGTGHLSELSCVSLTVLCSSLVGCARGGKLSAAAGGWSMNSCKRHCQKCWGYKKSGAXLLEPRRSSSYGAVGCGAALCHXLDSGGCVSRRGACMYQVAYGDGSVTAGDFVTETLTFAGGARVARVALGCGHDNEGLFVAAAGLLGLGRGGLSFPTQISRRYGRSFSYCLVDRTSSGAGAAPGSHRSSTVSFGAGSVGASSASFTPMVRNPRMETFYYVQLVGISVGGARVPGVAESDLRLDPSTGRGGVIVDSGTSVTRLARASYSALRDAFRAAAAGGLRLSPGGFSLFDTCYDLGGRRVVKVPTVSMHFAGGAEAALPPENYLIPVDSRGTFCFAFAGTDGGVSIIGNIQQQGFRVVFDGDGQRVGFAPKGC

SEQ ID NO: 194852 - protein, 201 aa, Zea mays
  Clone ID: MRT4577_109297C.1.pep
MMNRDCTLTFTFEQTEGDQAASPSATKLVLPITRGSSSELANKKQKKEAQRRVQHVGVQGPFIKSKWSHVPITFSQEDLQLKDYPHNDAMVISCVSKGFLVHNVLVDISSAADIIFAKAFRQIYHLIMVLLMCMEAKRLLEGSKGIGQIPWPSCSVAGTDFLSVGCSGGTTAAAKGTTSDTAGASADAGVLEKQRQLLLRA

SEQ ID NO: 194853 - protein, 49 aa, Zea mays
  Clone ID: MRT4577_109298C.1.pep
AQVLIPKDPDLRSCTGLNGWTFWPMSKVLIFHKGLIYSSSFLTVTQAMF

SEQ ID NO: 194854 - protein, 59 aa, Zea mays
  Clone ID: MRT4577_109299C.1.pep
DLGLDDGRKVAQKARECSCFLRGTEVLAEHHEKYMPKEVAEALERSKKRLEAEAEAAAD

SEQ ID NO: 194855 - protein, 125 aa, Zea mays
  Clone ID: MRT4577_10929C.1.pep
DSPISHDCGDQGRQIGGGRQPADLESTTQPSPRALRSIPPARSDRRRRIGGGHPIGRAQIHYINQRQRIGGGLPTRLSFPTDCSDQRRLTNKDRVCTCSKLNKGRVCSCSCLTEFWMLHISNFSY

SEQ ID NO: 194856 - protein, 125 aa, Zea mays
  unsure (1)..(125): unsure at all Xaa locations
  Clone ID: MRT4577_1092C.1.pep
HASVHASVAALATKIWALRKLXIALSACXVANTTMITQCSQAPIATRIHAYLPSMIASVCENPAXLQPYRLQQAISARNIPLSHLLLQQSPVLSTVQSLAQTIMAQHLQQLVLPVINQVTLTNLS

SEQ ID NO: 194857 - protein, 46 aa, Zea mays
  Clone ID: MRT4577_109300C.1.pep
AWGHFLHTGHWAESLHPCLVIHFESINYLKTRREALRCPCWAPVSS

SEQ ID NO: 194858 - protein, 101 aa, Zea mays
  Clone ID: MRT4577_109301C.1.pep
FLSQGGSGYARDITFQNMAVHGVRNPIVIDQSYCDRAEAEPPCRERRSAVQISDVVFRNIRGTTVTRDAIRMSCSRNVPCRGIVLQNIDLKMQGGPGHAPA

SEQ ID NO: 194859 - protein, 122 aa, Zea mays
  Clone ID: MRT4577_109302C.1.pep
AFPNQKGGNFYPRALGGLIKLTNPTLVMLRGGKICPSTNLGGPARVIRVLLFWLRRNHILVYKNGGAGRQTGVPFSHGHGDHRGRDWHFEPFPEGALSEGLHSPLWDCPFDEGGDEPPLAWA

SEQ ID NO: 194860 - protein, 598 aa, Zea mays
  Clone ID: MRT4577_109303C.1.pep
MLGIGGLGSGSGMEAGTSCGALLRELQQIWAEVGESEGEKNKALLDIERECLEVYRRKVDDANRTRVQLHQSVAAKEAEVASLMATLGEHKLYLKKDKGVVPLKEQLATVAPVLESLKCKKEERIKQFSDIRSQIEKIRFELSEYNDQGDDPSSLAAEEHDLSMRKLNSYQTQLRALQKDKSERLRKVLEYINEVHSLCGVLGIDFGSTVHEVHPSLHQNGVEQSRNISNSTLEGLASTIYKLKAERKSRIHKAREIMESLCQLWKLMDSPEEEKRQFSKVMSSLILPEEGITSPGVLSEETIEKMEFEVERLTRLKTSRLKEIVMKRRAELEAICQNAHIEPDVSTAPEQTDALIDSGLIDPSELLANIESQILKAKEESLSRKDIMDRINRWIAACDEEAWLEEYNQDPKRYSAGRGAHINLKRAEKARILVRKIPSMVDDLINRTFAWENARNKPFLYDGGRLISVLEEYRLSRHQKEEENRRYRDQKKLESILLAEKEAIFGSRPSPRKTSSLSRKANGYRPNGNTNGLKTPTPRRLSLGSATPELLTPRSYSGHNRYFGDVRRLSTSHLNFGDDSLSTFTSISGSEPESPSIG

SEQ ID NO: 194861 - protein, 70 aa, Zea mays
  Clone ID: MRT4577_109304C.1.pep
VWCLSVWYLSMRPPLLFPVFQLLSLWSSGCAVVSSLPPCPVLRALGVLVAWYLVNPFKTPRLRPLFVRRK

SEQ ID NO: 194862 - protein, 101 aa, Zea mays
  Clone ID: MRT4577_109305C.1.pep
KKGFYFDPFKRTPTHPFCIGLNPLAAQKRQNINTAGSYLPPGGSSPRGINAGGNKRGGTNFHKITAALQMAKPFSWLRNEAFAWTYINVSRQPPLGMTKDL

SEQ ID NO: 194863 - protein, 155 aa, Zea mays
  unsure (1)..(155): unsure at all Xaa locations
  Clone ID: MRT4577_109306C.1.pep
MDLRILGVAARHMKLKKDQLAVDRQTGDSRENVFDQSRDMPDNMSLQXIDAEREPASAEAREKDALACDYPHGVWSTGESWIRAELPAFVRATAEARYQAISKDTVARGFAAARERRERYKWSLKEKVQATDLDTXRSXQXHSATFRNFIRNPDF

SEQ ID NO: 194864 - protein, 90 aa, Zea mays
  Clone ID: MRT4577_109307C.1.pep
NSARGVQTSTGTGIPPWPTTAASLELPRLRSSPRFASPPPLPRRQLYGVQLGRRPPVVGTAGAATSRLRTPRQTHRDDKKQSESWEISGG

SEQ ID NO: 194865 - protein, 62 aa, Zea mays
  Clone ID: MRT4577_109308C.1.pep
FMSPCKGVPLYPHEKGPYNLSTVNKEVLMSTVYKEPQTYECAPSSCGCLPRSTGDNPRHPLP

SEQ ID NO: 194866 - protein, 271 aa, Zea mays
  unsure (1)..(271): unsure at all Xaa locations
  Clone ID: MRT4577_109309C.1.pep
KVRVWDVSERRVVDWADAKDIITAVGYQPDGQGLIVGIAAGRCRFYNHAGENVELEKVLKVTKKKSAGRQITSLQFSCGDPARILIASAGSKIRVSDGGAKINRKFEGRRGSKVLVPPSLTSDGQYLVSAGADSNVYIWDLDRPARGKSRTRGPRRVRSCEHFFSEGVTSVATWPGLAHQQEDLXRRRRGPPPRSAATASSARSGXFSADGARGAATWPEEKLLPSLRYVNCAGMDDCRAKVSAAWNKVVVTGGSDGVIRCFHNYGLPVKL

SEQ ID NO: 194867 - protein, 58 aa, Zea mays
  Clone ID: MRT4577_10930C.1.pep
NIVRKYIFIEHLFSTHFKAYNDYTTHAFNTLPRGSLARLQNVRSRVRRLCRSSGKLIL

SEQ ID NO: 194868 - protein, 36 aa, Zea mays
  Clone ID: MRT4577_109310C.1.pep
WLGFFFFFFGFFFFFFFFCLQINILDRRCINSKASL

SEQ ID NO: 194869 - protein, 111 aa, Zea mays
  unsure (1)..(111): unsure at all Xaa locations
  Clone ID: MRT4577_109311C.1.pep
SFPQPTAARWLVSPCSRPSSRSSPSPPPXGPMPAPRMAPLPAPPAXPRPPPLRRSPPRPPPXPSPMASPPAPPTDAPTDAPSAMTPXPQSPPHPPAPPPAPPRAPPCTRPP

SEQ ID NO: 194870 - protein, 386 aa, Zea mays
  unsure (1)..(386): unsure at all Xaa locations
  Clone ID: MRT4577_109312C.1.pep
RANIYEETILYYRKLKGAGFRPNASNFYTMINLLARHDDNETAAEILQDMRAAGCLCSSIVTFLVRAYGAVGRMHKVLPILQSCFDKILLDATSCSILVTSLVQNSLLEEALYILREKKWKDSAFEDNLYHILICSCKEGGNYNDAVRIYNQMPKSEHIRIXISCTMIDVFSTMERFADAETILLELKASASVLDMIAYSVIVRMYIKARRLKDACSVLAEMEKQKEIIPDKYLFLDMLRTYQKCGLLEKLADTYYWIRKSQVKCDEAMYNCIINCCGRAIPVDELSRIFDEMLQQGHLANTVTFNVLLDIYGKAGLFNRAEKVFIMARKQGLADIISYNTIIAAYAKGGNFLSMNYFVQMMQXRRFPVSLEAYNCMLDAYGKAGR

SEQ ID NO: 194871 - protein, 47 aa, Zea mays
  Clone ID: MRT4577_109313C.1.pep
NQEKVDTLAGGTLISVEAKRMRPWHNPRFWGERTLLRPVLSADAYMM

SEQ ID NO: 194872 - protein, 100 aa, Zea mays
  Clone ID: MRT4577_109314C.1.pep
HKKRGMITNNIKISGTFVELFVRRNCLCLLLLPNEKHVTDELTLKIWFPVTAMPPNYVMLLFMSYMLLPNSGTFVVVLLLPNSVVCVLLTLKIWLVCNYK

SEQ ID NO: 194873 - protein, 61 aa, Zea mays
  Clone ID: MRT4577_109315C.1.pep
SFLETEPILNFTQDPLFTLLPPKFFWPPYRERCFLFRSRFGFSGWTPDSVPGSFQSLILWL

SEQ ID NO: 194874 - protein, 73 aa, Zea mays
  Clone ID: MRT4577_109316C.1.pep
FNRAFKLERAWKNLEQHYFEVEEVYFHAFQIVHCTLDSQKLEDVGYHACLAHMLPMFNYVGFRSISFFLLILV

SEQ ID NO: 194875 - protein, 96 aa, Zea mays
  Clone ID: MRT4577_109317C.1.pep
RIRHERHITCTPISCHYLLGCSFISERGRGCGLGAKEEREYWAAAGCERGGGSFHQSVHPHPQRLMLTRWIRRGYRSGEKLTIDQEFEQYFSNLML

SEQ ID NO: 194876 - protein, 134 aa, Zea mays
  unsure (1)..(134): unsure at all Xaa locations
  Clone ID: MRT4577_109318C.1.pep
SSSQRQRAARDRRGQRQPXRSRGGRXAAGGGRRAPRGAPXPXPGRGGXPTXTTGRGGGRPGGAATAGRRGRRGTRAARPAPPAAAGTPPPGGHPPARTTRGTPEPPSAPTATAKAPTAATKRRPAPPGTTGPGA

SEQ ID NO: 194877 - protein, 71 aa, Zea mays
  Clone ID: MRT4577_109319C.1.pep
TVPNLLVNRAFRVHELQDHLLNEIHDLILYTVNAGTILASDIIDLTTSYVAHQLHLVQFLKLQYSHAKKDH

SEQ ID NO: 194878 - protein, 193 aa, Zea mays
  Clone ID: MRT4577_10931C.1.pep
MANQNFPAQNHPQTVVIVGASGGIGLGFVRYFLEQVPFPVKIWATYRQAIAELDHLAKENPDRLTLVPLDITEESQIAQFSQQLGKTEVNWLINCVGILHVEDNPPEKSLRHLQPSQLQQYFAVNSIGPVLLAKHFLPHLRHASPSVFATISAKVGSIGDNQLGGWYGYRASKAALNMLLKNTAISIRGMLRG

SEQ ID NO: 194879 - protein, 62 aa, Zea mays
  Clone ID: MRT4577_109320C.1.pep
MGGVSAASLALLWLLLLWVESRTLHEISNGLMVEVDPTYATYIQQALIVCNCKKRQSLNSGI

SEQ ID NO: 194880 - protein, 105 aa, Zea mays
  Clone ID: MRT4577_109321C.1.pep
MAAPGRVFTLLMLLAAAGTMAASDAAVVPATTSPSPAPTGWLKAHATFYGGADASDTMGGACGYGNLFTQGYGTRTAALSTVLFNDGASCGQCYKIACDRKRADP

SEQ ID NO: 194881 - protein, 137 aa, Zea mays
  Clone ID: MRT4577_109322C.1.pep
MPRANEMLRADSRMMVVFGALTSKPEQLTFEDSLRFVKKVKARDYMLYLSLFDILGRMELSQLDAYRELQLLFQNHPDLCEELEKFRPPVPIKQATNNIWPWVIVCAVPLVAVSLIPALGNPVLWFVQQTIGEKIAV

SEQ ID NO: 194882 - protein, 68 aa, Zea mays
  Clone ID: MRT4577_109323C.1.pep
KPIFPLKTLNPNLKKGIVMSKAFYFPLKRTMFSILLLLRDRKKRELPCVWGTKKNFPDDFLGPQTVDP

SEQ ID NO: 194883 - protein, 266 aa, Zea mays
  unsure (1)..(266): unsure at all Xaa locations
  Clone ID: MRT4577_109324C.1.pep
METSWLLLSGALLLSLLVLRLHAKNRRLPPGPPAVPLFGNLLWLRNSAVQVEPLLLKLFKRYGPVVTLRMGSQLTIFVADRRLAHAALVGAGAVTMANRPQAATSSLLGVSDNIITRTDYGPVWRLLRRNLVAETLHPSRVRLFXPARAWVRGVLMDKLRASGAAGDDEPRDVMEAFRYTMFCLLVLMCFGERLDEPAVRAIQDAERKWLLYISQQMSVFFFFPSVTRHVFRGRLQTARALHRGRRSSSCADHARREYKRLAKTAS

SEQ ID NO: 194884 - protein, 54 aa, Zea mays
  Clone ID: MRT4577_109325C.1.pep
IICLFFQECVFPCISIEGKRQQQDILPDQPRLRGTECSRGPNGYSIRKTHRKFN

SEQ ID NO: 194885 - protein, 58 aa, Zea mays
  Clone ID: MRT4577_109326C.1.pep
LVPLRLQPLSPQKKNRCSSQSAKPTTRLQPDLWLNHPSILRTGAATKYEPMTLTTTRQ

SEQ ID NO: 194886 - protein, 186 aa, Zea mays
  Clone ID: MRT4577_109327C.1.pep
YLICGLCVHFDIKFIFCGGGITTVACHWVPQASSGRCTIGWTRRTPTKELIPDILLNHDWIRALRMASYGFLLYGPGSYEWYQLLDRCMPKQTFVNLSAKVILNQIVLGPCVIAVIFAWNNLWLGKLSELPSKYQNDALPTLLYGFKFWIPVSIVNFGVIPLPARVAFMSSCSIFWNFYLSTTMSK

SEQ ID NO: 194887 - protein, 203 aa, Zea mays
  Clone ID: MRT4577_109328C.1.pep
RGPPREPLSSSSSSESIEQGGGWPIEFPFRQAVTAASLTFTGDTIAQVRSRIVDRRRCCPDSNTKELIPDILLNHDWIRALRMASYGFLLYGPGSYEWYQLLDRCMPKQTFVNLSAKVILNQIVLGPCVIAVIFAWNNLWLGKLSELPSKYQNDALPTLLYGFKFWIPVSIVNFGVIPLPARVAFMSSCSIFWNFYLSTTMSK

SEQ ID NO: 194888 - protein, 146 aa, Zea mays
  Clone ID: MRT4577_109329C.1.pep
MLVFFPLLDATLWGVIERLNGWKRYDKDTYMEMDVSELPPGEVMQIVWNGEPVFVRRLTHAEIKQEDEYPVDTILDKGKEVILTDAGATKLLVCSAVCTHLGCVPIPYLGAYNGWVCICHGSVYDKFGRVRQGPALENLGYVNNSV

SEQ ID NO: 194889 - protein, 100 aa, Zea mays
  Clone ID: MRT4577_10932C.1.pep
PIRRPVALPSVESEVAASSAQDRAKDILVVVSGLLFGFGCGTLPPAAMYLVWSLLAPPWASGYDDDVFNDDEGRLSDSQSPQKAGYVIIPHPYEFGAGKN

SEQ ID NO: 194890 - protein, 62 aa, Zea mays
  Clone ID: MRT4577_109330C.1.pep
LFSPPAIERLSGGVFEEVIVTNSILLPEDKCFPQLTVLSMANLVGETIWHVHRDGSVSSIFQ

SEQ ID NO: 194891 - protein, 40 aa, Zea mays
  Clone ID: MRT4577_109331C.1.pep
NWGFLAMTKGSTRYTNMHIIFSNFEIGNRIVQQLFWFRFI

SEQ ID NO: 194892 - protein, 64 aa, Zea mays
  Clone ID: MRT4577_109332C.1.pep
YHRVRKTMPALVATAWGGLLQLELTSSHLVEAAKRRKQLGTHMTVVEKMNKVETQSHPNKSVPK

SEQ ID NO: 194893 - protein, 417 aa, Zea mays
  Clone ID: MRT4577_109333C.1.pep
MSGIALAPEMTAGVTSPRRVSPKRTDDASTLAKDLLGVTLVPEMTVCSAPDATSPPSIDQEDRLTVVSIFGSTGSKEEDDPDSGWDFSDLSDPGAMRDFMIACDHCLSGCFDDGNDLDDEGYGPSHECSHVDQGDHNEGNHLDGKSHDDNKKEGGKEEEFPEVHNYFMIYGGQAANASARHRKQERREVYLVKVAAPVYLDWSDKPITFDRGDHPDFVPSLGRYPLVVDPIIGNVRLSKVLMDGGSSLNIIYAETLELLGDDRSEVRAGAAPFHGIVPGKRILPLGQIDLPICFGTPSNFRKEALTFKVIGPCYAKFMAIPNYTYLKLKMSGPNGIITIGSTYRHAYECDVECMEYAEALAESEALIADLERLSKEAPDVKRHAGNFEPVEAVKSVSLDPSNDASKKVQIGSELDPK

SEQ ID NO: 194894 - protein, 98 aa, Zea mays
  Clone ID: MRT4577_109334C.1.pep
QSNTIMNMKCPTAKALSVATLSALLILLFFVLRCGSSASPSPQLSIARRSRRLLWTPCRDANSCSTPVSGFRQFFKAPATVFESLKKMPKSRSNPSHN

SEQ ID NO: 194895 - protein, 1066 aa, Zea mays
  unsure (1)..(1066): unsure at all Xaa locations
  Clone ID: MRT4577_109335C.1.pep
MTLGTSDTWPRLGLRSRGTLGHFRDQRERFVMESHRREAPSLGPYQNGSESSKSPAEARGLPSHPAAAKTVDSVNEPAQKLGARPCTRATARPHEGTTRPTEASQQELRPQRSQTTPPRPQGLHPAGEHRRPPRSGCCANHPGETDNDQVQPRAQQEAPPRPSLGLGLGIGLGRRSPPRPTPELGLGLGFGRRSLPRPTSGLGLGLGLGKSHALARPWASALASEEPPPRPTSSSDRPRHKGHIITLLLASAGYEGTRLTSHQAYPGNSTCMYGVASENMQLALLLRQIKLRWDGLENSAARPAPTAVPTTQAKTDNKSRSTTEFGPGRNRKLRLARPQAPASGEGLRLARPPDLASTSGSGLERRSPPRPTPGLGLDLGLGRNHVLARPRPRPQEKSPPRPTLGLGRSRQQGIHHYPIPSLLRLQGTRPASHLAYPGDGPKRTDDASTLAKDLLGVTLVPEMTVCSAPDATSPPSIDQEVPSVFHPVPFRFSLDPPSDPAMVSAFVKAYPNLPRYRMWSTWDRLTVVSIFGSAGSEEEDDPNSGWDFSSLTDPGAMRDFMFACDHCLSGCSDDGHDVDDEGYGPSGECFHVNLGDHNEGNHLGMPEVDDPPGPASRVDIPRELAVVPXPCGGQDIQLEQIREMQARVDGEAGRLVQLRQNIEQEWAGQALTGGACRRAQDIQRRIIDNARAALPPAXCRQQPGESLREYIRRFLKQRTELPNVTDSDVIGAFLAGTTCRDLPQGEPKIDAPEASALRGMKKKAKNKSQAKRDAADANLVAATEHRNLWKPPRGAGAFDKMLKEPCPYHQGPVKHTLEECVMLRRYFHKTGPPTEDGKGHDNDKEGSKEEEFPEVHNCFMIYSGQAANASARHRKQEHREVCLVKVAAPVYLDWSDKPITFDRGDHLDFVPGPGRCPLVVDPIIGNVRLSKVLMDEGSSLNIIYAETLELLGVDRSEEALTFEVVGFRGTYHAVLGRPCYAKFMAVPNYTYLKLKMPGPNEIITVGSMYRHTYECDMECVEYAEALAESEALIADLERLSKEAPDAKRHAGEREIGSNLFLNDFGG

SEQ ID NO: 194896 - protein, 114 aa, Zea mays
  unsure (1)..(114): unsure at all Xaa locations
  Clone ID: MRT4577_109336C.1.pep
MYPECEIPFKLLLIGDSGGGKSRLLRRFAXNSYLDNXFTRVAVEFNIRTVVHDGKAILLRIWDTAGQERFMTIISSYYRGAHGIIHVSDVTDQESFNYVKQWLXSEXERYAGDN

SEQ ID NO: 194897 - protein, 147 aa, Zea mays
  Clone ID: MRT4577_109337C.1.pep
LVSWLGAARCPHPRRSSVAAWSRASSWQPAASPFQHFQQRSTQADADGAAPTWNRTRSRRSSSEWRLPTPNTFDVGRPRPAQLGLAAARAEDRKGKEESRSSPGRRQRGGSVVGAMRRRRAGRDKAIGRVRAPAARSRRPGFDPQGP

SEQ ID NO: 194898 - protein, 57 aa, Zea mays
  Clone ID: MRT4577_109338C.1.pep
IMEVLIMYLFHFESNESDQLIYGEVHGLMVLYACKNHQAPNRPVALILFKQKWAGCV

SEQ ID NO: 194899 - protein, 110 aa, Zea mays
  unsure (1)..(110): unsure at all Xaa locations
  Clone ID: MRT4577_109339C.1.pep
QSHENRQDILAIPSLRLILSVGIALVAVLCYWRLVIAGAVSXILXSTLPDLCMHSTNITIVFTLLMEITDPNIRSKPVGGDVTSVDSLRQMLHIGLLVLKDIGALMNDCN

SEQ ID NO: 194900 - protein, 119 aa, Zea mays
  Clone ID: MRT4577_10933C.1.pep
MAGRLTAAGSRILGGGGARAAASALRHRAGMGLPVGRHIVPDKPLPVNDELVWDNGTPFPEPCIDRLAPHIGKYEALAWLCGGLGFFAALGMAAVVNDKASNIPYTPKVYPYDNFDKAL

SEQ ID NO: 194901 - protein, 277 aa, Zea mays
  unsure (1)..(277): unsure at all Xaa locations
  Clone ID: MRT4577_109340C.1.pep
MDAPPPSQPDDAAPAPSSTLASAPSPAPTSNPPTSAAAAAPAPDSAIANPNPNLATASSASVPAASSSAPPIPRGGVVLGVPAPRSAQTPAGYTGFVPPPPLAHQFGSMHRGPDQPPPSSSQFRQPSPGTQNIGIVGSLNTSQISPGTISGPQKPRPGLPSSTPIPSGSQMLGSQRPPSQSLMRPMTVSSPSLASQQTPQSSSSTFRPQQRPQVSQPRPQQSQLVTPSQQNTILTQQQQQQKQQQSASHXNQQIAAPXQPQLSQHPTARTPNIMTPK

SEQ ID NO: 194902 - protein, 423 aa, Zea mays
  Clone ID: MRT4577_109341C.1.pep
SLPRTHVTEQPGPGNSSSSMDAPPPSQPDDAAPAPSSTLASAPSPAPTSNPPTSAAAAAPAPDSAIANPNPNLGTVANPAQTLEAPGPSSAAARPPPPRMRTPYTHLAAPITMSSSSAATATASSASVPAASSSAPPIPRGGVVLGVPAPRSAQTPAGYTGFVPPPPLAHQFGSMHRGPDQPPPSSSQRPPSQSLMRPMTVSSPSLASQQTLQSSSSTFRPQQRPQVSQPRPQQSQLVTPPQQNTILTQQQQQQKQQQSASHQNQQIAAPKNQPQLSQHPTARTPISMTPKPDLPAIQNVAVLQSVDTAATDANASETGTRLLTKRSIHELVAQIDPNEKLDPEVEDVLIDIAEDFVESVTTFACSLAKHRKSSTLEAKDVLLHAERSWNITLPGFSGDEIKLYKKQHINDIHRERLALVPTF

SEQ ID NO: 194903 - protein, 64 aa, Zea mays
  Clone ID: MRT4577_109342C.1.pep
RSMNIGASKMDTSHCTFHIIELQLHILSYICNFFYVFCLKSAPSVHLTVIDLIHVKMSLFWTIY

SEQ ID NO: 194904 - protein, 121 aa, Zea mays
  Clone ID: MRT4577_109343C.1.pep
VRDRVLSPALPFNAGSLKIRRWSALCSSIRRLLSFTRPRCRRLLLTVVHAAVAAYGHGRWSQRLFDGGVPLQRAPLFPLRRRGSHRRQRRPRMQNSRGRSLALRASNQKPHLGGSYIKAFT

SEQ ID NO: 194905 - protein, 167 aa, Zea mays
  Clone ID: MRT4577_109344C.1.pep
EYYMSQQLTDLGDVYSFGVVMLELIVAKQPIEKGKYIVREAKRVFDADDAEFCGLKDMVDARIMSTNNHLAAFGKFVQLALRCVDEVATARPSMSEVVKEIEMMLQSEGLSSASTSASTSATEFDVTKGAPRHPYNDPPLPKKDKDVSTDSFEYSGGYSFQSKVEPK

SEQ ID NO: 194906 - protein, 43 aa, Zea mays
  Clone ID: MRT4577_109345C.1.pep
MFFFFKKKKKKKKKKKKKKKKKKKKKKKKKKKKKKKKKKKTQH

SEQ ID NO: 194907 - protein, 201 aa, Zea mays
  unsure (1)..(201): unsure at all Xaa locations
  Clone ID: MRT4577_109346C.1.pep
MGARQAAAFLLGCVAALTVVVLLLQRRPEELTTRAPLLQVSGGGGAGPSSSPSQSTSSSPPAHTNNTTAAAGDPRLPPPPNSTDDHGEDEEEEEEFRGSGGRVVARXRTADXRTVIITCVNQAWAAPGSLLDLFLESFRVGDGTAPLLRHLLIVAMDAAAMARCRALHXHCYLYSPXRGVDFAPAKPFLSXDYLELVWSKL

SEQ ID NO: 194908 - protein, 74 aa, Zea mays
  Clone ID: MRT4577_109347C.1.pep
ANQYPSNWSACHAHIECIRALSHIWGFTNNKVSVNDSTIPVPNYRRSANTFANGLSTVTNLLTGPHQEPPARAL

SEQ ID NO: 194909 - protein, 132 aa, Zea mays
  Clone ID: MRT4577_109348C.1.pep
NRGGEVKKGNKPPVRNGRPLFHKKRNKKSWHKWAKKMVPGEKGFMDNTPNKGGSREQKLDPLGSPRRPKTHNWGGDQIGPITDRKGVPHPERKNRPTRGERKYEYGAPGGSGVKTLTRAKKRGPLPHAQKKD

SEQ ID NO: 194910 - protein, 53 aa, Zea mays
  Clone ID: MRT4577_109349C.1.pep
ASSSASQLEEMILSPPHLGRRHALKGCLLICSLLSGHCEPVGHEEPPCLSEER

SEQ ID NO: 194911 - protein, 123 aa, Zea mays
  Clone ID: MRT4577_10934C.1.pep
MAGRLTAAGSRILGGGGARAAASALRHRAGMGLPVGRHIVPDKPLPVNDELVWDNGTPFPEPCIDRLAPHIGKYEALAWLCGGLGFFAALGMAAVVNDKASNIPYTPKVYPYDNLRAELGDRP

SEQ ID NO: 194912 - protein, 77 aa, Zea mays
  Clone ID: MRT4577_109350C.1.pep
SLTFYAQVHVPPKVSGLSLSPARCITWGTDKSAEWSVHSNTACREPRDFYSFKCILGMHEQLFCSAYVNQPRTVETC

SEQ ID NO: 194913 - protein, 90 aa, Zea mays
  unsure (1)..(90): unsure at all Xaa locations
  Clone ID: MRT4577_109351C.1.pep
MDKIKSGINGFGMIRRLVDKAALHSDDDELVVENNPYISTDYMTYMYKYDTVHGQWKHHEDKVRDSKTLFFGENEXVAGLGCPNPEENPW

SEQ ID NO: 194914 - protein, 84 aa, Zea mays
  Clone ID: MRT4577_109352C.1.pep
LVVDFDHFSCRERTLVSSSGATAAGLVHGASGLRISEVHVHVAHASLQLGRGYDHEQVAAPEAVDVLLARRQQVVDEITDNLTH

SEQ ID NO: 194915 - protein, 685 aa, Zea mays
  Clone ID: MRT4577_109353C.1.pep
VAVTRPAERKGRTCCRRCGKSKWESKESCIVCDARYCGHCLLRAMGSMPEGRKCVTCIGQPIDEAKRSRLGKGSRILSRLLGPLEVRQILKVEKECQANQLRPEQLLVNGFPLDDEEMTDLLSCQRPPGNLKPGRYWYDKESGLWGKEGEKPDSIISTNLNFNGKLQPDASNGTAQVFINGREITKIELRILKIAKVQCPRDTHFWVYHDGGYEEEGQNNIKGKIWESPLTRFACALVSLPVPPTNFDATKDEAPYSSKTVPDYLDHKRIQKLLILGSPGAGTSTIFKQAKLLYGNRFTDEELENIKLMIQSNMFKYLGILLEGRERFEEEALAVPNHPSSVGDDPQQDESKSSSSNSCIYSINAKLKKFSDWLLDIIATGDLDTFFPAATREYAPVVDELWKDPAIQATYKRKDELHFLPDAAEYFLSRAVEVSSNEYEPSEKDVIYAEGVTQGNGLAFIDFTLDDRSPMSESFGDNHDAYPQQPVNKYQLIRVSAKGMNEGCKWVEMFEDVSMVIFSVALSDYDQLGAPASGSSRTLVNKMIQSRDLFEATIRQPCFRDTPFLLLLNKYDAFEEKIGRSPLSSCEWFGDFCPLRTHHNSQSLAQQAFYYVAIKFKDLYAASTGRKLFVWQTRARDRPTVDEAFRYVREVLRWEDERGVAGYCPDESFYSTTELSSSRLIAAAQ

SEQ ID NO: 194916 - protein, 90 aa, Zea mays
  unsure (1)..(90): unsure at all Xaa locations
  Clone ID: MRT4577_109354C.1.pep
MVGKLFFLPFCFFDGRRCFLLPLFLLYIQPNPKGFWPKLRFIRNPKKKPEGTAHPGGGRGQKNPTWNGITKPLLGVQTKPHISYXCATPA

SEQ ID NO: 194917 - protein, 108 aa, Zea mays
  Clone ID: MRT4577_109355C.1.pep
MDMDKAVGAFNTLIAAYGQTGRVTDARRLFSMIPKTQNQHKGHKRMVFERNVVSWNSMMMCYIRTGDVCSARALFDEMPHKDLVSWNTMIAGYTQASEMEEAEKLFWE

SEQ ID NO: 194918 - protein, 91 aa, Zea mays
  Clone ID: MRT4577_109356C.1.pep
HTLLHKEPFVHTFINLASLKSAVARSCGAPYSYQAPLIHNPFSQPCSMIKVLPRPIFVQFAPKIPFHLLTPTDRHTVVAHLLILHPSNIKL

SEQ ID NO: 194919 - protein, 60 aa, Zea mays
  Clone ID: MRT4577_109357C.1.pep
MEPSCVIHSGSAERWRAEASRAFQHYLDRAAPHTAKRAAVTLVDAAVYALAVYYVRSLYV

SEQ ID NO: 194920 - protein, 45 aa, Zea mays
  unsure (1)..(45): unsure at all Xaa locations
  Clone ID: MRT4577_109358C.1.pep
VLLRPLSQXEXIYIYSRPTLLVGSMSNIGRCIYQNKNFCTITKKK

SEQ ID NO: 194921 - protein, 178 aa, Zea mays
  Clone ID: MRT4577_109359C.1.pep
KLFEHNYRLYLGSRVVAPCFCCRSPCSMQKSGVRSGPTGAETTDTGTRNKMREETPGPKTSTPVRSPPPAHNNHLFINTWPAMRAHPSWQRPPLGCHIFFSLFCCRRTQTFTCCSLPRLFQAAYLIDLLIIIEIDPIIISAETSSIEVKQDCRPRDPAASSHRRLRSAPNRTTTTTTT

SEQ ID NO: 194922 - protein, 113 aa, Zea mays
  unsure (1)..(113): unsure at all Xaa locations
  Clone ID: MRT4577_10935C.1.pep
GVPIFQGPFFKGKLYLPFPVGFPDSLAPKQCKAFKTVFPPRPFSKFSNMEINXFGGPPLPFFSPLQEKMPRKQAPPSPGGFEEGPKIPGGAQKVQWAPPLTAFFQGLLGGGGP

SEQ ID NO: 194923 - protein, 218 aa, Zea mays
  Clone ID: MRT4577_109360C.1.pep
SRLMNSGIHHTAVLQSSLHTSTNCYGSNMLSKIGDSRVEQNQHVNLCSCDLGSRVVAPCFCCRSPCSMQKSGVRSGPTGAETTDTGTRNKMREETPGPKTSTPVRSPPPAHNNHLFINTWPAMRAHPSWQRPPLGCHIFFSLFCCRRTQTFTCCSLPRLFQAAYLIDLLIIIEIDPIIISAETSSIEVKQDCRPRDPAASSHRRLRSAPNRTTTTTTT

SEQ ID NO: 194924 - protein, 91 aa, Zea mays
  Clone ID: MRT4577_109361C.1.pep
GTKKMPAHSLVGVLVIKDKTCSGSLFFNKQGEGAFAGLQGKTKSLKIDSQQGCWSTGYLFNKTTWTYIFSDPPRKKKRELGNPSEGGPYFK

SEQ ID NO: 194925 - protein, 108 aa, Zea mays
  Clone ID: MRT4577_109362C.1.pep
LIDLLIMMEIDPIIIRAETSSIKVEQGLQTKEIPPPPAIVASDPLRTERQRLRDFASSGTRSRTCDARPPKQNNKNLAGKDESTRRGKVSRRTAILDLDPQMRLREGG

SEQ ID NO: 194926 - protein, 133 aa, Zea mays
  Clone ID: MRT4577_109363C.1.pep
DVTSFLFFTCCSLPRLFQAAYLIDLLIIIEIDPIIISAETSSIEVEQDCRPRDPAASSHRRLRSAPNRTTTTSRFRQLDTGSNAGLPNPAIRYEPAQHEANGFPDKSKQSSSPRALGEARSQGGRPSWIWRAR

SEQ ID NO: 194927 - protein, 50 aa, Zea mays
  Clone ID: MRT4577_109364C.1.pep
LVTSTCLRIDNERPRFPYTRCFMSVLYTMLNTLFHGSTMQPFRTSRGPRA

SEQ ID NO: 194928 - protein, 136 aa, Zea mays
  Clone ID: MRT4577_109365C.1.pep
SVQKFRSQLHKFTCWFCSTRESPILERSQRFDFILYYISVWTNVEDLHMYLRLSIFHLYLPCWSIGIFVSCKSVSNWWTCVENAKLQYDGFHYSSTEIMARFNRGYADGELIRYGSWLWRCGTHWLVCFNHGSWRC

SEQ ID NO: 194929 - protein, 37 aa, Zea mays
  Clone ID: MRT4577_109366C.1.pep
SQFFCSIRLRISRPSPGASSQSRSRRPPSALRMHRLT

SEQ ID NO: 194930 - protein, 35 aa, Zea mays
  Clone ID: MRT4577_109367C.1.pep
MAVLLETLPPRVLSVSYFVSIYQEIRLLHVVQAHI

SEQ ID NO: 194931 - protein, 39 aa, Zea mays
  Clone ID: MRT4577_109368C.1.pep
IYSYSETSLLFKREELRNGLTTLYNKCLMTYLIGLHFFL

SEQ ID NO: 194932 - protein, 196 aa, Zea mays
  Clone ID: MRT4577_109369C.1.pep
IVESIILGNRVVAPCFCCRSPCSMQKSGVRSGPTGAEATHTGTRNKMREENPGPKTSTPVRSPPPARNNHLFIIAWPRLFQAAYLIDLLIIIEIDPIIISAETSSIEVEQDCRPRDPAASIYRRLRSAPNRTTTTSRFLQIDTGSNAGLPNPAIRYEPAQHEANGFPDKSKQSSSPRALGEARSQGGRPSWIWRTR

SEQ ID NO: 194933 - protein, 184 aa, Zea mays
  unsure (1)..(184): unsure at all Xaa locations
  Clone ID: MRT4577_10936C.1.pep
IRHEGHCNCRVAGHRPRAWWHCSSGLGCHQEPISRQQRGPCRPPRRRFSDLCIGRLLRHCVLSPDEGHCQMLFATSVSRSPIAPLFSTFFMASMSATGLIGLGLCDMLCSPPSRRLGMTSFLRSSLRGPRLPLQPHKLSTALVLADRPSLRLEPSISIARTSSPRHPALFGPPAGYGGDNRRRX

SEQ ID NO: 194934 - protein, 223 aa, Zea mays
  Clone ID: MRT4577_109370C.1.pep
LRLYLGNRVVAPCFCCRSPCSMQKSGVRSGPTGAEATHTGTRNKMREENPGPKTSTPVRSPPPARNNHLFIIAWPAMRAHPSWQRPPPLGCHIFFLFFTCCSLPRLFQAAYLIDLLIIIEIDPIIISAETSSIEVEQDCRPRDPAASIYRRLRSAPNRTTTTSRFLQIDTGSNAGLPNPAIRYEPAQHEANGFPDKSKQSSSPRALGEARSQGGRPSWIWRTR

SEQ ID NO: 194935 - protein, 123 aa, Zea mays
  Clone ID: MRT4577_109371C.1.pep
LSAQRHHPLRWSRPADQEIPPPPAIVASDPLRTERRRLRDFSRSIQDPTRVCRIQQSDMSLHNMKQTDFLINRNKVAHREHSPRQGLKEDDHPGSGGRDEVACRRGTRPTMVVLVPGRPRGTQ

SEQ ID NO: 194936 - protein, 92 aa, Zea mays
  Clone ID: MRT4577_109372C.1.pep
PGFPQGFAGQRGVIQRAVNCLGRILGPNGPFKRPPGGPARVKDFPKNCPWPGSFFWFFFFFCFFFLVFFFFFFFFFFFFFFFFNSKKNKSYS

SEQ ID NO: 194937 - protein, 76 aa, Zea mays
  Clone ID: MRT4577_109373C.1.pep
IITYTYTYTHITPNTLASSRMVYFLSFLFLFLSSLLASLFSIRLLHLFRPSSPSASSLVLPSSPPMPTMLFAALAV

SEQ ID NO: 194938 - protein, 64 aa, Zea mays
  Clone ID: MRT4577_109374C.1.pep
EGDSLHSVKNWGRHISDLASCYCVSLSVLISVVNPVCRTCINVWRRGRKKGGGCTGSRIPARPA

SEQ ID NO: 194939 - protein, 73 aa, Zea mays
  unsure (1)..(73): unsure at all Xaa locations
  Clone ID: MRT4577_109375C.1.pep
DKRRAGSMSLSVFWDRCHHLVGLLRVFXDLRLHSKQIAGSNPPSSCVVHFFGVEGLVFTCSCLGRAGCSHWCC

SEQ ID NO: 194940 - protein, 106 aa, Zea mays
  Clone ID: MRT4577_109376C.1.pep
MAFQGKNRQVLEVDPADDPTAEVATAFDRLSVSPIPNPSASAAVVQVCSPYALNNSGTQQPQSSSTRDATMVPLPPASVLSYRYQEVLNCLHDAINEMQQVSMNLK

SEQ ID NO: 194941 - protein, 166 aa, Zea mays
  unsure (1)..(166): unsure at all Xaa locations
  Clone ID: MRT4577_109377C.1.pep
MSQEPERAAVTAASGELPPAKRKKTDPSFAECSPAVPAMATAGWSTLPPDLVRRVADSLLATNDIDCYMDYRAVCSGWRAATDDPRSDATDPRFRPRRWILLDEVFQSQGKEMLLLNIDTGRFLRKNLPQLVDYHAVAITHRGYLVLAEKSPPXRRSRPQPSYRAS

SEQ ID NO: 194942 - protein, 127 aa, Zea mays
  unsure (1)..(127): unsure at all Xaa locations
  Clone ID: MRT4577_109378C.1.pep
MLVKEFKMLPVLAAGMNHAAAHPGLRRHLVGPNNEXSFSGHNLRSSFPQTXKRRWSLSFTTRSERVGRQNGVQMTTPSEIPRGWWFPSDFSFGAASSADXSEGDWNGYVKGQNNWDQFCHNHPKRIL

SEQ ID NO: 194943 - protein, 254 aa, Zea mays
  unsure (1)..(254): unsure at all Xaa locations
  Clone ID: MRT4577_109379C.1.pep
MSPSLVLVHSLPLPSRRALPIQLPRRLAPKHPSQWSLRTPRRLAVFARASASVVVSPHGEGGGGTAAGRKSTGYRNRFLDLARLGAVAEGAAEAFFRSEIRRRLAVTAALIVLSRVGYFIPLPGFDRRLIPDSYLSFSALPADDLGDFSSELKLSFFQLGISHQISASIVMQVLCHVLPSLEKLRKEGLDGHEKXKGYIWWLFFVVCNCGCFYCVMLFPAVFSICCXYRVKHVIITSLLLVLGXMSMTWICAPL

SEQ ID NO: 194944 - protein, 144 aa, Zea mays
  unsure (1)..(144): unsure at all Xaa locations
  Clone ID: MRT4577_10937C.1.pep
RVXGXRVGVQNMGRTAGGGVEEAPSCRDEGERSSSHGVATCELRRGRSSSRAGGALARRKHGDNATTQERAGSGEATTWATCRDAGERSKDEVGASVQEQRLVELSAVEEQRAPWLGETPWGSSARGFGGRVWYHGRRRAGEAE

SEQ ID NO: 194945 - protein, 85 aa, Zea mays
  Clone ID: MRT4577_109380C.1.pep
RGLCFVQGRFQEGSFVVSKRFPFDWGLCLEICSRLMLCWRRPLFSLPFLTVTGTCRCRSPRCAASLPRRVVLTSRSPGVKQGRRC

SEQ ID NO: 194946 - protein, 504 aa, Zea mays
  unsure (1)..(504): unsure at all Xaa locations
  Clone ID: MRT4577_109381C.1.pep
PTRPILPIPQVIFWLVIPKLIREERVRLIMTILLLMFIFQFLPKVYHSIHIMRKMQKVTGYIFGSIWWGFGLNLFAYFIASHIAGGCWYVLAIQRIASCLQEECKKNNSCDLISLACSKEICFHPPWSSNVNGFACDTNMTSFSQRNVSTCLSGKGSFAYGIYLGALPVISSNSLAVKILYPIFWGLMTLSTFGNDLAPTSNGIEVIFSIINVLSGLMLFTLLIGNIQVFLHAVLARKRKMQLRFRDMEWWMRRRQLPSRLRQRVRKYERERWAAVTGDEEMEMIKDLPEGLRRDIKRYLCLELVKQVPLFHGMDDLILDNICDPAXRPLVFSSGEKVIREGDPVQRMVFILQGKLRSTQPLTKGVVATCMLGAGNFLGDELLSWCLRRPFVDRLPASSATFECVEAAQAFCLDAPDLRFITEHFRYKFANEKLRRTARYYSSNWRTWAAVNIQLAWRRYRARASTDLAAMAAPPLAGGPDDGDRRLRHYAAMFMSLRPHDHLE

SEQ ID NO: 194947 - protein, 100 aa, Zea mays
  Clone ID: MRT4577_109382C.1.pep
LGVFWGFFFFFFFFFFFFFYLNINSQRGAHKIYSVMGLITGGKSTKIHLLKMGGGGGVFKRGNVQKQPPPYKQGIPPSEAYNIGRRQGCDPQGLVSQGNG

SEQ ID NO: 194948 - protein, 368 aa, Zea mays
  unsure (1)..(368): unsure at all Xaa locations
  Clone ID: MRT4577_109383C.1.pep
VWFNLFXYFIASXIAGGCWYVLAIQRIASCLQEECKRNNSCDLISLACSKEICFHPPWSSNVNGFACDTNMTSFSQQNVSTCLSGKGSFAYGIYLGALPVISSNSLAVKILYPIFWGLMTLSTFGNDLAPTSNGIEVIFSIINVLSGLMLFTLLIGNIQVFLHAVLARKRKMQLRFHGMDDLILDNICDRLRPLVLSSGEKVIREGDPVQRMVFILQGKLRSTQPLTKGVVATCMLGAGSFLGDELLSWCLRRPFVDRLPASSATFECVEPAQAFCLGAPDLRFITEHFRYNFANEKLKRTARYYSSNWRTWAAVNIQLAWRRYRARTSADLAAQAAPPLVGGPDDGDRRLRHYAAMFMSLRPHDHLE

SEQ ID NO: 194949 - protein, 77 aa, Zea mays
  Clone ID: MRT4577_109384C.1.pep
LTVSEIHELSTSNSSSLDDLRQINTIEVGHGSHYMIQVVEVVFDSLQTLTMELMLQHYDFHGKANNECHWITRMAWS

SEQ ID NO: 194950 - protein, 173 aa, Zea mays
  unsure (1)..(173): unsure at all Xaa locations
  Clone ID: MRT4577_109385C.1.pep
PLEAGSRRPDQITDDTDGHQICTCPRCSRGSRHGATCPLHCPQSLQAAVILITSPPIYEPARIRDMYGDDEPSRQPERSNEAAGAYAQACIDVATELNHPVIDIWAKMQEFPDWQTSALSDGLHFTPVXNKILFEEVVKTLETSIGFSQERLPSDLPLFHEIDPKDPMKAFGA

SEQ ID NO: 194951 - protein, 242 aa, Zea mays
  Clone ID: MRT4577_109386C.1.pep
MRPRLVLFGDSITELSFASGGWGAALTDRFARQADVVLRGLSGYNTRWALKVLPRAMEGAAGAGAGADPAAVTVFFGANDASLPDQVQAHQHVPLKEYQSNLRAICAYFKERWPSTAVILITPPPIYEPARIRDMYGDDDPSRQPERSNEAAGAYAQACIDVATELNHPVIDIWTKMQEFPDWQTSALSDGLHFTPVGNKILFEEVVKTLETSIGFSQERLPSDLPLFHEIDPKDPMKAFGA

SEQ ID NO: 194952 - protein, 86 aa, Zea mays
  Clone ID: MRT4577_109387C.1.pep
QACIDVATELNHPVIDIWTKMQEFPDWQTSALSDGLHFTPVGNKILFEEVVKTLETSIGFSQERLTSDLPLFHEIDPKDPMKAFGA

SEQ ID NO: 194953 - protein, 242 aa, Zea mays
  unsure (1)..(242): unsure at all Xaa locations
  Clone ID: MRT4577_109388C.1.pep
MRPRLVLFGDSITELSFASGGWGAALTDRFARQADVVLRGLSGYNTRWRXFCACFKERWPSTAVILITPPPIYEPARIRDMYGDDEPSRQPERSNEAAGAYAQACIDVATELNHLDIYIWTKMQEFPDWQTSALSXGDDSPRRETRWSSGAACRRAQACIDVATGLNRPVIGSCTKMQEFPDWQTSALSDGLHFTPVGNKILFEEVVKTLETSIGFSQERLPSDLPLFHEIDPKDPMKAFGA

SEQ ID NO: 194954 - protein, 49 aa, Zea mays
  Clone ID: MRT4577_109389C.1.pep
LRSLLSLVEFIEFDIQSFGKTSPCVRMVEDSKKKRGGMKGRGKGGSGRE

SEQ ID NO: 194955 - protein, 347 aa, Zea mays
  Clone ID: MRT4577_10938C.1.pep
TGPIRCPPSSLSALAGEDPPGSKLQKELVEILGKIINDNIRLHKELETKKKEIGRRHEELEKLVMNSTNREKLEAAKEEIAKENRLLDLATLKKKEEDEKFLKLVKEQEQEKENVRKMLYDLEMQLASKQKLELEREQLRGNLEVWKHMGKEDAKSKEMLDKLHEALKEKDEEMEHIDSINQTLIIKQRRTNDELEEAKKELTTDLLNMSSARSIVGVKKMGELDNKAFLASCKEKTADELSLSILCSKWEDEIRQPEWHPFKVIDVGGQAKEIIREDDEKLQALKAELGVQAHDVVVKALLEMNEYNPSGRYPIPELWNFKEDRRAPMGEAVAYIVKQWKANKRKH

SEQ ID NO: 194956 - protein, 43 aa, Zea mays
  Clone ID: MRT4577_109390C.1.pep
LYARHAHQRDGAFQRVLQTGNHFKEHVKSMLVRASLLEHDHIQ

SEQ ID NO: 194957 - protein, 87 aa, Zea mays
  Clone ID: MRT4577_109391C.1.pep
MRVLLGGLAFLAFAGSATFTHSSGGCGWQPPAPVHLPAAVHLAPSVYLASSVHFPPAVQLAAAVQLSPAVHVPSPVYFSSSPFHYPT

SEQ ID NO: 194958 - protein, 190 aa, Zea mays
  unsure (1)..(190): unsure at all Xaa locations
  Clone ID: MRT4577_109392C.1.pep
MENAPRILILGLLLLLCDDVGPDVSQNCLCQPNFCCRKLRYXVTTDAYCVYGRQSGPCRSQXTGDIGGGKGRVGSDDFNTANVXTDMFFNDIKNQDGSDXDGKNFYTRRALLSVVDEYPGLLHAGTDVQGQRQIAAFFEHVTHETGYFCYISXDNKSNAYCDXSNRXRTARLGQKNYRRIPLQISRNYNY

SEQ ID NO: 194959 - protein, 254 aa, Zea mays
  Clone ID: MRT4577_109393C.1.pep
MGESSALQSILYGRGALRLLDQRKLPLEEVYIDVKDSADGWNAIRDMVVRGAPAIAIAAALSLAVEVNDHDFTGTPVEAASFVSKKLEYLVSSRPTAVNLSDAATKLQNLVSRTAETAKDAKSIFQVFIEAAEAMLVDDVADNKAIGSHGAEFLQRQLGSSRNISVLTHCNTGSLATAGYGTALGVIRALHSGGVLEKAFCTETRPFNQGSRLTAFELVHDKIPATLIADSAAAALMNNGQVQAVIVGADRIAA

SEQ ID NO: 194960 - protein, 64 aa, Zea mays
  Clone ID: MRT4577_109394C.1.pep
PNIAYHSYATGRVLAHSKLATLRSFYLISARKLARFTTHLAEHSWYWPIPNSPMLSTRLTITPC

SEQ ID NO: 194961 - protein, 62 aa, Zea mays
  Clone ID: MRT4577_109395C.1.pep
AYVGDHGVTVRAVSDDESGLIMLMKLASMWRILVKLVRLCSSITSTWRLRSLQLTVKGAERR

SEQ ID NO: 194962 - protein, 79 aa, Zea mays
  Clone ID: MRT4577_109396C.1.pep
GHGCGGSNKLKIFKEATGPGYQYHSVCKRSIIVKLEESGSFLSGYYVGVCIFSMVCTILLLYSLSLSFCNSARHLGDNS

SEQ ID NO: 194963 - protein, 163 aa, Zea mays
  Clone ID: MRT4577_109397C.1.pep
GTLEAGREKVISFPFHSSRFYTSAPNPIPARPPCRRRCPPRASASPRPPSRPSTPPSPPRADGPTRRPPPFTSSPRSSPPPPRRCSATRSPAPAAPPTPRASSSRRSTSASPSPSTASRPPPPPPPPPPQSPPPPPPAPAMTPTSTSPPSPNPSWPPSSARRP

SEQ ID NO: 194964 - protein, 100 aa, Zea mays
  Clone ID: MRT4577_109398C.1.pep
AGWMLLSGTTLVSTSHNNTQVNDVYSLLACAGIIPGAPSTPRRTFCYLSGVTDGGGNDCGRSHPAFPLDPSCHRPFDATGDVPSHLIATNDFFLMTRFMS

SEQ ID NO: 194965 - protein, 49 aa, Zea mays
  Clone ID: MRT4577_109399C.1.pep
VIAFHCEALCGTREWVRILPMRHFLSFFLRHFSHYEAMRVPLVSCQVHL

SEQ ID NO: 194966 - protein, 82 aa, Zea mays
  Clone ID: MRT4577_10939C.1.pep
RTWRRMYGLLSVDRLLVRPILMSCLCNAYSDEQYLIFLRLWCERYCHVHVHYDLEEAHGACQLQCFIPSAQTKCDTRNAPEE

SEQ ID NO: 194967 - protein, 114 aa, Zea mays
  unsure (1)..(114): unsure at all Xaa locations
  Clone ID: MRT4577_1093C.1.pep
FFPLVLVLNFLLTGRLLVRKGVAVGCGWQAMVAYINLXCVYCIGIPLXAPLIHRLLLDQGTVGRQDCMIPYSYTRFVILICVTFRTNXGKEVEEAQKRINKWDDGKAPLLSAQE

SEQ ID NO: 194968 - protein, 126 aa, Zea mays
  Clone ID: MRT4577_109400C.1.pep
TPFLFVPWYMTNEGHCFDYYLPDIQPNIQQDREPHMTLECEIEMTPSELTCHALVQAMTVTKHRAYSTKPYHGSSRILDEHIYEYIHRAGALILFRYICSNEGEHTLSGVCRPTSYKRNTMLYSGT

SEQ ID NO: 194969 - protein, 122 aa, Zea mays
  Clone ID: MRT4577_109401C.1.pep
IHSAVGRYGKLALAVHLHCMVDVVLVDPISLGGDVLVQAETSLGRPPPARRSTQSPYGLLVFRITATGWHARILALDRLQNPCAILVDAARTTMSVTSSPVAPALAMAIAVVLLNGNLVLWT

SEQ ID NO: 194970 - protein, 133 aa, Zea mays
  Clone ID: MRT4577_109402C.1.pep
MAVPLLTQKIVKKRVKQFKRPHLDRYKCLKPSWRRPKGIDSRVRRKFKGCTLMPNIGYGSDKKTRHYLPNKFKKFVVHNVSELELLLMHNRTYCAEIAHNVSTRKRKEIVERAAQMDIVVTNKLARLRSQEDE

SEQ ID NO: 194971 - protein, 69 aa, Zea mays
  Clone ID: MRT4577_109403C.1.pep
KKKKKKKNKIKKKKKKKKRKGKKKKKKKKKKKKIKNPNASSNPSFFNSGAPVLTAPCLLTLPCNFLFFF

SEQ ID NO: 194972 - protein, 70 aa, Zea mays
  unsure (1)..(70): unsure at all Xaa locations
  Clone ID: MRT4577_109404C.1.pep
RVDDRHIXGYIMKGNLPLSLNRPNLAATDFRGAQEFRADLRSYQGLVRAYLPLPKCKYALFTAPEAMKVM

SEQ ID NO: 194973 - protein, 83 aa, Zea mays
  unsure (1)..(83): unsure at all Xaa locations
  Clone ID: MRT4577_109405C.1.pep
MSEITRLKSTIYVGGLDQAVTTQTLTEAFLPFGEIVDVSLPKPDLPSSTDNHRGFGYVEFEVRQDAXGTIDNIDQSELYGRII

SEQ ID NO: 194974 - protein, 263 aa, Zea mays
  Clone ID: MRT4577_109406C.1.pep
MPSRTHTTLLPLIILPPLPSVPASLRTSPTCTGRDQQCTTTVRIVGFVTIAQSFFQHVYKLHGLLVAIVSKRDKIFTSIFWKELFKLTGVSLHMTSAYHPQTDGQTKRINQCLDTYLRCFVQTCPSKWVSWIASAEFWYNTSQHSSIGKSPFEALYGYVPRHFGVQVPNSSSTDATSPPDQTTSVTVVASPPGHLAFVAPRPSLLSYRTYLIPFKFMWLFYRVEWCLPAFAWCSKDWCNGHPFASRWLHGSGRIWKLSGNAFH

SEQ ID NO: 194975 - protein, 154 aa, Zea mays
  Clone ID: MRT4577_109407C.1.pep
CSMSLVTGLLVCLHSAAKITHKTQSITSVAAAWHADATINSLGRDQENPRTPSKACLQQQTPTSPFPMAGASSGEESDDDEWRSEDGVDTSRFTPFHATNVSFQKRQALVTYLENNRAGITVFGFVVDRTWLHALFMIEFSLVMWLLGKTIGIS

SEQ ID NO: 194976 - protein, 32 aa, Zea mays
  Clone ID: MRT4577_109408C.1.pep
SSTWYHEVRSRSRSNLVISPSESLPSPWQPNQ

SEQ ID NO: 194977 - protein, 157 aa, Zea mays
  unsure (1)..(157): unsure at all Xaa locations
  Clone ID: MRT4577_109409C.1.pep
SPVCALPPPGIRPDHGLRLAGSVYLXLHPSNTAFYLQDLQLRRPISLGDPSXSATMNVTMHSLNPNDHVCIFYNHLNGIVTYRDYGMTVTVSLTPQYHGHRDFTDCAPLLLTETVPVAVYNADXHQQDLDARSPTTAVQADGRQQXKVGHWLSGRYH

SEQ ID NO: 194978 - protein, 76 aa, Zea mays
  Clone ID: MRT4577_10940C.1.pep
SDTSSVATNEEGRVRHKIILVCFFHLFFLLLRYLYFLPVYCRELTVLAFGIHTYIWRKMNSKSYQRHSLSCQPTLF

SEQ ID NO: 194979 - protein, 91 aa, Zea mays
  unsure (1)..(91): unsure at all Xaa locations
  Clone ID: MRT4577_109410C.1.pep
ITSDQFFHARLLVDEXEARVAVRACKGGLGFVPDAGELASALADATGKMGRDARARTMKPGGSSHDDLRXLVQEIRKLFSLLQDCLPEQSS

SEQ ID NO: 194980 - protein, 74 aa, Zea mays
  Clone ID: MRT4577_109411C.1.pep
GRFLGGGSFRRSSATCYYDVSGYGVGLLVQDVVDALCVGHRVVIAHLRAASVIESLPEALPAVASDHSSSSVIS

SEQ ID NO: 194981 - protein, 124 aa, Zea mays
  unsure (1)..(124): unsure at all Xaa locations
  Clone ID: MRT4577_109412C.1.pep
MSAPKLSTLELAVLLSPTVLPPPAVVRASMSCSTVYSTLMPSLPLVQMGRAMPPLPRCGGISXLLQQVNNTPDRRTXICVWLKNVANGANESGTYISRAAALPNKCVVALPYKISTNVNCDTIN

SEQ ID NO: 194982 - protein, 64 aa, Zea mays
  Clone ID: MRT4577_109413C.1.pep
TGCDERGAFVYCSSVQALRLMSCRGCQNRLGKKLGIFCGAKNKMFLLKKGIYLIKHHKKCKIKC

SEQ ID NO: 194983 - protein, 68 aa, Zea mays
  unsure (1)..(68): unsure at all Xaa locations
  Clone ID: MRT4577_109414C.1.pep
KVVNAVNKEGGSLGYFDILSDQEVGRGXKTYYNWSTLPQLCSRWGLRGGCDIALEMDKSGQLKSTLSE

SEQ ID NO: 194984 - protein, 90 aa, Zea mays
  Clone ID: MRT4577_109415C.1.pep
MPSSRARASSGTAAAAMDPWIAQPSLSLDLKVGLPTPAKVVLVEETNNFLAVSRTKDREVEALEAELRRVGNQNKRLIEMLRALLVNYTE

SEQ ID NO: 194985 - protein, 113 aa, Zea mays
  Clone ID: MRT4577_109416C.1.pep
PKQVEFLEEVMREGFGHPGVKGIVMWAAWHAKGCYVMCLTDNNFKNLPQGDLVDRLLDEWRKVPEKPMTDSNGVFEAELFHGEYQVTVKHASLKEPIVQTVDLDTKSEAAIKA

SEQ ID NO: 194986 - protein, 62 aa, Zea mays
  unsure (1)..(62): unsure at all Xaa locations
  Clone ID: MRT4577_109417C.1.pep
CVAWVLGVVRLQGGGAGXALXNWVCXNLXHLRRPFGFASPAKRQGSTWIIILVGAYGFGGGK

SEQ ID NO: 194987 - protein, 221 aa, Zea mays
  Clone ID: MRT4577_109418C.1.pep
MGEEASCNAVSAMEAATNARPAKENGRAPAVAEVVAQEAATDPRLQGISDAIRVVPHFPKHGIMFNDITTLLLRPRVFKDAVDLFVERYRGMRIDAVAGIEARGFIFGPAVALAIGAKFIPLRKPRKLPGEVISEKYVLEYGTDCLEMHVGAIERPGERVLITDDLVATGGTLCAAIRLLERAEADVVECACLIGLPKFKDFYKLNGKPVYVLVESRESDK

SEQ ID NO: 194988 - protein, 62 aa, Zea mays
  Clone ID: MRT4577_109419C.1.pep
LLETRIDANDYYYGAYSGCATQRKTPLQVPMAKSHFLWGLTVDNLDHKALENGSFDFPKHAM

SEQ ID NO: 194989 - protein, 81 aa, Zea mays
  Clone ID: MRT4577_10941C.1.pep
SVFAHCTIRVGGFIEKKTLQLLDHVAVHSLRLYKEVLVLMPLPFAAPSYPFLSLFPEHDSSRVAVFIRTARTAAGPRGGSE

SEQ ID NO: 194990 - protein, 150 aa, Zea mays
  unsure (1)..(150): unsure at all Xaa locations
  Clone ID: MRT4577_109420C.1.pep
MSNPTACPPSLPPKRTFLPDSYRVVNIDALLDMPPYDLDSALSPRVPPLRCRXLXRKSMALVFKLIYAEQHAPAAETPHSCKTHVRDVIIVPEMIEIIVVVYDDHTFDHLVIKPEMIDLYLADVSISYRTVKHXSSGIVATRSSRDIPVI

SEQ ID NO: 194991 - protein, 64 aa, Zea mays
  Clone ID: MRT4577_109421C.1.pep
MCVYKKKKKKKKKKKKKKKKKKKKKKKKKKKKKIKKKKNKKNNKKAEKHSQQEWMKTPSLHSRR

SEQ ID NO: 194992 - protein, 72 aa, Zea mays
  unsure (1)..(72): unsure at all Xaa locations
  Clone ID: MRT4577_109422C.1.pep
ENMASHNFGTVGLLKQVPRTGRPTIWIYRVKDNNARIGSXTVPYEDPHVASLVVERLLNMDFRGRTIWVHIA

SEQ ID NO: 194993 - protein, 135 aa, Zea mays
  Clone ID: MRT4577_109423C.1.pep
SPVSAKCRDLGACFQLFFLVLPKAGSKGFLAGLWGQGSFLSPFFFRGGIYRGRVCFPPGPMSFCWGHKHKRGALGSWPVSGWVFKIGGPCWAGVGNNPGNAWVRWSPVVKCFTEWPPSLGGVPPLLFGPPGNFFC

SEQ ID NO: 194994 - protein, 190 aa, Zea mays
  unsure (1)..(190): unsure at all Xaa locations
  Clone ID: MRT4577_109424C.1.pep
MATAPRILGLRLLTLLCAAAAPGTPHNAAAVQYFCCSKYXYCXTTDPYCVDACQYHPCLSAAAIDDVGDAGTPGCVCANVANVLTDAVFNGIKNQFDSGCHANNFYTRNAFLSVVNAYPGFAHAXTDVEDRREITAFFWHVPHQNVRLCYITEINKSKVYCHACYRQCSCPANQKYYGRAPLQISWNYNY

SEQ ID NO: 194995 - protein, 69 aa, Zea mays
  Clone ID: MRT4577_109425C.1.pep
EGGFPFNPLQRITGEKGLEPPYLEGVQKVAEKPIWRDPFFFDLKKKVFGETQIKQVFFKGAFEINPPFP

SEQ ID NO: 194996 - protein, 66 aa, Zea mays
  Clone ID: MRT4577_109426C.1.pep
ISFQETNIFCGGAFLYGYCEIFILLKLDFDFSLLLVDLTKKTIKTGTEPIHQLPDRKYRRPRAQTQ

SEQ ID NO: 194997 - protein, 47 aa, Zea mays
  Clone ID: MRT4577_109427C.1.pep
SRQTYPNHYFSTALSFSQMGPHKPPLPMIGGGGVPNFNSCTKSSLIH

SEQ ID NO: 194998 - protein, 68 aa, Zea mays
  Clone ID: MRT4577_109428C.1.pep
WVPAAPPSRRLMPLSSFERRRAACQRASERGSAHPACRLSPCVARSVTAAGAAGLRAPRRAVGAGPFL

SEQ ID NO: 194999 - protein, 46 aa, Zea mays
  Clone ID: MRT4577_109429C.1.pep
APPFFFCPATFFCYKKINKLTLLHCYLNFSPYIDLFFKKHQFETHY

SEQ ID NO: 195000 - protein, 60 aa, Zea mays
  unsure (1)..(60): unsure at all Xaa locations
  Clone ID: MRT4577_10942C.1.pep
MSRGRPASLKGSTNSTHPVVQLTTMRTTSXVNCHRMSATSIQRSAIVYCLLQYYRSPLEP

SEQ ID NO: 195001 - protein, 71 aa, Zea mays
  Clone ID: MRT4577_109430C.1.pep
PPPYSSSSLSQPFNFYTPTSLTVVHPPFSQSIMFPTHSKTSARITAWGRHTLLCGAQRQSKDGRGGDWVSD

SEQ ID NO: 195002 - protein, 44 aa, Zea mays
  Clone ID: MRT4577_109431C.1.pep
AGPHLVWIIRSTCPAGLVGKLRFYPEKKKKKKDGKSARSKVIQG

SEQ ID NO: 195003 - protein, 114 aa, Zea mays
  unsure (1)..(114): unsure at all Xaa locations
  Clone ID: MRT4577_109432C.1.pep
RLLRDGNSSTYQTRPQRQPQRCGGGEXAGAGSSAGQRXRSRRGRGGGGQEGQXMKRAIVKLLTSLEALEAEEHADRADTADAGKPQLALIEFNADTRSHATMDYYAKMASSFDV

SEQ ID NO: 195004 - protein, 136 aa, Zea mays
  Clone ID: MRT4577_109433C.1.pep
MRRLYPRGPRRPRFGGRKRRGASFSSLLSSCGLCSRDTALLDCSVAPAPATALSRRGRSVCSWAEPVQRGRERKRSKEPHRIRMGQCASHPGPAAGGGGGVARRGCLAVAREQRSRFYIFRRCVAMLICWRKYKKI

SEQ ID NO: 195005 - protein, 137 aa, Zea mays
  unsure (1)..(137): unsure at all Xaa locations
  Clone ID: MRT4577_109434C.1.pep
SVSQTLLLCCCTCLSATAHTERSTTASCAYLDQNFALSMGCSLEATLCGNTGVAQVNIASAIPTLASVRMLPWAKANINLTGQALIVSTMEXMAYFIFADXKILFVERRHSFEQDPEHLKNTSFQGTGRPHPVFFRP

SEQ ID NO: 195006 - protein, 116 aa, Zea mays
  Clone ID: MRT4577_109435C.1.pep
LPPKDPHGPPFSPPHGQGVSPRQGHPPLGNPAQGQGVIAPPHRAAKKGDIFCPASCQGISSLNERLGPFCNVKLNFSRPEKKIPFPTVFHQVLWLLVFEQGLPLICNTLKAPSINC

SEQ ID NO: 195007 - protein, 71 aa, Zea mays
  Clone ID: MRT4577_109436C.1.pep
GDRPFGSRRQARGTALLLMVSAGPFMGLLSRHMLDTAMQRRCLSHEGELQVELWTRPLLEPQEIGTSCVSP

SEQ ID NO: 195008 - protein, 111 aa, Zea mays
  Clone ID: MRT4577_109437C.1.pep
PHFPFTQLFFAPPPHFFPFTHQAPLTFAVYLQQQQFFPFTQLVFLSPSPFFTQHRLLPFSLPVLPNGGPLLQLHQLFPFTHLFLTNSPVFSPHPLLGGALLLICFWVLVQK

SEQ ID NO: 195009 - protein, 80 aa, Zea mays
  Clone ID: MRT4577_109438C.1.pep
AQDPWPWPPPPSQRHCPWRKGSGSPSAPAALVLPEVAEAAPGISPSLKNFLLSIVCGGVVLVAIVGAVVAVSNFDPVRRG

SEQ ID NO: 195010 - protein, 64 aa, Zea mays
  Clone ID: MRT4577_109439C.1.pep
IKFFKPPHSPFIFSPPTDVRTGTLLGILFQGNPTNFNKNSGRQNFFVCLAPFSLAQKFGEAQQI

SEQ ID NO: 195011 - protein, 350 aa, Zea mays
  Clone ID: MRT4577_10943C.1.pep
HLAVLKTAANPRGDAEQRLVAMMAGALSSRIRRPPASHQHLAGLCGAEQRAEWQLLQHVSPCFGLALHGANLAILDAVADQRAIHLIDFDVSVAQHTALIDSLASRRVAGTCLKVTAVTDPTSPFTPALAQALAATGQRLKEHARQAGVEFRFRAVSCVAGEVEASRSRLGCDETGEALVVNLAFALSRVPDESVSPANPRDALLRGVRGLRPRVVTLVEQELGANTAPLAARFADACAHYGAVLESLDATLGRDSAQRARAEAALASKAANAVAREGPDRVERCEVFGKWRARFGMAGLRPVAIGQGVADRVKGRLGPAARPGFDVKLDSGRLAIGWMGRVVTVASAWR

SEQ ID NO: 195012 - protein, 122 aa, Zea mays
  Clone ID: MRT4577_109440C.1.pep
MAMAAATVAASLPVAQGLGKPLCAGSNAPSLRAVAGAPRRRSARTRMAVVRASAQKQHSAKEWAAAAAVAAALVLPEVAEAAPGISPSLKNFLLSIVSGGVVLVAIVGAVVAVSNFDPVRRG

SEQ ID NO: 195013 - protein, 153 aa, Zea mays
  Clone ID: MRT4577_109441C.1.pep
MAISTPRGRPGHQNQTTTRPRPDCKRLSPRPMAMAAATVAASLPVAQGLGKPLCAGSNAPSLRAVAGAPRRRSARTRMAVVRASAQKQHPAKEWAAAAAVAAALVLPEVAEAAPGISPSLKNFLLSIVSGGVVLVAIVGAVVAVSNFDPVRRG

SEQ ID NO: 195014 - protein, 156 aa, Zea mays
  unsure (1)..(156): unsure at all Xaa locations
  Clone ID: MRT4577_109442C.1.pep
MLPAAMAAGFRAAARAGVLIISVAIFSSLFLFEVXFTSCSFMKSSVSAARPAAGDTNTEFIRTSCKSTTYPNLCFSSLTSRSAAIGVSPQLLAHESLTVSLETAQSTSAMMLKLAHVQGLTPREVGAMHDCVEELSDTVDELRKSLGEMKQLMRKD

SEQ ID NO: 195015 - protein, 67 aa, Zea mays
  unsure (1)..(67): unsure at all Xaa locations
  Clone ID: MRT4577_109443C.1.pep
TKKLKKQYINNAIQIVCTGSWIAVVIHVPYHLLKVFMKIHVTLVRELEKKFSGKDVXIAATRRIVRP

SEQ ID NO: 195016 - protein, 32 aa, Zea mays
  Clone ID: MRT4577_109444C.1.pep
FLGLGTKIVSFLDPNGWKTVLVDNKNFFKELE

SEQ ID NO: 195017 - protein, 86 aa, Zea mays
  Clone ID: MRT4577_109445C.1.pep
MAHRTVRCATGAPTVRHRCANGRFQRLVLTESRWTHGAPDSEQSTVRCTPDSPVRCPFGIVRFNSTRCRGVMHGIREIGFLVIIQL

SEQ ID NO: 195018 - protein, 61 aa, Zea mays
  Clone ID: MRT4577_109446C.1.pep
GNIWLGIIYFFTYKKASAPLWLVQSRNSQGILVYKHRIITIQTLKDIPKGHGVTHVLFCKG

SEQ ID NO: 195019 - protein, 92 aa, Zea mays
  unsure (1)..(92): unsure at all Xaa locations
  Clone ID: MRT4577_109447C.1.pep
FTTMSMAKYNKRLMDVAKSDSQDLLLNKLIAEDILTEXERDILLWSRNIATQITRTTKRARIAVYHTTXSLETLIAYIYFTNFELSEQLMFQ

SEQ ID NO: 195020 - protein, 137 aa, Zea mays
  Clone ID: MRT4577_109448C.1.pep
MTAFQGKCHCGNTKWTAKLEQDQQSHILCHCNTCNQLSGGTYTLNQIIPKANLKITQGEDLGKYTYKGDSGKGVHCFYCKNCTAHVYHAQEAMGDDKIVLRTGLLEPEFKPAAEIYCKDRLGWEKEVAHSFETMPPS

SEQ ID NO: 195021 - protein, 119 aa, Zea mays
  Clone ID: MRT4577_109449C.1.pep
HAGEYLRRRSHAVLALLRRAADQLPIQVHLRARGPNALDGTDGFRFTCLPRFKDLIARINAEAEAEGQPTVTCVVGDSTMTFALRAARELGLRCATLWTASACGFIGYFHYRHLVERGM

SEQ ID NO: 195022 - protein, 116 aa, Zea mays
  unsure (1)..(116): unsure at all Xaa locations
  Clone ID: MRT4577_10944C.1.pep
MISDGLSRMKVVAAYLLAVLAGNASPSAEDLTGILESVGCEVDNERMELLLAQLSGKDITELIAAGREKFASIPCGRGRVAVAASAPACCGAAPAAXAKKKEKVEEKGKSDYXMGF

SEQ ID NO: 195023 - protein, 115 aa, Zea mays
  unsure (1)..(115): unsure at all Xaa locations
  Clone ID: MRT4577_109450C.1.pep
LSSALYDTSXASCPSLPASTXLPLALPPVPSAVPLPSFCRSXRAPPWPAEALPPPPRSSVACRPPLPPPLCPCSPXXSPSPSPPSRPSXSPPPPPLLPPPPPPLPPLPPPPPPPP

SEQ ID NO: 195024 - protein, 489 aa, Zea mays
  Clone ID: MRT4577_109451C.1.pep
MGSLPPVDGQRRPPHVVMIPYPAQGHITPMLQFAKLLHTRGFHVTFVNNEFNHRRHLRARGPNALDGTDGFRFAAIDDGLPLFEADATQDIPALCHSTLTTCLPRFKDLIARINAEAEAEGQPTVTCVVGDSTMTFALRAARELGLRCATLWTASACGFIGYFHYRHLVERGMVPLKNEEQLTDGYLDTIVDWIPGAPKDLRLRDFPSFVRTTDPNDVMLNFFIHETEGMSQASAVVINTFDELDATLLAAMAKLLPPIYTVGPLQLTVRNNVQANSPVAAIGSNLWKEQEAPLRWLNGRAPRSVVYVNFGSITVMSNEQLVEFAWGLANTGYYFLWNVRPDLVKSGDSAGLPPEFSAATEGRSMLSTWCPQAAVLEHDAVGVFLTHSGWNSTLESICGGVPMLCWPFFAEQQTNCRYKCTEWGIGKEIGDDVQRGEVESLIREAMEGEKGQEMLRRVTELRDSAVAAAGPDGRSMRNVDRLIEEVLLA

SEQ ID NO: 195025 - protein, 131 aa, Zea mays
  Clone ID: MRT4577_109452C.1.pep
GRVGGRVGYKAGALKKGMEHIYAKQCEFVAIFDADFQPEPDFLLKTIPFLVHNPKIALVQARWEFVNYDVCLMTRIQKMSLDYHFKVEQESGSFVYSFFGFNGTAGVWRVSAINQSGGWKDRTTVEDMDLA

SEQ ID NO: 195026 - protein, 65 aa, Zea mays
  Clone ID: MRT4577_109453C.1.pep
HQFILYCNYDNITSSQYCRFFFIERRRVAYHYTKKKKGLKQTDTNRRSGKRTKIKEGYKTSERTR

SEQ ID NO: 195027 - protein, 253 aa, Zea mays
  unsure (1)..(253): unsure at all Xaa locations
  Clone ID: MRT4577_109454C.1.pep
MSPFLAVVMNHAAPHPGLRSHLVRPNNDSFSRHHLPTSSPQSSNGMSKLXFTTRSGTVSRQYGDQMMIPSQIPQREWFPSDFTFVAVTSLYQMECAWNEHGNTESYCNLFCHYHPKRILDASNSDIATNSYHMYKTYVILLKEMLMNAYMFSISWPRILPKGTKEGCINPDGIKKYRNLINLLLDNGIEPYVTIFHWDVPQALEEKYGGFLDKSHKSIVERYTYFARVCFDNCGDKVKNWLTFYEPXTFTAFS

SEQ ID NO: 195028 - protein, 39 aa, Zea mays
  Clone ID: MRT4577_109455C.1.pep
TFRYLQEPSRIPVLFYGLKRREFFSPLMFCQRKKKKIWR

SEQ ID NO: 195029 - protein, 49 aa, Zea mays
  Clone ID: MRT4577_109456C.1.pep
FFLRLCYHPCCCPYQYSWPSISTCSSSMDSTNHGWRIFGKNKIYKIIQQ

SEQ ID NO: 195030 - protein, 125 aa, Zea mays
  unsure (1)..(125): unsure at all Xaa locations
  Clone ID: MRT4577_109457C.1.pep
MSHPVFLVQSFNNYGPMLALINLFIGLYFLMFHNISLYSYFFXFIFIFPIFYFIFCFYFYFLFLPLYLFFFFIFFFLYYFFLYFYFIFSFYFFYFIFYFTFLFLFYLFSFFLIIFYFFIYLFLFF

SEQ ID NO: 195031 - protein, 139 aa, Zea mays
  unsure (1)..(139): unsure at all Xaa locations
  Clone ID: MRT4577_109458C.1.pep
QARFGLPHGTALYARKFRLSCSEMNGRYFSNEFIVEVSVLHSVNRVAHPSHMLSSQQFLHRGHQPPSEMAGHSLASSHRNSMVPSAATLMIEECVGYLVLMVMLGLVRIHXLHRRVSEASGPAGAFSDPKDPDLFWDDS

SEQ ID NO: 195032 - protein, 121 aa, Zea mays
  unsure (1)..(121): unsure at all Xaa locations
  Clone ID: MRT4577_109459C.1.pep
GDKKAPQAGTSHNHGQNQARAQGTQPTDEKEQNEHARQTPRAXISTQFAGGIIMTHGDDAGLKLTPRIAPIQAIIAPIWKKGDEKAVAVEAXTQIQKYSKKARLRVKVDNSELLTPGWKFN

SEQ ID NO: 195033 - protein, 61 aa, Zea mays
  Clone ID: MRT4577_10945C.1.pep
LQLPVVYPIFHVILTATTKCEEFSSLNHLTTLQSVVYTTTQQPGCKLFLASYRQNNNSHAI

SEQ ID NO: 195034 - protein, 47 aa, Zea mays
  Clone ID: MRT4577_109460C.1.pep
WAPPMYQPTTEGHAHTPILRTTRRREWIEVQLTALNGDDTQGDPQPS

SEQ ID NO: 195035 - protein, 40 aa, Zea mays
  Clone ID: MRT4577_109461C.1.pep
INEAHGCLTELYSTGRVKELLAQGVQQSRYHEKTPEQERT

SEQ ID NO: 195036 - protein, 53 aa, Zea mays
  Clone ID: MRT4577_109462C.1.pep
HSLTTHGVCCILREPTCSSPAPIPYIPVNKCICTRFKNKMLKKAWVERDNYGP

SEQ ID NO: 195037 - protein, 475 aa, Zea mays
  unsure (1)..(475): unsure at all Xaa locations
  Clone ID: MRT4577_109463C.1.pep
MAPFQMRFGLQISPARSDDDEEEDEDDDDNEEEYDEMASEGTASPPMMLRPGRGGGGLVSAVVGALRRSLVMCSAGAVDIDDDDDEEEGGIEIGRPTDVHHVSHVTFDRFGGFLGLPADLEPEVPRRTPSASVSVFGVSPTSLQCSYDPRGNSVPVGLLMMQRKLYDRGGLKVEGIFRINAENSQEVYVRDQLNSGVVPNEVDLHCLAGLIKAWFRELPSGVLDALTPEQVMHCNTEGGCALLASMLPPVEAALLDWAINLMADVVEQENYNKMNARNIAMVFAPNMTQMADPLTALIHAVQVMNFLKTLILKTLKERNKKDEALEALQPCSSSPNDQDEHQVSEHLEKPSVLPNQKGFGFHMNDSATPVQVLGAEKTLHHHSQIRSHEXKVWNRXDHKKRQSDASSLLGSDSSNRFNSSGREFGSRNGASDRFSFRKGVERLCRHPVFQLNRSMKKSADAVVFDAPREARQAWV

SEQ ID NO: 195038 - protein, 80 aa, Zea mays
  Clone ID: MRT4577_109464C.1.pep
HPYHSGSPPYVPVGPMGVRVRSSSLMMACMMPWLHVDKTITQHVLIDCVRSVGGQQNNNEGRPLENPSLRLRAPDVKVVV

SEQ ID NO: 195039 - protein, 52 aa, Zea mays
  Clone ID: MRT4577_109465C.1.pep
IYWLLLLCLQSSTFPDTNNGVGKCRQYKLSPVFDSVKMNKKKKKSTCPGGRS

SEQ ID NO: 195040 - protein, 260 aa, Zea mays
  unsure (1)..(260): unsure at all Xaa locations
  Clone ID: MRT4577_109466C.1.pep
ADNEELTDLLAAEESKFSDDKSKKPLALMEDGKGGVFVRGLEEELVSSAAEIYRILERGSAKRKTAETLLNKQSSRSHSIFSITIHIKECTPEGEEMIKCGKLNLVDLAGSENISRSGARDGRAREAGEINKSLLTLGRVINTLVEHSGHIPYRDSKLTRLLRDSLGGKTKTCIIATISPSVHCLEETLSTLDYAHRAKHIKNKPEVNQKMMKSALIXDLYFQMDRLKQELYAAREKNGVYIPRDXYIADESXKKAMSEK

SEQ ID NO: 195041 - protein, 117 aa, Zea mays
  unsure (1)..(117): unsure at all Xaa locations
  Clone ID: MRT4577_109467C.1.pep
MALMPGGAHGAEAWDQMQVDQXYPLPPQAHHRPPTTPSMLGLLIDGSEPVTGHHLSTTIGGKNGKPKRTIIYMADTVVGTASFGIVCQAQCLETDETVAINKGLLDMRSNIMELLIT

SEQ ID NO: 195042 - protein, 36 aa, Zea mays
  Clone ID: MRT4577_109468C.1.pep
TRRPRTPPPRGGRRSTEAWCAYNSICCTELASIPPT

SEQ ID NO: 195043 - protein, 98 aa, Zea mays
  Clone ID: MRT4577_109469C.1.pep
ITFPLVFLSISATMTRDETRGVNNGMKLDPLSPVPKKFAFLQGASNRPVYNRGGSNTRHRCRTVFFREKKPIFAGRGLPTMGFRVQNPLSLSLGVLLV

SEQ ID NO: 195044 - protein, 93 aa, Zea mays
  unsure (1)..(93): unsure at all Xaa locations
  Clone ID: MRT4577_10946C.1.pep
FPINPLFLPLVRIHATDYLCTYTAXXVXXPFVSFXXXXHXXLSXXTTIXTPFLQXTIKITFKIKQYFIKYIFKKFFYYIYFQKIYSIYNNIFI

SEQ ID NO: 195045 - protein, 54 aa, Zea mays
  Clone ID: MRT4577_109471C.1.pep
YTTYQSSQYNTTSQQSLTLTQYISNTILTKTYILNNYSFPKAKTSYYFLLLTPL

SEQ ID NO: 195046 - protein, 96 aa, Zea mays
  Clone ID: MRT4577_109472C.1.pep
VDADHSSESQSVAPAEVRKEQPSEHQKDVDMEQLLDPQNQDHPWNPLDPVSDTAAKDSSEPKSDIATEKPAESQNNAEQSVEQQSEPHSDKSTERP

SEQ ID NO: 195047 - protein, 87 aa, Zea mays
  unsure (1)..(87): unsure at all Xaa locations
  Clone ID: MRT4577_109473C.1.pep
MICTLLKYLQTWXQALLKKXAIQKLVKFFQNCLEQYFGHILDAFLKIITKSSRLNTTMSTNGLTTLHIARLDSSNLVVAKVWRLEFI

SEQ ID NO: 195048 - protein, 253 aa, Zea mays
  Clone ID: MRT4577_109474C.1.pep
MAQRGELGRQLPLRGPLKALEADIHHANAMADAIQRNYGGACVQMRLSFSSLAPLFLYFIQWLDCGCCYALPSYLGLFHILICKVYADGDSSVSTYERRASLREFYAIIYPILQQLESSLIERDLKGKGRCKDIVSRRRMEDWKKVSGRDVEREDECGICMEACTKMVLPNCSHAMCIKCYRDWYKRSESCPFCRGSLKRIRSTDLWVLTNSNDVIDPAHLEKENVRHFYSYIDSLPLILPDSIFFFYYEYLL

SEQ ID NO: 195049 - protein, 259 aa, Zea mays
  unsure (1)..(259): unsure at all Xaa locations
  Clone ID: MRT4577_109475C.1.pep
SRPAGISILVCVSVPNLAAARARRHRQPSTIAPSPPAADQLLHPATRGQVLHPTVRSRLFVSCXEQVGKGNRPNTYLNSVGYAEVEKGFKDRTGIDVTKSQLKNKWDKLKEDFKAWRKLKLRQTGXGWNREKGTIDMDDDWWKRARADIPGCGKFRKLGLQNEDEMARCFGDITNIGCDHWSPRVANDSIATNVEQPDVVPMFETQDEEFIPATQDNEDNASTPSPGSGKRLARPVQGKGKKAKTGNALLIQEAVSSMA

SEQ ID NO: 195050 - protein, 53 aa, Zea mays
  Clone ID: MRT4577_109476C.1.pep
ILFKICYFTIFRYLFKRSLLCFAPVCKPRVCLVLLGCLETDCAKRSLSYAQVV

SEQ ID NO: 195051 - protein, 331 aa, Zea mays
  unsure (1)..(331): unsure at all Xaa locations
  Clone ID: MRT4577_109477C.1.pep
SHLAAARARRHRQPSTIAPSPPAADQLLHPATRGQVLHPTVRSRCQKLIGTLRIHRLFVSCXEQVGKGNRPNTYLNSVGYAEVEKGFKDRTGIDVTKSQLKNKWDKLKEDFKAWRKLKLRQTGXGWNREKGTIDMDDDWWKRARADIPGCGKFRKLGLQNEDEMARCFGDITNIGCDHWSPRVANDSIATNVEQPDVVPMFETQDEEFIPATQDNEDNASTPSPGSGKRLARPVQGKGKKAKTGNALLIQEAVSSMASSANEFVAKKDGKYSIDQVMEIVIACGAGYETNEHYIASELFVKKEQREMFMTLPTNEIRFNWLRRKYNDKHAK

SEQ ID NO: 195052 - protein, 259 aa, Zea mays
  Clone ID: MRT4577_109478C.1.pep
PSRRTSTASLTIDDCSIPASRRPAATSCNPRTSAASYSPFEMPEIDWNLENTQIVCKLFVEQVGKGSRPNTYLNSVGYAEVEKGFKDRTGIDVTKSQLKNKWDKLKEDFKAWRKRARADIPGCGKFRKLGLQNEDELARCFGDITNIGCDHWPPRVANDSIATNVEQPDAVPMFQTQDEEFIPATQDNEDNASTPSPGSGKRLARPVQGKGKKAKTGNALLIQKAVSSMASSANEFVAKKDGKYSIDQVMEIVIALWCW

SEQ ID NO: 195053 - protein, 62 aa, Zea mays
  Clone ID: MRT4577_109479C.1.pep
ICRILLKKKRVDGDYYVGGFEEIGEKGLKKMEGMFKEILGKEVLKCVKGYFGKIMRKIKMDL

SEQ ID NO: 195054 - protein, 67 aa, Zea mays
  Clone ID: MRT4577_10947C.1.pep
PKTQTWCFSIPAHSGSPDAAVGGGVNDNLPNRWFRPETDSPCSIRFIHIEEHAMKDLNRFYRSVRIV

SEQ ID NO: 195055 - protein, 58 aa, Zea mays
  Clone ID: MRT4577_109480C.1.pep
AVPGAVSRRRQSGLVQDRGAEVIRRRAAAAAANRRSFSDVSSCPFLGAMANIAIPWFF

SEQ ID NO: 195056 - protein, 61 aa, Zea mays
  Clone ID: MRT4577_109481C.1.pep
RLNTNTHVRGRVVDVRRWNIMTTRQQNDGATTPFVSRLCNLNSCYCRCMHRTTLTVRVVTH

SEQ ID NO: 195057 - protein, 193 aa, Zea mays
  unsure (1)..(193): unsure at all Xaa locations
  Clone ID: MRT4577_109482C.1.pep
MREIVHIQAGQCGNQIGAKFWEVISDEHGIDPTGTYHGDSDLQLDRISVYYNEATGGKYVPRAILVDLEPGTMDSVRSGPFGQIFRPDNFVFGQSGAGNNWAKGHYTEGAELVDSVLDVVRKEAESCDCLQGXQLTHSLGGGTGSGMGTLLISKIREXYPDRIMNTFSVVPSPKVSDTVVEPYNATLSVHQLG

SEQ ID NO: 195058 - protein, 79 aa, Zea mays
  Clone ID: MRT4577_109483C.1.pep
SATTGSHPPFPRNSDDQHEGTSIKLSPEFFPTVKIILNPSSSHDQRYVALLSISSETDTLTMTTSVTTSTYCSMTSIFS

SEQ ID NO: 195059 - protein, 40 aa, Zea mays
  Clone ID: MRT4577_109484C.1.pep
KILMTYSTSITTVSNILLAKVTFIGVRAHSKTATSSIASS

SEQ ID NO: 195060 - protein, 43 aa, Zea mays
  Clone ID: MRT4577_109485C.1.pep
GSTIITSSMKSRLTIQRMQYVTIASFLEPLSYLHYNDITHTIA

SEQ ID NO: 195061 - protein, 79 aa, Zea mays
  unsure (1)..(79): unsure at all Xaa locations
  Clone ID: MRT4577_109486C.1.pep
RCKQLICDPSYVKDRVEKVGQVIRVICILSHPTKNTNDANSCQIIIPHNXPVQXXXXXXSCLGLPELHIYWASALPLIY

SEQ ID NO: 195062 - protein, 175 aa, Zea mays
  unsure (1)..(175): unsure at all Xaa locations
  Clone ID: MRT4577_109487C.1.pep
CIGADYVVVPTMADIALKCPDIEGEDGDICKPRIEDLAHETTSXIYSALNVDRMLLKAGEWSRATVFFSTDDEKHIDDADIIYASANTHTKTLYLGADKAGYLTYCESAGRMIADVYNTDTIDDDKNTVHVKTDGAIEKMLTHNTMGINYQMLYHLYFLVEVTAIEDLLKPDREL

SEQ ID NO: 195063 - protein, 68 aa, Zea mays
  Clone ID: MRT4577_109488C.1.pep
MDAGHHMEIKEVAAAEAMMMGMPTVPSRFRRICVFCGSSQGRKKSYQDAAVELGEELVSRNIDLVYGG

SEQ ID NO: 195064 - protein, 38 aa, Zea mays
  unsure (1)..(38): unsure at all Xaa locations
  Clone ID: MRT4577_109489C.1.pep
SENQPSYVSTRGTTTASVRTLQPLRGXGSKDTHWTRXT

SEQ ID NO: 195065 - protein, 65 aa, Zea mays
  Clone ID: MRT4577_10948C.1.pep
STFEYIACIHCNIRFRLTDIVKSVKCVDFFKNRHAIFYGKNSGHRDIISRHNSGIYHESSKRPAT

SEQ ID NO: 195066 - protein, 268 aa, Zea mays
  Clone ID: MRT4577_109490C.1.pep
MPISLTMVRAAVGQMRSTASMASNLTQAQSLCRKAHQAGAKALFLPEAADYITTSGGLQLCKPVTTSEFVIGLQDCAKQYNLAISVGIHEPVSSDAQKVKNTLIWITPQGEIAQRYQKLHLFDMDVKDGPQMKESDGVERGLDLGHPFDSPVGRIGMQICFDLRFPEPALALRKRGAQVLLYPAAFTTPTGKAGHWEILLRARAIETQSYVIAAAQVGVHDDQGKRRSYGHSMIVDPWGKIVAQLGGDEGEDGKWADEGENAVAELDP

SEQ ID NO: 195067 - protein, 117 aa, Zea mays
  Clone ID: MRT4577_109491C.1.pep
LNGQCRDEFDEEKEPDRMVLVGWSGPVDKQTTNNGETKSVPSSSNTEDVDGTAEDISANPGMKRKLNEILEAKENFDALENPSDVDSSGTQVVEDDDNDDLVMFDEDPRQDKKMRLQ

SEQ ID NO: 195068 - protein, 74 aa, Zea mays
  Clone ID: MRT4577_109492C.1.pep
TGCHGNMVYVSTSIMDPPTVLSESKKANEPLTTVQAQCFYIALTTLRCLFSRVKPFIVGEQRILMVELIIASFS

SEQ ID NO: 195069 - protein, 104 aa, Zea mays
  Clone ID: MRT4577_109493C.1.pep
PKPDPGDGAPPASPRSGNSLSTVGPKLWLEGILEGLPNLPEGGAPCFFFAFFLGKRVFCAHAGLGFEAFLGCFGWDLLALFFFVVPTLFPEKSLMGSNNGPGVP

SEQ ID NO: 195070 - protein, 75 aa, Zea mays
  unsure (1)..(75): unsure at all Xaa locations
  Clone ID: MRT4577_109494C.1.pep
KRSTPSSPYPYVLHRDFVACPXLCGPVSLAHLAPLLCSPTLSPHQCRCRPSIPLLPSILLHLLGRVGGRVGGRVG

SEQ ID NO: 195071 - protein, 78 aa, Zea mays
  Clone ID: MRT4577_109495C.1.pep
NIKKHTKSNLINNNLTTRATEILSILALLALLSSASKLTYSSIQLNSSNFHYHTLNSMAYFKQLRTWKNPGLSDITRF

SEQ ID NO: 195072 - protein, 37 aa, Zea mays
  Clone ID: MRT4577_109496C.1.pep
SAIFFLKNSHVRFSFSKTVKMLRLYATLGDSCLPHIV

SEQ ID NO: 195073 - protein, 42 aa, Zea mays
  Clone ID: MRT4577_109497C.1.pep
FPTSHSYHLYPCLLQSVTRHGIVVGGQPPVPDPPFARWPPTI

SEQ ID NO: 195074 - protein, 152 aa, Zea mays
  unsure (1)..(152): unsure at all Xaa locations
  Clone ID: MRT4577_109498C.1.pep
MFLKTKRKNHRGQGGKKKKEGPAHPKKLKDKXPKGKKNTRDRKTGNRTHRKKKEEKPPARRKNRQKKNKGNESKSRLGEGQLHTKEPNQKTPAKKXQKRKKRQARNDRKQKKNRAKRPTRPGKTRQRRENKTPRDKRKEAKKKRRGKKQSRR

SEQ ID NO: 195075 - protein, 680 aa, Zea mays
  unsure (1)..(680): unsure at all Xaa locations
  Clone ID: MRT4577_109499C.1.pep
MLVLRRVSFLLSSPSPRAPLAKPLLLLRPPQTLAPTARQLVAMAASVPSAGGAGTMSRDAFRAAVTNTLERRLFFVPSFKIYGGVAGLYDYGPPGCAVKANVLAFWRQHFVLEEGMLEVDCPCVTPEVVLKASGHVDKFTDLMVKDEKTGNCYRADHLLKDFCKDKLEKDHTLSPEMAEEYNRVLAILDDLTAEQLGAKIREYKIVAPDTKNSLSDPYPFNLMFQTSIGPSGLSPGYMRPETAQGIFVNFKDLYYYNGNKLPFAAAQIGQAFRNEISPRQGLLRVREFTLAEIEHFVDPEDKSHPKFGDVSDLEFWMFPREDQMAGRSATRLKLGNSISEGTVNNETLGYFIGRVYLFLTQLGIDKDRLRFRQHLPNEMAHYAADCWDAEIECSYGWIECVGIADRSAYDLRAHSDKSGEKLEAHEKFAEPREVEKLVITPSKKELGLAFKGNQKLVVESLEAMTETEALDMKAALESRGEVEFKVCTLGKDVTIKKNMVSINIEKKKEHQRKFTPSVIEPSFGIGRIIYCLFEHCFYQRPGKTEDEQLNVFRXFPPLVAPIKCTVFPLVKLEKFEAVAKKISKALTAAGISHIIDMTGNTIGKRYARTDEIGVPLAITVDHTTSVTVRDRDSKDQIRVDVDEVASVVKEVTDGQSTWADIMWRYPAHTASAADEDGAQP

SEQ ID NO: 195076 - protein, 95 aa, Zea mays
  Clone ID: MRT4577_10949C.1.pep
QLLLSERVSNLEELPLNEYREYIKVQTDKGTEVATNLVILCTGIKINSSAYRKAFESRLASSGALRVNEHLQVEGHSNVYAIGDCADVRTPKMAY

SEQ ID NO: 195077 - protein, 499 aa, Zea mays
  Clone ID: MRT4577_1094C.1.pep
MAGDGADAAHGASARLEGVLTDASTPWARRAWGAAAIELPLLTRLAAPAVVMYMINYLMSMSTQIFSGHLGNLELAAASLGNTGVQMFAYGLMLGMGSAVETLCGQAYGAHKYEMLGIYLQRSAVLLCATGVPLAVIYGFSEPILVFLGQSPEIARAAAIFVYGLIPQIFAYAINFPIQKFMQAQSIVLPSAYISTASLALHLLLSWVVVYKVGLGLLGASLVLSLSWWLLVAAQFAYIVMSPRCRHTWTGFTWQAFSGLWDFLKLSAASAVMLCLETWYYQVLVLIAGLLPNPELALDALSVCMTVNGWVFMIAVGFNAAASVRVSNELGAGHPKSAYFSVWVVTALSTLISIMLGVLVLCLRNYISYLFTEGEVVSNAVADLCPLLAVTLVLNGIQPVLSGVAVGCGWQQFVAYVNIGCYYIVGVPLGALLGFVFKLGVKGIWAGMIGGTCMQTAILVWVTLRTDWNKEVEEAQKRLHKWEANKTTEPLLAGVSNHK

SEQ ID NO: 195078 - protein, 84 aa, Zea mays
  Clone ID: MRT4577_109500C.1.pep
FNNFFLVCRFLGVYPRFLLFPGGQKKTHWGTYETAHFIQGKQKGLNNILPRIHPILFFFFSQGTFLGYKKNGIFPKTIGSSGFV

SEQ ID NO: 195079 - protein, 56 aa, Zea mays
  Clone ID: MRT4577_109501C.1.pep
MIVAVTPCFPCNNNDVLVTSTCVSFVRLSSSAEMQSTNESGHIHTLGGGAIVISVP

SEQ ID NO: 195080 - protein, 81 aa, Zea mays
  unsure (1)..(81): unsure at all Xaa locations
  Clone ID: MRT4577_109502C.1.pep
MGPGAGAHYSARAAGGVFRDFRGRRAGIIKALTNEGGRGYXRCDPXKGNLCVYGDPNETWEGTLPAXEGPPXIPEPALGIN

SEQ ID NO: 195081 - protein, 134 aa, Zea mays
  Clone ID: MRT4577_109503C.1.pep
SYGRLGPSRPAGNPTSKPAVFSSITTKFYNSQLGIIPHSRSMESSAALLLLTLLLVADTAPQVAEDKQQESGVQRERLRCHTIFEDDCLLDAEGWQEGDTTWFRARSPARSPHHVQPECCTLGSRATSRVPSIM

SEQ ID NO: 195082 - protein, 59 aa, Zea mays
  unsure (1)..(59): unsure at all Xaa locations
  Clone ID: MRT4577_109504C.1.pep
DALPDAWSDSRXPATRGGCKYRSPGHYGSVITDRGTDGPTPWMSSPCLICSPKTPFVQS

SEQ ID NO: 195083 - protein, 116 aa, Zea mays
  unsure (1)..(116): unsure at all Xaa locations
  Clone ID: MRT4577_109505C.1.pep
GATLPVISFTGQKVRQVTIDLXSTPASTARAGAHRAIITDRQNTRRGTCSTFTRXHVRSTRRKSYQQKKTAKARTGTQRTPIHTSDGDVLGXPRPVXWAIWINRKEKRLAISTGIE

SEQ ID NO: 195084 - protein, 129 aa, Zea mays
  Clone ID: MRT4577_109506C.1.pep
MASSTPKTQHTHNNRSTEWTSEMRDRQARGKNPYVEENDASDAEPMRLGGYHIAESHMERERRGEAMFVLDNPEALMAHAQASGDSIAGQRLRFMRQLCGFDNDKYDDASTSSSSTRNTKRRVSDRVNR

SEQ ID NO: 195085 - protein, 193 aa, Zea mays
  Clone ID: MRT4577_109507C.1.pep
RPDLCPRSGPTAFAPSLLEPLGVANSNISAHKRPISPPLGRGPYSFELTRGSPMSSSSPCWSPSPGCMPADHHGRAQRPLPAPPLQADGRPTQPPGTPRRWRAVAPGTRPSPLLGRDTAPPLHRRPRSDPGDRALGVRAPALALARVLGSPHRPCSRSRPLLRRSPSPLLLQADPTPTELPHIFPRPTMSAGH

SEQ ID NO: 195086 - protein, 48 aa, Zea mays
  Clone ID: MRT4577_109508C.1.pep
YPHDHDLLDDLTTTSLPRHLPDHALTSFTIHSQPNGHDHFNHFLTATL

SEQ ID NO: 195087 - protein, 92 aa, Zea mays
  unsure (1)..(92): unsure at all Xaa locations
  Clone ID: MRT4577_109509C.1.pep
PDHAPRAISICCYREHLALMVSGSYTFIISQXSLTTSVIITQXLPPVTPTGFKQPAXQAYKLHQAIAAXSVLQHPIFQLQQRSFGHLTIQTI

SEQ ID NO: 195088 - protein, 1099 aa, Zea mays
  unsure (1)..(1099): unsure at all Xaa locations
  Clone ID: MRT4577_10950C.1.pep
MGDDIKSTLETLMANMQTLQSAVQANAAAIQALTDRSSSSSNEHRTSTGEHHNDRPPRFQKMDFPRYDGKSYFHQQCIMEEEKVWMASYNLEDGAQLRYIQIQEDEGGVPTWHRFKHLLNLRYGPPLRSALLFELADCRRTGTITEYQDHFQALLPRAGPMQEIQRVQLFTGRLGPPLSHVVRIHNPQSLAAAMGLARQIEQMELSTAAAAKPTHRDLLSIPAPRPALPVXDMVLGTRXLATLGPILWDFDARXTFYRQGQPICWHGVQGPTAPTLRTTSASPSLLDELLASFTGVFSEPRGLPPPRSRDHGITLVHGSEPVAVRPYRYPASHKDEMERQCAAMLEQVLVRRSFSAFSSPXLLVKKPDGSWRFCVNYRALNAITIKDAFPIPVVDELHGAKFFTKLDLRSGYHQVRMRPADIDKTAFRTHDGFYKFLVMPFGLCNAPTTFQALMNDVLRPFLRRFVLVFFDDILIYSASWADHLRHLRAVLTVLQQHRLFAKCSKCVFGERSIAYLGHVIFDAGVAMDPAKVQAVADWPKPRSTRAVRGFLGLAGYYRKFVNDYGAIAAPLTALLKKDDFTWNDDATTAFQDLKTTVTSAPILALPNFTRPFVVECDASTYGFGAVLLQDKHPIAYFSRPIAPRHRSLAAYERELIGLVQAIRHWRSYLWGRRFTPGALNTVADALSHHDTEETNGGAVLAVSTPRFDFNTRLHDVQATDPVLVALHEELAAGSRAAPWALTDDLVTYDGRLYVPPASPLLQELVVAVHEDDHEGVQRTLHRLRRDFHFPDMRRIIHDLVRACTTCQRYKSEHLHLAGLLHPLPVPTAVWADIGLDFVEALPRVRGKSVILTVVDRFSKYCHFIPLAHPYSAESMAQAFFTEIVRLHRVPQSMVSDRDPVFTSTFWKELMRLMNVKLHMTSAFHPQSDGQMEVANRVIIMYLRCFIGNRPRQWLRWLPWAEYTYNTAYQSSLRDTPFRVVYGRDPPSIRSYEPGDTHVAAVAKTMEEREEFLADVSYEVGDWVLLRLRYRPVASLSPAVQGKLQPRYFGPYSISELINNVAIRLELPPRAKLHDVFHVGLLKKWVGVGTCSQQQGDQQE

SEQ ID NO: 195089 - protein, 60 aa, Zea mays
  Clone ID: MRT4577_109510C.1.pep
PGGTVVTYDARRREVVPLDLAHQGARPSTRATTSLHGHTCIVSCPGEWIGEGQEDVTRGV

SEQ ID NO: 195090 - protein, 87 aa, Zea mays
  Clone ID: MRT4577_109511C.1.pep
LSLCSGIANSDIQLVLYSLPRSALPQRSYSHCPSVPFLHQCLVSYLYRAFFLLVHCQCHCKQALISPGFLEPTASAKIFARQSSPER

SEQ ID NO: 195091 - protein, 45 aa, Zea mays
  Clone ID: MRT4577_109512C.1.pep
TVLVLLACSAPYLQPSYVVACQPPMSPVGLSRPKWFCVRAPKILR

SEQ ID NO: 195092 - protein, 88 aa, Zea mays
  Clone ID: MRT4577_109513C.1.pep
SCGISFMRLPFIFAISEFKSCRCPGNSFDARFIAILRDPHLARTMGSRLHILFQSISGSLVAEVLVPLRYALSSSSQCYSWNPQMETL

SEQ ID NO: 195093 - protein, 128 aa, Zea mays
  unsure (1)..(128): unsure at all Xaa locations
  Clone ID: MRT4577_109514C.1.pep
PRARGPRRPPHRAKPPPPAGTPRPRAAPPPSPRTPDPTAPPAQQPQPXTGRQPTARXPTLSAREEPNRAPPPPRNTKPETTQTPXPRPEPXPPASTAAPXPPAQPSPRRAASPRGEGHGFLSVQKKVH

SEQ ID NO: 195094 - protein, 261 aa, Zea mays
  Clone ID: MRT4577_109515C.1.pep
YVKVDDKKLAIGTLSIDKYPQIQFDLVFNKEFELSHTSKTTSVFFSGYKVEQPIEGDEMDLDSEDEEEELNIPVIKENGKGDGKEEQKNQEKAVAATASKSSLGLEKKSKDDSDDSDEDESDDSDEDDSDDSDEGEGLSPDEGDDDSSDEDDTSDDDEEETPTPKKPEAGKKRGAENALKTPLSDKKAKVATPPAQKTGGKKGATHVATPHPAKGKTPANNDKSTEKSPKSGGSVPCKSCSKTFNSEMALQAHSKAKHGAK

SEQ ID NO: 195095 - protein, 41 aa, Zea mays
  Clone ID: MRT4577_109516C.1.pep
SRVTTHARPKKKKKKKKKKKKKKKKKKKKKKKKKKYKKKKN

SEQ ID NO: 195096 - protein, 85 aa, Zea mays
  Clone ID: MRT4577_109517C.1.pep
GQEGLQGKKDSLAAKCPRFSNHNQINGYWIKKKFMKGCCPDPLAITKRLPLLQTVTYEGHALLHKQTQNQSPFPGLPFSYLTEYI

SEQ ID NO: 195097 - protein, 303 aa, Zea mays
  Clone ID: MRT4577_109518C.1.pep
MEFWGLEVKPGSTVKCEPGHGFILHVSQAALGESKKSDSALMYVKVDDKKLAIGTLSIDKYPQIQFDLVFNKEFELSHTSKTTSVFFSGYKVEQPIEGDEMDLDSEDEEEELNIPVIKENGKADGKEEQKNQEKAVAATASKSSLGLEKKSKDDSDDSDEDESDDSDEDDSDDSDEGEGLSPDEGDDDSSDEDDTSDDDEEETPTPKKPEAGKKRGAENALKTPLSDKKAKVATPPAQKTGGKKGATHVATPHPAKGKTPANNDKSTEKSPKSGGSVPCKSCSKTFNSEMALQAHSKAKHGAK

SEQ ID NO: 195098 - protein, 689 aa, Zea mays
  Clone ID: MRT4577_109519C.1.pep
MAPVSLPPGFRFHPTDEELIICYLKRKINGRQIELEIIPEVDLYKCEPWDLPEKSFLPSKDLEWYFFSPRDRKYPNGSRTNRATKSGYWKATGKDRKVNSHRRAVGMKKTLVYYRGRAPHGSRTDWVMHEYRLDERECETDTGLQDAYALCRVFKKTAPGPKIIEHYGAVHHPIEQTQWMGSSVERSPTLDLSSDVRGDDFDSSSFSFPTEAPMDSSMHGGLFGMQMSAPHEDAKWMQFLSEDAFNATNPFFTNPASSSFSCLPSKVDVALECARLQHRLSLPPLEVEDFPHDVSLDTKASVLRSSNPNNEVDILQEFLSVASASQELINGTSSSYAAEMWAGAGTSSTSGTHYVNELSSLFEFGVKAKEEADNFYHMDCIGTSAGFSPKPVRVDEPVRLVEIADMEEFKEEKRRVENLRGVRLHNNDDLGEIPTDCCITQYPISDTADISGEAGHLTNPTSAGGLDTAPIFSQSQPDDFAIGFSDDADPNASFDLCERVDVKHGLFVSTVGAPKTFFHHVEPSKKVSFHLNNNPVASDDDVSKATGKSRSPIISVMTTKDSGSSFSVFSKLKALIRDKFLVKKLPSSCQRSLLGSKETAAVSELLQMVVSSLLLTPTEVTGPTTMTTEQEELARKAMKPGPRRCDGSHAWLLPLPKRSKGISSMFFSGKWAFLTSALAIRAPGPGCNH

SEQ ID NO: 195099 - protein, 37 aa, Zea mays
  Clone ID: MRT4577_10951C.1.pep
SCNLNPWSRAGEARWSVRRFSSREACDSCDCECRSDD

SEQ ID NO: 195100 - protein, 134 aa, Zea mays
  Clone ID: MRT4577_109520C.1.pep
RSVCWLSPGLGPRGVRLPSSCLSPGLLCPWPRAPCPLSWACRCGVLVLLPRLWEQSSLSLLVRLSPPPPSGRLVCSAACASVAVLPRPGSAVLGVGSHVPPAGSGGSVSPAPGCRLSRGPSLRRSPRVCVRLGV

SEQ ID NO: 195101 - protein, 85 aa, Zea mays
  Clone ID: MRT4577_109521C.1.pep
SVFNNNFSKLGLFYQQLTMAIQSAQVRPQKGTNAPPNETYISCLFWPNPFIPNSMGPVFSFQTTQKNVPKIKGKFGDPIISDIFL

SEQ ID NO: 195102 - protein, 165 aa, Zea mays
  Clone ID: MRT4577_109522C.1.pep
PLSPVSSSSNLNPSPPPASSTALPSQEASSTSPSSSADRSLRGASRQELANHQQSLAAAPAPDAELAGETEEQRGKFLVLRLYEALNARDARRAQELLAPDLEWWFHGPPAHQHMMRLLTGAGTNAEFRFCPRSVDAFGSTVIAEGSAGQLLYWVHAWTVGPDGV

SEQ ID NO: 195103 - protein, 95 aa, Zea mays
  unsure (1)..(95): unsure at all Xaa locations
  Clone ID: MRT4577_109523C.1.pep
YVGNSRXETLIIDSKSIQLHAIVPIPGGSVDKDISLSPDGQYVLTNSNDRFIRVYRNILPAKGSREEIRNMSTHSYECGGQFDSIKVHGTCCLIF

SEQ ID NO: 195104 - protein, 80 aa, Zea mays
  Clone ID: MRT4577_109524C.1.pep
SCSLTAPAKQHNLFTYDLVLKYLCSSKRLLSIFMYNFLILHHAYQKKKMQSNRFCLCLILFPSVYVTQQFYTCSCILSLQ

SEQ ID NO: 195105 - protein, 127 aa, Zea mays
  unsure (1)..(127): unsure at all Xaa locations
  Clone ID: MRT4577_109525C.1.pep
MDILATLIQQQHPITLTLLAVVDLQQSATYAQMIAQSSLAYIQIIPQLLLPHIIWGVASVTLRXTALLQLQASATQAQPXYNARTALTHEPFVAHLTLRSVEPHHLLPSMPPLSHLALENPXAYLQQ

SEQ ID NO: 195106 - protein, 161 aa, Zea mays
  unsure (1)..(161): unsure at all Xaa locations
  Clone ID: MRT4577_109526C.1.pep
PTRPRTRGVDEDDGPVTSVSGAPDGRHIAIGLNSSDIQMWDTSSNALLRTLRGVHQSRVGSLAWNNNILTTGGMDGVIVNNDVRVRSHIVQTYRGHQLEVCGLKWSGSXQQLASGGNDNLLHIXALSMATNSVPGQNQWVHRMEDHTAAVKALAWCPFQSN

SEQ ID NO: 195107 - protein, 42 aa, Zea mays
  unsure (1)..(42): unsure at all Xaa locations
  Clone ID: MRT4577_109527C.1.pep
QKPGPQGPGRPSLPQGGPRNGPPPSGPQNFXPKIXQPPGGPK

SEQ ID NO: 195108 - protein, 45 aa, Zea mays
  Clone ID: MRT4577_109528C.1.pep
GNPGVRKWQVLQKAGGSTPYEEPKDFRPKFPLTSMGHFKSQPLNL

SEQ ID NO: 195109 - protein, 184 aa, Zea mays
  unsure (1)..(184): unsure at all Xaa locations
  Clone ID: MRT4577_109529C.1.pep
ARNSARLWWESSSELIAFKTEMKKVFKMTDLGTLSYYLGIEVHQGDKGISLCQTSYVKKLLEKVGLSQCNPCSTPMEAKLKLSKDSDSSRVDSSEYRSLIGSLRYLLHTRPELNFSVSYLSRFMEAPSQDHLAAVKHLLRYVAGTMELGLFYPRGTHKNVVITGYSDSDLXGDLDDGRSTSGTI

SEQ ID NO: 195110 - protein, 101 aa, Zea mays
  Clone ID: MRT4577_10952C.1.pep
STVQISCFTRSTVDSLKIFHFDLRLQGQQHDLLNLMKSEASHSTMLLATECKDDWKTSLIVYTTHVEDSTKKFQRPSFKFLKQIDIEKHGLYDAYNIILLR

SEQ ID NO: 195111 - protein, 158 aa, Zea mays
  unsure (1)..(158): unsure at all Xaa locations
  Clone ID: MRT4577_109530C.1.pep
LYFGLCFXLLLEIGLIKLGADDFDRQFWVMSKVFLVRMAFLGAATVQILHSIFTYRDYEVLNYGLLQTLVEKVRALEENAGGRAPSYASESEESLRDYSWVFDELADDVDSKMDPTYVVPPERSPPTRRRDQIVVAEETGENSVTTFVSRKYNLRARK

SEQ ID NO: 195112 - protein, 73 aa, Zea mays
  Clone ID: MRT4577_109531C.1.pep
KQAQMPASNSLPPPPFSLKQVTLCTVRFFAGGIAMQVSNLNILPLDGVYPEHNSSGPCYELGPARPDLAVWLP

SEQ ID NO: 195113 - protein, 174 aa, Zea mays
  Clone ID: MRT4577_109532C.1.pep
MLATTCSRPPCPCPCARSRRLPAATFGARRTSSAKRRAPRRAAAAVRCGLLPVDPWAPTMDSQSVASQLFAVSLFPYLGFLYFMTRSKTAPGLTLFGFYFLLVFVGATIPAGIYAKVHYGTSLSNVDWLHGGAESLLTLTNLFIVLGLRGALRKLEEEGTDEIVSEASQEKSSV

SEQ ID NO: 195114 - protein, 165 aa, Zea mays
  Clone ID: MRT4577_109533C.1.pep
MLATTCSRPPCPCARSRRLPAATFSARRTSSAKQRAPRRAAALRCGLLPVDPWAPTMDSQSVASQLFAVSLFPYLGFLYFMTRSKTAPGLTLFGFYFLLVFVGATTKVHYGTSLSNVDWLHGGAESLLTLTNLFIVLGLRGALRKLEEEGTDEIVSEASQEKSSV

SEQ ID NO: 195115 - protein, 138 aa, Zea mays
  unsure (1)..(138): unsure at all Xaa locations
  Clone ID: MRT4577_109534C.1.pep
LMIRLSSQTNELYHLEAGAXMNIISXGDKLDLSVEXGSXFAAEVVISTTDLEQHTXIEHTLTNAKLSVXISLTEATVQYNSIADGXFLVITGQTFIVSIVVKGFGYSNKTXFLVGMFVVQIGESAYVLLMRATRMHLI

SEQ ID NO: 195116 - protein, 416 aa, Zea mays
  unsure (1)..(416): unsure at all Xaa locations
  Clone ID: MRT4577_109535C.1.pep
KTWKWKKPGVSHEPVVADEASTAREVGVRAAAYRRRRTPPWHEVRRLRTVTEDVVTGYRMHIKGWRSRYCSIYPHAFIGTAPINLTERLFQVLRWSTGSLEIFFSRNNPLFGSTFLHPLQRVAYINITTYPFTAIFLIFYTTVPALSFVTGHFIVQRPTTMFYVYLAIVLGTLLILAVLEVKWAGVTVFEWFRNGQFWMTASCSAYLAAVCQVLVKVVFRRDISFKLTSKQPAGDEKKDPYADLYVVRWTWLMVTPIIIILVNIIGSAVAFAKVLDGEWTHWLKVAGGVFFNFWVLFHLYPFAKGILGRHGKTPVVVLVWWXLHLRHHRRAVHQHPTHPRARRQARRRDRKARRRRTPPWQEVRRLLPLAVKRRAASIVMHAHIPPALMVTMVSRQGEECTRSRSSIHRLLSTAAR

SEQ ID NO: 195117 - protein, 99 aa, Zea mays
  Clone ID: MRT4577_109536C.1.pep
KIRAGFLNLFKSHGVLDRGNRAQPKKFPWGGRGRITPPVGGAQAHRLFFPGAPAPDMGPFLGERGKKFPPIPVCRTEKGAPPTKGPFFLGPKRFLSQPW

SEQ ID NO: 195118 - protein, 381 aa, Zea mays
  unsure (1)..(381): unsure at all Xaa locations
  Clone ID: MRT4577_109537C.1.pep
AAVVAEEATIAEAVAVCAAAYEKKTGWGSDIGWVYGTVTEDVVTGYRMHIKGWRSRYCSIYPHAFIGTAPINLTERLFQVLRWSTGSLEIFFSRNNPLFGSTFLHPLQRVAYINITTYPFTAIFLIFYTTVPALSFVTGHFIVQRPTTMFYVYIGYLEGTLVILAVLEVKWAGVTVFEWFRNGQFWMTASCSAYLAAVCQVLVKVVFRRDISFKLTSKQPAGDEKKDPYADLYVVRWTWLMVTPIIIILVNIIGSAVAFAKVLDGEWTHWLKVAGGVFFNFWVLFHLYPFAKGILGRHGKTPVVVLVWWXLHLRHYRRAVHQHTPHPRPRRQARRRDRKARRRPPWQEVRRLLPLAVKDRSIGAANPASSCMHIPALMMIW

SEQ ID NO: 195119 - protein, 100 aa, Zea mays
  Clone ID: MRT4577_109538C.1.pep
YDDQLLTKPHFDNWTKWFGIGGSWSAKKDLPRLRGVFQLGGQTRSIKHSLAAPECGCVAQRTYSRRTLYEPTTNLFKMVIKVRAEYNDIKNETLTKMDPC

SEQ ID NO: 195120 - protein, 151 aa, Zea mays
  unsure (1)..(151): unsure at all Xaa locations
  Clone ID: MRT4577_109539C.1.pep
LKKLNQINTPFDFWTKLKEKRMRREREGGEGGRKKIQILAGTSTKCVCVGSLHLHSSSTNHRAAVLRRRWMDERERVHSSPWRLTIVTIRAGGICACMTMLAARRFTARGSSRRTSCHGGVRRRRAFRSRRRACRRXPWMCGMLMYFPAGP

SEQ ID NO: 195121 - protein, 92 aa, Zea mays
  Clone ID: MRT4577_10953C.1.pep
RTMNTFIPCGLNNILHYGTNRKPVRASHAFGHLKVTGGASLTCRGQIWWCRPKCCLCLGPVMWSASVLSGPLSGPWPGPIILTWINMVGGRF

SEQ ID NO: 195122 - protein, 116 aa, Zea mays
  Clone ID: MRT4577_109540C.1.pep
APASGPPPSPGARRTWLSSPPSVHCPPRRVVVQPAHAVVDLQHSCMHHYFYHVLAYAATVIALDPEVMAHWHHQLHPLVSLGLAVLATVAQDLVALLLREAVGAPTRPPTRPPTRT

SEQ ID NO: 195123 - protein, 95 aa, Zea mays
  unsure (1)..(95): unsure at all Xaa locations
  Clone ID: MRT4577_109541C.1.pep
SDIQSPPISSATWPESFEQGRPCRQSIFPTLHQNFPSSLDWVTTSRMHHRQLRVVLAQRQLCREFLLRICLLTSAVTPTGILFVXKKKRWSACNS

SEQ ID NO: 195124 - protein, 61 aa, Zea mays
  Clone ID: MRT4577_109542C.1.pep
LTCVDSVNDHKFKQIWPLALMLKYSLGHLSLAIGSPHDKKAVLLSASCKPQTPLPVSINES

SEQ ID NO: 195125 - protein, 57 aa, Zea mays
  Clone ID: MRT4577_109543C.1.pep
HSFVFSQLRRSLRFSLYVILKTGCALIFDFRIILCLTAILPGLRLVGVKQAIVSKKT

SEQ ID NO: 195126 - protein, 115 aa, Zea mays
  unsure (1)..(115): unsure at all Xaa locations
  Clone ID: MRT4577_109544C.1.pep
MVVDKVAYDHRPPAPSAGINLHVGSCXGKGDLGTVEFLHGXPEIWYSLRHHSLXVAVAGYRAIAPDCRGYGLXDQPTENEEAYWVWDDLLEDVLAILEALSXPKAFLVGKDFCAL

SEQ ID NO: 195127 - protein, 73 aa, Zea mays
  Clone ID: MRT4577_109545C.1.pep
GVREVQINAAVVVRRRRSFPLRSLVLHLRHSIPCPPAVGYPDAPIILHYPAFFPVLFEAPLSSGILSPGYRFF

SEQ ID NO: 195128 - protein, 71 aa, Zea mays
  Clone ID: MRT4577_109546C.1.pep
VFRNNKTLHPLSGCYQVQMGQKKNPPSSSITPSNLNLRPRFPFWLRKSLASNAGSKRPSFVFSIGKRFELF

SEQ ID NO: 195129 - protein, 84 aa, Zea mays
  unsure (1)..(84): unsure at all Xaa locations
  Clone ID: MRT4577_109547C.1.pep
RHITRLLDEDGXPAFTLGNRVSCYALKHWTEHVHPVKLEPYNPDYQYEYMLWTXSLYIRNCYRCVRMVNNIYLNYYALHGDEAH

SEQ ID NO: 195130 - protein, 83 aa, Zea mays
  Clone ID: MRT4577_109548C.1.pep
HASALTYDTAHVLPHGTAAMIPIPLVVPSLPMRYLCTYYGADQTGHMRRVTHVPPSEIYHRAADCRAASPVGVRRADFSYNAD

SEQ ID NO: 195131 - protein, 450 aa, Zea mays
  Clone ID: MRT4577_109549C.1.pep
MPMSSTAQMASLAVLIISLVFAALASDAAAGVRVELTRVHADPSVTASQFVRGALRRDMHRHNARKLALAASSGGTVSAPTQDSPTAGEYLMALAIGTPPLPYQAIADTGSDLIWTQCAPCTSQCFRQPTPLYNPSSSTTFAVLPCNSSLSVCAAALAGTGTAPPPGCACTYNVTYGSGWTSVFQGSETFTFGSTPAGQSRVPGIAFGCSTASSGFNASSASGLVGLGRGRLSLVSQLGVPKFSYCLTPYQDTNSTSTLLLGPSASLNGTAGVSSTPFVASPSTAPMNTFYYLNLTGISLGTTALSIPPDAFLLNADGTGGLIIDSGTTITLLGNTAYQQVRAAVVSLVTLPTTDGSAATGLDLCFMLPSSTSAPPAMPSMTLHFNGADMVLPADSYMMSDDSGLWCLAMQNQTDGEVNILGNYQQQNMHILYDIGQETLSFAPAKCSAL

SEQ ID NO: 195132 - protein, 97 aa, Zea mays
  Clone ID: MRT4577_10954C.1.pep
QPQQKIIFLTSNQQAGPTSTQYNIATSKPDQMPPSLMGDGTTKKKNMMLGGSKSRGKKKNRCYKPQGVYLKAVVGPQVSKEASKQMFLPHERRRGQN

SEQ ID NO: 195133 - protein, 51 aa, Zea mays
  Clone ID: MRT4577_109550C.1.pep
SLSSRSYLKSASISASKCVVATKKHPEDDGIAEEMEGAVNGLSEKVSRMHS

SEQ ID NO: 195134 - protein, 75 aa, Zea mays
  Clone ID: MRT4577_109551C.1.pep
GQRTGKNKSMLVTAHQVHFGGFDSLAQYYQLSNGSSIPTVKLWNNSLFSESNASSCLKKPVAQSLQNSQPLQWLF

SEQ ID NO: 195135 - protein, 100 aa, Zea mays
  Clone ID: MRT4577_109552C.1.pep
YFTRVVCCVLFESVKQSPGCHGPWQSNPCFIWPLFFYATLVLVGGLGGERIFFPKFWPRVGLVCVLSCPSWGLKNSPTLFCFSVWAECAVQPPALPPVPS

SEQ ID NO: 195136 - protein, 72 aa, Zea mays
  Clone ID: MRT4577_109553C.1.pep
IGRGGSFMGTPKKVYHIWATRTDPNTFSLVGVKGPATGIWVCRVPIASRATGPTQGKKGRVFPMSKCKHLGF

SEQ ID NO: 195137 - protein, 391 aa, Zea mays
  Clone ID: MRT4577_109554C.1.pep
MRPSLCCAPLFLLLLLHLAFARPLFPLPSKTKNEEKKPIQTFRPYNIAHRGSNGEIPEETAAAYMRAIEEGADFIESDILASKDGALICFHDVTLDDTTDVAKRKEFANRRRTYEVEWFNVTGWFVVDFTLEELKTLRVKQRYSFRDQQYNGMFSIITFEEFISIALDADRTVGIYPEIKDPVFINKHVKWADGKKFEDKFVDTLLKYGYKGQYMSENWLKQPLFIQSFAPTSIVHVSDFIDSPKVFLIDDISVRTQDTNQSYWEITSDDYLAYISKYVVGLGPWKDTIVPASGNYLMPPSDLVARAHAHNLQVHPYTYRNENQFLHFNFFQDPYNEYDFWINTVGVDGLFTDFTGTLHRYQELTSPHRKDETANSLLVKISQMISAYEGL

SEQ ID NO: 195138 - protein, 124 aa, Zea mays
  unsure (1)..(124): unsure at all Xaa locations
  Clone ID: MRT4577_109555C.1.pep
GCTNFIFTEPAQLFEKYMDRGFDMLAFLCNQIVEQEPCTNVDIVQFASTHSNGEXPGLLEVDXQGDCGMNQLHMSEXIRGGLVGDGLIGHYDTCSDDQDERAVEGYTSTNWSLGIEKDIKRLLG

SEQ ID NO: 195139 - protein, 102 aa, Zea mays
  Clone ID: MRT4577_109556C.1.pep
RQQANMSFRRCRGKSKGPKDESRTTNAGMQIPVMTHHALSQGREVGRVLQYWCARLPLSRAKVSLDTADETDKQPEDRLQEEAHGDVSSYISHRATTKNSQS

SEQ ID NO: 195140 - protein, 112 aa, Zea mays
  unsure (1)..(112): unsure at all Xaa locations
  Clone ID: MRT4577_109557C.1.pep
MPNTDSLVTGLGCSTDACSVKNAFSTYREALMSXNILRRDTQRAHGLXXITFSTXEAMXRNAIEVMNPWELDCRTMTDNEAQYRXDRCGCSGGYGGGRGCCGYGGGGRRDGG

SEQ ID NO: 195141 - protein, 161 aa, Zea mays
  Clone ID: MRT4577_109558C.1.pep
GDLIATSPTKQRFASSANLLTRSTIEGSKSGSRGAERAIVLQIVLPEEHSSEGTPVHAADSSLTTTGHHSDFFSGLTQVTSASLAHRFHGNVQPPHNKMVAPRPCNVCLSSGVTHLHMGEPLLNISTGIYGLGVVKCTSCQSTSTEGSSFSPSCGWSGVYR

SEQ ID NO: 195142 - protein, 65 aa, Zea mays
  Clone ID: MRT4577_109559C.1.pep
SLPYKFMLMFMQILQIKVLLLVFKKLDAIFFALFFCCGESHSFLCKHGIVTHQFISMRHIGNFYF

SEQ ID NO: 195143 - protein, 137 aa, Zea mays
  unsure (1)..(137): unsure at all Xaa locations
  Clone ID: MRT4577_10955C.1.pep
FTISYLFVFNIFLLFVSQFSLHFFYVFHFSYYSFVHFIXYFCFLSFFFNYFFSSILYFYFLIIFICLHFLYFXFLFVYLFHLLFYFPYYCLIFVLFFLFYFFLLFPLFFLFYPFFFYYFNXHIFFLFFFFFTIFIFF

SEQ ID NO: 195144 - protein, 110 aa, Zea mays
  Clone ID: MRT4577_109560C.1.pep
WSCPLQPAHARCCAKRSRRRARRTSSMVTASTTVLFLFRNATISFRPNRFPARGETEGGWRETAGIFFSLLSRRLILSCSSLTSLPRFSAVIEPPNQNCKCVFRQFCCFA

SEQ ID NO: 195145 - protein, 81 aa, Zea mays
  Clone ID: MRT4577_109561C.1.pep
MAPGAGDDSDPASYIHTVQHLIERCMTFGMSMEECMEALAKRADVQPVVTSTVWKELEKENKEFFDKYRQWISEKRSGSTS

SEQ ID NO: 195146 - protein, 62 aa, Zea mays
  Clone ID: MRT4577_109562C.1.pep
MAATKLQALWNHPAGPKTIHFWAPTFKWGISIANIADFAKPPEKISYPQQVGTDKLFNQFKL

SEQ ID NO: 195147 - protein, 59 aa, Zea mays
  Clone ID: MRT4577_109563C.1.pep
PAPIGKKNAFYLSPVLCQEERSVEDLVPRVRHAGEAPVSANRCPGVRRCSLRGGCSSRA

SEQ ID NO: 195148 - protein, 48 aa, Zea mays
  Clone ID: MRT4577_109564C.1.pep
PSASTSRPLLQLSSTSTARNQTASLIPPCITNERRSTQGQQALRNGEN

SEQ ID NO: 195149 - protein, 64 aa, Zea mays
  Clone ID: MRT4577_109565C.1.pep
GVGGPGGKSCLFSSRTHFWASGLEKVPRFNNPCWAKKKKKKKKKKKKKKKKKKKKKKKKKKKKK

SEQ ID NO: 195150 - protein, 521 aa, Zea mays
  unsure (1)..(521): unsure at all Xaa locations
  Clone ID: MRT4577_109566C.1.pep
MKPDVRKDAGCGVTAFGVSCFDIKSFVASLALLTLVMALWQLHPYQPLLSASRPSSICPLLPRPTISASSRAASTAAAFPSANSSTNAASTKAASSXSRRYDXKPAASVLPAARPRDPNKREFRSYGSAAALFVQMGAYRGGPRTFAVIGLASKPAHVYDTPYFKCEWVPNQEPSSPAPPRAVRTKAYKMLPDWGYGRIYTVVVVNCTFPTNPNADNRGGKLFIQAYYSTASRRYERFVALEEVPGSYDESRFRPPFPYEYLYCGSSLYGNLSAARMREWLAYHAHFFGPKSHFVLHDAGGVSTEVRAVLDPWIRAGRVTVQDIRAQAEYDGYYYNQFLVVNDCLHRYRHAANWTFFFDVDEYIYLPDGRTLQEVLGQLEPYTQFTIEQNPMSSKLCVEDPTMEYSRKWGFEKLVFRNSITRVRRDRKYAIRARNAYSTGVHMSQNVIGRTTHKTESLILYYHYHNSINVMGEPCREFVPRPNNGSKVMFEGIPYVYDDNMERVAGEIKRFEEETLGTVRT

SEQ ID NO: 195151 - protein, 162 aa, Zea mays
  unsure (1)..(162): unsure at all Xaa locations
  Clone ID: MRT4577_109567C.1.pep
TWKRSASTAPRRSSGRRTPSAPPRTGSTRPITSRRAAPGRAGLSPWPRXRRHCGPVSGERXSRRRRRATAAVATALRRSXASGRRGRCQXGATRPWGRARPPTRRLARLHTSKPRTSGRXSSPRPSNKXRTRWGSTAARRRRTRPRRPHVPRWRSTTKVGRP

SEQ ID NO: 195152 - protein, 69 aa, Zea mays
  Clone ID: MRT4577_109568C.1.pep
SGVKSFEHQCLPIKEQSFTFWCLQYLTNTLDMNLFLESSSPQPLASPSSIFLVLGPFSMKGPHTIADAY

SEQ ID NO: 195153 - protein, 174 aa, Zea mays
  unsure (1)..(174): unsure at all Xaa locations
  Clone ID: MRT4577_109569C.1.pep
WIELGCLMADPSDPRTRRRRRRRTTLSRLAKQSLIDGRSLSLNPSSSVGSVSFCFSFTVAIADGGACSGGGWAWKERPPVSPAIYGSQSGGRGSSSCMRRRRPRSRYRWIGRRWSTAVWQPQMRRERQRQPPAGGSWASNWKPVAETRMGWHGRVLXLXLPLPACCMGIGSSGQ

SEQ ID NO: 195154 - protein, 69 aa, Zea mays
  Clone ID: MRT4577_10956C.1.pep
QHRDAARDKGVDQPHSLHAILHRIPTSRRRCHYEIKIGPLPDAGGSRTLGRSAWTEVHASAHASANASA

SEQ ID NO: 195155 - protein, 47 aa, Zea mays
  Clone ID: MRT4577_109570C.1.pep
ITIHTYHKATCITKLCLHPHPILYTRTKQIEECFFTNYIRNYTPKTL

SEQ ID NO: 195156 - protein, 123 aa, Zea mays
  Clone ID: MRT4577_109571C.1.pep
WMEGPVDHVTPPSSTHTLKEERASVDHPNEVTLELSQSLSMLHPCVIHRFFLAPLHLMLTLCLELQFHIPDMIAPRCICVQTVVNYHYATYYFKLRGRHITHDDVSIAIIMDRHNNSHSLFND

SEQ ID NO: 195157 - protein, 112 aa, Zea mays
  Clone ID: MRT4577_109572C.1.pep
PRNPCPLKNRFCRDPLKILASCPYFKGSPFVAWGPHLRCVGVAYPKGTLRVFWITPFFCYLGGSRHKNTFRASIFVLTLGNTSVSSGPNHKECRPPFERHTLVYRGCPCLYE

SEQ ID NO: 195158 - protein, 129 aa, Zea mays
  unsure (1)..(129): unsure at all Xaa locations
  Clone ID: MRT4577_109573C.1.pep
PRGEKKNRGGENPPPGEKPPTREKGPPPPVFKRVGGGKNQGPPPKRESPRAKXNWGGPGALGDPKKKIFGGPGGPPGXPPGPRGGPRFPFGGAVKNRGKPGEYGFPGEKGNPPPSPPKLWAGRIKGNPG

SEQ ID NO: 195159 - protein, 60 aa, Zea mays
  Clone ID: MRT4577_109574C.1.pep
IMHVFSSPQGQYDKHTVDSVSGYPWSLSFCKGAMNWFPLQAHNHSRKAVADLYHGPKSSL

SEQ ID NO: 195160 - protein, 43 aa, Zea mays
  Clone ID: MRT4577_109575C.1.pep
KKKKKKKKKKKKKKKKKKKKKKKKKKKKKKLKIKRFVLWGGPL

SEQ ID NO: 195161 - protein, 169 aa, Zea mays
  Clone ID: MRT4577_109576C.1.pep
MAMAAGRGLLALFSVVVVAGLTSAANGPFLSDSVFQPSAGSTGRSLLQAKNSCPVNFEFQNYTIITSKCKGPKFPAGPCCAALKEFACPYYTYLNDESNDCASTMFSYINLYGKYPPGLFSSECKEGKQGLSCADVLERDSATASSGHHAQISLLALITVLSVVVALFH

SEQ ID NO: 195162 - protein, 153 aa, Zea mays
  unsure (1)..(153): unsure at all Xaa locations
  Clone ID: MRT4577_109577C.1.pep
WLGSPLPANGPFLSDSVFQPSAGSTGRSLLQAKNSCPVNFEFQNYXTIITSKCKGPKFPAGPCCAALKEFACPYYTYLNDESNDCASTMFSYINLYGKYPPGLFSSECKEGKQGLSCADVLERDSATASSGHHAQISLLALITVLSVVVALFH

SEQ ID NO: 195163 - protein, 118 aa, Zea mays
  Clone ID: MRT4577_109578C.1.pep
CCPVNFEFQNYTIITSKCKGPKFPAGPCCAALKEFACPYYTYLNDESNDCASTMFSYINLYGKYPPGLFSSDCKEGKQGLSCADVLERDSATASSGHHAQISLLALITVLSVVVALFH

SEQ ID NO: 195164 - protein, 170 aa, Zea mays
  Clone ID: MRT4577_109579C.1.pep
MAMSAGRGLLVLFFSAAVVAELASAANGPFLSDSVFQSSAGSTGRSLLQAKNSCPVNFEFQNYTIITSKCKGPKFPASQCCAALKEFACPFNNYLNDESNECASTMFSYINLYGKYPPGLFSSECKEGKMGLSCADVPRKDSSTANSGYRAQSSLLALINVLSVIAALFY

SEQ ID NO: 195165 - protein, 38 aa, Zea mays
  Clone ID: MRT4577_10957C.1.pep
VHPQSGGMLSYHLIDMDSPTDKHWPRRAIMTPVITDTN

SEQ ID NO: 195166 - protein, 65 aa, Zea mays
  Clone ID: MRT4577_109580C.1.pep
YYLPAADVPPHVYGIHVTRSGKHQLLKSLLLLLVNGINPVNHLRGLARIKKKKKKGRPLAVADAW

SEQ ID NO: 195167 - protein, 113 aa, Zea mays
  Clone ID: MRT4577_109581C.1.pep
GGGGGGRVQRRWDDGRPTTRDGRMRHPASFGMYPVASYTHYCYVYTVLATRGGLLQLLVLCAPHLLVSLLLHVLCSHRPSRIIRLGTRLVVGEIMQKEANFSLTYSSVRCELT

SEQ ID NO: 195168 - protein, 127 aa, Zea mays
  Clone ID: MRT4577_109582C.1.pep
FVSVQEICLHGDLRRKVLRQVELWKLVASCSCINPLCHRRKLYHLDLLPVAHGRAGAESSGQVARAPFPSIGSGAHITHNPNTQHQCLRLNTFTWSCSLPMKGTTRRLFHFNIWNGNGNEDDEWRRM

SEQ ID NO: 195169 - protein, 51 aa, Zea mays
  Clone ID: MRT4577_109583C.1.pep
NHVFLCLKLQAYLIYKPWITDNFINTFFFTQLSLDSRIKKILLMIVFFYLM

SEQ ID NO: 195170 - protein, 491 aa, Zea mays
  Clone ID: MRT4577_109584C.1.pep
MTLVRMPCRLCCFLLVVAASAVSGRGRVVTTLPGYEGRLPFHLETGYVEVDEDAGAELFYYFVRAESGADDSDTPFVLRIPGGQRCSAFSGLAYEIGPIMFVVEPYNGSLPRLRYNPNSWTKVAHILFVDSPVGAGFSFSRDAKGYNAGAVSTTLHLAKFLTKWFNDHPEYHANPFYIDGESYAGKIVPFLAQMISEGIEAGMKSAPRLKGYLVGNPSTEERIDVSARVPCAHGFGIISHQLYEMILGHCHGEDYSNPAKELCGQALKTFNDLTSEVAQGHVLQEKCVAASSSPVLNANSRVAGGSSSWASDGRKILREEEMVGRRGVLGKLFHPPALPPFSCRVYRYYLSYFWANDRRTRDALGIKEGTVDEWVRCHNDDQELPYESELKSVVKYHRNLTSRGYRAMVYSGDHDLLVPHLGTQAWVRSLNFPVVDDWRAWHLGGQSAGFTITYSNNMTFATIKGAGHTAPEYEPERCFAMFSRWILNRPL

SEQ ID NO: 195171 - protein, 132 aa, Zea mays
  Clone ID: MRT4577_109585C.1.pep
PLQTLDDQHQHQGGGGLGQPETCLKDNDNELIYSPEECRSNRRHHPDSEATHTYVDAYRRSYCHTWRPHCPDTPTDLRPQGSMTTRPTPRQRATPRRSTRQEWSTKRLKQCIGRAFRRTTLCVRVMTAWDLS

SEQ ID NO: 195172 - protein, 66 aa, Zea mays
  Clone ID: MRT4577_109587C.1.pep
PQQHITPMSYPCRACVLFDKMPNSSIPVSSVIAFGALLHSCMLTLSFRFFLPHKTAAATTPLWRVL

SEQ ID NO: 195173 - protein, 335 aa, Zea mays
  unsure (1)..(335): unsure at all Xaa locations
  Clone ID: MRT4577_109588C.1.pep
GRQHRWRQGRRGHRRQAARRRGGHKDYFXSREAREFASGALAGAMSKAILAPLETIRTRMIVGVGPRHIFGSLVDIIQQNGWQGLWAGNTINMLRIIPTQAVELGTFECVKRSMAXAQEKWKEDGCPKIQLGNMKIELPLHLLSPVAIAGAAAGIAATLACHPLEVIKDRLTINREVYPSIGLAFRRIYKTDGIGGFYAGLCPTLIGMIPYTTCYFFMYDTIKTSYCRLHKKSSLSRPELLLIGALSGLTASTISFPLEVARKRLMAGALQGKCPPNMIAALSEVIQEEGVMGLYRGWGASCLKVMPNSGITWVLYEAWKDVLLADRNKPRSLAN

SEQ ID NO: 195174 - protein, 72 aa, Zea mays
  Clone ID: MRT4577_109589C.1.pep
ILLIDKIICSSLKILQFDERLTLKKLSMKFNLFIKFLQNSYVTSHYIGIARDLSKPNPYSPTCYSYIVSILY

SEQ ID NO: 195175 - protein, 65 aa, Zea mays
  Clone ID: MRT4577_10958C.1.pep
THASSHNNTSPFPSISTQPQTPQDESFYNSSRSLQNSLHNHPTTKTIINLTIIYSTKNKFKPFLI

SEQ ID NO: 195176 - protein, 178 aa, Zea mays
  unsure (1)..(178): unsure at all Xaa locations
  Clone ID: MRT4577_109590C.1.pep
MWVLLVALALLALAVSATXTHTSRXCGCQPPPPVYLPPPVLLPPTSHLPPAVHLSPTAHLPAPDHLTPAVHVPATPHLAPSPCHYPTKPARPQPHTEPHTXPGQQADLTPDQAGGXTCTGTRRHTLGQCXVRPVRHDXGELATLYWAHEGQQLTAMCGLQLQQPGACPCDASAGGVYY

SEQ ID NO: 195177 - protein, 46 aa, Zea mays
  Clone ID: MRT4577_109591C.1.pep
GHSTIILRYQIGCDAGCLHFILYTNYPEPRSTKAQFDASQKQNIKA

SEQ ID NO: 195178 - protein, 64 aa, Zea mays
  Clone ID: MRT4577_109592C.1.pep
SSAITTLVDEHVSHSSFSVSNAFVSCKGGARSDEKSKCHDGQSCELSGYICSVFKKVMFKLKVG

SEQ ID NO: 195179 - protein, 43 aa, Zea mays
  Clone ID: MRT4577_109593C.1.pep
KYATWYTLCCYCVVNIYTKLTQLERVNSELKRRSYEFPKVLCI

SEQ ID NO: 195180 - protein, 120 aa, Zea mays
  Clone ID: MRT4577_109594C.1.pep
PALVLFFFFFFFFFFFWVTRAFNEFFFFFKQTEGAFIKLGKTHSSHTRPMAVHFYNDSKTHFVLSKAHLTIKKSTYGLIKISKDLALGRSSSPPKWGGPQLWAQNFSGPFKPRKFGGFFF

SEQ ID NO: 195181 - protein, 66 aa, Zea mays
  Clone ID: MRT4577_109595C.1.pep
GCLQGSISWRGGAGWAPKFFFEKFRPLFKKPSPVPPSGAKKKNALINSVVGSKLPVLSVGLEIFSN

SEQ ID NO: 195182 - protein, 220 aa, Zea mays
  unsure (1)..(220): unsure at all Xaa locations
  Clone ID: MRT4577_109596C.1.pep
MESFLGNPMLSVHCKDSSCGNSHGSKVNIRTAIACIISGFVILLCVLLLAIYKTKRPQPPIKASDKPVQGPPKIVLLQMDMAIHTYDDIMRLTENLSEKYIIGYGASSTVYKCVLKSGKAIAVKRLYSQYNHGAREFETELETVGSIRHRNLVSLHGFSLSPNGNLLFYDYMENGSLWDLLHGPSKKVKLDWETRLRIAVGGXQGWPILHHXCNPRIAHR

SEQ ID NO: 195183 - protein, 55 aa, Zea mays
  Clone ID: MRT4577_109597C.1.pep
RNVCTHACHHVHNTSRYAYLNLCLIFLRFLISLIMSPFFQLALMVDSSRVNVRVG

SEQ ID NO: 195184 - protein, 54 aa, Zea mays
  Clone ID: MRT4577_109598C.1.pep
VKANRNRNHTIKGYGVIKNWYWGYSGGKHYHYHLRYIWGTKRDPSSFLGSKILF

SEQ ID NO: 195185 - protein, 197 aa, Zea mays
  Clone ID: MRT4577_109599C.1.pep
MAVLLWRCICGPQQSFSKNRGASTPSPLAGRRSKYSGQSVKAMPMRLLTVGKKRSRGTQLLVEEYKEKLGHYCEFEDTLIRSNPKLTSDVKVQVEAEDTAMMQQLKSDDFVVVLDENGKDVISEQIADLIGDAGNTGSSRLTFCIGGPYGLGLQVRERADATIRLSSLVLNHQVALIVLMEQLYRAWTIIKGQKYHH

SEQ ID NO: 195186 - protein, 82 aa, Zea mays
  Clone ID: MRT4577_10959C.1.pep
PGPSRADHVAVTAQAGRPGGGACQSDLGSLGLIMITHMAAGILEIQLDCSCSPPMVRPHQNRFHKQGSMWLTTMLRVLQAGR

SEQ ID NO: 195187 - protein, 68 aa, Zea mays
  Clone ID: MRT4577_1095C.1.pep
SGFVTVGRGSEVDDPDVDMDGDEKDNAVTEMSLTLSVDHRVFDGQVQVEFFSYLALNFSFISSMILLM

SEQ ID NO: 195188 - protein, 121 aa, Zea mays
  Clone ID: MRT4577_109600C.1.pep
LSESALLKKHVIRMTKYDYRLSNKLDTDLQKLRCRVNYHSLRFTDPIQELAEKLIQRMREKNRYFIALHLRFEPDMLAFSGCYYGGGEKERRELAAIRRRWRTLHIRDPHKGRLHGIISLT

SEQ ID NO: 195189 - protein, 102 aa, Zea mays
  unsure (1)..(102): unsure at all Xaa locations
  Clone ID: MRT4577_109601C.1.pep
PRVRPRVRGRVXRGFWLQLPSHFCDTYMPKQDSIITLVDEKDEEFDTKYLAYKKGLSGGWAGFALCHGMQDGDSAVFQLIKPTTFKVYIIRAASDDVSEVDE

SEQ ID NO: 195190 - protein, 106 aa, Zea mays
  unsure (1)..(106): unsure at all Xaa locations
  Clone ID: MRT4577_109602C.1.pep
MYKSRLQELCQKRRWAPPLYEPTREGPAHAPLFRATVVVNGERFSSRDEGEKSLKEAYNLAAMAAFDNLIALPXPRPLPLPRLLQRRPHPVSCQLVPWDQICTVRS

SEQ ID NO: 195191 - protein, 76 aa, Zea mays
  Clone ID: MRT4577_109603C.1.pep
ISLYIRWSLNRCSTCSWCDCWFDQLTSSIHYTSENFDHHLHCSPRLILIPKNSSDSQRRRYGGRPKKRSVELRLLR

SEQ ID NO: 195192 - protein, 135 aa, Zea mays
  Clone ID: MRT4577_109604C.1.pep
FCFFPAPPPRRDVFCPVPLARADGQKGTQPGPAFPGRFFFSFGRVQKPASRPGFRPAPPPRWFALSFLFGAPLFSPLVSGLFFRGDFCGVAHSDGNFLSPMVAPGFSPRPNWAPFTPPGAGPRFPSRPPGPGPPT

SEQ ID NO: 195193 - protein, 57 aa, Zea mays
  Clone ID: MRT4577_109605C.1.pep
LEKPCLFPIYIVFVIKIPSFTQLGFNNKKKAPFSFISFLLKIFPHFFILYIGNPPLF

SEQ ID NO: 195194 - protein, 120 aa, Zea mays
  unsure (1)..(120): unsure at all Xaa locations
  Clone ID: MRT4577_109606C.1.pep
PNNKEVNSFLRGVVGKRMHSMALREGCERTNGADDFLGLLLEFNXEARRPDRPRAESPXGMTIDNVIEECNTFYFARMDTTIVLLTSSMDLLIMHREWLDRAWEDMTGLFHRDDNTPGYD

SEQ ID NO: 195195 - protein, 166 aa, Zea mays
  Clone ID: MRT4577_109607C.1.pep
MSLHIAAAIHCGLGRHANAIPVLKRAVKVMKPTQEPSANSKLEAGAASGDDEAAAICRAQLEGGKLRLLKGSSREWSIVVGVVAQMGVMYCMLFKIDEVAQLFEEAREVLEQECGASHPNTLGVYNNLAAIYDVMGRYIEKQSLKATFASALADPTVDLNMQIYSC

SEQ ID NO: 195196 - protein, 216 aa, Zea mays
  Clone ID: MRT4577_109608C.1.pep
TETLRAFDVPPASPPLVATDFTGFISNTNFISWSVALLAPGIFGTEGHRANRPITEPNPTGRGSSIVHTLARLNPSHPPRRSEGAFGGGSRAFSAPSKADASAAASELDGLPRFEKNFYVESPAVAGMTEEEVEAYRRRREITVDGRDVPKPVREFRDVGFPEYVLQEITKAGFVEPTPIQSQGWPMALRGRDLIGIAETGSGKTLAYLLPAIVHG

SEQ ID NO: 195197 - protein, 493 aa, Zea mays
  Clone ID: MRT4577_109609C.1.pep
ALAAADASDCASPCVPSSEGAFGGGSRAFSAPSKADASAAASELDGLPRFEKNFYVESPAVAGMTEEEVEAYRRRREITVDGRDVPKPVREFRDVGFPEYVLQEITKAGFVEPTPIQSQGWPMALRGRDLIGIAETGSGKTLAYLLPAIVHVNAQPILSPGDGPIVLVLAPTRELAVQIQQEATKFGASSKIKSTCIYGGVPKGPQVRDLQKGVEIVIATPGRLIDMIESHHTNLRRVTYLVLDEADRMLDMGFEPQIKKIVSQIRPDRQTLYWSATWPKEVEQLARNFLFDPYKVTIGSEDLKANHAIVQHVEILSESQKYNKLVNLLEDIMDGSRILIFMDTKKGCDQTTRQLRMDGWPALSIHGDKSQAERDWVLSEFKSGKSPIMTATDVAARGLDVKDVKYVINYDFPGSLEDYVHRIGRTGRAGAKGTAYTFFTAANARFAKELINILEEAGQKVSSELAAMGRGAPPPSSGYRDRYRGYGGGRSWS

SEQ ID NO: 195198 - protein, 84 aa, Zea mays
  Clone ID: MRT4577_10960C.1.pep
RLLGCPNFPVPISRKSGPKNFPLLGKVMGETGRKIVRFFPTRFLKDIFGFFSSVPRISPKGFSFFFPLGIEKGGNFHVWAPTFF

SEQ ID NO: 195199 - protein, 72 aa, Zea mays
  Clone ID: MRT4577_109610C.1.pep
RQFDLGVSKYSVTAIRFSLYFFFYFFHPLVFIYSLVLCCQTTLASTKSQYCLAVTEGQILPTLPSLNRHQYF

SEQ ID NO: 195200 - protein, 60 aa, Zea mays
  Clone ID: MRT4577_109611C.1.pep
NKKFFFFLFLKKKNKKNKKINLNKKLKIETKAWIPRYLFICIRPIPRDSQGRIRQHMAAV

SEQ ID NO: 195201 - protein, 108 aa, Zea mays
  Clone ID: MRT4577_109612C.1.pep
SSTCLHLEDVNLCIYSEALSSRSTSKLQGLQYLEQCCGSFQVYISSQWCRFYTSFQIRVSTSVYGHLQDGAQSLCSVTVMLILPSYVIWLWYSCLMACAVLAIRAQLK

SEQ ID NO: 195202 - protein, 141 aa, Zea mays
  Clone ID: MRT4577_109613C.1.pep
SISPDKTRPKKKQGKGQQKTNNKKRREGERQHQKKTTGGRILATPPALEDATRKKKQGKTTAGTKIRQKTSKSYRNNSLNQVLSSRSSKPLGSIWLNNQWQVSGRTPPASARENDPPLNTPNLEHSSRTRRSNREPPTGTW

SEQ ID NO: 195203 - protein, 51 aa, Zea mays
  Clone ID: MRT4577_109614C.1.pep
LDHGPTLHAPFLQMPATDIVPPAVRSISPPLCPVPVRTPKSLEILICMPDA

SEQ ID NO: 195204 - protein, 76 aa, Zea mays
  Clone ID: MRT4577_109615C.1.pep
CACACAHPSSMLSRYPDCTWRFQTVPSKNSKPPLPCLTQLLKAAPALKEPVYQGHLTCAGDTRRGFPDFWPRGGTI

SEQ ID NO: 195205 - protein, 84 aa, Zea mays
  unsure (1)..(84): unsure at all Xaa locations
  Clone ID: MRT4577_109616C.1.pep
FLAYPIFFFISFFFFFFFFFFFFFFFFFFXXFFFLKSLNQCILNAQTKSCAGRPISRSACKTKYPMLSNYHTAGYRNNVARLEH

SEQ ID NO: 195206 - protein, 57 aa, Zea mays
  Clone ID: MRT4577_109617C.1.pep
CPKTLVVLEGNLLNLFKVCRTCRVTQTKYALGFSKPGLQFFLCSWGKMQMFVGMFSF

SEQ ID NO: 195207 - protein, 150 aa, Zea mays
  Clone ID: MRT4577_109618C.1.pep
GFGFPPSPLESGFGAGPFSPDFGKPGRFPLLEGFRWGWAAPWNGPDIGFFFFSPPGWEGAFFFTPGRVPFFFSFPPGLRRPVFPRVGHRSFPFGPFFLVKANGFWCFQFRGPAPLLFFFFVQKIGVGCPPFGPILLAFFFFFPGDKTRAL

SEQ ID NO: 195208 - protein, 215 aa, Zea mays
  unsure (1)..(215): unsure at all Xaa locations
  Clone ID: MRT4577_109619C.1.pep
PVRQPRXTVAASIADIDFVQKRXNIEPTLEDGTISFLSISSLRYGFKIIDILTISAIARHTASLATYARNKMLELKHSNEKNVCIIYGQDFKANYLKMGPSITFNLKREDGTWFGYREVEKLASLSGIHLRTGCFCNPGACAKYVGLSHSDLVSNFEAGHVCWDDNDVINGKPTGAVRISFGYMSTYEDAEEFLKFLQSFFCVQTCRIEQWLPGE

SEQ ID NO: 195209 - protein, 204 aa, Zea mays
  Clone ID: MRT4577_10961C.1.pep
MGDDRVWMYSSFKKDGLHSQEWLATTHEFVDRATTFSQIDKREHGREQKFLNHGKSRYVEVVNEDWEKVMTKVAHKQLWHIPLTPRKMFVSLKEDHHAHEVMPTVLGANVGLLKAFIKHRCNTGLVEAPIQTITSARRATFEKLNAWYTLFDGMTDSSEVRAQMMGSSSYSLGLSSNRPIEQELDMLLNLCFVSVMHDGQYEVN

SEQ ID NO: 195210 - protein, 115 aa, Zea mays
  Clone ID: MRT4577_109620C.1.pep
RNTASTFEANSRKTLMTMPQVTLHSLPNLGLLRTFGLDGGGLVSLASSSLLVKEETEKANGNNADDAEDDDNTSLLRSPVLALGELVGDRVAGHERLDSGHCVWERRDYFASFEG

SEQ ID NO: 195211 - protein, 142 aa, Zea mays
  unsure (1)..(142): unsure at all Xaa locations
  Clone ID: MRT4577_109621C.1.pep
MAECXPRPGKSWAPCLMYRGPAAPKVVIPPLPPPWSQRSFRFVVWCPPGFXCGVGSRPPSVVPGGYLAKVPRPVCLFSVSSRVVQVFSRFGPQVVPSCSPRXALVLWFVGEGWALGLFSGARGGLGALFLGFLGVGGGFFLV

SEQ ID NO: 195212 - protein, 61 aa, Zea mays
  Clone ID: MRT4577_109622C.1.pep
GKCPLSFLRMIKNFKKKIVFCKKKKKKKKKKKKKKKKKKKKKQKKKKKKKKSLSLARAAAR

SEQ ID NO: 195213 - protein, 56 aa, Zea mays
  Clone ID: MRT4577_109623C.1.pep
FTFYRWALPTGFHQRALLGPEKNFYFRDGPIHGGVKSMLSSLGPPWGLPWGSGLKP

SEQ ID NO: 195214 - protein, 64 aa, Zea mays
  Clone ID: MRT4577_109624C.1.pep
KRCPRSLCALMPMDQFLSSIPCEREKRPSDGSVRRRQSFAYASRLCFVRNVVISQRYVSFYILY

SEQ ID NO: 195215 - protein, 84 aa, Zea mays
  Clone ID: MRT4577_109625C.1.pep
PAGFGFSQMTLPRRRTTSPLPTTWASARCLCSRESMSRRSMRWRQSKRPENYNGECDLGPQPLHTQLPRHTTDMRLRARVISEI

SEQ ID NO: 195216 - protein, 48 aa, Zea mays
  Clone ID: MRT4577_109626C.1.pep
LDECKILMLMRVVIKVCLAPDVVSCCFIVFLVSIYASFFYFSPYSFYF

SEQ ID NO: 195217 - protein, 54 aa, Zea mays
  unsure (1)..(54): unsure at all Xaa locations
  Clone ID: MRT4577_109627C.1.pep
TDRETGRSRGFGFVTFSYEXSMLDAMENMNGKELNRRNITVNQAQSRGSDGGTL

SEQ ID NO: 195218 - protein, 92 aa, Zea mays
  Clone ID: MRT4577_109628C.1.pep
LKLAIVFWLYSYVVRVIFQTHGSIGIKTAAGETNRQRGTDEAHPAAVLSQPSTRTSTVPLRSSCSNSLEKNKHTHTISKVQTHAQLPKISAI

SEQ ID NO: 195219 - protein, 87 aa, Zea mays
  unsure (1)..(87): unsure at all Xaa locations
  Clone ID: MRT4577_109629C.1.pep
SDLFQCQSHYQQHQQQFQGHDKQQHPLHPHNFIMSSXKSHHLQCHCQDLQQTTRRIYYYYCISSNLKNXCHEFHMHHCSPFVMPFFQ

SEQ ID NO: 195220 - protein, 53 aa, Zea mays
  unsure (1)..(53): unsure at all Xaa locations
  Clone ID: MRT4577_10962C.1.pep
ALHDARHDAAHVVAGAXLRRSDGVDSLGGSSPKAGAAADLGISSRVGEFGERV

SEQ ID NO: 195221 - protein, 114 aa, Zea mays
  unsure (1)..(114): unsure at all Xaa locations
  Clone ID: MRT4577_109630C.1.pep
KLVFFSGKKFVGKAQTXLLNGTAKREKRVFYGPFPKKKGVAKNXXIKKKKKXXXLNXFTFKFPKKXGGGVKNQKGLKNXHGGKKNXXRFFKKGPXXXXTCDXXKXXPLKKNLRG

SEQ ID NO: 195222 - protein, 70 aa, Zea mays
  Clone ID: MRT4577_109631C.1.pep
ANGEIPRAANKSVFAVVCLAEGDIKDANASVKSFNFAIFLPCLLNLLGLDKMCLIMTMYQKLSPISTGRP

SEQ ID NO: 195223 - protein, 194 aa, Zea mays
  Clone ID: MRT4577_109632C.1.pep
MADRLVLLVLVVAAASLTVASPVAAARPCNTLFISSHSANANPSNDPDHRSPLTTTVVTVFRIRRFGPHFLRTQGHAHPHLNHHHRHHLHSIPANIQIRRPELPELPHSAAGVAASIQERVKDILVVLVGILFGLGCGALTAASMYLIWSVIAGPGASSHYDELYGDEASDSESPKKVGYVIIPGVEAYDGGKN

SEQ ID NO: 195224 - protein, 479 aa, Zea mays
  unsure (1)..(479): unsure at all Xaa locations
  Clone ID: MRT4577_109633C.1.pep
MAYAAAVTLRRVVLVSAALRLALVVFGEWQDAHLEVRYTDVDYLVFSDAAASLATGGSPFARATYRYSPILAFLLVPNSLLHAAWGKLLFSAADLLVGLFINTILELRGIPEKMRMWSVVAWLFNPFTFTIGTRGNCEPIVCAVILWILICLMKGTXARGCKTSRVWGRDKLMQAFPRKCGEAASNPQPGRVLQAAFWYGFIVHFRIYPIIYAIPFVIVLGKGYAGPVGRPTLTMWRSKQQLQDDKVSQIEEPTSFLATVWGFLSNFISRNGILFGLLSGSMFFAWTGVFFYLYGWDFLNEALLYHLTRTDPRHNFSIYFYHIYLHHQQGFSSIQRLASFLPQLIVQLALILRFSRDLPFCMFLQTVAFVAFNKVMTAQYFVWFFCLLPLILPWSSMKLKWKGLACAVVWMGSQLHWLMWAYLLEFEGRNVFVQLWVAGLMFLAANTFVMLMVMKHHKYTLLFSTPLKSGNKVATKKEE

SEQ ID NO: 195225 - protein, 56 aa, Zea mays
  Clone ID: MRT4577_109634C.1.pep
VPSYAINRNTRSDKLYERHTTLCVLLNQERATYTRPVSKSRARECELSRRYELIYP

SEQ ID NO: 195226 - protein, 89 aa, Zea mays
  unsure (1)..(89): unsure at all Xaa locations
  Clone ID: MRT4577_109635C.1.pep
MGXRKXXAXPPPKKRGGKRXTVFSCPFXNHRSXVECGVDMXNLSGEPSXXICEENFSTTVNALTEPIEIYREWSEECERVNTVXGDQEA

SEQ ID NO: 195227 - protein, 68 aa, Zea mays
  Clone ID: MRT4577_109636C.1.pep
KAPLPMLVLPQPGSLLSSYVGGFGSAISMPVNFSLNQSTSSPSATFGFDGPVRSHLEDVNQFVCFQQY

SEQ ID NO: 195228 - protein, 101 aa, Zea mays
  unsure (1)..(101): unsure at all Xaa locations
  Clone ID: MRT4577_109637C.1.pep
VHLPSDFXPVAEANAEDYTAGAGSKDYAHVRIHQRIGRNSLTTGQGSEKEYSYNKILKDLIKELCCNGSGDHDPELGPDIQLQSDQRRNDATYVVHAVIQK

SEQ ID NO: 195229 - protein, 64 aa, Zea mays
  Clone ID: MRT4577_109638C.1.pep
ALKLLVIAVCDLVDCLLLLAHPALSSSAHSTRHLLELADIHLEQARRVGGGGWNGGRRDQRHFL

SEQ ID NO: 195230 - protein, 71 aa, Zea mays
  Clone ID: MRT4577_109639C.1.pep
ICNQYIDSIILSNHLPSIDPSESVASTLHRLPYMEPVDTGPSFSVLADSRTRVPSSPPYETTVQRATCILS

SEQ ID NO: 195231 - protein, 89 aa, Zea mays
  unsure (1)..(89): unsure at all Xaa locations
  Clone ID: MRT4577_10963C.1.pep
SSLEPSITGPDGGTALAGARELDIINGDRDRSGIYRSSHATYRQQQXKEEARHPTGEQEKGMLHDKGPTALKALTVATLFPLDGLMLVL

SEQ ID NO: 195232 - protein, 114 aa, Zea mays
  Clone ID: MRT4577_109640C.1.pep
AHASALVAGRFHVNLLRLTWRTAFVVVSTVLAIVLPFFNDILGFLGAIGFWPLTVYYPVEMYIRQRRIQKYTSRWVALQLLSFLCFLVSLASAVASIEGVTESLKHYVPFKTKS

SEQ ID NO: 195233 - protein, 72 aa, Zea mays
  Clone ID: MRT4577_109641C.1.pep
GRRSAIASASKWSLVSTAFEKDHVVCKQQQSQALELNKADLQSGAHALLSTLIQSIVSRLRTLTLEPAQASA

SEQ ID NO: 195234 - protein, 428 aa, Zea mays
  unsure (1)..(428): unsure at all Xaa locations
  Clone ID: MRT4577_109642C.1.pep
MAAADASAETAAIARRLASCNTGTRERALRYLLSDFLPASAPRLSATDLLKLWKGIFFCFWHADKPLYQSSVATRLASAVSAPPSPTDGAAFLAAYLTTLRREWAHIDVHRLDKFYLLNRRFLHHAFLLLRANSFAPDVTSQVVSVLSDKALLPEADNVAAATSRGLGYHVAEAFLDELLPVLPVSLETMDTLLAPFFTVLEKSTDRVMVSKVKAGVFERLLDSGSRLLEMVKKGEDVEKGDPEEKLGKVGLLFGFSKRFLDIGAMAETVQSNRKVVFGLRDAFVKIEKGLQLSGLEIPAPKFEATEVPVPPNVGKGKAQKKKKKTKKAALAEGEMEDDKDLKREKKIKKEKKEKKRRKVEVVDEGDVTEKSTNAPGADQQMGDGTDGITFDAALKSNLQKQFDMGSAYAGMGXGGCTSSDSPLTPST

SEQ ID NO: 195235 - protein, 350 aa, Zea mays
  unsure (1)..(350): unsure at all Xaa locations
  Clone ID: MRT4577_109643C.1.pep
MSSSSPVSAVSSATAPHVVDDCLGIVQLLSDGTVTRSADYSDIPLLGEVPSNLPVQWKDVVYDPAHALRLRMYRPXTPTAAGRXNKLPVLVYFHGGGFCICSFEMPHFHAGGLRLAAELPALVLYADYRLGPEHRLPAAHRDAEAVLSWLRAQAEADPWLVESADMGRVFVCGDSAGGNIAHHIAVQYGTGHLALGPVVRLAGYIMLWPYFAAEERTASETAGLDVDHQFVSTALLDQMWRLALPVGATRDHPAANPFGPDSVPLEDVAFQPLLVVDPDQDVLHDRTQDYAARLTAMGKLVELVVFRGQGHGFFVFDPCGEASDQLIHVIRRFVLLHKHPCNLVDLSTTM

SEQ ID NO: 195236 - protein, 39 aa, Zea mays
  Clone ID: MRT4577_109644C.1.pep
PTLSPTHQSCSKQELPPTPARAIKQANAANIHPTRLNLS

SEQ ID NO: 195237 - protein, 63 aa, Zea mays
  Clone ID: MRT4577_109645C.1.pep
LITLWGGQKPSCPPARGSFHGYSNGQTPLSQCLDKGHCQVVAPQPTLTKCFFPGKTLGCRLRF

SEQ ID NO: 195238 - protein, 552 aa, Zea mays
  unsure (1)..(552): unsure at all Xaa locations
  Clone ID: MRT4577_109646C.1.pep
ICELPCLVNGCPSAARPLNFALDHPDGAPAPAASSPTTGRALLAVRLALPPPPPRFSQPQADAQPRAAVVAEVRWKGHRASALGSLRRAAVRRNRTWEDADAAWEEEFESVDTLAVASQREGVVFHPWELTFRVVSDINKGPKNKPSILGTISLNLADYALTAGEIILSLSIPGGAPEQASSLHLTLSMVELRAFQETSDASQRSAATLPLSPSSGDSFPGGKDEVLVIKAGLRKVKILTDLVSTRRPKKTCQXEVAKISSVLTXGAEYPCDTESLDDDLDDRVEEDEFGDSTIRKSFSYGSLQSVNYVGGLVYAHAKIDGEHEDWIYYSNRKTDVGFHVEKVLPSTTENGLLTAKRSILPWRKRKLSLRSLKAKGEPLLKKAYGEEGGDDIDYDRRLLTSSDESVSEGSRGDGSANTMVSEFGDDNFVIGNWELKEIISRDGRMKLSSQMFFASIDQRSERAAGESACTALVAVIADWFQANQNIMPIQSQFDSLIREGSLEWRNLCENETYRKRFPDKHFDLETVLHTKIHPLTVSPSNLLFDLSYYDYG

SEQ ID NO: 195239 - protein, 51 aa, Zea mays
  Clone ID: MRT4577_109647C.1.pep
AEMIPEAMYIPLKHFKYDWNYNKVILRYQAYNVIFVPQHQSTFTTLEVRTV

SEQ ID NO: 195240 - protein, 37 aa, Zea mays
  Clone ID: MRT4577_109648C.1.pep
SAISITQELSNEYSCCLQALGARYMMYNVNPLCLYIS

SEQ ID NO: 195241 - protein, 48 aa, Zea mays
  Clone ID: MRT4577_109649C.1.pep
FFFFFFFFFFFEERLSHLFDELIYRRGMSPEYERSIYNLILGSSKSRR

SEQ ID NO: 195242 - protein, 36 aa, Zea mays
  Clone ID: MRT4577_10964C.1.pep
TYHAQDGLWILWLYYVCLMCNDCTMSLGAYIIVTQS

SEQ ID NO: 195243 - protein, 129 aa, Zea mays
  unsure (1)..(129): unsure at all Xaa locations
  Clone ID: MRT4577_109650C.1.pep
ARPASTHTPPAPAPPPRAGATGXXPAGPRXEPAXXGRGRXAQPRRPRRAPHATGRSADDATKQAQEGEATAXATKAPAXRKEFFWAPRGGGDLKAEDKTKTWKKLENVAESGAAGMKPNPPLGPPATRG

SEQ ID NO: 195244 - protein, 87 aa, Zea mays
  unsure (1)..(87): unsure at all Xaa locations
  Clone ID: MRT4577_109651C.1.pep
MSDRRARMQGSKNRGDRPRASSAMARSSMMMRAXALVDLALAVSTAEARNIKTTTTEKKDDAVVLAQTFPPFDRLGVGVSPALGVLP

SEQ ID NO: 195245 - protein, 149 aa, Zea mays
  unsure (1)..(149): unsure at all Xaa locations
  Clone ID: MRT4577_109652C.1.pep
GVPGGRLECSEGRLRNADGYVLLCGAALRKPHPGIGAPVILEELHLIQKALHDPLPGNHLLKRPLPSCSPLTHPLTALPSCPAGTTPQHQARFSISRSDLSVRDGDALLTXGCGRGLEARRRQGPRCLPWVSMPLCLCLSLQTMSDGAL

SEQ ID NO: 195246 - protein, 100 aa, Zea mays
  Clone ID: MRT4577_109653C.1.pep
HKDRGDLKGMRGITATGSGYWKATGKNKEIFHGRRTSRVLVRKKKTLSLYTGHAPSGGKTMWEMHECRLEGSLSPNLHRGDKDEWADCEVINKDSAAKVG

SEQ ID NO: 195247 - protein, 77 aa, Zea mays
  Clone ID: MRT4577_109654C.1.pep
FVWSLCFYNKKKKKKKKKKKKKKKKKKKKKKKKKKKKKKKKKKKKKKGGALFKGPNFTSRGLQGNIFFLGPPKLNQR

SEQ ID NO: 195248 - protein, 72 aa, Zea mays
  Clone ID: MRT4577_109655C.1.pep
PHLLNFLAPFLGDISKDLSYLNLSVPPCGRLVPPEFFNPFFLLARTQFFFSWPAIKLPFSHPFNFFFPPPFC

SEQ ID NO: 195249 - protein, 200 aa, Zea mays
  Clone ID: MRT4577_109656C.1.pep
RTRILKQRLKVPPALNQFTRTLDKNLATNLFKMLLKYRPEDKAAKKERLLKRAQAENEGKTVESKKPIVVKYGLNHVTYLIEQSKAQLVVIAHDVDPIELVVWLPALCRKMEVPYCIVKGKARLGSIVHKKTASVLCLTTVKNEDKLEFSKILEAIKANFNDKFDEVRKKWGGGIMGSKSQAKTKAREKLLAKEAAQRMT

SEQ ID NO: 195250 - protein, 257 aa, Zea mays
  Clone ID: MRT4577_109657C.1.pep
MAPKRGGRAPVPAKKKAVVTNPLFEKRPKQFGIGGALPPKKDLHRFVKWPKVVRIQRQRRILKQRLKVPPALNQFTRTLDKNLATNLFKMLLKYRPEDKAAKKERLLKRAQAENEGKTVESKKPIVVKYGLNHVTYLIEQSKAQLVVIAHDVDPIELVVWLPALCRKMEVPYCIVKGKARLGSIVHKKTASVLCLTTVKNEDKLEFSKILEAIKANFNDKFDEVRKKWGGGIMGSKSQAKTKAREKLLAKEAAQRMT

SEQ ID NO: 195251 - protein, 132 aa, Zea mays
  unsure (1)..(132): unsure at all Xaa locations
  Clone ID: MRT4577_109658C.1.pep
PNLEREILPQGGGASSPAAQNHLKLIPGIPNNLSLDCLAPFLYPFNRSNRWVFXFSLSLFYYIFFLFXFYYFYYITHFFNFIFILFNVFGCYFLLLIIFIFXYFHIILXFIIFLIYFSFFILFILYLFFYFF

SEQ ID NO: 195252 - protein, 162 aa, Zea mays
  Clone ID: MRT4577_109659C.1.pep
MDPAAEPAAWPPWTSLLLRALSRRRTWVALFLAVYAGLLSSSWSLLASVRAWYYSASSASAAPAWPAALYASVMYGAVFGLLSMAAALAVAAPAMLVTWTTVLVLLAFAGRPRRSLVAEGRRATRDIAGLALRVLLREGNAVAALCAAASFAALLLFQIDHQ

SEQ ID NO: 195253 - protein, 86 aa, Zea mays
  Clone ID: MRT4577_10965C.1.pep
VDMLGRSRRERGVLGVAVFDVAAGLIISGDLVVLMRLFRDMCSPLVQVLRHYERIRFGGDRPRPRLRLCDVTVAAWLLVGVADEGE

SEQ ID NO: 195254 - protein, 150 aa, Zea mays
  unsure (1)..(150): unsure at all Xaa locations
  Clone ID: MRT4577_109660C.1.pep
MFPPSPILLPPDAAPPVRRPMRECISIHICQAAIQVASECXVLYCREHGMQADGHMPGDKTIGGGDGAFNTCFSETGAVMHVARAXFADLXPTXIAAVRTGTYRQXFSPEEVMSWEDDVXNNFGRGHYAIGKEIADLCLDGITKLGXNCT

SEQ ID NO: 195255 - protein, 84 aa, Zea mays
  Clone ID: MRT4577_109661C.1.pep
PTRPSTWTPQRSSPCGGRPRPRRRRRATSSSGLLFPVAWAGAMTPRHRRWSARAAGSSATAASSPENRCYSRPATRRPPRPRTR

SEQ ID NO: 195256 - protein, 122 aa, Zea mays
  Clone ID: MRT4577_109662C.1.pep
MERTVAHILLVLSLGAALVVAGRPTGASGEVAAIRLPSDGQGLGGDATTLEEDERPWACCDDTHCLRVIPRACLCRDTVARCASACQHCDQVGPGRYVCLDIHEGWPGPKCTHQVDVAGAGN

SEQ ID NO: 195257 - protein, 69 aa, Zea mays
  Clone ID: MRT4577_109663C.1.pep
LNQAQLGERPALDLFNGQGGPGVKAVDLPGMVFFVFKNNKAFWGNFPTFFGRQLQGLEPTIFPPEKNLR

SEQ ID NO: 195258 - protein, 81 aa, Zea mays
  Clone ID: MRT4577_109664C.1.pep
HDVTSIRLMSIGVDYSRSTIVKHTCYSLARNILGYYYRSIGTGRSISIITETIIRFARHVIEREHSLGRFGPPVYVWFQGA

SEQ ID NO: 195259 - protein, 141 aa, Zea mays
  Clone ID: MRT4577_109665C.1.pep
FWKKKKKKKRPSSSSWTHESCPATSAPRCRTRPPASAPTPTRHAGRRAARRVRPGPARLIRLGIRSLRIADVEYAREIKIFVNFGKKKKKKNAHHRAPGLTSRVQPLKPRAAELDPRPGLRLRLDTRPGKRRGVSGRVRRA

SEQ ID NO: 195260 - protein, 177 aa, Zea mays
  unsure (1)..(177): unsure at all Xaa locations
  Clone ID: MRT4577_109666C.1.pep
NKENGAGETXEPRXXXAQTNKRXXPKXTEXXPXEDANXXXSAXXAXXRKDXXKHGTDXKGXXQPEPPPEKKGPEXXXXTEXKXRTSXXTXAXRXDNXXXXGXRTPGGGGXEXGKDGDTHXXGDNPRXXGXGGRDQDXXGNKXXETXTXGRAERTXAXNDPAKKKKKATPEEEEGQXQ

SEQ ID NO: 195261 - protein, 35 aa, Zea mays
  Clone ID: MRT4577_109667C.1.pep
FFFFFFFFFFRGSLLGGIAVNPLHYINHPRCDQTL

SEQ ID NO: 195262 - protein, 79 aa, Zea mays
  Clone ID: MRT4577_109668C.1.pep
ELPSPEPTRFGFATAVKAAVDGVMTTTPKDVQGDRAVKKRGRKNQYRGIRQRPLGKWAAEIKDPNKGVRVWVGTYNTGE

SEQ ID NO: 195263 - protein, 94 aa, Zea mays
  Clone ID: MRT4577_109669C.1.pep
ITLLVISLSFIYTFTQKFYPGKTNDGTIELIGFHGAWSLKHKGCASCSTSRDKKTILVSSRGVQRLCRCFLWTICQMLNLDKKGVTWRIWLDPP

SEQ ID NO: 195264 - protein, 53 aa, Zea mays
  Clone ID: MRT4577_10966C.1.pep
LCGCLAGRAGAVNGRPRVVVHAYIRSAREHRWACRIWYRPPPPSLRLASSADL

SEQ ID NO: 195265 - protein, 85 aa, Zea mays
  unsure (1)..(85): unsure at all Xaa locations
  Clone ID: MRT4577_109670C.1.pep
REPLPLGRFIVSKGPRALDVTLHVPAEVPSYRTHEGSASLLVDEGCGASRLAISPVLRCRYQSGIVSTTPMXAGRKKEKGRGRVS

SEQ ID NO: 195266 - protein, 162 aa, Zea mays
  unsure (1)..(162): unsure at all Xaa locations
  Clone ID: MRT4577_109671C.1.pep
AFVFCAYRSKARXVVDMLRMHTYLCELTHNKMRLRRRDAVTRWSLAYNPYLLRVRYTRGPRWEEPSPARXHLXXDQKVTIGDKRKQNRLVIPKHHAEKHLQLQIPSVGDESNGALLNLEDEQGKVWRLHYSHWNSRQSYLLTNGWSQWVKENGLQPGDVVGL

SEQ ID NO: 195267 - protein, 70 aa, Zea mays
  Clone ID: MRT4577_109672C.1.pep
RTVMPVPKSVVFAWSDGCVGESLNELRLFFPLEWPNLCIDISELAVLYRHGCTFIHASPSKKNTQDREVG

SEQ ID NO: 195268 - protein, 494 aa, Zea mays
  unsure (1)..(494): unsure at all Xaa locations
  Clone ID: MRT4577_109673C.1.pep
MAITAPTPDILGERQSGQDVRTQNVMACGAVANIVKSSLGPVGLDKMLVDDIGDVTITNDGATILKMLEVEHPAAKVLVELAELQDREVGDGTTSVVIIAAELLKRGNDLVKNKIHPTSIISGYRLAMREACKYVEEKLAVKVDKLGKESLINSAKTSMSSKLINSDSDFFATLVVEAVQAVKTTNAKGDVKYPIKSINILKAHGKSAKDSYLLNGYALNTGRAAQGMPTRVTPARIACLDFNLQDMSLKHLXEGGAIAVRRVRKEDLRHVAKATGATMVSTFADMEGEETFDSSFLGHADEVVEERIADDDVILVKGTKNTSAVSIILRGANDYMLDEIERSLHDALCIVKRTLESNMVVAGGGAVEAALSVYLENLATTLGSREQLAIAEFAESLLIIPKVLSVNAAKDATELVAKLRAYHHTAQTKADKQHYSSMGLDLSKGIIRNNLEYGVIEPSMSKVKIIQFATEAAITILRIDDMIKLTKEEEGNEE

SEQ ID NO: 195269 - protein, 140 aa, Zea mays
  unsure (1)..(140): unsure at all Xaa locations
  Clone ID: MRT4577_109674C.1.pep
MLLPTSPPAPMRTWFQRWLSAAAAAAAAASAPPAESRLSPDPEWLVKDATVALEAERPSEDVVARPPCCCCCCVAAGAIDTGGGXSPRGTEATRRXAGCCMSRHQEEADGGGWGGGELATEASEPSCAMHCMHGSWCSAA

SEQ ID NO: 195270 - protein, 123 aa, Zea mays
  unsure (1)..(123): unsure at all Xaa locations
  Clone ID: MRT4577_109675C.1.pep
RPSPAPHCSSPLPIXPSPRSIPQPPPPPELAWLGSPAPVDPAQGRVAGPPTPQFRRNRPEAAAPAPCSAPSXPPRSPAPGLPXVPPLRSPAGTLACSAAPLQPRPPPAHLQPRSRPAPLPCTN

SEQ ID NO: 195271 - protein, 257 aa, Zea mays
  Clone ID: MRT4577_109676C.1.pep
MGTKSHLSVQAPSPRTLSRLAFFHSPGLHSHLAAAAMAITAPTPDILGERQSGQDVRTQNVMACGAVANIVKSSLGPVGLDKMLVDDIGDVTITNDGATILKMLEVEHPAAKVLVELAELQDREVGDGTTSVVIIAAELLKRGNDLVKNKIHPTSIISGYRLAMREACKYVEEKLAVKVDKLGKESLINSAKTSMSSKLINSDSDFFATLVVEAVQAVKTTNAKGDVKYPIKSINILKAHGKSAKDSYLLNGYALNT

SEQ ID NO: 195272 - protein, 546 aa, Zea mays
  Clone ID: MRT4577_109677C.1.pep
MAITAPTPDIRGERQSGQDVRTQNVMACGALSNIVKSSLGPVGLDKMLVDDIGDVTITNDGATILKMLEVEHPAAKVLVELAELQDREVGDGTTSVVIIAAELLKRANDLVKNKIHPTSIISGYRLAMREACKYVEEKLAVKVDKLGKDSLINSAKTSMSSKLINSDSDFFATLVVEAVQAVKITNAKGEVKYPIKSINILKAHGKSAKDSYLLNGYALNTGRAAQGMPTRVTPARIACLDFNLQKTKMQLGVQVLVTDPRELEKIRQRESDITKERIEKILKAGANVVLTTKGIDDMSLKYFVEAGAIAVRRVRKEDLRHVAKATGATMVSTFADMEGEETFDSSFLGHADEVVEERIADDDVILVKGTKNTSAVSIILRGANDYMLDEIERSLHDALCIVKRTLESNMVVAGGGAVEAALSVYLENLATTLGSREQLAIAEFAESLLIIPKVLSVNAAKDATELVAKLRAYHHTAQTKADKQHYSSMGLDLSKGIIRNNLEYGVIEPSMSKVKIIQFATEAAITILRIDDMIKLTKEEEGNEEE

SEQ ID NO: 195273 - protein, 81 aa, Zea mays
  Clone ID: MRT4577_109678C.1.pep
CFCSGCPPGSSPRVVHLEVLSTEFSFPTSPFWLGLTSSVSCTLSLLGQFRVRELTSPFHRMLSLFWGIWPILFRWFVPVLL

SEQ ID NO: 195274 - protein, 91 aa, Zea mays
  Clone ID: MRT4577_109679C.1.pep
NFFFCFFFFFFFFFFFFFFFFFFFKKKNPLFLNAPLPHPKLKRGKEGGGNYKLKTHPLFRGVFGSKITQTSFSFFLTMKTKISNHTLKLYF

SEQ ID NO: 195275 - protein, 103 aa, Zea mays
  Clone ID: MRT4577_10967C.1.pep
MATNVENPDGSTLKLTSVYIAIGIFSVFFLLFRSLAVVVLGVKTSRSLFSQLLNSLFRAPMSFYDSTPLGRILSRVSSDLSIVDLDIPFCFMFSIGAGINAYS

SEQ ID NO: 195276 - protein, 65 aa, Zea mays
  Clone ID: MRT4577_109680C.1.pep
AKFGEPGATACVDPPTPWRWGGIPLGGGAPPHFPKGWLYGPFWGPPVIPSSWSSRSCGRVFPRSL

SEQ ID NO: 195277 - protein, 91 aa, Zea mays
  Clone ID: MRT4577_109681C.1.pep
FRGPSLPAPNWLRKPVEKPPSPPGGFFPALKRAFFGPALPPDSQFKGLEKKIPLFFWGAFEFFYGGPLPPPNQFLGNVFSPPQGFGFGPLG

SEQ ID NO: 195278 - protein, 72 aa, Zea mays
  Clone ID: MRT4577_109682C.1.pep
GTRGPHKFFLTLPRGRVVTKVPAGNIAGADGDRLCLEEAAFQRGDASPRCGEKVWNRAPFLFAPTLTTPPAS

SEQ ID NO: 195279 - protein, 111 aa, Zea mays
  Clone ID: MRT4577_109683C.1.pep
ALLSHVWRSVPLPGWRSHSIDGPHLPSTPRKFLFPHRVARATVSARTPCRVSAHLCEAVLPPAMEGDLCSFSFLYSPPRSRADSSRSLNQRHCPRNPLSPTARTFQRRSRS

SEQ ID NO: 195280 - protein, 219 aa, Zea mays
  Clone ID: MRT4577_109684C.1.pep
MPSHSPHALRPSTFRAPGWGRPRCFRLAVVGGAQLRGSWYLSAIARLQGFSSGSPTASPRRWSPKTATVVSRTGGVSQHVVRREGGTRVLGRFHSRFRDEDRSEDLPVRFGAAGARWCDVGGQVDVTVGAEVVAAGESFSADETVSATRGPTSGSLALISGSRPPRGDTNESLPAVASVLGPSLPLQRSLASYPEFVVPQALQCGGLFVPAGVEPEFYL

SEQ ID NO: 195281 - protein, 140 aa, Zea mays
  Clone ID: MRT4577_109685C.1.pep
MDSFNATARKVLDEMRLMEARLTEKIVGRCDGVEHRVDARCDELHNHFTARYYTFPQQAEPVFDEGPIFDEEPVFEGESFPSTTDYIDGKRMVDAAERQDVEATNQVGCTLLEDAAARIVDEYQPPLQLSPDPDSSSPAT

SEQ ID NO: 195282 - protein, 97 aa, Zea mays
  Clone ID: MRT4577_109686C.1.pep
KSASSIFPLRNVFTVKVKILRAPRFDLGKHMKVHGHHKWDDGLKRHRPVEIEEEPSSILISIRLPGRSIRRMSLHTRWLIRLIESCKSGFGRPFLSV

SEQ ID NO: 195283 - protein, 89 aa, Zea mays
  Clone ID: MRT4577_109687C.1.pep
SQRSFLIQVAVCLSRHLNLFSKSNFFLIARSLTKAWVFLQKKNRRKAAPRTKPERSESHKLQFLRRERWMETLCLPVWQPVSMATGCRH

SEQ ID NO: 195284 - protein, 573 aa, Zea mays
  Clone ID: MRT4577_109688C.1.pep
MTDSSWVPPARLPEAFPAARFPPIDLYALPTGGSRTSTNLPSRPARRRRRLAVRFRPPKPYYLLPSSPASSMATNGSSPRVRDTESSLEKVKRQLSSGSGRYLLQGPLLKRSETLRKWNERWVILDPTSGKMEYKLRRNETAIKGTILFDASSTITLSPVNFQGMPKYNGCCFYIGTPQKKDYFLCAETPGAAKAWVSTLHATQLVLRAHKEAVNSLAGNGSPATLGTVATAVANANATAMEATKEIEAALKVSMRAALGLDTNNSNEGQLDDLTIMKETLRVKDEELQHLAKDIRSRDATIKEIADKLTETAEAAEAAASAAHTMDEQRQLLCSEIERLKQALERQIEQSVVKLRQSEEKVISLSKEKEQLMKERDAAFQEAHMWRIELVKAREQAVIQEATIARAEEKARVSEADAAARIKEAAEKLHTVEKEKEELLALVGVLQSQVLREQSSTKQVCEERSESCSGADNSPLLTKHVDASDDDVDKACVSDSRSVPVSSDSTEVQLAVDGVDIRPVGDAEWSSFQQPEALIADVREVSPEADGGSLDIPVVNPPPVSDHIQGGGGATHP

SEQ ID NO: 195285 - protein, 283 aa, Zea mays
  unsure (1)..(283): unsure at all Xaa locations
  Clone ID: MRT4577_109689C.1.pep
MATNGSSVRVRDTESSLEKVKRQLSSGSGRYLLQGPLLKRSETLRKWNERWVILDPTSGKMEYKLRRNETVIKGTILFDASSTITLSPVNFQGMPKYDGCCFCILFSYILVKEILFQKEFLKXIFRGITCFKVVLFLYXLDIGTPQKKDYFLCAETPGAAKAWVSTLHATQLVLRAHKEAVNSLAGNGSPATLGTVATAVANANATAMEATKEIEAALKVSMRAALGLDTNNSNEGQLDDLTIMKETLRVKDEELQHLAKDIRSRDATIKEIADKLTETAGGC

SEQ ID NO: 195286 - protein, 70 aa, Zea mays
  Clone ID: MRT4577_10968C.1.pep
RHLSSPWGQDPSADIDVLWPVRGVTRWSGWSDGRRGKKGCVWRWRSRTIRAQAEHSETARESGGCVVAHP

SEQ ID NO: 195287 - protein, 51 aa, Zea mays
  Clone ID: MRT4577_109690C.1.pep
VLHDCPPTDLVDFRLLNFSTCKALNPIKQIPLPGGRYSTARKNVFVGTPRH

SEQ ID NO: 195288 - protein, 144 aa, Zea mays
  unsure (1)..(144): unsure at all Xaa locations
  Clone ID: MRT4577_109691C.1.pep
MLSRIDRHGAVMPSGPPYLIRGGPAHRRDTSGHTLMDISFKEHDESMSVQQGGPRRTLLTNYIRXVPLYMNALDHFKNHLKCDKNRRIKEAMTDKVTDYLRRAEEIRAVLDEGGAXAWADGGDSAVGLIAKINYKGGDGXGGND

SEQ ID NO: 195289 - protein, 47 aa, Zea mays
  Clone ID: MRT4577_109692C.1.pep
QPNKVKAAQNPLLLPPKANSLGHLGRSTANGKPPKAKEGMFVKNYSY

SEQ ID NO: 195290 - protein, 62 aa, Zea mays
  Clone ID: MRT4577_109693C.1.pep
MGKVHGSLARAGKVKSQTPKVEPQEKKKTPKGRAKKRLTYTRRFVNVTMTGGKRKMNPNPGS

SEQ ID NO: 195291 - protein, 119 aa, Zea mays
  unsure (1)..(119): unsure at all Xaa locations
  Clone ID: MRT4577_109694C.1.pep
ARPLCSSPQPTAALSFRNIHTHCTSQRAQPHSSRPRQSIKPFHEGVDVAPARCQRRRAVHQQKGPPIHVRLRRHQGCLHLRWLLRQSPTATPXTXXXTTPLTGTXTGTVTTESTRRGGS

SEQ ID NO: 195292 - protein, 109 aa, Zea mays
  Clone ID: MRT4577_109695C.1.pep
FIGDLARVKQTTRRRRRYVSMSSSSSSAANTPPGKSSSEETMSDLAAELHPGHTVEFGVSRISSVRVQEMQQLGYFGNGVGRVPGAEEIPELEGVRGIFYCGPSVMKGK

SEQ ID NO: 195293 - protein, 53 aa, Zea mays
  Clone ID: MRT4577_109696C.1.pep
WKNSFPRFSAPSLKAFPLTPSYITIPIKLFHTIASVVLPLPNIPFARVFFCFI

SEQ ID NO: 195294 - protein, 107 aa, Zea mays
  unsure (1)..(107): unsure at all Xaa locations
  Clone ID: MRT4577_109697C.1.pep
IPPPPKSINNPGLGVPEKKGKKAKLPPPLTGPPEKNPPHKNQNFSPFSFGPPEKGPPPPNAGPPNKFQKNRKKRXPPGPHKXPPPPKNFKFFGPPPPYLPNCFFFPT

SEQ ID NO: 195295 - protein, 65 aa, Zea mays
  Clone ID: MRT4577_109698C.1.pep
YIYGSGGVFFCFLVPFFYGVSHRRTTRFLITMNNQKINKGSIFLITFLTLRWNPPPRNGCSKILV

SEQ ID NO: 195296 - protein, 118 aa, Zea mays
  Clone ID: MRT4577_109699C.1.pep
MAPKRGGKAPVPAKKKTEKVTNPLFEKRTKQFGIGGALPPKKDLHRFVKWPKVVRIQRQRRILKQRLKVPPALHQFTRTLDKNLATNLFKMLLKYRPEDKVAKKERLLKRAQAEAEGK

SEQ ID NO: 195297 - protein, 95 aa, Zea mays
  Clone ID: MRT4577_1096C.1.pep
IKFYIINMSINRRQGLPWSSGETCLNESPGHGLKAASRGKTRLCLIVYPLPRPHSCGSLQNWVIPLNMSMKIHLWQPYSTGKLISYSYKVQDKLA

SEQ ID NO: 195298 - protein, 72 aa, Zea mays
  Clone ID: MRT4577_109700C.1.pep
KNGKKATMMKKNHIRLRRTMEKRRKNRNKTGETQVMIATACYQIRRPVAGHHKITSTSRIRRSFLTRDSVVY

SEQ ID NO: 195299 - protein, 37 aa, Zea mays
  Clone ID: MRT4577_109701C.1.pep
DVATLDNLLQGGEVEEVILQAEKELSLAMKMLQWTPW

SEQ ID NO: 195300 - protein, 66 aa, Zea mays
  Clone ID: MRT4577_109702C.1.pep
AWEKRQFGGGKRRATGKPCPGARRLALPRSSSNRLGPSPVNTRSANPPEVKTVLLDLMVVKQPTRK

SEQ ID NO: 195301 - protein, 67 aa, Zea mays
  Clone ID: MRT4577_109703C.1.pep
MPAAVIDSSSRERVAVSAIRERGASDIERVRLVDVQVHPEGGVQADCDSGDCEGDEEVDSRAGERDG

SEQ ID NO: 195302 - protein, 138 aa, Zea mays
  Clone ID: MRT4577_109704C.1.pep
NEVMSIFSARVARKRPATSLSRTELDRYLDDEYVPANQENFDVLGWWNVAGSRYPTLRAIARDIFAIPVTTVASESAFSRSGRVLSEHRSRLTPDLLEALMCSQNWERNKAKDDEKTEAASFWSCLDDIQEGLERITL

SEQ ID NO: 195303 - protein, 178 aa, Zea mays
  Clone ID: MRT4577_109705C.1.pep
MASSMISSPAVTTVNRAGAGMVAPFTGLKSMAGFPTRKTNNDITSIASNGGRVQCMQVWPPIGKKKFETLSYLPDLDDAQLAKEVEYLLRKGWIPCLEFELEHGFVYREHNRSPGYYDGRYWTMWKLPMFGCTDASQVLKELQEAKTAYPNGFIRIIGFDNVRQVQCISFIAYKPPGF

SEQ ID NO: 195304 - protein, 80 aa, Zea mays
  Clone ID: MRT4577_109706C.1.pep
MDDGILLSARILGFDEDNNVIHVSTCTGAFAIRLVDSMQFTELFEVSRIGSYHSCHPYAGFYTGGGVPGLLTNSNYICSE

SEQ ID NO: 195305 - protein, 36 aa, Zea mays
  Clone ID: MRT4577_109707C.1.pep
SMITWLNLSKSCTPSPTTPQPTLQPTRLPTRPLIAW

SEQ ID NO: 195306 - protein, 92 aa, Zea mays
  Clone ID: MRT4577_109708C.1.pep
MTKRTKKVGITGKYGTRYGASLRKQVKKMEIAQHARYVCQFCGKNSVKRESVGIWHCRSCRKTTAGGAYTVSTPAAAATRSTIRRLREIAEV

SEQ ID NO: 195307 - protein, 80 aa, Zea mays
  Clone ID: MRT4577_109709C.1.pep
WVSPPLNRSLHWGLAADPPSPFLMGASRASILSPAQFPPTTTTSSCTTKVLLPHGAPSSLSLQEEGGDEWIIPLSIPLYI

SEQ ID NO: 195308 - protein, 107 aa, Zea mays
  Clone ID: MRT4577_10970C.1.pep
CIEIAGDNACPSAIHVPCLEKVKAGGTPRASGQRKAPSRPVCIVIHEKVVQRYTPVVRVRNTCCPCNDRHSDPRGGGATFQHDTERRGIYYLHSVRLGVGDISELPD

SEQ ID NO: 195309 - protein, 297 aa, Zea mays
  unsure (1)..(297): unsure at all Xaa locations
  Clone ID: MRT4577_109710C.1.pep
GGRQVQMSEAEIRQLCVEAKQVLLSQPNLLRIHAPVKICGDIHGQFVDLLRLFDLGGYPPTSTYIFLGDYVDRGKQSLETXCLLLAYKLKYPDNIYLLRGNHEDAKINRVYGFYDECKRRFNVRLWKIFCDCFNCLPMAALIDDKILCMHGGLSPELTSLDQIKDIERPTEIPDYGLLCDLLWSDPSHDTEGWGESDRGVSCTFGADKLVEFLEKNDLDLVCRAHQVVEDGYEFFAERRLVTIFSAPNYCGEFDNAGALLSIDESLMCSFQILKPNETGAPHSRKPLPSKAPKGENV

SEQ ID NO: 195310 - protein, 105 aa, Zea mays
  unsure (1)..(105): unsure at all Xaa locations
  Clone ID: MRT4577_109711C.1.pep
VQFLPPGTSMGFGDPAVQAYKLQQAICASVLQQPIFHVQQQSLSHLTIQTIAXQQQQQFLTRLSHLAKVNPAVYLQHQMLASNPIALSNVIANHTLHQMQQFLPS

SEQ ID NO: 195311 - protein, 73 aa, Zea mays
  Clone ID: MRT4577_109712C.1.pep
CTRAETCAQSYTDPVFHPGWSYKEKRTTLSSGHGGCTPALPAPRTAGRPGRRRARGGARLLLVLPRAAVAGGL

SEQ ID NO: 195312 - protein, 104 aa, Zea mays
  Clone ID: MRT4577_109713C.1.pep
PKIFFSPSSGMVLGPGAFFYPAQSQRVKNSSFFFLPPQGDTNWRATSRGFRCIRFSFFVVKSGPRGSNKSGFSRNFLILSLLLLHGKKGGPWPLIFLSRHTPLV

SEQ ID NO: 195313 - protein, 201 aa, Zea mays
  unsure (1)..(201): unsure at all Xaa locations
  Clone ID: MRT4577_109714C.1.pep
LFSHIHFPVQTAKTVYESLLGENASETSLANIQFIRFLRRTEGTEAARXAQSVFEAGLKRFMHEPGYILEYTDFLCRLNDDRNVRALFERALSLLPPEESTEVWRRFAQFEQNYGDLSSIXLKVEQRRKEALSRTSEDALSASENTLHDIVSRYSYMDLWPCSSKELDYLARQEWLAKNIVKKVETPAMLNSGSMLDKGAA

SEQ ID NO: 195314 - protein, 48 aa, Zea mays
  Clone ID: MRT4577_109715C.1.pep
NEVLKYRIKKKKKKKKKKKKKKKKKKKKKKKKKKKKKKPPPAPHFLSP

SEQ ID NO: 195315 - protein, 44 aa, Zea mays
  Clone ID: MRT4577_109716C.1.pep
IPLLRRRCLFRPVCTCRLKALRSMYRSIVQCSSFSSHAVVVTSA

SEQ ID NO: 195316 - protein, 57 aa, Zea mays
  Clone ID: MRT4577_109717C.1.pep
NITVTRLYKFGTTMYLYLTTHARMLIHQTNKVTHIKIKTFSYNLRFFQQGKKGNQIL

SEQ ID NO: 195317 - protein, 322 aa, Zea mays
  unsure (1)..(322): unsure at all Xaa locations
  Clone ID: MRT4577_109718C.1.pep
FQRALKXIHDSEVLKYAFAEMEESRGAIQTAKTVYESLLGENASETSLANIQFIRFLRRTEGTEAARKYFLDARKSPSCTYHLYVAYATMAFCVDKDAKVAQSVFEAGLKRFMHEPGYILEYTDFLCRLNDDRNVRALFERALSLLPPEESTEVWRRFAQFEQNYGDLSSMLKVEQRRKEALSRTSEDALSASENTLHDIVSRYSYMDLWPCSSKELDYLARQEWLAKNIVKKVEKPAMLNSGSMLDKGAAGFSASARLLPQSAKVVRPETSQMVIYDPRQMKGPEFAATSSGYTKEVEATLKVLSPSMVSFIKNLPAIEGP

SEQ ID NO: 195318 - protein, 99 aa, Zea mays
  Clone ID: MRT4577_109719C.1.pep
GRYHAVDREAETRKSSTLLAILVLQALLVYTAADKGPARPKKQRCICERTIWSGVQTCDDLLTKCAVTCKNCLLVCIDKGATNYRCLNFLAENCGCMIH

SEQ ID NO: 195319 - protein, 90 aa, Zea mays
  Clone ID: MRT4577_10971C.1.pep
FSLLLAGLFGSARAFLNLVLKGCTFLGEWIVNFGFWGSIKVFGHLLAEIFTSSTFGFGYSILVGLQKHLTSTLDILVWSDGTRMEFVKIL

SEQ ID NO: 195320 - protein, 30 aa, Zea mays
  Clone ID: MRT4577_109720C.1.pep
KVSFEHGASQIDVKYDELELSNKNSCLFSP

SEQ ID NO: 195321 - protein, 73 aa, Zea mays
  Clone ID: MRT4577_109721C.1.pep
LPEPIESNPFGPSSKLKRLPQNLQEFVKSLFPKKVLHKLIGEKLVPTAKAKRKGGINPFSKKPGALKDFPPRF

SEQ ID NO: 195322 - protein, 258 aa, Zea mays
  unsure (1)..(258): unsure at all Xaa locations
  Clone ID: MRT4577_109722C.1.pep
PAGPIPPEVFLKPYDAIFLNNNRFTSGIPETVGKTKASVIVLANNQLGGCIPRSIGEATTTLDQFIFTNNSLVGCLPVETGLLTNVTVFDVSDNALTGSIPPTLAGLSKVEQLDLSHNMFTGDVPSHVCKLPALANLSVSYNFFTREASECSSTADENMDGTSFDDDANCLGQSRPMQRGADECTPVVSKPVDCTKVQPXCGWPSPPAVSSPPLLSSPPPVASSPPPRSSPPPPPIIIPPVRGTKYQSPPPPLFPATK

SEQ ID NO: 195323 - protein, 49 aa, Zea mays
  Clone ID: MRT4577_109723C.1.pep
RMSCAPSNGNKRSIIFLTPMATNILALLALLALLVSATSEHCGIMNAFV

SEQ ID NO: 195324 - protein, 194 aa, Zea mays
  Clone ID: MRT4577_109724C.1.pep
VDPAFFRRRRPARADGGGRQLHVLLQDISAAAGSAERGRLVFVGKHAHLRYSFDLEDLLRASGGGRGKGGLGTSYKAVLEDGATVVVKRLRDVAAARREFGACVEAAAGAAEGHRNLVPLRGYYYSKDEKLLVLDYLPGGSLSARLHGSRGTGRTAMDWDARVRAALCAARGVAHLHTAHGLAHGDVKSSNLLL

SEQ ID NO: 195325 - protein, 184 aa, Zea mays
  Clone ID: MRT4577_109725C.1.pep
GGSSTRPHAVDEQARPPSGPAHRPWIRSIRGLNGQIWLPSPGRTARSRAPAAAPAQRPLRPPSPDTVTPPPAPWGGSNLQGGERGPLACASSRGQGRTRGSGWCEDPRGGGPQALIDEEGGGSAAVGRRVEDPRELIDEDPRALIGGCGRDAPLKEGGIERGGQAGCEERHRRKGCAIEGIPAG

SEQ ID NO: 195326 - protein, 48 aa, Zea mays
  unsure (1)..(48): unsure at all Xaa locations
  Clone ID: MRT4577_109726C.1.pep
YLRPTKYXRAFFIIRSAHNTQLNFNSFHTYKYHPTSAHKLTPRNTHLH

SEQ ID NO: 195327 - protein, 81 aa, Zea mays
  Clone ID: MRT4577_109727C.1.pep
LGEALLEGVHVRREEAEALGEHLHERRIRVGFPGRRRRRFGRRHEVGVLLHAGDHARLEAAERGDERVAQPRAPRRDPAQR

SEQ ID NO: 195328 - protein, 52 aa, Zea mays
  Clone ID: MRT4577_109728C.1.pep
KFGDLGAKPIFFGGFYLGKKKIKKKKKKKKKKKKKKKKKKKKKGKKKKKKGP

SEQ ID NO: 195329 - protein, 78 aa, Zea mays
  Clone ID: MRT4577_109729C.1.pep
SEPAGTAYSPPPPATTPQSGIHGRRSLSLLDANTDDYHLELTKAGGYSLECSLYVPVYIPEKTALPCGPYCHGNRVWR

SEQ ID NO: 195330 - protein, 100 aa, Zea mays
  Clone ID: MRT4577_10972C.1.pep
RGGWRPGTSSASSAPVRGRARRGTPAPASPTTTSSASASPWAAASAPTPSARAWRAPPPSPPSAPSPLSTPTRPRRAACAAAPPSLPPGPGGGAGAADAV

SEQ ID NO: 195331 - protein, 105 aa, Zea mays
  Clone ID: MRT4577_109730C.1.pep
MLTHLRRPATILSPLLRRNMSVYKVVSTSSAPSAIGPYSQAVVHNGLAYSSGSIGFEPSTMQIVEGGVEAQTRQALKNLKAVVEAAGASTASVLKTTVFLKDMGD

SEQ ID NO: 195332 - protein, 504 aa, Zea mays
  unsure (1)..(504): unsure at all Xaa locations
  Clone ID: MRT4577_109731C.1.pep
MAPKKRKADPAESADAAEAAAGNHRQEPAPSEPKPRATIYFPITDDPPEPAAEEDEEDGAGEDEDDVEDIGKLLEPLSREQLVALLRTAAETSPATMAAVRRAVESDPASRKLFVHGLGWGASAEDLRSAFSCFGELEDCRVISDKQSGRSKGYGFVLFRSRRSALRALSRPQLQIGGRLAFCHLAASGPAPPASQSQNPXAPTQTPMPTLTPIPPPXSGSSSSQPDNMPRKIFVGNVHADVDVDRLYNYFAQFGEIEEGPFGFDKNTGKPKGFALFVYKSVESARRALEEPMKNFDGKTLNVQKAIDGRTKGSSGTNTNANSNPTTASVAAAAAAAQMTAPATAAISPYDASAYGATAVPDMSFAQQAAMLGFGAQQQAFAQPNAMLAMIAAMQNPAALGMTPAMFAAMNPAFAAAALGAGGQQAQTAGLTGFGAQGFGTQAFGAGGAAFPNAAGVQAATAGISRRWGSSLVFKGHLISGWPSNYPDKHCSGSSWLSGQLGRA

SEQ ID NO: 195333 - protein, 87 aa, Zea mays
  Clone ID: MRT4577_109732C.1.pep
IVHLSVWGLKATDPCSPSFKNKILVPLISGVGASCRSCGSLADAQFTASLWRNKPCNEGYGRNEPLTIPPLICRSQCKGSLLKSSSA

SEQ ID NO: 195334 - protein, 126 aa, Zea mays
  Clone ID: MRT4577_109733C.1.pep
TSDRFFEKNLFGAGTETTSTTVEWAMSLLLNNPGTLEKAREEIDAAVGHSRLLNAGDLPRLGYLRCIIAETLRLYPAAPLLLPHESSADCKVGGYDVPPGTALLVNVYAIHRDPAVWEEPGRFVPE

SEQ ID NO: 195335 - protein, 130 aa, Zea mays
  Clone ID: MRT4577_109734C.1.pep
VSYQGPRRGQGAHVVLAGGDLQRDGRQVSGAQRRARGEEDSRVPAGELRCPVRSHAYLVVRRESCSRRSSWLYSGVCSAAARRVVRYGVRLVHVQVDVRTSVFAFSDEGGEISVCCLPRGGRRGGGKAPS

SEQ ID NO: 195336 - protein, 344 aa, Zea mays
  Clone ID: MRT4577_109735C.1.pep
MMMLTKEFALSPPPGVVPRRRPSARVAPTAARGGSPVPDLWLRTAAPVPASAAAGFASSHSHDGDCDLAMLVTDFLENGATAGSGDSRNSSDSESGLPDLAHLADTISMLKQGGDEKENELLAMVHSLLLSIHEPQLQPFKTGQCGGSCIRHLLVKLLRYSGNDAAVCTSKWQGFDKIPGGDYEYIDVIMHGDTTAPERLIVDIDFRSHFEIARAVDSYGTLLNSLPVVFVGTLPRLKQFLHVMVDAAKWSLKQNSMPLPPWRSLPYLQAKWQSKYERKDSITEGGFQSTSSDHALCIGHLKRLKTSLQLELETAGLLMMPIKANKKRMPKSSERRRRRSLLSC

SEQ ID NO: 195337 - protein, 158 aa, Zea mays
  Clone ID: MRT4577_109736C.1.pep
GRLGGAAIAGIVVGAVVVVLLLLIAVVLCAVSKRRSAGAREGPKAATSAAAGSGAARGGAPPASGEGRCITSSDKEAPKCHPARYYEAQVDIGSNKIRGNGVNDPSPGSDQDHRCDMAYSLSDSLLIKTTTAPPTPKPGAPVPGYQNHGSESTRQDEH

SEQ ID NO: 195338 - protein, 183 aa, Zea mays
  unsure (1)..(183): unsure at all Xaa locations
  Clone ID: MRT4577_109737C.1.pep
LGQIAESRRLGQTSXTLVSLSSSFGFFGRLLPSFLDYYSAKSGYSISRTGSMASLMAPMSGAFLLLLNPSHFFLYLSTAVIGTCTGAITSVAVSATSELFGAKNFGVNHNVVVSNIPVGSLCFGYSAAYLYQRGARGGGHHCVGAACYRETFVVWGATCAVGTLLCAVLYARSRREATGTAAG

SEQ ID NO: 195339 - protein, 448 aa, Zea mays
  Clone ID: MRT4577_109738C.1.pep
MALVQFNGALVPQLGEKPRLLSSSPAIAKATYSDARFLTPKTGSRGRGKQLLSPSYSLHSQTSSEQLNHVPSSRFRQKRGSRFIVRAEADFYSVLGVSRNASKSEIKSAYRKLARSYHPDVNKDPGAEQKFKDISNAYEVLSDDEKRSIYDKYGEAGLKGAGMGTGDYSNPFDLFESLFEGFGGMGGMGGGRAARNRPMQGDDESYNLVLNFKEAVFGVEKEIEITRLEGCNTCDGSGAKPGTKATTCKTCGGQGQVVSSTRTPLGIFQQVSTCNTCGGTGEFSTPCNTCGGDGRVRRTKRISLKVPAGVDSGSRLRVRSEGNAGRRGGPPGDLYVFIDVLSDPVLKRDGTNILYTCKVSYIDAILGTTVKVPTVDGTVDLKIPSGTQPGTTLVMSKKGVPLLGKSNARGDQLVRVQVEIPKRLSSDEKKLIEELANLNKAQTANSRR

SEQ ID NO: 195340 - protein, 526 aa, Zea mays
  unsure (1)..(526): unsure at all Xaa locations
  Clone ID: MRT4577_109739C.1.pep
MAVGLYSLGLSPPPRLDTILFPQLRPHLRCRVPARVAAAGTSWSPAAGDSEDGVGGWWFPEYEKSMKQARGRIGFKRAVVVGLGASAAIALAGLAWRFPSSQKRIQQLIVAPLHYVQEKLPTIESTETTKEDASDRESDEIEVSSATHDKKAEAITDDSRQNYRTTIASPFPFGVPTDPVHEEALSVLKKLQIIEKDVSSSDFCTRKEFARWFVKLCSKFERKKMQRIVPNKLTSGTVQCAFDDVNIDDPDFLYIQSLGESGIVSSKLSNSLEILTSGSPCSQGNTLFLPDSYLSRFDLVNWKVLVEHPRALRIDENVGNTRRLQPGKPVTKAQAAAALTSGRMKEAVHEELNKLEAENQAHLSLIAEIMEELISRGDIQQQWEQKMKKEQERALEVDNNLQHVLHELANERTDREEELADLLKERAALECQXQELINLRLEIDGMYDRLATEKRRVTLADQHTLXNQLSDMTSKHQAVNEAKSYLEAEKEALTMLRTWVEDEAAHVHERAETLEKALRRWRIPED

SEQ ID NO: 195341 - protein, 71 aa, Zea mays
  unsure (1)..(71): unsure at all Xaa locations
  Clone ID: MRT4577_10973C.1.pep
GVGCFALLFSVRRCFSRXGLLLVXSXGSPSLPALFEVSFPFLSSALALNCSSCGKVFSLVSFLTNLLGRPL

SEQ ID NO: 195342 - protein, 461 aa, Zea mays
  unsure (1)..(461): unsure at all Xaa locations
  Clone ID: MRT4577_109740C.1.pep
MITRGIQQLIVAPLHYVQDKLSTMESTEIIKEDASERESDEIEVSSATHDKKAEAITDDSRQNYRTAIASHFLFRVHTDPVHEEAFSILKKLQIIEKDVSSSDFCTRREFARWFVKLSSXFERKKMCSIVPNKLTSDTVQCAFDDVNIDHPDFLYIQSLGESGIISSKLSNSLETLTTGSPSQGNSLFLPDSYLSRFDLVNWKVLVEHPCALEIDQKMLSQNVCILDLRACPDVSPSMLIELMAGENSIISRVFGNTRRLQPHKPVTKAQAAAALTSGRMKEAIQEELNRLEADNQARLSVIAEITEELINRGDIQQQWEEKMKKEQERALEVDNNLQHVLDELANERADREEELAVLLKERAALECKNQELINLRLEVDGMYDRLATENEEVMADQQTLENLVSDMTSKHQAVNEAKSYLEAEKEALTMLRTWVEDEAGRVHERAETLEKALRRWRIPED

SEQ ID NO: 195343 - protein, 69 aa, Zea mays
  Clone ID: MRT4577_109741C.1.pep
VLHFVWGFFCFLIFLGGNCILPSYHVKPKGGGLIHIIPPTGRYPTGWQKPNCTRHKSRVHFQGVCFLLN

SEQ ID NO: 195344 - protein, 58 aa, Zea mays
  unsure (1)..(58): unsure at all Xaa locations
  Clone ID: MRT4577_109742C.1.pep
IMTLLGGSGVRXXXXDIPPSHSCSLVRYSKILLLPPPVICIGPKPPSLTRRTSPCSIT

SEQ ID NO: 195345 - protein, 134 aa, Zea mays
  unsure (1)..(134): unsure at all Xaa locations
  Clone ID: MRT4577_109743C.1.pep
QQGRAAATATATRPEDGQRNDGEAQXAAPXPAAAAAPAXXTQHQQKEXAXGXEAGXRAKEGRRXTRAXRHTDAHRRRXAARDXXAXXAXAPPAGGEANGRXXAQGPKEEETERDXEAAXPAXQKXSKQGXPESE

SEQ ID NO: 195346 - protein, 47 aa, Zea mays
  Clone ID: MRT4577_109744C.1.pep
ISGWVTHRAPRVMPNATSPRSTMPSRCRPSTSLWAGAVHTEPFIHCA

SEQ ID NO: 195347 - protein, 76 aa, Zea mays
  Clone ID: MRT4577_109745C.1.pep
ERDECLKNYYTGQDHSSTACHFALWPLQSGSSVVRSFSDLTLILLTTKDKPTNADLDVPPSSAEAHTEMFHLSPAG

SEQ ID NO: 195348 - protein, 698 aa, Zea mays
  Clone ID: MRT4577_109746C.1.pep
MNPYFVGILVPVAVSLLLRKRRKAERMRGVPVEVGGEPGYAVRNYRFEQPVETHWEGVSTLADLFEQSCKEYVYMPLLGTRKLISRETEAAPGGRSFEKLHLGEYEWKCYAECFKSVCNFSSGLIRVGHQKNERVAIFAETRAEWQIGLQACFRQNITVVTIYASLGEEALCHSLNETEVTTVVCGQKELKKLIDISGQLDTVKRVVYINEEGISTEVSLAQNCTSWIVESFEEVTRLGAEAPVEANMPLPSDVAVIMYTSGSTGLPKGVMMTHRNVLATLSAVMTIVPALGSKDIYLAYLPLAHILELAAEALMAAVGASIGYGSPLTLIDTSNKIKKGTLGDASALKPTLMTAVPAILDRIRDGVRKKVDTKGGIAKQLFDIAYNRRLAAINGSWLGAWGLEKLLWDTLVFGKVRAILGGKIRFVLSGGAPLSGDTQRFINICLGAPIGQGYGLTETCAGGTFSEYDDTSVGRVGAPLPCSYIKLIDWPEGGYLTADLPMPRGEIVIGGPNITKGYFKNEAKTNEVYKDDEKGMRWFYSGDIGRFHPDGCLEIIDRKKDIVKLQHGEYVSLGKVEAALIVSPYVENIMIHADPFHNYCVALVVAAHIELESWASQQGIKYSDFSDLCQKQEAVKEVLGSLAKAAKQARLEKFEIPVKIKLIPEPWTPESGLVTAALKLKREVIRKTYENDLAELYA

SEQ ID NO: 195349 - protein, 98 aa, Zea mays
  unsure (1)..(98): unsure at all Xaa locations
  Clone ID: MRT4577_109747C.1.pep
SGPLSCSVLLLLVPGLVLCVPFVCRACAVCVGSPCVSVWLAVPPVLFAPCCFRAFCGFXFAXFSGWFGGSFLKVPXXFFXGRPPSEELVEQGIYSGPV

SEQ ID NO: 195350 - protein, 63 aa, Zea mays
  Clone ID: MRT4577_109748C.1.pep
FLLTSEQQGPLLGVKFLGSLNPWLPPMGRQPVIQGYILPGGRFLNAGVYWVPVDWLPQFLVSF

SEQ ID NO: 195351 - protein, 72 aa, Zea mays
  unsure (1)..(72): unsure at all Xaa locations
  Clone ID: MRT4577_109749C.1.pep
QDEGLDKLVETVLNTKHIALAVNEELTLHTRLIVXCHITKXVVYVSFTLDDNLLSCLQDDLEDHVDVTNSRL

SEQ ID NO: 195352 - protein, 76 aa, Zea mays
  Clone ID: MRT4577_10974C.1.pep
EIDSCLVRLSSVDRVKYSIYIVDDTVCILKFEIRYVIGDEIGKLLVIALEYEAVYYGYISTRNETTLSFNFSTTIM

SEQ ID NO: 195353 - protein, 53 aa, Zea mays
  Clone ID: MRT4577_109750C.1.pep
KLYFYILWSKTTTLERLVYLYIEKTHLPPYKTHNITKQIITLLSIQNQFNSIY

SEQ ID NO: 195354 - protein, 100 aa, Zea mays
  Clone ID: MRT4577_109751C.1.pep
ACKLNNISSFAAFFFLQYDLFTFRFTQHKQILSDRTHTFHAKRERERELLQGFRSTTKEAKKTDTKPRCLQAWAKNMSPVGFFSLFFPDAWADAWADAWA

SEQ ID NO: 195355 - protein, 58 aa, Zea mays
  Clone ID: MRT4577_109752C.1.pep
PKMSRIKRDGWHAVYSVAFLTGPERINHINLITSVIWIERFKFGRRLMRKGGCLRLVP

SEQ ID NO: 195356 - protein, 87 aa, Zea mays
  Clone ID: MRT4577_109753C.1.pep
RMNNIHAILAGILYGYWLFLSHDDMHQRQHQMHPHHTPHRFSRSKEMRKLQSQVKKGSKRKTEVTKNRRSVSNDKLRCKCPPSRCED

SEQ ID NO: 195357 - protein, 46 aa, Zea mays
  unsure (1)..(46): unsure at all Xaa locations
  Clone ID: MRT4577_109754C.1.pep
EMYFLIXREATNIRQIALLLTCTSSDIYQTSPPTKGCLSTAVMFQK

SEQ ID NO: 195358 - protein, 51 aa, Zea mays
  Clone ID: MRT4577_109755C.1.pep
TRRLGYLTRACVSITTARSVSVASDAYESARLWHSLSVVVACMTIRLLVNA

SEQ ID NO: 195359 - protein, 43 aa, Zea mays
  Clone ID: MRT4577_109756C.1.pep
NISGGGHLKKALLGHFVGPSFPNSQRRKPWNQGLIVEPYSNRT

SEQ ID NO: 195360 - protein, 167 aa, Zea mays
  unsure (1)..(167): unsure at all Xaa locations
  Clone ID: MRT4577_109757C.1.pep
PRVRGRVGGRVGSSLSSKSPRWSQPPPIPPPQAIPVVGVLSPPLEPQAAVKSTKRAGIIGIAFEAYYSKIWQMLAASKVDACNAAAAWAGQYCKCRFELDEKELEEEEADSLGSVSPMSSEAENGKELVDELARLRINXEQQLQRGGHGGXRVPLPWDLLQPVMRVL

SEQ ID NO: 195361 - protein, 74 aa, Zea mays
  Clone ID: MRT4577_109758C.1.pep
MEPVVGIVVSNKMQKSVVVAVDRLFHYKMYNRYVKRTSKFMAHDEADSCNIGDRVAGCRVGIGLEKGGGAGALS

SEQ ID NO: 195362 - protein, 102 aa, Zea mays
  Clone ID: MRT4577_109759C.1.pep
PAGISFTPHHKCPASESDQRASDGGEREERTVISPSSLTTHTRDGDAATAEVCIKAQKISRSRLSSPPHPRCAVCVPSPRDREQVLSSSIHPCPVLLVALLD

SEQ ID NO: 195363 - protein, 46 aa, Zea mays
  Clone ID: MRT4577_10975C.1.pep
AAPPFVSQTSTTGGYKRCGYCHLLNSTRTVDESSLLELNMTGKNNS

SEQ ID NO: 195364 - protein, 83 aa, Zea mays
  Clone ID: MRT4577_109760C.1.pep
QNLKRRGKDACKEIVIFRSNRWNALLVLVVIDLKKQVKIVHQTYRKGRKHDSFTLGTMGHRMNNQVKTYNYLATEICALEDLQ

SEQ ID NO: 195365 - protein, 292 aa, Zea mays
  Clone ID: MRT4577_109761C.1.pep
QTARKLFDATPCKDQIMLSSMISGYATNGYSEEALSLFQLMLAAGFHIDRFLCSSIISICANMARPFCGKLLHGYASKVGILSDLSVSSSLVKLYSKSGNLDDSRKVFDEIDVPDLVTWTAIIDGYAQHGSSQDALALFDLMIRCGVKPDTVILVSVLSACGRNGLVEEGFKHFNSMRTVYGVEPVLHHYCCMVDLLGRSGRLVEAKSFIESMPVKPNSMVWSTLLAACRVHDDVVLGRFVENKIHEENCDSGCFATMSNIRANSGDWEGVMEIRKSVKDVEKEPGWSFLEE

SEQ ID NO: 195366 - protein, 81 aa, Zea mays
  Clone ID: MRT4577_109762C.1.pep
APRYCENSPDYCVNTDLFFPPREVSAPLPFFILKISDTIVYSCYSLSHESAIPILCGLLAKLLNHSKNILLQFTTYNTVAT

SEQ ID NO: 195367 - protein, 56 aa, Zea mays
  Clone ID: MRT4577_109763C.1.pep
TCPSYWHQRGARKTRPTPPESKGPALKRCVDPPKQIRKCVAISLSFVGVQTHLFKF

SEQ ID NO: 195368 - protein, 78 aa, Zea mays
  Clone ID: MRT4577_109764C.1.pep
CIFKSPDVQGGKWVFHWSGKAVPAFPRRDQTCCPLKVGLWLTTNMARSSIQSHASFCISRFIQFQSCFLAPTRPWGVC

SEQ ID NO: 195369 - protein, 66 aa, Zea mays
  Clone ID: MRT4577_109765C.1.pep
NTRKICLSQHLFYTQKPKINKPAFFKNAVRHSNITNNITTNYHTTKHAPNNLITQLHNSIFLPSQT

SEQ ID NO: 195370 - protein, 100 aa, Zea mays
  Clone ID: MRT4577_109766C.1.pep
WHQDGITMHARTRANGPPNSCMAIYGRKGGWDSFSACNHHCGEHPAPCGDAALPCRWLHGAQFSCPGARASPFFLALRPCQLPCTSGVARTRQLTSTAAR

SEQ ID NO: 195371 - protein, 74 aa, Zea mays
  Clone ID: MRT4577_109767C.1.pep
GSWPVHQVNNEAWVGWDFWDNLMCDGQSFEEHLQISVCQQNFVRLVVVQVIRPWDGAWNPALILNCRWYPAQGE

SEQ ID NO: 195372 - protein, 143 aa, Zea mays
  unsure (1)..(143): unsure at all Xaa locations
  Clone ID: MRT4577_109768C.1.pep
FNESAVDNRVLKAVVETLKAKVSMXDLGVXRVTGMNXLYLAVSNMSSLSMLFKGYPFESAYESTVSVXDDLTSXLANPREIVCSEGYIPXIASSVQXQSDYFVSGXQPAGKMDRAHSLHRVASMEHLXQKRMFVGQVTAGPSP

SEQ ID NO: 195373 - protein, 128 aa, Zea mays
  Clone ID: MRT4577_109769C.1.pep
MARSSKMMVAAALLALALAVSTAEARNIKTTTTEKKDDAVVQPQTFPPFDRLGGGASPAFGGLPGGSIPGSSIPGFSMPGSGSSLPGFSLPGSGSMPLFGGGSPGFSGFGGMPGSPTAGSVPEHANKP

SEQ ID NO: 195374 - protein, 68 aa, Zea mays
  Clone ID: MRT4577_10976C.1.pep
NWSSESASGCQMLCFSVRFCENRFCENRSNQCECRIRRVVAMGGIWCFLNPKSCRPFSSLFACKPRDI

SEQ ID NO: 195375 - protein, 107 aa, Zea mays
  unsure (1)..(107): unsure at all Xaa locations
  Clone ID: MRT4577_109770C.1.pep
MARSSKMMVXAAALLALALAVSTAEARNIKTTTTEKKDDAVVQPQTFPPFDRLGGGASPAFGGLPGGSIPGSGSMPLFGGGSPGFSGFGGMPGSPTAGSVPKHANKP

SEQ ID NO: 195376 - protein, 54 aa, Zea mays
  unsure (1)..(54): unsure at all Xaa locations
  Clone ID: MRT4577_109771C.1.pep
DNVKAKILXKEGIHPDGRRLIYSGKHLDDCLTLSHYNIQNESTLHLVLLLHGRH

SEQ ID NO: 195377 - protein, 128 aa, Zea mays; identical to SEQ ID NO: 195373
  Clone ID: MRT4577_109772C.1.pep

SEQ ID NO: 195378 - protein, 127 aa, Zea mays
  Clone ID: MRT4577_109773C.1.pep
MARSSKMMVAAALLALALAVSTAEARNIKTTTEKKDDAVVQPQTFPPFDRLGGGASPAFGGLPGGSIPGSSIPGFSMPGSGSSLPGFSLPGSGSMPLFGGGSPGFSGFGGMPGSPTAGSVPEHANKP

SEQ ID NO: 195379 - protein, 70 aa, Zea mays
  Clone ID: MRT4577_109774C.1.pep
THTKKGLGSNRAYTTDGAAIYGGKNLQIGLPAGGPKGPNYPGKKPPFFKNASDKHHLAKKRKPFKKNRHT

SEQ ID NO: 195380 - protein, 70 aa, Zea mays
  Clone ID: MRT4577_109775C.1.pep
TTVSIQAFSVIVNSPLRIDLSCVLDHVVSELTAFLRKDSSSYQVTPPPHDDFADICLNSNGGATNNNLMS

SEQ ID NO: 195381 - protein, 123 aa, Zea mays
  Clone ID: MRT4577_109776C.1.pep
MARSSKMMVAAALLALALAVSTAEARNIKTTTTEKKDDAVVQPQTFPPFDRLGGGASPAFGGLPGGSIPGFSMPGSGSGLPGFSLPGSGSMPLFGGGSPGFSGFGGMPGSPTAGSVPEHANKP

SEQ ID NO: 195382 - protein, 196 aa, Zea mays
  Clone ID: MRT4577_109777C.1.pep
PRRRSQHPVDPISHPPLARPSLLRRQKEMMLYKIRSHAQIQDLQARSDELGLSNKSMLVSLVSLESVRIAWESYALLRPLIKESWSWVCPQLDFLSDVAGLSLEIQKLEHDVLPQLKLQEAKLERGALEALLLMKNSAVALLHLRKCFKEDLGVLLAKEDLVSAKVKRLSKMLKYIAVRLLQERECNIVGLQERVR

SEQ ID NO: 195383 - protein, 44 aa, Zea mays
  Clone ID: MRT4577_109778C.1.pep
LHGYLSMIEGWLSSECLLVKKKKDAALRTKHTTRDRRHSDSIVS

SEQ ID NO: 195384 - protein, 385 aa, Zea mays
  Clone ID: MRT4577_109779C.1.pep
MLGQSLYYRNRSAAASTSNDDFAWRHLMAFTGCDDAEKLRSENITGKIMVCRAPEFKSNYPPTAQFSWASRAAIAGGAKGVIFEQYSTDVLDGQASCQGHLPCVVVDKETIYTILNSDSNVARISPAATMVGPQVASPRIATFSSRGPSAEFPSVLKPDIAAPGVSILAAKRDSYVLLSGTSMACPHVSAVVALLGPVHPDWSPAMIKSAIVTTASVTDRFGLPIQANSVQRKPADAFDMGGGLIAPDRAMDPGLVYDIQPEEYKSLDDRVDRLNLPSIAVPNLMYDSVTVSRTVTNVGPVEATYRAVVEAPAGVAMDVAPPVIAFERGGVRNATFKVTFVAKQRVQGGYAFGSLTWLDDAKRHSVRIPVAVRTVVRDFVADVSR

SEQ ID NO: 195385 - protein, 239 aa, Zea mays
  Clone ID: MRT4577_10977C.1.pep
MDSDLWISRLTAAKRQFALQRAQRQHAAPASHHDRFGYDDIEPEDDLHSDFPCPYCYEDHDVASLCAHLEDEHPFESKIVSCPVCSARISKDLVDHITLQHGYLFKLQKHQRVRRVTGNGNHNLSYAGRDLQLQETYLKVLLGNSSRSSSTNASSTVTDSLLPSLVLNLSSPEVEDASKFSAPAVVENNWFKRSLPSKTWKLRTVDSTLSHEERERRRRRAAVRSAFVQHLLVTTIFED

SEQ ID NO: 195386 - protein, 53 aa, Zea mays
  unsure (1)..(53): unsure at all Xaa locations
  Clone ID: MRT4577_109780C.1.pep
SSLLSSVLSSVLSSDFSLDCSFFLFVARGLFAGTVGFSGSESSESDCEXVSEL

SEQ ID NO: 195387 - protein, 34 aa, Zea mays
  unsure (1)..(34): unsure at all Xaa locations
  Clone ID: MRT4577_109781C.1.pep
GYLPDTIAFFLFNSHVTPXAIVLTRHGQSLHNVR

SEQ ID NO: 195388 - protein, 256 aa, Zea mays
  unsure (1)..(256): unsure at all Xaa locations
  Clone ID: MRT4577_109782C.1.pep
MGWRPHVVSVSSSALLVLLQLLVLLMLPADASSSSQTTTTTIYVVYMGEKKHDDPSLVVASHHATLASVLGSKDEALSSIVYSYKHGFSGFAAKLTQPQAEEXKCVVVASPELSMNQVVLLLRITSLXQHIYNDILEYPGVVSVKPNTYHHVHTTRSWDFLGMSYGQQQSWSSSSSRLLRKAKYGEDVIVGVIDXVLVGFEFRHHLNPVCVADMYASAGIWPESRSFDDSGYGPVAKRWXGVCQTGQAFNASNWQP

SEQ ID NO: 195389 - protein, 126 aa, Zea mays
  Clone ID: MRT4577_109783C.1.pep
QGTNKLVPSVSKKKSFRQSPLNMKTPLAPFLVLMGSEATYLSSPRRASPFPMFLTTACHRRCRGPCFFRRSREIRAAAPRTLFRDGIGCGLPLPCAGIRVACFSKGPMSFLGEREGGKGKGRRKAL

SEQ ID NO: 195390 - protein, 789 aa, Zea mays
  unsure (1)..(789): unsure at all Xaa locations
  Clone ID: MRT4577_109784C.1.pep
MGWRPHVVSASSSALVLQFLVLLLPLPLPLLSADASSSQTTTTIYVVYMGEKKHDDPSVVMASHHAALTSVLGSKDEALRSIVYSYKHGFSGFAAKLTQPQAEELTKYPGVVSVKPNAYHHVHTTRSWDFLGMSYGESPSLSSSSRLLRKAKYGEDVIVGVIDSGIWPESPSFDDSGYGPVPKRWKGVCQTGQAFNASNCNRKVIGARWYGADVGEEDLKGEYRSARDANGHGTHTASTIAGSPVRGASHAGGGLAAGIARGGAPRARLAIYKVCHDVGGGTSCGDASILAALDAAIGDGVDVLSLSLGGGSDEVYRTLHVVAAGITVVFSAGNDGPVPQSVTNALPWLVTVAATTVDRTFPTVVTLGDGETKLVGQSLYYRNRSAAASTSNDDFAWRHLMAFTGCDDAEKLRSENITGKIMVCRAPEFKSNYPPTAQFSWASRAAIAGGAKGVIFEQYSTDVLDGQASCQGHLPCVVVDKETIYTILNSDSNVARISPAATMVGPQVASPRIATFSSRGPSAEFPSVLKXCMHVYLMISHLHESMYIYISQRVSVWTTDXPDIAAPGVSILAAKRDSYVLLSGTSMACPHVSAVVALLKSVHPDWSPAMIKSAIVTTASVTDRFGLPIQANSVQRKPADAFDMGGGLIAPDRAMDPGLVYDIQPEEYKSLDDRVDRLNLPSIAVPNLMYDSVTVSRTVTNVGPVEATYRAVVEAPAGVAMDVAPPVITFERGGVRNATFKVTFVAKQRVQGGYAFGSLTWLDDAKRHSVRIPVAVRTVVRDFVADVSR

SEQ ID NO: 195391 - protein, 84 aa, Zea mays
  Clone ID: MRT4577_109785C.1.pep
LSLFFFFLKPNYRGRFYLLVTVLHQLDQPICMQTHVCEHKNCTTRCNTRLQRDKHRVGFCYRRMRRHLHWELGPYLWPVDHPPQ

SEQ ID NO: 195392 - protein, 73 aa, Zea mays
  Clone ID: MRT4577_109786C.1.pep
PFTSPSSRSTEATPVTLALRGTSSAVELAALFPGDRGCRLLLRLHGPTVDHNAHHREQHPEYVLHGEGRVKQD

SEQ ID NO: 195393 - protein, 107 aa, Zea mays
  Clone ID: MRT4577_109787C.1.pep
MAMATQASADTRHLVAAAIMREGPNLLKLARKEQCLALGTRLRSKYKITYQFYRVFPNGEVQYLHPKDGVYPEKVNPGREGVGQNFRSIGKNVNPIDVKFTGKSTFD

SEQ ID NO: 195394 - protein, 76 aa, Zea mays
  Clone ID: MRT4577_109788C.1.pep
TRSTHSAVECKQPHGNGFLCFFAPCACYALSGRNYRRHRIRFLSCPYFPTHSTDPCCYLIEQHLGMHPGASTTTRQ

SEQ ID NO: 195395 - protein, 46 aa, Zea mays
  Clone ID: MRT4577_109789C.1.pep
TKGGSLSNVPVGGGCRKNRSRGKPVRAVPVDSVAPSSGGAAAFTHR

SEQ ID NO: 195396 - protein, 238 aa, Zea mays
  Clone ID: MRT4577_10978C.1.pep
FGSSGSSWHLLCGGGRGRGQEGKACSHHGFRPLDLASHGRQAAVCAAARAAPARRPGIPSRSIGYDDIEPEDDVHSDFPCPYCYEDHDVASLCAHLEDEHPFESKIVKHQRVRRVTGNGNHNLSYAGRDLQLQETYLKVLLGNSSRSSSTNASSTVTDSLLPSLVLNLSSPEVEDASKFSAPAVVENNWFKRSLPSKTWKLRAVDSTLSHEERERRRRRAAVRSAFVQHLLVTTIFED

SEQ ID NO: 195397 - protein, 110 aa, Zea mays
  Clone ID: MRT4577_109790C.1.pep
MAMATQASAATRHLVAAAASAIMREGPNLLKLARKEQCLALGTRLRSKYKITYQFYRVFPNGEVQYLHPKDGVYPEKVNPGREGVGQNFRSIGKNVNPIDVKFTGKSTFD

SEQ ID NO: 195398 - protein, 204 aa, Zea mays
  Clone ID: MRT4577_109791C.1.pep
MAMATQASAATRHLVAAAASAWAPSAKPRQLSSQLALPSSSSRAPAPLRATAGEAVTEEAPKGFVAPQLDPSTPSPIFGGSTGGLLRKAQVEEFYVITWVSPKEQVFEMPTGGAAIMREGPNLLKLARKEQCLALGTRLRSKYKITYQFYRVFPNGEVQYLHPKDGVYPEKVNPGREGVGQNFRSIGKNVNPIDVKFTGKSIFD

SEQ ID NO: 195399 - protein, 223 aa, Zea mays
  Clone ID: MRT4577_109792C.1.pep
KKIPKKKKKKKKKKKKKKKKKKKKKKKKKNPFNPSTPALHGHGKVTAVLPGSPEVPNRIGFFVGLVGVSSPWGFPLKLLARQNQAGENMLLLSNSRNQGNGGSKIKTLLQGTLFSGVAFGLRNQGKLSYDKKNEYLDDAEDQLTHKDKSIFQARKQKAGSYRDSNAQRVANNSDVTTNPEEGEGNHHSDTLDHNEKTVKTGSNKDSTTLHEDDKKNPESSKAE

SEQ ID NO: 195400 - protein, 183 aa, Zea mays
  Clone ID: MRT4577_109793C.1.pep
WAKPRQLSSQLAMPSSRGPAPLRASDDGPAAAAVTEEAPKGFVPPQLDPNTPSPIFGGSTGGLLRKAQVEEFYVITWTSPKEQVFEMPTGGAAIMREGPNLLKLARKEQCLALGTRLRSKYKINYQFYRVFPNGEVQYLHPKDGVYPEKVNAGRQGVGQNFRSIGKNVSPIEVKFTGKESFDI

SEQ ID NO: 195401 - protein, 94 aa, Zea mays
  unsure (1)..(94): unsure at all Xaa locations
  Clone ID: MRT4577_109794C.1.pep
CPNGPFFFRAPGKIGDYSPPFSSPQLGVGYGPPKVARFNMPPPVGGIRSFFEAFRPGTPRPFXLQTGFPPQQVGGPTPTLGQTGVANPGFLPKR

SEQ ID NO: 195402 - protein, 237 aa, Zea mays
  Clone ID: MRT4577_109795C.1.pep
MLAPPSSIPFHSIPVLAHLAPPSASAHPPRIVMAMATQASAATRHLVAAAAATAWAPSAKPRQLSSQLALPPSSSRAPAPLRATAGEAVTEEAPKGFVAPQLDPSTPSPIFGGSTGGLLRKAQVEEFYVITWVSPKEQVFEMPTGGAAIMREGPNLLKLARKEQCLALGTRLRSKYKITYQFYRVFPNGEVQYLHPKDGVYPEKVNPGREGVGQNFRSIGKNVNPIDVKFTGKSTFD

SEQ ID NO: 195403 - protein, 63 aa, Zea mays
  Clone ID: MRT4577_109796C.1.pep
HACGAYVLEDHQEEESKCAVTTLEPQLYDIAAVEPCFTYSGSQWHTCIWNVLWLPSLLRACSI

SEQ ID NO: 195404 - protein, 63 aa, Zea mays
  Clone ID: MRT4577_109797C.1.pep
EEVVLMEQKYVLNDSTNIKTVLNDLSKEVGSKVTIGNFIRMEVGEGIERTEAADGLEVAGGAM

SEQ ID NO: 195405 - protein, 379 aa, Zea mays
  Clone ID: MRT4577_109798C.1.pep
MAWGQGAKRSILGLLFRSQHQTARAYSSSAFQTHQLSTHVPQDGVFIRRFGSEVSSSEQMNLIKQLRQRTSAPIKDVKASLVTCNWDIEAAQKDLRKRGVALAAKKSSRTAAEGLLAIAQDDKRAAVVELNCETDFVARNDVFQYLASSLAKMALSAQGPGELFMPFGPELLENMPINLDHPKLSVETTVQSAVTEVAAMVGENVKLRRGFMLSTTAHGVVSSYMHTCPQPGMGRIAGLVTLETEDSSTLLDSVKSVGSSIAMHIVAAKPLFLSKELVSASALENEREILRTQAQSSGKSQMAMDKMVEGRLRKYFEEVVLMEQKYVLNDSTNIKTVLNDLSKEVGSKVTIGNFIRMEVGEGIERTEAADGLEVAGGAM

SEQ ID NO: 195406 - protein, 98 aa, Zea mays
  unsure (1)..(98): unsure at all Xaa locations
  Clone ID: MRT4577_109799C.1.pep
PGPAAXAGGVXGLPLRAPXPPXGALGAXXXXAGPPPSPXXARGPAVLGXALGXXGLRXXRWPRXGAVLXVCXXGRLPPRXXVVAPAVRXRLPGLRPXA

SEQ ID NO: 195407 - protein, 53 aa, Zea mays
  Clone ID: MRT4577_10979C.1.pep
RCAPRRPASWWGFGSRRKRRRARILWPTPRGLARRAATGCRCSSSLDQALTFT

SEQ ID NO: 195408 - protein, 488 aa, Zea mays
  unsure (1)..(488): unsure at all Xaa locations
  Clone ID: MRT4577_1097C.1.pep
FVFLFYIMLRVALPPVAVYMINFVMSMSTQIFCGQLGNLELAASSLGNTGIQPLAYGLMLGMGSAVETLCGQAYGAHKHRMLGVYLQRSTVLLMATAVPLTVVYAFSERILVLLGESERISRAAAVFVYGLIPRIFAYAANFPIQKFLQAHIISRPAXIYDEAHIQTXRRRADPSWYTRNIYTHTRWAALAAHLALSYLVVYRLGLGLLGASLTLSASWWAIVAAQFAYIVTSSRCRLTWRXXFSWQAFSGLPSFFRLSLASAVMLCLETWYFQILVLIAGLLKDPELALASLSVCMTISGWVFMISVGFNAAASVRVSNELGAGNPRAAAFSVVVVTLLSFVLSVLVSAVILLCRDYISYIFTEGEDVSQAVSRLTPLLAFTLILNGIQLQPVLSGVAVGCGWQAFVAYVNVGCYYIVGIPLGCLLGFYFDLGAAGIWSGMIGGTLMQTLILIWVTFRTNWNKEVEEAQKRLNKWDDGKAPLLSAQE

SEQ ID NO: 195409 - protein, 88 aa, Zea mays
  Clone ID: MRT4577_109800C.1.pep
WNHGIKPPRSGPRNLPARQLRLQALRGPGTTGARVTTARADGEYRCFLTGLARRTGNHTVYNGFKKYSEGLEAQDHAISGDPKVQKLE

SEQ ID NO: 195410 - protein, 104 aa, Zea mays
  unsure (1)..(104): unsure at all Xaa locations
  Clone ID: MRT4577_109801C.1.pep
MARTQSAGAVAVVAAVLLLSAAATTLXSFIIEGRXAPFXCPCLSYSRXTGSGPSXSCCSGFRNLKSAFSTFFDRRAVCNCLKNSVRGVSGLNAGNSFSLPSKCG

SEQ ID NO: 195411 - protein, 120 aa, Zea mays
  Clone ID: MRT4577_109802C.1.pep
RALVQLAGRPPVTCSCSLAVASSRLGNLRAPTMLQYPAVGFSSNSSPSSGFAAVSMLAQVATSTLVSSLRAPSMTTFFAAPAQVTPGLARISLQLADVTEQSVTLSSLPWPRPPCCSSPR

SEQ ID NO: 195412 - protein, 346 aa, Zea mays
  Clone ID: MRT4577_109803C.1.pep
MEALVVRQLGDPTLPPGGEASPFAAVSGDHPVPEISSPTAVRVRVAATSLNFATFLQVQGKYQERPPLPFVPGSDYSGVVDAVGPGVRGLRPGDRVCSFTGLGSFADFIVAEEKQLFLVPDGCDLVTAGALPVAFGTSHLALVHRAQLKAGQVLLVLGAAGGVGASAVQIGKVCGAVVIAVARGAEKSDYLKSIGADHVIDSSKDNVIESAKSFLKARGLKGVDVLYDPVGGKLTQDSLKLLNWGAQILVIGFASGDVPVIRANIALVKNWTVHGLYWGSYLTHRPQVLIDSLNELLSWLSKGLITVQISHCYRLVEVHLAFSALRDRKAVGKVMIVMGSSAVPRL

SEQ ID NO: 195413 - protein, 236 aa, Zea mays
  Clone ID: MRT4577_109804C.1.pep
MEALVVRQLGDPTLPPGGEASPFAAVSGDHPVPEISSPTAVRVRVAATSLNFATFLQVQGKYQERPPLPFVPGSDYSGVVDAVGPGVRGLRPGDRVCSFTGLGSFADFIVAEEKQLTSSRYVPEVKRIELCLTRGPPHEYSKNSALLEPDLGQGVSLGESPPRPRRSSSGALPVAFGTSHLALVHRAQLKAGQVSFNVISCVFPHFLDQRHPRALFKNLNMIKMFYSSGIASSQRS

SEQ ID NO: 195414 - protein, 38 aa, Zea mays
  Clone ID: MRT4577_109805C.1.pep
SLNSTIRCTQVSDARVNRWNRSDARAWNFWSKCSLSSG

SEQ ID NO: 195415 - protein, 69 aa, Zea mays
  unsure (1)..(69): unsure at all Xaa locations
  Clone ID: MRT4577_109806C.1.pep
FPAPTIPPLSPADTRRWVFSPNLLFLLPSPPIFTWFEVSPPXIPRRGRGAGGAKVGTRKKAGAMRWWNY

SEQ ID NO: 195416 - protein, 44 aa, Zea mays
  Clone ID: MRT4577_109807C.1.pep
LDRSSWRMNLSRSQLTRRVHQSHSSHYCNLVIRQPNEIFTCLCI

SEQ ID NO: 195417 - protein, 63 aa, Zea mays
  Clone ID: MRT4577_109808C.1.pep
RSRSSLKKPAAHQGFNSSHGEPNPPPCILQTDALGHGTRISCAPYIHHQPQLESLQHINLAAH

SEQ ID NO: 195418 - protein, 212 aa, Zea mays
  Clone ID: MRT4577_109809C.1.pep
MARTEKLTSDGCSGGEVQVEVELGMGVDGKGIIECRICQEEGEEAAMDSPCACAGTLKFAHRKCIQRWCNKKGNITCEICNQVYSPNYVIPPPKCCSDEMDMNLRQNWVGRIDPHDSHFLAIAIAEQQLLQAEFDDCVSANSSGATCCRSIALIVMFLLLVRHVIVIVRDVSMLQDATVLFSATLQFAGFFLPCYVIARSCYALQHRRRRQV

SEQ ID NO: 195419 - protein, 100 aa, Zea mays
  Clone ID: MRT4577_10980C.1.pep
GASWKSSRSSSTNASSTVTDSLLPSLVLNLSSPEVEDASKFSAPAVVENNWFKRSLPSKTWKLRTVDSTLSHEERERRRRRAAVRSAFVQHLLVTTIFED

SEQ ID NO: 195420 - protein, 54 aa, Zea mays
  unsure (1)..(54): unsure at all Xaa locations
  Clone ID: MRT4577_109810C.1.pep
GFXXPXSXLSLXTNTSIPXVQPIIHSPSSSKLTNILKIKRKQLYNMHLLSSKIA

SEQ ID NO: 195421 - protein, 108 aa, Zea mays
  Clone ID: MRT4577_109811C.1.pep
LKKRHPPLWNFRQRLGFTSTFGRPSLAPLLTKRTIWLRSPKNSQEKPLSNSRLVEVVNIATPAQEKMKPWKETSRSSKTTKSFRGGLGATPSRLPVKAGFIYVFFPAL

SEQ ID NO: 195422 - protein, 61 aa, Zea mays
  Clone ID: MRT4577_109812C.1.pep
THTYCLVANRYFIGTRLVMNCLSQEANYLVTYLQNLYGWCLLKKCLCWMSLLAGRIVKASS

SEQ ID NO: 195423 - protein, 488 aa, Zea mays
  Clone ID: MRT4577_109813C.1.pep
MATPASSKAPATSDSDSEGLAESLRALCARMDSAAFLGFVVARRKEADALRAEMPPALKLCVDPAKFVMDAVADVFPVDRREVRNPADLAWACVLILEAAVPALADTDPDIGPARPLVPRAARDRARGMARDWKDAAEKKGGVEGAKPPDAHAFLQLVATFAVAEREDRPLYRRIVVSFSWRRQMPRLALTLGLEEQMADIIEELIAKRQQLDAVNFAYEAGLQEKFPPVPLLKSYLEDSKKTSTAASDNSSTSSGQSGSNVNKKEQSALRAVIKCVEDRKLEAEFPLEGLRKQLEELEKAKTEKKKAASSATSGGSGGPATKRIRASTGGPMPPAKAGRLTNNACVSSLPAPTTLTQSPSHASYANTSPSRTSYANTSPSHASYATVSPTHASYATPSPPHASYATASPYPYDRPVGHGVYCTRSPPVIREPYVYPAEEVATVNVGIPMAYSTPPMSYPAAPYGGYGNGMPAYTNGMAPAFHQAYYR

SEQ ID NO: 195424 - protein, 159 aa, Zea mays
  unsure (1)..(159): unsure at all Xaa locations
  Clone ID: MRT4577_109814C.1.pep
QTKGRTXAPXGAKAGAGARKTXPTAXIFFPAILLYAEILFFFWRXQXGXTAGGGGAPPRXXXKEQEXXTXDTQRTXHAKKXRXRTTXTRXQDARKQPAXGHSTGKSXTKRAKPRPXXPRSATRPGXRATXATRXQRRTGTRXATRAATAXRTTPERQRA

SEQ ID NO: 195425 - protein, 269 aa, Zea mays
  unsure (1)..(269): unsure at all Xaa locations
  Clone ID: MRT4577_109815C.1.pep
MASAAAAAVAPAAEEKKGAGGPVTGDMVSAGFAELERQQRLLATCTRLYQHLSDHIGSLERGLAARSDALRVRRRAFDARTHRALDSLHRREASIDASVSRALDHLHXLRQGVTAGSGSGTRRRRXGAAEGLRALCARMDSTAFLGFVVARRKEADALRAEMPAALKLCVDPAKFVMDAVADVFPVDRREARSPADLAWACVLILEAAVPALTDPDPDIGPARPLVPRAACERARGMAREWKDAAEKKGXVEGAKPPDAHAFLQHVATF

SEQ ID NO: 195426 - protein, 199 aa, Zea mays
  unsure (1)..(199): unsure at all Xaa locations
  Clone ID: MRT4577_109816C.1.pep
MASPAAAAAAAPPPAAKEKEKDAEEAPVTGDMVSAGFAELERQQQLLATCTRLYQQLSDHFGSLERGLAARSDALRVRRRAFDARTHRALDSLHRREASIDASVSRALDHLHSISASASGAAAASSKVPATSDSDSEGLAESLRALCARMDSAAFLGFVVARRKEADALRAEMPPALKLXLDPSKFLMDAIPEVIHVNC

SEQ ID NO: 195427 - protein, 76 aa, Zea mays
  Clone ID: MRT4577_109817C.1.pep
IKCGDKLMLGTARGLPSCRIVIKQKSVFLKFLQLCRGSLTSPACLKKAYVSLPIIRGSVFIRTTKSYSFVLCLFSL

SEQ ID NO: 195428 - protein, 107 aa, Zea mays
  unsure (1)..(107): unsure at all Xaa locations
  Clone ID: MRT4577_109818C.1.pep
MANALTKERARLYVRLYILGYIMCNSNHYXTPYLTTILVLINEEDATGDAAWHIAYLLEDINKSNNTSYESLCRCVCRPDTHSHVNSAEFQAKLPSDLLPDYVRVFV

SEQ ID NO: 195429 - protein, 235 aa, Zea mays
  Clone ID: MRT4577_109819C.1.pep
MERGDCQFTVVPPRQYDEAQFMHQLMVAGDQQDPAGAGRGAAAAGGERKRRFTEEQVRSLETTFHARRAKLEPREKAELARELGLQPRQVAIWFQNKRARWRSKQLEHDYAALRAQFDAMHARVESLRQEKIALAAQVDELRGRLNERQDQSGSCEVNDAEAAADDKRNNSTSSLVQDDGATPPPAAVDASEDSAATGEYYDHVAYEYDGLHDPFVCATPDLWDTWPLLEWNAVA

SEQ ID NO: 195430 - protein, 64 aa, Zea mays
  Clone ID: MRT4577_10981C.1.pep
MLVYQDLLSGDELLSDSFTYKELENGVLWEVEGKWVTQGPVDVDIDATPSTEAVSSVPPRADRC

SEQ ID NO: 195431 - protein, 95 aa, Zea mays
  Clone ID: MRT4577_109820C.1.pep
PPPFVEKELMLIKGFVNPAARKEILKIAEIFRTKPVDVFGPPKTLQLTGDFYKKGAPQRVLEPYGLCEVPKTGRETLGPEIKVGSKNPPGYFFPL

SEQ ID NO: 195432 - protein, 844 aa, Zea mays
  Clone ID: MRT4577_109821C.1.pep
MAAAAASFSALPFLLLLLLVPSLDGASNVTYDHRSLIISGRRRLVISTSIHYPRSVPEMWPKLVAEAKDGGADCIETYVFWNGHEIAPGQYYFEDRFDLVRFVKVVRDAGLLLILRIGPYVAAEWNYGGVPVWLHYVPGTVFRTNNEPFKNHMKSFTTYIVDMMKKEQLFASQGGNIILAQIENEYGDYYEQAYGAGGKPYAMWAASMALAQNTGVPWIMCQESDAPDPVINSCNGFYCDGFQPNSPTKPKIWTENWPGWFQTFGESNPHRPPEDVAFAVARFFEKGGSVQNYYVYHGGTNFGRTTGGPFITTSYDYDAPIDEYGLRRFPKWAHLRELHKSIRLCEHTLLYGNTTFLSLGPKQEADIYSDQSGGCVAFLANIDSANDKVVTFRNRQYDLPAWSVSILPDCRNVVFNTAKVQSQTSMVTMVPESLQASKPERWSIFRERTGIWGKNDFVRNGFVDHINTTKDSTDYLWYTTSFSVDGSYSSKGSHAVLNIDSNGHGVHAFLNNVLIGSAYGNGSQSRFSVKLTINLRTGKNELALLSMTVGLQNAGFAYEWIGAGFTNVNISGVRTGIIDLSSNNWAYKIGLEGEYYNLFKPDQTNNQRWIPQSEPPKNQPLTWYKVNVDVPQGDDPVGIDMQSMGKGLAWLNGNAIGRYWPRTSSINDRCTPSCNYRGTFIPDKCRTGCGQPTQRWYHIPRSWFHPSGNILVVFEEKGGDPTKITFSRRAVTSVCSFVSEHFPSIDLESWDESAMNEGTPPAKAQLSCPEGKSISSVKFASLGNPSGTCRSYQMGRCHHPNSLSVVEKACLNTNSCTVSLTDESFGKDLCPGVTKTLAIEADCS

SEQ ID NO: 195433 - protein, 681 aa, Zea mays
  Clone ID: MRT4577_109822C.1.pep
MLFETFVVATLLILLLVPVGRCADATAGSDDERFVYNGFKGANLTLDGASTVTPNGLLVLTNGTIQMKGHAFHPSPLPFRDRGAQNATAARSFSTTFAFAIFGPYIDLSSHGLAFFVSSDRAALSTALPGQFLGLLNSTDNGNGRTHVFAVELDTLFNADFLDRNSNHVGVDVDSLVSRAAADAGYYDDGTGQFRNLSLVSRKAMQVWVDYDSGSTQVTVTMAPLGLARPKKPLLQTTVDLSGVVQGTAAYVGFTSATGILFSRHFVLGWAFAFDGAAPALNISALPALPPAGPKPRPKVLEIVLPIATATLVFAVGVLVYALLRRRARYAELREDWETAFGPHRFSYKDLFHATGGFSDKRLLGAGGFGSVYRGVLRKSNTEVAVKKVSHESKQGMKEFIAEIASMGRLRHRNLVQLLGYCRRKGELLLVYDYMPNGSLDKHLYDRSKGARALGWPQRLHVIRGVASGLLYLHEDWEQVVVHRDVKASNVLLDGEMNGRLGDFGLARLYDHGTDAHTTHVVGTMGYLAPELGHTGKATPATDVFAFGAFLLEVTCGRRPVEQDEHNSHTVLVDWVAERWRRRLILDAADTMIPDGFNPDEVCLALKLGLLCSHPLPNARPTMRQVMQYLDGDMVLPDLSPEYFGFTAVERMYSREVSKDTMAYVSSSTSMGAISDLSSGR

SEQ ID NO: 195434 - protein, 203 aa, Zea mays
  unsure (1)..(203): unsure at all Xaa locations
  Clone ID: MRT4577_109823C.1.pep
MGPQPPLHLPAANGDSIVDRDVWLACAVPLSRLPAVGAEVYYFPHGHAEQCPAHLPAPLPAPHLFPCTVAGVSLGADDETNEVFAKISLSPGPHRGPAAACRTDPTSDCPPQELSYFTKELTQSDANNGGGFSVPRYCADHIFPTLDFDANPPVQKLFMRDTRGNPWQFRHIYRXTPRRHLLTXGWSRFVNAKLLVAGDIVVF

SEQ ID NO: 195435 - protein, 256 aa, Zea mays
  Clone ID: MRT4577_109824C.1.pep
IGLEGEYYNLFKPDQTNNQRWIPQSEPPKNQPLTWYKVNVDVPQGDDPVGIDMQSMGKGLAWLNGNAIGRYWPRTSSINDRCTPSCNYRGTFIPDKCRTGCGQPTQRWYHIPRSWFHPSGNILVVFEEKGGDPTKITFSRRAVTSVCSFVSEHFPSIDLESWDESAMNEGTPPAKAQLSCPEGKSISSVKFASLGNPSGTCRSYQMGRCHHPNSLSVVEKACLNTNSCTVSLTDESFGKDLCPGVTKTLAIEADCS

SEQ ID NO: 195436 - protein, 146 aa, Zea mays
  Clone ID: MRT4577_109825C.1.pep
MPRSGISGTLRSPQIDVVIDTGNPFLNRTVDGFLKIGAVGACKVAAEETFDCLHRGDVSKRKVEHALKKMCKEGAYWGTVAGVYVGVVYGVERVRGRSDWKNAMVGGALSGALVSAASSNHGDKIVKDAITAGAVATAVEFANYLT

SEQ ID NO: 195437 - protein, 92 aa, Zea mays
  Clone ID: MRT4577_109826C.1.pep
STINSTRTKGKKGKKNQLTRPCSLEYQKFRTKISAHAAPFPNGGILHTWQLNHKDSLATHNECEIPTVLTMIMTVVSWQTAARLLGVRPLRL

SEQ ID NO: 195438 - protein, 53 aa, Zea mays
  Clone ID: MRT4577_109827C.1.pep
SLDPKASFHTQSAAAVLLQKASSSLMLALGKCTIICVARRSKFKCENLYYLNY

SEQ ID NO: 195439 - protein, 286 aa, Zea mays
  unsure (1)..(286): unsure at all Xaa locations
  Clone ID: MRT4577_109828C.1.pep
LLSVCFDDLPHELKCCFLYFAALPTNTTVEARSLVFMWVAEGFLSSKGGKTMEKIGFVYLSELISRNLVNRAKMNDDSSFGSMLVTIQTKVHDFLQIEAHEASFVEVHSNDDIPTLTSARRLSLQNYTDKYAVLAHPLPKLRSIFSQYEQEPNKGDXGTTTGPKGAGRTCSGCPSKXAISKMKRDIRSHIKDLFHGSEFLRVINLQGIEIGETLTSAIGDLVHLQYLGITSCSLRHVPWSIGGLTSLQTLDVREXNVRELPRSFWMXQTLRHVLGFVLSCPXQIGD

SEQ ID NO: 195440 - protein, 70 aa, Zea mays
  Clone ID: MRT4577_109829C.1.pep
RHVHTTANCASLDSDVTSESQPDDDHRPTHMNASDIISLSTGWHLCGLFEESNWKRESKDTCTNTSSTII

SEQ ID NO: 195441 - protein, 78 aa, Zea mays
  Clone ID: MRT4577_10982C.1.pep
PQPKLRFHWDSNSGPKECYLDHLNNSARGPFTYLCINTLKINRVEDTELIGWFIGILFISTIKLFFLSNTQESCVSLN

SEQ ID NO: 195442 - protein, 805 aa, Zea mays
  Clone ID: MRT4577_109830C.1.pep
MRGRYFRDMSIVRAGGDDNVPAPEENEVVIFRSFFKAGLRFPLSRFVVEVLKTFQIFLHQLTPKAILRMGVFVWEVRSQGIEPSAKCFCSMHELLYETKATGKEQYHNNFGCYGFIARPNASHLVPTFRKRWPGNWMEEWFYVKNDLIAREDITEVIMRPIWSRFGLRKPKVEIDEAAEACQKAFGTVCFFIGTRDLIQEHIVFKVWPLVESWEIPKETIIESSEEDNALSTAFGGRGKKRLNIVFDAIGFVYPDYRYSLRGQGKKRKAATSATPDEPMPKGKKLKVLTHRSRYIELVVVPEFGGEASSAAEPREPVPPTQKAEEPAIMPKAPSVELVETKVDKDKAEESKTEEVTKMPGILSPLTEATTLKAEKSSTTTPNRRRMVATPTPEALKESIDYIICHASGKGLSQEEEREAQHYAQKLKYPKGALVFNGSGEEDFLYCLPDNKEISVCREIGRSFEFLKLEDGLSILSKDELADSLAYNSIKGLILSNALRAQKNIEDEGYTMALNNLRSVVIELRNEGLEKDKILISLVNKVKEGEASSKAQAEIQKNEIEDLRKQLAEAKEKCALAEANRDANEYWKNYLEKTVEELRASKERYFEKSLGCVENIKASFTNVGAYSNEDNFIRGDPKGVIEWISGEAEAFEEILSDRGDVCAFSGARGISAILENVGCNHIKTMAHAEAAFSADVTKDPSAEATLMGGKFYNDVWENGGREMAHEIMKKSEKDIHEARVEAKRAEKAAEREKRIAELSPPSEPFDPLADPETKKAIEIINIAEFIVDKVVNKLLNEIAEKVLKEE

SEQ ID NO: 195443 - protein, 69 aa, Zea mays
  Clone ID: MRT4577_109831C.1.pep
GGTFLIRTISLIFESSQIKYPLSSALSQQLLNHSLLKKSSYNYDGIILTPYLLHFKTTFIFFKIFFKNF

SEQ ID NO: 195444 - protein, 125 aa, Zea mays
  Clone ID: MRT4577_109832C.1.pep
AICGVQTRDPVFGIHRFFGQRCGGMRTPIPSRASVRCQSSAVSRFIFSRASRDQVARLLRRVLVVESDRSSITEFLLRRLEGRLEHCRGGRGSSTLSEASLLSGEEFGERDEEEKSFPGRLRGTQ

SEQ ID NO: 195445 - protein, 737 aa, Zea mays
  Clone ID: MRT4577_109833C.1.pep
MSQDKKVAAETKLTEEEKLFEEKKAANPYIAGFIESMAKSNTEKITKEILEGLSEDTSDSDSYDAKSGGEDSDDRPWRPSHAIFGKSTIKQSHLENMRGRYFRDMFIVRAGGDNNVPAPEENEVMIFRSFFKAGLRFPLSRFVVEVLKTFQIFLHQLTPEAILRMRVFVWAIRSQGIEPSAKCFCSMHELLYETKATGKEHYRNNFGCYGFIARPNASHPVPTFRKRWPGNWMEEWFYVKNDLIAREDIKEVIMRPIWSRFGLRKPKVEIDEASEACQKAFGTVCFFIVTSDELLGSYSKVEDNALSTAFGSREKKRLNRVFDAIGFVYPDYRYPLRGQGKKRKAAALAASAEPVPKAAGKKMKVLTHRPRYIEPTVVPKFGGEASSADESRETAPPMQRAEELATMPRAPLVELVETKVDKDKVERSTTEEVTKMSGTLSPSTEATTLRAQKSSAITPRRRRMVNVLDVLETTDSISLAPKGKVAEADKTQPKADTKQIDVEATTTHAKTEVGPSVRAEMKPVEFEEKATEEKATEQISFEKVATPAPEALKESIDYIIHHASGKGLSQEGLILSNALRAQKNIEDEGYTMALNNLRSEASFANVGAYSNKDNFIRGDPEGVIEWISGEAEAFEEILSDRGDVCAFSGARGISAILEKAGCDHVKTLAQAKAAFSVDDTKDPSVEASLIGGKFYTDIWANGGREMAHEIMKKSEKDIHDAREAAKKLRKLQNARDE

SEQ ID NO: 195446 - protein, 511 aa, Zea mays
  unsure (1)..(511): unsure at all Xaa locations
  Clone ID: MRT4577_109834C.1.pep
MDEGLKPKEKISQDKKIAAETKLTEEEKLFEEKKATNPYIAGFIESMAKSNTEKITKEILDGISKDTGDSDKYDAESGGIDSEDQPWRPSHASFGKSSIKQSHLKNMRGRYFWDMSIVRAGGDDNVPAPKENEVVIFRSSFKAGLQFPLSSMHELLYETKATGKEQYHNNFGCYGFIARPNASHPVPTFRKRWPRNWMEEWFYVKNDLIAREDIKEVIMRPIWSRFSLRKPKVEIDEATEASQKAFGTVCFFIGHGKKRKVATSATPDEPMPKGKKLKVLTHRPRYIEPTVVPEFGGEASLAAEPREHVPPMQKAEEPVIMPKAPWFELVETKVDKDKAERPKTEEVTKMPGILSPSTEATALKAETSSATTPKRRRMAETEAGPTVPAETKPAELEEKATEEKATEKISFEKVATPAPEALKESIDYIIRHASGKGLSQEEEREAQHYTQKLKYPKGALVFNGSGEEDFLYCLPDNKETSVCQEIGRSFGFPKLEDGLSIXYQRMNWLTV

SEQ ID NO: 195447 - protein, 912 aa, Zea mays
  Clone ID: MRT4577_109835C.1.pep
MAKSNTKKITKEILEGLSEDTGDSDDYDAESGGEDSEDRPWRPSHIIFGKSTIKQSHLDNMRGRYFQDMSIVRAGGDSNVPVPEEDEVVIYRSFLKAGLRFPLSRFVVEVLKIYQIYLHQITPEAIIRMGIFVWAVRSQGLEPSAKCFCSMHELVYETKAMGKEQYHNNFGCYGFIARPNASHPVLTFRKRWPGNWMEEWLYVKNDLKAREDIKEVIMRPIWSRFGLRRPKVEIDESAEACQKAFGTICFFIGTRHLIQEHIAFRVWLLVESWEMPKETITESSEGELVRLKYTFRYGDKFDEPNDDWLKCIKVTSDELLGSYSKAEDNALSIAFGGRGKKRLNRVFDAIGFVYPDYRYPLRGHGKKRKAATSATPDEHVPKGKKLKVLTHRPRYIEPTVVPEFGGEASSAAEPREHVPPTQKAEEPLVETKVDKDKAERSKTEEVTKMSGILSPLTEATALKAEKSSATTPKRRRMVNVLDILETTDSISLAPTEKAAEADKTQPKADTRQIEVESTITQAETEARPTVPAEMKPTEFEEKATEEKATEQISFEKVATPSPEALKESIEYIIRHASGKGLSQEEEREAQHYAQKLKYSKGALVFNGSGEEDFLYCLPDNKEISVCWEIGRSFGFLKLEDGLSILSKDELADSLAYNSIKVIELRNEGLEKDKILISLVNKVKEDEASSKAQAEIQKNEIEDLRKQLAEAKEKCALTKANRDTSEYWKNYLEKIVEELRASKERCFEKSFGCVEKIKASFANVGAYSNEDNFIQGDPEGVIKWISGEAEAFEEILSDRGDVCAFSGARGISAILENAGCNHIKTMAHAEAAFSADVTKDPSAEATLMGGKFYNDVWENGGREMAHEIMKKSEKYIHEARAEGKRAEEAAKREKCIDIVSRRLTSAFVFVTSN

SEQ ID NO: 195448 - protein, 576 aa, Zea mays
  Clone ID: MRT4577_109836C.1.pep
MPICSCEETIHEFEMLTRDAGRVQKDTLKKILELNADAEYLNKFGLNGRTDVESYKSCIPLCVHSDLEPYIHKIADGDSSPLLTGKPVTSLSLSSGTTQGRPKFLPFTDELLETTLQIFQTSYAFRNREYPIGRGKALQFIYGSKQVVTKGGILATTATTNLYRRARYKEGMKDIQSQCCSPDEVVFGSDFHQSLYCHLLCGLIYSDEVHQVFSTFAHSLVHAFQTFEEVWEDLCADIRDGVLSEKVTVPSVREAVTKILKPNPELADSIYMKCTGLSNWYGVIPALWPNAKYVYGIMTGSMEPYLKKLRHYAGHLPLISADYGASEGWVGANINPTLPPEQVTYAVLPQTGYFEFIPLEVENSASSIHYLESEPVGLTEVEVGKTYEVVITTFGGLYRYRLGDIVKVTGFHNATPELRFICRRSLVLSINIDKNTEQDLQLAVEEAAKLLDAEKLEIVDFTSFVEKSSDPGRYVIFWELSSDASEDVLRGCANCLDLAFVDAGYVGSRKIRAIGPLELRILKRGTFKEILDHFLSLGGAVSQFKTPRFVNPLNVKVLQILSRNTTRSYFSTAYGL

SEQ ID NO: 195449 - protein, 110 aa, Zea mays
  unsure (1)..(110): unsure at all Xaa locations
  Clone ID: MRT4577_109837C.1.pep
MPINRIVLRSHQEVYHAGALKAAFAECISTLIFILTCQGSSMDCKMLTGCGPTTPAGLIAAAVAHAFTLFVAVSVGSNISCGHVNPGATFXGCLGSNITLFRRLLYWVAH

SEQ ID NO: 195450 - protein, 119 aa, Zea mays
  unsure (1)..(119): unsure at all Xaa locations
  Clone ID: MRT4577_109838C.1.pep
KKDGPHRRAEKAPAPRPGGGHRAGPTKHTAAQGRRAAEPHXESDPRNGGAAXAERAGSHPDEEKRTAAQGRQPGDKSEGEHPAXRGQERQXGQRQGRGRRNTRSTTRRPDQGERAATSG

SEQ ID NO: 195451 - protein, 69 aa, Zea mays
  unsure (1)..(69): unsure at all Xaa locations
  Clone ID: MRT4577_109839C.1.pep
GHAILVPGQQVKTVKKGKQXDPFFRLVGNFVSCHEGVAWCFQTSFKIGKTRKRPPPNKQGFVKSHYFRF

SEQ ID NO: 195452 - protein, 242 aa, Zea mays
  unsure (1)..(242): unsure at all Xaa locations
  Clone ID: MRT4577_10983C.1.pep
MAQEQPNPNEVVLGQEINGARVVTLNRPRQLNGINDRVVYLLAQLLEKWEQDDDAKLVIFKGAGRAFSAGGDLKMFYEGRSSDDSCLEVVYRMYWLCYHIHTYKKTTVALVNGLVMXXGGAAMVAPLKFAVVTEKTVFATPEASVGLHTDCSFSYIHSRLPXXYLGEYLALTGARLNAKEMIAAGLATHFVHSEKLEDLEKQLLNLNTGDESAVRAVIEDSSTDVXNLDQESIXLNKLSTID

SEQ ID NO: 195453 - protein, 64 aa, Zea mays
  unsure (1)..(64): unsure at all Xaa locations
  Clone ID: MRT4577_109840C.1.pep
FPNGAFLFMFPGIXXNSSLICSSELADHQRVKEGRGRPGSRAQEGSNRSQKAAPVPVPRTGTCK

SEQ ID NO: 195454 - protein, 73 aa, Zea mays
  Clone ID: MRT4577_109841C.1.pep
MRVTTLLGLIAYAVAEASCSRNIIYYDQWHTKDLPPKDVTHSVTHVMMSFANSSLFTTEPAGKYEPFQPLKEV

SEQ ID NO: 195455 - protein, 102 aa, Zea mays
  Clone ID: MRT4577_109842C.1.pep
PPGAFRWLPWGGIVGPPLTSLRGGGWSPQFPAFYCPSGAPNCGGFEPAQGADRRRVPPPPTPGSPQQQTTTDSKFTQKKKKKKGKKKKKKKKKKYSALLPLL

SEQ ID NO: 195456 - protein, 126 aa, Zea mays
  unsure (1)..(126): unsure at all Xaa locations
  Clone ID: MRT4577_109843C.1.pep
MTAPTNDGNNANTDADSGQENEQIDRFLVLFIEXLHEIQDELEKANDEASDKDLEVEQKYRDIHIPRYVKMGNIINTMLNFWLTHSMSHALLTELVTEIDQNIYNILDYIDEDDAEDYVRYYIYVN

SEQ ID NO: 195457 - protein, 84 aa, Zea mays
  unsure (1)..(84): unsure at all Xaa locations
  Clone ID: MRT4577_109844C.1.pep
NGRLSLCXDLQRKSFATQYILPFCSNSIQXLSTKRLQIRHTRHMRSDKLNKSAQDSVSQVWRSLIDYEDLLCNNAHLVPMSSIA

SEQ ID NO: 195458 - protein, 102 aa, Zea mays
  Clone ID: MRT4577_109845C.1.pep
GIVWVAPIVRQALNITQSITSGHACVSVKPDVVDLTIEQGQAVALMTRVLVIPHDHTVRGHARVRYQRSVVAVEPELPFAYSPDSRGYVLAFRRLESGEHHG

SEQ ID NO: 195459 - protein, 115 aa, Zea mays
  unsure (1)..(115): unsure at all Xaa locations
  Clone ID: MRT4577_109846C.1.pep
IKSPQTKPSPAGDASQSWQSAEQKIHHVVAAPRRQGGVLDSGVAAIPQVDHPVPKAARGDGIAVDRRSVWRGVDWTLAAGGARQQNSDXEERRRAIVARDERGLVPHARCPAAMP

SEQ ID NO: 195460 - protein, 96 aa, Zea mays
  unsure (1)..(96): unsure at all Xaa locations
  Clone ID: MRT4577_109847C.1.pep
KNQRNTSSGKAWHAPQQRQLALSTRDRXELSTPPQSPRXDTTEMETILKRAPAKQTGRHGDPPGEQRCPAPGAHNQNHPPQHLMKPAPXGPRVXFP

SEQ ID NO: 195461 - protein, 42 aa, Zea mays
  Clone ID: MRT4577_109848C.1.pep
GSMRAPHGGHGRRSIRVLFRLVSFIFVFPHPSKSAGALISQS

SEQ ID NO: 195462 - protein, 91 aa, Zea mays
  unsure (1)..(91): unsure at all Xaa locations
  Clone ID: MRT4577_109849C.1.pep
SGRSSLVVTIGPSARHXSETSSTIMFGQRAMKVVNTIKLKEEVDYEILYKKMEREVDQLTSEMERQQKVIRSEKMQMDKRLRESERSFHDL

SEQ ID NO: 195463 - protein, 79 aa, Zea mays
  Clone ID: MRT4577_10984C.1.pep
FRPRLSTPSAGAQVRREGRPGACPPQLIACRRALRPVGVDWDPGGHVPFSKSKSLGRFHCRFSQAKIKTLGISKGGSFI

SEQ ID NO: 195464 - protein, 85 aa, Zea mays
  Clone ID: MRT4577_109850C.1.pep
TYQNLRTKRQRAHRHYLRDRTIAAPVTAQADSGGEISSGDTTHDAGSASCNGTTEKQVSAHTKKGGRYPDVNMWIGSKHRKPVKK

SEQ ID NO: 195465 - protein, 65 aa, Zea mays
  Clone ID: MRT4577_109851C.1.pep
VELQCSRTDSRSIMHEIFKSKAVQERNYFGSRRIQLSFILKLSSRLRDFKIARLIIAYNPMEQIP

SEQ ID NO: 195466 - protein, 145 aa, Zea mays
  Clone ID: MRT4577_109852C.1.pep
MAGGKPRGLNAARKLRTNRKDQKWADLAYKKRALGTAYKSSPFGGSSHAKGIVLEKVGVEAKQPNSAIRKCVRVQLIKNGKKVTAFVPNDGCLNFVDENDEVLLAGFGRKGKAKGDIPGVRFKVVKVSGVGLLALWKEKKEKPRS

SEQ ID NO: 195467 - protein, 45 aa, Zea mays
  Clone ID: MRT4577_109853C.1.pep
CNAGQSSEVTSGYYKRPAVVKPAARKIWILGDPTPHLFFSHACVR

SEQ ID NO: 195468 - protein, 117 aa, Zea mays
  Clone ID: MRT4577_109854C.1.pep
PFRVFFFFFFFFFFFFFFFFFFFFFFFGGFFKKKPLFYFPGKIFFLGPENRGTKKKGFQTQGKGFFPFCLLKQGKRWPFLKRDQNPYFFKKLGLGAKLRGEPFFWKFGPNQKKHFLG

SEQ ID NO: 195469 - protein, 62 aa, Zea mays
  Clone ID: MRT4577_109855C.1.pep
ISEPTHASTHSSNSTIALLRFTHILTLYGTCIILKTTLKILVLNMYAKLLIKQTTLLIIGQP

SEQ ID NO: 195470 - protein, 80 aa, Zea mays
  unsure (1)..(80): unsure at all Xaa locations
  Clone ID: MRT4577_109856C.1.pep
EPNDLQKDPPTXCSAGPEEDDMFHWQATILGPSYSPYPGGVDLVTFHCPPDYAFKPTKEAFRTKVFHPNINSNGSFCLDI

SEQ ID NO: 195471 - protein, 72 aa, Zea mays
  unsure (1)..(72): unsure at all Xaa locations
  Clone ID: MRT4577_109857C.1.pep
FKFCPKIKGHIVGDIGLXRSNVQHYYSCLPPVHQHETNXICKKKSTSLSKKITNSLIPFVQGEYRKAPCTTV

SEQ ID NO: 195472 - protein, 306 aa, Zea mays
  Clone ID: MRT4577_109858C.1.pep
IFPAEIFPAPISLPCSSSSRARAPPSHGARQPAARPAPALKPAHGVCPCPSSHASSSPLLRARFFSPRARLSPWPPSSPWKFLACALLWVTLCSELPWRRPISSWLLRSGCHWSARGSLIFPSQGLSCARHSARFLVTAPRRVLHSRACFPWPRAAARSSPCAVVLICSVSLALETQSPSPADLSPRAFLFLVSHSYLDRLSSPDLQLYICHPSISLSSPSSFVLLCSLSSNTEFWILDKNKRDPCVSLIKYSVEDINRRSSSIRVSSRNPKNRVKTRLAARYSPSVRQIVWIGKSLPISQIRVSC

SEQ ID NO: 195473 - protein, 101 aa, Zea mays
  unsure (1)..(101): unsure at all Xaa locations
  Clone ID: MRT4577_109859C.1.pep
PVPQNEAFELVQGMQIQPNAGVWGALLGACHMHKNHELAQLAAERLSELEPRKASNYVLLSNISAEAGKWDESEKARASIKEKGVNKPPGXSWINIGLIVQ

SEQ ID NO: 195474 - protein, 115 aa, Zea mays
  Clone ID: MRT4577_10985C.1.pep
TGHTNLTPSRTASTATMATKEFTPSWCPRPSSTTTSTTVSQTSARTATPTSTCLTEPSSSHDMRPHQLACLPLVCLWMTGCAGSSPLRVSYVSTLSSCTNYHNNLMTLIEILHLT

SEQ ID NO: 195475 - protein, 69 aa, Zea mays
  Clone ID: MRT4577_109860C.1.pep
PGDPKQNDCSLDRQSYGSNLHWEVLHGSCNPHRCVSQLLTVRRDLYVGLVLYDESKVLKKHIVKKGLLE

SEQ ID NO: 195476 - protein, 58 aa, Zea mays
  Clone ID: MRT4577_109861C.1.pep
RNCMLDPSHPSVVPWMETKLVFLFHSLRGAKASSAWASRGERGIISDIRSQGAITGRS

SEQ ID NO: 195477 - protein, 52 aa, Zea mays
  Clone ID: MRT4577_109862C.1.pep
NYWFFPQGSPPVSQKKKKKKKKKKKKKKKKKKKKKKKKKKKKKKKLEGRARV

SEQ ID NO: 195478 - protein, 78 aa, Zea mays
  Clone ID: MRT4577_109863C.1.pep
GRAVPSITPTFLLPAPPTENRYSLEKMHRLRSTLDTMAHAHLILIILMPIITAAQTPALEPTNHSTSINLYIVYILIL

SEQ ID NO: 195479 - protein, 56 aa, Zea mays
  Clone ID: MRT4577_109864C.1.pep
NYMGFKKNTRGATNKYFLDGFWTPIYNKRVCKQINLVDINHTGAKATPTKRPTTFF

SEQ ID NO: 195480 - protein, 278 aa, Zea mays
  unsure (1)..(278): unsure at all Xaa locations
  Clone ID: MRT4577_109865C.1.pep
MSLRPSEREQMRKGNYKQTVDAEESRRRREGQMVDIRKAKREESLQKKRRDGFPASAAGVPPMGHSTALQQKLDGLPAMVQAVHSNDPSVQLEATTQFRKLLSIERSPPIEEVISTGVVPRFIEFLTREDHPQLQFEAAWALTNIASGTSENTKVVVESGAVPIFVKLLNSLSEDVREQAVWALGNVAGDSPKCRDLVLGHGGLYPLLQQLNEHAKLSMLRNATWTLSNFCRGKPQPNFDQVKPALPALQHLIHSXDEEVLTDACWALSYLSDGTNDK

SEQ ID NO: 195481 - protein, 126 aa, Zea mays
  unsure (1)..(126): unsure at all Xaa locations
  Clone ID: MRT4577_109866C.1.pep
SNIFVRVLSDFGALSLSSSSFDSHRAFLGEQTEKAFMKETKVXTHFKEVRPGKKPFLRKNRFWKNIGLGFKTQTEAVERTYIDKKCTFTGTASITCRIIAXTWHSAXTNRTMIVRLNYLHCGKKYQ

SEQ ID NO: 195482 - protein, 556 aa, Zea mays
  unsure (1)..(556): unsure at all Xaa locations
  Clone ID: MRT4577_109867C.1.pep
MSLRPSEREQMRKGNYKQTVDAEESRRRREGQMVDIRKAKREESLQKKRRDGFPAAGAVPPMGHSTALQQKLDGLPAMVQAVHSNDPTVQLEATTQFRKLLSIERSPPIEEVISTGVVPRFIEFLTREDHPQLQFEAAWALTNIASGTSENTKVVVESGAVPIFVKLLNSNSEDVREQAXLNYNSYTLLYEIYVEWCLGSFFFVFAXVWALGNVAGDSPKCRDLVLGHGGLFPLLQQLNEHAKLSMLRNATWTLSNFCRGKPQPNFDQVKPALPALQQLIHSQDEEVLTDACWALSYLSDGTNDKIQAVIESGVFPRLVELLMHPSASVLIPALRTVGNIVTGDDMQTQCVIDNQALPCLLNLLTTNHKKSIKKEACWTISNITAGNREQIQAVINANIIAPLVQLLQTAEFDIKKEAAWAISNATSGGTHDQIKYLVAQGCIKPLCDLLVCPDPRIVTVCLEGLENILKVGEAEKNLGAGDVNVYAQMIDDAEGLDKIENLQSHDNTEIYEKAVKMLESYWLEEEDDAMPSGDNPQNGFNFGNQPSVPSGGFNFG

SEQ ID NO: 195483 - protein, 117 aa, Zea mays
  unsure (1)..(117): unsure at all Xaa locations
  Clone ID: MRT4577_109868C.1.pep
TLYYQGIEKKHAKLKGNEKAVVARHEVGHALVGTAVANLLPGQPRVEXELKQLLIEQSDKKGSNLTFXVEFXKLSILPRSGGALGFTYTPPVTEDRYLLFVDELRGRLVTLLGWEGS

SEQ ID NO: 195484 - protein, 394 aa, Zea mays
  unsure (1)..(394): unsure at all Xaa locations
  Clone ID: MRT4577_109869C.1.pep
PGRPSVFGSPSIIFXVRRRGAVAKSRDGRYRIVSNDEREQTLNQLLTEMDGFDTNSAVIVLGATNRADVLDPALRRPGRFDRVVMVEAPDRFGRESILKVHVSRRELPLSKDVDLANIAAMTTGFTGADLANLVNEAALLAGRLNKEIVEKVDFIRAVERSIAGIEKKHAKLKGNEKAVVARHEVGHALVGTAVANLLPGQPRVEKLSILPRSGGALGFTYTPPVTEDRYLLFVDELRGRLVTLLGGRAAEEVVLAGRVSTGALDDIRRATDMAYKAVAEYGLNQRIGPISLATLSNGGLDDSGGSPWGRDQGHLVDLVQREVKALLQTALEVALSVIRANPAVLEGLGAYLEENEKVEGEELEEWLKSVVASKELTSFIRGQQEQVLQLEAGS

SEQ ID NO: 195485 - protein, 111 aa, Zea mays
  Clone ID: MRT4577_10986C.1.pep
NSARGLHSCTPHGRGASVRLIPPTRQQRAPAPVLSSPLATPVAVGRRSSPPRLPPYLPTSPWHPRKEYPFHSVPCFFTTPPCIRASLPLNFPVSLRSFVILDLGCLGWFTG

SEQ ID NO: 195486 - protein, 353 aa, Zea mays
  unsure (1)..(353): unsure at all Xaa locations
  Clone ID: MRT4577_109870C.1.pep
MFLRAINTEGISKTKEYIAEKMLAVIDEVGAQNVVQVITDNAANCRAAGIIVEQKHPHIFXTPCVVHTLNLALKNICASREIENVLYTEFQWISEVIGDASMIKNFIMNHSMRLSMFNEQSNLKFLAIADTRFSSAIVMLKRFIAIKDALSVMVVSEKWSAYREDNPRQAQFVKKIVNDLWWDKVRYFLSFTEPIYTMIRATDTDKPCLHLIYEMWDTMIEKVKSVIYRHEMKETHEESIPTRPVHDILVSRWTKSNTPLHCLAHLLNSKYYTDAWINEVLNRQAPHNDEEISEMRNTCFRRYFSGAELKKIKLQYANFSLFGPGFNSFDSLEDRSYMEPKCGGEFMAILLQN

SEQ ID NO: 195487 - protein, 77 aa, Zea mays
  Clone ID: MRT4577_109871C.1.pep
SSGAPGRGEKKKKEKKKKKKKKKKKKKKKKKKKKKNFLIFSFNPFKGKILKNFFYLWGARGGGGLLGPIFPLIWGGY

SEQ ID NO: 195488 - protein, 43 aa, Zea mays
  unsure (1)..(43): unsure at all Xaa locations
  Clone ID: MRT4577_109872C.1.pep
NFSGSLSTLRLPLAPCYNYTNCCPXATSFRLLIRCNSIIKFFG

SEQ ID NO: 195489 - protein, 146 aa, Zea mays
  unsure (1)..(146): unsure at all Xaa locations
  Clone ID: MRT4577_109873C.1.pep
FLIQTQHSAGQLRNRKNSNSGRAKVSESTDIVTFADVAGVDEAKEELEEIVEFLRNPERYVRLGARPPRGVLLVGFANAISNGNYCLTIVFVTILLFFIYRXLPGTGKTLLAKAVAGEAEVPFISCSASEFVELYVSMGAARVRDL

SEQ ID NO: 195490 - protein, 158 aa, Zea mays
  unsure (1)..(158): unsure at all Xaa locations
  Clone ID: MRT4577_109874C.1.pep
DIRRATDMAYKAVAEYGLSQRIGPISLATLSNGGLDDSGGSPWGKDQVCLETFPTPSRTIKXCHLQALSSNLEPNGRXLVDLVQREVKALLQSSLEVALSVIRANPAVLEGLGAYLEEKEKVEGEELQEWLKSVVASAGLTSFIRGQQEQVLQLEAGS

SEQ ID NO: 195491 - protein, 60 aa, Zea mays
  Clone ID: MRT4577_109875C.1.pep
LAHVSRLLGFDPLCFWNCELGGIVSVVTVIATGKHATSHQTRHRAQSSPSATRVPQEPEL

SEQ ID NO: 195492 - protein, 475 aa, Zea mays
  unsure (1)..(475): unsure at all Xaa locations
  Clone ID: MRT4577_109876C.1.pep
GYLEAGRARPFDIKXPYEKMVENMVEFGSPDKRSGGMLNSALVGLIYVVLIAVVLQRLPISFSQQSPGQLRNRKNSNSGGAKVSESSDIVTFADVAGVDEAKEELEEIVEFLRNPERYIRLGARPPRGVLLVGLPGTGKTLLAKAVAGEAEVPFISCSASEFVELYVGMGAARVRDLFAKAKKESPSIIFIDEIDAVAKSRDSRYRIVSNDEREQTLNQLLTEMDGFDTNSAVIVLGATNRADVLDPALRRPGRFDRVVMVEAPDRFGRESILKVHVSRRELPLSKDVDLADIAAMTTGFTGADLANLVNEAALLAGRLNKEIVEKIDFIHAVERSIAGIEKKHAKLKGNEKAVVARHEVGHALVGTAVANLLPGQPRVEXELKQLLIEQSERRRCNLTYFFNAEFXKLSILPRSGGALGFTYTPPTTEDRYLLFVDELRGRLVTLLGGRAAEEVCFSXGRVSTGALDDIRRATD

SEQ ID NO: 195493 - protein, 52 aa, Zea mays
  Clone ID: MRT4577_109877C.1.pep
LNCLEKHYSTNNIITKSKTDAGVVHSYSTPSLGLVLDPPKSLLRHTPTYTNM

SEQ ID NO: 195494 - protein, 39 aa, Zea mays
  Clone ID: MRT4577_109878C.1.pep
SIRGALSRGNLGFALLLMPCHLSKKKKKIKLYKINSSTL

SEQ ID NO: 195495 - protein, 291 aa, Zea mays
  unsure (1)..(291): unsure at all Xaa locations
  Clone ID: MRT4577_109879C.1.pep
HWVPRGRPCCCLTLVLLDLANLVNEAALLAGRLNKEIVEKVDFIRAVERSIAGIEKKHAKLKGNEKAVVARHEVGHALVGTAVANLLPGQPRVEKLSILPRSGGALGFTYTPPVTEDRYLLFVDELRGRLVTLLGGRAAEEVVLAGRVSTGALDDIRRATDMAYKAVAEYGLSQRIGPISLATLSNGGLDDSGXGLPDWRXIHSKKYDQGHLVDLVQREVKALLQSSLEVALSVIRANPAFLEGLGAYLEEGGGVEGEELQEWLKSVVASKELTSFIRGQQEQVLQLEAGS

SEQ ID NO: 195496 - protein, 86 aa, Zea mays
  Clone ID: MRT4577_10987C.1.pep
RLPPRIPPLRGRRDSTPRTLPPSLDWSMCSSISAPSLASPFRSFFLFPLSLTFGFCLIHHISLLVGRETLRRLGASATACSASGVA

SEQ ID NO: 195497 - protein, 79 aa, Zea mays
  Clone ID: MRT4577_109880C.1.pep
PVVPTQSPRGYARSVPVKKKAWLPPVPFRRMAFAGSPRSLVVPPRFFCCVCTMTVLLLQCSYSFSPRAPIWFAGGPVRP

SEQ ID NO: 195498 - protein, 90 aa, Zea mays
  Clone ID: MRT4577_109881C.1.pep
DDKHTLTKSFDKERKKNCVYPNTHTANMTTNHVAIKNCAAKEQTSLIHIKKMGKRQFAILRRTTLVGVQKNTLKIIRGPENRMQQFGQFV

SEQ ID NO: 195499 - protein, 118 aa, Zea mays
  Clone ID: MRT4577_109882C.1.pep
GRGGGVIVLWGPRGVYIYSLGPYYMCMRAGAWVHMCLTPSVYRRGSSFVARGVGGANARACLQQWDTSHPAEKTGKRRNHGAGEKKKKRRKGKKKPSKQRGRGPLSKTETRETTHGTS

SEQ ID NO: 195500 - protein, 113 aa, Zea mays
  Clone ID: MRT4577_109883C.1.pep
MAPVPGYAGTKTSARGLYSGGGGGRQHRPSFQNSVFSIEEILSATNNFSPALKIGQGGFGAVYKGVLPDGTVVAVKRAKLVSRSRDQAACCSLQFSISCRFPLFRFLAESTGE

SEQ ID NO: 195501 - protein, 50 aa, Zea mays
  Clone ID: MRT4577_109884C.1.pep
SIQKAPGWVLLVYITQPPMANPESFFLGVDKTKKNEKRPPNKKKKKRKRR

SEQ ID NO: 195502 - protein, 101 aa, Zea mays
  Clone ID: MRT4577_109885C.1.pep
SPGQGIFSKKGDGALPLKKRGGVNPKLVPSPLWLAPNPTHHKAFHAGGPFAGKGNVTRPNRIVLFSPAPKPAPKKNGPKLDGSFAIPLLIKGFGTQNDFCS

SEQ ID NO: 195503 - protein, 81 aa, Zea mays
  Clone ID: MRT4577_109886C.1.pep
PSSPPKGFQFAPGDLAPCPACNHLCPLPFCLAAFFSSPPYGWGKEALWSIIKPPGPKKTCSRNFFPTPGPFFVLTPPLFTP

SEQ ID NO: 195504 - protein, 63 aa, Zea mays
  Clone ID: MRT4577_109887C.1.pep
CDMAGRTSTCTWASFSLHSCTSLEDNPREHTTRRHDSCDLHKSCDPINECIYDILTWHRFWHG

SEQ ID NO: 195505 - protein, 65 aa, Zea mays
  Clone ID: MRT4577_109888C.1.pep
DADSRLVHRVVVDADVAQHQYVGDVVLVTVEDGGEVRVVKVEDVRKFTGAVDDRCVMREDEGMRG

SEQ ID NO: 195506 - protein, 121 aa, Zea mays
  Clone ID: MRT4577_109889C.1.pep
FFFFFFFFLFFGFFFFLEGRCFFTKWQQVLFLFGCQVATNSIKAGTQNFTFRPGYPCTFLNSTGNYTKPIIQSLPLVPQLQEGQIQQLGSASNLFTCPPPLPKYFFLCANFALQTNQTPTL

SEQ ID NO: 195507 - protein, 40 aa, Zea mays
  Clone ID: MRT4577_10988C.1.pep
HSLTKETLVHNVRMEAKLCAYRHHQKTLLRTLGLSKSVVS

SEQ ID NO: 195508 - protein, 128 aa, Zea mays
  Clone ID: MRT4577_109890C.1.pep
ENKCERFDLQGFSLYQCYRRWATKRTAGSTKNGRDSNPKYLGVKKFGGEKVLPGNIIVRQRGTRFHPGNYVGMGKDHTLFCLKEGNVRFERNKLSGRKWVHVDPVAGHDLHPIYADGFATTSDTEPMQ

SEQ ID NO: 195509 - protein, 57 aa, Zea mays
  Clone ID: MRT4577_109891C.1.pep
MGSTAGYVAAVVDDEACMYAMQLASSSILLMTLKIAIYLFLLDVLQKDAGCGKAALA

SEQ ID NO: 195510 - protein, 146 aa, Zea mays
  Clone ID: MRT4577_109892C.1.pep
MALSSMFKRINVKDLTSKVSVYTSATELSGGLNMIFRRWATKRTAGSTKNGRDSNPKYLGVKKFGGEKVLPGNIIVRQRGTRFHPGNYVGMGKDHTLFCLKEGNVRFERNKLSGRKWVHVDPVAGHDLHPIYADGFATTSDTEPMQ

SEQ ID NO: 195511 - protein, 243 aa, Zea mays
  Clone ID: MRT4577_109893C.1.pep
MTKRPDGLRWKMVFSSRYCSGVTVEYRNEGGAMVPIRVHTVLISTQHDETVTNDEIAADLKEHVIKPIIPEQYLDEKTIFHLNPSGRFVIGGPHGDAGLTGRKIIIDTYGGWGAHGGGAFSGKDPTKVDRSGAYVARQAAKSIVASGLARRAIVQVSYAIGVPEPLSVFVDTYGTGAIPDKEILKIVKENFDFRPGMIIINLDLKKGGNGRYLKTAAYGHFGRDDPDFTWEVVKPLKSEKPSA

SEQ ID NO: 195512 - protein, 144 aa, Zea mays
  Clone ID: MRT4577_109894C.1.pep
KGGGTQTKKKGNPTDPNNQKTHKEVGALKKPGKKPRGGEDPRKHPRLKKKTLKGPLLFREKREGLEKKKNSALKKALKKGAPKTQLLFIGFRKKPRARDFPTLNKTRGPGEPKFIKKARGFLRKRHVEGLTQAFINPRAGGPKP

SEQ ID NO: 195513 - protein, 409 aa, Zea mays
  Clone ID: MRT4577_109895C.1.pep
VLPPHLFIVILVQVSEGLDFADRAGRAVIVTGMPFATPTDAKVRLKREYLDKQGTPSNKNTKMLTGEEWYVQQAARAVNQAVGRVIRHRHDYGAIIYCDERFVWPNYQSQMSYWLRPHIKCYSKYGEVVQGLTRFFRDKASSDPLTLEPTDCNNCIAPPANKHMLKEKLSDLAASAQDECPQITLSGNSTMRRSNFMKLAQITPANRSTLTTKHNFVSTSTKHNLPEDQLSQDTNVDITVDLAIQGHLKEHTFKSLGLKKAKTMDRSKDAVVLDDVSSKLPQNIGSRALARYQCGGPTPESKKSTIATACGKNDGACEKTEGQESNSGPAFLKLVQEKLSPAEYTEFVEYMKALKLKTMHTKDSLEAITKLFSSPGRLPLLEGFRVFVAKNHLPLYEQLVRRPNNVFST

SEQ ID NO: 195514 - protein, 148 aa, Zea mays
  unsure (1)..(148): unsure at all Xaa locations
  Clone ID: MRT4577_109896C.1.pep
LQQLVRHVINHVGLASLSPLYGHMQCLPFYSLCTLVPVMYVKQQMSXVSSVGTVVXSNNRQLIPMXRLKAVNGFAYKKQQVCLQLGSVAQAXSSSFLRQRQLVPVYQQSGARSATXLACITQXLPFEQLAVTSXAASYKLHIVGGDLF

SEQ ID NO: 195515 - protein, 92 aa, Zea mays
  Clone ID: MRT4577_109897C.1.pep
KQAMWRRALAMVLFMAGAGLLSWAGGAGSHHGLWSIITLPMFQSMLSHRGLHAFSISPSTPTTPSSRPPACSLSYAPLFTSKLSCLISTSFF

SEQ ID NO: 195516 - protein, 55 aa, Zea mays
  Clone ID: MRT4577_109898C.1.pep
SILPVLSSVSSNTVILHKMHEITISFALRNFQVSRTRLIQLIIMIRYYSSRYTLD

SEQ ID NO: 195517 - protein, 108 aa, Zea mays
  Clone ID: MRT4577_109899C.1.pep
VVLKDAIDYVEWHYREPSDDKFRHRKSWLTSSRGGSSSCDDGCIDLPINGDNDDVINFILDFDKLHRVRLDRITHACGCMCASIVMRHSIGGTLSYSAVGFCGGFADA

SEQ ID NO: 195518 - protein, 31 aa, Zea mays
  Clone ID: MRT4577_10989C.1.pep
LIFHIMIILRLGCFGWRKCGICRLDIIGRVG

SEQ ID NO: 195519 - protein, 258 aa, Zea mays
  unsure (1)..(258): unsure at all Xaa locations
  Clone ID: MRT4577_1098C.1.pep
SCVRGSLGLTWSAFSWQAFPGLPSFXFRLSPSSAVMLCLETWYFQILVLIAGPLKDPELALASLSVCMTISGWVFMISVGFNAAASVRVSNELGAGNPRAAAFSVVVVTLLSFVLSVLVSAVILLCRDYISYIFTEGEDVSQAVSRLTPLLAFTLILNGIQPVLSGVAVGCGWQAFVAYVNVGCYYIVGIPLGCLLGFYFDLGAAGIWSGMIGGTLMQTLILIWVTFRTNWNKEXEEAQKXRINKWDDGKAPLLSAQE

SEQ ID NO: 195520 - protein, 48 aa, Zea mays
  Clone ID: MRT4577_109900C.1.pep
NRPKPEAGGWSLGDGHGSLRRRPALLRRLFCSSIQPLLKTRAKLRNHK

SEQ ID NO: 195521 - protein, 49 aa, Zea mays
  unsure (1)..(49): unsure at all Xaa locations
  Clone ID: MRT4577_109901C.1.pep
SKSIIRIVYILKFHLCCSLFGCNPYXXLXLLFCFCCRYVSSAQIYSLDQ

SEQ ID NO: 195522 - protein, 85 aa, Zea mays
  Clone ID: MRT4577_109902C.1.pep
LLELIVCSHDEDNRHILCYTIDYYIDSCGLPPMSQPGRGSCLFEQLNILENCHIVYVYSGVFAPFVPLDLAHDTLLNSMLEFSSS

SEQ ID NO: 195523 - protein, 91 aa, Zea mays
  Clone ID: MRT4577_109903C.1.pep
HTIDHARSHLNTIITSQSVCIYIILGSSYNRTCLKLAINLSDYLLHAHKSIYDAIRKIIHTNTQPYTNRSLAHFRTSKTRTYQRRHIDPYI

SEQ ID NO: 195524 - protein, 104 aa, Zea mays
  Clone ID: MRT4577_109904C.1.pep
MSGGPAAVSFLTNIAKAAAGLGAAASLLSASLYTVDGGERAVVFDRFRGVLPDTVGEGTHFIVPWLQKPYIFDIRTRPHNFSSNSGTKDLQMVNLTLRLLSRPD

SEQ ID NO: 195525 - protein, 117 aa, Zea mays
  unsure (1)..(117): unsure at all Xaa locations
  Clone ID: MRT4577_109905C.1.pep
RARISGGVGSLGGQFSGLASTAICWGQSYGXRXVRPPIIYGDLGRPNPMTVFWSKTDQSLTFRPMKGMLTGPVTILNWSLVRNDQPRFETCYQIVFATKKEVEDLEAGGIKVFQIDK

SEQ ID NO: 195526 - protein, 155 aa, Zea mays
  unsure (1)..(155): unsure at all Xaa locations
  Clone ID: MRT4577_109906C.1.pep
MKEIMNVHIRTCSLSRPANDCWELYCHKHGIDPDGTMPVDTSAVRLDDAFYTCFSETGTGKNGPRDMFDDLETTVIEEAHTVSXRQLFHPDXVLSGKEDSLTIFARVHXYTVETQMDNLCLDRERKLAHNCMRCRRSLMFQARXGGTGSELALLL

SEQ ID NO: 195527 - protein, 88 aa, Zea mays
  Clone ID: MRT4577_109907C.1.pep
RIRPRVRAASLMRICTYTNIVDNTSIASSGSVGLLLVRGWAQRADANATSSVSDLGGSASGGAAALVALDDHLDVRLSIASRYLIMNP

SEQ ID NO: 195528 - protein, 358 aa, Zea mays
  unsure (1)..(358): unsure at all Xaa locations
  Clone ID: MRT4577_109908C.1.pep
SANNYLQFLRSLNRSKCCAKGICTECFLQMKSPTSCKPTQCPYCKTLNYAVEYRGVKTKEEKGIEQLEEQRVIEAQIRMRQQEVQDDAERMKNKRTATLGXSSISTGRFLQYXGASTAVANSPRGNDVLSSEVQHSELISRNSEAFKQMRGNNFEVDLEEVMLMEAIWLSIQDQEALGNPGCVSTTPSSIPSRPFDDGDMTTTAEAASSGGFACAVAALAEQQHMHGESSSASPCQTIRFGTLSRPDRSTTQDLSVAGSSSSDSRVEEPPTSNTHRTIEAAEYSNSNVQWSEVAEAGTSIAESDGTVEAGVDNSSTSAGSNIDSVSVPDSFEEQMMLAMALSLVDARARAGSPGLAWR

SEQ ID NO: 195529 - protein, 372 aa, Zea mays
  Clone ID: MRT4577_109909C.1.pep
MPLAEPPQWRRKATDFFSTSSVKLKQAGQSAGDNIADVAGKVGSAVKSRWVVFQEARQQQQQQRPPHETVQERIITAAATTGLLFRKGISETKEKVAVGKVKVEEAAKKTADKSKSILNNIERWQKGVASTDVFGVPIEATVQREQSDRAVPLVLVRCADYLVISGLNNEYLFKSEGDKKVLQQLVSLYNEDSGASLLEGVNPIDVGALVKCYLASIPEPLTTFSLYDELRAARVSIPDLRDILKKLPNVNYMTIEFVTALLLRVSHKSSLNKMDSRSLAVEFAPLIMWRQGDTGTDLRNHLKFTLKPPPKIVDTTSNAATWDLLDEDDEDASSQIPLDDASPPDYSSIEVIQCLIEHHNAIFTDANETVWR

SEQ ID NO: 195530 - protein, 64 aa, Zea mays
  Clone ID: MRT4577_10990C.1.pep
AVPNRPLEKANVITTCFYLQMSMTLAVADGHLVNMGKMIEEMEGKLRNSLDQVQFCIDNDYAEY

SEQ ID NO: 195531 - protein, 174 aa, Zea mays
  unsure (1)..(174): unsure at all Xaa locations
  Clone ID: MRT4577_109910C.1.pep
MPLAESPPWRRKATDFFSTSSVKLKQAGQSAGDNIVDVAGKVGSVVKSRWAVFQEARQQQQRPPHETVQERIITAAASTGLLFRKGISETKEKVAVGKVKVEEAAKKTADKSKSILNNIERXAEGSRSTDGGFGVPIEATVQREHLDRAVPLVLXVRCADYLAIXGLNNEYLFK

SEQ ID NO: 195532 - protein, 121 aa, Zea mays
  Clone ID: MRT4577_109911C.1.pep
RRTRSDGSGAAATTSWRPWISRRSWPRRKTRTPTPTAPPTSRRSSAVREARRRPRRDGQVVVTVTVTAASLAFLACQTRTTTSSRWSRARSRVRTASARLSSGGHETPRGRKRTLEPSKLP

SEQ ID NO: 195533 - protein, 228 aa, Zea mays
  Clone ID: MRT4577_109912C.1.pep
MPLAEPPQWRRKATDFFSTSSVKLKQAGQSAGDNIADVAGKVGSAVKSRWVVFQEARQQQQQRPPHETMQERIITAAATTGLLFRKGISETKEKVAVGKVKVEEVAKKTADKSKNILNNIERWQKGVASTDVFGVPIEATVQREQSGKAVPLVLVRCADYLVISGLNNEYLFKSEGDKKVLQQLVSLYNEDSGASLPAGVHPIDARALVKCYLASIPEPLTTCSPYDE

SEQ ID NO: 195534 - protein, 48 aa, Zea mays
  Clone ID: MRT4577_109913C.1.pep
ISLLVHGLPRSLRPRGSSVARRRGLAVASPVSLHQRPCGVPVALWRYA

SEQ ID NO: 195535 - protein, 165 aa, Zea mays
  Clone ID: MRT4577_109914C.1.pep
RFQNVLPAFSVCSSSPFIPAIPLRSRYRAVVVVPLAEPPQWRRKATDFFSTSSVKLKQAGQSAGDNIADVAGKVGSAVKSRWVTFQEARQQQQQRPPHETVQERIITAAATTGLLFRKGISETKEKVAVGKVKVEEVAKKTADKSKNILNNIERWQKVCDLEFVT

SEQ ID NO: 195536 - protein, 261 aa, Zea mays
  unsure (1)..(261): unsure at all Xaa locations
  Clone ID: MRT4577_109915C.1.pep
MAVGKNKKLGKKKKGGSRKVADAFAKKEWYDIKAPSAFPIRQVGKTVVTKTQGTKNAKDSLLGRVFESSLGDLKPNGEDDAFRKFKLRVEDIQGSNCLTNFYGMDLTTDKLRSLVRKWHTLIEAHADVKTTDGYTLRVFAIGFTKRRPNQIKKTCYAQTAQIRQIRKKMVDIITRETTSVDLNEFVTKIXIPEIIGREIEKATEGIYPLQNVLIRKVKMLRAPKTDVNKLLELHGGAEAAAVNTNQQAKADVGTAVERKDQ

SEQ ID NO: 195537 - protein, 77 aa, Zea mays
  Clone ID: MRT4577_109916C.1.pep
YMRLSDRQIKAVPNAVSWGRSFNPKMHSSLLVIVNQEGQNHQLFSLLESLTASKSIFRQMSGLSFNALRDGLKPTRP

SEQ ID NO: 195538 - protein, 373 aa, Zea mays
  Clone ID: MRT4577_109917C.1.pep
MPLAESPPWRRKATDFFSTSSVKLKQAGQSAGDNIVDVAGKVGSVVKSRWAVFQEARQQQQQQQRPPHETVQERIITAAASTGLLFRKGISETKEKVAVGKVKVEEAAKKTADKSKSILNNIERWQKGVASTDVFGVPIEATVQREQSDRAVPLVLVRCADYLVISGLNNEYLFKSEGDKKVLQQLVSLYNEDSGASLLEGVNPIDVGALVKCYLASIPEPLTTFSLYDELRAARVSIPDLRNILKKLPNVNYMTLEFVTALLLRVSRKSSLNKMDSRSLAVEFAPLIMWRQGDTGTDLRNHLKFTLKPPPKIVDTTSNAATWDLLDEDDEDASSQIPLDDASPPDYSSIEVIQCLIEHHNAIFTDANETVWR

SEQ ID NO: 195539 - protein, 42 aa, Zea mays
  unsure (1)..(42): unsure at all Xaa locations
  Clone ID: MRT4577_109918C.1.pep
MYXXXPASEQPERGXCXGGXRXLXEQREDXXVALDACXXLXL

SEQ ID NO: 195540 - protein, 164 aa, Zea mays
  unsure (1)..(164): unsure at all Xaa locations
  Clone ID: MRT4577_109919C.1.pep
RERARKKNGAFAFRKLFHPVFSQKXSRFLRAGLDAAGKTTFFSSLSFAKIATTIPNXIGFNVEPVESKTFSFXTSWNXVGGKDMIRPFWRHYCPDTQGLIFVGDSNDRDRVVEARNDLHRMLTEDELRDAVLLVFANKQDLPNAMNAAEITDKLGLHSLRQQHW

SEQ ID NO: 195541 - protein, 61 aa, Zea mays
  unsure (1)..(61): unsure at all Xaa locations
  Clone ID: MRT4577_10991C.1.pep
MALALHSRAGHXNRLKALIAAEYSGINDELTDDFEMGVSYKTPEFPKMNTLGNAPVLETPD

SEQ ID NO: 195542 - protein, 109 aa, Zea mays
  Clone ID: MRT4577_109920C.1.pep
LATLWYNLSTNPMVVIARTTLAVTMKTCMTLMSSLGPLAWTPEINVLTEDAVTACIPGIIYRRHQRFSSAYAICWEEIWAIWRIKGCIELDTTLTSLPIYDILRMYRGL

SEQ ID NO: 195543 - protein, 81 aa, Zea mays
  Clone ID: MRT4577_109921C.1.pep
SSWYILCSWSSACCESTAIVSLYTAYAAPEGCFMMPAAMMCCLVFGRTTSPRMVAHDHDDDGSVVTRQYNKSPSAALEAAA

SEQ ID NO: 195544 - protein, 65 aa, Zea mays
  Clone ID: MRT4577_109922C.1.pep
SSNLSLLPLPLLAVLIRIITLYTVLAEMSRTTKVDEHLNAVYFYPPAHRAGAYRRALTVSCAQIL

SEQ ID NO: 195545 - protein, 231 aa, Zea mays
  Clone ID: MRT4577_109923C.1.pep
PGRPRVRSALSLLRLPPGALRLLRRAPLPCTLHLSRAAALVPDPWPPWSFPIAPGSDPAPERPTFGFCAPDLELQPWRFASPSSTLLLYSNHSRAPQLTLQRRDFQRSASSSYARRSLILHAPSPSSGVRSPRPLFLQLGAQLPLSWPWLPCRGPFPASSPAPSRRPSLCHLLVPRPYSALCSAMAAVPRPPSPRAAFPLLLPAPSALVLSPSRAPGVLLSCLPRAAGVSP

SEQ ID NO: 195546 - protein, 80 aa, Zea mays
  Clone ID: MRT4577_109924C.1.pep
GSPTVYEPHKWPIFSTVYLHLCQLRSLGYLKPAKIWEKDLCLCLCLKDWDLVPKIFSIQVSCEQRAFSQTVQKFSGKPFL

SEQ ID NO: 195547 - protein, 86 aa, Zea mays
  Clone ID: MRT4577_109925C.1.pep
GRAQRADNRWNARQLCQERPRLCSAFPGAGPAHHGGEARQRRVNFRVLPVQERARRCQGPRQRCSCGCCRRGDGILGCVRWHGGCL

SEQ ID NO: 195548 - protein, 94 aa, Zea mays
  Clone ID: MRT4577_109926C.1.pep
MYRAKRAASLRAKRRRLGKYELGRTIGEGTFAKVRIAKNMDTGDHVAIKILDKAKVHKNKLVEQIRREICTMKLIQHPNVVRLYEVMGSKARIY

SEQ ID NO: 195549 - protein, 201 aa, Zea mays
  unsure (1)..(201): unsure at all Xaa locations
  Clone ID: MRT4577_109927C.1.pep
EGRPGDTIESTYNTKHAVPRRXPWKVDVESSGVPAKLRLLEQELLNLEKVVNGDLSKIPLVMRKQVKRYQTLAGKIDDLCKRMQTSDPCDSTLNSEFRTQRQTEFLLEAFHLQHRATETRQKLGTLQAETAKGSFGDELTAEAKMCTRRALSSIRNNFKEIQRSLEIWLARILGDLEGMLARDGASRIREYFLSPYTSAVR

SEQ ID NO: 195550 - protein, 77 aa, Zea mays
  unsure (1)..(77): unsure at all Xaa locations
  Clone ID: MRT4577_109928C.1.pep
SIRYFEITEAPPYIHFLRTFTSKEPQRRMASMPTRGLAVSKCEIARLYTLQQRKCEPIIMTVPRQSRLFQDXLYPDT

SEQ ID NO: 195551 - protein, 101 aa, Zea mays
  unsure (1)..(101): unsure at all Xaa locations
  Clone ID: MRT4577_109929C.1.pep
PXAKPGAILDSFKGKTGTTPDTNFLHPTIPSAKLVLSHTLIPKSINRKKQICQWTKQWDKEPKNTISLVHAGGMIKRYIIQQGGDGYHWQYMCTYTVTLYR

SEQ ID NO: 195552 - protein, 69 aa, Zea mays
  Clone ID: MRT4577_10992C.1.pep
LFLQPQAHSTTKQTLRLLCDGPKTQHKRPIRVRLRNISSLQCYMHLSLLSFCHLKQRTLSFFQPYYQSS

SEQ ID NO: 195553 - protein, 54 aa, Zea mays
  Clone ID: MRT4577_109930C.1.pep
DKGHLTAKLITKEKEHDLLNYQDHDVKSALSSLGEAADQFETIANVNCSEKLNT

SEQ ID NO: 195554 - protein, 104 aa, Zea mays
  Clone ID: MRT4577_109931C.1.pep
PRGRRPRHRRRRRYLPSDPRRRRIHPNPLRDLAAPQPWPVIFEYNGSPRRHGGEELMSITEITKGCTNALSTSGLTINGRLSNNICSTWISMGSTLTPRRYTTR

SEQ ID NO: 195555 - protein, 96 aa, Zea mays
  Clone ID: MRT4577_109932C.1.pep
QLGKKSTTITASFRFLDPTSTSWAESSNIAVTEEHTAQVLHAGTSPVQNDLQSHHCHDNCLYVDLSEVPAAIRFLSLCSYNWHLVDSSLILQKPGG

SEQ ID NO: 195556 - protein, 81 aa, Zea mays
  Clone ID: MRT4577_109933C.1.pep
KRKGERDSNNSLVPLNQCQVGKFFELNFVATVEKARICLLHEFNYGKATAVVKPRTGWEAYGPTFYFFKQKQVLKAEPSTP

SEQ ID NO: 195557 - protein, 59 aa, Zea mays
  Clone ID: MRT4577_109934C.1.pep
RLLENILIREKMLLLKVHKFVFEQGFSSYFEVGTRLFNLWEAADSRQKILVLNYNSSGI

SEQ ID NO: 195558 - protein, 46 aa, Zea mays
  Clone ID: MRT4577_109935C.1.pep
YISSLWNNNRFSKQGSRTKFYCPPPTCREQIVKQKKFLKIKKCPPF

SEQ ID NO: 195559 - protein, 56 aa, Zea mays
  Clone ID: MRT4577_109936C.1.pep
FRATTTLKTKPMNKKLYQLTMNYTSTCSPPFSTKNYYPLSILKKNSPYKENLRSHP

SEQ ID NO: 195560 - protein, 132 aa, Zea mays
  Clone ID: MRT4577_109937C.1.pep
MPPEAASSTGHIVARIRRPLPAERPHVRRCTRLLCSAFLTVLLVAGVVLFVVYLAVRPHRPRFHVTAFSASGIGPSSGGTVSLSGQLSIRNPLHVAWRSGATGTGTRSTSAARWPSDSTASCWPSTCRNAAA

SEQ ID NO: 195561 - protein, 68 aa, Zea mays
  Clone ID: MRT4577_109938C.1.pep
GYSGWPRKKDLRAAALPTIFLSFSATKQDNCSMSSCLSLGYTVLFAIIIRSRDVKFWLHCSSSNKVLF

SEQ ID NO: 195562 - protein, 89 aa, Zea mays
  unsure (1)..(89): unsure at all Xaa locations
  Clone ID: MRT4577_109939C.1.pep
DADEEGDQGHVFGYATDETPELMPLSHVLATKMGARVTEXAKNGTCAWMRPDGKTQVTXQYVNEGGAMVHVRVHTVIVCTQHDETVASD

SEQ ID NO: 195563 - protein, 181 aa, Zea mays
  Clone ID: MRT4577_10993C.1.pep
LGPPDGLGGEPQHHRSPVALGRTEPCGKPQLAASVATTPCLDATASLITCGTSVQPLCRCCNKISYARPTSYPLAAPTIPQSSHHSSNPPSTPGKQIPSRCRHTSPPPIHRTARCVFHVPVLFPSVRARGVQCRCYGLRGGGGTIGTINQGYALKRPGNHATDLIVESTATNAMDCVRGVR

SEQ ID NO: 195564 - protein, 85 aa, Zea mays
  Clone ID: MRT4577_109940C.1.pep
VPVFCVFFLLLSCASFYFFFTACFLALKNGGPSLFFPLAPAGGILRTPKPIPLKTRGGGHWPLPITNKKNPLGMGTLGPGGVLHS

SEQ ID NO: 195565 - protein, 50 aa, Zea mays
  Clone ID: MRT4577_109941C.1.pep
IRHEAQTPAQTLARARQIFNSPFRPPIDLHAYLGLFLRRRARSLDTPGAR

SEQ ID NO: 195566 - protein, 510 aa, Zea mays
  Clone ID: MRT4577_109942C.1.pep
LRALPRRLELWLPCLAAVESNPAPPPLAPPPPDEASAGSGLDARAGGGGGGGDGGGGTDLGWLRAFPHVFTASMANFLFGYHIGVMNGPIEDIATQLGFQGNPFLQGLVVSIFIVGAFFGSLGSSALVDKFGCKRTLQIDSIPLIIGALLSAQADSLDEMLLGRFLVGIGIGVNTVLVPIYISEVAPTKYRGTLGTLCQIGTCLGIIAALSLGIPSESDPHWWRTMLYAACVPGILIVAGMQFAVESPRWLAKVGRFDDARKVVESLWEPSEVEKSMEEIKAVVLNDDSRGSWSDLLVEPHNRVALIGGSLFFLQQFAGINGVLYFSSLTFRDVGITNGALASLYVGIINFGGALVASNLMDKQGRKKLLIGSYLGMAFAMFLIVYGISFPLDEGVAHSLSIAGTLLYIFTFAIGAGPVTGIIIPELSSARTRSKVMGFSFTVHWICNFLVGLFFLELVNKFGVGAVYAGFGGVSLLTALFAYNFIVETKGRSLEEIEMSLSSATPGKQE

SEQ ID NO: 195567 - protein, 96 aa, Zea mays
  Clone ID: MRT4577_109943C.1.pep
QLSDQLPESREAARNLALELQVFYEKSQASTSDEHEGELSASPDAESWEAFCQSKLSALSAQAILRVTPTTKEGVTSTTTKEGVTSAPKEGLAVGC

SEQ ID NO: 195568 - protein, 57 aa, Zea mays
  Clone ID: MRT4577_109944C.1.pep
LANIDVARLCWPKIVVFSRSIQSTLLYMVFLSNLVSLQPPRPGCPLHHLRNYRTHNH

SEQ ID NO: 195569 - protein, 115 aa, Zea mays
  unsure (1)..(115): unsure at all Xaa locations
  Clone ID: MRT4577_109945C.1.pep
PGRTEWWAWRRPAASPRRLAPLSAARGGRGAAWGAFFFSPAGAPGRCGGRPFFSXACGVLAAGDDASLCTPCLVASHGLPALSREPHRCLRASAGFTLARAHGLGGRPFRLRVWV

SEQ ID NO: 195570 - protein, 59 aa, Zea mays
  Clone ID: MRT4577_109946C.1.pep
NEQIYTNAFNLNIKGAYAWGGLWKCCYRNHLPTMLTRCYQFHCWDILLTSGVYNVRKPN

SEQ ID NO: 195571 - protein, 60 aa, Zea mays
  Clone ID: MRT4577_109947C.1.pep
KPVLNYFFFFLLRFPIAILSSLYFLILVFLLVFNQIPYFFINFLINTIFTIPFYFNIFFF

SEQ ID NO: 195572 - protein, 77 aa, Zea mays
  Clone ID: MRT4577_109948C.1.pep
AKEGIPPDQKGFIFPGKKLEEGRPLTDYNIPKESPPPPGPRLRGGQKIMGRLNRQSAWVVWGPPPKWRVSKELPFGS

SEQ ID NO: 195573 - protein, 152 aa, Zea mays
  Clone ID: MRT4577_109949C.1.pep
HAPNAPFVHISHAPAQLIYASPLCFCDITEKPSRAVYAHPELFFGALPAPLLFLFGAPPCPPTVGLLGSLMSLLPGLTFKLFCFPPASRSASASSASGDVFEGLKAASVCAAPSSEPDLAYSVDRGLSESLSCASFCANRAGLVERKRGRTT

SEQ ID NO: 195574 - protein, 47 aa, Zea mays
  Clone ID: MRT4577_10994C.1.pep
RMLSKRLNVVFHHDKHGTFCRVSAGAARGPTAPSPTAPRRSWAAAAT

SEQ ID NO: 195575 - protein, 63 aa, Zea mays
  unsure (1)..(63): unsure at all Xaa locations
  Clone ID: MRT4577_109950C.1.pep
MKPPKNKKKKPQQPPKNXKNKKKKKKKKKKKKKKKKKKKKKKKKKKKKKKKKKKKKKKKKKKN

SEQ ID NO: 195576 - protein, 179 aa, Zea mays
  Clone ID: MRT4577_109951C.1.pep
LSLPLHIQVKFKIDKDCRPLPESSLKQAINENYSAKSKFDPELTTKQVQRLLLLFKPLSAPQSVPNNHFEERRHYEEQRKPYYHFEERLPLLPIEEVRQPRFDDERRPAVRHVPLEDPYRAQAPRFAPVPVESQLGHSLASAQGDHGRYYQPPALAPEPRHIPLVLEPRYVSPAHVPTV

SEQ ID NO: 195577 - protein, 35 aa, Zea mays
  Clone ID: MRT4577_109952C.1.pep
RDLRDCPIQSPTITLGNQIEIQVGAPTPIGEKGPF

SEQ ID NO: 195578 - protein, 105 aa, Zea mays
  Clone ID: MRT4577_109953C.1.pep
YTKLLPNHYPHRSQFSGVKNKTGSQTLELEEQDSFWGAPTPTLDMYKTGIKNNVLRWRRVTFGIFQGDLGLFGGGPTATGAKHAPGGLVTGHNEGGLELWGGSPP

SEQ ID NO: 195579 - protein, 555 aa, Zea mays
  Clone ID: MRT4577_109954C.1.pep
MAMHLHPRFYRSHPMLLRHRLWCKRQSRPLLLRRHLWYRRRRQPLMLKYRCIHQCQPLLKHQLCRQSQSQNQLMLMLMLQLQFLSARGKGVGADNSGGDGRMKSRKERARSGKGKEVLGDGGSKGKGKGKGKKAVGKKEERGDHKVAGFIFMCNAKTKKECYQNRLFGMPGGKIGMVKKIRPGVKLFLYDFDLKLLYGVYKAASHGGLNLVQGAFSGKFPAQVKFKIDKDCRPLPESSLKQAIKENYSAKSKFDPELTTKQVQRLLLLFKPLSAPQSVPNNHFEERRHYEEQRKPYYHFEERLPLLPIEEVRQPRFDDERRPAVRHVPLEDPYRAQAPRFAPVPVESQLGHSLASAQGDHGRYYQPPALAPEPRHIPLVLEPRYVPPAHVPTVPELQHVPAAYYRTSAPSGDSYYRPVDNLVPEGYADRIVANITARDPIISDHTALPVEASARPDRLDDLYRIRGAHVEELYRPREIADRAGITARADRVEELYRYDRLANRAVDPPHSAYLTTAYENNPAYAETSVRPISARVGGSGAPVSSLYSFSGGPVYR

SEQ ID NO: 195580 - protein, 120 aa, Zea mays
  Clone ID: MRT4577_109955C.1.pep
PVLPLKPLPTGFAFLVFPLLPMFTLGGPVKNLNLGGMNPPLNLKFWGSGPVEIFSSPKPPCFFFFSKAVGFSFDGPYALLSFNSQHPRPKNVLLAGSSRVFNLKLKIFIIFLMRQKPPVV

SEQ ID NO: 195581 - protein, 461 aa, Zea mays
  Clone ID: MRT4577_109956C.1.pep
MPPSKARRKRSLRDITATVATGPVANSKPGSSSTNEGKQHDKKKEGPQEPDIPPLPPVVVNIVPRQGLGCEVVEGLLVPSRKREYKPNSKYTVGNHPIYAIGFNFIDMRYYDVFAIASCNSVIIYRCLENGGFGLLQNYVDEDKDESFYTLSWTIDQVDSSPLLVAAGSNRIIRVINCATEKLDKSLVGHGGSIHEIRTHASKPSLIISASKDESIRLWNVHTGICILVFAGAGGHRHDVLSVDFHPTEVGIFASCGMDNTVKIWSMKEFWIYVEKSYSWTGHPSKFPTRNIQFPVLTAAVHSDYVDCTRWLGDFILSKSVKNAVLLWEPKPDKRRPGEGSVDVLQKYPVPKCSLWFMKFSCDFYSNQMAIGNNKGEIYVWEVQSSPPVLIDRLCNQECKSPIRQTAVSFDGSTILGAADDGAIWRWDEVDPAASSSKPDQAAAPAAGVGAGAGADADADA

SEQ ID NO: 195582 - protein, 70 aa, Zea mays
  Clone ID: MRT4577_109957C.1.pep
IHKLENPCKKGKTWVAFLVPALAKIIHPQKKRAFVYVRTNLIPKTNTFYKGLTGITSVSETFFFAYQKIG

SEQ ID NO: 195583 - protein, 87 aa, Zea mays
  Clone ID: MRT4577_109958C.1.pep
NPKKKRRIYIFPLELLHTQLIQKQNKNPARKMAVASTSKISEGRQGVYTFSLPACTEITRETKTRPAFTKINRNIMRFYSKNFQMRG

SEQ ID NO: 195584 - protein, 67 aa, Zea mays
  Clone ID: MRT4577_109959C.1.pep
YVSSEFGSSPSAEVHFVQNCLSDVCISHGIALFISRLSKLAAYSVYRRCILGASRILYDLKQSEPMM

SEQ ID NO: 195585 - protein, 137 aa, Zea mays
  Clone ID: MRT4577_10995C.1.pep
PTRPPTRPPTRPRTRGRGQVAPATTGLTSLTGPWPFWFLGGGGGGGGRPVAVGFGTRQARARLPGTRRPKRGEDHMNAERKNVGGARKEGPGDTLAGGERIARAHTLRVLQRIEVNDGVGMRFVSLFAEMFQKIWWI

SEQ ID NO: 195586 - protein, 111 aa, Zea mays
  Clone ID: MRT4577_109960C.1.pep
PQQSVRAQRVSGPVRERASPRALGLSLSVGGFLVSPGETGFWAENRSFGLAPLLGVRAFISYPWVSFFWFRLVGCAILPRDHHFPRLPPIWFLAPSLVPRPPPLGTSPFGW

SEQ ID NO: 195587 - protein, 193 aa, Zea mays
  Clone ID: MRT4577_109961C.1.pep
RHTTSRSENSTESEGGEPRATYPPPEKVALDPPTPAICFSCDSWATVVVAALLQVPRSSPVPLAPPRRRRAPARFRPRTPLLRPGFRPLATPAGLSLCCRGGARLSENSSQTEGAGLGAGAGAGFACRSPDLPDLAAKVAARARRTAHLPRGRYGLHEPAPPPGVRLRQKGQMLVLPSQLLYFSSLFNLMTAT

SEQ ID NO: 195588 - protein, 721 aa, Zea mays
  Clone ID: MRT4577_109962C.1.pep
MGTERKRKVSLFDVVDETSVSAKLRAASNGAAATATGGNPSVNRWNGRPYTARYFDILEKRRTLPVWQQKEEFLRSLRDNQTLILVGETGSGKTTQIPQFVLETEGLGNRSMVACTQPRRVAAMSVSRRVAEEMDVTIGEEVGYSIRFEDCSSHKTVLKYLTDGMLLREAMADPLLEKYKVIVLDEAHERTLATDVLFGLLKEVLKNRPDLKLVVMSATLEAEKFQGYFNGAPLMKVPGRLHPVEIFYTQEPERDYLEAAIRTVMQIHMCEPAGDILVFLTGEEEIEDACRKINKETNNMGDQVGPVKVVPLYSTLPPAMQQKIFEPAPAPLKEGGPPGRKIVVSTNIAETSLTIDGIVYVIDPGFSKQKVYNPRIRVESLLVSPISKASAHQRAGRAGRTQPGKCFRLYTEKSFNEDLQPQTYPEILRSNLANTVLTLKKLGIDDLVHFDFMDPPAPETLMRALEVLNYLGALDDEGNLTQLGEMMSEFPLDPQMSKMLVISPKYNCSNEILSVSAMLSAPNCFLRPRDAQKAADEAKARFGHIDGDHLTLLNVYHAYKQNNEDPQWCYENFVNSRALKSADNVRQQLVRIMTRFNLKMCSTDFNSREYYVNIRKTLLAGYFMQVAHLERTGHYLTVKDNQVVHLHPSNCMDHKPEWVIYNEYVLTTRNFIRTVTDIRGDWLIDIAPHYYDLSNFPSCEAKRVLERLYNKRERERAANRG

SEQ ID NO: 195589 - protein, 72 aa, Zea mays
  unsure (1)..(72): unsure at all Xaa locations
  Clone ID: MRT4577_109963C.1.pep
GCNIIQLVPFSQIAGVGPVAFLAQQPLLAFYLRSGPNVGPLLQLHQVLPFGPLFLPNPAVFXQQPVIGGGLF

SEQ ID NO: 195590 - protein, 255 aa, Zea mays
  unsure (1)..(255): unsure at all Xaa locations
  Clone ID: MRT4577_109964C.1.pep
VTFFLGALDDEGNRAQLGEMRSENSLDPQMSKMLVISPKYNCSNEILXVSVMLSAPNCFLRXRDAQKAVDEANARFGHIDGDHLTLLNVYHAYKQNNEDPQWCYENFINSRALKSADNVRQQLVRIMTRFNLKMCSTDFNSREYYVNIRKTLLAGYFMQVAHLERTGHYLTVKDNQVVHLHPSNCMDHKPEWVIYNEYVLTTRNFIRTVTDIRGEWLIDIAPHYYDLSNFPSCEAKRVLERLYNKRERERAANRG

SEQ ID NO: 195591 - protein, 42 aa, Zea mays
  Clone ID: MRT4577_109965C.1.pep
MCRLIDIAPHYYDLSNFPSCEAKRVLERLYNKRERERAANRG

SEQ ID NO: 195592 - protein, 737 aa, Zea mays
  unsure (1)..(737): unsure at all Xaa locations
  Clone ID: MRT4577_109966C.1.pep
MVTERKRMVSQLDVMVDMSVSANWSTDSFSISATPTGANSSVRRRNAQNDADEAKARFGQIDGVHVTLLKVYLAHKQNNDQTLILVGETGSGKTTQIPQFVLETEGLGNRSMVACTQPRRVAAMSVSRRVAEEMDVTIGEEVGYSIRFEDYLTVKDNQVVHLHPSNCMEHKPEWVIYNEYVLTTRNFIRTVTDIRGEWLIDIAPHYYDLSKKLVVMSATLEAEKFQGYFNGAPLMKVPGRLHPVEIFYTQEPERDYIEAAIRTVMQIHMCEPAGDILVFLTGEEEIEDACRKINKETNNMGDQVGPVKVVPLYSTLPPAMQQKIFEPAPAPLKEGGPPGXLLSPLKRSRTSCXRKLIVSTNIAETSLXTIDGIVYVIDPGFSKQKVYNPRIRVESLLVSPXTRASAHHRAGRAGRTQPQPQTYPEILRXNLANTVLTLKKLGIDDLVHFDFMDPPAPETLMRALEVLNYLGALDDEGNLTQLGEMMSEFPLDPQMSKMLVISPKYNCSNEILSVSAMLSXKYNCSNEILSVSAMLSAPNCFLRPRDAQKAADEAKARFGHIDGDHLTLLNVYHAYKQNNEDPQWCYENFVNSRALKSADNVRQQLVRIMTRFNLKMCSTDFNSREYYVNIRKAMLAGYFMQVAHLERTGHYLTVKDNQVVHLHPSNCMDHKPEWVIYNEYVLTTRNFIRTVTDIRGDWLIDIAPHYYDLSNFPSCEAKRVLERLYNKRERERAANRG

SEQ ID NO: 195593 - protein, 186 aa, Zea mays
  unsure (1)..(186): unsure at all Xaa locations
  Clone ID: MRT4577_109967C.1.pep
IPYATRAPLALRRGGSPAATEHRDLIYQLHISIVADVDDEPEVAGGAPMKRTFRQHXYRGVDLHALLDMSTDDLDQLFPARARRMFQRVLNRKAMALIKKLREANEDAPAGEKPEAVXTHLRSMIIVPEMIGSIVGVYHGXTFYQVEIKPEMIGHYLAEXSISYKCGKHEGSCIGATHSSRFIPLK

SEQ ID NO: 195594 - protein, 64 aa, Zea mays
  Clone ID: MRT4577_109968C.1.pep
FYYFFFFLTKPMEWWDGSSRSMMLITYISPACHTRGCGNQNNPLRGGLFTGTNPLGGTTLTCNP

SEQ ID NO: 195595 - protein, 98 aa, Zea mays
  Clone ID: MRT4577_109969C.1.pep
RGFPSLISQENGIDQSRRPQSVFRTAAETAKDKPFEATFVISQLTEEKKSSVQQNQKFRQEVEVFRKESSKTGGGLSIPFLFDGGLMGIVGGHTPKRT

SEQ ID NO: 195596 - protein, 230 aa, Zea mays
  unsure (1)..(230): unsure at all Xaa locations
  Clone ID: MRT4577_10996C.1.pep
IQKNGPEHFGXPSPQPNPNPDQTPRPHSSSPRVRVSTPXLSPAPIRTNPPAWPPASWWTSPPWGPPASSPXPRVPPPXPPPASSPPSPPPPTRTSPTSAPSSPVSSPPTRTLPSRPSGSSPRSPSTTPPTTSAPFSTSSPPSLPPPLPPPSPLRSSPPSSPNSSTLPSPAGRLRRSSRLSSATSVSAAAAPLAARSTPTLGGSCQVSGSWSRCGACATPRTDARSRSFSR

SEQ ID NO: 195597 - protein, 65 aa, Zea mays
  Clone ID: MRT4577_109970C.1.pep
GKKKGLTSPFLCLKNGKPSLADQDLSFLKCFNPFSPIFCKPPQGFVPFDFPPFNFIRGFKIPPFF

SEQ ID NO: 195598 - protein, 88 aa, Zea mays
  unsure (1)..(88): unsure at all Xaa locations
  Clone ID: MRT4577_109971C.1.pep
AATRRGRWPAVVIRRGLADWHDILRNVSDLGVQDVLGVEYLPFKEHVGDGHCNSESVLEQDTVRFNDSFPRPWMXKAIAKGAQCLKRH

SEQ ID NO: 195599 - protein, 211 aa, Zea mays
  unsure (1)..(211): unsure at all Xaa locations
  Clone ID: MRT4577_109972C.1.pep
REVDAEAVLLLARGCPLLEDVAFLDCGTVDEAALAGIHSVRFLSVAGCRNLKWATASTCWTQLPSLIALDVSRTDVPPSAVSRLISHAKTLKLICTLNCISVEEEQLHNPAVFSNSKGKVVLTINSDIFKSFETMFPVVDVKEHEFFNQCNWSXKDXIPGDTMTWLEWILSQXLLRLXEXNPQXMDXFWLQKGXXTVLDVKSXQXDXQXGH

SEQ ID NO: 195600 - protein, 111 aa, Zea mays
  unsure (1)..(111): unsure at all Xaa locations
  Clone ID: MRT4577_109973C.1.pep
LWAPFLSASFTTVWDAPLGPPPGGSPSRRSPRRSPSLRSPSPRALPARPPHVRPSPRRLPPGSPPRXAPPYCFPAVCPPPPPGLPFPPRFGRFFFVGPFSFVYLSGDKLRG

SEQ ID NO: 195601 - protein, 299 aa, Zea mays
  Clone ID: MRT4577_109974C.1.pep
AGRAGTSFSPPRYIRARRTLSEGTKRRAAPGFPSLSRPRSAPIGATALWGRRSKVGRRCFRYTEAVSSFLQLVATVSSAFSQLSNNLLLLLYLRITVLSSSETFQLGSSSSNPVMDHQNLLPNNSNVYEQILLPNALEHEDCPHYLLNGHDVGVPNGSLIGQQNTSLSLWEPAGSSSMSCLVDHDNFFQAKREHLASSLSIGGPLNIDRRRHEGTSSLPLHNLNIDLNINQADQFGSDDVDLVHGNGQSSANTVTAHRGSFITDHIMHHGVSSDATGSSSWNAECFNGAASQHSRHPAF

SEQ ID NO: 195602 - protein, 108 aa, Zea mays
  Clone ID: MRT4577_109975C.1.pep
LGFFNFFLVFSLFFFFSHHPEKIMPRSMGFKDAHNQRVYWIFLPLKTTYFFGHKIPMVFILKTGPGKRGRASTPCLGGQTLAPAFWEKCKWGFQRELFIGKGFCPLRL

SEQ ID NO: 195603 - protein, 102 aa, Zea mays
  Clone ID: MRT4577_109976C.1.pep
LIFFLVSARFSPPRYIRARRTLSEGTKRRAAPGFPSLSRPRSAPIGATALWGRRSKVGRRCFRYTEAVSSFLQLVATVSSAFSQLSNNLLLLLYLRLTRFVL

SEQ ID NO: 195604 - protein, 62 aa, Zea mays
  Clone ID: MRT4577_109977C.1.pep
SMHHIRFYHAFLIRSPYTCNKLSTAFPSWCLSQHKSQIALVQISHHADLSNALATHGYCIAW

SEQ ID NO: 195605 - protein, 62 aa, Zea mays
  Clone ID: MRT4577_109978C.1.pep
VPRTVPILKIRVTLLTFYSTHSTCFSTFFRPQNPNNWENSLETIPIILNLAIPYSHIYLPKF

SEQ ID NO: 195606 - protein, 104 aa, Zea mays
  Clone ID: MRT4577_109979C.1.pep
KGGKIFFNSSPKVNYIPAEGVLRYALHLRFLSPFSKKSSKSRYHCKLDMSSQPHSRSRTEEKKRFYLYNDIKVVFPQRHSDSDKGKLRVEHDFPANPKYFDISN

SEQ ID NO: 195607 - protein, 227 aa, Zea mays
  Clone ID: MRT4577_10997C.1.pep
PRVRGRVGSRTSSQIECSLECPVVCSISLYDSCMEATDSDHKPVKCVFNLDIAHVDKQTMRQKYGEIMSSNKEVLDSLQGLEALPEVDISTNDIMLQDQNPFVVKLHNRSTKELACFEIIGQTPMSSGTAFSGFPSWLKVSPAVGIISPRQSVEVTLQHGQIRSQDYLTGTSGDSSGAAQEKVATLLVTVTRVDSTAGRRHKIQVQHRCRRETYSSRGYNLADRFFA

SEQ ID NO: 195608 - protein, 71 aa, Zea mays
  Clone ID: MRT4577_109980C.1.pep
YTKSKSPYLTVKPPITELARVMGHRCQGFLLSTTSRRSRAWVETSTSESLPSDRPNLWVRRPVRESSGGGV

SEQ ID NO: 195609 - protein, 80 aa, Zea mays
  Clone ID: MRT4577_109981C.1.pep
FVFRPFFFFFQRHVTLPGLYFENRNMTEAVFWSKSSLGPGIASLLHTYSAETRCMSCDQSGSVHEPGKLGATITFLEHNS

SEQ ID NO: 195610 - protein, 393 aa, Zea mays
  Clone ID: MRT4577_109982C.1.pep
MGFIGAHGVETLKRYRYSGEDRSVVAKYVLQPFWSRCVTLFPLWMPPNMITLTGFSFLVLSALLGYICSPHLDTAPPRWVHLAHGLLLFLYQTFDAVDGKQARRTSSSSPLGELFDHGCDALACAFEALALGSTLMCGGWTFCFWVVAAVPFYLATWEHFFTNTLILPTINGPTEGLMLIYVSHLFTFFTGAEWWAQDFRKSLPFFGWIPLPFLSEIEIPLYVLVLILMIVCAVIPTVRSNVSNVQEVVEARKGSMALALAMILPFIVLLAGVAIWCYLSPSSIMRNQPHLLVIGTGFNFGYLVGRMILAHLCDEPKGLKSGMFMSLVFLCFPIANALIAKINDGSPLVDELVLLLLYCAYTVGLYLHLAVSVVHEIKDALGIYCFRITRKEA

SEQ ID NO: 195611 - protein, 54 aa, Zea mays
  Clone ID: MRT4577_109983C.1.pep
MFYVSEIIDSHDVLGALYLVTYLPVRMYNVCMSDISRRHWSPPHTPSYTNAVSS

SEQ ID NO: 195612 - protein, 115 aa, Zea mays
  Clone ID: MRT4577_109984C.1.pep
LLSSEEAQRRWRSAVGALVKNRRRRFRMVPDLHRRSLDEAQRRSTQEKIRLALYVQKAAMTFIDGAKHKDYRITEDIRNAGFSINPDELASITSKHDAKALKMHGGVDGVSTTAT

SEQ ID NO: 195613 - protein, 116 aa, Zea mays
  unsure (1)..(116): unsure at all Xaa locations
  Clone ID: MRT4577_109985C.1.pep
TLXCGGWTFCFWVVAAVPFYLATWEHFFTNTLILPTINGPTEGLMLIYVSHLFTFFTGAEWWAQDFRKSLPFFGWIPLPFLSGMYSLGDVINLCKHGITYFLYALLLLPCYLTACI

SEQ ID NO: 195614 - protein, 69 aa, Zea mays
  Clone ID: MRT4577_109986C.1.pep
MSLVFLCFPIANALIAKINDGSPLVDELVLLLLYCAYTVGLYLHLAVSVVHEIKDALGIYCFRITRKEA

SEQ ID NO: 195615 - protein, 89 aa, Zea mays
  Clone ID: MRT4577_109987C.1.pep
PAKASAVVASVNKLHFSGTRFYRKKHKHSLPENGNAPLYQQLFTSPIRPRENHHEHISAREGSHTLELMHAEHHISNNQKTAVEKPLRK

SEQ ID NO: 195616 - protein, 74 aa, Zea mays
  Clone ID: MRT4577_109988C.1.pep
KPQLAGKSFKKTEKFFLKNHWIFSFNPKQIFCFYPKTALGETPALRPPIPTPGALISWLGVKVSYNGVFNPWGV

SEQ ID NO: 195617 - protein, 68 aa, Zea mays
  unsure (1)..(68): unsure at all Xaa locations
  Clone ID: MRT4577_109989C.1.pep
CRSEXAKGVGKXRXXXXSNLXGXSCDGXEXLLVAXXMPXXTXAKHLFHXDYQTIERXXXLXEAXYXAV

SEQ ID NO: 195618 - protein, 95 aa, Zea mays
  unsure (1)..(95): unsure at all Xaa locations
  Clone ID: MRT4577_10998C.1.pep
MPAVGLSINVLVLLRGAAVQRGLRRSDYARFRRCCSARLRXLFMSLPLLXGRGASSXRVLSSSAVTXVRLLPVAPSLVVRAWCRALAGQAAGAAA

SEQ ID NO: 195619 - protein, 59 aa, Zea mays
  Clone ID: MRT4577_109990C.1.pep
KEKQSVSKTNRCWILKSHGNIFLLPARSNLMMLTIKYIDQHHLIYANEKSHVLILWATQ

SEQ ID NO: 195620 - protein, 78 aa, Zea mays
  Clone ID: MRT4577_109991C.1.pep
PLLGSVSGPWLSPCFVPFPLSWSLPWYKLTALFSFLSIMRFGYRSFFSKCFRLLLWLFGFLSLWFGACLCPLLWVTVP

SEQ ID NO: 195621 - protein, 67 aa, Zea mays
  Clone ID: MRT4577_109992C.1.pep
ARALPIVYAERPCYLSKPQAYISGRGAASNGPRCRPPGGSLGPGQETLPELVDLAGAGEADPLEPGK

SEQ ID NO: 195622 - protein, 168 aa, Zea mays
  unsure (1)..(168): unsure at all Xaa locations
  Clone ID: MRT4577_109993C.1.pep
FAGLVPXXXXRSGRGLXXGPPFLXXGXAGLVXXVPPXPLVVGPFSRSPPLGRFAVRALGPPVAVGVLXGVGXGAPPGARVFFFFSPCSFWLVLCLLVGARGASPLSSCWPPCGCGVKFLGASPPGLGVFFLSLDPWCFLAFLFFWALGCWASLVLGFVLPLCPPKKIF

SEQ ID NO: 195623 - protein, 127 aa, Zea mays
  Clone ID: MRT4577_109994C.1.pep
QTSGTETNIVSRSEGQDTPARGPGADSSTMRTSSTSGEDSTSTVEPTKVTPSTPPSPNPTTQESFFKSVNKRLQMLESNSTLSLLYIEEQSRMLRDAFSKVEKRQMAKMNTFLEELNTTVIDEIRNL

SEQ ID NO: 195624 - protein, 50 aa, Zea mays
  Clone ID: MRT4577_109995C.1.pep
VVTVPATRDRHSARRQLAPSLQHDRARLDIRSHHSSSEDVTSSFVACHEQ

SEQ ID NO: 195625 - protein, 96 aa, Zea mays
  unsure (1)..(96): unsure at all Xaa locations
  Clone ID: MRT4577_109996C.1.pep
GXDLLMHGGSFHISGWDLKPSRCLLHLCCLLRRHDLSKWPACLEQDDLVGLGAAEWVPQPLASRLFPSCPLPWRETLSSLLLGCSVPSSLIRHSES

SEQ ID NO: 195626 - protein, 80 aa, Zea mays
  Clone ID: MRT4577_109997C.1.pep
FASWNTPNSPLHTYHEFLVCLATVHELSKRETQTTGGPDLINPFKGPHELNIIGDEDHLREPADLKMLLTGEEPGRELEL

SEQ ID NO: 195627 - protein, 153 aa, Zea mays
  Clone ID: MRT4577_109998C.1.pep
PAHSLSSLCLFRMPPGAHTPAEATRHRPSPTTRAAQRQKPRPALPTEQRPQPARTPAPRRQPRPARSRPSASARPPHRRDPESTRRADASAEDRPAQEPTKPDVPSCRAPTRPDAHPRSHASRRPDRVLSCTRLRRHRARLSCKPSRATVRVN

SEQ ID NO: 195628 - protein, 172 aa, Zea mays
  Clone ID: MRT4577_109999C.1.pep
IHDKVWAASILSDIHAMREAYPAYPKISAILSSVSEELLEAPLFVSLHNLCAILKCTTPTMVMLQCAIRNAGYQVSGSHVDPLALKTDAPMSVIWDIMRCWVKLHPVKHRPGNHPGNVILSQEPKFQAKFSRVLGASVTRKRARFMPNPEKYWGPGTKAGRNPRTFQMDNRN

SEQ ID NO: 195629 - protein, 113 aa, Zea mays
  Clone ID: MRT4577_10999C.1.pep
QWGNSFCQGANLPLRVPFKVDKVEGGIRLGFFPVKDGPTRTLVYINCLVFPAPDGFGPVFRAFRKGLLKDKDPLGEPRFFKTLLQALEKFIQIARVCPCKPPPIKRCISVTFN

SEQ ID NO: 195630 - protein, 520 aa, Zea mays
  unsure (1)..(520): unsure at all Xaa locations
  Clone ID: MRT4577_1099C.1.pep
MDSTTTTTAPLLQPAAAASSKEEPAPASPHGAGSWELEAVLADASSPVLRRAWEGARLELPLLLRVALPAVGVYVINFVMSMSTQIFCGQLGNLELAAASLGNTGIQSLAYGLMLGMGSAVETLCGQAYGAHKHGMLGVYLQRSTVLLMATAVPLTVVYAFSARILVLLGESERISRAAAVFVYGLIPQIFAYAANFPIQKFLQAQSIVPPSAYTSARTXAAHLLLSWVVVYKVGLGLLGASLVLSLSWWLLVAAQFAYIVMSPRCRHTWTGFTWQAFSGLWDFLKLSAASAVMLCLETWYYQVLVLIAGLLPNPELALDALSVCMTVNGWVFMIAVGFNAAASVRVSNELGAGHPKSAYFSVWVVTALSTLISIMLGVLVLCLRNYISYLFTEGEVVSNAVADLCPLLAVTLVLNGIQPVLSGVAVGCGWQQFVAYVNIGCYYIVGVPLGALLGFFFKLGVKGIWAGMIGGTCMQTAILVWVTLRTDWNKEVEEAQNRLHKWEANKTTEPLLAGVSNDK

SEQ ID NO: 195631 - protein, 45 aa, Zea mays
  unsure (1)..(45): unsure at all Xaa locations
  Clone ID: MRT4577_109C.1.pep
YAGYVTVDAKAGRALFYYFVEALQDPSDKPLVLWLNXGGPGCSSF

SEQ ID NO: 195632 - protein, 69 aa, Zea mays
  Clone ID: MRT4577_10C.1.pep
SFENVLHEESKNGMGKRSAADADVYWLNKYKLAPRRGAVYVSTIAGVKRAPSDCQGDLAVKKKAKLYKI

SEQ ID NO: 195633 - protein, 121 aa, Zea mays
  Clone ID: MRT4577_110000C.1.pep
YSCIDELTSLAGNQRQQRKAVEEELDRSLVLLDLCNAMQENFAELRVSVQEMQLALKRGDNVSLQAKVQSYARLAKKAQKQFKKISSKAASDIEGCKIVRLLAEAREIAVSMLESTSHLLS

SEQ ID NO: 195634 - protein, 38 aa, Zea mays
  Clone ID: MRT4577_110001C.1.pep
AIDGGLLLHGQLHLQLGRSVTSLLGGDLVGVGGVSITA

SEQ ID NO: 195635 - protein, 85 aa, Zea mays
  Clone ID: MRT4577_110002C.1.pep
GGAPKERGGFGGGGGGSGGAGGSGGGGGGFGGGNRGGGFGNSPGNWGNLTVGPPRPSFPVSSRGVFPSPKGFFSFVPFGGAPLGF

SEQ ID NO: 195636 - protein, 306 aa, Zea mays
  Clone ID: MRT4577_110003C.1.pep
MVTCRKMARVDVAELKQRLVKRLGRERAAKYFAHLTRLLNLKLTKVEFDRLCFATIGKDNIALHNALIRGIIGNALSGVPPPSRQAVTGQSGTTTAPSGQCVGVALPVVGNVGAVVDSGDGELARELGAPVGKVVSVEDGEEVEQVRSVPCVQSRSPITQPLGISVAGGSGTRVRRRLDDPLVSCYDCGHLLDTGSLCEDLQRRLHSTGTGVTVQAVDALNRGLDELLRRLIKPCMDLSRVRASSRRISKVNEKVAGRVNSLQQLNQGQRTTLQDFAVAVQSDPHLLGPNWPTQIEKVQAMSFGGE

SEQ ID NO: 195637 - protein, 307 aa, Zea mays
  unsure (1)..(307): unsure at all Xaa locations
  Clone ID: MRT4577_110004C.1.pep
MVTCRKMARVDVAELKQRLVKRLGRERAAKYFAHLTRLLNLKLTKVEFDRLCFATIGKDNIALHNALIRGIIGNAXLSGVPPLSRQAVTGQSGTTTAPSGQCVGVALPVVENVGAVVDSGDGELARERGAPVGKLVSVEDGEEVEQVRYAPCVQSRSPITAPLGISVAAGSGMRVRRKLDDSGVSCYDSGHLLDTGSLCEGLQRWLYSNGTGVTVQAVDALNRGLDELLRRLIKPTVDLSRVRASSRRISKVNQKFAGRMNSLQHPNQGQCTTLQDFAVAVQSDPRLLGPNCPTQIEKIQAMSFGGE

SEQ ID NO: 195638 - protein, 121 aa, Zea mays
  unsure (1)..(121): unsure at all Xaa locations
  Clone ID: MRT4577_110005C.1.pep
LASDYNSVRLREDPCQGPAMPVVIKTDSNISNTNNNAQTKAKEVKKSSHRSTYDDTSVKLVMAGTGCSDIAIAEXVKFAIIIQVLGEMDXDVDAAIEYLIAERLAVSTDDAGGRPLYKPCI

SEQ ID NO: 195639 - protein, 122 aa, Zea mays
  unsure (1)..(122): unsure at all Xaa locations
  Clone ID: MRT4577_110006C.1.pep
MAQTGDNTAATTAAATQFATPAFLTSTKPDRFKGVNYKRWRTRAVLWFQSMNCYAATKGMPEGDLEPAQREAFERVDIMFKTALLGIIDDSIVDPYMLFDNGKDMWAALEAKXXVSDAGSEL

SEQ ID NO: 195640 - protein, 60 aa, Zea mays
  unsure (1)..(60): unsure at all Xaa locations
  Clone ID: MRT4577_110007C.1.pep
SPCLHSCNLLSGALRGXSEMASMKAEVTWLRDMLCGDDAYDMPVKLIXLVPEDYPYNDDD

SEQ ID NO: 195641 - protein, 91 aa, Zea mays
  unsure (1)..(91): unsure at all Xaa locations
  Clone ID: MRT4577_110008C.1.pep
SHNRSYLEKPKQLDGEEYLLLRIRLANGDAEIQPYDSSVCYSHPQVRTNGQATALSSYTYSSFISLIRQWRFLASSEYQXYIIDHLWARRS

SEQ ID NO: 195642 - protein, 95 aa, Zea mays
  unsure (1)..(95): unsure at all Xaa locations
  Clone ID: MRT4577_110009C.1.pep
XXLFAFMQXXTXXXXKATGQQQNRXRIAAPRXXTQKKAXXTXXXGGGKSXXGKREKRGXXKXPTAPRAXXRSXSXXQQXXQKXQTPKQXXRKXXG

SEQ ID NO: 195643 - protein, 195 aa, Zea mays
  unsure (1)..(195): unsure at all Xaa locations
  Clone ID: MRT4577_11000C.1.pep
MGTKESGRKKFPDREQRHHGRATPTPTPRTPHRRTRPHGTXPAPRPRSPTHNPPRGSPPTKATTEAATPQPXGRKQTPGQANPRXAAPXTQQAPPKEERSEAKAEDRAGRGERRAAADPRDSTDAGXPRRGGPQGRQHAQPQQAGAQQGNGRSSKQQGRXRENEQHPKHERRKDTGDRNPSGQAQEDRSTRQPRH

SEQ ID NO: 195644 - protein, 59 aa, Zea mays
  Clone ID: MRT4577_110010C.1.pep
GINFLTTPFFGPPTRFGGGSSRYTSLLFRTYVPTFVRDKTGADPFRALGFGASPWEKKN

SEQ ID NO: 195645 - protein, 67 aa, Zea mays
  unsure (1)..(67): unsure at all Xaa locations
  Clone ID: MRT4577_110011C.1.pep
SVRARTWRRWRASGCRCRRGLRXFXLFXFFFXFPFLFLFFPLLPLFQALQPVRAAPHRFTPWYTHHT

SEQ ID NO: 195646 - protein, 97 aa, Zea mays
  Clone ID: MRT4577_110012C.1.pep
PDPKLCLIPFQSNVSDVKSVYWHQGRFSVGRVPSPYSSHHQDQEQPLLPQYLHGLRHHKTHVLPSPLHQPHLSQHPHTLTYQTHLDHHALYRSYPSF

SEQ ID NO: 195647 - protein, 83 aa, Zea mays
  Clone ID: MRT4577_110013C.1.pep
MRTQRNLLPLLLLLSAALLAVADAQERKNYVVHLEPRDDYGGGGSVEEWHRSFLPEATLDSAADDGPRIIHSYSHVLTGFADS

SEQ ID NO: 195648 - protein, 156 aa, Zea mays
  Clone ID: MRT4577_110014C.1.pep
PLPKNCRVMIPWDLTVSLFLTQGFPVNFLFRAPHFCGLFLFRTMGLFFCRVLWSPQSLAFLMFFLPKKGSFLPMVPPPFWAPPRGSLFQDWAAFFKGVPVFSTFSPLNVKGVFFFLPGAPKFFVGFFNQTPLGWFFLKPGAWNNLPRLLVGPPWVG

SEQ ID NO: 195649 - protein, 232 aa, Zea mays
  unsure (1)..(232): unsure at all Xaa locations
  Clone ID: MRT4577_110015C.1.pep
MPGGGFAVSAPSGVEFEAKITPIVIISYTTRRLGRRLTMLIAGVFFIIGVIFNGAAQNLAMLIIGRILLGCGVGFANQAVPLFLSEIAPTRIRGGLNILFQLNVTIGILFANLVNYGTSKIHPWGWRXLSLSLAGIPAAMLTLGALFVTDTPNSLIERGHLEEGQXVLKRIRGTDNVXEPEFNEIVEASRIAQEVKHPFRNLLQRRNRXPQLVIAVXLXIFQQFTGIHAIMF

SEQ ID NO: 195650 - protein, 231 aa, Zea mays
  Clone ID: MRT4577_110016C.1.pep
MPAGGFSVSAPSGVEFEAKITPIVIISCIMAATGGLMFGYDVGISGGVTSMDDFLGKFFPAVLRKKLEDKESNYCKYDNQPLQLFTSSLYLAGLTATFFASYTTRRLGRRLTMLVAGVFFIVGVIFNGAAQNLAMLIVGRILLGCGVGFANQAVPLFLSEIAPTRIRGGLNILFQLNVTIGILFANLVNYGTSKIHPWGWRLSLSLAGIPAALLTLGALFVTDTPNSLIER

SEQ ID NO: 195651 - protein, 93 aa, Zea mays
  Clone ID: MRT4577_110017C.1.pep
PLIKGASFKAPFKEQQKQQAFISSPWPPHLKNGGLKAKKFENPLFLIKTAWWMLFPQSPRETRKTKLGNHTWARGDKNPNHGKAVIFNKLLGP

SEQ ID NO: 195652 - protein, 111 aa, Zea mays
  Clone ID: MRT4577_110018C.1.pep
HPSTRHAGPAIGTTHRRSVCFYTVAQSLGFSMPTFTWPPVDATTPVKRKPMAARPVRSPYCTSEKRRPRANGCPTIEATTTSNHTPAGARSRAEKKREVHARRRPSVAGAS

SEQ ID NO: 195653 - protein, 324 aa, Zea mays
  unsure (1)..(324): unsure at all Xaa locations
  Clone ID: MRT4577_110019C.1.pep
ARNSARGEGVPDWRRFRVLPLPARRGLAGPRLQLQLAHRGHLREPGGGTIRSRLRGEAGSELADGRRSCDTDPRFSLDAARMSIDDAGFSWDEPRASWDGYLFGGGAGIGLGRAPRPLSRLPPILSVLEDTPTDVVGSXDGSEFYHFQHAEDLLDRGFSSNSLIEDISASSLSGRAKKPRRWRKAWSLWGLIHRRAAGRRSGGGPSDITDRSFSEPWPDLRVRGANPKMQRCNSSNLSARSSFSSNSGGLGSSRRSYVDANGNVRRREEPHAQAQAQVERTRSARYSPGRAAADNGMLRFYLTPMRSGSGRTRGGGGLPSKAGA

SEQ ID NO: 195654 - protein, 122 aa, Zea mays
  unsure (1)..(122): unsure at all Xaa locations
  Clone ID: MRT4577_11001C.1.pep
VKCGEANEALXEYFQSMRRRXVTAVGVVSTCAQLGALEQGRSGVVAQRALIDMFMKCGRLDLAMLAFGSMAERSVVNWNVIIVGHATHGYGLDAVMLFHPKEAERVTVDDLSVIAILTXCTH

SEQ ID NO: 195655 - protein, 135 aa, Zea mays
  Clone ID: MRT4577_110020C.1.pep
TLQLNTTKPSLTSWTQLKSLFVCIYIIGGVTSMDDFLGKFFPAVLRKKLEDKESNYCKYDNQPLQLFTSSLYLAGLTATFFASYTTRRLGRRLTMLVAGVFFIVGVIFNGAAQNLAMLIVGRILLGCGVGFANQV

SEQ ID NO: 195656 - protein, 88 aa, Zea mays
  unsure (1)..(88): unsure at all Xaa locations
  Clone ID: MRT4577_110021C.1.pep
VLQSFLTGRGPARXXQILLRKRDDDSPFMPIEXXLLGXNDRGKRRAQGMMDGSAVTPRMRFAAXTHRTRRHNGRPLPCEDSGGDKCLR

SEQ ID NO: 195657 - protein, 381 aa, Zea mays
  unsure (1)..(381): unsure at all Xaa locations
  Clone ID: MRT4577_110022C.1.pep
TLGVCRVVPVVEEGPAVVPMDISGEVAAESNAAAQGGKXMAIKDHIDLESAQSKKASPKDLRXSFWVAASVFSKKWQKWRRKQKLKKEAAVSKAAAAAMPPPEKPSKPSFFRRSRLRGEAGSELADGRRSCDTDPRFSLDAARMSIDDAGFSWDEPRASWDGYLFGGGAGIGLGRAPPPLSRLPPILSVLEDTPTDVVERSDGQIPVEDDFDPDPPGGSLQTRDYYLDSSSRRRRSLERSSSVRRPSFEVTDPTRPMPPAVNGTGRESPIGGGSEFYHFQHAEDLLDRGFSSNSLIEDISASLEAALSGRAKKPRRWRKAWSLWGLIHRRAAGRKSGGGPSDITDRSFSEPWADLRVRGANPXMQRGNKQNLSARNSFSNN

SEQ ID NO: 195658 - protein, 514 aa, Zea mays
  Clone ID: MRT4577_110023C.1.pep
MPGGGFAVSAPSGVEFEAKITPIVIISCIMAATGGLMFGYDVGISGGVTSMDDFLREFFPAVLRRKNQDKESNYCKYDNQGLQLFTSSLYLAGLTATFFASYTTRRLGRRLTMLIAGVFFIIGVIFNGAAQNLAMLIIGRILLGCGVGFANQAVPLFLSEIAPTRIRGGLNILFQLNVTIGILFANLVNYGTSKIHPWGWRLSLSLAGIPAALLTLGALFVTDTPNSLIERGRLDEGKAVLKRIRGTDNVEPEFNEIVEASRVAQEVKHPFRNLLQRRNRPQLVIAVLLQIFQQFTGINAIMFYAPVLFNTLGFKSDASLYSAVITGAVNVLSTLVSVYSVDRVGRRMLLLEAGVQMFLSQVAIAIVLGIKVTDHSDNLGHGWAIMVVVMVCTFVSSFAWSWGPLGWLIPSETFPLETRSAGQSVTVCVNLLFTFVIAQAFLSMLCHLKYAIFVFFSAWVLVMSLFVLFFLPETKNVPIEEMTERVWKQHWFWKRYMDDDNHHIVNGKLTGASV

SEQ ID NO: 195659 - protein, 87 aa, Zea mays
  Clone ID: MRT4577_110024C.1.pep
PISSPQASVTAVGVGRRSVAAHVPASVRQWASLLAGRPVRCAAQRSDSPRVASWAPETLGAPAFAIAILDQSDQYLSFCPRVRPRVK

SEQ ID NO: 195660 - protein, 55 aa, Zea mays
  Clone ID: MRT4577_110025C.1.pep
HVVPRDGDAGGGAVCGRRRHCYWWFELTAHRTLRQRNGVRARVFSKSVWWRERQD

SEQ ID NO: 195661 - protein, 195 aa, Zea mays
  unsure (1)..(195): unsure at all Xaa locations
  Clone ID: MRT4577_110026C.1.pep
RISAYTSWVVRTEDVSWWSHNASPQNYNALQDSSCCEEAEDLGALSPSSRGLDIAGLPIKKLSFNASTLREAXTPRKPFAQIMPGNNVSSMPARPISNDTEEENKTPKTFAGLNPKTPVTVTAPMQLAVTPAVANKVIATPXNPFPGEGRVASAXPGDIEYSFEERRLAVYLARQVAFFVHSPSPSCANTQLLLS

SEQ ID NO: 195662 - protein, 108 aa, Zea mays
  unsure (1)..(108): unsure at all Xaa locations
  Clone ID: MRT4577_110027C.1.pep
GLLYHCSAQGLGVGXHTHQLYRAHVECLPGVATPLGIKVSYKMXPRHLAKLIETMNPSNKPGWITIITKMGAENMKMKLHHLIRADRKAELNDTWINDPMHXNTIQAP

SEQ ID NO: 195663 - protein, 123 aa, Zea mays
  Clone ID: MRT4577_110028C.1.pep
LKLERRQQRTSIRHSIMLISRTTNLTHRLIRRPNTRQQRQTTMMLNSMPKMITNKNRRTMNNIKSRTIQPRMLNSNIRIHHRLRRQITRNSTSRIRSPILLIRLRRNLHRLRIVRLIQAHKHA

SEQ ID NO: 195664 - protein, 103 aa, Zea mays
  Clone ID: MRT4577_110029C.1.pep
CARRVPIQVVCICLLVLTPSGFDLAGLDLTNIQSSSAPALLVLQAGRLHQRVRVSTAGRHRHVQRAGLQAGVRRPRVAVAGRAPDCVRGRRAGAGAALRDNEA

SEQ ID NO: 195665 - protein, 86 aa, Zea mays
  Clone ID: MRT4577_11002C.1.pep
MAMAMANPAPLPTFSSQSRAFTPNISLRSGRAISRSRALALTATTACSIRLRVRAAKDCSPPPSYPLSEVFPYVAAEWRTIAKGWK

SEQ ID NO: 195666 - protein, 126 aa, Zea mays
  unsure (1)..(126): unsure at all Xaa locations
  Clone ID: MRT4577_110030C.1.pep
MVLAGALVWEVATAFARQMPCPCPGLKGWNGAGPGLTTIMAPGGXYPXPEYLRXPECXPLAXGPYYAGVXQPSAMXQPLRAQCCQQQMKMMDVQSVAQQLQMMMQLERAAAXSSSLYEPALMQQQQ

SEQ ID NO: 195667 - protein, 72 aa, Zea mays
  Clone ID: MRT4577_110031C.1.pep
GELTKLLRGLGQTLKRLKTKKNLPLRGEQGPGTNAYPEIKQPNPNWGFFIPKELGARARAHRKPLKKKQVVP

SEQ ID NO: 195668 - protein, 112 aa, Zea mays
  unsure (1)..(112): unsure at all Xaa locations
  Clone ID: MRT4577_110032C.1.pep
MAASGGRETAAYPAAMNALYAACXXGNVTEQLWNFTWPAAIATLHPTSFPVAVLGSLKARXGSRGPPCXGNLVSSLPRIPAYXSLTVIQTAXHLGXAAMVTYAFTVPRAQLH

SEQ ID NO: 195669 - protein, 98 aa, Zea mays
  Clone ID: MRT4577_110033C.1.pep
YHNSHTLNITIHKPYNHKTLNSSRLGKAHISFQSPNPISNIQGFRSTNFRDSIQFIWPIIHNGKKPRFKGKETCQGPQAPKWLLGLLEGGLLSGGGGG

SEQ ID NO: 195670 - protein, 88 aa, Zea mays
  Clone ID: MRT4577_110034C.1.pep
EHNIGEGTYYSDVGDQKANTAGDNVATSKLRVTCLACLTYDLTSSIPLPLHTYWLTPLHRQHKWMTSTNHSSTISGLPIITADQRLLL

SEQ ID NO: 195671 - protein, 63 aa, Zea mays
  Clone ID: MRT4577_110035C.1.pep
TKREPAYEVLRFLTKRSIWDLWESFNEPLIVRYLSNRELGTWPRSSFQERSFRSRNVGTISFP

SEQ ID NO: 195672 - protein, 87 aa, Zea mays
  unsure (1)..(87): unsure at all Xaa locations
  Clone ID: MRT4577_110036C.1.pep
ACIQVCPTNPVNFNVDNVGVANLLGGGLHXFFCGSVALRSREICNACSVMTSKXAVEVQYVSLKIATFSFTFHTGYTCQRSMPFFSI

SEQ ID NO: 195673 - protein, 63 aa, Zea mays
  Clone ID: MRT4577_110037C.1.pep
LSSYTYCPDLRRRSSGAFHASVLIYVPANAFSLYTSSHVCRSLCSACAIAISESLAPCPSKYP

SEQ ID NO: 195674 - protein, 85 aa, Zea mays
  Clone ID: MRT4577_110038C.1.pep
KGYCWILTLLQQRCIWCVPSFKSIVSSCCPVPSLDCLNKVKVKVLKNSSDNKAKDVPSSILGVIQGNWRSLLIYALTVRVNLRLS

SEQ ID NO: 195675 - protein, 42 aa, Zea mays
  Clone ID: MRT4577_110039C.1.pep
GRIKKLKSLISLGAFIKYVFRVDESPPKFVYSPLEDLYFFFI

SEQ ID NO: 195676 - protein, 100 aa, Zea mays
  unsure (1)..(100): unsure at all Xaa locations
  Clone ID: MRT4577_11003C.1.pep
GQIGYARLRTFADSYRTLKAIXTKVFKSGINATPVIQCSKGPFDKYMLISXLFCAVGNGTYNDCPGXPRKNTCSKEILFQPSKKWXMLKQQNNQDDDPFQ

SEQ ID NO: 195677 - protein, 227 aa, Zea mays
  unsure (1)..(227): unsure at all Xaa locations
  Clone ID: MRT4577_110040C.1.pep
MMQQPQAHASALAVAHPHDPAGGDAPPKQVAQAMERLGRAGRLIADIRLGADRLLEALFVXATRPRXVRQHVDRMEHIIVKEDAAMRLYFQDLRALGRQLEESGVLNGALKARGNSWGLHMPLVCPDGAVVAYAWKRQLAGQAGASAVDRTRLALKAFTDQKRRFFPHLEDEVVSHLHDGEPGGTKKPKLFTSNGDLEEKSLSDILKKLPAIRLCLRRFAANAHRVR

SEQ ID NO: 195678 - protein, 57 aa, Zea mays
  Clone ID: MRT4577_110041C.1.pep
LSVNRYHYPLRYIWGTKQDPIFFGILARVKMLIFTTFFQEEGSASCLIMLIENTPMF

SEQ ID NO: 195679 - protein, 264 aa, Zea mays
  unsure (1)..(264): unsure at all Xaa locations
  Clone ID: MRT4577_110042C.1.pep
MMQQPQAHASALAVAHPHDPAGGDAPPKQVAQAMERLGRAGRLIADIRLGADRLLEALFVXATRPRXVRQHVDRMEHIIVKEDAAMRLHFQDLRALGRQLEESGVLNGALKARGNSWGLHMPLVCPDGAVVAYAWKRQLAGQAGASAVDRTRLALKAFTDQKRRFFPHLEDEVVSHLHDGEPGGTKKPKLFTSNGDLEEKSLSDILKNLEHEASNIKIFTYWHLDWSKRASSLASLLDDDFVDPSKELNLQNMDKSRSDALTTT

SEQ ID NO: 195680 - protein, 150 aa, Zea mays
  Clone ID: MRT4577_110043C.1.pep
RGALATPIDQVAVIELLVPSVFRAVVSLHPAGSTDPDAVAFFSPTEGGSYLHARGTSVHNVFKHVKEHADKALQYFISVEPSKALPLLLRWIASYQTLFTKVCSKCGRLLMMDKSLALLLPPVHRPYHQTSNIGPDLQEAYHIGCSSYDG

SEQ ID NO: 195681 - protein, 418 aa, Zea mays
  unsure (1)..(418): unsure at all Xaa locations
  Clone ID: MRT4577_110044C.1.pep
MMQQAQAHTSALAGAPSASAVAPTVAHPHDPVGGDAPPKQVAQAMERLGRAGRFIADIRLGADRLLEALFVXATRPRXVRQHVDRMERIIVKEDAAMRLHFQDLRALGRQLEESGVLNGALKAQGNSWGLHMPLVCPDGAVVAYAWKRQLAGQAGASAVDRTRLALKAFTDQKRRFFPHLEDEVVSHLHDGEPGDTKKSKLFTSNGYLEEKSLSEILKNLEHEVPNIKIFTYWHLDWSKRASSLASLLDDDFVDPSKELNLQNMDKSRSDALTTTIDQVAVIELLVPSIFRAVVSLHPAGSTDPDAVAFFSPTEGGSYLHARGTSVHHVFKHVKEHADKALQYFINAEPSKALPLLLRWIASYQTLFTKVCSKCRRLLMMDKSLALLLPPVHRPYHQTSNVGPDLQEAYHIGCSSYDG

SEQ ID NO: 195682 - protein, 168 aa, Zea mays
  Clone ID: MRT4577_110045C.1.pep
TAFWIRLGFGACCLATGISMVCVTSMHGLRASRWTHGWAISCQNLIVVAMPLHYVAKGFATPRTGKTLSQSSAWSFLWRLNSLVCGSGSGASAWPRRRAAPPWGAGASLRLWPEERENLVTVDSQWTIGIRAWHIPSYVRSGPLISGARIVIMYWFGYVGHLIRTIHI

SEQ ID NO: 195683 - protein, 111 aa, Zea mays
  Clone ID: MRT4577_110046C.1.pep
VDLMKTSLISNSCVFPAPRPNICSCVFFGFVRSIGYSYRIQDTTAINSYVSRFLCQRGHNLLETKTTKNPTQLFSSTYHLLPIYLYKCMQAPKDAVSSNPSARRSTDRRLN

SEQ ID NO: 195684 - protein, 117 aa, Zea mays
  Clone ID: MRT4577_110047C.1.pep
TPLHPTQVYEMLSLHKSKTWDNLKRYETQTTDHSVLLTLCYGTFSHTPARIFIPQNLAPELHDSITEYIPPLLTDNPLQRARNPQSTAQLRQKHHLGIAPYRLDLAAYDTIPSRTHP

SEQ ID NO: 195685 - protein, 73 aa, Zea mays
  Clone ID: MRT4577_110048C.1.pep
KKKKKKKKIYIKKKKKKGGILKKKKKKKKKKKKNKKKGRPFWGFHLSFPVLAPLYFFFGVPYFNFFARVFTPS

SEQ ID NO: 195686 - protein, 84 aa, Zea mays
  unsure (1)..(84): unsure at all Xaa locations
  Clone ID: MRT4577_110049C.1.pep
MERYHFKWFLFFLMTXEIKLMSYLSLPCWLLFELGPNLGAGSPLGLFLPASGLVGSPGRVAFGFGSSGPAAPLFGASSLRAGLL

SEQ ID NO: 195687 - protein, 94 aa, Zea mays
  Clone ID: MRT4577_11004C.1.pep
SQVFSSCLVRVQSWYSSQRLQQTLCAARSSQSRQCSCSFFSRSLGRLGSVVLRLLLFSIRCSSVVPPVVSLSFSIQRRLQIPSSRTLTIRVAPS

SEQ ID NO: 195688 - protein, 65 aa, Zea mays
  Clone ID: MRT4577_110050C.1.pep
FLNLFTYSLHIIIFVGRLIYSQTSLSLLLHLFHFFIPPISHFSSLVILSLFVFLSLFLKGFHPSF

SEQ ID NO: 195689 - protein, 76 aa, Zea mays
  Clone ID: MRT4577_110051C.1.pep
ICVFQVPFRPSWLGPLEFRLVCGVRLLSHNVFGLGTALLINMSSLYPSPFRHVWWACRMWFGSPPPAFASAEKKKI

SEQ ID NO: 195690 - protein, 94 aa, Zea mays
  unsure (1)..(94): unsure at all Xaa locations
  Clone ID: MRT4577_110052C.1.pep
QIIPTSSGAYLQQQQELIPPLVVNPPLVASFHQQQXLLPYQQFFLMHPVLRRHPPVVGGPFFLTSYKMSTMVAPSHRGVFPKNQQFIDCFFPPQ

SEQ ID NO: 195691 - protein, 195 aa, Zea mays
  unsure (1)..(195): unsure at all Xaa locations
  Clone ID: MRT4577_110053C.1.pep
KKRGWIFFPNQKKGFFGQGLKKPGHXPFFLAGGGKTLEKIKEREIFEPGFKNCPRVPEGKKAFXGNPIFGGKPGWGVKLGTKFVAPKFPKDPFPPKGGGGSNLGPGGKKGGSPPRGGGGKKICSPPRFLPPKEGEKFLTKLGVLLKPPGDGFGKFKPRKNNPIPWGETPGGGGKPGPQTPKFFNLFFKKRGGGPP

SEQ ID NO: 195692 - protein, 42 aa, Zea mays
  unsure (1)..(42): unsure at all Xaa locations
  Clone ID: MRT4577_110054C.1.pep
GEXSLSARVHFLGFLERPXVRPGKEQDLGLDEGGGAQRPPME

SEQ ID NO: 195693 - protein, 58 aa, Zea mays
  Clone ID: MRT4577_110055C.1.pep
DRNHQPRESKTCQFISVSKTVTRHLAHVHHAVVSSTSSSIQQAGKLATCLNRGEGLQT

SEQ ID NO: 195694 - protein, 282 aa, Zea mays
  Clone ID: MRT4577_110056C.1.pep
MSSQVDRRSQSAGKRARTDGSRREDDWVCPSCKNVNFAFRTTCNMRSCNQSRPADHTAMQTPPHYPTSGGYMGPGTPPSMYLGGGAPPYGSSMFNGPAVTRYGIPQFPGGSAYSYGYGGPIPMGSPYGPMQIAGPTPYSGGTMMTAGGMYGIPMDRYGPIPAGPGPMGTRAGSYSDEGSQKKPAGAGRDNDWECPNCHNINFGFRTVCNMRKCNTPRPANQGSKSDGLRGSKAKMPEGSWKCEQCNNINYPFRTKCNRPQCGAEKPSQTNNVNGSATDQDNQ

SEQ ID NO: 195695 - protein, 63 aa, Zea mays
  Clone ID: MRT4577_110057C.1.pep
GTIRDALQIKNLMFLLSLLKPLYQWVHSFHERLLVHVFHNLPGTTKGHPLSLRTFWKCRLIIR

SEQ ID NO: 195696 - protein, 91 aa, Zea mays
  unsure (1)..(91): unsure at all Xaa locations
  Clone ID: MRT4577_110058C.1.pep
XWECPNCHNINFGFRTVCNKRKCNTPRPANQXSKSDGLRGSTKMPEGSWKCEQCNNINYPFRTKCNRPQCGAEKPSQTNNVNGSATDQDNQ

SEQ ID NO: 195697 - protein, 424 aa, Zea mays
  Clone ID: MRT4577_110059C.1.pep
MLSWLRRFPNDVIHRKGGSSGRRTSSSTSWRNKSSSSFTARIIRCASSVVDTHHQHRGDDDDDDGDEDDEYDDCRLPSSPPNNNARRNTTTTAVISARAFSFRELADAAGNFRQDNLIGEGGFGRVYKARLPTRVQHAADDADLQGLPVAIKQLDRNGFQGNNEFMVEVLMLSMLHHPNLVSLVGYCAEGEQRLLVYEYMALGSLEDHLLLLRDDGHGSPLPWRTRMKIALGAARGLEYLHESAVIYRDLKSSNILLDQDYAPKLSDFGLAKLLPAPRTTDSSSSSSSSSSSGGGKVMGTYGYCAPEYLRTGKLSVKSDVYSFGVLLLELITGRRAIDASRPDGEQSLVGWAAGMFGDSTRFHELLDPRLVMAIRGRPTASQLKQAVGVASMCLQEHHALRPVMADVVVALSFIANDSPASPPC

SEQ ID NO: 195698 - protein, 70 aa, Zea mays
  Clone ID: MRT4577_11005C.1.pep
NTGWEIRKKKNKTGTPVCPGGGPPIVIRSRFLVELIHQNVWGRVCHSPLLIWEFAPPPAHLHAMEADGVF

SEQ ID NO: 195699 - protein, 132 aa, Zea mays
  Clone ID: MRT4577_110060C.1.pep
DLSRVGNGVLSSLITTDNGQEHQFVMWFGQERRSCLSWLSLVTCLCYYLLVLWVKCHLLYECLLVICVIEYHSSVMKYHNRHHFVLVLLRLRSGRCFSIYGWFVILQVLFLKPFFPSIVVSLGMLQLNEELY

SEQ ID NO: 195700 - protein, 308 aa, Zea mays
  unsure (1)..(308): unsure at all Xaa locations
  Clone ID: MRT4577_110061C.1.pep
MGLQVDRRSQSAGKRARTDGSRREDDWVCPSCKNVNFAFRTTCNMRSCNQSRPADHTAMQTPPHYPTSGGYMGPGTPPSMYLGXGAPPYGSSMFNGPAVTRYGIPQFPGGSAYSYGYGGPIPMGSPYGPMQIAGPTPYSGGTMMTAGGMYGIPMDRYGPIPAGPGPMGTRAGSYSDEDSQKKPAGAGRDNDWECPNCHNINFGFRTVCNMRKCNTPRPENQGSKPDGLRGSKPKTPEGSWKCEQCNNINYPFRTKCNRPQCGAEKPSQTNNANEPAEDQDNQVFVSEPSLWSSTFATPLFRTLSCMPY

SEQ ID NO: 195701 - protein, 111 aa, Zea mays
  Clone ID: MRT4577_110062C.1.pep
GRRRNDQRLGGGCGRALCLAAFASAKSRTSGYNPALIKKQKEFYKNAKLISKYKKTKKQQSQPNNHPEIPVHEDGGDTARYVPKPHNKGKKPTGHSLKEEFEKKPAEEEKG

SEQ ID NO: 195702 - protein, 61 aa, Zea mays
  Clone ID: MRT4577_110063C.1.pep
AAGHLPGAKRKRPDADITGDADAAAAAAAAAAPVAVDEASDAEVEEFYAILRRIRDAFRWL

SEQ ID NO: 195703 - protein, 84 aa, Zea mays
  unsure (1)..(84): unsure at all Xaa locations
  Clone ID: MRT4577_110064C.1.pep
MEAVPEKKKKVAAAPGTLKKKKVPAVPXPLKKKRRNFAEFKVKRLRKKFALKTLRDARTKLIYEKAKHYHKEYRQMYRTEIRMG

SEQ ID NO: 195704 - protein, 222 aa, Zea mays
  Clone ID: MRT4577_110065C.1.pep
MRWPLAISTRRRPLLFVLLIALYTIPRTFSSRLVTLDTVEIFTTHEWFAKPTVAFRCNGANKTYLPDVTEAHTPYTFKGEESWQPLTELPEKKCKRCGLYEEGTFKPDAVFDEWEMCSSDFKGGKYTRFKEGQFNATFLCPNCTASTGHGNPGPSEDLETKKTSIAVIIIVSVLASVLVVTALFGGFKYWQKKKRERDQARFLKLFEEGDDLEDELGLSNEF

SEQ ID NO: 195705 - protein, 251 aa, Zea mays
  Clone ID: MRT4577_110066C.1.pep
MATTTAPVLLVFLVAIATSVAPSPFPILTMAADADNGTTHLSFFMHDITSGASPTAVKVIKGPGAGSTPTAPALGMTFGDTMVIDDPLTEEASPASAALGRMQGFYMLASQTGAALMVCANLLLTSGAHNGSTLAVLGRDDTGQDVREIPVVGGTGTFRMATGYVLWKTPDGINGTDATVQLDVYVTTDGNGTTDAGDADGGGGSPSAGSGSSGSSGGSKSTSGAESRRRRMTGGWVVAVVVAVVGSFWVW

SEQ ID NO: 195706 - protein, 53 aa, Zea mays
  Clone ID: MRT4577_110067C.1.pep
EREAAWGTLFPQVKCVKPERRSVVRCHNTLEDYTIVVPYRGVYTCNSCRQTSV

SEQ ID NO: 195707 - protein, 78 aa, Zea mays
  Clone ID: MRT4577_110068C.1.pep
VMLFHVHEYEPQVAIFLSFYAPTAVPVRALYFVEAVSTVLYGYPCLTPQDSLLNIRAPSAAVSCVQSTILSWLLFWLF

SEQ ID NO: 195708 - protein, 41 aa, Zea mays
  unsure (1)..(41): unsure at all Xaa locations
  Clone ID: MRT4577_110069C.1.pep
MTKLNTPSIVLLVINHYRFETSKELFSFHTRKQRRXHTINE

SEQ ID NO: 195709 - protein, 110 aa, Zea mays
  Clone ID: MRT4577_11006C.1.pep
PPPPPTIFKPNREPKFQIKEFVPPPPLKNPPSSGSKIGPTDGAYYKAQLILGTPGEDLFFCGGEKRMVIYPEFSRLSGRIKKGCQLGSPFCPLFCKCCKGPVVIFRPRLF

SEQ ID NO: 195710 - protein, 101 aa, Zea mays
  Clone ID: MRT4577_110070C.1.pep
TTSCRPYVSVGGKKDRHPDQNHPIKRGDTIKISAINGPFSHSGMLFPGALARSTPGEPDWRSLQSPPSVTTRMTAMPFYTMRSRPLICPDEFCGYCWYLAF

SEQ ID NO: 195711 - protein, 98 aa, Zea mays
  Clone ID: MRT4577_110071C.1.pep
ILPGRRVYQSAAATGRGDNFLARSGPSPTDKVTDDGTGRPASGLLYTRTLPSLFAECSMTTSPVGSKTEMLSRALSGLADVLVAVEADKRGSLLRNRR

SEQ ID NO: 195712 - protein, 37 aa, Zea mays
  Clone ID: MRT4577_110072C.1.pep
VPPPLFYLHGREVGPLEKKSHKTLCFICYKTKKPVLC

SEQ ID NO: 195713 - protein, 62 aa, Zea mays
  Clone ID: MRT4577_110075C.1.pep
EMYELKRSQAFFIGRSVARPTSSSDVVVYESAVLRVASCRVGTVVSFGQLMVYNAQRMKLIL

SEQ ID NO: 195714 - protein, 65 aa, Zea mays
  unsure (1)..(65): unsure at all Xaa locations
  Clone ID: MRT4577_110076C.1.pep
MAVSIELSKEYGYVVXMVLVXYVFLNLWMVFQVGNCIRNYKVYYPTMYAIESENKDATLFXCVQR

SEQ ID NO: 195715 - protein, 46 aa, Zea mays
  Clone ID: MRT4577_110077C.1.pep
SRRAPRGRVADGPVEPLVLALLTGPHQLRLALLSSLISKGRKTPPP

SEQ ID NO: 195716 - protein, 83 aa, Zea mays
  Clone ID: MRT4577_110078C.1.pep
SFPVASSWLGDFIIISHLSDFFVVFGHCHRRHYRRRCHHHVNHLHHHIRRHRFPLSHWLQDHHHHDSHIPHYQCHLIPHHHHH

SEQ ID NO: 195717 - protein, 90 aa, Zea mays
  Clone ID: MRT4577_11007C.1.pep
NHHFFFPFNRLAALTPFVYFRQQFLLLFGQLGPASPASFLTHQQVLPFNQRFVATPPSFLQLRRFLPFAHLALTNPPAFYHQQFMGGAFF

SEQ ID NO: 195718 - protein, 66 aa, Zea mays
  Clone ID: MRT4577_110080C.1.pep
PSRITQVLWSQRDRRMSKTYAASESKQRDRGRSAGSADRRRLKDAGREQSIRGISGCPERPKRDIA

SEQ ID NO: 195719 - protein, 58 aa, Zea mays
  Clone ID: MRT4577_110081C.1.pep
PGDPHNTLHQSIFLHFLSHKCSYYLPAVFKKWSRFNYHFQIVNLYLYHLLLISFIASQ

SEQ ID NO: 195720 - protein, 79 aa, Zea mays
  Clone ID: MRT4577_110082C.1.pep
FPRPIPLLGMAFRMFRGTLALHTGRFHGNGWWKLVAKVGAASTPFNHPGAGGLPPERLEQVFQVFPISFVGAPPLVRGA

SEQ ID NO: 195721 - protein, 66 aa, Zea mays
  Clone ID: MRT4577_110083C.1.pep
RAQQSLHLLHGKALLHQATQPFPEKTWHVSRRSLAEYTNGYISSFLVLTAKSHGELLGGYQTLSGK

SEQ ID NO: 195722 - protein, 108 aa, Zea mays
  Clone ID: MRT4577_110084C.1.pep
SYVVDRRVSVVVFTDTVVFVVGMYTILYQCLSLGMVTTSWMECLDVAVRPLVAFPVHERGHSLVHARDVPFHVGDRYIFDVTSVKCTPAPLLSLSRCWGPTMLPCPRQ

SEQ ID NO: 195723 - protein, 73 aa, Zea mays
  Clone ID: MRT4577_110085C.1.pep
MVKSTTTMGAASCGGGVLPLASLNHISIVCRSVEASLRFYTDVLGLVPIRRPGSFDFGGAWYACRVCIESIYP

SEQ ID NO: 195724 - protein, 251 aa, Zea mays
  unsure (1)..(251): unsure at all Xaa locations
  Clone ID: MRT4577_110086C.1.pep
ATQKIIEEDAGEEEQQHGDGGGXVLPLASLNHISIVCRSVEASLRFYADVLGFVPIRRPGSFDFDGAWLFNYGIGVHLLQSEDPGSLPENKGEINPKDNHISFQCESMVAVERRLKEMGIPYVQRCVEEGGINVDQIFFHDPDAFMIEVCNCDNLPVVPLAAAADQRAPAVLGACKRAAAVGVKQQQQQSSAGGVPSSAAPASSSSRAGWCLLFPLRSRRRRRSAFRRRPRRRKPSGSPRSCRRTFCGGDY

SEQ ID NO: 195725 - protein, 222 aa, Zea mays
  unsure (1)..(222): unsure at all Xaa locations
  Clone ID: MRT4577_110087C.1.pep
MVKSTTTMGAASCGGGVLPLASLNHISIVCRSVEASLRFYTDVLGFVPIRRPGSFDFGGAWLFNYGIGIHLLQSEDPGSLPPEKGEINPKDNHISFQCESMVAVERRLKEIGIPYVQRCVEEGGINVDQIFFHDPDGFMIEICXTCDNLPVVPLAGDQQRAPAACRRAPAAVSTVKQQQQGSVVPASSAPVTTAAAQCMPSAATAAQAIRVAEESSSHISCA

SEQ ID NO: 195726 - protein, 57 aa, Zea mays
  Clone ID: MRT4577_110088C.1.pep
WLGTFGLIYVLDYVPVYVPHYVLVYVLVDVRLVYNVSLRLIYVVEVMPKYDLPEAFN

SEQ ID NO: 195727 - protein, 82 aa, Zea mays
  Clone ID: MRT4577_110089C.1.pep
CGAPGITFASLRRCITARPPSSGSSTCSARRDACGSWLYSSLHSAAAGSWPMRRCLPFLDLTSAAPLMRRARFLPRRRPLLR

SEQ ID NO: 195728 - protein, 146 aa, Zea mays
  Clone ID: MRT4577_11008C.1.pep
MRSPSGARPSSGGGAAADDDFAFYYSFFQDAAAASPLPLALDGAAMPNNRRRKRGGDDDSAAEPIKDGSNNGRKRSIATIITSLAALEAEDHADSAEAADASRRELALLESNADNKSQAMMDYFAKMEGSFDADADSEAAEARSLS

SEQ ID NO: 195729 - protein, 501 aa, Zea mays
  Clone ID: MRT4577_110090C.1.pep
MLAKIPECGSYGIHHAGSSSSAEPEQVHQAEPKVSRRQADGHPVAYGIFNSVDVDGKPPALVSSDSSSCVPLSSHDKEHQTSSLYRGVVQYTADREDDENSSGCTHPSTIENKGCKPQYLGNHRIRKLLASKVRKAARNKICGGIPSKKICGGLSKKGSKLNLCGKKMSTTHQKVQRMIFKKKKLAHRTSFAKEMLTEASGTSFAMEGQNKSCEAENYHVKLRIKSFNIPELFIKVPENATIGSLKRAVMDVVNSIMEGDLRVGVLLQGKDIQDDNKTLCQAGICHDKKLNNIDFTLECEREREPPSGVIIQEQMDFLTTDMVEPLARMKCEEPFPEADVGDDSQQPRAPYRSRSLSDLYSVHCPVQMASQDTSVSSQAIVPVSPAPSDVGALAIVPLCKSKGSEVGQRRMRRPFTVGEVEALVGAVEQLGTGRWRAVKTLAFDSIDHRTYVDLKDKWKTLVHTASISPQQRRGQPVPQELLDRVLLAQAYWSQQQQQARL

SEQ ID NO: 195730 - protein, 156 aa, Zea mays
  unsure (1)..(156): unsure at all Xaa locations
  Clone ID: MRT4577_110091C.1.pep
EEHQLDTPEVFKRWKIYADQAGAVSMNDYLVVNDRQCEVVQAYTAETVIHEPCPXGSWADGIVAHKVPEDVVPSXRKGGIACAHHTAYPVDCISDDGCESLQTADDDTNDGVTLXMTTVIVSTTGERXESREDLVATVHAAMMEEHICAVKDGALQ

SEQ ID NO: 195731 - protein, 117 aa, Zea mays
  unsure (1)..(117): unsure at all Xaa locations
  Clone ID: MRT4577_110092C.1.pep
PTRHTTAISSDMPRYDDRRAPYGLPRLNNPXSSSSRTESRDHDLDADCSQRRYDHSDAGXHASRPDAXPLDFVTRTQATIDPDHILAPANQADHDQMRLKXLNRLCKTLKALKMNNL

SEQ ID NO: 195732 - protein, 150 aa, Zea mays
  unsure (1)..(150): unsure at all Xaa locations
  Clone ID: MRT4577_110093C.1.pep
RCSLRRRRPSQMVPSGSAWHRPHRVPCLSPLYGXPPSYLTGEFPGDYGCDTVPLSVHPQTFFKIREVEVIHFRWDMLAVLGCVLPELLARNSVKFVDAGWFKADSLIFSXGGLDCLGKPTLIFVQRILAIWGCQSVLXMGAVQXYCIAGC

SEQ ID NO: 195733 - protein, 230 aa, Zea mays
  Clone ID: MRT4577_110094C.1.pep
MPPKKAPVRGVALQPLDTNQDALSPQEARNQKRNDDFHYGNFIFDDASPLAAKLQAIPWPQSYKPPQLPMYDGHSDPKQFLMSYEAIISSYGGIITSWQKFNDMLITSFQGFQTKQITAQALFQCTQDQEEYLQAYVRRFLHLRAQAPIVPNEIVIEAMIKGLRPGPTALYFARKPPQTLEKLLQKMDEYIRANNDFCQRREEAYRFSEMTRGFGGRLHPMHVRSIHNFN

SEQ ID NO: 195734 - protein, 67 aa, Zea mays
  unsure (1)..(67): unsure at all Xaa locations
  Clone ID: MRT4577_110095C.1.pep
MSDRAQMSWHAYVGDHLMCEIDGQYLAAEDIVGHDGATCAHNRAXFPEFKTDDMANIMNDFDEPMHL

SEQ ID NO: 195735 - protein, 43 aa, Zea mays
  Clone ID: MRT4577_110096C.1.pep
KNFDYRGCVLLCSRWGIYFKTAPVFFFLKFERIICFLIVFLFF

SEQ ID NO: 195736 - protein, 184 aa, Zea mays
  Clone ID: MRT4577_110097C.1.pep
IEAPVKTNKIPRQVPEQAWYMNPAFTILIGGILPFGAVFIELFFILIGGILPFGAVFIELFFILTSIWLHQFYYIFGFLFLVFIILIITCAEITIVLCYFQLCSEDYLWWWRSFLTSGSSAIYLFLYAGFYFFTKLQITKVVSGMLYFGYMLLASFAFCVLTGTIGFYACFCFTRLIYSSVKID

SEQ ID NO: 195737 - protein, 191 aa, Zea mays
  unsure (1)..(191): unsure at all Xaa locations
  Clone ID: MRT4577_110098C.1.pep
METKPVXITCLKTLLIIYSFVFWITGVILLAVGVWGKLTLGTYISLIAENSTNAPYVLIGTGTTIVVFGLFGCFATCRGSPWMLKLYAMFLSLVFLAELVAGISGFVFRHEIKDTFLRTYTDAMQNYNGNDERSRAVDHVQRSLSCCGVQNYTNWSSSPYFLDHGIPPSCCMNETDCNPLDLHNLTVAATK

SEQ ID NO: 195738 - protein, 184 aa, Zea mays
  unsure (1)..(184): unsure at all Xaa locations
  Clone ID: MRT4577_110099C.1.pep
ISVPLXFVGSYXGFKQPAIEAPVKTNKIPRQVPEQAWYMNPALTILIGGILPFGAVFIELFFILTSIWLHQFYYIFGFLFLVFIILIITCAEITIVLCYFQLCSEDYMWWWRSYLTSGSSAIYLFLYAGFYFFTKLQITKVVSGILYFGYMLLASFAFCVLTGTIGFCACFWFTRLIYSSVKID

SEQ ID NO: 195739 - protein, 49 aa, Zea mays
  Clone ID: MRT4577_11009C.1.pep
CFFPFLSQLCSETNFTCPGFYLIVSGVAKVLSCNGEAQPHLTVMLPIPL

SEQ ID NO: 195740 - protein, 513 aa, Zea mays
  unsure (1)..(513): unsure at all Xaa locations
  Clone ID: MRT4577_1100C.1.pep
MDSTTTAPLLQPSAASSKEGPGPAPAQHGEGSRELEAILADASKPWAWRAWEGARLELPLLLRVALPAVAVYMINFVMSMSTQIFCGQLGNLELAASSLGNTGIQPLAYGLMLGMGSAVETLCGQAYGAHKHRMLGVYLQRSTVLLMATAVPLTVVYAFSERILVLLGESERISRAAAVFVYGLIPQIFAYAANFPIQKFLQAQSIVAPSAYISVATLALHLGLSWVAVYRLGLGLLGGSLVLSFSWWVIVAAQFGYIVTSARCRDTWXGFTTQAFSGLGTFFKLSAASAVMLCLETWYFQIIVLIAGLLKNPELSLDSLSICMNVNAWVFMISVGFNAAASVRVGNELGAGNPRAAAFSVFMVTSLSFIAATVCAVVVLCLRDQLSYFFTGGEAVARAVSDLCPLLAATLVLNGIQPVLSGVAVGCGWQAFVAYVNVGCYYVVGVPLGVFLGFYLDLGAKGVWSGMVIGGTLTQTLILLWVTVRTDWNKEVENAKARLDKWDDKKQPLLVED

SEQ ID NO: 195741 - protein, 79 aa, Zea mays
  Clone ID: MRT4577_110100C.1.pep
VLDFPYPHLFGLPPRDYFGRLGHPQKTGRWVRIQWGRRVFLWRGTRWGGVLKCDSLPPCLGNPAPSGVEMGEPDPLISL

SEQ ID NO: 195742 - protein, 81 aa, Zea mays
  Clone ID: MRT4577_110101C.1.pep
MRQRIAIHIGQAGTRVGNPCCELYCLDHVIQDDGHRAGDKTIGGGDEGSNTFFRETGAGKQEPRAVIERPTNDALGQTTTG

SEQ ID NO: 195743 - protein, 42 aa, Zea mays
  Clone ID: MRT4577_110102C.1.pep
VERIHQLWDHTDNEALSVWYDCGGGGTIGRRCPTTAAPDARE

SEQ ID NO: 195744 - protein, 42 aa, Zea mays
  Clone ID: MRT4577_110103C.1.pep
LLIHVLVVLVLPRTASQDNSPAAREIIHSTPATIMRLSTTFN

SEQ ID NO: 195745 - protein, 227 aa, Zea mays
  unsure (1)..(227): unsure at all Xaa locations
  Clone ID: MRT4577_110104C.1.pep
IGEERQPRRRSSSXITPSRRQKLASLPTPTTGRRSRRRPHSRXRVSCEISPSNRSXSAPSSPPPTVLRSGRREDPAAACRXNTFVAPNVRARLHPRSXSMTKMGRRSRRRHRGRGRVSCETSPSNRSRSAPSPPPPIVLRSGRKEDPVAARRPITPSRCPKPTRGTRSRRRPHGRGRVSCKISPPNRSAPQPPPIDLRSGRRKIEWGVFAAIFLLCLYGRSQGCLVL

SEQ ID NO: 195746 - protein, 150 aa, Zea mays
  Clone ID: MRT4577_110105C.1.pep
MAAEQQHQLDLPGFRFHPTEEELLEFYLKQAARGRKLKFDIIPTVHLYRHDPWELPSLARHRHAVRVPQHRLPRRLHVVVGDRDGARGRRLALTVSCDEHEERGGGEESAAAGPLPDAAAEPTDGELVVCLLRQRPQLLTKIHTIQQLYM

SEQ ID NO: 195747 - protein, 69 aa, Zea mays
  Clone ID: MRT4577_110106C.1.pep
FFLSWGGTPCPPSFLGGKRERINKKMTMKKKNQYKKGEKKKKNKKKKKKKKKKKKKKKKKKKKKKKKLE

SEQ ID NO: 195748 - protein, 86 aa, Zea mays
  Clone ID: MRT4577_110107C.1.pep
PKSPQSNSFICKAKAHGHSCRPKLCPCPARWAARPKSYQGGARPPAAQGSFPLISLLGTRDLYLFFSFFHGSELKKGRHGSAAFRG

SEQ ID NO: 195749 - protein, 91 aa, Zea mays
  Clone ID: MRT4577_110108C.1.pep
VFVFFFLFFFVVFFFFFFFFFFFFFFFFLNTFNLGRLKIFHLKKLFPPLFGCGGKKKLILSHFYWPPLPLHIYKQGEIWGNLEKNKRINTL

SEQ ID NO: 195750 - protein, 48 aa, Zea mays
  Clone ID: MRT4577_110109C.1.pep
LCYLLLLHVFLTRQLFLICSQAPIASFFSSLPFINESFNLRKPISIIL

SEQ ID NO: 195751 - protein, 50 aa, Zea mays
  Clone ID: MRT4577_11010C.1.pep
LFAISPSLKRYASMSVSIGVLTVHDSAGEMKPGAAVRSKLTSVPGDLKST

SEQ ID NO: 195752 - protein, 277 aa, Zea mays
  unsure (1)..(277): unsure at all Xaa locations
  Clone ID: MRT4577_110110C.1.pep
PPPPPTPTPTPGPPSGGGVASIITEDLFERMLKHRNEPDCKARGFYTYDAFITAADAFRGFGTTGSTEVQKRELAAFLGQTGHETTGGWPNAPDGAFTWGYCYKEENGATADYCDMTGEYAQWPCVAGKKYFGRGPIQLSYNYNYGPAGEDATIAQDLLSNPELVASDAXSISFKTAIWFWMTAQPPKPSCHDVATEQWTPSAADKAAGRLPGYGVITNIINGIECGKGYNEKVANRTFFYTSYCDILGISYGDNLDCYNQRPXSTAHPXCWNRCSR

SEQ ID NO: 195753 - protein, 91 aa, Zea mays
  Clone ID: MRT4577_110111C.1.pep
HSYLLEIGAIGYGSALVLITSSDNNSALKSIEPLRLRMSPKKSEIILAAGVGATTIGSSSEKVSNDDLLCHGLAPTNSESDAHRPGGASTV

SEQ ID NO: 195754 - protein, 77 aa, Zea mays
  Clone ID: MRT4577_110112C.1.pep
LLLRDLGSHSCFAVLCSPMSSNVYCVPYFLYLVPYVGDMLPLENSNLKQCVSVPYTPQEWLVIPPMNALDVCDSHPP

SEQ ID NO: 195755 - protein, 89 aa, Zea mays
  unsure (1)..(89): unsure at all Xaa locations
  Clone ID: MRT4577_110113C.1.pep
RFKKKKPQENLKKDRHQPKKKPQIKEVXLMRGNPFINITNPGPFSFKKRWAPHLVFKNQARGKPKPPKRFITAPLRSDFPRKFFQRYIK

SEQ ID NO: 195756 - protein, 540 aa, Zea mays
  Clone ID: MRT4577_110114C.1.pep
MEVEPARRDAAALDLELLQLAELAPGALRENSIADALYAQWLVLPETTKLVKSLIEDAKTGAVLNVAGSSTSTNAASSSSLPSMFPAGSAPPLSPRSTSGSPRVMRRGSGAGPSSLGSPLKLVSEPVREVIPQFYFKNGRPPTKDLKEQCLSRTDHLFFGGGGLQVQEFRSVTKDICKLPSFFSSVLFKKIDVECTRTVSRDAFVEYWMNDNKVTMDMASQIFEILRKPGCTYLTQDDFKPVLKELLATHPGLEFLQGTPEFQERYAETVIYRIFYSINRSGNGHLTLRELKRGNLIAALQQLDEEEDINKVLRYFSYEHFYVIYCKFWELDADHDFLIDKENLIKYGNHSLTYRIVDRIFAQIPRKFTSMTEGKMGYEDFVYFILSEEDKSSEPSLEYWFKCIDLDGNGILTFNEMQFFYEEQLHRMECMAQEPVLFLDILCQMIDMIGPENESYLTLRDLKRCKLSGNIFNILFNLNKFMAFETRDPFLIRQERENPTLTEWDRFAHREYIRLSMEEDGEDASNGSGDVWDESLEAPF

SEQ ID NO: 195757 - protein, 69 aa, Zea mays
  Clone ID: MRT4577_110115C.1.pep
GHCRLTADSVTSKATEKFYCADLIQYLSVILLGKHFCFAGKLGREVGGGALQFQGNNLSSHQRSTPFVF

SEQ ID NO: 195758 - protein, 193 aa, Zea mays
  unsure (1)..(193): unsure at all Xaa locations
  Clone ID: MRT4577_110116C.1.pep
VFSVREVIPQFYFKNGRPPTKDLKEQCLSRTDHLFFGGGGLQVQEFRSVTKDICKLPSFLSSVLFKKIDVECTRTVSRLHDFLNLFXREVLQLLAYLSPTSVRSNMHYSFXWDAFVEYWINDNKVTMDMASQIFEILRKPGYTYLTQDDFKPVLKELLATHPGLEFLQGTPESQERYAETVIYRIFYFIYRSG

SEQ ID NO: 195759 - protein, 144 aa, Zea mays
  Clone ID: MRT4577_110117C.1.pep
NFRRFKCIDLDGNGILTFNEMQFFYEEQLHRMECMAQEPVLFLDILCQMIDMIGPENESYLTLRDLKRCKLSGNIFNILFNLNKFMAFETRDPFLIRQERENPTLTEWDRFAHREYIRLSMEEDGEDASNGSGDVWDESLEAPF

SEQ ID NO: 195760 - protein, 41 aa, Zea mays
  Clone ID: MRT4577_110118C.1.pep
KKQPLLLGFKKKKKKKKKKKKKKKKKKKKKKKKKKKKKTRG

SEQ ID NO: 195761 - protein, 66 aa, Zea mays
  Clone ID: MRT4577_110119C.1.pep
YKFYWPGLFINFFLRFNRISQGISWKPLIFGGPFILISFKGGPHRGVTNQVLGNWVFGIKRQGAGV

SEQ ID NO: 195762 - protein, 74 aa, Zea mays
  Clone ID: MRT4577_11011C.1.pep
IQLTSYNSASGYNLQFTIFGLQAYCVNEKSKCIPLQLVIYLVTVLILRLCCKLLCILYHHWYHTLLYASCKLTI

SEQ ID NO: 195763 - protein, 173 aa, Zea mays
  Clone ID: MRT4577_110120C.1.pep
MFIRIYLQYSLHKPAGVLMASENSPSEFAKIVQSKQTRQARLCGADPELLSSLAGSDAEVMVTIPNEQLEHVAEFQEEADLWVVANVARLLQLERAGGRKPADQPLSSDGLRTSSRLQPPSSSEFSSLAFGTAPPSGFTPSDGGGFGTPPGSFNGTGRPGSPGRPRGTQSPIG

SEQ ID NO: 195764 - protein, 183 aa, Zea mays
  unsure (1)..(183): unsure at all Xaa locations
  Clone ID: MRT4577_110121C.1.pep
MRLQYAWNAIPFILLFCAISTNKIFSNNKPFSFTIVSARSLLEIDPNSGLVQDKVKVGQTLEEDTQNIVNMTMNVSSGWSIVKEELILPARGAPFNSCHASTIVQIEEDNFLVAYFGGSREGAPDVKIWLQRYSDGHWHPPVVADEQDGVPMXNPVLFQLPSRELLLFYRIGQEVXKWSGAMK

SEQ ID NO: 195765 - protein, 65 aa, Zea mays
  Clone ID: MRT4577_110122C.1.pep
RPIDYQYRCSSRSISIGAKVQGGPVHRRRVGSCSASVQTFSSSLQVRDLWRCVGVMRSTDDMVER

SEQ ID NO: 195766 - protein, 58 aa, Zea mays
  unsure (1)..(58): unsure at all Xaa locations
  Clone ID: MRT4577_110123C.1.pep
NVSAASAAAPGPKSASAGAGKGAEGQSVVRRLQSELLALLMGDDPGVSAFPXGDNMLH

SEQ ID NO: 195767 - protein, 60 aa, Zea mays
  Clone ID: MRT4577_110124C.1.pep
MDINLYFAYLQHVACSSADGRTLLESSKTFLDKGKLEDAVSYGTKVRFVILLLHPYVKNS

SEQ ID NO: 195768 - protein, 59 aa, Zea mays
  Clone ID: MRT4577_110125C.1.pep
SNTARSADAHQASAIHQGVPFCPPPYLSMERRHGFFAALREEVARGLSPSRSRLMPDAT

SEQ ID NO: 195769 - protein, 559 aa, Zea mays
  Clone ID: MRT4577_110126C.1.pep
MHRFAADRARRAVAASLRGAASRAAAAPSRHAPAPRHPTSPVGAAAPVAAAAMARAAMSTAVAGVPPPVSLDTISPKVPPVSLDTINPKVLKCQFAVRGEIVTRAQKLQQELQRNPESLPFDEILYCNIGNPHSIGQQPVTYFREVLSLCENPALLDKSETHALYRSDAIERARKILDKIPGRATGAYSHSQGIKGLRDEIAAGIAARDGFHASADNIFLTDGASPAVHMILQLLIRSEKDGILCPIPQYPLYSASIALHGGSLVPYFLDEETGWALEVDELKKQLEEARSKGISVRALVVINPGNPTGQVLTEENQKKIVEFCKNERLVLLADEVYQENIYVEDKQFHSFKKIARSLGYTDDDLPLVSFQSISKGYYGECGKRGGYMEITGFSPQVRDQIYKMASINLCSNITGQILASLVMNPPKAGDESFESFRLERDGILSSLGRRAKALEEAFNSLEGITCNKAEGAMYLFPRLHLPQKAIGAAQAAGTAPDAYYAKRLLEATGIVFVPGSGFGQVPGTWHIRSTILPQEDKIPGIVSRFKEFHDKFMDEFRDY

SEQ ID NO: 195770 - protein, 76 aa, Zea mays
  Clone ID: MRT4577_110127C.1.pep
KAIGAAQAAGTAPDAYYAKRLLEATGIVFVPGSGFGQVPGTWHIRSPILPQEDKIPGIVSRFKEFHDKFMDEFRDY

SEQ ID NO: 195771 - protein, 99 aa, Zea mays
  Clone ID: MRT4577_110128C.1.pep
KKPATHLNTETEPTKRRTTQQKQEERRRRIGVDGKRQHTNKAPATLWTPPTRPPPPHRASFSRGGPNSLAQADELHRRHGLSRRVPHLIPRLRLPRYGP

SEQ ID NO: 195772 - protein, 106 aa, Zea mays
  unsure (1)..(106): unsure at all Xaa locations
  Clone ID: MRT4577_110129C.1.pep
MGLLLAICSGDNSHSDAMVQHDPSSCSKVRDVALRAIHWLCFSTPXTPTSIISDGFLDRVLSLLRTVDTTLQHCALKAMHLLCPALEEIMKAMGDAAFMLELVSAL

SEQ ID NO: 195773 - protein, 181 aa, Zea mays
  Clone ID: MRT4577_11012C.1.pep
LGRLKKAFDRKPGLSNLFLNPQFAQEIIYNQPAWRKVVCLPINNGVSPPGKSPNLAYFDSYPRDRVPSNLVQAQREYFGGPPYKRVDKPGFFPPEWFKIGGNISNNLLIAQRMACPVLTTPVGKEISSRNLFIDFCKLIIYMNKIKAPTAFVWAKKKKKKKKKKKKKKKKKKKKKKKLERG

SEQ ID NO: 195774 - protein, 59 aa, Zea mays
  Clone ID: MRT4577_110130C.1.pep
FGFLLLVMALCRLLLGRTDPRISVLGRSYQRGMLAITHGYACSLCSCESLPSFEACPPA

SEQ ID NO: 195775 - protein, 168 aa, Zea mays
  Clone ID: MRT4577_110131C.1.pep
TSEKLSLHNGEPLGPDDSTRYRSIVGALQYLTLTRPDLSFAVNKVCQYLHSPTTDHWTAVKRILRYLRYTLHHGLKISKSPSLLVSAFTDADWAGDIDDRRSTGGFAVFLGSNLVSWSARKQPTVSRSSTEAEYKAIANATAELMWIQSLLKELKISCPPTARIWCDN

SEQ ID NO: 195776 - protein, 64 aa, Zea mays
  Clone ID: MRT4577_110132C.1.pep
GVPGQFKKPKNFPIKHRNFSKTQTLKKNGVNTGQAWWPSRFKFMLQLQPIKRAAQIPPKHLQGV

SEQ ID NO: 195777 - protein, 106 aa, Zea mays
  unsure (1)..(106): unsure at all Xaa locations
  Clone ID: MRT4577_110133C.1.pep
DQASAHSSGRFAFAMVLFMAGAGLIARADGAVAQHGMWSMITRPMFHSMLSHRGDSGCQGAFYTYDAFIEAVSKFPGFGTTGDXQTRMRELAVFFGQTFHDTTGGW

SEQ ID NO: 195778 - protein, 95 aa, Zea mays
  Clone ID: MRT4577_110134C.1.pep
HKHPSVRGRSVHPINISSVSHTIEAFEIGERFTCQKASPCRGWKVVKMAMASSSSESGYSIIQVPCIFTANCTSLVIKFLRNFVQEKTLPLKMYL

SEQ ID NO: 195779 - protein, 77 aa, Zea mays
  Clone ID: MRT4577_110135C.1.pep
LVPDKATNTLFIIDSGFRMTRCDLGNNRATIARSGTKEFMEALAAGADVSMIGQFGVGFYCAYLVADRVVPTTKHNY

SEQ ID NO: 195780 - protein, 254 aa, Zea mays
  unsure (1)..(254): unsure at all Xaa locations
  Clone ID: MRT4577_110136C.1.pep
MDTWHIFLGSILFAIPLILLLRGRKGGRLRVPPGPPSLPVLGSVVWLTNSLADVEPLLRRLFKRYGPIVSLRVGSRLSIFVADRRLAHAALVERGATLADRPALPSLKLLGENDNTITRASYGPVWRLLRRNLVSETLHPSRVRLFAPARSWVRRVLAEKLRDESSSGGAAVVETFQYAMFCLLVLMCFGERLDEATVRAIAAAQREPLIYRSRKMAVFAFLPSVTKHLYRDRLQTLHXMQRRKXDLXVPLITL

SEQ ID NO: 195781 - protein, 75 aa, Zea mays
  unsure (1)..(75): unsure at all Xaa locations
  Clone ID: MRT4577_110137C.1.pep
AIPPPPKMRRXRPARXAPPPKRXSAPENHEKKIPEPCRXQEAGCPRXQPFXQNSGGDGGLAQLSRRPPPRYSGVC

SEQ ID NO: 195782 - protein, 139 aa, Zea mays
  unsure (1)..(139): unsure at all Xaa locations
  Clone ID: MRT4577_110138C.1.pep
PILGALRAPYKLIPALQRCSSEALSXGSRTCSFCTFSYTYKECALIVAPGHSVVSSSPSTQVGEDWLHSSSQGSRPERRGLKIIGSQHHIGVAPKFFDEPGRLLDDAKREICNHSCIGLYLEELYGWAGRAGRHHHYFL

SEQ ID NO: 195783 - protein, 344 aa, Zea mays
  unsure (1)..(344): unsure at all Xaa locations
  Clone ID: MRT4577_110139C.1.pep
MRRGSAAAGAPGGGGGVRDSWDGRYGLVVCTVSPACAXSKYRRFYDVKGDGVTSTAXHPLPIERMPGAAPSAHADAFYKPDSDYLLVDGXIRRHXYRLVLASCYSLYCXNXENHEGKEFSVFDXDYVVFQSPYNKLVQKSFARLYYNDFLRNCSTVDGESREKLAPYAGLSSEESYQSRDLEKASQQFAKNLYESKVQPTTLIPKQVGNMYTASLYAALASVIHNRHETLAGQRIVMFSYGSGLTSTMFSFMINEGHHPFSLLNIANILDISKKLKARHVVPPEKFVEALKLMEHRYGARDFVTSQDTSLLSAGTYYLTHVDSKYRRFYDVKGDGVATAMSNGH

SEQ ID NO: 195784 - protein, 56 aa, Zea mays
  Clone ID: MRT4577_11013C.1.pep
TPSTLIAQIEIRQFTCHANHSSCSEVASSASTTLAKDLTVISWIVITLEKLNLRGV

SEQ ID NO: 195785 - protein, 101 aa, Zea mays
  Clone ID: MRT4577_110140C.1.pep
SMHNSFTPPRRYASKPAAANPDPLRIESSRVVDPCNPYVSASRFAVDLHSPRRDAVNPRWLSVSRLVLCLCDEMLAGGQHMRLTDSARLFALNDSRFVLFM

SEQ ID NO: 195786 - protein, 543 aa, Zea mays
  unsure (1)..(543): unsure at all Xaa locations
  Clone ID: MRT4577_110141C.1.pep
MGKQGPCRHCGVTSTPLWRNGPPDKPVLCNACGSRWRTKGSLANYTPMHRNDNIDDDEPRVSKLKPPTSKLKSQKKKTNHIIMENGPFSSQNFRKMGDDDPSYRSSSGSAVSYSGSCAPYGAADASEMTGSAQSHAWESLVPSRKRSCVTRPKPSPVEKLAKELNSIMHEEKLYYLSESSEEDLLYHSETPIGSFEIGSGSVLLRHPNSKSLEEESKTSSIPADNKSYITSESYSDSASFVVHSGNKAAINLNLPTARSKKSPLHMEDNARRDKLHYENQHVLESVDSPLVSVDLEDVINYTNFMKYLTKEDRRQLLKFLPPVDSLTPPESLRSMFSCIQFSDAIDSYQMLLREGILDPSLCGDEEWKKVKTLALTNLTKCSWLECYKXRKRELKKPGEWGASVDRKALPSLXKPLKRPRDTHFQSDAELDGTMRSPLRVLKSGALALQFESSSLPKSSYATEDSTCTGGAPNLFMLPLEKLPLLVPSQYAVSDQDLLLEIPLNARHPEAELLCQPSQLMSSITSSSTSMGGVAEGEGYLKQP

SEQ ID NO: 195787 - protein, 134 aa, Zea mays
  Clone ID: MRT4577_110142C.1.pep
DVDGAFMKNLEKKVHPVHGTVVVNLHSDSELPDSEAEGNARFQSILPMGRHVSQVCQAYKQHFGLAFTAAVPWLCNITLVACRDKGIASGARLGLSHRDFVLGKLLSKSDTVERALDLPFPCLPYIKNGFTLVH

SEQ ID NO: 195788 - protein, 437 aa, Zea mays
  Clone ID: MRT4577_110143C.1.pep
MDGQAPPLLDAVVLEPLAVGDELHPRRPVEVEDAPAAAPPSGMDGQVPPLYNVTRDPLTVSDELQPTGEVVDDALLVAPDIVKGEVMEDDILPVATDIINDAASECPEAGSDGVVLTDELRNRIVKQVEYYFSDENLPTDEFLLNYVKKNNKGFVPIEIIASFRRMKKLVQDLSVIEAALRTSSKLVVSSNGKRVKRLHPLPHKELKDSKKSTVLVENLPPDFSMESIQEKFATVGKVVNITINDPESVKEFSTAKKPDFNLSFKAHVLVEYEAVEAAEKAVTALSDESNWRTGMKVRLLSKQSVMGPGKYKKPSKENQDAVSKMIDQNQHSKEDQLKTLEKISGADAVGITKDRDNLKPVFITETEHQDQKPNARGRKGWYKGQGQMQQNANKQGSCGSESLNKPISGPRMPDGTRGFTLGRGRSLPLQKSEKAEE

SEQ ID NO: 195789 - protein, 65 aa, Zea mays
  unsure (1)..(65): unsure at all Xaa locations
  Clone ID: MRT4577_110144C.1.pep
FKVQRPVCMIYSSSSVEEVFYRIXNASWXVIYTKRQLVQWYIAXMHKAGXFFEALENLSALKKAF

SEQ ID NO: 195790 - protein, 77 aa, Zea mays
  unsure (1)..(77): unsure at all Xaa locations
  Clone ID: MRT4577_110145C.1.pep
RPAAWCVWVRIAGRGGSPSSSPATPVKLVWVHMSRSSFRADVGSCLIGVPCELIXIXDVFGNNSELLRHHNPVHGNV

SEQ ID NO: 195791 - protein, 131 aa, Zea mays
  unsure (1)..(131): unsure at all Xaa locations
  Clone ID: MRT4577_110146C.1.pep
RPQXYTLNTINTHPNPAASPIAREXAGSTHTKNSALNGHTQNGHFSFPKHMAGLHPRXFQGSHSRIPPSQTIPERPCPFTRFHSQXNHNPEKXNGPLTHPSPHKTKXSLAIPLALQKVXALLPMPSRAPEP

SEQ ID NO: 195792 - protein, 125 aa, Zea mays
  Clone ID: MRT4577_110147C.1.pep
MATTTKTAAAAITAILLGATLLLLASPAVVRAQQPGNPCPTSAVADLKVCAEVLVLLKLRINVPQGQQCCPLLGGLVDLDLAACLCAAIRLNALGVPVNLPLDVPLVLNYCGRNASAVPGSNCPF

SEQ ID NO: 195793 - protein, 78 aa, Zea mays
  Clone ID: MRT4577_110148C.1.pep
GGSHHIELNKLHVYLVSAPVSRNKREFPMQSWSRNLLDYHTDGMIFRSLVTNTLSLLIYLYTFVSILSNIEEIKKFTF

SEQ ID NO: 195794 - protein, 524 aa, Zea mays
  Clone ID: MRT4577_110149C.1.pep
MAGGQLNVLTTLDQAKTQWYHFMAIVIAGMGFFTDAYDLFCIALVTKLLGRIYYSDPTSKDPGSLPPNVSAAVTGVALCGTLAGQLFFGWLGDKLGRKSVYGFTLILMVLCSVASGLSFGHTPKGVIATLCFFRFWLGFGIGGDYPLSATIMSEYANKKTRGAFIAAVFAMQGFGILFGTIVALAVSAAFRNAFPAPPYFVDAQASLVPEADYVWRVILMFGTVPAALTYYWRMKMPETARYTALIARNTKQATADMAKVLKKEIEKEDEQVERQVVGADTWGLFSAQFLRRHGLHLLATSSTWFLLDIAFYSQNLFQKDIFTKVGWIPPARTMNAIEEVYRISRAQALIALCGTIPGYWFTVGLIDIVGRFWIQIMGFFMMTVFMLALGVPYEHWTKASNHTGFVVLYGLTFFFANFGPNSTTFIVPAEIFPARLRSTCHGISAAAGKAGAIIGAFGFLYAAQDPKKPDHGYSPGIGIRNTLFVLAGTNFLGMLMSVFVPESKGMSLEEISKENVDDEAEAEV

SEQ ID NO: 195795 - protein, 488 aa, Zea mays
  Clone ID: MRT4577_11014C.1.pep
PIHLRPRPTDVIDRDRIKALRDEMKRAGFEESTDVLVSLMRAFSKEGDIKETEATWHWLLRSGCELPAQAYICRMELYARTGEPMKSLEMFKEMKNRNIPPNVASYHKIIEIMTKAREIEIAEKLMDEFVESDMKHLMPAFLDLMYLYLDLDMHEKLEHTFTKCLGRCRPNRILYTIYMESLVRIGNVSKAEEIFDEMHKNGMIGTNAKSANILLRGYLLAENYQKAESIYELMCKKKYDIPVESLEKLQSGLLSSKKVVKPPKPVSMKLDEEQREILIGLLLGGTQIESHAQKGVYIVNFKFQEDSHAHSALRVHIHERFFEWLPSACRSLNRESEIPYRFSTIPHAHFGFFADQFFQKGQPVLPKLVHRWLSPRVLAYWFMSGGVRLQSGDIVLKVSGGDTGGVERIVKSLQAQQSLACKVKRKGRFFWIGFQGCNADSFWKIVETYVLDSFASSTEESHNVGSDGLQDYTYYESDTQRHGRESEE

SEQ ID NO: 195796 - protein, 137 aa, Zea mays
  Clone ID: MRT4577_110150C.1.pep
GRQWRGRSTMEGTVQTGDRFTKLRVGETGRKVRVFWSNGQPFTHFFYGGIFERAPGGAARRSKEGGKKINVARGPKKRGDNWESGGAKMDFQESQGDKLGNSFSFPFPMEAKLGNYSKGEANGATDHLSYNQGCGGS

SEQ ID NO: 195797 - protein, 92 aa, Zea mays
  unsure (1)..(92): unsure at all Xaa locations
  Clone ID: MRT4577_110151C.1.pep
RFVETDGKGFGRVRGYEIGKKPFKLTPFXEVFSTPPWMGRIYXLKPPKNRVRGKLKKFKASAKTSPPLSAGRKNPWQLIKFPIVPFSLYFVG

SEQ ID NO: 195798 - protein, 67 aa, Zea mays
  Clone ID: MRT4577_110152C.1.pep
LLPRALGGRFRVARERDLGERWAGGPGTNLLSAFIGHVAQVPAELLAADSQTPFPKTKAPDLGRHFL

SEQ ID NO: 195799 - protein, 67 aa, Zea mays
  Clone ID: MRT4577_110153C.1.pep
HASADAAVHASEETCDCTHSPGWARLHHGRHKHGARATSSGLRINLVLSCRNCELTEMNKYHNDVAS

SEQ ID NO: 195800 - protein, 117 aa, Zea mays
  Clone ID: MRT4577_110154C.1.pep
YEILPVCQLQIPGMSTETKIKNTRCHLPLFKLLVLRLILIHNTSQQFTAEIAKCDKGSWGTTPSFHRSRLDRFLCSKSRFVRCNLSADRLSIKTLFFFFFFFFFFFFFIRTCLLLVP

SEQ ID NO: 195801 - protein, 62 aa, Zea mays
  Clone ID: MRT4577_110155C.1.pep
VSCRPSSRPSPPRGGAHRRSSRVQTRSGDGRRICGSLPPAWSSACSVSSLASPSTGTSRHRA

SEQ ID NO: 195802 - protein, 47 aa, Zea mays
  Clone ID: MRT4577_110156C.1.pep
MLDVDVANDDDLDIGLYLTICRRSTLTSQVTEAIFNPYTREPHTAPT

SEQ ID NO: 195803 - protein, 39 aa, Zea mays
  Clone ID: MRT4577_110157C.1.pep
MSKAFAKSLSQLNKALVRRLKALVVVTRAQPPAPARPTT

SEQ ID NO: 195804 - protein, 132 aa, Zea mays
  Clone ID: MRT4577_110158C.1.pep
SHVFITILLCRKRKIGYPNSGYPYPTRISGYLPGSTRSISDPNPKLYYPGITRIRPEYKNTRIRIRKMVPNEYPYPVPVSGTLPVFTPTTVWAAAATTPRQNHVAAAARKASPRVCCAAARKANRLGCGCYY

SEQ ID NO: 195805 - protein, 141 aa, Zea mays
  Clone ID: MRT4577_110159C.1.pep
WLSFFLLFYTFLQRRGEKNPRAGGTRAGKKKRQKKRTGRPRQGPTGPGRRTSPPERQGNYSPAPARPQPFPVGKRNTPTITHNKQPAREKKKPGAPNERANTHKLKGANRRGPRRETNQTNCINETANPPGEKPCGPAAKK

SEQ ID NO: 195806 - protein, 36 aa, Zea mays
  Clone ID: MRT4577_11015C.1.pep
PRVRPHVRPLLRPLVRTHVRVLTFIQVSLIIFLHAQ

SEQ ID NO: 195807 - protein, 67 aa, Zea mays
  Clone ID: MRT4577_110160C.1.pep
VTRCHAGPLIIPLPSVLGQIPVWIRSTGHYPAASVEDKPVSFLRRICMKACPFSMLSAPLTIFRTRW

SEQ ID NO: 195808 - protein, 216 aa, Zea mays
  unsure (1)..(216): unsure at all Xaa locations
  Clone ID: MRT4577_110161C.1.pep
APREPLLLPPPFLPWLASPALYLQPLLGPCSFLVPAXXPXXPAAAPPLXPXXPXXGCPPPXAXXPXXXXXXPXPPXPPXXPPXPXPPPPPPPPPPPPPPPPPXPPPPPXPPPPPPPPPPPPPPPXPPPPPPXPPPPPPPPPPPPPPPPPPPPPPPXPPPPPPPPPPPPPPPAPXXPPPPPPPPPXXPPPPRPPPPPPPRPPAPXPPPRRPAPPPAP

SEQ ID NO: 195809 - protein, 51 aa, Zea mays
  Clone ID: MRT4577_110162C.1.pep
CQQQATLVIAGMVCAQRYSRRGPACSRTREGTPSKGRTAARSTQGRSGTHR

SEQ ID NO: 195810 - protein, 113 aa, Zea mays
  unsure (1)..(113): unsure at all Xaa locations
  Clone ID: MRT4577_110163C.1.pep
LLRNKQTGPAGGYWFGPYYSHAADGKGLHGIAGHIMPYNDQPCRLELTXLSMGDKRLACACDHCICVGYHYCDDNDTTLLEDCCSTYSCGKGAKVGIEATHVEPRLSILEATR

SEQ ID NO: 195811 - protein, 70 aa, Zea mays
  unsure (1)..(70): unsure at all Xaa locations
  Clone ID: MRT4577_110164C.1.pep
KXRGRPHPSAHPSXLTFNVIFQKILPKLKVAFIPLGLNFXNQNSNINFKVTKFVKKCNYFFPTNFFNVPP

SEQ ID NO: 195812 - protein, 530 aa, Zea mays
  Clone ID: MRT4577_110165C.1.pep
MAAAAWWETLVVAAAADGTGGSSTTVVSICMFTTVLCLCLVAGHLLEENKWVNESITALVIGCIIGVIVFLLTKGKHSHILRFDEQLFFIYVLPPIIFNAGFQVKKKQFFHNFMTIMSFGVFGVFISGAIVSAGCYWLFPKVGFGELGAVDYLALGAIFSSTDTVCTLQVINQDETPRLYSLVFGEGVVNDATAVVLFNAIKDLDISQLKGGVVLKVIFDFLYLFATSTVLGISIGLVTAYVLKALYFGRHSTDREVALMALMAYLSYMLAELLELSGILTVFFCGIVMSHYAWHNVTESSRITTKHIFATLSFIAETFIFLYVGMDALDIDKWRTSKESFKTSIGIFGILILLILLGRVAFVFPISILSNIMSGSSERTPITFKHQVVIWWAGLMRGAVSIALAYNQFTFSGVTSDPVHATIITSTIIVVFFTTLVFGFLTRPLISGMLPHQSRALSRGHSTGSNSPKDDFTLPFLSGDEGASGSGIVLEQAKRSLSMMLERPVHTVHIYWRKFDDRFMRPIFGGPRSH

SEQ ID NO: 195813 - protein, 342 aa, Zea mays
  unsure (1)..(342): unsure at all Xaa locations
  Clone ID: MRT4577_110166C.1.pep
FSSTXTVCTLQVINQDETPRLYSLVFGEGVVNDATAVVLFNAIKDLDISQLKGGVVLKVIFDFLYLFATSTVLGISIGLVTAYVLKALYFGRXLLELSGILTVFFCGIVMSHYAWHNVTESSRITTKHIFATLSFIAETFIFLYVGMDALDIDKWRXIKGKNVNEMTXPRNLSKVVIWWAGLMRGAVSIALAYNQFTFSGVTSDPVHATIITSTIIVVFFTTXSVSQLIRDLAIXMRLEQAETCPXDXVFGFLTRPLISGMLPHQSRALSRGHSTGSNSPKDDFTLPFLSGDEGASGSGIVLEQAKRSLSMMLERPVHTVHIYWRKFDDRFMRPIFGGPRSH

SEQ ID NO: 195814 - protein, 71 aa, Zea mays
  Clone ID: MRT4577_110167C.1.pep
IPIFENTNTNKDRYGLDTKYLDLNTGKILALLGGSNLNTNENNIHTIYIHTQAQPRDSALLPLLKDIILPF

SEQ ID NO: 195815 - protein, 148 aa, Zea mays
  unsure (1)..(148): unsure at all Xaa locations
  Clone ID: MRT4577_110168C.1.pep
ATLLSLISLPHILFRHSTDREVALMALMAYLSYMLAELLELSGILTVFFCGIVMSHYAWHNVTESSRITTKXSIINVQTFLKNRMLCSIDLFGSILSNVYAVAKSSLFLMDVSXHIFATLSFIAETFIFLYVGMDALDIDKWRTSKER

SEQ ID NO: 195816 - protein, 96 aa, Zea mays
  Clone ID: MRT4577_110169C.1.pep
LQVFGFLTRPLISGMLPHQSRALSRGHSTGSNSPKDDFTLPFLSGDEGASGSGIVLEQAKRSLSMMLERPVHTVHIYWRKFDDRFMRPIFGGPRSH

SEQ ID NO: 195817 - protein, 131 aa, Zea mays
  unsure (1)..(131): unsure at all Xaa locations
  Clone ID: MRT4577_11016C.1.pep
SPLLRSSPPILSRSGSHSHTLAPSRLGETAEEADGAEEERDLREAFDVFDGNRDGLISAEELGTVLRSLGLRRQGSTGRAAADCRDMIRRXRGGASPFFFLGSADPASLRRLVDRDGDDMVSFEEFKRMMG

SEQ ID NO: 195818 - protein, 40 aa, Zea mays
  Clone ID: MRT4577_110170C.1.pep
TWMICENPHFLKSTCFLVQVCKLQCIVMLLVCLPNQDVFG

SEQ ID NO: 195819 - protein, 98 aa, Zea mays
  unsure (1)..(98): unsure at all Xaa locations
  Clone ID: MRT4577_110171C.1.pep
NPKKHIHLFYCSEXYFLFLXINNKSYSIELQSINSLIFYYHFPNLFINNPHNIPXHHFSFLAYSTLPXYIFQHNSIIFPLTKLFIASFTLLLTFFPTF

SEQ ID NO: 195820 - protein, 75 aa, Zea mays
  Clone ID: MRT4577_110172C.1.pep
PNPFSSTEFSMPFYTIQVICSSVLMQWFCSLEMLFESPSLQWVVIFIYGLKGRPGMQCLEMLLVFVPPPAWLYNL

SEQ ID NO: 195821 - protein, 44 aa, Zea mays
  Clone ID: MRT4577_110173C.1.pep
ETKKALDNFFESLKMYNYHSNHLLVDINANFIKYLIHKLLSFLV

SEQ ID NO: 195822 - protein, 216 aa, Zea mays
  Clone ID: MRT4577_110174C.1.pep
MGHQNCRRPPHVVVALVAIVLLQPCFVSVASSSSSVAIDGGGTNVKVPAVDGGAGSFVEFVTENVELYSNVSNEHMYGSAGKVWDPQLLVAQGMVVRYVVSPDGKGKFRTINEAVRAVPEGNKRRVILDIRTATYREKVLVPYTKPFITFLGNPKNPPVIMWDDRAATHGKDGKPVGTVGSATVAVESDYFMASGIVFRNHAPMAAPGQAGRTLVM

SEQ ID NO: 195823 - protein, 62 aa, Zea mays
  Clone ID: MRT4577_110175C.1.pep
PSLAVAMIQRWRQHPPHSPWSHPLQHLCWWCLLWQQHYPPQLLQLRPTSYRPLRRSRYWLLS

SEQ ID NO: 195824 - protein, 59 aa, Zea mays
  Clone ID: MRT4577_110176C.1.pep
DRERPPFFFFFFFFFFWVIPFFTSSLIYLSYKGFTKILCIFQRHILCFLFNPLDQQPVS

SEQ ID NO: 195825 - protein, 74 aa, Zea mays
  Clone ID: MRT4577_110177C.1.pep
MATVAATEAAVVDKKADAKMEIAGLEAKEEKLVKGCIFGTKRKFPNTEVLEESPYVGKFLRRGRVQQLVRTSTY

SEQ ID NO: 195826 - protein, 96 aa, Zea mays
  Clone ID: MRT4577_110178C.1.pep
MVRWLKPGMCSLRAARSFRAGACVFRPAPCGLTKTGGRASAAARARAGPAHAGDGPRASPPAVRPSPRTARRASPPATASSPTPTIITPPPTSDLY

SEQ ID NO: 195827 - protein, 160 aa, Zea mays
  Clone ID: MRT4577_110179C.1.pep
SARGGMGANGRLGHGGVEDKKKPTLVEALKDRHVKSIACGSNFTTCICIHKWVSGADQSVCSGCRQPFGFTRKRHNCYNCGLVHCHACSSKKVLKAALAPTPGKPHRVCDSCFMKLKAAETSSNSSHSKRNAIARRSVDSKDRSERPEIRFSRLATGSTA

SEQ ID NO: 195828 - protein, 33 aa, Zea mays
  Clone ID: MRT4577_11017C.1.pep
FGMLGPHGAGTTSFINMLIGLLKPTSGTAYVHG

SEQ ID NO: 195829 - protein, 75 aa, Zea mays
  Clone ID: MRT4577_110180C.1.pep
FSLSGDFPKLGSLPPPNETCIMFKVKETINLQPPVSHSFRTFCSSLPQSPDDPKPSFLQDTLPSLPPANLPLDSH

SEQ ID NO: 195830 - protein, 91 aa, Zea mays
  Clone ID: MRT4577_110181C.1.pep
RSLKTTPVGRVKKRLVLRRVCTKGKRGRLTTFIINSFTYLIKKNAQTFVSIFVTRFNQPALYPAHRSWRLNLKTCHKMFFPLGPKGLDFTA

SEQ ID NO: 195831 - protein, 71 aa, Zea mays
  Clone ID: MRT4577_110182C.1.pep
VGSLQTVAFSIGGRAFELRPDQYVLKVGEGFAAHCISGFTALDVPPPVGPLWILGDVFMGAYHTIFDYGKM

SEQ ID NO: 195832 - protein, 398 aa, Zea mays
  Clone ID: MRT4577_110183C.1.pep
MGVIGGTPPASCPTTRHCAEWARIYLKYCLCSQKEGAALALGLISVVSWGLAEVPQIMTNYRHKSTGGLSVAFLMTWIVGDLFNLAGCFLEPATLPTQFYMALLYTITTLILTGQTIYYSHIYHHLKLKNSRAASKPQKHQHRDASLREKLLGAKGSAASRNNESDTTVLIPSSPIPVNMKLVDQYHGSSSNADYYYMSARSLSRSPVPTAGIWSGSNRQSSRSPPQMNDQRGSLIGEIAPEHSAPSTVTKNALSVAPWMGLLLGTCLLHILIGNKHREMASGTVIPIGGNSSLSHGNGSELGRYLGWAMAIIYMGGRLPQILLNMQRGHAEGLNPLMFTFALLGNSTYVGSILVNSLDWSKVGPNLPWLVDAGGCVLLDSFVSFTPLLLWSQYVSTP

SEQ ID NO: 195833 - protein, 90 aa, Zea mays
  Clone ID: MRT4577_110184C.1.pep
LPPILLNMQRGPAEGLNPLMFTFAFLGNSTYVGSILVNSLDWSKVGPNLPWLVDAGGCVLLDSFIILQFLYFHYRKQRELSDEPDKPDKA

SEQ ID NO: 195834 - protein, 47 aa, Zea mays
  Clone ID: MRT4577_110185C.1.pep
ALGCRLVERINLCGLDHYIIGICGLIHMGLYLVVMICLELMLFGCSL

SEQ ID NO: 195835 - protein, 63 aa, Zea mays
  Clone ID: MRT4577_110186C.1.pep
VFSRVHDHSSGMDQYTAMNCTGQLTITWWERATTPCDCCPNASTLHVACNMRQDSDGRNVIVH

SEQ ID NO: 195836 - protein, 150 aa, Zea mays
  unsure (1)..(150): unsure at all Xaa locations
  Clone ID: MRT4577_110187C.1.pep
MDPWIGQPSLSLDLNVGLPTAARPPATTTTAEVLVEEDFLAVKKDREVQVQVQALEAELRRAGEENRRLSDMLRAVVAKYAELQGQVNGMAXRWSTAGNSAAAAAANRQSSASSDDGGSAAGSPSRKRPVRSDSLDTAPQHHNRKPPSPY

SEQ ID NO: 195837 - protein, 73 aa, Zea mays
  Clone ID: MRT4577_110188C.1.pep
CSQKNGMSVLSGSTQKIKLMEEGSQFTYILQQSSCSNRTCWFYVNLLTYAPLIKYSPTLLHKIFGIVVLLIYF

SEQ ID NO: 195838 - protein, 417 aa, Zea mays
  unsure (1)..(417): unsure at all Xaa locations
  Clone ID: MRT4577_110189C.1.pep
MGVLGGAPPASCPATRHCAEWARIYLRYCLCSQKEGAALALGLISVISWGFAEVPQIMTNYRQKSTEGLSVAFLMTWIVGDLFNLVGCFLEPATLPTQMYMALLYTITTLILTVQTIYYSHIYHRLEAKKSRAASKXKSINVRMHHYVKGFWXKDGVLSRNNGSDATVLIPSSPIPVNVKLVDQYHGSSPNTDYYYMSARSLSRSPVPTAGTWLGSNRQSLMTPPQTNDQRGSLIGEIAPAHSAPSTVTKNALSVAPWMGLLLGTCLLHILIGNTHREMPSGTVIPVGRRLLVFVEGHGNSSLSHGNGSEIGRYLGWAMAIIYMGGRLPQILLNMQRGHAEGLNPLMFTFALLGNSTYVGSILVNSLDWSKVGPNLPWLVDAGGCVLLDSFIILQFLYFHYRKQRELSDEHDKADKA

SEQ ID NO: 195839 - protein, 100 aa, Zea mays
  unsure (1)..(100): unsure at all Xaa locations
  Clone ID: MRT4577_11018C.1.pep
SRSAGAPSRLGETAEEADGAEEERDLREAFXDVFDGNRDGLISADXLGTVLRSLGLRRQGSTGRAAADCRDMIRRLVDRDGDGMVSFEEFKRMMAVVVEA

SEQ ID NO: 195840 - protein, 106 aa, Zea mays
  Clone ID: MRT4577_110190C.1.pep
CKRLNLKLCQVSLWQLEDELVLKGGGDVMGIIGSGHSCEAAPMRAKSERPQGALAAARARKARALAAARVRKAWQRKARARKAWQRKVTDLVAKLIDLNCRGDNFN

SEQ ID NO: 195841 - protein, 68 aa, Zea mays
  Clone ID: MRT4577_110191C.1.pep
FALLGNSTYVGSILVNSLDWSKVGPNLPWLVDAGGCVLLDSFIILQFLYFHYRKQRELSDEHDKADKA

SEQ ID NO: 195842 - protein, 51 aa, Zea mays
  Clone ID: MRT4577_110192C.1.pep
GGHKKKIRRYMTREGKGGSNQEPPRIWIFIVIIINSMSIFYLFFFIKLNYL

SEQ ID NO: 195843 - protein, 417 aa, Zea mays; identical to SEQ ID NO: 195838
  unsure (1)..(417): unsure at all Xaa locations
  Clone ID: MRT4577_110193C.1.pep

SEQ ID NO: 195844 - protein, 44 aa, Zea mays
  Clone ID: MRT4577_110194C.1.pep
HTFVHSPGERLRFLCRDIDRKIGKAKLQNPYYCVSPQSWMNVVI

SEQ ID NO: 195845 - protein, 59 aa, Zea mays
  unsure (1)..(59): unsure at all Xaa locations
  Clone ID: MRT4577_110195C.1.pep
MKVLIVALALLALAASAGFSTSGGCGLQTPPVHLPPSLYMPASVYLASQQXSEPLQYPN

SEQ ID NO: 195846 - protein, 55 aa, Zea mays
  Clone ID: MRT4577_110196C.1.pep
APCATGGPVPRPQLNDNPCLVLGIASVYQARHEFYVEINLVEVMCPTLSYGGQSS

SEQ ID NO: 195847 - protein, 143 aa, Zea mays
  Clone ID: MRT4577_110197C.1.pep
MEKAGKVTARAFTYAELSEATGGFRPESLLGEGGFGPVYRGRLGSSSGPEVAVKQLDRNGMQGTREFLVEALMLSLLKHSNLVTLLGFCTDADHSMLIYEYMPLGSLEDHLLDLPPGRAPLDWATRMRVAQGAARGLEYLHDT

SEQ ID NO: 195848 - protein, 74 aa, Zea mays
  Clone ID: MRT4577_110198C.1.pep
KHIKKKKKKNKNKYNKKNKLRLFGGIHRTPRLHRLHCITIASTFLSYNSNPLTSINTVFYLQNPDLTRIYCHVC

SEQ ID NO: 195849 - protein, 86 aa, Zea mays
  unsure (1)..(86): unsure at all Xaa locations
  Clone ID: MRT4577_110199C.1.pep
MLRHAARRLVSRTAXGSHRPXALVTADVPAEADDDSTFVEACKKVALNIEPPTTPLFLMHPFPSTLSTILTKLTVNFLLPYMFYIS

SEQ ID NO: 195850 - protein, 93 aa, Zea mays
  Clone ID: MRT4577_11019C.1.pep
ADAWAGGKAPWKHLATKAARESAPATGGVKKPHRFRPGTRALREIRKYQKSTELLIRKLALQRLVREIAHDFKTDLRLQSYAVDALHEAYQAY

SEQ ID NO: 195851 - protein, 77 aa, Zea mays
  Clone ID: MRT4577_1101C.1.pep
MVSATRSTNSSRSICMTASATSAPCRGRCRRYPHVLPPSAARSRRIARQVTSFRSASAAGATGSPALRTSAHTWPRA

SEQ ID NO: 195852 - protein, 95 aa, Zea mays
  Clone ID: MRT4577_110200C.1.pep
PQSRGPFFPTKGGPKNLLGPSLKKRAFRGGPFPNFSKKVIFTPFFFFFGGTPFFFFKGPKTGAKREKKKIGFKRANRALWKKKKKRVPPNGPQGF

SEQ ID NO: 195853 - protein, 127 aa, Zea mays
  Clone ID: MRT4577_110201C.1.pep
MASPVDEDLPGLPPIKTTPLLPPVPSSATVTATSSASSSPSPASSASAVDSAKAAEEEDREPSTPTSEGSRLRSPAVCPPAPSKPSAPRLPAKRKPTPAPARVFVSVPRDLFTVLRSLTPKKRIRIS

SEQ ID NO: 195854 - protein, 51 aa, Zea mays
  Clone ID: MRT4577_110202C.1.pep
VPWSECEVTLAVGQQFSQDVVGPLSGPWETSLMCGADQLLAFVKVFRSVVS

SEQ ID NO: 195855 - protein, 72 aa, Zea mays
  Clone ID: MRT4577_110203C.1.pep
VFFFFFFFFFFFFFFLENFFIKFFGGDTQSNVPFAKRLRAPLGLKNSIVLGILLFTPGMPFCYFFPQCESQN

SEQ ID NO: 195856 - protein, 129 aa, Zea mays
  unsure (1)..(129): unsure at all Xaa locations
  Clone ID: MRT4577_110204C.1.pep
LSSFAVFLWLVVCRFWVVLGLVFFPPFPPLCLRPLPPVVVLRLRFPFRCLVFCSSRVLGLGGSRFFLXFARPLCLPSFLCSLPAFGFSPLVCFPFRPPFFLPPLCVFXPAXPFIXPPLXXXGRRFLTKL

SEQ ID NO: 195857 - protein, 76 aa, Zea mays
  unsure (1)..(76): unsure at all Xaa locations
  Clone ID: MRT4577_110205C.1.pep
MVMPPCCDKVGEKIGPWTLXEDLMLVCYDQELGPENWRAAPTNSGLMRCSXSCKLRWTIYLRPGMKRVNFTDLEEK

SEQ ID NO: 195858 - protein, 69 aa, Zea mays
  Clone ID: MRT4577_110206C.1.pep
FSFDARFNNDLFIGSMRALALRSGHGKVHSFLRNVKVAEYVAVTTAFVVGTCCGRSSVLPTYLGALLCY

SEQ ID NO: 195859 - protein, 99 aa, Zea mays
  Clone ID: MRT4577_110207C.1.pep
MAPASGWGRAVGNTRSFVGNALGGLRGWSNLASWTVAGTLAYYLWVKPARQLQKEQEERAALAAATDPYRYVEKRKPIPDPQDTGLIYGKKREPTKSQD

SEQ ID NO: 195860 - protein, 75 aa, Zea mays
  Clone ID: MRT4577_110209C.1.pep
PLGFFHQQNLPPFCELTSANRASFFTQQQLGPFYKQFAGNPAPLFQIHPLLPFVPLVLANPAAPFRAPIIGGAPL

SEQ ID NO: 195861 - protein, 85 aa, Zea mays
  Clone ID: MRT4577_11020C.1.pep
QPPLEYFKSSIWNFKPLIHFNVFRVILTCLSITTFNSRPSSRSSTSPGLLIQLENPCRKSSIGVWMLSDDSRLERETICVRGHED

SEQ ID NO: 195862 - protein, 56 aa, Zea mays
  Clone ID: MRT4577_110210C.1.pep
GQDRENGTLHCECWMSSCWNLSVSGQCCVRTELIQRKMAQSLIQTEDANGRAKIPP

SEQ ID NO: 195863 - protein, 63 aa, Zea mays
  Clone ID: MRT4577_110211C.1.pep
KGFSPRPLHKRKERPFSLKGSTNSIFWAGIIFPPRISSKNSSHPSSDILYADQFFCYGNYRYL

SEQ ID NO: 195864 - protein, 112 aa, Zea mays
  unsure (1)..(112): unsure at all Xaa locations
  Clone ID: MRT4577_110212C.1.pep
AEKEIKEKKSSGKKVTKGKGESVEAVLPSKDDLRKTITEILKKVDFNTATFSDILKKLDNHYKMDLAPKKEAIKVMIQDELTXLSEEDEGEGAGDTEKKQQQPQAKEIEASR

SEQ ID NO: 195865 - protein, 86 aa, Zea mays
  Clone ID: MRT4577_110213C.1.pep
VQCCWGRSRRAQAAPWPDPVPGRMPRHRQWPPGLGRSKHHGGGCKKVGAVRVSNTLNTVSGRLAMLGPHQASWAGRAWPRGSRQTA

SEQ ID NO: 195866 - protein, 645 aa, Zea mays
  unsure (1)..(645): unsure at all Xaa locations
  Clone ID: MRT4577_110214C.1.pep
MEEKAMANGAATADVAAPDNKDNTKEEASESKEPAANQDADDQNKGLENGAEGQSGGDVNMADAEVTEEGDGDPGVAKQVDSEDIKTDADTKEDGNAKAEEVEDVKMTEADTGSTEVKDKEEKGDEVVDTTVDKQDESKEQEEGVSAEQDEKQGEEAEEKGKETDADEKQEEEAEEKGSADEKDEDEGDQKMEENKEETPKNKKARSARDRSQGNDNKHDGSKSREAKSLLNTPSPYGTXRPQRERKIVERLVEVIDKEPNKNFVVEKGQGTPLKDIPSVAHRISRKKPSDLKFLHSILFGRKGKAVDFKGHILQFSGFVWHESDEKQRAKAKEKLDKCVKDTLLDLCWTLGIPTPKANIRKEDIVSKLLDFIAEPHSAAESWGSDDQGSNSKKRKRGGESASKTPDGTPSRSRKKFVDDGTSSKRQNKALQYDTEEDESMKSDSEENIDEDSDEAADKQEVDYGSGKEKAGKKLSEVKESSGKKKSNTGSGHKSGPPNKIIKNLVKKVSSKIHEEKESPNGSAKVFSRKKKPTAEKEIKEKKSSGKKVTKGKGESAEAVLPSKDDLRKTITEILKKVDFNTATFSDILKKLDNHYKMDLTPKKEAIKVMIQDELTKLSEEDEEGEGDEDAGKKQQQPQAQEIEA

SEQ ID NO: 195867 - protein, 355 aa, Zea mays
  unsure (1)..(355): unsure at all Xaa locations
  Clone ID: MRT4577_110215C.1.pep
SKLLDSIFLRWKSKAVDFKGHIRQCSGFVWHXKXDEKQRAKAKEKLDKCVKDTLLDLCWTLGIPTPKANIRKEDIVSKLLDFIAEPHSAAESWGSDDQGSNSKKRKRGGESASKTPDGTPSRSRKKFVDDGTSSKRQNKALQYDTEEDESMKSDSEENIDEDSDEAADKQEGDYGSGKEKAGKKLSEVKESSGKKKSNTGSGHKSGPPNKIIKNLVKKVSSKIHEEKESPNGSAQXFSRKKKPTAEKEIKEKKSSGKKVTKGKGESAEAVLPSKDDLRKTITEILKKVDFNTXATFSDILKKLDNHYKMDLAPKKEAIKVMIQDELTKLSEEDEGEGAGDTEKKQQQPQAKEIEA

SEQ ID NO: 195868 - protein, 178 aa, Zea mays
  unsure (1)..(178): unsure at all Xaa locations
  Clone ID: MRT4577_110216C.1.pep
AKAHCHSESGESLGGPRHHAVPASCLALCCALXRCDACPTRVQXSCTTSARIAYCGLFPLSLXLSWALRKVSAPLLQTIPCINHFCYTPERDWFETHTALKGNPENFLFFTIIVAIMAVINDHKDPRDKIHLPGCMAKIFCWDIIVLLMLYVPYLVVSFYYSIYKCGSELYLLDQVVL

SEQ ID NO: 195869 - protein, 36 aa, Zea mays
  Clone ID: MRT4577_110217C.1.pep
VNLRCTPALGDHIHDDPTVEHLCQVGELLRLSWGAL

SEQ ID NO: 195870 - protein, 163 aa, Zea mays
  unsure (1)..(163): unsure at all Xaa locations
  Clone ID: MRT4577_110218C.1.pep
RTHQAKSNDGTTRSQEARRAPXAXXGSATXXGXXPQGTXAPRAKKPQNHRPXXKRGGEDRXEQAXRQQQAAAASXXQQPXNQGQQQTGAQETKQTNATQQQQQDQPAXSQPDXENPDARQQQEGPAHNPRARANGXAHQQQQQGQQRATHREQATGKPDGHQQ

SEQ ID NO: 195871 - protein, 105 aa, Zea mays
  unsure (1)..(105): unsure at all Xaa locations
  Clone ID: MRT4577_110219C.1.pep
QFAPTSNEYVLSNXNEGDNAETKFPSGSTAXSGQGVELAGITVXASNSPVTPSVSCNQADQEETMTTPIKDKVDPGGLYDLTELLDVDLSSYPDKVPAITDVRKQ

SEQ ID NO: 195872 - protein, 95 aa, Zea mays
  Clone ID: MRT4577_11021C.1.pep
PGPRSVLVVPPPSTRGGPAPAKKKKGLGETILGFIFKKDHLVETDPLLKKVGAGPAPPSRAKKTGGKKATGGDENGNGGGFNLGGLGGFFAKKNN

SEQ ID NO: 195873 - protein, 75 aa, Zea mays
  unsure (1)..(75): unsure at all Xaa locations
  Clone ID: MRT4577_110220C.1.pep
ILPLTRSIDALSATMGASESVXNSTRKRRITPLVLNKDYCVRLERSVSMTGRSMSKIYNLQFTAVRRREQGAAST

SEQ ID NO: 195874 - protein, 81 aa, Zea mays
  unsure (1)..(81): unsure at all Xaa locations
  Clone ID: MRT4577_110221C.1.pep
FGALELELDEIVKNKKHDSGTPILEXDVVMFTYTNRSSFTMESQSIRELRGTDRVSHVAIFFPYSRKSKTRRALLQSSSLT

SEQ ID NO: 195875 - protein, 39 aa, Zea mays
  Clone ID: MRT4577_110222C.1.pep
CDSGCLYFAASGWVFVAASGCGCGFAWGALLSAPISCGS

SEQ ID NO: 195876 - protein, 78 aa, Zea mays
  unsure (1)..(78): unsure at all Xaa locations
  Clone ID: MRT4577_110223C.1.pep
RCSSVAATXSTRVEDCCATNPEVLLSTVSALEVLGLEIEQCVVSCFSDFGMQASCSQVSSSTTWGGKGSDSFFILETV

SEQ ID NO: 195877 - protein, 339 aa, Zea mays
  unsure (1)..(339): unsure at all Xaa locations
  Clone ID: MRT4577_110224C.1.pep
MRAHNILYEAVGENISGPSFHLNEYSSGTIQATGKPNDCRRIDSAVRNLLLKGLGQPFSEEDIIGIYRTPLLDQRGQVRCGLFQKEIEETRSRRGNANVRYAWLPCSRYTMEQMAMRGALEIAKPHKGSICGVGTWLAPANCTNSCARYSDFHEDGIIRMMLCRVIMXNYIVWDANVHKHIYAEYAVIVQAPLVTNECSGLKDSVPNISEIISSGSRDNLTKEDRFAPCGVEQEAPRLGRAPRAPSSPWMPFSMLFAAISTKVPRSDMELVIRYYEEFKRKRMSRSDLVVRMRQIVGDKILVSTIMRLHHQKKPPSMAAAAAGLARALARGEEGGGVAE

SEQ ID NO: 195878 - protein, 139 aa, Zea mays
  Clone ID: MRT4577_110226C.1.pep
DDAANRCAARRGAMEGGITRQRRRGRAWPGHAGQGTDDGELLRADVWFDKDGRGWGVRGESFLRGRGLRRPGLGRARTPRRRWGIRAWGCRCARTDPCRSGVETGSVEPPWLLGQCVDPDRMGPSSRKARQGEGRREGG

SEQ ID NO: 195879 - protein, 69 aa, Zea mays
  Clone ID: MRT4577_110227C.1.pep
NLSPCFTFRLWVPQHNTLTYYSMLMAYHVLQVNLVLKNDLIIVSLFYPTHIYSMAYIFRYPLAITSHSN

SEQ ID NO: 195880 - protein, 102 aa, Zea mays
  Clone ID: MRT4577_110228C.1.pep
MFSGPGKNDWGFVTPRPGMELVYFKQQPNQGSGRGGKHSTSGREAPIMLLTGHRRVPYGMKFNPAGTGIASGSHGKDIFLWPAQGEGKNFMGRRGHRNAFFD

SEQ ID NO: 195881 - protein, 70 aa, Zea mays
  Clone ID: MRT4577_110229C.1.pep
GLSGNASGADQHLFARPARKTYWAMQPAIIAIAVWSRLTCKAQWVISGVMKHQSYLQLQGPLQVCARSLC

SEQ ID NO: 195882 - protein, 114 aa, Zea mays
  unsure (1)..(114): unsure at all Xaa locations
  Clone ID: MRT4577_11022C.1.pep
GXAPQNRRRRCGVLRRLRRLSKQASILLRFGTHRHDNSQGGGSERHAGVVQQIVGHTEEDISASVEVDDQWQPVMDAGPGRHEEAAQMRWEGRIVKVAAAVSLLNWQDRYQQLQ

SEQ ID NO: 195883 - protein, 51 aa, Zea mays
  unsure (1)..(51): unsure at all Xaa locations
  Clone ID: MRT4577_110230C.1.pep
GTRWLAPRTGTLPKVRVGVSPXRDVLGTGNGEEGEAGGGGLEGSGSSLRPA

SEQ ID NO: 195884 - protein, 165 aa, Zea mays
  Clone ID: MRT4577_110231C.1.pep
AVGGGSTPRGWLLPPLIGGFLKEPPLFFFPPLLIKLWGSPRFFFFSRPVVVFFSCSGVVFFPAAHHGGVLPPRSCFVVFLVVNLFFSPIIVGRGGFLFLVVGFPPLGGLFFNSFFFSSFFHQVGGKGGVSSSFFRCFPRHFFLFCSTLFPLRGGRGMCSSLLLHQ

SEQ ID NO: 195885 - protein, 96 aa, Zea mays
  Clone ID: MRT4577_110232C.1.pep
RPPREPSISHHRLSYPDVTGRTAGFRTQYTQGVYDPRLRTCHMHNEKDKSQQGPYSCSYPVALLEAAAARSRSRISARPSNVIPPPQRHSNTLQRQ

SEQ ID NO: 195886 - protein, 72 aa, Zea mays
  unsure (1)..(72): unsure at all Xaa locations
  Clone ID: MRT4577_110233C.1.pep
WGPXGXXGSSXRCSFRRSAAGVXVGGRLGAXAGALGGXGAXAVVLVXLRXRVPRLGPLVGXGALRLVLRFGV

SEQ ID NO: 195887 - protein, 149 aa, Zea mays
  Clone ID: MRT4577_110234C.1.pep
MTPKRPVSAAEAEVHPMLNRARKRAGGQIPEQIRNPLLKVRILLTTYHTPQQYDPAYHNLRRKLPGPNYPTNYPTPEPTAEALAETPTGSASGNDLVYESASASACSLSFSLPLVDLTLDLTLALAAAVADPILDTSLCTRICHVLGLL

SEQ ID NO: 195888 - protein, 76 aa, Zea mays
  Clone ID: MRT4577_110235C.1.pep
GNNPRTIFLTRELPAPFGQGYNTCKHILWLTGWDNKLLAKTCALPITEDGAPFLSLPGWDLRIGLFFNWFFLFQQE

SEQ ID NO: 195889 - protein, 235 aa, Zea mays
  Clone ID: MRT4577_110236C.1.pep
MGGEEGGDGLKLIGQYGSAFVTRVKLALSLKGLSYEYVEEDLRNKSALLLSSNPVHKAVPVLIHRGKPICESQVIVQYIDEAFAGIGPPLLPADPYERSVARFWAAFIEDKLVSPWDRVFRAKTEDEREEAMKQMLAAVDALEGALKEGRPRPFFGGDSVGYVDVVLGGAVSYAKGHDALFGSELIDAAKTPLLAAWMERFCELDAAKAVLQDVDRVVQYGKMLIAKNAAATRQA

SEQ ID NO: 195890 - protein, 144 aa, Zea mays
  Clone ID: MRT4577_110237C.1.pep
GKERQQRFFGQSSRGTVYMMMGREIPQAGIYYMHGACPIASSCLIIDLGTSISVCVVQYLSAETVAATTSACISCSGGSLRKQACVAAHGEMLRMRVRTCEERACAGSQLEAVRGQGGTEGAVLLSVLRSIVRAPPCMHADAAP

SEQ ID NO: 195891 - protein, 96 aa, Zea mays
  Clone ID: MRT4577_110238C.1.pep
ESEPAHWLLGVATSLVEVVKQMEGPLMHGRPHSRVGGHFTLQGPEAYRHPHGCGREHRVHFRPNPAIRHGLLSTLLLESARVGRTGDRASVPPEGP

SEQ ID NO: 195892 - protein, 141 aa, Zea mays
  unsure (1)..(141): unsure at all Xaa locations
  Clone ID: MRT4577_110239C.1.pep
MAAAHVDPLVVGRVIGDVVDLFVPTVAVSARFGAKDLTNGCEIKPSVAAAAPAVLIAGRANDLFTLVMTDPDAPSPSEPTMRELLHWXLVVNIPGGADASQGKQENYFGMPSNGARKNLEGTKLNCCSIKAHSTYTVYILD

SEQ ID NO: 195893 - protein, 96 aa, Zea mays
  Clone ID: MRT4577_11023C.1.pep
PPARGVFFFLIYLCYYMALFFQFVYAQAMERCKYHLYVGSFYLFFSGISGETNRHRQPKSLYGTTLATDPHRKPADDGRGEPSNQLGTPGGGATDP

SEQ ID NO: 195894 - protein, 48 aa, Zea mays
  Clone ID: MRT4577_110240C.1.pep
MSQNNASQLLPSELIARCIGSKIWVIMTVDKELVGYLCGFDVYVHMVL

SEQ ID NO: 195895 - protein, 122 aa, Zea mays
  unsure (1)..(122): unsure at all Xaa locations
  Clone ID: MRT4577_110241C.1.pep
MAAAHVDPLVVGRVIGDVVDLFVPTVAVSARFGAKDLTNGCEIKPSVAAAAPAVLIAGRANDLFTLVXLASXTCGDEDVQCLIPIDHQVMTDPDAPSPSEPTMRELLHWYGINLLLALLSFL

SEQ ID NO: 195896 - protein, 77 aa, Zea mays
  Clone ID: MRT4577_110242C.1.pep
SNLAMYFFTTCLDIIHISGCMHNKNIDLDKPKRRIYIYDLKQREEYKTKANLKFLQVHAYICIWKNDTYIIKQGRSQ

SEQ ID NO: 195897 - protein, 48 aa, Zea mays
  Clone ID: MRT4577_110244C.1.pep
WQEHARDEHVLAMFSPCAPRVVWCGSGSVKLRSYKDQRFAVSLSSNIC

SEQ ID NO: 195898 - protein, 54 aa, Zea mays
  Clone ID: MRT4577_110245C.1.pep
ITCGGHEADKQVHLHTYMKHSIISTIGVGMGHHLTLAHIIGRITMLCLRAYVNA

SEQ ID NO: 195899 - protein, 317 aa, Zea mays
  unsure (1)..(317): unsure at all Xaa locations
  Clone ID: MRT4577_110246C.1.pep
SGFFVEXTVIVAEGELLSNGIFQVNTCGFPPLEDREASVSLLMGFDFFGGGVIPTEETLRLSSLEKKAVNDMFVILSDVWLDNPETMEKLAVVLDGYDSVEVVPSLFVLMGNFCSRPCNLAFNSFEELRFQFGKLGEMIAARSRLKEHSRFLFIPGPDDAGPSKALPRCALPKYLIEELQKHIPNSIFVSNPCRVKFYTQEIVFFRQDLLYRMRRSCLIPPTTEETSDPFEHLVATITHQSHLCPLPLTVQPIIWNYDHCLRLYPTPHTIVLGDKSEQKAFKYTGITCFNPGSFANDSTFAAYRPCTKEVELSALEG

SEQ ID NO: 195900 - protein, 198 aa, Zea mays
  unsure (1)..(198): unsure at all Xaa locations
  Clone ID: MRT4577_110247C.1.pep
MPASMSTAYTMATAGVNVKEDCXRSLMEMKCKKVHRFTAYKHQPAAARPPGRTLRFTLGQGYDELVAALPGDDCRYAVFDFDYHTALNCHXSIILLIDWPRAHDRAKTCREXSRLPRLLDGVHYXEAHATEPSEMGLLLIRGSAMTPPMRSATIYVLTCASACSPTTYCSVFTMHLRSRTVYVQYGPMLILVCVLPLR

SEQ ID NO: 195901 - protein, 122 aa, Zea mays
  unsure (1)..(122): unsure at all Xaa locations
  Clone ID: MRT4577_110248C.1.pep
CAPISPLPPRIPLPAXPPFAAQPLXGPPSSTRAAAAPSTQPRSPRSSPXEAEPNPSRPPXPTAQSRFSPAPRLPAIWAPPVSRPPLXPPGPACQPSAPPGPACQPLTPPRARPPARRSNLGR

SEQ ID NO: 195902 - protein, 67 aa, Zea mays
  Clone ID: MRT4577_110249C.1.pep
APCGCCCNQQRNVIEAVVQNTRAHSHPWLGERIVPFFIRKEHWYLAPHRPRDALNYACMDILNRGYV

SEQ ID NO: 195903 - protein, 792 aa, Zea mays
  Clone ID: MRT4577_11024C.1.pep
MAVTFQHKIILRLGSMFCFGTISSVTDEEGTLHRITDPPERKFSSKVSEKIGAKQEKAQPSVLRKKITFNKPRTKGPSTRRTPLSTSPTEEWTRIIRRKEANEATEQAEQETRQHRENPLFGRNLNPDFARAMNMPSEVGGVLARIADGLPRTPDAEGYRWLFTQAANHLLPLAHPPNDLRHAINSRRDAWSSINASRERRHENEIRRREEYDRDHDIPARSQATRTESATASTGGTTRGRSRHHDDHSPPRDRQHHQRQEDTCGVSALTPRLRAIQWPPNFKVSNVDKYEPNQDPGGWLAIYTTAARAAGATEDSLSDKPAQPWDLKSINHRGDETLCSYLKRFQTMRNHIPEVTEAAVIEDFYRESNDSAFVRTILQKAPTTSEQLFREADLYITADERAQDLIGGAKPAPAAPRRDTNQQPDKRWEKRPREEVHAAGPPASRARGGPRGGERTLDDILDAQCPYHKDMRHTLRNCRDLKHSVGHGRPFQPLPPPPPRGGPGEPRQPQQQEEGGGAAFPRVDREVNVIFSEHGSQESKRQQKLNDRQVLVAATGPPTPYRWSEHPITFTRADQWLNLDHPGKYPLLVDPVIRESRVKKVLVDGGSSINVTFPQTLQGLGVHLKELHESDAPFFGIVPTEGEYPLGHIYMPVTFGTPENYRTEFLRFEVANFDYGYNAIIGRPGLAKFMAIPHYTYMILKMPGPQGIITVRADFQGAAKCFRVAIQAALTTKPSATSSAQANSKPEEDLAIPANEAQAVTSMRPTKETKRINLGFTDERKTTIISSSLDDK

SEQ ID NO: 195904 - protein, 79 aa, Zea mays
  Clone ID: MRT4577_110250C.1.pep
SWTRARTRGTWALSNGRISVARQTRRVTTAYGKDAAPREAERTRRAMEPCTKLTVADDRTARVIMQMPDIHPPGRELGA

SEQ ID NO: 195905 - protein, 84 aa, Zea mays
  Clone ID: MRT4577_110251C.1.pep
LLAWWSLCGTKVFGSNQQVWDQLQHVCRGASSFFGGGEQTRPGIGFSNNFWIPQYFFPTCKIPPAPTHVTLLFWRPKNFFFFSP

SEQ ID NO: 195906 - protein, 109 aa, Zea mays
  Clone ID: MRT4577_110252C.1.pep
VQEAIGEQVVGAVGKGHKGSYVEGLAGQVGRAEAATCAAECSRWQAWLGGEPRSGSSSSTGRRVRVGQAAPRVAVVAGQECARYAPAHQEARTGTHPATSSLKSLGTAS

SEQ ID NO: 195907 - protein, 47 aa, Zea mays
  Clone ID: MRT4577_110253C.1.pep
AEKWFPGHKCASTVQLHAIEEVWDLLAVPESVEDAPDQPEQIMMALS

SEQ ID NO: 195908 - protein, 93 aa, Zea mays
  Clone ID: MRT4577_110254C.1.pep
PLEGTGRITGGRRSEMGSRIAHGVLVLVLLLIVLPALSIGGRELADEKDHKEHSTASSERERRRLQGWRQMIMGATIRLRRFPSLASSLYPTD

SEQ ID NO: 195909 - protein, 61 aa, Zea mays
  unsure (1)..(61): unsure at all Xaa locations
  Clone ID: MRT4577_110255C.1.pep
ERCSRNFCITHRHPLDHDCSGEGHQXSRAGLAAISRAQAVASTSTVPSPSQTMPSCTSPSR

SEQ ID NO: 195910 - protein, 63 aa, Zea mays
  Clone ID: MRT4577_110256C.1.pep
FISILKFDFAGGRELADEKDHKEHSTASSEKGAATAAGVATNDYGRYDPAPAFSKPRFKFIPN

SEQ ID NO: 195911 - protein, 52 aa, Zea mays
  Clone ID: MRT4577_110257C.1.pep
LIFHLPKVSRGSLTIMREGKIISTVLICTLIPSCTVILFSIHRFKPLQYFTG

SEQ ID NO: 195912 - protein, 30 aa, Zea mays
  unsure (1)..(30): unsure at all Xaa locations
  Clone ID: MRT4577_110258C.1.pep
DCFKTYKKYYNSKEGLSSXXTILEQIIRCR

SEQ ID NO: 195913 - protein, 64 aa, Zea mays
  Clone ID: MRT4577_110259C.1.pep
TRVRVELFVMVSTQNCSVTMEELRRVFLVRLSSRLLIKSYLQLKCESIRFGLSYLMFALCHMNS

SEQ ID NO: 195914 - protein, 53 aa, Zea mays
  Clone ID: MRT4577_11025C.1.pep
KKKKKKKKKKIKKKKKKKKKKEKKKKKKKKKIKKKKKKKKKKKKKKKKKCLPF

SEQ ID NO: 195915 - protein, 151 aa, Zea mays
  Clone ID: MRT4577_110260C.1.pep
MGRLHSKGKGISASALPYSRSSPAWLKTTPEQVVEQISKLARKGATPSQIGVILRDSHGIAQVKHVTGNRILRILKSSGLAPELPEDLYMLIKKAVAVRKHLERNRKDKDSKFRLILIESRIHRLARYYKTVGVLPPTWKYESATASTIVA

SEQ ID NO: 195916 - protein, 241 aa, Zea mays
  unsure (1)..(241): unsure at all Xaa locations
  Clone ID: MRT4577_110261C.1.pep
PLHHCSGSRRSALPLSPNQGVPGAAAAAAARRASMAFLFNKFQEAIKTLAKSPSFARDPRHLQFDADVNRLFLYTSYNRLGKHXEEKDAEEIIELASKASVTDQQKQVQQNVHYQLKHICKSMDSILRPDTKDPSQSPSDAYNNSRRSGLSLAVGTGVAAANKPVXVPATRPLTRTELSNKFRDQFGYTLDIKPSLIPHKDAGQGLFLSGEANVGAVLAIYPGVIYSPAYYRYIPGYPRID

SEQ ID NO: 195917 - protein, 51 aa, Zea mays
  unsure (1)..(51): unsure at all Xaa locations
  Clone ID: MRT4577_110262C.1.pep
PVLVASCSXLVXVCXGSRLASLADRPAPAGVSAAPGRQTEATAQAXGAGAI

SEQ ID NO: 195918 - protein, 73 aa, Zea mays
  Clone ID: MRT4577_110263C.1.pep
MFRRTKTTMAAPGPPPTDGEVRIQKVDKIELVYNILSKTKLYKATAGTGKHPAAGHDQASGWKKTVNPSRPAC

SEQ ID NO: 195919 - protein, 83 aa, Zea mays
  unsure (1)..(83): unsure at all Xaa locations
  Clone ID: MRT4577_110264C.1.pep
DLAPFCTLKCKNVAEENTRVLYSLYGVVEHSGTMRSGHYTAYAKARTANSHLSNLVLHGDIPQDFEMESKGQWXHISDTHVQA

SEQ ID NO: 195920 - protein, 78 aa, Zea mays
  Clone ID: MRT4577_110265C.1.pep
EEEFGFQHPGVISIPCPAARFERSMAIVAEAKKGFSRWMAHMRWSLIKQGETTHYACLMTASVQWLKHLSNIHVRFEK

SEQ ID NO: 195921 - protein, 54 aa, Zea mays
  unsure (1)..(54): unsure at all Xaa locations
  Clone ID: MRT4577_110266C.1.pep
WXVAXLHRAXXXLPEFYFXAXXLVXQXNVXAYRXFGPILXTDXXXXRKTWXEEX

SEQ ID NO: 195922 - protein, 90 aa, Zea mays
  unsure (1)..(90): unsure at all Xaa locations
  Clone ID: MRT4577_110267C.1.pep
DXRFVSFPFFVLWFYPFSFIFFFSVFYVTEGEKQGSGVDSVCGVIKWKMSIFFVSIFLRNRRRKTRKRRGLGLWRDQTGDVDLFFVSVFF

SEQ ID NO: 195923 - protein, 186 aa, Zea mays
  unsure (1)..(186): unsure at all Xaa locations
  Clone ID: MRT4577_110268C.1.pep
FHGFLGLPVEFEDEMPCRVPSASASVFGVSAELMQCTYDGKGNSVPTILLLLQERLYAHGGLKSEGIFRINPENDQEEHVRDQLNKGIVPDDIDVHCXELVTLLRPTQAALLNWAVELMSDVVEEEELNKMNARNVAMVFAPNMTQMSDPLTALMHAVQVMNFLXTLILKTLRSAMMQPPPRVHTI

SEQ ID NO: 195924 - protein, 261 aa, Zea mays
  Clone ID: MRT4577_110269C.1.pep
MGRVIRAQRKGAGSVFKSHTHHRKGPARFRSLDFGERNGYLKGVVTDVIHDPGRGAPLAKVTFRHPFRYKHQKELFVAAEGMYTGQFVYCGRRATLSVGNVLPLRSVPEGGVICNVEHHVGDRGVFARASGDYAIVISHNPDNGTSRIKLPSGAKKIVPSSCRAMIGQVAGGGRTEKPMLKAGNAYHKYRVKRNSWPKVRGVAMNPVEHPHGGGNHQHIGHASTVRRDAPPGQKVGLIAARRTGRLRGQAAATAAKADKAT

SEQ ID NO: 195925 - protein, 133 aa, Zea mays
  Clone ID: MRT4577_11026C.1.pep
MREPSTTKRKRHRDVALVTSNSHEGSERSDPHDVTVDINKAFTDATNMVLLQQDLASQAIEIQKRRLQIEAKELELTKQRHKWERFRKKKDREIERMALENEHMVIENKRLELELRHKELELELKLKGKGNHP

SEQ ID NO: 195926 - protein, 438 aa, Zea mays
  unsure (1)..(438): unsure at all Xaa locations
  Clone ID: MRT4577_110270C.1.pep
MTGVVVVSSAGCKGGGGGKRAAGGRGGGEEERRRRAAVLELLLAAVRRSVVACRVERXRRSRVAGERGGXAVALEEMEIGWPTDVRHVAHVTFDRFHGFLGLPVEFEDEMPCRVPSASASVFGVSAESMQCTYDGKGNSVPTILLLLQERLYAHGGLKSEGIFRINPENDQEEHVRDQLNKGIVPDDIDVHCLASLIKAWFRELPEGVLDGLSPQQVLQCNSEGEFLELVTLLRPTQAALLNWAVELMSDVVEEEELNKMNARNVAMVFAPNMTQMSDPLTALMHAVQVMNFLKTLILRTLRERDDAATTGEYTPYSSPASSSKHDDAECCYGSEQDMDRSCEMSDMHSQISKSGRHADYLVRYNTCFDSEQEVDDHLSEVEEGFLRRLERDLGADRPEVSCRKISEIMALEDAEPKAETRAVEKGIQNENEEVAEQL

SEQ ID NO: 195927 - protein, 59 aa, Zea mays
  Clone ID: MRT4577_110271C.1.pep
CNKIIELATMISCRLAVYFSTINICISLYNGCYYSLKTYPPFNTLSIVNKIIVRVTHAS

SEQ ID NO: 195928 - protein, 130 aa, Zea mays
  Clone ID: MRT4577_110272C.1.pep
MASSPSPSPGTIRAPLPPSSATPSPATTTPTPASPAPVTQPNATPADPPSSPVAPPPVPSASTPPPQLTSPPPSLPPPPPDAVPPPPLVASPPPAPAAVVPPPSPPAPVAVPPPPTPAAPPKASPIHISP

SEQ ID NO: 195929 - protein, 74 aa, Zea mays
  Clone ID: MRT4577_110273C.1.pep
VRRVLLAFRVPARVLRWHVRRWCYHADQGTSCGTYDVSHSRSFIDSCRISWTWFCNRGTLDCVALVDHVSADAY

SEQ ID NO: 195930 - protein, 101 aa, Zea mays
  unsure (1)..(101): unsure at all Xaa locations
  Clone ID: MRT4577_110274C.1.pep
ENYSFNMGNPIKGEKIGSKLPADAKKKIGDPIDAAISWLDPTQLPKAGEFEAKIKELESLCNPIIAKMSQGPGXTMGGPGGMDKDAPSGNGGPGPKIEEVD

SEQ ID NO: 195931 - protein, 82 aa, Zea mays
  Clone ID: MRT4577_110275C.1.pep
VYLSGKGNVLDLTILDILACEWAVGTPQRSTSPTSPRDPLSHGACSSVSSGSLLIVLFLLVVLLLVLPPCVRQYMLDMTCIN

SEQ ID NO: 195932 - protein, 143 aa, Zea mays
  unsure (1)..(143): unsure at all Xaa locations
  Clone ID: MRT4577_110276C.1.pep
GGGGGGSXERTASGDPKACDDCNTTKTPLWRGGPNGPKSLCNACGIRYRKRRRVAMGLDPEAKRKPKRDDAILSKAEASSTKEEEEEDNKASTNKIKTKTTTHTVELHMVGFAKDAVPKQRRRMRMRRRKPSCLGEEERAAIL

SEQ ID NO: 195933 - protein, 55 aa, Zea mays
  Clone ID: MRT4577_110277C.1.pep
ISMDFIEALPRSQSFTCVLVIVDTFTIYANFLHLKHPFTALSVARLFHDQVYKHH

SEQ ID NO: 195934 - protein, 61 aa, Zea mays
  Clone ID: MRT4577_110278C.1.pep
YVWYHCFILEPLNKQPLRGTTSFSWCRSHNTNIGSTILSFFRGVPKLKRVYNTVYTRETIN

SEQ ID NO: 195935 - protein, 84 aa, Zea mays
  Clone ID: MRT4577_110279C.1.pep
NHLGGLNIIPSHGKFFACCKEKNGHAGPGLGYFPNIFFFIGKYHSWGGQQHTRLLKRGFFWGGLSYAGQTEKPGPRLNFPKTRF

SEQ ID NO: 195936 - protein, 57 aa, Zea mays
  Clone ID: MRT4577_11027C.1.pep
RGIILGAIKVDAAGVTWILTPPFFFFFLSLYYLKLSNNNNIAQPASPVNVLFCNYYS

SEQ ID NO: 195937 - protein, 80 aa, Zea mays
  unsure (1)..(80): unsure at all Xaa locations
  Clone ID: MRT4577_110280C.1.pep
PXVKSQCSHTQNXXRCXCRVXSTQYPNGLALFQSCEXXEDXXPAXVSXXLESXXLGLQIGQLXRPTSEEAXFVAWKNPSR

SEQ ID NO: 195938 - protein, 114 aa, Zea mays
  Clone ID: MRT4577_110281C.1.pep
LVCPWRYSPQSLYLSAMEAGTLGCMIVDREILREYAHLLDSRDGVVVSSVETPLNPIVVPWCLVLSAPFFILLMVGCQMEWTPPAMIITVSILILMAVVRRRDLGVRVPEREYG

SEQ ID NO: 195939 - protein, 164 aa, Zea mays
  Clone ID: MRT4577_110282C.1.pep
MAASARPGERATSFAVACSLLSRFVRQNGVAAAELGLRIKGEVEQQRTPATTSLLPGAEGEEVERRKETMELFPQSVGFSIKDAAAPPREEQGDAEPARTNASDMPIMRKASLHRFLEKRKDRLNAKTPYQTAPSDAAPVKKEPESQPWLGLGSNAVDSSLNLS

SEQ ID NO: 195940 - protein, 234 aa, Zea mays
  unsure (1)..(234): unsure at all Xaa locations
  Clone ID: MRT4577_110283C.1.pep
MAASARPGERATSFAVACSLLSRFVRQNGVAAAELGLRIKGEVEQQRTPATTSLLPGAEGEEVERRKETMELFPQSVGFSIKDAAAPPREEQGDKEKPKQLTIFYGGKVLVFDDFPADKAKDLMQLASKGSPXTERCFASTLCSSCCHYXDKAVLDPVISLAAAKKPARTNASDMPIMRKASLHRFLEKRKDRLNAKTPYQTAPSDAAPVKKEPESQPWLGLGSNAVDSSLNLS

SEQ ID NO: 195941 - protein, 233 aa, Zea mays
  Clone ID: MRT4577_110284C.1.pep
MAASARPGERATSFAVACSLLSRFVRQNGVAAAELGLRIKGEVEQQRTPATTNSLPGAEGEEVERRKETMELFPQSVGFSIKDAAAPREEQGDKEKPKQLTIFYGGKVLVFDDFPADKAKDLMQLASKGSPVVQNVVLPQPSAAAAVTTDKAVLDPVISLAAAKKPARTNASDMPIMRKASLHRFLEKRKDRLNAKTPYQTAPSDAAPVKKEPESQPWLGLGPNAVDSSLNLS

SEQ ID NO: 195942 - protein, 68 aa, Zea mays
  Clone ID: MRT4577_110285C.1.pep
MSTMGWKKYSHEQFGFNRFGASGPYKEVYKKFEFTPEGIAKRAKATIDFYKEVKPLRSPLDRAFQQLI

SEQ ID NO: 195943 - protein, 96 aa, Zea mays
  Clone ID: MRT4577_110286C.1.pep
ENPARPTRTAVDKNLGSRFDYYTKEHIGVAFNDGSKQLQDIRRGHRGNSLVLMGKNTLIRRCINDNAWKTGDHTLDPLMDLIVGNVGLIYTNGDLK

SEQ ID NO: 195944 - protein, 97 aa, Zea mays
  Clone ID: MRT4577_110287C.1.pep
PFRKLCLMHQTITCCLQCVILFISMLDPITSTFQSLDINGVIKDTLRRVHSCGTCSHSRSQTQNQNQIDTILHVDNQFCSISKKRNGLFILLMSLAN

SEQ ID NO: 195945 - protein, 59 aa, Zea mays
  Clone ID: MRT4577_110288C.1.pep
LWGRHFRLCPSASLGLCLFFVSFLCSHSVRFLFALALMVAPPREFLGVSQKAAMVVRLR

SEQ ID NO: 195946 - protein, 96 aa, Zea mays
  Clone ID: MRT4577_110289C.1.pep
GNKIFPRKAPFPVLPPNLGRGGDPQNPPPGCCNFPPRGGPPRGKKKNHPQKKKKKKKKKKKKKKKKKKKKKKKKKKKKKKKKNKKKKKKKKKKKLV

SEQ ID NO: 195947 - protein, 58 aa, Zea mays
  unsure (1)..(58): unsure at all Xaa locations
  Clone ID: MRT4577_11028C.1.pep
LKKAAGTTADRGAAXKCLKKAPAGVRGLKAGKAARIPSKWGVRIPYTISTSTDCSRVN

SEQ ID NO: 195948 - protein, 83 aa, Zea mays
  Clone ID: MRT4577_110290C.1.pep
MAQKETNGSNGEHISTRPPPTPTPQRYDKDSQANQRNPGTGGAGNIGTHRRDRRKENEKHEGMGADNKSTGTKENQKKGNGHP

SEQ ID NO: 195949 - protein, 145 aa, Zea mays
  Clone ID: MRT4577_110291C.1.pep
CTSTPLASSSTGAKSLGDLANGPVMAVSEEHHHGCSWSLTGVLYQFRCSKPFRSGPVGLTILGQQRAQPKQGTVVITIGPSKSCPENRDLKVKPFFIFLCICICHTLKYIAQILVLLNKLFRVFKWMGEKKEKLFKKTNPKKKRK

SEQ ID NO: 195950 - protein, 114 aa, Zea mays
  unsure (1)..(114): unsure at all Xaa locations
  Clone ID: MRT4577_110292C.1.pep
KWFSFQTSSKISXEIFQIXKIFFPPAFALGNSPKGFSLIGGFFGSPLNFPPKNGFGAKFFGEIFFPLSKINPPGAPPMVLPFFWWGGVAKTQQIFFXAPLEIFFLAHGFSQKVF

SEQ ID NO: 195951 - protein, 74 aa, Zea mays
  Clone ID: MRT4577_110293C.1.pep
LWYSTNKSFDCKLLVYLPIAALLLIMLLVVRRLVWVYCVINVLRQPVISECLNRNSGCPLSSTRSPSHGSKFIF

SEQ ID NO: 195952 - protein, 98 aa, Zea mays
  Clone ID: MRT4577_110294C.1.pep
HTSWDTPLHLYISIMICGIQTTVLLFVSLNLVTTEYTSTRYQHVDSMSGFPPAIGAMRMNFSGVIIFLSQQVALSTKACMRWSPRAMEFWFQPCVAAM

SEQ ID NO: 195953 - protein, 224 aa, Zea mays
  Clone ID: MRT4577_110295C.1.pep
PAGVLLSSRRYLSPSAHGAPSSYFQWPQCVLFALQRCALLPAPLPWSSLRALPLLRAQLPRLAAVLLQPPSHGVQFSLPSPRPRLPLVFSKPRQQHPVSIFLTSRSLVTRYTRAVSCSPGWPSCCPPMAPSRGPSLGRARPGHGGVVSIRPGSAMASPLPSLLQSLSLPPILRDAAPYPCSCSTRQIDSRQSLRSASFHCSVMVSEFWAGVVRVASSVVANSPN

SEQ ID NO: 195954 - protein, 73 aa, Zea mays
  Clone ID: MRT4577_110296C.1.pep
GPPPDCPHAQIVTFRSDSPSPLFSSLLHFIISPIPPILYRVCQSLQNRSFGCLASVLPALRVECRPYLSFPHA

SEQ ID NO: 195955 - protein, 46 aa, Zea mays
  unsure (1)..(46): unsure at all Xaa locations
  Clone ID: MRT4577_110297C.1.pep
CTEITHKLGLHCMRQXHWHIQSTCASTXSSVEEXLGWLSTNITSKA

SEQ ID NO: 195956 - protein, 45 aa, Zea mays
  Clone ID: MRT4577_110298C.1.pep
VTCVAVTAILSGVRMSMWFSRHMSSWFGHNLRWLKWKNMFTIFLS

SEQ ID NO: 195957 - protein, 71 aa, Zea mays
  Clone ID: MRT4577_110299C.1.pep
IKVVKLNVFPPAQARAYYSSIRYCSSSSSLVMFDVWGPLSDKLTCLCGVHVHGLDPLRPVRKVPLITTMEV

SEQ ID NO: 195958 - protein, 99 aa, Zea mays
  Clone ID: MRT4577_11029C.1.pep
SKGWNTHPLKFKSLFLKQLLKRFFGGNKNSMGTARGIFKPRRSKQPRGFCSPLNQFHSFNPLKILDSTIFAPGGRGALKGGSQDKGTALYLNPPQPEKG

SEQ ID NO: 195959 - protein, 515 aa, Zea mays
  Clone ID: MRT4577_1102C.1.pep
MASDSGETESHSDLPSIKMSSTRTDFENESYLQHPVYFSEEQTSDFIEKQITESSERECSESETEDDAELLQNASVILRTESHAPCPYSIPVSDKFKHVDYEDNEVIYSTYMPQLNEYEEEDGSSELGVSQWHMKGKRNNRNAVKRLVDMRDGNTWLNKYNGSLKGSLHNTNGGNPRKEGMHTSGEQFFEESFYQIKEEPNYDSDETNLFENMSHSETNLYYGKKYPSYLRTTRDLSRGYSYFNDSSNVSPLNKDTERIYHVDRNAYWDRPSFYQRKLTSSFGGMGPMLFNVNLKVQASYQGEHVPLVSLMSRLNGKAIVGHPIQIEIVEDGSTAVFCGDSGMQETTAAPPAWPTGRRTAMQRVPRSNPSGALLDGDNEGGLVYSDYETKPTLRKYSSSSNHQVKVNNKISSNARRSSAKPPKKSSKKTNLSSQKLRALSSISTAKNHHGEGGQAKANWHNDIFGGLIGSEGAVPLVTCVPTKVVFTRILEAVGRPPLSAARRVRMASPPVRDPP

SEQ ID NO: 195960 - protein, 90 aa, Zea mays
  Clone ID: MRT4577_110300C.1.pep
RPHTRRGLYLRRHWFPTNWLRNQYLNTPRHLVQWVYSKWSLQNSTVGHNTFFDRRKIPQLTALTGHFDNTLATSQHLAFLWVKKRAHWGK

SEQ ID NO: 195961 - protein, 45 aa, Zea mays
  Clone ID: MRT4577_110301C.1.pep
HIHFILLKLLAYGKTNTYQLPKKILINHWKHKSNILTIPLSQSHY

SEQ ID NO: 195962 - protein, 81 aa, Zea mays
  Clone ID: MRT4577_110302C.1.pep
VGCRLPYPAEIICRLYGTTGEFHKARFLLSPAVATARGLAEVVGSRQMFPHYNTIEASVVARSCIDYNDSGRVGRRGNSGP

SEQ ID NO: 195963 - protein, 56 aa, Zea mays
  Clone ID: MRT4577_110303C.1.pep
APVCFLEFFRVWLFSSEYTALSLEPFPRPCKATSSTPQRIRVCIRGISGWRAMQLP

SEQ ID NO: 195964 - protein, 64 aa, Zea mays
  Clone ID: MRT4577_110304C.1.pep
KIKFLPKSPFFFLSLFASQLLLYKMATGCRSFLPLELGSSSSLYFAPWFPILSVFSMSKRNLFS

SEQ ID NO: 195965 - protein, 83 aa, Zea mays
  unsure (1)..(83): unsure at all Xaa locations
  Clone ID: MRT4577_110305C.1.pep
MAALAPSKILGTKFNFAGSSRYATAAPTAGAQKIVSLFRKKPGQKSKASAVSESSPDISDEFVQWHGTDRRIXMTNGLMNRSE

SEQ ID NO: 195966 - protein, 226 aa, Zea mays
  Clone ID: MRT4577_110306C.1.pep
MQTTAAAAVAWAPGPSASTSSSSSPSTFRVGVASTAVRACSAPRLVASSAPLGCRRLRQVVQAVANPDPAIELPLTAENVEMVLDEVRPYLMADGGNVALHEIDGNVVRLKLQGACGSCPASVTTMKMGIERRLMEKIPEIVAVEPIADEETGLELNQENIEKVLDEIRPYLAGTGGGELEFVTIEEPIVKVRLTGPAAGVMTVRVALTQKLREKIPKIAAVQLLP

SEQ ID NO: 195967 - protein, 86 aa, Zea mays
  Clone ID: MRT4577_110307C.1.pep
FFFFFFFFFLFFFFFLFFFTLSYFIFFLFFLHRWAVHPSYTRLFPGRRLTGIKSHAPTLETQFFSATRAPPLDHRPLRGGARVPPA

SEQ ID NO: 195968 - protein, 85 aa, Zea mays
  unsure (1)..(85): unsure at all Xaa locations
  Clone ID: MRT4577_110308C.1.pep
LAFNQLGVLNPAAYLQQQIGLPFSQLAAANRAAFLTQQQVLPFYQQFAANPASLXQLQQLLPLGQLALTDPADCYQQHIIGGALC

SEQ ID NO: 195969 - protein, 194 aa, Zea mays
  unsure (1)..(194): unsure at all Xaa locations
  Clone ID: MRT4577_110309C.1.pep
IRTRSRGGGGXPLSGRAYLPPGIFFPPVDGQQPYLTRAFFLLSSHGRLPPMGLLHSGGGGIPGAAPHGARPPNSRARASASSTDRDEIAHDSSPAARSFSSDSLSSPCAGGSPPPMGCGRSFLSDGRRALKPLLPFWARPGPCSDGARTEVSLARPPCPSPSPSSMRARASSLCPAHLHLSRGGPWASSPIAPS

SEQ ID NO: 195970 - protein, 99 aa, Zea mays
  Clone ID: MRT4577_11030C.1.pep
MAGSRAQPSLELSVRVVRVDGLDQEQLERGGTLFLRYYVPAGDGRRRLRVDTREVPCGGDLRWGGELARFERRGGSSGTGGAAPAAGIAFELRWRPRPS

SEQ ID NO: 195971 - protein, 59 aa, Zea mays
  Clone ID: MRT4577_110310C.1.pep
VVPVLENPDDAAATNVAGSGIGNRLVVAGGGAAAVAFHAAAAAQLGSLLDASLCTRAES

SEQ ID NO: 195972 - protein, 151 aa, Zea mays
  Clone ID: MRT4577_110311C.1.pep
MGRMHSRGKGISSSALPYKRTPPSWVKTAVADVDELITKAAKKGQMPSQIGVLLRDQHGIPLVKSVTGSKILRILKAHGLAPEIPEDLYFLIKKAVAIRKHLERNRKDKDSKFRLILVESRIHRLARYYKRTKKLPPTWKYESTTASTLVA

SEQ ID NO: 195973 - protein, 70 aa, Zea mays
  Clone ID: MRT4577_110312C.1.pep
LTIFFLSSSAGKMGVAVYLDTIFVPLSLFITVGYHVYLCHTIKNKPSRTTYGISKKRRTDWSLNLNQVIA

SEQ ID NO: 195974 - protein, 69 aa, Zea mays
  unsure (1)..(69): unsure at all Xaa locations
  Clone ID: MRT4577_110313C.1.pep
SHPLKQVDPRPRFRAIFGLVLPFILQQQPQTWRLXGXLLGGHLPQQMQVVWGLQQAPPCPFLCGGGVPP

SEQ ID NO: 195975 - protein, 85 aa, Zea mays
  unsure (1)..(85): unsure at all Xaa locations
  Clone ID: MRT4577_110314C.1.pep
CDFHKSHSCILLWKEYFYNYIFHNKLXYSVCLFQLRRIFLSHRGGLICQIESCYIFDLVQVQVYYFYGCLISYLFLKKIVSLSLF

SEQ ID NO: 195976 - protein, 178 aa, Zea mays
  Clone ID: MRT4577_110315C.1.pep
MQIFVKTLTGKTITLEVESSDTIDNVKAKIQDKEGIPPDQQRLIFAGKQLEDGRTLADYNIQKESTLHLVLRLRGGMQIFVKTLTGKTITLEVESSDTIDNVKAKIQDKEGIPPDQQRLIFAGKQLEDGRTLADYNIQKESTLHLVLRLRGGMQIFVKTLTGKTITLEVESSDTIDNV

SEQ ID NO: 195977 - protein, 108 aa, Zea mays
  Clone ID: MRT4577_110316C.1.pep
ARGGGDVGSSNKEGASANNELIEAGGAAKEAGAEAVGDGTGAAKNAAKVGVATTIYVEGFGAAEMAAAVAAEADTPTVGEDTTNAPNNASYEDTAGGVDTNANDSSCD

SEQ ID NO: 195978 - protein, 44 aa, Zea mays
  Clone ID: MRT4577_110318C.1.pep
ERVGKSVAKPTQRHAIASPRIYIIRLDPAKLFGRFPKKNSTPLI

SEQ ID NO: 195979 - protein, 55 aa, Zea mays
  unsure (1)..(55): unsure at all Xaa locations
  Clone ID: MRT4577_110319C.1.pep
VALTSSSERKVDXVSVLRYKDTCALCINFLHSGKVDGXPFITHPVGFSQREVEEA

SEQ ID NO: 195980 - protein, 174 aa, Zea mays
  Clone ID: MRT4577_11031C.1.pep
AHREYQVVGRRIPTDADPTPKVYRMRIFAQNDVVAKSRFWYFLSKLAKVKKANGELLSVNELTEKKPTTIKNFGIFLRYRSRTGIHNLHKEFRDTTRVGAVNQMYNEMASVHKATWNNINIIEVNELKAAQTVRPNIKQFHDSKIKFPMPHRVQRVPMKRYRSTFVAKRPSTFW

SEQ ID NO: 195981 - protein, 70 aa, Zea mays
  Clone ID: MRT4577_110320C.1.pep
FFFWSVYRFIHGGIFITICPSKLILGIINGNATHRPWGTRAHNLTGIHYLPPQSPTPFLLGFLFNSALYM

SEQ ID NO: 195982 - protein, 153 aa, Zea mays
  Clone ID: MRT4577_110321C.1.pep
ITSLISFSQASCGMPFHFSSPCWFHVLPPLSLALGFKSWRRRSCTGSWRRPCTGSWRQQCIVHSAAEDGGGGQQTEAEMAVNDDKSETVAVVEGTVASRLAHDCFGEGRRWSSGRADGSNVDDDGAAAERMVVATEGADARSLRSDPLVSLPN

SEQ ID NO: 195983 - protein, 112 aa, Zea mays
  Clone ID: MRT4577_110322C.1.pep
NQLTLHSQGKRGRLLPLYQMFAAPWGQTHQVCLHPSLITSHEPSPLKCTRHSRSPPGCRRPSFAPRRTWGVPGHHLVGVEVPENAEHARRLLLLLADLFLQQLDPLGRSWDI

SEQ ID NO: 195984 - protein, 177 aa, Zea mays
  Clone ID: MRT4577_110323C.1.pep
IKIMDWLGQSQYATQTVWGSSLSSAISEVVFSKNATVRLLVAYWAHLIPNTEKYLKSLLYSNVLCASSSYNHCGGKVEIKYYVVPGHNETGPALSQGGGATGNRYPGFTRVNHGKYAVSDVRANVGTSNLIWDYFYTTAGVSFGTYNPSIVAQLQDVFDADWYSPYAVPVEPLEESA

SEQ ID NO: 195985 - protein, 102 aa, Zea mays
  Clone ID: MRT4577_110324C.1.pep
KAVGIVATRTIVSPPQKGSGVFGPRPRTMTVVSVGILEDVVFPPQIVGKRVRYRLDGSGFIKIFLVPKERNSPESKLETCTWVSLRLCGKDVVFEFPMPENA

SEQ ID NO: 195986 - protein, 74 aa, Zea mays
  Clone ID: MRT4577_110325C.1.pep
SRARSSSTDITFITRWQNMHMGKRLDRSTHTNLALNSIFQGGPAIFYLLHYIRQNKRGGPPPDQDHHSPTPGFF

SEQ ID NO: 195987 - protein, 49 aa, Zea mays
  Clone ID: MRT4577_110326C.1.pep
IMQSERFWMDAHFVDDLVIHGSNNTMLLLKNPKKKKKKKKKKKRAALAI

SEQ ID NO: 195988 - protein, 125 aa, Zea mays
  unsure (1)..(125): unsure at all Xaa locations
  Clone ID: MRT4577_110327C.1.pep
PGGKAPRKQLATKAGPKFAPSTGGVKKPPRFRPGTVALREIPQFPKSPELFIPKLPFQRLVREIAQDFKTDLRFQNFSVSPLQEAAXASPVGLFEDPNLWALPAKGVPLMAKDIQLAPRLPGERA

SEQ ID NO: 195989 - protein, 105 aa, Zea mays
  Clone ID: MRT4577_110328C.1.pep
QKIFGFPGGLKFFPCFQGPKKMVFFVSTGPNPRCRNLFLPRFNICPGTFSCTRGFCLGTCSPPSLSFLFWPPEFFWGVVFPPLCLKKKKKKKKKKKTNQKKKKKK

SEQ ID NO: 195990 - protein, 174 aa, Zea mays
  Clone ID: MRT4577_110329C.1.pep
MAPRTSEKTMTPAAAAAATGLALSVSGGAGASGPHFRGVRKRPWGRYAAEIRDPAKKSRVWLGTFDTAEEAARAYDAAARDYRGPKAKTNFPFPSSCMPLAAGAGAGSLPAAKAVTGGGGSRSSNSSTVESFSSGSDVQAAPMQAMPLPPSLELDLFHRAAAAGTGTGGAAVRF

SEQ ID NO: 195991 - protein, 89 aa, Zea mays
  Clone ID: MRT4577_11032C.1.pep
ERPPGQVQAFFFFFFFFFVFFFFFLFFFFFVSFFFLLTKNDFFWKLFNHAQHRGALPSLLLNSDSQQATNGAKFSYLQRTNTPRGGRRL

SEQ ID NO: 195992 - protein, 159 aa, Zea mays
  Clone ID: MRT4577_110330C.1.pep
ELRAAQTAAPGDDLCKEFDALVDRPLDEREDLAAIFKVLEEIRDKIKIKHGGKKVDDDELLPRSKRGDLANLLPLIRTALELRSKPPPPVQQDATGGAHDSKPTGCIPCKPRASQQHKEEKEGSKEVVSLKLLLRLTQNVLEPEQYYEWTTSYVDEERI

SEQ ID NO: 195993 - protein, 142 aa, Zea mays
  Clone ID: MRT4577_110331C.1.pep
MGRAPCCDKTSVKRGPWSPEEDEVLRSYVQNHGTGGNWIALPHKAGLNRCGKSCRLRWLNYLRPDIKHGGYTEQEDRVICSLYSSIGSRWSIIASKLPGRTDNDVKNYWNTKLKKKAIAMQQQQQEYYHHQQQQHSSGGRGR

SEQ ID NO: 195994 - protein, 51 aa, Zea mays
  Clone ID: MRT4577_110332C.1.pep
ASSYFYKRVHFDCNVAINSRTSCLMYRSLFFNDFDYPDIVFKEECLTIRTI

SEQ ID NO: 195995 - protein, 904 aa, Zea mays
  unsure (1)..(904): unsure at all Xaa locations
  Clone ID: MRT4577_110333C.1.pep
DDGSHYMWIFLLRLKSDMXPMLSHFFAWVSTQFGSTCQAIQCDNWTDFDNFSRAIFLNRGVHIQMSCPYTSPXNSKAERMIRTTNNIIRFLLLQVSIHVRFXAKALYIANYLLNRLPIEAICALTPHFALFGSXSTYEHLHVFGCACYPNLFTTAHKLAHGSTSCVFLGYSHDHKGYXCXDLSTNHLLISHVVLDEASFLFSASPSTSVPKLDSLFANCRVDSPIQPHLXFSSAGSFSAAPSAASASLXTSCIASLSPITPLVALSSPVVPHTALPSPTAPLATLPSLVMPCASLASSTAPCAASAXDSLILCMSMSDMHRACTTSYLSPTRXLRFADPVHVYHLCAQDCPSTRSCIXRRCTTLLSFVEIXHIHPMVTRXNRAVLWPVDRLVLSTVASSSVVSLMPLFARRALVDPHXSVVLXDKHVALLANHTXDLVHRPTRCNIVTGKWVFIHKRHADSSFDWYKAXWILRGFTRLHVVDYDETFSPVVKSRIVRTILSLPLSRSXPVHPLDVKXNAFLYGTLTETMYCSQRIGFMDPAHPNMVYKLHKSLYGLKQAPRFASLVSLGFVEAXSDTSLFIYCCCGGTVYLLMYVDDIVLMVFGPAILQRTISALQREFAMKDLGQLHYXIAVEPPTLAAXMFLQQRAYTGDLSDXASMXSCMLCSTPVDTQAKVSSVVGVPVSDSTAYWTLFXAIQYLTFTRLDIVYXVSXLCLHMHDPXESHLTAVKWIFXYLRGTLDYGLLXNAPPXALVSYTDVDXARCSDTRRSTSGYFFFLGSNLVSWSLKWXQVVSRSSVEAEYRVVANGVVDTXWIRXFLLELXSPISSTNLVYCDNVNVVYLSTNPTQHQQTKHVEIDLHFVRECVAIDDVCVHVQTTSQFVDIFTKGLPTSLFLELRSSLNICR

SEQ ID NO: 195996 - protein, 85 aa, Zea mays
  Clone ID: MRT4577_110334C.1.pep
WRVKPPFFPTTTKHHKQPFPYYYHPHIIHNTILNAPHSPSPITGTPSNPHSQHPYHHTITPTPLQKKPATTTNFLLLPLNFPTQN

SEQ ID NO: 195997 - protein, 60 aa, Zea mays
  Clone ID: MRT4577_110335C.1.pep
MKHVTRCDGKKKRKKTTIELEKMKKKNKIYKKNKTKYKHKLFVFIALSNHGKWGFILRNF

SEQ ID NO: 195998 - protein, 70 aa, Zea mays
  Clone ID: MRT4577_110336C.1.pep
LSSREPFWKSEFVVYKLKEMGKITEKDIMMICDQFQRLDTGSCGKITLSDLLESHHLVSEPRDKKKGKKS

SEQ ID NO: 195999 - protein, 42 aa, Zea mays
  Clone ID: MRT4577_110337C.1.pep
MSGASARGRLSPASGGAGDSEPRSAVGRTRSVSATRGRKPSP

SEQ ID NO: 196000 - protein, 181 aa, Zea mays
  unsure (1)..(181): unsure at all Xaa locations
  Clone ID: MRT4577_110338C.1.pep
PHLQDFRPSLSSSPRADAAAADARRPPRRHGRCTTEKDFLXQTKVFLFSNKSRGGEQPXQGGNPFCNSIGLGXFKTPSEAIEETYIAQQXPFAETVXSIRGRIIAGTCHSANTDRTIFVHRNYLLFGNKYQRDDKRCSNIPDHISPCFRANEGDHVIIGQCTSLSKLXTGNVVKVIPAGSA

SEQ ID NO: 196001 - protein, 159 aa, Zea mays
  Clone ID: MRT4577_110339C.1.pep
AGRASLPLVAAALHFLLAAAAPLSIAARSLLQPSPMVPSRVPLRAPPCITGARSSPGSSASPPMAAPSVWHPAQVAPSSSCGRSTTSSPCSSHVRLSSIPSPSSLMLLRDAALSIPESSTVPPWFQPSNPIANLPRLAAGTLSDHVMWRIGTESTTRWC

SEQ ID NO: 196002 - protein, 157 aa, Zea mays
  Clone ID: MRT4577_11033C.1.pep
MLIPKDDRKKIHEYLFREGVLVAKKDFNLPKHGDIDTKNLYVIKAMQSLNSRGFVKTRFSWQYYYYTLTPEGLDYLREWLHLPAEVVPATHIKQQRSHAPPRGMMGGEDRERRPRAPREGREGGYRRREEGKEGGAPGEFAPSFRGGFGRGRGAPQQ

SEQ ID NO: 196003 - protein, 189 aa, Zea mays
  Clone ID: MRT4577_110340C.1.pep
MARILVEAPAGSGSPEDSINSDMILILAGLLCALVCVLGLGLVARCACSWRWATESGRAQPGAAKAANRGVKKEVLRSLPTVTYVSDSGKAAAAAEGGADECAICLAEFEGGQAVRVLPQCGHAFHAACVDTWLRAHSSCPFCRRVLAVDLPPAERCRRCGARPGAGAGISALWKAPTRCSAEGPTFLA

SEQ ID NO: 196004 - protein, 120 aa, Zea mays
  Clone ID: MRT4577_110341C.1.pep
ELDGIERYRDKERRDRHRREEKDHNGRGRRDREKEKDDRRRDKDDGKHRDRDRDRERDRDKDSKYRDRDKEPERERNRDRDRDRGKDREREPHRQRDKDRIINRDKEADRDKEREAEGQG

SEQ ID NO: 196005 - protein, 49 aa, Zea mays
  Clone ID: MRT4577_110342C.1.pep
VLSRRPPLVSARLLLTQSCLGPHQRIPRPGPEGAATNILAPRPLRRLCA

SEQ ID NO: 196006 - protein, 38 aa, Zea mays
  Clone ID: MRT4577_110343C.1.pep
RLCVHRCHGASIVSCSRRALTSVRGLHIVVKYAHGWSL

SEQ ID NO: 196007 - protein, 93 aa, Zea mays
  Clone ID: MRT4577_110344C.1.pep
LTKGDWDHRAGRDEALPSHTRVHLYGIAPPSTGHHHGDDATAIAAATVALRGRRGTLSKYPSLHRILWLLSEANTHPCKHDYHNIKQGTNTTK

SEQ ID NO: 196008 - protein, 47 aa, Zea mays
  Clone ID: MRT4577_110345C.1.pep
TTTSCSRKQHRILCMKRQLKLSAYIVGNIIGKEVGSFAILPCYYCLS

SEQ ID NO: 196009 - protein, 120 aa, Zea mays
  Clone ID: MRT4577_110346C.1.pep
FLPFNQQVALNFAAYLQKQQLLPLSQLVVAYPGKFFPFNQLEALNFQVYVQQQQLLPLSQLVVVSPVAFLKKKNLLRFYLHTGPKVGTLLKLQQLLPFDQLVLTNPAVFYQQPIIGGALF

SEQ ID NO: 196010 - protein, 94 aa, Zea mays
  Clone ID: MRT4577_110347C.1.pep
YDSSAYSVIQSRAASCTRRLFSSADSFTPINKYCVTNLLVSINRIFKIEKNNNTYEIESAFQTFCLIFSTSQRAHFFLTSSNVPIHFFYSSFDR

SEQ ID NO: 196011 - protein, 88 aa, Zea mays
  unsure (1)..(88): unsure at all Xaa locations
  Clone ID: MRT4577_110348C.1.pep
MAGWPPPPPAXPPPPPPTAHRAPLPCLRHPPPXPPALLPLSSSLPPQPTSRRPPAFGALPSPSLPLPPATAHRPRSSMPSLPPTAALP

SEQ ID NO: 196012 - protein, 98 aa, Zea mays
  Clone ID: MRT4577_110349C.1.pep
VLVNWYQLSCMLRKNKSDNRTVIRNKFMFLLTVCCACACMWWDLCAAQYSTVKPGAEPGFRVREAGNIDNACTHIYTDLVKTYIIIKSTRLFCDTKAN

SEQ ID NO: 196013 - protein, 80 aa, Zea mays
  Clone ID: MRT4577_11034C.1.pep
RRANREQPSLRIGRPCRPNCSLERRPQRLTGPMFSVNGTPGRFSAPSGLVLFSPRGSCIESGCFFLHPIILSFISFQCLI

SEQ ID NO: 196014 - protein, 41 aa, Zea mays
  Clone ID: MRT4577_110350C.1.pep
NVSRYPSRTETNGNVFLSHPGGFYNVDALTAVEDKLTRGSA

SEQ ID NO: 196015 - protein, 186 aa, Zea mays
  Clone ID: MRT4577_110351C.1.pep
MASFSLKPQHNGSSSRIYHTICSATASEWRSLLRSRSFVSWSWKKHTRLRLRCCQGSDGGDDSRLSQNTGIFHPSIWGDFFLGCSSSPEEAAASSQQKAWMERCDELKEEVGRLMVVEANSPLHERLHFIDALESLCLDHLLEEEIGAALTQIETAGVSDDCDIGTVSLWFYLLRKHRHRASPDVF

SEQ ID NO: 196016 - protein, 49 aa, Zea mays
  Clone ID: MRT4577_110352C.1.pep
SYQWSPVGVHGVIFLAPIVVCKRLHTSPGSMLPSHPFRQRSLASSPRAE

SEQ ID NO: 196017 - protein, 66 aa, Zea mays
  Clone ID: MRT4577_110353C.1.pep
IVCKAATSVLHFYPGWFLTEENSVNSANHTRPPGVPLCDFYETDVSNPQPGDREQPHWLDKTCPYN

SEQ ID NO: 196018 - protein, 191 aa, Zea mays
  Clone ID: MRT4577_110354C.1.pep
MSIELLTKFLTLLFGYAMPALECFKAIEQRPGRADQLRFWCEYWIILVLLVMFDEIAGVLISKIPMYYELKLAFLVYLWYPKTRGTDIVYETFLQPLVMQYQPNIEARLQYLRANAGDILVFYLKNFAERGYELFLRVLDYVRSQASRGSRTRSFFSFRGERSERPSFTDDYVTGGDRRDGGRHRRPRSGY

SEQ ID NO: 196019 - protein, 86 aa, Zea mays
  Clone ID: MRT4577_110355C.1.pep
PWTLFWKWHPNTEPGPVIPLYKTTKGGSSFQNIKVSHVPPVVIQSNTWQVCLNGKSWPPQSVCFKGMFLNLFILSPNDMKKITPKI

SEQ ID NO: 196020 - protein, 125 aa, Zea mays
  unsure (1)..(125): unsure at all Xaa locations
  Clone ID: MRT4577_110356C.1.pep
MFIRILHYMWNSHKTRNSSAEHENPSKAKXWVQQHVQPYISQTRITCITXGNEVFNYNDTQLTANILPAMQSVYNALVNLGLGQQVTVTTAHSFNILAYSFSPSSGAFRQDLIQYIQPLLSFHAQ

SEQ ID NO: 196021 - protein, 75 aa, Zea mays
  Clone ID: MRT4577_110357C.1.pep
HLSFSRSISIASGGILLWKIKILALPNSQTLTWWETGSTCSGGGRYGGNIAWDPDVHDRLTDRPHDSHQVLALSA

SEQ ID NO: 196022 - protein, 71 aa, Zea mays
  Clone ID: MRT4577_110358C.1.pep
RAGLDSNLSPWVARARPVISRACKPARSHSHLPNKILGCLYLPPPSPNGPAQIGADRTRHRQARRAAPHPR

SEQ ID NO: 196023 - protein, 135 aa, Zea mays
  Clone ID: MRT4577_110359C.1.pep
RAYVRAWSIHEQDIDLCIRAGSPHVGMVEWKLPILRRRMVASRRRSSESFRWPGLGGSVLAGVSLGLRSATSASTDPRQDIQRRRPARAMDTHTSILVQLLMCFRDAVVGATNLFGQHHLARPYQPLDVSCPVLV

SEQ ID NO: 196024 - protein, 45 aa, Zea mays
  Clone ID: MRT4577_11035C.1.pep
KHCFIYTLKTINPLPFFLFSLYTYIREGAFLFTLLKGHNFILTGV

SEQ ID NO: 196025 - protein, 115 aa, Zea mays
  Clone ID: MRT4577_110360C.1.pep
PSHTNAAPTPTRSQSRSPKSEFPATPAFARRDRRRADAALAQLAHTAPAAVAHQSRPQPDVRSAARAAKSTGPMTNRPVQRPNLRSARRRQSPGGRIGVLGGGGLLLGSRWRLPA

SEQ ID NO: 196026 - protein, 56 aa, Zea mays
  Clone ID: MRT4577_110362C.1.pep
RRTIQKHTQAESPLTTNLTTIELPRWDFIYALVELYARAPAATIRPQRSLAHIRPL

SEQ ID NO: 196027 - protein, 124 aa, Zea mays
  unsure (1)..(124): unsure at all Xaa locations
  Clone ID: MRT4577_110363C.1.pep
CLVNKDKKERPGRSSETYVNSEGDTLAVAIGDTAVSVGSKDITIGEISRDLDKFAASECTEPFDFATKAVTEFKIKVDVDKTVIGPTKSVXEDLLPYPLRDEEINXIATEGTGEPYSDTTADRS

SEQ ID NO: 196028 - protein, 81 aa, Zea mays
  Clone ID: MRT4577_110364C.1.pep
RTASLSASPICIRRRLNASIPLTARMTQAPFLPRERLLKLRMHSQSMTITRYLTGRYNVTTFVASPFFFFCLQHVHERARR

SEQ ID NO: 196029 - protein, 250 aa, Zea mays
  Clone ID: MRT4577_110365C.1.pep
MKSYPWAGARPLAVVQLLLFLADNMSGKSTLSEVRTSSGTFLRKGQDPIVESIEDKIAAWTFLPKENGEDIQVLRYKHGEKYEPHYDYFTDNDNTVRGGHRYATVLLYLTDVPEGGETKKKKKKKKKVFPLAEEPDDAKDATLSECAQKGIAVRPRKGDALLFFNLNPDGTTDSVSLHGGCPVIKGEKWSATKWIRVASFDKVHHPQGNCTDENESCAKWAALGECIKNPEYMVGTTALPGYCRRSCNVC

SEQ ID NO: 196030 - protein, 84 aa, Zea mays
  Clone ID: MRT4577_110366C.1.pep
QNPLAVPRPLLGYVLRATLCLGCCRVGGDGMLVMGGYGSGILSSGTMFRSVLNIIPGGQSFPLRPSFFFIMRHNVFLCSSGVTL

SEQ ID NO: 196031 - protein, 51 aa, Zea mays
  Clone ID: MRT4577_110367C.1.pep
SMQLGNFLRSIQIILYRTMIVQCIVVRVMLIELFTSEGLLEGKLICSEAGQ

SEQ ID NO: 196032 - protein, 308 aa, Zea mays
  Clone ID: MRT4577_110368C.1.pep
MKSYPWAGARPLAVVQLLLFLAHLVDRGGAAGGGSKGSSVYPAAVVYPHHSRQISCKPRVFLYQHFLSDDEANHLISLARAELKRSAVADNMSGKSTLSEVRTSSGTFLRKGQDPIVEGIEDKIAAWTFLPKENGEDIQVLRYKHGEKYEPHYDYFTDNVNTVRGGHRYATVLLYLTDVPEGGETVFPLAEEPDDAKDATLSECAQKGIAVRPRKGDALLFFNLNPDGTTDSVSLHGGCPVIKGEKWSATKWIRVASFDKVHHPQGNCTDENESCAKWAALGECIKNPEYMVGTTALPGYCRRSCNVC

SEQ ID NO: 196033 - protein, 215 aa, Zea mays
  Clone ID: MRT4577_110369C.1.pep
NVKVTHRVGCPLNYDTLKETIINVRESAKSDKEVPLSIVVISDRDWFVGDAAQADKQLAYTLLLAENICQKHGVMVENLVSEIVDMGLGKQISKIRPSLSFIGAEEIMSRVTAQVAESSELNEVWKDILNAEGDEIYIKEIGLYMKEGEKISFLELSERAVLRREVAIGYIKDGKQHINPINKSEPLSLEMNDSLIVISEFEGEQPIMMGGESSG

SEQ ID NO: 196034 - protein, 492 aa, Zea mays
  Clone ID: MRT4577_11036C.1.pep
NILNVSMNLGLDISAEAEKERGRIRSFEEQEFDAFQRVKRELFRDVPYLLIIDNLESERDWWEGKDLHDFIPRNTGATHVIVTTRLPRVMNLEPMQLPQLSYIDAMALIQGKRKKDYLPEEAEVLRKFDERLGRLSFGLWVVGSLLSELMIAPSTLFEAVDRISLNENLFPIGANDDGFCRNNSFLVKVLVFCFALMDRAKGGSLTSRMVIAGSWLAPTPVSSTLLAATASKLPMKGSGMHLFGESLRTAFLCGTHCFLAPNGRKAEVESALLLVNLGLARKANRHPGCWIQFHPITQLFGKIRGGLVPTTAAVNGVMRTGNPSVYSDHLWASAFLVFGFKSEPPAVQLKAVDMVLFIKKTALPLAVDSFMSFSRCGSALELLKVCTNVLEEVEKSYASRMQDWSRGSLCWRKKLQPNHRVDELVWQEVTLLKATLLETRAKLLLRGGLFDTGEELCRTCISIRTVMLGHGHAQTLAAQETLAKLVRYRSKI

SEQ ID NO: 196035 - protein, 62 aa, Zea mays
  unsure (1)..(62): unsure at all Xaa locations
  Clone ID: MRT4577_110370C.1.pep
SLMTALSQPPAPHKLYFTHKKIDYHNKNIKDMXRQNANPPIRDNADFGSTNQNLQKNLKIKI

SEQ ID NO: 196036 - protein, 52 aa, Zea mays
  Clone ID: MRT4577_110371C.1.pep
LTTPVSTESGRLASDAVLFFLLYMAAAVEKFLDVAENSRVQELSLRCSISYF

SEQ ID NO: 196037 - protein, 61 aa, Zea mays
  Clone ID: MRT4577_110372C.1.pep
MDPNCSCAAGDSCTCAGSCKCKECKCTSCKKSCCSCCPVGCAKCAQGCICKGASDKCSCCA

SEQ ID NO: 196038 - protein, 162 aa, Zea mays
  unsure (1)..(162): unsure at all Xaa locations
  Clone ID: MRT4577_110373C.1.pep
LCAEQRTPATPRSRHHXTPLPRSTPTPXVPFQKRHLSPPAFPPRPTCLRPPPRPPRRRRXTDAPPKPXRREAQPDGIPHRRHRAAPXPPSRRTRTWPRRSRPRTSARSPTSGRSSPPTRTKSPSGACRSTRPATPPPTSARTWCSSRSSAPRTSAPATRTPC

SEQ ID NO: 196039 - protein, 149 aa, Zea mays
  unsure (1)..(149): unsure at all Xaa locations
  Clone ID: MRT4577_110374C.1.pep
MVCTPRSCTLFKNXADGNTACXARQKTKLFGIHANIPXMDMCNLDXXPLCYSINAMPWSNAHYTNHVTTADWLSYHHNDDMVLNASVLYYSDLEKRTLXCAXPRTCSVFVTILRIRGQPVTCGKELSACVPDSNNSDDQELAVGGILIY

SEQ ID NO: 196040 - protein, 46 aa, Zea mays
  unsure (1)..(46): unsure at all Xaa locations
  Clone ID: MRT4577_110375C.1.pep
RVARIARAHLSXLXSPPRSSLGVSXXREIVQRITXRKRHSYAYESN

SEQ ID NO: 196041 - protein, 274 aa, Zea mays
  Clone ID: MRT4577_110376C.1.pep
GRPGSPLSIPSSFGCSFPLPLSRAPVLLLKPQGEARFHLADPMAQPEIPAFGDWETTGNTPYTQKFEDARKNKKTGILAQPNDPRRNLEPPRKSPLHPTVYKTNPQDQGPRNPPHRPRPELDNQRHSDRPTHRESAPRRHSNLQREQGSNAGTPRSPYRTAAGSASPMQPNNQSKPKHRSTGMQTPERRASSEGLGQHTPGRSRMKPGGYEPEEVAVPPFGEWDDANAASGEKYTGIFNRVRDDRLSPTSSARQPSTTRSEENKVQQKCSCCIL

SEQ ID NO: 196042 - protein, 277 aa, Zea mays
  Clone ID: MRT4577_110377C.1.pep
GKADISVLFFGGLRSVPARICVKRVVILDFYNFCTGEARFHLADPMAQPEIPAFGDWETTGNTPYTQKFEDARKNKKTGILAQPNDPRRDLEPPRKSPLHPTVYKTNPQDQGPRNPPHRPRPELDNQRHSDRPTHRESAPRRHSNLQREQGSNAGTPRSPYRTAAGSASPMQPNNQSKPKHRSTGMQTPERRASSEGLGQHTPGRSRMKPGGYEPEEVAVPPFGEWDDANAASGEKYTGIFNRVRDDRLSPTSSARQPSTTRSEENKVQQKCSCCIL

SEQ ID NO: 196043 - protein, 65 aa, Zea mays
  Clone ID: MRT4577_110378C.1.pep
MLHERVKAEAMQILSLFHVLTRLDVFDLDYTLWPFYCECRANMDSTRLFMLAMVIMSDPHENGTD

SEQ ID NO: 196044 - protein, 85 aa, Zea mays
  unsure (1)..(85): unsure at all Xaa locations
  Clone ID: MRT4577_110379C.1.pep
MTPTSALRVVMPQICFVITVRSGSEVRIPYDGDXNXVPKTAXNFRALCTGEKGVGKSGKPLHYKGSTXYRVIPEFMRXGGDFTRG

SEQ ID NO: 196045 - protein, 94 aa, Zea mays
  unsure (1)..(94): unsure at all Xaa locations
  Clone ID: MRT4577_11037C.1.pep
RGRNVVLDQXGDPKVVCGGVTIDHAIELYEPTENARAAFISEVALPTKXTAGDVTTTGRILAFENIKLSLLRVTTGAHPPSLKKVIDKTLPPPP

SEQ ID NO: 196046 - protein, 46 aa, Zea mays
  Clone ID: MRT4577_110380C.1.pep
SRLPCSTIFISPTRQCFSIESQYLALRHNTRALLYGWLYDELLQLN

SEQ ID NO: 196047 - protein, 62 aa, Zea mays
  Clone ID: MRT4577_110381C.1.pep
KNRPAHTLLPSMRSWPELTGGSTTSRDLKQTTELKPSHRSQYINIRQHHTIPVLSIRHYKSE

SEQ ID NO: 196048 - protein, 28 aa, Zea mays
  Clone ID: MRT4577_110382C.1.pep
QVVHVRLLSRVISWMSMSRVTEGCQHEQ

SEQ ID NO: 196049 - protein, 129 aa, Zea mays
  unsure (1)..(129): unsure at all Xaa locations
  Clone ID: MRT4577_110383C.1.pep
MSALMGVESWRVPTPVQVTXGAVVLEPLTQFELQEQDRXSDLVHCSIALYMSEPVSVDDLSRLVAAEEARMLRSALXTRGLFLVAKHEIEVSLXMHDVMGVSLDFFYQTLXREQEYSNLIGEKAGPVSS

SEQ ID NO: 196050 - protein, 56 aa, Zea mays
  Clone ID: MRT4577_110384C.1.pep
LLLYLHTSYSSLLPSFSSMTCACLSTSSKITYSCMTPSYLFYNVYLIHLIVRIFTT

SEQ ID NO: 196051 - protein, 150 aa, Zea mays
  unsure (1)..(150): unsure at all Xaa locations
  Clone ID: MRT4577_110385C.1.pep
GTRVKLPPKSQPPEKTEESPSAPDAPTCPKQCRRTGTLQSXFCASSLVVTATVKSMVREPGEGLAVTVSLIGAYKTGGLDLPSPPTGASLKFYVPCKQCPPMKKGVSYLLMXQVEENRGPVLPPESFVVXHRPNQDQILTNLSKRKCPSQ

SEQ ID NO: 196052 - protein, 679 aa, Zea mays
  unsure (1)..(679): unsure at all Xaa locations
  Clone ID: MRT4577_110386C.1.pep
MAAVVAIWRKDFRNFRALNSAFVILLPKVENPSNAKEFRPISIIHSFAKLITKILANRLGGQLDSMVSKNQSTFIKGRFIQDNFMLVQQTTRFLHSQNQPTIMLKLDISKVFDSVSWPFLLEVLQSLGFGAGWCDIVSGLLATSSSQILLNGIPGDFIPHRRGLRQGDPLSPMLFILVMDVLNLMVGRAVEARLLQPLSTCSFLHRVSLYADDVALFIKPTVDDLVLVGNILRLFGEASGLQTNIQKSSIIPIRCSQSEVATVQDHLPCKLEEFLFKYLGLPLSLKKLNKAQLQPFIDRLANSLPGWKADLMTKAGRAVQVQFVLTATIVYHAMALDLSPWALKAMDKIMRNFLWRGRSETNGGHCLIAWPKVTRPKELGGLGISNLQSLNWALRVRWLWLQKTSPDKAWASFQLQFSDQIPWQRLASSNASASASTEASDSEVFFEKWRIGVSTYRVSVSISPCQGNIDGRNTLFWGDRWLLGQRLVDLAPHLYAMVPKRVANKRTVVEGLTDMAWVHDLRGTVTVVVIAEFINLAEAVSEVLFLPDTPDKHIWRFSSSGQYSAKSAYGMIFMGSITFEHCDLIWKSWAPPKCRFFLWLEEETINHLLLSCVFARQFWFILLQRIGLAGVAPQPGEEDFMAWWKGISAPLGGSSQAGLNXLGAWCLWKHRNDCVFNGM

SEQ ID NO: 196053 - protein, 226 aa, Zea mays
  Clone ID: MRT4577_110387C.1.pep
MRRICIPKLVILLLLCTRTLPAGVSSAKIHGNPANDLVALINGKREASRLPALRNSRGLGCMALQYISECMAATTGGAACSSGNTMACQTPEAHITEVYAANCGVELPTVDVISGRLFGCHRDRDGPEDALASATALSVIRGKEHTQVGAGFDRRGPFFWCLLFSSGSPNSTFLLEAGGKGIDQTHGCFSAPDRPSCNATPPRPGQLMCTITAAAAVLLFRCLVST

SEQ ID NO: 196054 - protein, 792 aa, Zea mays
  unsure (1)..(792): unsure at all Xaa locations
  Clone ID: MRT4577_110388C.1.pep
KETVNSTPRAQPKKGAEPVAVSSTSGKGSAIRRVTLVILAAVLFGVSIALKDGAEKASEYFAGSPSIDLEALGIQHHLLDHLVNSCSEEEVWDTIKQMPSDKAPGPDGFTGRFYKVCWPIIKKDIMAAVVAIWRKDFRNFRALNSAFVILLPKVENPSNAKEFRPISIIHSFAKLITKILANRLGGQLDSMVSKNQSTFIKGRFIQDNFMLVQQTTRFLHSQNQPTIMLKLDISKVFDSVSWPFLLEVLQSLGFGAGWCDIVSGLLATSSSQILLNGIPGDFIPHRRGLRQGDPLSPMLFILVMDVLNLMVGRAVEARLLQPLSTCSFLHRVSLYADDVALFIKPTVDDLVLVGNILRLFGEASGLQTNIQKSSIIPIRCSQSEVATVQDHLPCKLEEFLFKYLGLPLSLKKLNKAQLQPFIDRLANSLPGWKADLMTKAGRAVQVQFVLTATIVYHAMALDLSPWALKAMDKIMRNFLWRGRSETNGGHCLIAWPKVTRPKELGGLGISNLQSLNWALRVRWLWLQKTSPDKAWASFQLQFSDQVKSLFDLALVSEVGDGXGSNTLFWCDRWLLGQRLVDLAPHLCAMVPKRVANKRTVAEGLTDMAWVHDLRGTVTVVVIAEFINLAEAVSEVLLLPDTPDXHIWRFSSSGQYSAKSAYEMIFMGSITFEHCDLIWKSWAPPKCRFFLWLVAHNRXWTADRLARRNLDHPDACVLCDQEEETINHLLLSCVFARQFWFILLQRIGLAGVAPQPGEEDFMAWWKGISAPLGGSSQAGLNSWGRGVCIHYIN

SEQ ID NO: 196055 - protein, 767 aa, Zea mays
  unsure (1)..(767): unsure at all Xaa locations
  Clone ID: MRT4577_110389C.1.pep
MVADLLLSLLLPQFNQCCVAGLLPCTEFVAGRAQVEVIMNNVESSAASGGAPGSAASATLDSAAFVEKAIAALPPELASQAVDVKRKAKSQDPGWKYGWWPDSTKDFVQCIFCRKIIPSGIKRFKQHLAGGFGDTMKCGSVPELVSKEMLAYLRKNARSLVVNVDEDGGEDESEGKKEQVAAEPSSGTKVKQAKKKINQSAISAFVVSAPPKPQTQKHSKSVSSMLCKTPEEVVAERHRSKTSQSTLEHCTKKDKEAKQIVDDHVADFLYENNIPLNVVKSRSWEIMLESIGQYGPGYRSPSYHDTRVPLLDRAVDRTAELRKKHEEAWKEYGCSLMSDGWTDMRQRHIINFLANSPAGTFFLESVDASSEVANAQMLADLLEKQINKIGKEYVVQTVTDNGANFKAAEGQQAENIVLSAPFWNKVENCLKATQPLLVALRIADGDETPAAPEILAAMDVAKNTIKEALKDNQRLLAEVLNCYEKRWETQIEQKLYGAALFLNPGKFXHKGQRQKTSCKAKIHXFNDCMWKMVADDNEQTVISKQADDYERSEGECFSKQGAIRDRDKKNPILWWGSYGGLAYELQCLAKRIISLCCSASGCERNWSVFANIHTKKRNKLEHKRLDKLVYVSYNRKMQNRFQKIRELGSKGKRSNPLLLNDFQWESEWVVENDEVHAGDGADITWANVDEVVGATEGLRGRNLPRAASTRAAVSSQIIAYSRSRKRQRDIDQHPEGDAADEMDEDNDDESGPAEVADAGFHLDDDLL

SEQ ID NO: 196056 - protein, 111 aa, Zea mays
  unsure (1)..(111): unsure at all Xaa locations
  Clone ID: MRT4577_11038C.1.pep
TVCFDIDAGGFLNVFAEDMTTGVLNKIXTITNDXGLLFKEEIAKMVHVAEKFMLXDEEHKKKVESKSSLENYSYNMRITINDEMIEFKLAVDYKKKIEDSIVAAFSWLVSN

SEQ ID NO: 196057 - protein, 64 aa, Zea mays
  Clone ID: MRT4577_110390C.1.pep
LFYISPRTGLERFMVCTRYVLHGIKFVLRLKMLELIHRIRLGIMPPLLFHRVLWSSLLFLHCCF

SEQ ID NO: 196058 - protein, 92 aa, Zea mays
  Clone ID: MRT4577_110391C.1.pep
PLARSLALYASHPAPPDRHLHIPVSVHARPPALPPASTSLKPRLRCRGRTPEAALQGEHGSSKSTALSRSCNLPRYTITDVYSIRDHPFRRR

SEQ ID NO: 196059 - protein, 58 aa, Zea mays
  Clone ID: MRT4577_110392C.1.pep
SARANFFIFLPRSNHPPAHVDGYAKPVLRKKLNCTRTGPAESYPAPTRYKPPHNELTY

SEQ ID NO: 196060 - protein, 151 aa, Zea mays
  unsure (1)..(151): unsure at all Xaa locations
  Clone ID: MRT4577_110393C.1.pep
ERTRRQAAEAVGGLLLPAARPAPGARSGGVTSPKWKQHRMPTTPHGKFPIIGHNNLXIGSHAHVXSLRDLHGKYGHNGLMLGQVGAXVPTIGGPTPQAAEAVLRKHEHVLAXSRPRNPXVATSCRYNFDGTGAFGAGTARYWAHGGKGGQT

SEQ ID NO: 196061 - protein, 58 aa, Zea mays
  Clone ID: MRT4577_110394C.1.pep
IFIIIKRGMAWNSSRVSAVLVSLLATSQHHVGALKAGYGPGCKIMGSHADPWKAIVSR

SEQ ID NO: 196062 - protein, 38 aa, Zea mays
  Clone ID: MRT4577_110395C.1.pep
AYLDGLFKDTNLCAIHVKRVSIMPKNIQLASSTCGKVT

SEQ ID NO: 196063 - protein, 615 aa, Zea mays
  unsure (1)..(615): unsure at all Xaa locations
  Clone ID: MRT4577_110396C.1.pep
ESACKSGSALLKRQXGFNFKDPAKAASVKQEPQPQIDCTGNLQVWRVNGSDKTFLSFSEQCKFYSGDCYIFQYTYPGYIGDECLIGNRNGKKSVQEERSAAISLADKMIESLKFQAVLVRIYEGKEPTEFFPIFQNLVIYKGGTSTGYKKFVSENGIEDDTYSENGVALFRVQGSGPENMQAIQVDTAAPSLNSSYCYILHDGDTVFTWIGNLSSSMDQELAERQLDVIKPNLQSRMLKEGSEYDQFWKLLGVKSEYGSQKIVRDQESDPHLFACTFTKGVLKVREIFNFTQDDLMTEDIFILDCHSCVFVWVGQHVDTKIRAQALNIGEKFLDLDILMENVSRETPLYVINEGSEPQYFTRFFSWDSAKSIMHGNSFERRLSLVKDGVKPRADKPKRRSTTSTHTGRSSVPDKSQRSRSMSFSPDRIRVRGRSPAFNALAANFENPNARNLSTPPPVVRKQVPKPVSSDSSKPPPRTASIAAISASFERPKATLIPKSIKASPDASKPQIEANKPTLETNAKEINPTKDSQIATPTVEEDVKESQAECQAGLPIYPYDSLRTSSTNIPTDIDVTKREIYLSSSEFREKFGMTKEAFGKLPRWKQNRLKIALQLF

SEQ ID NO: 196064 - protein, 83 aa, Zea mays
  Clone ID: MRT4577_110397C.1.pep
IFPAAKKKKNFFSLLKFMRDAGSKIFFFNDSKGPVPFKVSENLFFMGAPPPRGGKIKFQGGPPPPGGKKKGQGRNFAPQKMWE

SEQ ID NO: 196065 - protein, 98 aa, Zea mays
  Clone ID: MRT4577_110398C.1.pep
DHRIAEALQVAARALTAGDGRRAQDWTGWLTPAYSSYRCLGTTRLRVRMNQDACSRSSYHGHANSVKAMHLLRWGRGGAARGAHIVVHLRWRCSLRCV

SEQ ID NO: 196066 - protein, 154 aa, Zea mays
  Clone ID: MRT4577_110399C.1.pep
ELKVYSLAILLVNLGKDETSPDQLALFLYCNYFIYSVCGQNLLPRNLGVPVFKDMNKSTVCGRSQSIIRYEEILDEAPFGMRGFFFSFLHFFCENRLILVKFLYIPLDFLHFKGSLISGANSYHLLVPLPRHIICSSATLQRREETIPHFDNPA

SEQ ID NO: 196067 - protein, 86 aa, Zea mays
  Clone ID: MRT4577_11039C.1.pep
MPTPTPSLGRNSEIIFVGIMFQQLMNHTFPTFQHLIDRAIMTEKKRKEMEDRKRKIGGPRPGSSNRPRFSGNPPQQFKQNQHPPQQ

SEQ ID NO: 196068 - protein, 252 aa, Zea mays
  unsure (1)..(252): unsure at all Xaa locations
  Clone ID: MRT4577_1103C.1.pep
SPRVRPRVRGRVGFDDRRVPYNIMSGTSMSCPHVAGIVGLLKTKYPAWSPAMIKSAIMTTATTTANDGNPIQDETGAVATPFGYGSGHVDPVKALDPGLVYDTTLLDYTNFLCSLKPTQNPLPXPGRPPPAPGGNLSQPLVGLLLPLFDAAGEPCKCSKGPYGRPEDLNYPSIAVPCLSGSATVKRRLKNVGAPGKYRAKVTEPAGIKVTVVPSELYFGVGEEKEFTVKMDVDVNAPAANNDYVFGSVVWSD

SEQ ID NO: 196069 - protein, 90 aa, Zea mays
  Clone ID: MRT4577_110400C.1.pep
TFFPLSIPGWGCWPYSFYPPPRSRCPMRTKNRRATRGRPAMQPRPGATLCLTEQTARCCALCQHTVRAAAHMHHTGRARVDADRPSHSDC

SEQ ID NO: 196070 - protein, 137 aa, Zea mays
  Clone ID: MRT4577_110401C.1.pep
NRGEDETSPDQLALFLHCNYFIYRVCGQNLLPRNLGVPVFKDMNKSTVCGRSQSIIRYEEILDDAPFGMRGFFFSFLHFFCENGLIPVKFLYIPLEFLHFRGSLISGANSYHLLVPLPRHIICSSATLQRRGRNHPP

SEQ ID NO: 196071 - protein, 92 aa, Zea mays
  Clone ID: MRT4577_110402C.1.pep
ASLSREEVVPRHHRSLFTGDRRNRRPGDREAPLRAARQGRRSLSPEKDLPRGGRPWADIVVGDTERIAPRAVPHRVIILRHRRVPSRLRRKV

SEQ ID NO: 196072 - protein, 90 aa, Zea mays
  Clone ID: MRT4577_110403C.1.pep
QKGATGSNPVVTQRRSHRHVQKGTRKSNQPFSTKKTTNPHSLEQQSNPDREGVNGYASRPKRDGQAGRRPNSTPDSPRAEAIREARLVPN

SEQ ID NO: 196073 - protein, 33 aa, Zea mays
  Clone ID: MRT4577_110404C.1.pep
SRLQVVRTRLENRNRLPFPPMCCGIICISSYDL

SEQ ID NO: 196074 - protein, 70 aa, Zea mays
  Clone ID: MRT4577_110405C.1.pep
PRLEVDLDTCKFPRCQNQTSYRIPMIFQASPGVREHVLNRLKQIGSMIPDAESSSSVLGVLCWILENEPV

SEQ ID NO: 196075 - protein, 97 aa, Zea mays
  Clone ID: MRT4577_110406C.1.pep
EVLAYNSSHRSAISEWYHISPRTQIRGNDVARVVGSAQYGTSSYAVRVPMQWILVGRRVRLRGFECRSAHTSTHWWDAVKQEDEWKQTGDGEYRTRR

SEQ ID NO: 196076 - protein, 106 aa, Zea mays
  unsure (1)..(106): unsure at all Xaa locations
  Clone ID: MRT4577_110407C.1.pep
MVLPGDDAPTAAFPNILGRPRHTGVMLWMWQKDAYVGDEAQSXKRGILTLKPPTEHGIPSPWDDMQTIRYHTFYHSPSPPPPTTPLRLPTTPPFPPPTPPTPQPPT

SEQ ID NO: 196077 - protein, 93 aa, Zea mays
  unsure (1)..(93): unsure at all Xaa locations
  Clone ID: MRT4577_110408C.1.pep
GLAHTYLLQNTPRENFGGSTAGLVRKAHVEEYYDLKGLXPKRKCSKSXTQREGLKPEEGNLLXIPRKDHCLPLGTRGRSKAKHHFNSSKRVVP

SEQ ID NO: 196078 - protein, 40 aa, Zea mays
  Clone ID: MRT4577_110409C.1.pep
ARYPKIGVRSVDPVHQFTRSQSESLIQRAQVHELASLHLA

SEQ ID NO: 196079 - protein, 246 aa, Zea mays
  Clone ID: MRT4577_11040C.1.pep
MVARRRKLAVRRSTLSVGGNPVVNTVTARPGVARRWVYTTLWRYRLQHRYSADGLTVGLGVQWTPPFRKLAPGAEHRPGTLQMCAGNSCLVFQIACAGGAVPRILRRFLADARVTFAGRNVAADCRMLRAHHGLDVASTLELRRGGGGGGRQSLAEMAERLLGIPRGLVEKPQWVGMSKWDRRRLSPAQERYAAVDAYVSCRLGECIRRGVDAVSSQDDYVSSDGDEFVESGGREDLWYLLRNIHM

SEQ ID NO: 196080 - protein, 42 aa, Zea mays
  Clone ID: MRT4577_110410C.1.pep
PCSLKRPPSPSHYKISLVLSKTILSNVRSVGFLLQLLQVLGF

SEQ ID NO: 196081 - protein, 118 aa, Zea mays
  Clone ID: MRT4577_110411C.1.pep
NKMKRKPENKRQRKEKRSNLAGPANLAFGPRNRCPMRSAQLTGAAPTPSPLVILTHSRSCRVPSTCGTHRADTRPHASTPMRPTLYCRHAGPRASLHTCARWSSLLLCGPYWSASSLN

SEQ ID NO: 196082 - protein, 132 aa, Zea mays
  unsure (1)..(132): unsure at all Xaa locations
  Clone ID: MRT4577_110412C.1.pep
LTSTYGLSPGAAPPEQVPAPXRAKPNPNPNPNPXPTPPSPPAAAPALTPTPPPMPPPRAXPPAPAPVPRKVSSAPXAPVATPAGSPPGLCRPSPPPLQLQRQKQQPEKKTPTRPPXQAAPXPPPAHPAPRPC

SEQ ID NO: 196083 - protein, 97 aa, Zea mays
  Clone ID: MRT4577_110413C.1.pep
MKPFICSSHFVVLVLSIVIAAEMASVEADHDCYHLSGKFKGWCLYPDHCADVCFTESDNNLGGKCRGFPSRCYCKTYCAQGPKAAPRTTVAASPALV

SEQ ID NO: 196084 - protein, 47 aa, Zea mays
  Clone ID: MRT4577_110414C.1.pep
AVRGCALPVPEVAVCVVVSKTSIVVASAAAIVNCLFPRPSSRIPSLR

SEQ ID NO: 196085 - protein, 64 aa, Zea mays
  Clone ID: MRT4577_110415C.1.pep
NCRGSYLLDVNHLSCFPAITCNMIMYSRILSIKKKKKRKAAPSKGTQALRKGGNASSCFLKSSP

SEQ ID NO: 196086 - protein, 98 aa, Zea mays
  Clone ID: MRT4577_110416C.1.pep
VAQFKDNLGGALPKAVKAARAPVKNGPAGIPKKIADCRSYPFYRFVRKKLEPVSLPGKKTPSPGKKLNKVLVAINQGKHIDPLLKSLKKWKGKPLPIC

SEQ ID NO: 196087 - protein, 65 aa, Zea mays
  unsure (1)..(65): unsure at all Xaa locations
  Clone ID: MRT4577_110417C.1.pep
IADWIAALACLFAVKGLLQNXPIKKWMWYSCYVGIXVAIFWTYYILRYIVLVNLSFFSLPCTQCF

SEQ ID NO: 196088 - protein, 94 aa, Zea mays
  Clone ID: MRT4577_110418C.1.pep
ERPLTSDPIDPLQIGQEASVHQFGNTVVSCSGSSQRYSCGNDSFRKTNRSSSSRICRHAESAVGSKTLAEMFALSDSERLKLNSDSNAPVLCNM

SEQ ID NO: 196089 - protein, 64 aa, Zea mays
  Clone ID: MRT4577_110419C.1.pep
SRADRGISKHSLYRGRDESSWAPAIGVAALAAAGVSASTRGRALDRARSATPWRGLGCPHLERS

SEQ ID NO: 196090 - protein, 98 aa, Zea mays
  unsure (1)..(98): unsure at all Xaa locations
  Clone ID: MRT4577_11041C.1.pep
QEFSYNAAHSKFPPXLLSYTTTMTNRVNKRILSYRLNYYLQRECISYGKTNLGHDGLIPAHDAYRRGNNPTLGEGWLTKIRRARIKXMKXHLDMNAWL

SEQ ID NO: 196091 - protein, 53 aa, Zea mays
  Clone ID: MRT4577_110420C.1.pep
RPPMLVGSPMANTERRMSCALTKLNDPKEGDSPPRKERRISNKELSRVQVAMT

SEQ ID NO: 196092 - protein, 69 aa, Zea mays
  Clone ID: MRT4577_110421C.1.pep
DRCRHYTSPNRTTCPPSILHYHPVTSNHRVRSIRYPSMLSDTRLAITARCPVRVIVCTPRLKLPSLLPS

SEQ ID NO: 196093 - protein, 79 aa, Zea mays
  Clone ID: MRT4577_110422C.1.pep
VVRFGCALSCLMDDSEDSAQPLHLVVGAGFLARESFSSCCCGTRRWRPSVGVVLNACSMDGRSRSAAKSNVSSVLRRRR

SEQ ID NO: 196094 - protein, 209 aa, Zea mays
  Clone ID: MRT4577_110423C.1.pep
MTHRLEVIGGHSRLLRPHPHFVVSAGSANGPRPDRRSSSRRGTVIAKERKNTFLAELKMPSHQDKKRNISSNFSKHAVKDEDEPAWTPLRDTYMLGSKLKDWDKMKAFANALVHIHPSHPGHLDSANSIEEKDKIIEITGLQNLAKSLSAQHCVQIKSAEYMERRASGVHEKYNLQSGKPKLTGSSIFRLGIKTRLTPFMKALLTTEVK

SEQ ID NO: 196095 - protein, 150 aa, Zea mays
  Clone ID: MRT4577_110424C.1.pep
MDPTPRAVLISISSGGAKGGGGGSHAHYRGVRKRPWGRYAAEIRDPWKKTRVWLGTFDTPLEAALAYDRAARTLRGAKARTNFPDDHAGQQLQQHLRRRQHPPPQHVSFGGVGVGVDVDCAPPWHFVCFQTPTTAPATETPSTALELGTG

SEQ ID NO: 196096 - protein, 84 aa, Zea mays
  unsure (1)..(84): unsure at all Xaa locations
  Clone ID: MRT4577_110425C.1.pep
SLWLVVWPCFPVGWSGALPLLGPSXFSLVVFFXXXFWLLFVWFXXLFRXGGFWAXSLLAPLGFFSVXFLWXGAGPALGAPRFVR

SEQ ID NO: 196097 - protein, 75 aa, Zea mays
  Clone ID: MRT4577_110426C.1.pep
KVDPAQRGLRHDAQHVSHLKSNSNRYRSRANPLNPSLPSTEFPKEAIQFTEPRQRQRDRGKRHRQRERWRHCQSR

SEQ ID NO: 196098 - protein, 55 aa, Zea mays
  Clone ID: MRT4577_110427C.1.pep
SSTNASGSRRRSICLCSPTRQQRATAWRRDGQGQVVGERKQAQHQTAAAATASPP

SEQ ID NO: 196099 - protein, 91 aa, Zea mays
  Clone ID: MRT4577_110428C.1.pep
LLFCQSPPFPIFGSQRRCRVWTSSPKIVPVSEGLKFPQFMAGLVCLMGVKTWAGKKESVTKTGHLPKGSMGPPDRGDPGIPLKTTKGEGGG

SEQ ID NO: 196100 - protein, 102 aa, Zea mays
  Clone ID: MRT4577_110429C.1.pep
WGDYCWCYSFLILIVYIKWNIYTSSTLNYSQELASTPSLGLSDEAEVSEEVVTSLSEVPARDSFVKMLLVFDSRMLMEQSSSVPGFTTLLPSGVRTTQFQIT

SEQ ID NO: 196101 - protein, 97 aa, Zea mays
  unsure (1)..(97): unsure at all Xaa locations
  Clone ID: MRT4577_11042C.1.pep
PEVPPDGACXGSHVMASRQESVLVMSLPVVLTDYPPYTGSTVVVVGRNDLLAPVRELPVVGGTGSFRMATGYVLFKTKSWSSDYHDVVLELDVFLRT

SEQ ID NO: 196102 - protein, 61 aa, Zea mays
  Clone ID: MRT4577_110430C.1.pep
SSGNNAEYAGSGLKGEFCYTIKINLLFLYILKNSNLCLNVLSFGKTCLKQNSMAYLFISNQ

SEQ ID NO: 196103 - protein, 62 aa, Zea mays
  Clone ID: MRT4577_110431C.1.pep
KLFFLKRTGLFLLGTLLPKNRVVYPGLFFSGIPAFLFLNQDQGGISGNPFFFWFWGFYGCFG

SEQ ID NO: 196104 - protein, 47 aa, Zea mays
  unsure (1)..(47): unsure at all Xaa locations
  Clone ID: MRT4577_110432C.1.pep
RIPFIPLLGFHHTTPACLNXXXAVSVGRTELLLHVYYSEKXTSRPAC

SEQ ID NO: 196105 - protein, 31 aa, Zea mays
  Clone ID: MRT4577_110433C.1.pep
SFNSSSNSDLVKIWVCLYSRCSISAYLCFKV

SEQ ID NO: 196106 - protein, 150 aa, Zea mays
  Clone ID: MRT4577_110434C.1.pep
LRIAPTSPPTSYSSSPKPPPTDVSPSPVPFGASSPYFPLPRARPHLYCRAALAPAPIRWMPARHSTLCPSVLWRSPAVRAESLVWCSPSNFVVIAICFRASRNQRSSVGDQEIKLFEFYKVEVTEHLFGEGKCPLTHYVLSTYNSLSRIT

SEQ ID NO: 196107 - protein, 117 aa, Zea mays
  unsure (1)..(117): unsure at all Xaa locations
  Clone ID: MRT4577_110435C.1.pep
NPPDTGTITTFVLSPLPALSPSLPLSAPLNPPLILFHLSRLPFRTDHLSEARHFRSRLLTCLLPRLSTSSSPSPAYYVLPTCLRLKILGQISHGHAATCTPESPRXVPTKTPIVLMI

SEQ ID NO: 196108 - protein, 87 aa, Zea mays
  Clone ID: MRT4577_110436C.1.pep
IGYLEAGRKRLWRVWPLAYAPLSASAYALIGLRSSALCRSITGEHYPISCMWRTPDASCEAYTTRPLLISTDTRFCAASPTRRSQKA

SEQ ID NO: 196109 - protein, 186 aa, Zea mays
  unsure (1)..(186): unsure at all Xaa locations
  Clone ID: MRT4577_110437C.1.pep
MAAFRFHHYQVVWCALPTPGDEHPKIYRMKIWATNEVCAKSKLWYFLRKLKKDNNSNGQVLAINEIFERNPTTIKNDGIWLRYQSRTGYHXMYEEYRDTPLHGAVKHMYNEMGSRHRVRSPCIQIVETDTELFKLCNRDNAMSYHNSEIEFPLMYGKVMSPISKLKTTXKASSAHLFMRCRCGHRM

SEQ ID NO: 196110 - protein, 163 aa, Zea mays
  Clone ID: MRT4577_110438C.1.pep
MVSATLEKAMDPGKKSTVKFVSVWPILASRAWVILGYNIGGMRGAAFNLKKALKIPAVQLEILIGIISFYSFLESFVGARTSKRIGRRLTVFFPGVIFLMGALLMGFSVNYGMLMGARFGAEVGVAYGGMIAPVYTAEISPGGSRGFLTSFLEVLINLGFLLG

SEQ ID NO: 196111 - protein, 58 aa, Zea mays
  Clone ID: MRT4577_110439C.1.pep
VPRAPPLEPPPPPPPPPPPPPPPPPPPPPPPPPPPFGHKNNFFLKFVLAPTKILIVGP

SEQ ID NO: 196112 - protein, 85 aa, Zea mays
  Clone ID: MRT4577_11043C.1.pep
TQAFVEYQAKYPLPSSWTRSSSTTHTTQHGDVPEKLTGAPRSSHHQVAHLQRAAPAPGNCGDAQSLYRCTPNASSRALSASATTT

SEQ ID NO: 196113 - protein, 1031 aa, Zea mays
  Clone ID: MRT4577_110440C.1.pep
MDCYNFGELGHLAHQCNKPKKNKFKGKKEDDNDDEKKEKRFFKRKDGKHKRFHKKKNGKAYIVGDWLTDIESSSGSSSSEEENDEKVVAIIGDFSRPPPSPSSTSHLCLMARGERKVQNDNDIDDSDSDSDDEFASPSYDELTDLLKEYTQIIRKSKSKYAKDKCEKLNEANRELKDILVKIKEDYTKIKFDHDNLLVENELLSCNTHEAINHVVKIDVATSCDDLSQGDQTSLHDELTEKVEVLTLDNQKLKRYLTDATTRGKVAIENNDFNNELAVDNERLKNEVKKLKSENEHLATSVQKFNKGQYLQNELFMNTVIKNNKSGIGYNSFVQKKAATQYKPKQTHKPIKCFECGKEGHFAHNCKAKPPTPLPKHLRPFAFNAHYVLRKVANGKVNYKTGGSHWVIDSGCTQHMTCNPRMFTSLDENVDGQDKITFGDNSKGKVQGLGKVAISNDLSISNILLVAPLSFNLLSVDVIVSKMDDESMVFKGFRYNNLYLVDFTPEDVDLRTCLFTKASLGWLSHRRLAHVGMSTLKKVLKKDMVRGLKDVVFEKDKPCSALIVDDFSRYTWVFFLHDKSEVASIFKKFAKKAQNEFYCKIKKIRSDNGKEFDNTNIHEYCDEIGIKHEVSATYTPQQNGVVERKNRTLITLARTMIDEYNTPERFWAEAVNTACYASNRLFPHRLLAKTPYELLNGKKPDVSFFRVFGCKCYIYKKRHHLGKFQRRCDIGFLLGYSSKSKAYRVFNHATGVLEETYDVEFDETNGSQGALENLDGVGDEPLREAMKNMPIGAIKPKEDEEEVQNIDMPSSSSVPQDDEKDERHANEDTFVSHEQARDPDWVNAMHEELNNFTRNQVWTLEKPPQDARIIGTKWVFRNKQDDEGVIVRNKARLVAKGFSQVEGLDFGETFAPQPPGFEDPRYPNHAYRLSKALYGLKQAPRAWYERLRDFLIEKGFKIGTIDTTLFTKKHNSDIFICQVYVDDIIFGSTNDYHYKEFGELMSKGFEMSMIGELTYLFGFQVKQMKDGNFLSQ

SEQ ID NO: 196114 - protein, 1655 aa, Zea mays
  Clone ID: MRT4577_110441C.1.pep
MSGGDGPPPVFDGDDFPYWKIRMEAYLEAIDIGVYKAATQGFPEPRDPTNLVGDEFNYEKWNAKAKNTLFRGLCKDVFNRVRNHKNAHDLWMDICALHEGTRSEREERYHIAMRKLNSFEMLANENANAMYSRLNILVEEVNGLGLTQISQPDVVRKILSVLPIDKYGHIVTVLHQMDLSVTTPTQILGKINAHEMKTTKMLKKLNREGIKFDSRKKKFFSNKRKPISEMDCYNCGELGHLAHQCNKPKKNKFKGKKQDDNDDEKKEKKFFKRKDGKQKRFHKKKNGKAYIVGDWLTDIESSSGSSSSEKENDEKVAAIAGDFSSPPPSPSSTSHICLMARGERKVQNDINIVDDSDSDSDSDEEFASPSYDELADLLKEYTQIIRKSKAKCDRLKNENESLNAKYDIVIKASDEIKEENKTMSSTVNELTNSLKDAKEKCDKLNEANRELQNRLVKIKEDYTQIKFDHDNLLVENELLSCKTHEAINPVVKIDVATSCDDLSQEEQTSLHAELTEKVEVLTLDNQKLKNYLTDATTRGNVAIENNDFNNELAVDNQRLKMSVQKFNKGQYLQNELLMNTVMKNNRSGHFAHNCKAKPPTPLPKHSRPFAFNAHYVLRKVANGKVNYKTGGSHWVIDSGCTQHMTGNPRMFTSLDENVDGQDKITFGDNSKGKVQGLGKVAISNDLSISNVLLVAPLSFNLLSVGQLCDLGLQCLFTPTEVIVTKMDDESMVFKGFRYNNLYLVDFTSEDANLRTCLFTKASLGWLWHRRLAHVGMSTLKKVLKKDMVRGLKDVVFEKDKPCSACQAGKQVANTHPTKAFMSTSRPLELLHMDLFGPTNYVSVGGNLYCLVIVDDFSRYTWVFFLHDKSEVASIFKKFAKKAQNEFDCKIKKIRSDNGKEFDNTNIHEYCDEIGIKHEVSATYTPQQNGVVERKNRTMITLARTMIDEYNTPEKFWAEAVNTACYASNRLFPHRLLEKTPYELLNGKKPDISFFRVFGCKCYIYKKHHHLGKFQRRCDIGFLLGYSLKSKAYRVFNHATGVVEETYDVEFDETNGSQGALENLDDVGDEPLREAMKNMPIGAIKPKEDEEEVQIIDMPSSSNVPQNDEKDERHANEDTFVSHEQARVQAEDIDAPGSSSQVVDRRNSSLLQAHPQNQIIESPSQGVITRSHRHASFIEHHSFVSCVEPTCIDEALQDPDWVNAMHEELNNFTRNEVWTLEKPPQDARIIGTKWVFRNKQDDQGVIVRNKARLVAKGFSQVEGLDFGETFAPVARLEAIRILLAYASCYDIKLYQMDVKSAFLNGFINELVYVEQPPGFEDPRYPNHAYRLSKALYGLKQAPRAWYERLRDFLIEKGFKIGTVDTTLFTKKHNGDIFICQVKQMKDGNFLSQEKYTKDLLKRFNMEKCKPIKTPMPTNGHLDLDEGGNPVNQTLYRSMIGSLLYLTASRPDIMFSVCMCARLQSNPKKAHLRAVKRILRYLRHTTSVGLWYPKGATFDLIGYSDSDYAGCKIDRKSTSGGCHLLGRSLVSWTSKKQNSVALSTAEAEYIAAGACCTQILYMKQTLLDYGVVLEKVPLLCDNESAVKIANNPVQHSRTKHIDIRHHFLRDHVAKGDIILEGVRLEDQLADIFTKPLDKTRFCMLRNELNILDLRNFM

SEQ ID NO: 196115 - protein, 51 aa, Zea mays
  Clone ID: MRT4577_110442C.1.pep
LQPQPAEQSVTGGGRGRGAWSNGQVVSPKLSWTRRAGVERARDSMAVHSGR

SEQ ID NO: 196116 - protein, 159 aa, Zea mays
  Clone ID: MRT4577_110443C.1.pep
MSVVILDGSTVRGFVADEAAFARSLDARFAALDANGDGVLSRAELRRALESFRLLDGGGFGSAQPAPLPAEVAALYDAVFEQFDADHSGAVDRAEFHDEMRRIMLAVADGLGSQPLQVAVDDEGGSFLLEAAEHEAAGIAAKIEANRKAEAEAEAEAAK

SEQ ID NO: 196117 - protein, 2093 aa, Zea mays
  Clone ID: MRT4577_110444C.1.pep
MKQWRDDVDQLLSMVHSTSTRLKTRSSRRQHEAPASVRSPSVRGAQTNDLRAELNRRRAGEDAWVSLERARERRKNIDGRDLNQDFAAIAPQTPMGTRSQTGVPLAVYSWEELFARFVANFASAYQKHGVEAHLHAVRQEPGETLRKFISRFTKVRGTIPRISDASIITAFRQGRQMPNDYLSELAVGVDRWRAVGAPSNDVRWGWTSSRFYGDDFPYWKIRMEAYLEAIDIGVYKAATQGFPAPRDPTNLVGDEFNYEKWNAKAKNTLFRGLCKDVFNRVRNHKNPHDLWMDICALHEGTRSEREERYHIAMRKLNSFEMLANENANAMYSILNILVEEVNGLGLTQISQPDVVRKILSVLPIDKYGHIVTVLHQMDLSVTIPIQILGKINAHEMYMHINDKDESSSKRKNLALKANQERKGKAKVQIEEESSSDDDLDANIALMVRKTTKMLKKLNREGIKFDSRKKKFFSSKRKPISEMDCYNCGELGHLAHQCTKPKKNKFKGKKEDYNDDEKKEKRFFKRKDGKQKRFHKKKNGKAYIVGDWLTDIESSSGSSSSEEENDKKVAAIAGDFSSPPSSPSSTSHLCLMARGERKVQNDIDIIDDSDSDSDEEFASPSYDELADLLKEYTQIIRKSKAKCDKLKNENESLNAKYDIVMKASDEMKEENKTMSSTVNELTTSLKDAKDKCDKLNETNRELKDRLVKIKEDYTKIKSDHDNLLVENELLSCNTHEAINPVVKIDVATSCDDLSQGEQTSLHDELTEKVEVLTLDNQKLKRYLTDATTRGKVAIENNDFNNELAVDNESLKNESGIGYNAFVQKKATTQYKPKQTHKPIKSFECGKEGHFAHNCKAKPPTPLPKHSRPFAFNAHYVLRKVANGKVNYKTGGSHWVIDSGCTQHMTGNSRIFTSLDENVDGQDKITFGDNSKGKVQRLGKWVNSVILEFNAYSLQQRRLAHVGMSTLKKVLKKDMVRSLKDVVFEKDKPCSACQAGKQVANTHPTKAFMSTSRPLELLHMDLFGPTNYIKKIRSDNGKEFDNTNIHEYCDEIGIKHEVSATYTPQQNGVVERKNRTLITLARTMIDEYNTPERFWAEAVNTACYASNRLFPHRLLAKTPYELLNAKKPDVSFFRVFGCKCYIYKKRHHLGKFQRRCDIGFLLGYSLKSKAYRVFNHATGVTNGSQGALENLDDVGDEPLREAMKNMPIGAIKPKEDEEEVQNIDRPSSSNVPQDDEKDERHANEDTFVSHEQARIQAEDVDAPGSSSQVVDRRNSSLLQAHPQNQIIGSPSQGVITRSHRHASFIEHHSFVSCVEPTCIDEALQDPDWVNVMHEELNNFTRNQVWTLEKPPQDARIIGTKWVFRNKQDDQGVIVRNKARLVAKGFSQVEGLDFGETFAPVARLEAIRILLAYASCYDIKLYQMDVKSAFLNGFINELVYVEQPPGFEDPRYPNHAYRLSKALYGLKQAPRAWYERLRDFLIKKGFKIGTIDTTLFTKKHNGDIFICQEFEMSMIGELTYFLGFQVKQMKDGNFLSQEKYTKDLLKRFNMEKCKPIKTPMPTNGHLDLDEGVTLPAREPSPVLPGFSPLVRQVRMPRTKNVSAPGGGDDEDPRRPFRQVKGKTMYLEQQEGRRKRRMDRAARAAAATATEQAELGDQPQTPSDQIAYRVRRLASRPRSSTPITASTPPPTLPAPVTLLRHPPPPLHHLPLLLLLLPLLLLLSHLLASGSAMRLSGTGTSVQTRTHGDLATGSEGHCCRRSLQHQDSGVLLQGPDVCTDCSACAPAFGPSRFSASPGADSEVHLSYLPGLLTLLTTSGRYVEEWVRVFYATVWIDPDHHWMRFRFEREDVTIHASQIRQLFGFHESSTRLHNLCYGTSDPPRHPHGGVAPDGSRRSPADFTTAAKFLYQLMRRTLLPRMGYREAATHIQLWLLGALVSHSEFDVVDFLICEIEDTVLDGLRARRQLPYAHYLCHIFAQLIRPPQFQGTLEASHLLFGSYRPAPEDPVPAPAPVFDTQAEDTALHQFEAQDTTVDDDDDNDDDDFGIPPPPPMLPRSHDHEAGSSNGAAPAAPPAIDPALAEILQTLTQQQAHLAAVQ

SEQ ID NO: 196118 - protein, 61 aa, Zea mays
  Clone ID: MRT4577_110445C.1.pep
HSTGAMHHYELQLSDNQSFLTIPSGAEFIPTPGSGSSVGFSRSAAVTAPVTVGAPSGRVAR

SEQ ID NO: 196119 - protein, 57 aa, Zea mays
  Clone ID: MRT4577_110446C.1.pep
RAAALAHSMTMRPVAELLLLLPSRHSTYCSDSSHECEDHLRAIAWTRAALLRCRCLI

SEQ ID NO: 196120 - protein, 1391 aa, Zea mays
  unsure (1)..(1391): unsure at all Xaa locations
  Clone ID: MRT4577_110447C.1.pep
MEAYLEAIDIGVYKAATQGFLEPRNPTNLVGDEFNYEKWNAKAKNTLFRGLCKDVFNRVRNHKNAHDLWMDICALHEGTRSEREERYHIAMRKLNSFEMLANENANAMYSRLNILVEEVNGLGLTQISQQDVVRKILSVLPIDKYGHIVIVLHQMDLSVTTPTQILGKINAHDMYMHINDKDESYSKRKDLALKANQERKGKAKVQIEEESSSDDDLNANIALMVRKTTKMLKKLNREGIKFDSRKKKFFSSKRKPISEMDCYNCGELGHLAHQCNKPKKNKFKGKKEDDNDDEKKEKRFFKRKDGKHKRFHKKKNGKAYIVGDWLTDIESSSGSSSSEEENDEKVATIVGNFSSPPPSPSSTSHLCLMARGDRNIQNDIDITDDSDSDSDEEFASPSYDELADLLKEYTQIIRKSKAKCDKLKNENESLNAKYDIDKCDKLNEANRELKDRLVKIKEDYTKIKFDNDNLLVENELLSYNTHEAINPVVKIDVATSCDDLNQGEQTSVHDELTEKVEVLTLDNQKLKRYLTDATTRGKVAIENNDFNNELAVDNERLKNEVNYKTGGSHWVIDSGCTQHMTGNPRMFTSLDENVDGQDKITFGDNSKGKVQGLGKVAISNDLSISNVLLVAPLSFNLLSVGFRYNNLYLVDFTSEDVDLRTCLFTKASLGWLWHRRLAHVGMSTLKKVLKKDMVRGSKDVVFEKNKPCSACQAGKQVANTHPTKAFMSTSRPLELLHMDLFGPTNYVSAGGNLYCLVIVDDFSRYTWVLFLHDKSEVASIFKKFAKKAQNEFDCKIKKIRSDNGKEFDNTNIHEYCDEIGIKHEVSATYTPQQNGVVERKNRTLITLARTMIDEYNTPERFWAEAVNTACYASNRLFPHWLLAKTPYELLNGKKPDVSFRVFGCKCYIYKKRHHLGKFQRRCDIGFLLGYSFKSKEYRVFNHATGVVEETYDVEFDETNGSQGALENLDDVGDEPLREAMKNMPIGAIKPKEDEEEVQDIGRPSSSNVPQDDEKDERHANEDTFVSHEQARPTCIDEALQDLDWVNAMHEELNNFTHNQVWTLEKPPQDARIIGTKWVFRNKQDDQGVIVRNKARLVAKGFSQVEGLDFGETFAPVARLEAIRILLAYASCYDIKLYQMDVKSAFLNGFINEHVYVEQPPGFEDPRYPNHAYRLSKALYGLKQAPRAWYERLRDFLIEKGFKIGTVDTTLFTKKHNGDIFICQVYVDDTIFGSTNDYHCKEFGELMSKEFKMSMIEKYTKDLLKRFNMEKCKPIKTPMPTNGNPDLDEGGNPVNQTLYRSMIGSLLYLTASRPDIMFSVCMCARFQSNPKKVHLRSIKRILRYLRHTLSVGLWYPKGATFDLIDYSDSDYAGCKIDRKSTSGXCHLLGRSL

SEQ ID NO: 196121 - protein, 2230 aa, Zea mays
  unsure (1)..(2230): unsure at all Xaa locations
  Clone ID: MRT4577_110448C.1.pep
MDLLPFLMVTIFLIGKFVCDEFNYEKWNAKAKNTLFRGLCIDVFNRILGKINAHEMYMHINDKEESSSKRKDLALKANHERKGKAKIQVEEESSSDDDLDANIALMVRKTTKMLKKLNREGIKFDSRKKKFFSNKRKPISEMDCYNCGELGHLAHQCNKPKKNKFKGKKEDDSDDEKKEKKFFKRKDGKQKRFHKKKNGKAYIVGDWLTDIESSSGSSSSEEENDEKVAAIAGDFSSPPPSPSSTSHLCLMARGERKVQNDINIADDSDSDSDEEFASPSYDELADLLKEYTQIIRKSKAKCDRLKNENESLNAKYDIVIKASDEIKEENKTMSSTVNELTNSLKDAKEKCDRVNEVNRELQNRLVKIKEDYTQIKFDHDNLLVENELLSCKTHEAINPVVKIDVATSCDDLRQEEQTSLHTELTEKVEVLTLDNQKLKNYLTDATTRGKVAIENNDFNNELAVDNQRLKNEVKKLKSENEHLATSVQKFNKGQYLQNELLMNTVMKNNKSGIGYNAFVQKKATTQYKPKQTHKPIKCFECGNEGHFAHNCKAKPPTHLPKHSRPFAFNAHYVLRKVANGKIKVNYKTGGSHWVIDSGCTQHMTGNPRMFTSLDENVDGQDKITFGDNSKGKVQGLGKVAISNDLSISNVLLVAPLSFNLLSVGQLCDLGLQCLFTPTEVIVTKMDDESMVFKGFRYNNLYLVDFTSEDVDLRTCLFTKASLGWLWHRRLAHVGMSTLKKVLKKDMVRGLKDVVFEKDKPCSACQAGKQVANTHPTKAFMSTSRPLELLHMDLFGPTNYVSVGGNLYCLVIVDDFSRYTWVFFLHDKSEVASIFKKFAKKAQNEFDCKIKKIRSDNGKEFDNTNIHEYCDEIGIKHEVSATYTPQQNGVVERKNRTLITLARTMIDEYNTPERLFPHRLLAKTPYELLNGKKPDVSFFRVFGCKCYIYKKRHHLGKFQRRCDIGFLLGYSLKSKAYRVFNHATGMVEETYDVEFDETNGXPKEHLXNLDDVGDEPPREAMKNMPIGAIKPKEDEEEVQXSLTGLLHQXPQDDEKDERHANEQARVQAEDVDAPGSSSQVVDRRNSSLLQAHPQNQIIGSPSQGVITRSHRHASFIEHHSFVSCVEPTCIDEVLQDPDWVNAMHEELNNFTRNEVWTLEKPPQDARIIGTKWVFRNKQDDQGVIVRNKARLVAKGFSQVEGLDFGETFAPVARLEAICILLAYASCYDIKLYQMDVKSAFLNGFINELVYVEQPPGFEDPRYPNHAYRLSKALYGLKQAPRAWYERLRDFLIEKGFKIGTVDTTLFTKKHNGDIFICQVYVDDIIFGSTNDYHCKEFGELMSKEFEMSMIGELTYFLGFQVKQMKDGNFLSQEKYTKDLLKRFNMEKCKPIKTPMPTNGHLDLDEGGNPVNQTLYRSMIGILLYLTASRPDIMFSVCMCARFQSNPKKAHLRAVKRILRYLRHTTSVGLWYPKGATFDLIGYSDSDYAGCKIDRKSTSGGCHLLGRSLVSWTSKKQTSVALSTAEAEYIARRHQFRMSRTKNVSAPGGGDDEDPRRPFRQVKGKTVYLEQQEGRKKQRTDRAARAAAAAAAAAAQAELGDQPQTPSDQIAYRVRRLASRPRSSTHTSASTPPPTLPAPVTPVAPSTTTAIPATSTTPASTAPPPAPATAPPIPPPHFRERDETEVQPLAADPRLFDLQRATAARVRRFRYVPVESWLPAKRDPVAGDLFSTRIQESFFRAQMSAQIALRVHRLLDLLAFLLTVGADSEAHLTYLPGLLTLLTTSGRYVEEWVRVFYASVWIDPDHHWMRFCFEREDVTITASQIRQLFGFPESTTRLHSLCYGTSDPPRRPHGGVAPGTAHVAALFRPPFSDGSRRSPADFTTAAKYLYELIRRTLLPRMGYREATTHIQLWLLGALVSHSEFDVVDFLICEIEDTVLDRIRARRQLPYAHYLCHIFAQLIQPPRFQGTLEASRLVFGFYRPAPETPVPASAPVFDSQAEDAALHQFDTQATAVDDDDDDDFGVPPPPPMPPHSHDHEAGSSSAAPAAPSAMDPALASILQSITQQQAHLAVEQARLSERMLSMFQNMQDRQDALQQQLLQDRAESRAFMALMLQQSGVSVPPVQSPPPPPLHAPVVPSILSGPPVGPSPLRPVTLAFTSPVLSSVCPQPPVPPASAVTTTVVAVSVTSSVPVAPAARPQSESVLALASTTDPGSETDSDPPPAFALLPRP

SEQ ID NO: 196122 - protein, 1667 aa, Zea mays
  unsure (1)..(1667): unsure at all Xaa locations
  Clone ID: MRT4577_110449C.1.pep
MNTVMKNNKSGIGYNAFVQKKAITQYKPKQTHKPIKCFECGNEGHFAHNCKAKPPTPLPKHSRPFAFNAHYVLRKVANGKIKVNYKTGGSHWVIDSGCTQHMTGNPRMFTSLDENVDGQDKITFGDNSKGKVQGLGKVAISNDLSISNVLLVAPLSFNLLSVGQLCDLGLQCLFTPSEVIVTKMDDESMVFKGFRYNNLYLVDFTSEDADLRTCLFTKASLGWLWHRRLAHVGMSTLKKVLKKDMVRGLKDVVFEKDKPCSACQAGKQVANTHPTKAFMSTSRPLELLHMDLFGPTNYVSAGGNLYCLVIVDDFSRYTWVFFLHDKSEVASIFKKFAKKAQNEFDCKIKKIRSDNGKEFDNTNIHEYCDEIGIKHEVSATYTPQQNGVVERKNRILITLARTMIDEYNTPERFWAEAVNTACYASNRLFPHRLLAKTPYELLNGKKPDVSFFRVFGCKCYIYKKRHHLGKFQRRCDIGFLLGYSLKSKAYRVFNHATGVVEETYDVEFDETNGSQGALENLDDVGDEPLREAMKNMPIGAIKPKEDEEEVQXSLTGLLHQXPQDDEKYERHANEDTFVSYEQARVQAEDVDAPGSSSQVVDRRNSSLLQAHPESQIIGSPSQGVITRSHRHATFIEHHSFVSCVEPTCIDEALQDPDWVNAMHEELNNFTRNEVWTLEKPPQDARIIGTKWVFRNKQDDQGVIVRNKARLVAKGFSQVEGLDFGETFAPVARLEAICILLAYASCYDIKLYQMDVKSAFLNGFINELVYVEQPPGFEDPRYPNHAYRLSKALYGLKQAPRAWYERLRDFLIEKGFKIGTVDTTLFTKKHNGDIFICQVYVDDIIFGSTNDYHCKEFGELMSKEFEMSMIGELTYFLGFQVKQMKDGNFLSQEKYTKDLLKRFNMEKCKPIKTPMPTNGHLDLDEGGNPVNQTLYRSMIGSLLYLTASRPDIMFSVCMCARFQSNPKKAHLRAVKRILRYLRHTTSVGLWYPKGATFDLIGYSDSDYGGCKIDRKSTSGGCHLLGRSLVSWTSKKQNSVALSTAEAEYIAAGACCTQILYMKQTLLDYGVVLEKVPLLCDNESAVKIANNPVQHSRTKHIDIRHHFLRDHVAKGDIILEGVRHQIRMPRTKNASAPGGGDDEEPRRPFRQVKGKTVYLEQQEGRKKRYVPVESWLPAQRDPAAGDLFSTRIQESFFRAQMSAQIALRVHRLLDLPAFLLAAGADSEAHLTYLPGLQTLLTISGRYVEEWVRVFYASVWIDPDHHWIRFRFEREDVTITASQIRQLFGFPESTTRLHSLCYGSSDPPHRPHGGVAPGTAHVAALFRPPFTDGSRRSPADFTTAAKYLYELIRRTLLPRMGYREATTHIQLWLLGALVSHSEFDVVDFLICEIEDTVLDGIRARRQLPYAHYLCHIFAQLIQPPRFQSTLEASRLFDTQGTTADDDDDDDDFGVPPPPPPPMPPRSHDHEAGSSRAAPAPPSAMDPALATILANLAAEQARLSETMLSMFQSMQDRQDALQQQLLQDRAESRAFMALMLQHSGISAPPVQSAPPPPLHAPVVPSILSGPPVGTSPLRPVTLAFTSPVLSSVCPQPPVPPASAVTTTAVAVSVTASVPVAPAARPQSESVPAPASTADPGSETDSDPPPAFALLPRPRPNAPPPPPPASDV

SEQ ID NO: 196123 - protein, 67 aa, Zea mays
  Clone ID: MRT4577_11044C.1.pep
NTESFLKELLTCSHFLHVRSSFSYGPPLLHIYMIVAGVYIYPPSEYPPMVIFYKDCGVNSNTHSLHS

SEQ ID NO: 196124 - protein, 103 aa, Zea mays
  Clone ID: MRT4577_110450C.1.pep
SQFRLALLSVAQNVQHSGAPRDTKRSFSVGMCPSVSCLNLRKTAASSCAQSHRPPPQETFRWPLNSAAPSVGPSTEHCQKVPTTSRLNRARLSTAALARSGWT

SEQ ID NO: 196125 - protein, 3574 aa, Zea mays
  unsure (1)..(3574): unsure at all Xaa locations
  Clone ID: MRT4577_110451C.1.pep
MSGGDGPPPVFDGDDFPYWKIRMEAYLEAIDIGVYKAATQGFPEPRDPTNLVGDEFNYEKWNAKAKNTLFRGLCKDVFNRVRNHKNAHDLWMDICALHEGTRSEREERYHIAMRKLNSFEMLTNENANAMYSRLNILVEEVNGLGLTQISQPDVVRKILSVLPIDKYGHIVTVLHQMDLSVTTPTQILGKINAHEMYMHINDKEESSSKRKDLALKANHERKGKAKIQVEEESSSNDDLDANIALMVRKTTKLLKKLNREGIKFDSRKKKFFSNKRKPISEMDCYNCGELGHLAHQCNKPKKNKFKGKKEDDNDDEKKEKKFFKRKDGKQKRFHKKKNGKAYIVGDWLTDIESSSGSSSSEEENDEKVAAIAGDFSSPPPSPSSTSHLCLMARGERKVQNDINIDDDSDSDSDEEFASPSYDELADLLKEYTQIIRKSKAKCDRLKNENESLNAKYDIVIKASDEIKEENKTMSSTVNELTNSLKDAKEKYVKLNEANRELQSRLVKIKEDYTQIKFDHDNLLVENELLSCKTHEAINPVVKLDVATSCDDLIQEEQTSLHAELTEKVEVLTLDNQKLKNYLTDATTRGKVAIENNDFNNELAVDNQRLKNEVKKLKSENEHLATSVQKFNKGQYLQNELLMNTVMKNNKSGIGYNAFVQKKAITQYKPKQTHKPIKCFECGNEGHFAHNCKAKPPTPLPKHSRPFAFNAHYVLRKVANGKIKVNYKTGGSHWVIDSGCTQHMTGNPRMFTSLDENVDGQDKITFGDNSKGKVQGLGKVAISNDLSISNVLLVAPLSFNLLSVGQLCDLGLQCLFTPSEVIVTKMDDESMVFKGFRYNNLYLVDFTSEDADLRTCLFTKASLGWLWHRRLAHVGMSTLKKALKKDMVRGLKDVVFEKDKPCSACQAGKQVANTHPTKAFMSTSRPLELLHMDLFGPTNYVSAGGNLYCLVIVDDFSRYTWVFFLHDKSEVASIFKKFAKKAQNEFDCKIKKIRSDNGKEFDNTNIHEYCDEIGIKHEVSATYTPQQNGVVERKNRTLITLARTMIDEYNTPEMFWAEAVNTACYASNRLFPHRLLAKTPYELLNGKKPDVSFFRVFGCKCYIYKKRHHLGKFQRRCDIGFLLGYSLKSKAYRVFNHATGMVEETYDVEFDETNGSQGALENLDDVGDEPLREAMKNMPIGAIKPKEDEEEVQIIDRPSSSNVPQNDEKDERHANEDTFVSHEQARVQAEDVDAPGSSSQVVDRRNSSLLQAHPQNQIIGSPSQGVITRSHRHANFIEHHSFVSCVEPTCIDEALQDPDWVNAMHEELNNFTRNEVWTLEKPPQDARIIGTKWVFRNKQDDQGVIVRNKARLVAKGFSQVEGLDFGETFAPVARLEAIRILLAYASCYDIKLYQMDVKSAFLNGFINELVYVEQPPGFEDPRYPNHAYRLSKALYGLKQAPRAWYERLRDFLIEKGFKIGTVDTTLFTKKHNGDIFICQVYVDDIIFGSTNDYHCKEFGELMSKEFEMSMIGELTYFLGFQVKQMKDGNFLSQEKYTKDLLKRFNMEKCKPIKTPMPSNGHLDLDEGGNPVNQTLYHSMIGSLLYLTASRPDIMFSVCMCARFQSNPKKAHLRAVKRILRYLRHTTSVGLWYPKGATFDLIGYSDSDYAGCKIDRKSTSGGCHLLGRSLVSWTSKKQNSVALSTAEAEYIAAGACCTQILYMKQTLLDYGVVLEKVPLLCDNESAVKIANNPVQHSRTKHIDIRHHFLRDHVAKGDIILEGVSHQIRMPRTKNASAPGGGDDEEPRRPFRQVKGKTVYLEQQEGRKKWRMDREARAAAAAAAAAAQAALGDQPQTPSDQIAFRARRLTSRPRSSSHTSASTPPPTLPAPVTPIAPSTSTAIPTTSTTPASTASPAPAPASAPPVPPPRFRERDETEVRPLVSDPRLFDLQRATAAWVRRFRYVPVESWLPAQRDPAAGVLFSTWIQESFFRAQMSAQIALRVHRLLDLPAFLLAAGADSEAHLTYLPGLLTLLTISGRYVEEWVRVFYASVWIDLDHHWMRFRFEREDVTITASQIRQLFGFPESMTRLHSLCYGSSDPPRRPHGGVAPGTAHVAALFRPPFTDGSRRSPADFTTAAKYLYELIRRTLLPRMGYREATTHIQLWLLGALVSHSEFDVVDFLICEIEDTVLDGIRARRQLPYAHYLPRMQLFDSLTLRVQQLMMMMMMMMILGFLLRLRLLCLHAHMIMRLGVLVLPLLILRLWTLLLLRFSRLSPSSRLTWQPSRPVYPTGCSRCFRTCRTGRMRFSSSYFRIGLRLPVPPASAVTTTAVAVSMTASVLRQMTAWWRWELGDHREDLVGDPTQVLVYYETDSSSPSTSGSESASTTSKRNERKKYSKPPMFEDEDYSMWSDKMRHHLTSLHKSIWDIVEYGVQVPKKGDKDYDSEEVEQIQHFNSQATTILLASLSREEYNKVQGLKSAKEIWDMLKTAHEGDDVTKITKRETIEGELGRFRLRQGEEPQDMYNRLKTLVNQVRNLGSKKWDDHEMVKVILRSLVFLNPTQVQLIRGNLRYTLMTPEEVIGNFVSFELMIKGSKKIVELDGPSMFEAQLVAFKAMEEKKEESTSSRTPIDASKLDNEEMALIIKSFRQILKQRRGEDYKPRSKKVCYKCGEPGHFIAKCPLSSDSDMGDDKKGRRKDKKRYYKKKGGDAHVCQEWDSDESSTDSSSYEDAANIAVTKGLLFPNIGHKCLMAKDNKRKKVKSRSSTKYETSSDEDNCSDEEDNLRTLFANLNMQQKEKLNELISAIHENDELLDTQEDFLIKENKKHVKVKNAYALEVEKYEKLSSELSTCHDTIANLRNENAKLIAKVDSNVCDDSISNLRNDNANLLAKIEKLNNSLASLRNENENLIAKAQDFDVCNVTICNLRSENDILHAKVVELKSCKPSTSIVEHTSICTRCRDINVDVIHDHLALIKKQNDHIAQLNAKINEHDLENEKFKFARSMLYNGRRPGIKDGIGFQKGDNVKLNAPPKRLSNFVKGKAPMPQDNEGYILYHVGYPESKIRRIHSRKSHSGPNHAFMYKSETSSSRQLTHAKLPRKKTHIASNDHNISFKTFDASYVLTNKSGKVYASGGSSWIIDSECTNHMTGEKKMFSSYEKNQDPQRAVRFGDGNQGVTVFRRCDDSIAFKGVLEGKLYLVDFDRAGLDTCLIAKTNMGWLWHRRLAHVGMKNLHKLLKGEHILGLTNVHFEKDRICSACQAGKQVGVHHPHKNIMATDRPLELLHMDLFGPIAYISIGGSKYCLVIVDDYSRFTWVFFLQEKSHTQETLKGFLRRAQNEFGLRIKKIRSDNGTEFKNSQIEGFLEEEGIKHEFSSPYTPQQNGVVERKNRTLLDMARTMLDKYKTSDRFWAEAVNAACYAINRLYLHRILKKTSYELLTGKKPNVSXFRVFGXVEGFLLGYDSNTRAYRVFNKSSGQVEVFCDIVFDETNGSQVEQVDLDEIGDEEALCVALRNMSIGDVCLKESEEPPHAQDQPSSSMQASPPTQDEDKSQNDEGEDQEVEPPQEESNDQGGDAHDQDEEDEQVPRPPHPRVHQAIQ

SEQ ID NO: 196126 - protein, 116 aa, Zea mays
  Clone ID: MRT4577_110452C.1.pep
MVQRVTLRTRKSYNTSSNVRRIIKTPGGKLSYLRLHKQATAPKCGDCHTSLPGVPALRPVRYATVSKRIKTVQRPYGGSRCGNCVRDRIVRAFLVEEAKIVKKVLKSQAVPTKSKK

SEQ ID NO: 196127 - protein, 879 aa, Zea mays
  Clone ID: MRT4577_110453C.1.pep
MKAINPVVKIDVATSCDDLSQGEQTSLHDELTEKVEVLTLDNQKLKRCLTDATTRGKVAIEKNDFNNELAADNERLKNESGIGYNAFVQKKTTTQYKPKQTHMPIKCFECGKEGHFAHNCKAKPPTPLPKHSRPFAFNAHYVLRKVANGKVNYKTDGSHWVIDSGCTQHMTGNPRMFTSLDENVDGQDKITFGDNSKGKVQGLGKVAISNDLSISNVLLVAPLSFNLLSVGQLCDLGLQCLFTPTEVIVSKWMMNQWRLAHVGMSTLKKVLKKDMVRGLKDVVFEKDKPCSACQAGKQVANTHPTKAFMSTSRPLELLHMDLFGPTNYVSVGGNHYYLVIVDDFSRYTWVFFLHDKSEVASIFKKFAKKAQNEFDCKIKKIRSDNGKEFDNTNIHEYCDEIGIKHEVSATYTPQQNGVVERKNRTLITLARTMIDEYNTPERFWAEADNTAWYASNRLFPHRLLAKTPYELLNGKKPDVSFRSKAYRVFNHATGVVEETYDVEFDEANGSQGAIENLDDVGDEPLREAMKNMPIGAIKPKEDEEEVQNIDRPSSSNVPQDDDKDERHANEDTFVSHEQARTLEKPPQDARIIGTKWVFRNKQDDQGLIVRNNARLVAKGFSQVEGLDFGETFAPVARLEAIHILLAYASCYDIKLYQMDVKSAFLNSFINELVYVEQPPGFEDPRYPNHAYRLSKALYGLKQAPRAWYERLRDFLIEKGFKIGTVDTTLFTKKHNSDIFICQVYVDDIIFGSTNDYHCKEFGELMSKEFEMSMIGELTYFLGFQVKQMKDGNFLSQEKYTKDLLKRFNMEKCKPIKTPMPTNGNLDLDEGGNPVNQTLYRSMIGSLLYLTASRPDIMFSVCMCARFQSNPKKAHLRAVK

SEQ ID NO: 196128 - protein, 74 aa, Zea mays
  unsure (1)..(74): unsure at all Xaa locations
  Clone ID: MRT4577_110454C.1.pep
IXGAXSXIXTIISIXPXAMTXYXNTSLXXIRTNYSRPTSSAXCXXWQQVXLXXXXXRXLXTTXFDPAXGGXXFP

SEQ ID NO: 196129 - protein, 844 aa, Zea mays
  Clone ID: MRT4577_110455C.1.pep
MPRTKNASASGGGDDEDPRRPFRQVKGKTVYLEQQEGRKKRRSDREARAAAAAAAAAAQAALGDQPDIPSDQIAFRARRLASRSRSSTHTSASTPPPTLPAPVTPIAPSTSTAIPTTSTTPASTASPAPAPASAPPVPPPRFRERDETEVRPLGSDPRLFDLQRATAARVRRFRYVPVESWLPAQRDPAAGVLFSTRIQESFFRAQMSAQIALRVHRLLDLPAFLLAAGAESEAHLTYLPGLLSFLTISGRYVEEWVRVFYASVWIDPDHHWMRFRFEREDVTITADQIRQLFGFPVSTTRLHSLCYGTSDPPRRPHGGVAPGTAHVAALFRPPFTDGSRRSPADFTTTAKYLYELVRRTLLPRMGYREATTHIQLWLLGALVSHSEFDVVDFLICEIEDTVLDGIRARRQLPYAHYLCHIFAQLIQPPRFQSTLEASRLVFGSYRPAPEIPVPAYAPVFDTQAEDAALRQFDTQGAADDDDDDDDFGIPPPPPPPMPPRSHDHEAGSSSAAPATPQAMDPALASILQTLTQQQAQLAAEQARMSERMLSMFQTMQDRQDSLQQQLIQDRAENRAFMALMLQHSGISASPVQSAPPSSLHAPVVPSILSAPPAVTSPLRPVTLAFTSPVLSSVCPQPPVPPASAVSTTAVAVSVTASAPRQMGSTFDLVGYSDSDYAGCKVDRKSTSGTCQFLGRSLVSWNSKKQTSVALSTAEAEYVAAVQCCAQLLWMRQTLRDFGYNLSKVPLLCDNESAIRMAENPVEHSRTKHIDIRHHFLRDHQQKGDIEVFHVSTENQLADIFTKPLDEKTFCRLRSSFCILLLIMVLKLYKHSLDLTSPLQSDAHV

SEQ ID NO: 196130 - protein, 45 aa, Zea mays
  Clone ID: MRT4577_110456C.1.pep
SHSLSFGRHHYHHINDIIRVPDFEIVHDGKLTCTVLLSRSLYTEF

SEQ ID NO: 196131 - protein, 239 aa, Zea mays
  unsure (1)..(239): unsure at all Xaa locations
  Clone ID: MRT4577_110457C.1.pep
MPKTKVHPNAAAAEPVLTVSTACARADPGEEEPPTVLTVWRKSLLFNCDGFTVYDARGDLAFRVDSYDSTGRRRAEVVLMDGAGTPLLTVRRKRRLGVLAEHWVIYXRRRSGGEGDAQQPXSRPLLSVRRHRASSSSSKAKAKALAHVTPLPASSSSLSGYHRASAEASYVMEGSYGRRACVVRDRAHGDAVVAEVSRKEAAVGDDVFRLVADPRLGATLAMGLVVALDEMFARGRSTN

SEQ ID NO: 196132 - protein, 86 aa, Zea mays
  Clone ID: MRT4577_110458C.1.pep
MHDTEDYRPYGNKIAYPETPYHAKIQEVELSATTQHNDECLDENVQAEAIVRDLNEVAASSINISKDDGCRSADDDTNAIDIQADP

SEQ ID NO: 196133 - protein, 68 aa, Zea mays
  Clone ID: MRT4577_110459C.1.pep
ELDRMCPRQHGLGRLPSRPQVLGRDTPSGYDHDLGTQARSGNSESPFQPSWTPSSTFYGRTCAIFLKP

SEQ ID NO: 196134 - protein, 65 aa, Zea mays
  Clone ID: MRT4577_11045C.1.pep
VILLGCLASLGVVLLNIMEFLSQTRPNCLVKCLGQSSQQEWSHGTLAGGLRQRQLMYPLDNLVLT

SEQ ID NO: 196135 - protein, 69 aa, Zea mays
  Clone ID: MRT4577_110460C.1.pep
MPKQIHEIKDFLLTARRKDARSVRIKRTKDAVKFKVRCSRYLYTLCVFDADKANKLKQSLPPGLSVQEV

SEQ ID NO: 196136 - protein, 63 aa, Zea mays
  unsure (1)..(63): unsure at all Xaa locations
  Clone ID: MRT4577_110461C.1.pep
XFFFFFYTGGDLWKVRGLPPRTTKSILERDNQACPNKGDPFPDRAQRAGSLYPDQDPGKQWYQ

SEQ ID NO: 196137 - protein, 375 aa, Zea mays
  unsure (1)..(375): unsure at all Xaa locations
  Clone ID: MRT4577_110462C.1.pep
IGYPTRPRGATTQVSDPSPPSDSPLPPSHDHEYRRPRPFPRLLLLLLSPPPSPSVRLAGGARGRSKSTAMAAVKVDKATNELLLGPDWTLNIDICDAVNSDHGQGKEVIKALKKRIQHKNANVQFLALTLLETLIKNCGDHVHYQVVERNILEEMMKIVKKKADMQVRDKILMLLDSWQDAFGGPGGKHPHYYWAYAELKRSGVEFPKRSPDAASMFISPVTQPESLPTYLQAGYGMPVDSSSRLDEAMSSNGAPLSISDLERMLGAVELLNEMLRAVNPNEKDAANDEIITELVTQCRSYQKKIMSSVSLVRDEELLGQALDLNDRLQILLEKHDSIASXSPSSADVINVVCEVPSGTASNQGTNFPPQAALRT

SEQ ID NO: 196138 - protein, 84 aa, Zea mays
  Clone ID: MRT4577_110463C.1.pep
ISTVSTLEQLTNMTLVARRCDSVPDMIRRCQDHDWVTEPADELDDDASYNQAVSAKVCNPLTYGNHTSCSLQPHTGRRTLERRT

SEQ ID NO: 196139 - protein, 209 aa, Zea mays
  Clone ID: MRT4577_110464C.1.pep
MECVIGVVGSDFAVVAADTSAVQSILVHKTDEDKIMLLDSHKLMGASGEPGDRVQFTEFIQKNLHLYQFRNNMPLSTAATANFTRGELATALRKNPYSVNIILAGFDKDAGASMYYIDYIATLHKIDKGAFGYGSYFCLSLMDKLYRPDMTVEEAVDLVDKCIKEIRLRLVVAPQNFAIKIVDKDGARDYARRDIGGDSPATRTATIAT

SEQ ID NO: 196140 - protein, 142 aa, Zea mays
  unsure (1)..(142): unsure at all Xaa locations
  Clone ID: MRT4577_110465C.1.pep
AGRRADPQAGGKPPPSTAARQAGFPSAWVRGGLPHIVVVGPGRLGRSAXGGTLVFPLGGFGXAGVGGFGEGAAGVXXRSFKYAWVLDRLXAERERXITIDIALWKFETTKYYXCTVIDAPGHRDFIKNMITGTXQADWAVLI

SEQ ID NO: 196141 - protein, 82 aa, Zea mays
  unsure (1)..(82): unsure at all Xaa locations
  Clone ID: MRT4577_110466C.1.pep
ARSGSTAPGADAPKVQNAHNEISALNDNELSAANKTASHPPYVEMIVESIPALLERKGASSMDICKYMAXKNAXGKLPTDFR

SEQ ID NO: 196142 - protein, 89 aa, Zea mays
  Clone ID: MRT4577_110467C.1.pep
MRVLEEDLYPSTPGKVKVERAGAMSRYLHRCFASTGTMFLWALFLVAMTATYLSVHSIVDTSSRYFAASWGGLHWERQIRASASPRRPL

SEQ ID NO: 196143 - protein, 167 aa, Zea mays
  unsure (1)..(167): unsure at all Xaa locations
  Clone ID: MRT4577_110468C.1.pep
IGYLEAGRDFTPSPLLGVHHRSTSLAFLTSTDHFSFRIADIPLSIPYHAAMSPHIEGDPVSSRSTKRQRPTEASQEPSALTGLTAAGQPYTXLGLPSQDRARTSRAARVRDPSSSRALHSPASDSEISLASSSACSSLDRIMTATCTDYDTYRDYVPAYACQNQTLL

SEQ ID NO: 196144 - protein, 157 aa, Zea mays
  unsure (1)..(157): unsure at all Xaa locations
  Clone ID: MRT4577_110469C.1.pep
PVISSSAPWQFNLTSTMGKENSHINIVVIXQVDSGKSTTTGHLILQLAGIXDKRVIERYDKDAAEMNKRSFKHSWELDKLMVERERGITIDIILRNDDTTTHYCTHIDDPGHRDFIENMNTVTSQADCAVLIIDSTTAGPEAGISDDDQTRERALLE

SEQ ID NO: 196145 - protein, 87 aa, Zea mays
  Clone ID: MRT4577_11046C.1.pep
IARQALEQRGHNVSAQCCDAVHSCRAEAPASSVASSACLCTPGLSSCARRYLCASHIERVVAAVVEQLEFVIHDLIPHLGLLVVICF

SEQ ID NO: 196146 - protein, 71 aa, Zea mays
  Clone ID: MRT4577_110470C.1.pep
PKVGPVSVAEARTFQFQSPRFRGPCLPRSNWAKVCRTEGFPGGRFRGFPPPCFCPPPCPLFVCPTAGWGSR

SEQ ID NO: 196147 - protein, 66 aa, Zea mays
  Clone ID: MRT4577_110471C.1.pep
EDIKNHGNPTSHKPELVLNNFTTRLGHRVGRMIQYLFPQDPNFRGRRVVTFHNQRDYILFRHHRAW

SEQ ID NO: 196148 - protein, 133 aa, Zea mays
  unsure (1)..(133): unsure at all Xaa locations
  Clone ID: MRT4577_110472C.1.pep
SSSPSLASELVIYTDTNWVDCXDTCRSISGYTVFLGTNLFSWSSKHXLVVSRSSTKIEYHTMANGVTKAFWLHXALXELHSPLARATLVYCDNVSMIYLXTNLHRRTKNVEIDLHFVREHVAVGDVRSLHVPT

SEQ ID NO: 196149 - protein, 53 aa, Zea mays
  Clone ID: MRT4577_110473C.1.pep
RVGSILPEVNFLERSMGKTKGWRDREREMLARLIQSWMKEQMLLRTSEAASMI

SEQ ID NO: 196150 - protein, 88 aa, Zea mays
  Clone ID: MRT4577_110474C.1.pep
LDTSDACSAVSLLPCLLPFTCRVRLLGGRRRRTLSFSAPATSTHHTRIVFIGFECLIVSVKFEFITSSPRNPVRWLPHALCGTTVADP

SEQ ID NO: 196151 - protein, 103 aa, Zea mays
  unsure (1)..(103): unsure at all Xaa locations
  Clone ID: MRT4577_110475C.1.pep
LCFWLAPVSLARSCSFWSASGCSLACPFSSGAVRLRCPRWARPGGPPPFEKASSPRPCRAFSCSRLRRSLLRCVCGVCVPLFGAPCRFXPRXXXCXXGPPPXL

SEQ ID NO: 196152 - protein, 67 aa, Zea mays
  Clone ID: MRT4577_110476C.1.pep
RDAPRAPRHRDAIPSPGGITQWCSQNDAGSYVASHVPSGCTVPMDVAWSSKNNCPQKDRRAPLHGEW

SEQ ID NO: 196153 - protein, 388 aa, Zea mays
  Clone ID: MRT4577_110477C.1.pep
MSCTVAIPSSPVFSPSRRPLSCKAASASPEPTVPASTAAPAPAAAAGSPLRPFALRALLREEVSPSPPPQPTSAAAVALVPSGAALKRRRPTPLVVPASGAAAAAAAAAAVAAVEADPRNEVEEEGEEFAAYCRRGKGRRRVEMEDRHVAKVALGGDPQVALFGVFDGHGGKNAAEFAAENMPKFMAEELTKVNGGEIEGAVKRGYLKTDEEFLKRDESGGACCVTAVLQKGGLVVSNAGDCRAVLSRAGKAEALTSDHRASREDEKERIENLGGFVVNYRGTWRVQGSLAVSRGIGDGHLKQWVVADPDTTTLLVDQQCEFLILASDGLWDKIDNQEAVDLARPLCINNDKTSRMAACRMLTETSISRGSTDDISVVIVQLQKFSSS

SEQ ID NO: 196154 - protein, 87 aa, Zea mays
  Clone ID: MRT4577_110478C.1.pep
PLGENKEGGAPDPTFLPLSRGDKPPLPKERANARSWGEVYCLIFTPKTWRAAFNNEPGGAQGGAPSRLSALALSPCLPRGTRSPPCV

SEQ ID NO: 196155 - protein, 96 aa, Zea mays
  Clone ID: MRT4577_110479C.1.pep
SATDRRQRRRPGQSTDRRDGKEDRAQECAPFPWARRWPGPEPSTASRHEQPPWPAKRAEIRGAGGARRAGRSGLGNKNGDWAGFAGANTPIRGPSR

SEQ ID NO: 196156 - protein, 159 aa, Zea mays
  unsure (1)..(159): unsure at all Xaa locations
  Clone ID: MRT4577_11047C.1.pep
TKTAAGPRLATASTXRAIHPRHXRSAASVRREEVAQPRDTAGQWRSTKKARRSLLPHAAVCAHASMCFWNSTHIHAWFHSPNPPWTGSRTKRRNPIGMLNPENARAPSLSPQPNSKGKLLYDNRSSSSLGWTLGGKNLLPPSQSNNSRRRDKRRNQLKN

SEQ ID NO: 196157 - protein, 160 aa, Zea mays
  unsure (1)..(160): unsure at all Xaa locations
  Clone ID: MRT4577_110480C.1.pep
GEPTVPAAAAAAAAAVAAVEADPRNEVEEEGEEFAAYCRRGKGRRRVEMEDRHVAKVALGGDPXVALFGVFDGHGGKNAAEFAAENMPKFMAEELTKVNGGEIEGAVKRGYLKTDEEFLKRDESGGACCVTAVLQKGGLVVSNAGDCRAVLXRAGKAEAL

SEQ ID NO: 196158 - protein, 100 aa, Zea mays
  Clone ID: MRT4577_110482C.1.pep
VSGHIGGAYKIGARGAYIKLYTTDLRSNVCRGSFNLQITPARVSPLHTTTLEGAFSKICQTPRNVRSTMRGDDLICASCAPRLPCALDMVSLSNAPGANK

SEQ ID NO: 196159 - protein, 84 aa, Zea mays
  unsure (1)..(84): unsure at all Xaa locations
  Clone ID: MRT4577_110483C.1.pep
DKQILISCTVPNRIYGHYATVHXIGYGKDRYLPKKSWSTKDSVHHPFSGSIGQGSVLKGXDQGLMTVHVGXEVADVHGTPDYAY

SEQ ID NO: 196160 - protein, 112 aa, Zea mays
  unsure (1)..(112): unsure at all Xaa locations
  Clone ID: MRT4577_110484C.1.pep
TGRALRRTVRPAVPGVTXLSGGQIEEEASINLNAINKCPLRKPWALTFSYGRALQASALKAWGGKKENLKAAQEEYIKRALANSLACQGKYTPSGQXGAAASESLFISNHAY

SEQ ID NO: 196161 - protein, 55 aa, Zea mays
  Clone ID: MRT4577_110485C.1.pep
VTIQASMWCLCFKFGTTNVMAFAPLWTVPLSHEVRSPYRGGLPWSSRVSGRGSYT

SEQ ID NO: 196162 - protein, 101 aa, Zea mays
  Clone ID: MRT4577_110486C.1.pep
QILLPYLQLCKMLPERKRAPIARGALVFILMNHHTITRPKPLQNCPKHCINKILILALTTTFTLKPHRAYHSCRTLFWKNQALPDRPNHRSFRSGCIKMIT

SEQ ID NO: 196163 - protein, 180 aa, Zea mays
  unsure (1)..(180): unsure at all Xaa locations
  Clone ID: MRT4577_110487C.1.pep
KPAPRSPLLSRSTWKELLEPKSTESLLADGGLDPRSPLLSRSTWKEVTAPKSTESNFAAAVTDGRAIHGISPQPQYGGTPLSSPPKLNLFHQTRPQFHHFPSPQVGGAAPGDLPILENLMPMGHLDQFLADPGFAKRTARLSDFDGRHGXSGNGXGGRVPGQFGLPDAGPIGALKELELG

SEQ ID NO: 196164 - protein, 49 aa, Zea mays
  Clone ID: MRT4577_110488C.1.pep
VIVHFVLQIIYCFLLVEPGANGLIVNKWLAGSHISSWAFYIHRSSRSQY

SEQ ID NO: 196165 - protein, 80 aa, Zea mays
  unsure (1)..(80): unsure at all Xaa locations
  Clone ID: MRT4577_110489C.1.pep
FPPPKKLKWCQKFKKFPQKFWALSPSFFLGRDPPGPPLNYPIGVFSXGPRFXLPGMKNFLYTRGRVFGKKWDFLPPFFPK

SEQ ID NO: 196166 - protein, 151 aa, Zea mays
  unsure (1)..(151): unsure at all Xaa locations
  Clone ID: MRT4577_110490C.1.pep
MMHAKSDSDVTRLPASAPPGPANRGDLDGNDGYYHQSPSGESQHDGYQYSSIEATAVYYCPNDSTTNPSYSRNSCSSSVTGLSRNLRTGASAPRKALNNKGGTECTSIARGRPYNYLAGNSSLSRRXEMILEFLTFVCIFTVYCLIIWGGT

SEQ ID NO: 196167 - protein, 42 aa, Zea mays
  Clone ID: MRT4577_110491C.1.pep
QYKIPYEDHLFLSFKPRLRFARPICIYIPGLPLLSFRFKKDL

SEQ ID NO: 196168 - protein, 185 aa, Zea mays
  unsure (1)..(185): unsure at all Xaa locations
  Clone ID: MRT4577_110492C.1.pep
MVNTRKGGGIDLPANPYNRRVLRQQQQAEMNPPNPPPVGADPVISAQMQIMQQMADTMADMHAQMRQERQEMRQEREDIRREMHQEREEIRQERRAQQQQQQAPLPPPPPPAPSRDKHREFMSHKPPTFSNSADPLQADDWLKSVEKMLNIAQCSDREKVLYASGRLTGQAADWXDAYCAAHAAV

SEQ ID NO: 196169 - protein, 308 aa, Zea mays
  Clone ID: MRT4577_110493C.1.pep
MLLRPRPSFFRAVVPPPLTRACVPSRRTLSASAEAGTASPKDAASAPVPAATRKNPRKAGSPPMGIVKTALFLPPGVERDALVPADMVIPGSNIVVGPYAGDARVKGAEFVKSSARARDCPNDDRPEFAVLGRSNVGKSSLINALTRRKEAALTSKKPGKTQTINHFLVNKSWYLVDLPGYGFAAASQSARMDWSSFTKGYFLNRDTLVGVLLLIDASIPPQKIDLDCANWLGRNNIGLTFVFTKCDKVKKGKGGRPDENIKEFHETISGLYPDPPPWIMTSSVTGLGRDGLLLHMSQLRNYWDNEAV

SEQ ID NO: 196170 - protein, 89 aa, Zea mays
  Clone ID: MRT4577_110494C.1.pep
MGLAFWKLFNRLFAKKEMRILMVGLDAAGKTTILYKLKLGEIGTTIPTIGFNGGTGEDKNINFTVWDVGGQDKIRPLWRDYFQNTQGLI

SEQ ID NO: 196171 - protein, 52 aa, Zea mays
  Clone ID: MRT4577_110495C.1.pep
CLRVQRHGLAGAAPLVEGTPLTAEQACCQRLPTGKEAGPRAWAHRCSPKTSG

SEQ ID NO: 196172 - protein, 150 aa, Zea mays
  Clone ID: MRT4577_110496C.1.pep
TGRPAPRAPTPSDMRSERAAAAATAKAQRQRRRPLLRRRPAQHAAVVFVRIHVRTTAQLTRLPTRPFSATGWSVGGRRGEGFRYVVDKHEGRAGRRERRRRRRPQVAVFPNVKKDSCNSDKKNKSSSSSLHPPYLSLSLSSRAVACSRSE

SEQ ID NO: 196173 - protein, 94 aa, Zea mays
  Clone ID: MRT4577_110497C.1.pep
LVLGAKKGGARGVDTGPLSPFNPPEGRRGSPKWTPPAPPFFKKCLFVKKPSRISFLKGGLSPSWGPPLKKNRGGKFMFPRKPGIGYVFCPLFRG

SEQ ID NO: 196174 - protein, 68 aa, Zea mays
  Clone ID: MRT4577_110498C.1.pep
TPHPKKLQDLLPAIINQVGPDNLNNLGGLGGQFQKRAPGFSGAKAGPTPGFSQGNGNNVSRLAPGKTF

SEQ ID NO: 196175 - protein, 65 aa, Zea mays
  Clone ID: MRT4577_110499C.1.pep
YPVHFAHDNVYFWAAQNPVHVAPRRPSRCKGRCLRSFHAMNNCGEEDPLLGHIMQELDVFIKILL

SEQ ID NO: 196176 - protein, 75 aa, Zea mays
  unsure (1)..(75): unsure at all Xaa locations
  Clone ID: MRT4577_11049C.1.pep
VSIGLVPGSHPSGEVSHPWXXREWXXAIVDRXVPSYIFIWLPSTYYLHXYCSWNAHXVSILIWLPFFPSAQQIXE

SEQ ID NO: 196177 - protein, 243 aa, Zea mays
  unsure (1)..(243): unsure at all Xaa locations
  Clone ID: MRT4577_1104C.1.pep
MAKTYPVVSAEYQEAVEKARQKLRALIAEKNCSPLMLRLAWHSAGTFDVSSKTGGPFGTMKKPAEQAHAANAGLDIAVRMLEPIKEEIPTISYADLYQLAGVVAVEVSGGPVIPFHPGREDKPQPPPEGRLPDATKGSDHLRQVFGKQMGLSDQDIVALSGGHTLGRCHKERSGFEGPWTRNPLKFDNSYFTELLSGDKEGLLQLPSDKTLLTDPVFRPLVEXYAADEKAFFEDYXEAHLRLS

SEQ ID NO: 196178 - protein, 140 aa, Zea mays
  unsure (1)..(140): unsure at all Xaa locations
  Clone ID: MRT4577_110500C.1.pep
HASRQASDQAFGPRVRXTLRSIQHRNLLPIITACSSIDTTGNSFKALIYELMPNGNLDKWIHHKDNEALPKRLSLAQRIAVVVNVADALDYLHHDCGRPTIHCDLKPSNILLGDDMNAVLADFGIAHLYSDSQSTWKSSF

SEQ ID NO: 196179 - protein, 172 aa, Zea mays
  Clone ID: MRT4577_110501C.1.pep
LSPSAPSTATASASRSGRMRPLEKSWSASIMGRLPAGENSKSASARPGGLGGGGSSAKSLEKDIRGGSISCRPRLLRVVRVNTYVPSRTTRTPNCRVTTDRRTDEDASSVCASCRRPVAAACSEVCGFGQARQAMDGMAWAGCSRATVQGMLYNSSSGEAGCSGRGGEFVQT

SEQ ID NO: 196180 - protein, 101 aa, Zea mays
  unsure (1)..(101): unsure at all Xaa locations
  Clone ID: MRT4577_110502C.1.pep
MTTIPMFHASEFPQRDWVLSDYPFGAATSLYQIXSCWNEHGKVESNWDHFCNNHPXRILYGSNSHIAANSYHMYKTDLTLLTEMGMHTYRFSISWARILPK

SEQ ID NO: 196181 - protein, 95 aa, Zea mays
  unsure (1)..(95): unsure at all Xaa locations
  Clone ID: MRT4577_110503C.1.pep
RALXCVXLXXLLFCXGXSXXCXFLXLXVXSXVXCLGXXXCXXVXPFAXSXWSPXVSXCCXCXXACRLXXXXXXXXXWSXFCXXXPPLXAWXXXXX

SEQ ID NO: 196182 - protein, 84 aa, Zea mays
  unsure (1)..(84): unsure at all Xaa locations
  Clone ID: MRT4577_110504C.1.pep
RETASTPNPRSSTDDLAGERATDMEASGSGRPAEELGXSNPQIATQAEMADARLPVAYQNQCCDLLITFNMSQVAEFYLPWKCR

SEQ ID NO: 196183 - protein, 90 aa, Zea mays
  Clone ID: MRT4577_110505C.1.pep
GSAPSPAAVVRERVAVKLRGYFDLAKEEMDKAVRAEEWGLPDDATAHYRNAMRVMLEAQAARVPDAVSSRCARVLFLAPVAARASGMIRD

SEQ ID NO: 196184 - protein, 41 aa, Zea mays
  Clone ID: MRT4577_110506C.1.pep
KRTISSYRKSFLESSKNKDQHVVRWSPGKCLFASVDVQNKK

SEQ ID NO: 196185 - protein, 125 aa, Zea mays
  unsure (1)..(125): unsure at all Xaa locations
  Clone ID: MRT4577_110507C.1.pep
MSASPEFYKPAPPAFSPPTLLLHGAGADXRRRRDHVAGGSGXRCRTPTGGESQVKPPGTCPPAPRKPRAPAACRKRLFEVEVLSLRLEELEQLFWRPRPAPPPPPPAQKKKRRRVACTGPNKKSI

SEQ ID NO: 196186 - protein, 55 aa, Zea mays
  Clone ID: MRT4577_110508C.1.pep
GAGFNFQCQILGRLTRCCWGESPKISPGPNKGFLKTKTGFEGQKDYARRLSFLLL

SEQ ID NO: 196187 - protein, 94 aa, Zea mays
  Clone ID: MRT4577_110509C.1.pep
DTETARTTSSTECIGTKDVDHIREAPNTLKKEMAKCMAFTYYKLAVSYHGLGQLVQFITSTGILCQSRVYAGCVRHVEPQIQDIGDSGLQYEKP

SEQ ID NO: 196188 - protein, 694 aa, Zea mays
  unsure (1)..(694): unsure at all Xaa locations
  Clone ID: MRT4577_11050C.1.pep
MEMNSSGEETVIKVRKPYTITKQRERWTEAEHKRFLEALKLYGRAWQRIEEHVGTKTAVQIRSHAQKFFTKLEKEAMNNGTSPGQAHDIDIPPPRPKRKPNSPYPRKSCLSSETQTKELPNDKSTKPNMPLSNGHVKMVGDASLQNFQRKELSEKGSRSEVLNLFRDAPSASFSSVNKSSSNHGAPRRTEASKTESRDMSIMENNSFNPNTQEDVKVISDQEMERLNGIQIRSKCEHSHEGYLDISTQQMKLMPKSVETTYVDEQTARASXHPSREQRDSXSVPVTVPEGTHPDQTSDQVGINGSMNPCIHXQWFLQTQKFGSSATPQTFPHNYAAFAPMMXATATKIRTAARLAASYWPAAEGNTPIDPNQENPADGVQGRNIGSPPSMASIVAATVAAASVWWATQGLLPFFAPPVAFPFVPAPSAAFPTVDVPRPSEKDRDCPVENAQNECQEARKQVQFEGLRVAASSESDGSGKXGVSPYGVKAISXRMLMPHLPXAGTNDAFRNKKKQDRSSCGSNTPSSSDVDAGNVPEEDNANEKAKQASCSNSSAGDTNHRRFRSNGSTSDSWKEVSEEGRLAFDALFSREKLPQSFSPPQAVDSKEVAKEEEDEVTTVAVDLNKNATSIDHDDLDTMDEPRASFPNELSHLKLKSRRTGFKPYKRCSVEAKENRVPTSDMVGTKRIRLDSEAST

SEQ ID NO: 196189 - protein, 78 aa, Zea mays
  Clone ID: MRT4577_110510C.1.pep
TLLLPFYACCASERDGAVVYYAYAHAELFFHRDPILARCRWRPIVEMDTVFAFLSGTCYPYPDYMGTLGREDRNMMVL

SEQ ID NO: 196190 - protein, 85 aa, Zea mays
  unsure (1)..(85): unsure at all Xaa locations
  Clone ID: MRT4577_110511C.1.pep
VVFIRSLRCERTQKQVRGISIHEKLNGPFDSRRYLGLMRAHLRPXPFDRPLRDAFRVLDKDRSVTISVSDLRLVLTSIGEKLVVH

SEQ ID NO: 196191 - protein, 63 aa, Zea mays
  Clone ID: MRT4577_110512C.1.pep
PWIRSFAFGGALLFPMMKNGLGGFLAKTNRNYGARCSPNPVETGLNFSGPRLVGRDFEPDYSC

SEQ ID NO: 196192 - protein, 75 aa, Zea mays
  Clone ID: MRT4577_110513C.1.pep
AGTVLNAYLAQMVSFEPNGGGLQQWGRQRDSPECSIPSKGVPIGRLLRTVAACDAKYHSIGGLRSQVHVRGHFYI

SEQ ID NO: 196193 - protein, 155 aa, Zea mays
  Clone ID: MRT4577_110514C.1.pep
RRKQLNDLYSSLRSLLPDADHTKKLSIPTTVSRVLKYIPELQKQVDNLERRKRELTNANCKPGVLNTSEIVTTPIVSATCLNDTEIMVQVSLHSNVAATALPLSKCIKVLEDAGLHLISSSTYSTFGNKTFYSLHLQVCMHVHSMVPAVSFNFFI

SEQ ID NO: 196194 - protein, 105 aa, Zea mays
  Clone ID: MRT4577_110515C.1.pep
TTWTCPRRSWTGPAYEFVPRLVRCSRIIYYYYSHYRARKRGSAGKCIAAVKTTTAAKDGKKKHFSSFLCTHLLSLLATLLGSKPASYNFATRTLFFAAKKSDFYP

SEQ ID NO: 196195 - protein, 112 aa, Zea mays
  unsure (1)..(112): unsure at all Xaa locations
  Clone ID: MRT4577_110517C.1.pep
XXXFFFFFFFGKPPLTRFFPPPKFPKKKKTVQILGGLPLNQKKKFFFFFFFFFFFWTPHLNPFFSPPKVPKNEHGGSSFWGPPFQPKKNFFFFFFFFFFFEHPTLTSFIPSL

SEQ ID NO: 196196 - protein, 106 aa, Zea mays
  unsure (1)..(106): unsure at all Xaa locations
  Clone ID: MRT4577_110518C.1.pep
HSFHIINYFSYLSFRIHNQEAPHNSTLSKLTFSHLQPITYIILXIPSFHHMFYTNSLTSYTPYLNTHYNQLTHYMHTQSIFSFNPYTIHSTQHVSSPTPSEPLPYY

SEQ ID NO: 196197 - protein, 112 aa, Zea mays
  Clone ID: MRT4577_110519C.1.pep
GRAGLTSRISPLPAHSRTPPTPFTRRRRRRRRHPPYLCRPARGRHIRSSLFISACTLRRGSDAAVLLLLRVCPRTATLVLCYCNACSVSVSPRPRPLRLPVIRIQTLKLLLL

SEQ ID NO: 196198 - protein, 82 aa, Zea mays
  unsure (1)..(82): unsure at all Xaa locations
  Clone ID: MRT4577_11051C.1.pep
TGPAVFDPISSPKFAGGAAGPKTFCPXVVGFSFEDPKKVILKANPDPPIVVLPLGSVVPPDFPPTRVRFFVDIVAQTPPMGF

SEQ ID NO: 196199 - protein, 51 aa, Zea mays
  Clone ID: MRT4577_110520C.1.pep
IRYTGPPTLPAYLLTVHGIILKVGFLPSNALRYDAQPINVPIIIILLPNQI

SEQ ID NO: 196200 - protein, 92 aa, Zea mays
  Clone ID: MRT4577_110521C.1.pep
AGRYRDEHQYQQKLPQEYQPQHQRPSPLQKLIKKAPTNEKSSSVFYRLAQTPTRSSKAKITYRHSSGSVEELKMKWEPVEKRPQSAIMSHFI

SEQ ID NO: 196201 - protein, 36 aa, Zea mays
  unsure (1)..(36): unsure at all Xaa locations
  Clone ID: MRT4577_110522C.1.pep
VPHAXXVELSLAFPEYGKDLSVKHTLGCLDCXVVFK

SEQ ID NO: 196202 - protein, 35 aa, Zea mays
  Clone ID: MRT4577_110523C.1.pep
AQSDKGRNDPSITPVHQLPLVVGELPDGEVGEELS

SEQ ID NO: 196203 - protein, 127 aa, Zea mays
  unsure (1)..(127): unsure at all Xaa locations
  Clone ID: MRT4577_110524C.1.pep
DYMQEQLSKLQGGLNTVDFVTVXRGVASGVDQLLFAGIFTSGTKVSSDGVERLQGDLSVLFAIFSAWCLRPEGFFPRLSEGLRLLKIDEQQLREGAFKDKNWLREHGIRHLAAADTERIIKNRVYDA

SEQ ID NO: 196204 - protein, 102 aa, Zea mays
  unsure (1)..(102): unsure at all Xaa locations
  Clone ID: MRT4577_110525C.1.pep
VDICRXGERDGRPSTDSERRSRHPXXSTTLSXLSXQAXXPRLAPNSKKKRTXXRLLSEYHANVCTRXGHGHPTDPSGIRCEASTKHXXGAAGSRKRARGGFV

SEQ ID NO: 196205 - protein, 94 aa, Zea mays
  unsure (1)..(94): unsure at all Xaa locations
  Clone ID: MRT4577_110526C.1.pep
HVGLLYCDPISVVVFYNIIDSXTNLDWYKGPTLLEALDLINEPKRPSNKPLRLPLQDVYKIGGIGTVPVGPVXTGIIKPFMVVTFRPSCLTTEV

SEQ ID NO: 196206 - protein, 261 aa, Zea mays
  Clone ID: MRT4577_110527C.1.pep
MMPQASASLDLGLSLGLTLTSQGSLSSSTTTAGSSSPWAAALSSVVADVARARGDAYAQHHAGAAMTMRASTSPDSGDTTTAKREREGELERTGSGGVRSDEEDGADGGAGGRKKLRLSKDQAAVLEECFKTHSTLNPKQKVQLANRLGLRPRQVEVWFQNRRARTKLKQTEVDCEYLKRWCDRLADENKRLEKELADLRALKAAPPSSAAAQPASAAATLTMCPSCRRLASASASADQAGRAGPCWGPLPVFVDGPARRP

SEQ ID NO: 196207 - protein, 227 aa, Zea mays
  unsure (1)..(227): unsure at all Xaa locations
  Clone ID: MRT4577_110528C.1.pep
MSENELAVIKPEALKTYIWLQCFDGSIQQVEEDVAMFCPMICLEIVKNGTGSSKNHAIVLPERVSPDKFXSLILNYCRFXHQVPGRSNKERKSFDEKFVRIDTEKLCKLASAALGLQLRPLVDLTCGALARIIGGKTPDEVRDIFHLPDDLTEEEKLEPLKNVNDDPTIRLLNRLYGKEAGKELXNAQKLKGFQTQEQKDERSXDELLCFINGHGRFQRWGKRLRKK

SEQ ID NO: 196208 - protein, 95 aa, Zea mays
  unsure (1)..(95): unsure at all Xaa locations
  Clone ID: MRT4577_110529C.1.pep
FVCFRRSCGLLGAGLPPLXVVAPLLVRARCVCRAPWFVXWVVPLXWFVVRGWPPLXVXCLAWPVPLXCXXXLXALXSGLPCXXXXALFXGLGFPV

SEQ ID NO: 196209 - protein, 203 aa, Zea mays
  Clone ID: MRT4577_11052C.1.pep
MAPPRTGLKALNLKHYILAALMAILAVAVVVTVFSVLLSPARIFFSVTNPRSHLLVGNGGANLTFTLAANNTSQRAAVWYNTILVDVLNSTVVTPASIWTKADLKKNATSLMAGWQTRGSVATVDATVSVSRGSMAMAFINGADVNSSAFTVTVTAVARFKVGIAKTQLYDINVMCTPVIFLLQNRSGISVAASGANVDCGPY

SEQ ID NO: 196210 - protein, 256 aa, Zea mays
  unsure (1)..(256): unsure at all Xaa locations
  Clone ID: MRT4577_110530C.1.pep
QALKTYIWLQCFDGSIQQVEEEVAMFCPMICLEIVKNGTGSSKNHAIVLPERVSPASLSLILNYCRFHQVPGRSNKERKSFDEKFVRIDTEKLCKLASAALGLQLRPLVDLTCGALARIIGGKTPDEVRDIFHLPDDLTEVRVPLIVVYRKKFSLSPXTTPPPGAKKTDFINTSSAXKVDHFILDVDTFDTYLXEEKLEPLKNVNDDPTIRLLNRLYAKKRKELQERQKLKDVQTQEQKDERSLDELLCFINGHGG

SEQ ID NO: 196211 - protein, 86 aa, Zea mays
  unsure (1)..(86): unsure at all Xaa locations
  Clone ID: MRT4577_110531C.1.pep
PRVRGRVGSISSFAXKGGDLTFFVRTPHNQLASNTISSSSFALTLTRQSRSPDVRSRTLAEGCPPGSNYHTKGPFSPSPNHPMQST

SEQ ID NO: 196212 - protein, 96 aa, Zea mays
  Clone ID: MRT4577_110532C.1.pep
PEHGTLVEEEPTPFLPRGAATELHHHCERGAWQRTGVDGERQSLDGAASASLSSISSPAAKTTVASGGDLTVLASADGCESRSGGPSARPRSHFIQ

SEQ ID NO: 196213 - protein, 90 aa, Zea mays
  Clone ID: MRT4577_110533C.1.pep
CEGFQSFGGNRLFPFFSQLAFLPSCKGIKISLRGPLGPFFFLCSPLFFFYFGTPKGAQGLSDPFFFPPWVLTPNFPKSLNGINFAVPAFY

SEQ ID NO: 196214 - protein, 52 aa, Zea mays
  Clone ID: MRT4577_110534C.1.pep
YMGKNLGVTLADSLRGSIFFLIYINKVFKKKPSNRLAKRLSKYSHILFRISR

SEQ ID NO: 196215 - protein, 124 aa, Zea mays
  Clone ID: MRT4577_110535C.1.pep
LRARLNQNSDLAALMVQVQELHKEKEILKMNLDTAEAEVVTLSEDNRALDEEIKRLLSLLEKERQRRSERKKSASTSTKNKRKSSSLRDGNTAGRALDFGCADSSRHPLSPLPHNSPDYRAHKK

SEQ ID NO: 196216 - protein, 64 aa, Zea mays
  Clone ID: MRT4577_110536C.1.pep
LCCRLTCHMASSHLIKSSSLCDSYQRLGGCTLLEMRSFLRGGMLTRVTHPALAEVLWSHGCRHH

SEQ ID NO: 196217 - protein, 123 aa, Zea mays
  unsure (1)..(123): unsure at all Xaa locations
  Clone ID: MRT4577_110537C.1.pep
LPTIAAKKXFLNILRTLSTSSTTSTIFPQCSQSPISSFLPPYLSPSLSSVCQNPILQPYIIQHAITSSILPLSPLFLQQPSSLLHHLPLVHLFAHNIISQQLLQLFLXNLSSYSHQQQYPSFN

SEQ ID NO: 196218 - protein, 54 aa, Zea mays
  Clone ID: MRT4577_110538C.1.pep
SSGRPGRYKKKKKKKKKKKKKKKKKKKKKKKKKKKKKKKKKKKKKSFFLGPEPP

SEQ ID NO: 196219 - protein, 209 aa, Zea mays
  Clone ID: MRT4577_110539C.1.pep
GRTATRPAAIAGAGAVSSDVRSSSPPRPIPVARAYLRVGSLKPPHGHTHLQGFDGCVCVRDDNGGLDLDWTGRAAILDHACDRLAFCPDARRRLVGSVPPPIDRLCVWYDWVAVAVLEVWRPAMAHHSGAARRGGRAMAMNRSGVQIRWREVRPGRAAASLRCGCLFEVIDQPEDAAEVSDSDPRPQPPPCSCKPVLPSLLIMLRPSTC

SEQ ID NO: 196220 - protein, 155 aa, Zea mays
  Clone ID: MRT4577_11053C.1.pep
CGSNTPSSSDVDVDNVPEKEGNGNEKAKQASCSNSSAGDTNHRRFRSSGSTSDSWKEVSEEGRLAFHALFSREKLPQSFSPPQAEGSKEVGKEEEDEVTTVAVDLNKSTTSIDHDLDTIGFKPYKRCSVEAKENRVPASDEVGTKRIRLDSEAST

SEQ ID NO: 196221 - protein, 70 aa, Zea mays
  Clone ID: MRT4577_110540C.1.pep
FKDPCSVYLCAKRDMEDKGTSPVGAWAGYLFMRYADAEQTRLSKGHRINMKPIPLRGAPPWTVGAGKCSP

SEQ ID NO: 196222 - protein, 262 aa, Zea mays
  Clone ID: MRT4577_110541C.1.pep
RVHAYVRPRVRRFLVEQLSKVNPSCMDRDQRLAFWINLYNALIMHAYLAYGVPRNDIKLFSLMQKACYTVGGQSFSAAEIEFVILKMKTPVHRPQLSLMLTLNKFKITEDHKKYSIDEFEPLLLFGLSCGMFSSPAVRIFSAANVRQELQESLRDYIQATVGTNGKGKLLIPKLVQSYAKGAVEDSLLADWICHHLAPDQATVIRDSSSQWKQRLLGARSFTVLAFDSKFRYLFLPDSCGSQSQKPEAKQSYKLPEPCSESE

SEQ ID NO: 196223 - protein, 151 aa, Zea mays
  Clone ID: MRT4577_110542C.1.pep
GLSSFSSICLIYRCLSWTVIRLLKPKLLLGHPVVAQVRIFSAANVRQELQESLRDYIQATVGTNGKGKLLIPKLVQSYAKGAVEDSLLADWICHHLAPDQATVIRDSSSQWEQRLLGARSFTVLAFDSKVRYLFLPDSCGSQSQKAEAKQS

SEQ ID NO: 196224 - protein, 60 aa, Zea mays
  Clone ID: MRT4577_110543C.1.pep
SRLRLKKKPPCPQYRTSFAGVGPPPLWGGAAPFSPPEIAILLHPLKFGWLPPLGPPALTR

SEQ ID NO: 196225 - protein, 70 aa, Zea mays
  unsure (1)..(70): unsure at all Xaa locations
  Clone ID: MRT4577_110544C.1.pep
SRXHRXKVRRKRRXXRFAKGSVGXTXRRXXPQSTGKQLEKQVQAGDRLXFDSSPXTVTQAELSPTRSRPL

SEQ ID NO: 196226 - protein, 83 aa, Zea mays
  Clone ID: MRT4577_110545C.1.pep
GSEIQGRCWVLFFQQAWGGSQGCCLQRSSPDRFRPRASKRGGVLDLGWKNGLSWGFKPMGSFKPPGAAHKDRTRSPPLFFPPP

SEQ ID NO: 196227 - protein, 138 aa, Zea mays
  Clone ID: MRT4577_110546C.1.pep
SATKPAPNVPPPSSPRVYSSRLKARRRRRLPARRRGPGGPFLHPTRTLFATRAIPAALVSILRPLSSYRRRSRSSRRPPSPSQPTFSPGPGPWSIVGLDEPSLLWDPVRVYRPRVNHHPRLCLLQPQLRHLPSLQYQP

SEQ ID NO: 196228 - protein, 93 aa, Zea mays
  Clone ID: MRT4577_110547C.1.pep
MAAAAATKASSWMVAMSVGAVEALKDQGGLCRWNYALRSVHRTAKANVRSSRSFAAQRDKELTPAAQKGRQEDKAAAEEGLRTVMYLSCWGPN

SEQ ID NO: 196229 - protein, 51 aa, Zea mays
  Clone ID: MRT4577_110548C.1.pep
MPSHKTFRIKNKLSKKMRQNRPIPYWIRMRTDNTIRYNAKRRHWRRTKLDF

SEQ ID NO: 196230 - protein, 103 aa, Zea mays
  unsure (1)..(103): unsure at all Xaa locations
  Clone ID: MRT4577_110549C.1.pep
KKAFFNKEPKKFPESYHSEQEKPQQQKSFARRNLGPVQNYQNPRVKKTKVCFXFNVYGPKGDIFTKKASKALASFKKKENVPVEENATVIPKCFRQRPPKEPL

SEQ ID NO: 196231 - protein, 280 aa, Zea mays
  Clone ID: MRT4577_11054C.1.pep
MEVNSSGEETVVKVRKPYTITKQRERWTEAEHKRFLEALKLYGRAWQRIEEHVGTKTAVQIRSHAQKFFTKLEKEAMNNGTSPGQAHDIDIPPPRPKRKPNSPYPRKSCLSSETQTKELPNDKSTKPNMPLSNGHVKMVGDASLQNFQRKELSEKGSRSEVLNLFRDAPSASFSSVNKSSSNHGAPRRTEASKTESRDMSIMENNSFNPNTQEDVKVISDQEMERLNGIQIRSKCEHSHEGYLDISTQQMKLMPKSVETTYVDEQTARASHTLAESNGDS

SEQ ID NO: 196232 - protein, 91 aa, Zea mays
  unsure (1)..(91): unsure at all Xaa locations
  Clone ID: MRT4577_110550C.1.pep
MAAAKASSWMVAMSVGAVEALKDQGGLCRWNYALWSVYRTAKANVRSXAESSSCSGTWTWPRRRSKGRQEDKAAAEEGLRTVMYLSCWGPN

SEQ ID NO: 196233 - protein, 133 aa, Zea mays
  Clone ID: MRT4577_110551C.1.pep
MNKFSGLKYKLSKSEKFDEYMKALGVGMLTRKVGNSVSPVVELTVDGDNYTLKSSSTFKNTVINFKLGQEFEQETPDGRKVKTTITQEGDNKLIEVQAGDKETKIIREITPEEISMTLTVDDIVCTRHYKLVE

SEQ ID NO: 196234 - protein, 93 aa, Zea mays
  Clone ID: MRT4577_110552C.1.pep
MAAAAATKASSWMVAMSVGAVEALKDQGGLCRWNYALRSVYRTAKANVRSGSRSFAAQRDKDLAPAAEKGRQDKAAAEEGLRTVMYLSCWGPN

SEQ ID NO: 196235 - protein, 132 aa, Zea mays
  Clone ID: MRT4577_110553C.1.pep
GSQRSGWPSRQRRRRRSGSPSRSTRCCSGLASPGADSGIGHAGASYTNRGLLAEADEVLLLAADNPFTLPEAAFARRRLDRAVCAAASRMVEEFLRVRRRRKEQLGGHRRGGGRCTTGAGRGTCSSVPHEVR

SEQ ID NO: 196236 - protein, 72 aa, Zea mays
  Clone ID: MRT4577_110554C.1.pep
TQSPALFLHPQAPHYPCSFQYLQPFSYSFGPAPHLPSCLFLAPFPNSLFISPPLKFAVAAAAHVGLQDKRRV

SEQ ID NO: 196237 - protein, 103 aa, Zea mays
  unsure (1)..(103): unsure at all Xaa locations
  Clone ID: MRT4577_110555C.1.pep
MENVDHAFYISDEDDLGGGAMGGPRGAPVKEIALAVALVDFGALGTGGGLLMAENRVGGDRAHGIFFMKSGIVMNIXGFYYTRSAYYAYKGDKGCSFSNMPPI

SEQ ID NO: 196238 - protein, 455 aa, Zea mays
  unsure (1)..(455): unsure at all Xaa locations
  Clone ID: MRT4577_110556C.1.pep
MVNPLLIFLPFLSVAALPGNADAAGPDPCAGRRIHIRGLPPRFNTDLLRHCGANAFPLADPSAAATSVPPCESLANHGLGPRTHPRSRSWYRTDARLLEAFFHRRILERDCLADDPADADAVFLPYYAALDALPYVIDPALLDESARHGVALAEFLSRDQAHILSRRHGHDHFLVVAGSAWDYAQSPVAEPRLWGSTSLLRLPELANFTFLTLESRTWPWQEHAIPHPTSFHPSSLGHLRAWLARARRSRRATLMLFAGGASRPSRPNIRGSILSECANRTDACVVVDCSGGKCAHEPVRYMRPMLRSKFCLQPPGGTPTRRSTFDAILAGCVPVFFEDXAARRQYGWHLPPVRYGEFSVHMPKEAVVFGGVRIVETLQAVPEEEVRRMRQRVLEMAPRVVYRRHGSTPELRQAVKDAVDLAVDGVLQRIRWRTRALEDGPPERIYAQEEDSVDR

SEQ ID NO: 196239 - protein, 89 aa, Zea mays
  Clone ID: MRT4577_110557C.1.pep
LYYVLLNLRKRKWYHKALELVEYVQNSQLLELGERDYAARVDLTAKVYGLHKAEQYIEKIPASHRSEVVYRTLLANCVAEGNVKKSEQV

SEQ ID NO: 196240 - protein, 123 aa, Zea mays
  unsure (1)..(123): unsure at all Xaa locations
  Clone ID: MRT4577_110558C.1.pep
MDAPKLETRAMAALLAATARAATAAARAARTXTTGDSTLRPRLPSWQMGGAMPTQTRCGGMRSLLQQANNTPDRRTICGCLKNVANGANGSGTYISRAAALPRKCGGALPHKISTNANCNTIK

SEQ ID NO: 196241 - protein, 110 aa, Zea mays
  unsure (1)..(110): unsure at all Xaa locations
  Clone ID: MRT4577_110559C.1.pep
MEHAPWILALGLLALLYADASPACLQKCGCQANFCCXKFGYCXTTYAYWGDCCQSGPCRXGLXGGGSGTXGSKGSGGSNMAHVVTVTLYNVINNQTKSGCEGKNYYTRSA

SEQ ID NO: 196242 - protein, 70 aa, Zea mays
  unsure (1)..(70): unsure at all Xaa locations
  Clone ID: MRT4577_11055C.1.pep
MGGLRLVFFTLRPAAASASASSGATPAAYGSVCVSLARAARGLXPXLRLAPPRRRGDLDRTCARDLHHGG

SEQ ID NO: 196243 - protein, 75 aa, Zea mays
  unsure (1)..(75): unsure at all Xaa locations
  Clone ID: MRT4577_110560C.1.pep
QGKYLGAKQVLLDAAKKLGIKGAEELLXDPTKGVPEVQEKLKKFSSGISGVPPFVVHNKNPPRGGPPPNEFIRGF

SEQ ID NO: 196244 - protein, 135 aa, Zea mays
  Clone ID: MRT4577_110561C.1.pep
LPEGFLDRTKEVGLLVPSWAPQTQVLAHSATGGFLTHCGWNSTLESLVHGVPMVAWPLFAEQRLNAVMLSEGAGAAIRLTETKDKETIAAVVRELVEGQGKGAMVRVKVAELHQAAAECLRDGGAATTALDEVLD

SEQ ID NO: 196245 - protein, 78 aa, Zea mays
  Clone ID: MRT4577_110562C.1.pep
VGSLVFFFFTVIEVGVQVSFLTFPNPLCTKKKSTNIIFSGARFGGGPHWEDCFPNTTCHTLILAHHTLDAVTPGGNHR

SEQ ID NO: 196246 - protein, 503 aa, Zea mays
  Clone ID: MRT4577_110563C.1.pep
MSTRPPHRPPATAARRTDRQPSMKAGPPHVAMLATPGMGHLIPLAELAKRLAARRGATATLITFASAASATQRAFLASLPPSVAARALPPVDLSDLPRDAAIETLMTAECARSLPAIAAVLAELGETARLVAFVVDQFGMESFNAARDAGVRAARCLFMPMNLHALSLVLHLPELAASVPGEFRDLAEPVRLPGCVPIPGPDIISPLQDRSNPSYAVMVNLAVRCREAAAAILVNSFDAVEPEAAEALRHPAEPGWPPVYPVGPLILQSEPESGGTGADVDGTPPRAACLDWLDRQPARSVVRVGGRVGGALPKEQMHELALGLERSGQRFLWVVRSPGDDEGTLNGNYYDAESKKDPFAYLPEGFVERTKEVGLLVPSWAPQTQVLAHGATGGFLTHCGWNSTLESLVHGVPMVAWPLFAEQRLNAVMLSEGAGAAIRLPETKDKESIAEVVRELVEGEGKGAMVRAKVAQLQKAAAEGLREGGAATMALDEVIDKWEAEAN

SEQ ID NO: 196247 - protein, 52 aa, Zea mays
  Clone ID: MRT4577_110564C.1.pep
ISHLRIQRVCLLLWIEHHSCASQSVASGACELRALLAGNERAPRRARSGDVA

SEQ ID NO: 196248 - protein, 132 aa, Zea mays
  Clone ID: MRT4577_110565C.1.pep
MAAASDRGEVDTARPFRSVKEAVAVFGHRILVGNNHSSHSSIACDTDVASFSLRSEQWGDRLAASEYLPSFSHALSLGEMDDVELMGGQRRKAQKVKPIVPLIGDILFSRRKSTKEKGDDGSYSGDLYGVLG

SEQ ID NO: 196249 - protein, 91 aa, Zea mays
  Clone ID: MRT4577_110566C.1.pep
LPQDGGDFFKGGGLGVFLVFPPLPQLGCLRGGHFVPPDRWCSPFWCSFVNFSRFGPTLFFKNPIPLFLFLKKKIALFHPQPGFNNLLFFYP

SEQ ID NO: 196250 - protein, 88 aa, Zea mays
  Clone ID: MRT4577_110567C.1.pep
SGVMEKIHPLGPLPITPHEVKKTWPLLGRKICIPKNNVKFFFCLKPLTGMETNLSFCLPPPPKNKKFLGFEPNAKQTCQNENTQKISV

SEQ ID NO: 196251 - protein, 118 aa, Zea mays
  Clone ID: MRT4577_110568C.1.pep
DVYARVPHARNSARGFTVLVAFYMCRGENRLMVDVLANLLTGTLHSRLKTLPLSHIPKKEAEVASTNYLAGGAGSAQNPALLCHNQALSGGIEPVPARSGETANAKAEAVSASVADDD

SEQ ID NO: 196252 - protein, 190 aa, Zea mays
  unsure (1)..(190): unsure at all Xaa locations
  Clone ID: MRT4577_110569C.1.pep
EPHRAFCYSYISTEHSRTPSPTPLTCPNAACSTSSPSTTRPPPLASTLRHSGIQPENPCCQLHCLQDGIHGDGHMPADQTIASGDDVLHTFFKETGDGKDXPQAVHDDLQPXTAIDEVKTPTYPHLFHPDQLISGHEEAGNNCDPGHYTIEXTLHDLRLERNANLAHNCSGIPKDCSSFKACVSHRTKIR

SEQ ID NO: 196253 - protein, 714 aa, Zea mays
  unsure (1)..(714): unsure at all Xaa locations
  Clone ID: MRT4577_11056C.1.pep
MEVNSSGEETVIKVRKPYTITKQRERWTEAEHKRFLEALKLYGRAWQRIEEHVGTKTAVQIRSHAQKFFTKLEKEAINNGTSPGQAHDIDIPPPRPKRKANSPYPRKSGLSSETPTKELPSDKSTKPNMPLSNENVLMXQKFQRKELSGKESCSEVLNLFRDAPSPSFSSVNKSSSNHGAPIEASKTKIRDMTIMENSSLNPNMQEDVKEINDQEMERLNGTQISSKCEHSHEGYLDISMQQMKLKPESVETTYVDKQTARASHSLAERTGTTSIPVTATEETHSVLTSDQVGINGSMNLSIHPMFPADPKFDSSATPQPFPHNYAAFAPMMQCNCNQDTHRSLVNMSSTFSSMLVSTLLSNPAIHAAARLAASYWPAAEGNTPIDPNQENLADGVQGRSIGSPPSMASIVAATVAAASAWWATQGLLPFXRPTHGFFICXPAPSAAFPTVDVPRPSEKDRDCPAENAQKECQEARKQGQFEGFRVAASSEYDGSGKGEVSVHTELKISPVQNADATSAAGADTTDAFMNKKKQDRSSCGSNTPSSSDVDVDNVPEKEGNGNEKAKQASCSNSSAGDTNHRRFRSSGSTSDSWKEVSEEGRLAFHALFSREKLPQSFSPPQAEGSKEVGKEEEDEVTTVAVDLNKSTTSIDHDLDTIGEPRASFPNELSPLKLKLRRTGFKPYKRCSVEAKENRVPASDEVGTKRIRLDSEAST

SEQ ID NO: 196254 - protein, 144 aa, Zea mays
  unsure (1)..(144): unsure at all Xaa locations
  Clone ID: MRT4577_110570C.1.pep
LDSADFTEVQRISQSKDAVQSPLQIQDGKPVDSETADSIFIEDLILQFCDDHQMQWRCPNCTKDHEEPSASESKNGEQMVGSGKEDTTVVGDQIEQSDRKARHSKESECHGGNLSAAKQTELLGTNQTADDSKQLMMHXENVKE

SEQ ID NO: 196255 - protein, 73 aa, Zea mays
  Clone ID: MRT4577_110571C.1.pep
ESLRSPAPKWVGDQAMEIVLFCQAPGLGTCVFSPPLGWPVVRKNAMERQGFFFLESPRVSNSLTRGEAKEWIY

SEQ ID NO: 196256 - protein, 116 aa, Zea mays
  Clone ID: MRT4577_110572C.1.pep
TLYETWLLSSEKYTHTEINVNQLLLSRMRKSLLQTLLSHLMGKGLGVGTSNPLVTVPGGGEHINTPVVYRSDANTATSVKPPAERPRWFDGISGLFHDVVGFDVLVRAVLGVFCVA

SEQ ID NO: 196257 - protein, 190 aa, Zea mays
  unsure (1)..(190): unsure at all Xaa locations
  Clone ID: MRT4577_110573C.1.pep
LRRXRSSPPRAPLLPPXILLQKRRNDEARAAVADLKRLLDLEWANLPPSTLELVAGDGSHQTGAAADHTMPKREILAKPVQVGSASHQSIRTQVADNASNANKADGARRDEAHPSNSNVNYEADSDRESMVGHQNASVKGAEGQLSEKSVFTSKKRVLVERIPKWDSSDDDQPVRKRKLDPFERKPYPSP

SEQ ID NO: 196258 - protein, 188 aa, Zea mays
  unsure (1)..(188): unsure at all Xaa locations
  Clone ID: MRT4577_110574C.1.pep
LEAGRAGTASSSRILALASPSALCPLPCRRCPRPTIYSFSSSSRATAVSPTPCSTPSSPPNPHPPPSPAPXTAPPKSPSAXPSTPPSTPWAPPAPPASSSTRRERSSPTPTQPPASPTRFLLQKMKKTMRLGLRWPISSASSTLSGPTSRPPRSSSSPGTGPTRLVPLPTTPCVQSFACSGSQRSVKF

SEQ ID NO: 196259 - protein, 46 aa, Zea mays
  Clone ID: MRT4577_110575C.1.pep
PKEFTFFIICCNKGNSFGFIYICVTLGDCFSFLVIVVWFYYIRFCL

SEQ ID NO: 196260 - protein, 156 aa, Zea mays
  Clone ID: MRT4577_110576C.1.pep
LIPHCNKTDKASILDETIEYLKSLQMQVQIMWMTSGMVPMVFPGAHQYMPPMALGMNSGCIPAAQGLSQMRRLPYMNHPMPNHIPLNSSPAMNPMNPLNTVNQFQNGHLREVPRPGPHVYGHQIAQAEEHNRILEVAASTVIPTSKAGQPPTFDGV

SEQ ID NO: 196261 - protein, 82 aa, Zea mays
  unsure (1)..(82): unsure at all Xaa locations
  Clone ID: MRT4577_110577C.1.pep
PTLVYSILFCSRSERSKFGGASFXIRPXGFKPHAGRGLCVLCXLCERAGVVVGLLVLRLLXLLHLRFLAALRAWLALAPAVA

SEQ ID NO: 196262 - protein, 74 aa, Zea mays
  Clone ID: MRT4577_110578C.1.pep
KPGFSPKGTLMDASIPPVFKGDGGEDKFSVAFEPETGQVLVATNRRLRGNPPGPRKYNGGEPPSLPEIVKAPRP

SEQ ID NO: 196263 - protein, 105 aa, Zea mays
  unsure (1)..(105): unsure at all Xaa locations
  Clone ID: MRT4577_110579C.1.pep
EPSSQXGGRMGGSPNDPSSXQLLXRWXXLRXACSXXLGXXRRLXXLRSXRLAPQEERIKYPXQALPXXWGGGLTRXXRRLPTWEKGAXGHRGRVPSXSSTKVXXR

SEQ ID NO: 196264 - protein, 106 aa, Zea mays
  unsure (1)..(106): unsure at all Xaa locations
  Clone ID: MRT4577_11057C.1.pep
RSRSLAIELVYSRYYTRGRGTIALFQRLLNQCCQQXIWMMDIQYISQKLNIMMXIERSAVVSSIIYEPAMIQXQHQMLPTQYLKRTAIMISXNMPAIAXLYHYQFH

SEQ ID NO: 196265 - protein, 337 aa, Zea mays
  unsure (1)..(337): unsure at all Xaa locations
  Clone ID: MRT4577_110580C.1.pep
MASAAATATMGTGKVVCVTGASGYIASWIVRLLLDRGYTVRATVRDTADPKKTLHLTALDGAKDRLHLFKASLLEEGSFDAAVHGCDTVFHTASPFYHNVKDAKAELLDPAVKGTLNVLGSCKKASIKKVVVTSSMAAVAYNRRPRTPEVTVDETWFSDPQICETNQQWYILSKTLAEEAAWKFSRDNGLEIVTINPAMVIGPLLQPTLNTSAEAILKLINGSSSTYPNFCFGWVNVKDVALAHILAYEVPSSNGRYCMVERVVHYSELVNIIRNMYPTLPLPDKCADDKPFVPPYQVSKEKIKSIGIELIPLETSVKETIESLKEKGFAXFDSSKL

SEQ ID NO: 196266 - protein, 78 aa, Zea mays
  Clone ID: MRT4577_110581C.1.pep
ISGWTHSSKHSIHFNHNFTLNTLNHKQGLRILTEALHNSTIALSTHSQPNINIPLITTTHNSPIHNKVTLIIFKYFEL

SEQ ID NO: 196267 - protein, 61 aa, Zea mays
  Clone ID: MRT4577_110582C.1.pep
TVLTAKMLSMKLGDKLAIMPVAKLDDHKTNRRGAKINPTPYEESDQSLNGLGERPRLNEPY

SEQ ID NO: 196268 - protein, 78 aa, Zea mays
  Clone ID: MRT4577_110583C.1.pep
HNFPPTRLYNLFSLIPNLSTSEELFNKTANLHFSIYFPNSTPYSSTPSQLSHKNNLFLPYTYHLIIPIICFLNLHSNL

SEQ ID NO: 196269 - protein, 275 aa, Zea mays
  Clone ID: MRT4577_110584C.1.pep
MERRPPHQEKAARRTLPRRGQIKAGIFASLFRCIVAPEAPARKEGGTNKDGSSNHRGCKNKDGGSHRRVSPVLTHEATVHVDGVLCFFHLNKDFTLPVKIILHPTPMDLDDTRPPDDAIPNVPSPPEAPAFSVAPSPADAIALLPRRPGSGRPCCRKVMGGEVAASPGLSLWARLRLASSTSYYLGLGIRVIRADGGGARAVRPSKESQSQYAAGCLLVLELEQSSAAAPTQGAERRTPGAVDGGAAAEQWSPGGRRWTAGRRAAAGGGRAVQKI

SEQ ID NO: 196270 - protein, 92 aa, Zea mays
  Clone ID: MRT4577_110585C.1.pep
FYLGRAHSLRSSVFTLGSRIAFRPSLPGLFRALLTANVGYPLAPGTYQAGGFARSRVWSGAPIFRIVLGRKAHGCPLLERSGSPPLAGTGAL

SEQ ID NO: 196271 - protein, 160 aa, Zea mays
  Clone ID: MRT4577_110586C.1.pep
FLYGYGAIFNFIGLVVTAIIQGPGSFNILEGHSKATMFLICNNAAQGILSSFFFKYGDTILKKYSSTIASIFTGVASAVLFGHTLTINFVLGISIVIISMHQYLSNQIKDEVPSSKVEMAEAHDHSRKEPSYVNVPDSGASEMKSKHRHGSDERQPLLPV

SEQ ID NO: 196272 - protein, 76 aa, Zea mays
  unsure (1)..(76): unsure at all Xaa locations
  Clone ID: MRT4577_110587C.1.pep
EEPCFFVYFACSSSKWRVFVLFLYRKPSRTAXXFVFVVQFLHFASSRMSCPVPSQMFFFPPGFFVVKSEFMVQPNF

SEQ ID NO: 196273 - protein, 151 aa, Zea mays
  unsure (1)..(151): unsure at all Xaa locations
  Clone ID: MRT4577_110588C.1.pep
YPGQTHGVRRVACNLLRYPVINQVRYGXVWPYSHQHQFFPFNQLLTSYHAAYLLQQLLPCRHIATGYSDKQQLLAFYQSSAINRAADLQDPTLLPCTHVAAXDXASFLTQLQXLPFYHSFSSQPTTLLQLQQLLHFVQLALTKPAWSYQQH

SEQ ID NO: 196274 - protein, 399 aa, Zea mays
  Clone ID: MRT4577_110589C.1.pep
MNGEVECSVCHAKVPVPPPVSKAYDSHRSTVSSRQRALNVLLVSGDCVLAGLQPILVYISKVDGKFKFSPISVNFLTEITKIMFTIVMLFIQARRLKVGDKPLFTVSIFMQAARNNVLLSVPAFLYAINNYLKFIMQLYFNPASVKMLSNLKVLVIAVLLKMIMRRRFSVIQWEALALLLIGISVNQLKSLPEGSSVLGLPVAAGAYLYTLFFVTVPALASVYNEKALKSQFDTSIYLQNLFLYGYGAIFNFIGLVVTAIIQGPSSFNILEGHSKATMFLICNNAAQGILSSFFFKYADTILKKYSSTIATIFTGVASAVLFGHTLTINFVLGISIVIISMHQYLSNQIKDEVPSSKVEMAEAHDHSRKEPSYVNVPDSGASESKHRHGSDERQPLLPV

SEQ ID NO: 196275 - protein, 52 aa, Zea mays
  Clone ID: MRT4577_110590C.1.pep
RRIGVGLLAITATVGKGICCKTINLGHSKVFPVPTVLTAASVLNLGHTIEYL

SEQ ID NO: 196276 - protein, 80 aa, Zea mays
  Clone ID: MRT4577_110591C.1.pep
RPAGPGISADTVYTKSERRATARSKQRPVAKCCDGYNYLKRHLYAIKALHTPLFEIPVGMVVYYYTMNGANILTCACSLH

SEQ ID NO: 196277 - protein, 51 aa, Zea mays
  unsure (1)..(51): unsure at all Xaa locations
  Clone ID: MRT4577_110592C.1.pep
MPSHKTFRIKKKLAKKMRQNRPIPYWVRMRTDNRGGDNAXFFHWXRTKXGX

SEQ ID NO: 196278 - protein, 363 aa, Zea mays
  Clone ID: MRT4577_110593C.1.pep
LREAQEKSGSLSSDSNSEMAYASPGTDDTSTDLDTDEKNHMLELGQLVSLTASDSGNKAKDKLLGQKALRRLAQNREAARKSRLRKKAYVEQLENSRLKLSQLEQELQRARQQGIFIPTPGDDQQPNSTSEKGALAFDKDYAGWEDEHRKQISELRAALSAHAGDDELRRIVDGVMAHHHEAFRLKCVAARADAFHVLSGMWKTPVERCFMWLGGFRPSEILKFLASHLDPLTERQLASVHGLQQSSQQAEEGISQRVQALQQSVAETLASSGSPCLPVPAGRAPPPGDDAAPDCSGTMAAAVAKLVALESLVHEADGLRRQTLEQMQRVLTTRQSARALLVISDYLSRLRALSSLWIARPRE

SEQ ID NO: 196279 - protein, 363 aa, Zea mays; identical to SEQ ID NO: 196278
  Clone ID: MRT4577_110594C.1.pep

SEQ ID NO: 196280 - protein, 179 aa, Zea mays
  unsure (1)..(179): unsure at all Xaa locations
  Clone ID: MRT4577_110595C.1.pep
LREAQEKSGSLSSDSNSEMAYASPGTDDTSTDLDTDEKNHMLELGQLVSLTASDSGNKAKDKLLGQKALRRLAQNREAARKSRLRKKAYVEQLENSRLKLSQLEQELQRARQQGIFIPTPGDDQQPNSTSEKGAXLAFDRDYAGWEDEHRKQISELRAALSAHAGDDELRRIVDGVMAH

SEQ ID NO: 196281 - protein, 67 aa, Zea mays
  Clone ID: MRT4577_110596C.1.pep
FTTTFPPKPNNRVSMDTNQNIQGPCMGVQNLKQNMVKSRARYFGPAPKHWTKIRWVDKFIPAQGGLF

SEQ ID NO: 196282 - protein, 175 aa, Zea mays
  unsure (1)..(175): unsure at all Xaa locations
  Clone ID: MRT4577_110597C.1.pep
ARADAFHVLSGMWKTPVERCFMWLGGFRPSEILKXFLASHLDPLTERQLASVHGLQQSSQQAEEGISQRVQALQQSVAETLASSGSPCLPVPAGRAPPPGDDAAPDCSGTMAAAVAKLGALESLVHEADGLRRQTLEQMQRVLTTRQSARALLVISDYLSRLRALSSLWIARPRE

SEQ ID NO: 196283 - protein, 104 aa, Zea mays
  unsure (1)..(104): unsure at all Xaa locations
  Clone ID: MRT4577_110598C.1.pep
RSAPLRDLELERXTFIKLVLLVRTTKWGYKATSXXXPAPPTCSRPXVERDISRPPLSRGRXPMAFGRSTIFAAWXYAENXXVPRSPLDCWIPPAPAPRCXFFFX

SEQ ID NO: 196284 - protein, 38 aa, Zea mays
  Clone ID: MRT4577_110599C.1.pep
LRSSQKSITKLLYIKSIFPKIFPIFHKPAISIIPFSTL

SEQ ID NO: 196285 - protein, 95 aa, Zea mays
  Clone ID: MRT4577_11059C.1.pep
KELAEPVVRRAAHVHYFAPSTEPTASDAHAAMALSFASTAELNPLQTPTTANPSETPAPTTSQAPCLSPSTFQISFQKQPQSQQQMAPAEQPPEP

SEQ ID NO: 196286 - protein, 124 aa, Zea mays
  Clone ID: MRT4577_1105C.1.pep
LPNPAETLCLPSPFVQANRPTHMKKQEKTVSTPPYRRRRLLSHVWDTMPCSQDRSGKAQPHNACSESQPRSAQELLPCHAMPPCHGSQPEITHPPPLPALPSMVTHRFLFPTPINLLFYTFHWT

SEQ ID NO: 196287 - protein, 87 aa, Zea mays
  Clone ID: MRT4577_110600C.1.pep
MVKKRKNNGRNKKGRGHTKPIRCSNCSRCTPKDKAIKRFTIRNMVESAAIRDISDASVFAEYTVPKMYLKLQYCVSCAIHGKIVRVR

SEQ ID NO: 196288 - protein, 102 aa, Zea mays
  Clone ID: MRT4577_110601C.1.pep
QANAEHEKTFALINHNDCFCFLLLHVHLEISSNAYYILVHLLLCYCFTFFLLQFALVYCAYSFICLMVFQGPRIRERNSSHVMPVDTSLGLVEFESNCLIKI

SEQ ID NO: 196289 - protein, 155 aa, Zea mays
  Clone ID: MRT4577_110602C.1.pep
MAMETCFRAWALHAPAGSKDRLLVGNLQVLPSKRALAPLSVGRVATRRPRHVCQSKNAVDEVVVADEKNWDGLVMACETPVLVEFWAPWCGPCRMIAPVIDELAKDDSPNVASTYGIRSIPTVLIFKGGEKKESVIGAVPKSTLTTLIDKYIGSS

SEQ ID NO: 196290 - protein, 168 aa, Zea mays
  unsure (1)..(168): unsure at all Xaa locations
  Clone ID: MRT4577_110603C.1.pep
MAMETCFRAWALHAPAGSKDRLLVGNLQVLPSKRALAPLSVGRVATRRPRHVCQSKNAVDEVVVADEKNWDGLVMACETPVLVEFWAPWCGPCRMIAPVIDXLAKDYTVKITCCTVNTDYSPNVASTYIIRSIPTVIIFKGGEKKDNVIRCXTESTLATLIDKNIPRS

SEQ ID NO: 196291 - protein, 69 aa, Zea mays
  Clone ID: MRT4577_110604C.1.pep
MNEAFDFDISDADTTRRADGYESNTRQNDSLPSTSKRDPESNHWASDGQRQLTTGGSNSSTSERGYGFE

SEQ ID NO: 196292 - protein, 167 aa, Zea mays
  Clone ID: MRT4577_110605C.1.pep
MAMETCFRAWALHAPAGSKDRLLVGNLVLPSKRALAPLSVGRVATRRPRHVCQSKNAVDEVVVADEKNWDGLVMACETPVLVEFWAPWCGPCRMIAPVIDELAKDYAGKITCCKVNTDDSPNVASTYGIRSIPTVLIFKGGEKKESVIGAVPKSTLTTLIDKYIGSS

SEQ ID NO: 196293 - protein, 52 aa, Zea mays
  Clone ID: MRT4577_110606C.1.pep
ETPRYPTTVRRFSGHLLQRTYHSPHTVMMISELGPSAPYRFHHQVTALDTFE

SEQ ID NO: 196294 - protein, 140 aa, Zea mays
  Clone ID: MRT4577_110607C.1.pep
PPLSQLIRIGKGAQLGTPLSPGGGRFIFQVGTPVFPPVGRPISPPPLMGFPSLIGPPRLSPLRFGGLFFGPLGGFPFSPRTVCFRGIFPGFGFPPGPPYPPPPGEGVPPLGVPRPGFQCCGPPPWGAFVPGIMVSLSLEV

SEQ ID NO: 196295 - protein, 57 aa, Zea mays
  Clone ID: MRT4577_110608C.1.pep
EVCHTLGLHQHPWRVIANSMVPGDCARFMRMLCICSFDTDQHLDLYICCTSRTVNMY

SEQ ID NO: 196296 - protein, 63 aa, Zea mays
  Clone ID: MRT4577_110609C.1.pep
HNVPIGVSMYIFIGHNDYQLHLLSSSFLPKKMKASEVGSHNVPIGVSMYIFIGHNDNSNQVMI

SEQ ID NO: 196297 - protein, 88 aa, Zea mays
  unsure (1)..(88): unsure at all Xaa locations
  Clone ID: MRT4577_11060C.1.pep
MSRVLEPLIVGKVIGXVLDHFNPTVKMVVTYNSNKQVFNGHEFFPSAVAAKPRVEVQGGDLRSFFTLVMTDPDVPGPSDPYLREHLHW

SEQ ID NO: 196298 - protein, 371 aa, Zea mays
  Clone ID: MRT4577_110610C.1.pep
DCFIYNNSSWRLNYCVGGEVTTMFHLDRPMYLLGYLANQSRVYLIDKEFNGVGYTLLLSLIEYKTLVMRGDLEHANIILPSIPKEQHNSVAHFLESRGMLEEALDIATDPNYRFDLAVQLGSLEVAKEIAIEAQSESKWKQLGELAMSTGKLEMAEECLLRIRHQSGLLLLYSSLGDAEGITKLASMSKELGKNNVAFLCLFMLGKLEECLQLLVDSNRIPEAALMARSYLPSKVSDIVSIWKKDLQKVNSKAAESLADPAEYPNLFEDWQIALNVEATVAPKRGVYPPAEEYMTYAERSNDSLVEVFKSMNVEEVPSDNGDPVHEVTEDDGVEGSMDDVVEVEPDDSTDGGVLVNGNDGEEHWVLTPDQQ

SEQ ID NO: 196299 - protein, 155 aa, Zea mays
  Clone ID: MRT4577_110611C.1.pep
PASGRLPPHEFAALSAAAGASDDDEDVEDEDGGLAGGEGSGEARRRRMLAREEAKLEKEIVRMVLAGEAEDKLKPNSGQSVAVGDHHLCVGFHDDASGEYRIWEWHGHVMLFDDEEGYSAEYIYGNANRSKENGSSGGPRVVRRNVVNGPTTPAR

SEQ ID NO: 196300 - protein, 104 aa, Zea mays
  Clone ID: MRT4577_110612C.1.pep
QARLREPGRTVTELGRRAHLFGGRPFFFAVRSVTRAVCISGGAENACVALNAEKKAAFHYSGCYTNVRNVQKFFNCAQDVNEADINTRGSAGGTEDHWKQIKRL

SEQ ID NO: 196301 - protein, 270 aa, Zea mays
  Clone ID: MRT4577_110613C.1.pep
MASPPPPPPPPARHPTSAATAAAAGNGHDTSAATAAAAGNGHDTSASPVDALFLQNLMTRVQLRPPFLDTNSFLTQDLDDFLLNEFAALSAAAGASDDDEDVEDEDGGLAGGEGSGEARRRRMLAREEAKLEKEIVRMVLAGEAEDKLKPNSGQSVAVGDHHLCVGFHDDASGEYRIWEWHGHVMLFDDEEGYSAEYIYGNHFEPLAAATARAKKKEKEMREKELSMGLRDLVVDTDDGGNANRSKENGSSGGPRVVRRNVVNGPTTPAR

SEQ ID NO: 196302 - protein, 92 aa, Zea mays
  Clone ID: MRT4577_110614C.1.pep
LVSRGHISDLIASTARDGWPPLSVADTLSESWRSQGCQSVLWKRKLNPFYLLILLMVCQGPSCVRGHSPRLNGPAADRPSVFAYKVPVPSSR

SEQ ID NO: 196303 - protein, 107 aa, Zea mays
  Clone ID: MRT4577_110615C.1.pep
QLDYMVPCQGPLVFSSSPIAVPGASSLTRSRFQSRAVFQTPTGGRAPTFQQFTSSMPFADCVASSFSCSGRRIHARSYCLLLRLGRALLSLGPLHRRDARDLWRGIG

SEQ ID NO: 196304 - protein, 559 aa, Zea mays
  Clone ID: MRT4577_110616C.1.pep
MYRVKSEGEGEGEGDCEMMLQEQMDSLVADDVSSGGGSPHRGVGTPLKKGPWTSAEDAILVDYVKKNGEGNWNAVQKNTGLFRCGKSCRLRWANHLRPNLKKGAFTPEEERLIIQLHAKMGNKWARMAGHLPGRTDNEIKNYWNTRIKRCQRASLPIYPASVCNQSTNEDQQLSGNFNGGENISNDLLSGNSLYLPDFTSDNFIANPEALSYAPQLSAVSISNLLGQSFASKSCSFMDQVDQAGMLKQSGCVLPALSDAIDSVLSSADHFSNDSEKLRQALGFDYLNEANASSKSIAPFGVALTGSHAFLNGNFSASRPTNGPLKMELPSLQDTESDPNSWLKYTVAPAMQPTELVDPYLQSPSATPSVKSECASPRNSGLLEELLHEAQALRSGKNQQSSVRSSSSSAGTPYETTTVVSPEFDMGQEYWEEQPSSFLSEYAHFSGNSFTESTPPVSAASPDIFQLSKISPAQSPSMGSGEQALEPKHESAASPRPENLRPDALFSGNTADPSIFNNAIAMLLGNGIDAEYKPVLGDGIVLDSSSWNNMQHAFQMAGFK

SEQ ID NO: 196305 - protein, 63 aa, Zea mays
  Clone ID: MRT4577_110617C.1.pep
GNPVPYSLSLPRNWATQHFGKIGNFLKSPWILVWNVIVMEYILYYSYELKKKKKKKKGRPLAI

SEQ ID NO: 196306 - protein, 464 aa, Zea mays
  unsure (1)..(464): unsure at all Xaa locations
  Clone ID: MRT4577_110618C.1.pep
VKYCLKCLLNRYGESAEEAAGKEDWICPKCRGICNCSFCRKKKGEMPTGIMAHIAKASGCTSVHDLLKKGSDVVSAAQAILKVNGSDKXHKEIPRDRXAAEVATEKDVNIGIDINTVIADEGDENIGVDLNSLPSVDTKKRQKRQKLKHRTKKDPADATSHGVNTEPLQMDGNLDFLNSKTVRPRGTPVTKIAGAELDDEDTGAAIQFIEFCRAFTEVVQXFQIKKGQPEKILQDLVGGRELRFVSSVVAGFHINLLSVIQEGKGKKPLAYTRDGDAWVIDIGKYISESASISKGFPLNHINQGISGYKNLSPSXKLRNWIDMQNDIAAEPVNAAREKARAAKEMVKELKERLKDNMNKIIVSPNEAAASNSEANKYIISQIKEAQEVKRAAINDMATMEKQGGFWTKPLMVEKGAAYWKLDGYCDNSAILLQEYGGDELMANKDKWFMFTEDEEKIIEKHLAT

SEQ ID NO: 196307 - protein, 87 aa, Zea mays
  unsure (1)..(87): unsure at all Xaa locations
  Clone ID: MRT4577_110619C.1.pep
GLRPHPFIRPSHLPWPPPPALTPVPSRATTPASSPSRPSRSGSPSGRRAPPGGGGXPPPFTXPLKFLHSPSAKRWGERGCQRGRTFW

SEQ ID NO: 196308 - protein, 318 aa, Zea mays
  unsure (1)..(318): unsure at all Xaa locations
  Clone ID: MRT4577_11061C.1.pep
MAAAWEVLAVLLVAAQVASAAQVTAPAFLWAPKNYGFSSDDAKEVVHYQTISPKSLAKSVLEEGGWSNFMCSREDTQNNVDVAIVFIGSKLQSSDISKDKQVDPALADTLKLSFTRSEFSMAFPYVSTTVDERLEDSLLSSFAENCNNGFGRNRVTYTDTCTGQDLKKYHNMDAINDLVVSGVASRRANHPSGQTDVIVFCSGGFENPGTAKSEGELLSQLVDSLDLSGAKYTVLYASQPXWFAXSPSGLPLGRHLAEKKTNGTKAVQGEKCDGECLVKSSLLEGTFVGIVLLIILISGLMCMMGIDTPSRFEAPQES

SEQ ID NO: 196309 - protein, 86 aa, Zea mays
  unsure (1)..(86): unsure at all Xaa locations
  Clone ID: MRT4577_110620C.1.pep
KKKKNWTRGYQKEKVXNIVFFGQAPYNKVLSKGPKSKQFPPSFLFXPLRVNGSLARGAIKVFMAKGLIRMVFVLFSPQIYPGAPNP

SEQ ID NO: 196310 - protein, 562 aa, Zea mays
  unsure (1)..(562): unsure at all Xaa locations
  Clone ID: MRT4577_110621C.1.pep
MAAPPEGNVRLGEGWDEDDVLEPQPLEVIAPDVKSKKRNPAPGVRVVGRRIYDPENGKTCHQCRQKTTDFAAACKQVKKKGPCPVKYCLKCLLNRYGESAEEAAGKEDWICPKCRGICNCSFCRKKKGEMPTGIMAHIAKASGCTSVHDLLKKGSDVVSAAQAILKVNGSDKXHKEIPRDRXAAEVATEKDVNIGIDINTVIADEGDENIGVDLNSLPSVDTKKRQKRQKLKHRTKKDPADATSHGVNTEPLQMDGNLDFLNSKTVRPRGTPVTKIAGAELDDEDTGAAIQFIEFCRAFTEIFQIKKGQPEKILQDLVGGRELRFVSSVVAGFHINLLSVIQEGKGKKPLAYTRDGDAWVIDIGKYISESASISKGFPLNHINQGISGYKNLSPSCKLRVLNFLCDETLSTDKLRNWIDMQNDIAAEPVNAAREKARAAKEMVKELKERLKDNMNKIIVSPNEAAASNSEANKYIISQIKEAQEVKRAAINDMATMEKQGGFWTKPLMVEKGAAYWKLDGYCDNSAILLQEYGGDELMANKDKWFMFTEDEEKIIEKHLATR

SEQ ID NO: 196311 - protein, 64 aa, Zea mays
  Clone ID: MRT4577_110622C.1.pep
MGRHLSRITEHVPTHKTRSPLGLEKKFHLKKKKKKKKKKKKKKKQKKKKPKKKKKKKKKKKERL

SEQ ID NO: 196312 - protein, 132 aa, Zea mays
  unsure (1)..(132): unsure at all Xaa locations
  Clone ID: MRT4577_110623C.1.pep
PRGGPPFRGSIPVVGPPDGALPGAKKLLASPKIGGGAPNLGTGAGPSVLERGGGFKKAPGKGFPPQLCPRSPGSPPGVFASPXKGXKKLAWGAPFGIGEMCRGPWNWAKKNPFGFCGGAKKKGGFFPKKNCR

SEQ ID NO: 196313 - protein, 82 aa, Zea mays
  unsure (1)..(82): unsure at all Xaa locations
  Clone ID: MRT4577_110624C.1.pep
VXPTXFXXXSSXXXXSXFWVPSSXNRRRSNRXXALHCSRCXPXAPAXGKXAARXXCCGKFXXRARXKAXLFXGPSPPWMXWG

SEQ ID NO: 196314 - protein, 136 aa, Zea mays
  unsure (1)..(136): unsure at all Xaa locations
  Clone ID: MRT4577_110625C.1.pep
MVHFTAPKTTHGHQTFQQTVVLKQTLACLPLQQPSSFFPFNQLGSLNSASYLQQQQLPFSQLPAAFPQQFLPFXQLATLNSPAFLPQQXLLPSPLLVXEACYLLTNHSLPFYQHVAPNAGTLLQLQQLLPFNQLAL

SEQ ID NO: 196315 - protein, 130 aa, Zea mays
  Clone ID: MRT4577_110626C.1.pep
NCVYKTWNQKHKPRLISVEFVWNTMNSVRADFSGSLLFVCLYWWSVTWGVSFPHLFLLKAMIRRQAQIFILLLVQAPLYFIVLPNIILGIRIKKNVPCNKNDCYSPYKYVDTEGSMVSKSQPPTRPPTRP

SEQ ID NO: 196316 - protein, 96 aa, Zea mays
  Clone ID: MRT4577_110627C.1.pep
FFPMRRAQSVFLLQVQLILLSHLKYMDQQSAEYVSGHSPMNPPSNTALLSKGEDIGSQDGGSLFSPTRTGAGIICCSRRSTEADLLKAVALSSDLR

SEQ ID NO: 196317 - protein, 119 aa, Zea mays
  unsure (1)..(119): unsure at all Xaa locations
  Clone ID: MRT4577_110628C.1.pep
DRRSASACKMVIVLVVCLALSVASASVLQMPCPCAGLPGLXGAGAGLTSMMGAGGLYPFPEYLGQPQCRPLAAAPFFPGCGQPGALFHPFRSLCCLPPLRMMALHSGSQHLLLMLLFER

SEQ ID NO: 196318 - protein, 90 aa, Zea mays
  Clone ID: MRT4577_110629C.1.pep
PNKTIKKKKFQLTDQTKQKKNKACNLPRAASLKGPFPGPWLAVLWESPLGPKPGVFRAKPGSPGKWFPPHYSPQPPCRILKGKTRGALRG

SEQ ID NO: 196319 - protein, 86 aa, Zea mays
  Clone ID: MRT4577_11062C.1.pep
SACHSCCFHGSTSAVSYTYRTSGRMLFGCTMWLGIQTSENLIAYTRVNVADFGLAGLPFRALVNTNSSAVYTGPCVYKFPEVCVFA

SEQ ID NO: 196320 - protein, 495 aa, Zea mays
  unsure (1)..(495): unsure at all Xaa locations
  Clone ID: MRT4577_110630C.1.pep
MRFRSAGCSPPRRARAALPVSHAVTGTRRGSGPGVHIARGEASAKRGVGQPAGPAVAGLLLELGEASPQSATRSFSRFLSPRCHRWRRTWASCAVLPDPRPRQRPPPPRSPSLPPPPPYXSPFDPARPPXAAPPLPRCVASPMLGRVQDETGDDGAAGYTLTXVSDRXNQFFMYMKPETKDWRKLLVFREEWQRYRGHFYKRCQVRIHMEADPSLKQKLVVLARKVKKIDDEIEKYMELFTELRENPADINAIVARRRKKFTGEFFRHLNFLVNAYNGLDERDGIVRLGAKCLSAIHAYDCTLEQLDIESAQSKFDDILNSSSLDGACDKIKSLAKAKELDSSLILLINRALAAAKDFTTMNDKVKDIMYHIYTTTKESLKSISPPEMKLLKYLLNIEEPEERFGALATAFSPGDGREAKDEDALYTTPSELHXWIKMLLDSYHLNKEETDFMDARKMSDPVIIQRLTLLKEMIEEEYMKRYIHPEEEEEPMDDS

SEQ ID NO: 196321 - protein, 93 aa, Zea mays
  Clone ID: MRT4577_110631C.1.pep
IKKKKKKKKKKKKKKKKKKKKKKKKKKKRAGRFRGIRSYFRRPCDGPRFFFCCLLNFNSLRLSFPSALTVTTPGLCPTPCGLPFLPLFACCGC

SEQ ID NO: 196322 - protein, 74 aa, Zea mays
  Clone ID: MRT4577_110632C.1.pep
HTRELHFDHILNQRILVYVLQHSLRVRANITIGTNERRSIGSTLSRISSHNLLATCAGHARSFPGLHSRFTFAP

SEQ ID NO: 196323 - protein, 154 aa, Zea mays
  unsure (1)..(154): unsure at all Xaa locations
  Clone ID: MRT4577_110633C.1.pep
VKVIHANLVISEGVMALVHAIPAAQKAVYGTSTKVCRGGMFPSFTIFTSSHGIVKAVGKVLLGPYGRMXGRSSVVXSVHVSVCKXSVRMEKGSXVDRXKKAPTPASEGXARGSWVYVKQHTVLADFSGGSRXAFLSLSSGMVFKAQFIKRDLRC

SEQ ID NO: 196324 - protein, 260 aa, Zea mays
  Clone ID: MRT4577_110634C.1.pep
SLERNRLSGTIPPSSIGLLPSLNILDLSGNEITGAIPPDFNNLKLNKLDMSSNQLTGEVLPSLQSAAYESSFVGNHGLCARKGSGVDLPKCGSARDELSRGLIVLFSMLAGIVLVGSVGIACLLFRRRKEQQEVTDWKMTQFTHLGFTESDVLNNIREENVIGSGGSGKVYRIHLPARAGGDEEHGGSGGGRMVAVKRIWNARKLEAKFDKEFEAEVKVLGNIRHNNIVRLLCCISSQDVKLLVYEYMENGSLDRGCTPL

SEQ ID NO: 196325 - protein, 179 aa, Zea mays
  Clone ID: MRT4577_110635C.1.pep
MVKRSKKSKSKRVTLRQKHKVLRKVKEHDMEKMVTKADPSKRIVLLHNKIDLVPKEAVEKWLTYLREEMPTIAFKCNTQEQRTKPGWKSSKLDKTNSIPQSSDCLGAENLIRLLKKYSRSHELKLAITVGIVGLPNVGKSSLINSLKRSRVVNVGSTPGVTRSMQEVQLDKKISDPAPW

SEQ ID NO: 196326 - protein, 81 aa, Zea mays
  unsure (1)..(81): unsure at all Xaa locations
  Clone ID: MRT4577_110636C.1.pep
RGWMPIILARMTGLFSTFDMICVTSGYLKLASQLXIHIFGGLFGGHFPSXSLFSLNYNVISSPSPPLTPPIFSSLLTNFTP

SEQ ID NO: 196327 - protein, 88 aa, Zea mays
  Clone ID: MRT4577_110637C.1.pep
LSGVHQLPSMPPYPPISGKCPPFGGVHPLVRVGGQQPEGEAHAPVLGVLSFLGGFSFMGPCSEAWAFAFPKPFKNLPPKNLPLGTEVK

SEQ ID NO: 196328 - protein, 68 aa, Zea mays
  Clone ID: MRT4577_110638C.1.pep
KSFPLMQPPYFRKCGNKISPTKVRPSEGVLTPLETKNSVKNRHRSSPPSFFGGWANMMFDIDIVDAKR

SEQ ID NO: 196329 - protein, 66 aa, Zea mays
  Clone ID: MRT4577_110639C.1.pep
PQGTGGRSIYGECFDDENFTLKHVGPGVLSMANAGPNTNGSQFFICTVKTPWLDNRHVVFGHVLKG

SEQ ID NO: 196330 - protein, 95 aa, Zea mays
  Clone ID: MRT4577_11063C.1.pep
GPVFNAAFSPLAQIFVAGIDLFIPPEPLYLGSVLGSVLVILGLHPVLWGKKKETAAAAASAKPVQAEVEQQKKGCFFPLLFTKGQCAKAAPNIIY

SEQ ID NO: 196331 - protein, 140 aa, Zea mays
  unsure (1)..(140): unsure at all Xaa locations
  Clone ID: MRT4577_110640C.1.pep
MNARCTYSYGVLMLQSKCPSALASFKQIVANAQGRRIAVFLDYDGTLSPIVDDPDKAFMSXGKPEPPVCFKYLALSDQXATAYALSEKPSAQMRAAVRNVAKYFPTAIVSGRSRKKVLMKRLHCCFFFLLPTYMFTCIAV

SEQ ID NO: 196332 - protein, 47 aa, Zea mays
  unsure (1)..(47): unsure at all Xaa locations
  Clone ID: MRT4577_110641C.1.pep
LVSELWSQHAGEVLASSGTRLLLYCLPXLDSGVLDSECVLXXPMHLT

SEQ ID NO: 196333 - protein, 56 aa, Zea mays
  Clone ID: MRT4577_110642C.1.pep
ENCPITDKVTCPKLLAALPLVYYPNPLVFRKRSSLTKETHDLIDQRGIPNPYNTIL

SEQ ID NO: 196334 - protein, 115 aa, Zea mays
  Clone ID: MRT4577_110643C.1.pep
RSMTQQALVVMWAACMTPQELGSDQTDRSFMFCVSYGSTHASRGDLSKSAVVQTAEFSCCTPHEPVVSWLCLLDTSEQFLRIDIFSRLCLGLCVRWCLYLWLCVSLCVYVSRNGR

SEQ ID NO: 196335 - protein, 225 aa, Zea mays
  Clone ID: MRT4577_110644C.1.pep
PRGWPGDGAATPLLIPLLSPYCQRVSSPSLLAAGAVIRPLICLFPHNHRHYDALYPSVPNVWPRHQRRRRGAAASVDQEESSASETAVAPEEDLELLKKNRDMTFGEVKLTIMIEDPRDIERKRTLGIEDPDEITRDDLADALAEVNEGKIPENRVALQLLAKEMAEWPDIEIEAPKKKSKPGKSVYAKATDTGIDPETAAKRLNLDWDSAADIDGEEEDDDETE

SEQ ID NO: 196336 - protein, 441 aa, Zea mays
  Clone ID: MRT4577_110645C.1.pep
MKDGETEEAQRDAVTARMRAQDYAGARALLLRTLQTNPRLEGALKMLPVLEVLCCAAAGRGGVDWYRVLQVLPVDDAARVEARYKSIVAQVEPAMGALPGAELALKLVDEAYAVLSDPEKREGFDSSNVFTRFVRSGVVDAPPPGGTLVRPDRVSSLHTNKIMALNGTSNAVSRTNHADRPCFDGRDSRLSNVASSSGTKRMDPCFLADDGELQSPDGTHVNKGQKSVSEKDVYCMSPSQENWDTCFDDPSHAKEEDLDACFDDPSGTKEGELCSSKSYEYHNFEEDRAIENFAPGQVWAAYDWGRFPRRYALIVKVLTDKMQLYVSWFMPCPQTPEEKKWSLVGLPLVCGTFVADEHRISLTCPTMFCHQISNNNMNQDLEVYPQEGEIWAIYRNWDIGWYTDPRMWKNSDFSIVEILTSYSNESGYTVAHLTKVDGYGS

SEQ ID NO: 196337 - protein, 88 aa, Zea mays
  Clone ID: MRT4577_110646C.1.pep
LAELSFGTALFIFFYLFSAEPVKLSYSAIPNTWDKAKTHAHTQNYSEAGGRYMIIVPNNLCSKPKSNMKPPLQKTSLGKPWMVPPWSP

SEQ ID NO: 196338 - protein, 293 aa, Zea mays
  unsure (1)..(293): unsure at all Xaa locations
  Clone ID: MRT4577_110647C.1.pep
MSPMALLTPLPIPLLSPYCQRVSSPSLLAAGAXQTSHLSFPXNHRHHDALYPSVPNVWPRHRRRRRGAVASVDQEESSASETAVAPEEDLGPPVSSDAAAEDGVATSAQPAEASPEDLENIREIKRVLELLKKNRDMTFGEVKLTIMIEDPRDIERKRTLGIEDPDEITRDDLADALAEVNEGKIPENRVALQLLAKEMAEWPDIEIEAPKKKSKPGKSVYAKATDTGIDPETAAKRLNLDWDSAADIDGEEEDDDETEVPSAVGYGALYLLTAFPVIIGISVVLILFYNSLQ

SEQ ID NO: 196339 - protein, 104 aa, Zea mays
  Clone ID: MRT4577_110648C.1.pep
RTWSGDGVGAKAKTLPFARSLRRLATPTKTTPERAEGAGRMRTGAAALRPLRCKTKARLHRSLLVPRPYLVGRPKWDSAHCNGPRADKHVTGRVCNSLFYNDGL

SEQ ID NO: 196340 - protein, 102 aa, Zea mays
  Clone ID: MRT4577_110649C.1.pep
WLNEIARFASANVPKPLVGNKSVLTATKVVAPQPPKGFFYKMGLPFMEAGAQNPLNVGRAFMAMAAPPKARVARPPVGANPRPAPVQIPGQPVNQKRFCCSS

SEQ ID NO: 196341 - protein, 83 aa, Zea mays
  Clone ID: MRT4577_11064C.1.pep
LLLGPPRLVPPVLGAPVRVLSPLRFAPPFLAVPFLSLLPVAQVAFKASSLVAALLGFGRLFGALSPGLFYVKLFLRGLGPPRI

SEQ ID NO: 196342 - protein, 41 aa, Zea mays
  Clone ID: MRT4577_110650C.1.pep
ITKKMLAIPKLSRHMGYFHASMSNQNYNGDLSWVLNYVYLP

SEQ ID NO: 196343 - protein, 136 aa, Zea mays
  unsure (1)..(136): unsure at all Xaa locations
  Clone ID: MRT4577_110651C.1.pep
XTHGPLXXTXGSXAXXQRXXXGRNKKXXXXXERGQXXXXXRKNXXDXXXXGDNKRTXRXXXXQNXRXXGTXXXXXXQXDXAXXTXGXXXXGXEXXRPXRPKXXGTXGXXXQXXXXXXXKGXPXXRXXKNSQXXAXG

SEQ ID NO: 196344 - protein, 215 aa, Zea mays
  unsure (1)..(215): unsure at all Xaa locations
  Clone ID: MRT4577_110652C.1.pep
NSARGRHPRCLSPPSSALSAPPSPXPPQPXSPRSPRCLPPSPXLPRGTPPCSPRRLPPSPTXPSPTSPHYLTPXGGNSPRPRTSXIRLGWPIPPPQTPRPAPMSARPARQRTFGLPPPLPSPAHPQPPRHPQPPPASXPPTRPPRHPQPSXASYPFXPRTPXVEQPPRRKPPPXPHPHSPPRASTASSGRERPPGASAAGAEEERRGWFGASSTA

SEQ ID NO: 196345 - protein, 141 aa, Zea mays
  unsure (1)..(141): unsure at all Xaa locations
  Clone ID: MRT4577_110653C.1.pep
MRGGARQPRPRARTRERHHRREAVQETVHDELTLDGRPRVNLRAGGGRPWIXEPGCXDSLMXDSINANYVHMDESPATTELQSRCADRMAHLSNAPXVKADETAIGVGTVRTSQAIMPAGLAANRKWLARGREQGNPCDSP

SEQ ID NO: 196346 - protein, 150 aa, Zea mays
  unsure (1)..(150): unsure at all Xaa locations
  Clone ID: MRT4577_110654C.1.pep
MRNTMMNSTDTRARAXGKKGTPSLKISSARKNSRSRDENVRLHVPGAQIERYLKKVRYAKSGCAGXARIXLLLVMEXLAAEDQEINLKVVTYMINTHIILRQVVLLIRQLDEFWKLXLSKLTIAHGGVVRNIYPGLLPKIERKKVTIRLQ

SEQ ID NO: 196347 - protein, 37 aa, Zea mays
  Clone ID: MRT4577_110655C.1.pep
WTTGARLLSAFTLATHSRGRGVPSTGTASRPHPLPEE

SEQ ID NO: 196348 - protein, 164 aa, Zea mays
  unsure (1)..(164): unsure at all Xaa locations
  Clone ID: MRT4577_110656C.1.pep
MFYSEEHHSRSKADAGAPRTHPQQAGTVRNNGYIASKNRPCKVGEDSTTKTGKQGHAKRHVAAIDIFNGKKLEDIVPPAHNRDIFYATPPEHQVNDISEDGAVSQRTTXGNTKEDLRHPTEETLVTQIKEGFESGKELVETVQAAMGEEQNGAREDDGPKKLTC

SEQ ID NO: 196349 - protein, 82 aa, Zea mays
  Clone ID: MRT4577_110657C.1.pep
VIGSSITTIALKLSDEVLYAASCAIRIAVALVSATMSWKYTSKVVNTLSSAAVAPVASLAYHSSRWRSVVVKLAMSMDGSRA

SEQ ID NO: 196350 - protein, 86 aa, Zea mays
  Clone ID: MRT4577_110658C.1.pep
IQEGTAGWHKVANEAARTIPGRENGGNCDIKNLSRGSKVYLPVFVEGANLSTGDMHFSQGDGEVSFCGAIEMSGFLELHFSQGSYL

SEQ ID NO: 196351 - protein, 44 aa, Zea mays
  Clone ID: MRT4577_110659C.1.pep
TYHICLRLRVYRMIKHVRTILNLFNLLEKIYVIYLRLMSYEPHY

SEQ ID NO: 196352 - protein, 46 aa, Zea mays
  Clone ID: MRT4577_11065C.1.pep
IRLEVRSRVFYAKTKEMRNRSGSSTILADSLHGHPHSPLHCVEGAL

SEQ ID NO: 196353 - protein, 267 aa, Zea mays
  Clone ID: MRT4577_110660C.1.pep
MASMLEKIDEMLLLAVYKKVCTSLGASRRRWAPKPFVARSFKPPTTYSKPTPPRVMIGPVSSLSEPSPGPPSPSSSPSPAASSRKAIWYFEGIYAYSPQIPGVRFPGLTHPGIVGTAPSAKLLNVWNEREKRLAETSPQTLKLFEVLHQRPLANLPTPENCLLGKIQEGTAGWHKVANEAAKTIPGRENGGNCDIKNLSRGSKVYLPVFVEGANLSTGDMHFSQGDGEVSFCGAIEMSGFLELNFFQGFIPLIHPSKTKFSAAVVLL

SEQ ID NO: 196354 - protein, 473 aa, Zea mays
  unsure (1)..(473): unsure at all Xaa locations
  Clone ID: MRT4577_110661C.1.pep
MGCAASRLEDEEAVKMCRDRRDLIKQALEQRNRFASSHIAYIESLKRVSVALQRFVAGDDHHELIFDTFISPIKQQKPEMLGLPYGSYEKRTIHVSRYLRSGPNPSVSIEEHPRPVETVRVESNYPMDNDSGMVDRFLPTPSSPVRSSSYYPPPYNRPSYPPPLDQETVRNSSYCMXMTGQAMHLXTQETMRTSYYASYDRPSYPPPSPQEPLRNSYHVPYDTSYPPPSPQEQEASPWDFFWNPFSSLDSFTYPRPRSSYDNVVTDDELARLQRVREEEGIPELEEEDDECQEHVQMDRKEEKEEHDNADDDEDDDEDDGEECEHSDECMVSNVNFDANMKQETKGFESKGIQCTEAPEPCKTVELEIKAHRKELMRNRVANAEETPGFTVYLNRRPASLVEAMKDIDCQFSGICDAAREISVMLEASRAQYSTSNDLSAKMLNPVALLRSASSRSSLSRFPFASSSLIDDLF

SEQ ID NO: 196355 - protein, 461 aa, Zea mays
  Clone ID: MRT4577_110662C.1.pep
MASFSSLSASSSTSTPSFNLPAKTSAGTGSLSFHRARESQKSRARMVTVRAEAVDTTISPRVNALRPSKTMAITDQATALRQAGVPVIGLAAGEPDFDTPAVIAEAGINAIRDGATRYTPNAGTLELRKAICKKLEEENGLSYSADQVLVSNGAKQCITQAVLAVCSPGDEVLIPAPYWVSYPEMARLAGATPVILPTSISDNYLLRPESLASVINENSRILILCSPSNPTGSVYPKELLEEIAAIVRKHPRLLVLSDEIYEHIIYQPAKHTSFASLPGMWERTLTVNGFSKAFAMTGWRLGYLAAPKHFVAACGKIQSQYTSGASSISQKAGLAALNLGYAGGEAVSTMVKAFQERRDYLVRSFRELPGVKISEPQGAFYLFIDFSSYYGSEVEGFGTIKDSESLCLFLLEKAQVALVPGDAFGDDKGVRISYAAAMSTLQTAMGKIKEAMALLRPPVAV

SEQ ID NO: 196356 - protein, 214 aa, Zea mays
  Clone ID: MRT4577_110663C.1.pep
MQAEALVKAQDDLRETTGHLGMTLIKLAKFEREQATCNSLRRRAGEIHNFANSVLKMSRSQIKLNSEMVKHLGSIHEYLEMMISVHHAFTDRSNALYYVQSLSADLFSLHTRAGGLESSSARDMGHEWSTYQKVEGLKEAIRSAEAAKSDAVREYESIKENNMIEIKRFDKERRHDFIEMLKGFVVTQVSYSDHFANMWTKVTEETEVYANRSN

SEQ ID NO: 196357 - protein, 73 aa, Zea mays
  Clone ID: MRT4577_110664C.1.pep
SSPELALGSSARAGPAPPKTLHYWLPFNQQFKTGPPPLFVVEKTPPPPPHALCKHSSLFPTTNNWRGPPLNCL

SEQ ID NO: 196358 - protein, 143 aa, Zea mays
  unsure (1)..(143): unsure at all Xaa locations
  Clone ID: MRT4577_110665C.1.pep
LVLRPLTKARAGVQKVSGGPQESGNGSPRSTHMSPSSNHASSDDEIYMAPLFLRIKLPQMENQHVTIPISRSQSYPYSTGSXRXEFFERTKDAVTHLRPKPVKIPLPSSATRHIERQLTSGHRFAREDNVPLAFYGITGTNLY

SEQ ID NO: 196359 - protein, 566 aa, Zea mays
  unsure (1)..(566): unsure at all Xaa locations
  Clone ID: MRT4577_110666C.1.pep
PTRAPSTDPDPPRLLLPSAVPPIDSTDPLFTTSPYSDPKRPRPSPNPTHPSXSQPAMMAAEPSPSVPSTAAEDMETLALDSSSSSAXPLRPPPPTPSXSPPTSPTAAASDDPFVIDDFLDEDDFTAPPPSVAGPPPAGLGDAASPVFPKITVSDPKKHAEPSGGGAAGVIPGSGSYFSYLITTRFAGGGGEVRVRRRFRDVVALADGLAAAHRGLFVPARPDKSVLEGQVLQRHNFVSQRCAALQRYLCRLAAHPIVGQSPGLRTFLTEPGAIPAFQSEAPRYWTTTVNAAAPMVQMKAGRDLFGMFKGLKQTMVNGMVATKPPPVEQETDTEFLAHKARFEDLQQQLTTTSQQAEALVKAQDGYRETTGHLGMTLIKLAKFEREQATCNSLRRRSGEIHNFANSVLKMSRSQIKLNSEIVKHLGSIHEYLEMMISVHHAFTDRSNALHYVQILSADLFSLHIRARRLESSSARDMGHEWSTYQKVEGLKETIRSAEAAKSDAVREYESIKENNKIEIKRFDKERRHDFIEMLKGFVITQVSYSDHFANMWTKVTEETEVYANRSS

SEQ ID NO: 196360 - protein, 157 aa, Zea mays
  unsure (1)..(157): unsure at all Xaa locations
  Clone ID: MRT4577_110667C.1.pep
MKGGKKEAAGCGAGHTAGLAAQGSSHRRTWTPVPRAQPRRTAPSPPLPCVAPVAHAVLPARYMPPNPLPHSLLAPATLATPSSSSYLPPFAXPIPPXSTPPHTPMRPPITTPPCLSRASAPAPPSSPXAIPPPPLXPYPASNYPLSPPPXTPPPAAP

SEQ ID NO: 196361 - protein, 74 aa, Zea mays
  Clone ID: MRT4577_110668C.1.pep
PACSVQEPACPHYSFDAGPHEPAVRPVYVCRGSGGLINLLRHMLWLDASGAKGPLRLATRQVRVTLASSALSTD

SEQ ID NO: 196362 - protein, 43 aa, Zea mays
  Clone ID: MRT4577_110669C.1.pep
LYYLFLLNNSDPFLHIIITSEFYTVTMFVYAKFTLFTYNFPKL

SEQ ID NO: 196363 - protein, 79 aa, Zea mays
  Clone ID: MRT4577_11066C.1.pep
GHPRRVPAAWRSCAVAEGQGGGGGADERSASQRCRGRGRPCFSASSCTDVASKQKNLKLEKQRKKEKENSNCNRVVLCF

SEQ ID NO: 196364 - protein, 71 aa, Zea mays
  Clone ID: MRT4577_110670C.1.pep
AVVTTQSTRAKQVSMSALILGMLTTVLSVVYSAVRAGSSTTFLSPPSSPRSGAKKKKKKKKKVLCVVTTAK

SEQ ID NO: 196365 - protein, 47 aa, Zea mays
  Clone ID: MRT4577_110671C.1.pep
MTQVWAKGGVFVSPRVKKKKKKKKKKKKKKKKKKKKKKKKKKKKQKN

SEQ ID NO: 196366 - protein, 71 aa, Zea mays
  Clone ID: MRT4577_110672C.1.pep
NFPNKLAPWHKIVPATGRRKRGLFANGDMHIQLSTPKKGRRFHIWEGQTIGSCSMTWHHVVLQTSLVSPMP

SEQ ID NO: 196367 - protein, 113 aa, Zea mays
  Clone ID: MRT4577_110673C.1.pep
AVVKLYVNLGELSKADSFLMNVTEDNPDRHPLFSSYVILLKAYAEKGDIHNAEKIFDRVKQTSFPARTLPYNLLLAAYASAQVTPYGFRERMKADKFSPGKSQIEQLKQLDSL

SEQ ID NO: 196368 - protein, 187 aa, Zea mays
  unsure (1)..(187): unsure at all Xaa locations
  Clone ID: MRT4577_110674C.1.pep
PRPPRVRPRSPPVVVGPPPSSGRRGGQPVTTVGSRRSGPSSXPPARTXGPGPRPPASXSLTASRPPYPRPPPPKAATASSPPPPXRTPSPSXAPPPLRPPPTPAPPQAEXPPRLRPRDRGTCGSARGGAPPPPGRXASPSPPPPPPPSSSSAEAAQARPVLRVPEGGGDRGGHLRAHRLPAAAAASE

SEQ ID NO: 196369 - protein, 102 aa, Zea mays
  unsure (1)..(102): unsure at all Xaa locations
  Clone ID: MRT4577_110675C.1.pep
LRLNCNAYRDVSLCWRVLALCASATNAFIIXQCSLAPSVIIPHFLRPVTSMCXKHLVEQAYMLQQALAASVLHQPSNXIASSILXHLTIQTICSHQPQQYLP

SEQ ID NO: 196370 - protein, 46 aa, Zea mays
  Clone ID: MRT4577_110676C.1.pep
CTVRHKLQTFRSDNMVPLVLHPRTVARLENPNSTCTVTQLSSQANV

SEQ ID NO: 196371 - protein, 49 aa, Zea mays
  Clone ID: MRT4577_110677C.1.pep
IWETGAVKGLTSQALTINVDEHRQGGTKTAIDSLNVSRIHRYAIRYLTV

SEQ ID NO: 196372 - protein, 160 aa, Zea mays
  unsure (1)..(160): unsure at all Xaa locations
  Clone ID: MRT4577_110678C.1.pep
GPREKSPPFFLFKGGKKGPEKTPPVQPHPLGAPPPGGKKPKTPPQPNWPPTPGXISGPXLKPPRFLPPLNPPVPLKKQTAPPKFRFFCKKISENLGEKNLRTPPNKKYFPFFAPPPQPGWGKKKGNLPGGPKNFFWASGPLLLGGPALCPPHKQAPFLFF

SEQ ID NO: 196373 - protein, 290 aa, Zea mays
  Clone ID: MRT4577_110679C.1.pep
MQMQKTNMREDWSGKTSITERLSSEIEGFLHHAKRPGNSKNDNLDNGNEKRDASLCRQSLESVHLNGATSVPRLAEDDDDGSSIASDLHCFELNTHGGAIRNHELAGARRRVTGCMHSPMRRLEYSNGVSVEGSPMSNVPPCPKKEKTRSGVSRQHFITSAPETSSRNDASLAPAADEQNETVMTQVSRRLRDDLLKIKSEAPQHAYLGQKSNQPRTNEFHEYSPAPAPARRHLNNPAQSLDCEISEPPAHQLTGTKENSLKVKLLQARLEGQHARLSASVFPLISTRRK

SEQ ID NO: 196374 - protein, 67 aa, Zea mays
  Clone ID: MRT4577_11067C.1.pep
ISVQSRISWASTSMDPHKVLSVGALSSSDHGALHSLIMLPRRACRVRVGGDRSLLHLRSHAGGDQPW

SEQ ID NO: 196375 - protein, 318 aa, Zea mays
  Clone ID: MRT4577_110680C.1.pep
DFLLQKICENTSASKLTKTNGKRPDSADTGSKNEWRGIPTRLNNIPHSREIREYFYNDVLKATKLAIEDKKTRLQIDINIPELNPEMDVYRIGTLMELVRELSLSFADDGKRVKVCVQGSMGQGAFAGIPLQLAGTRKILEFMDWGDYGAKGTFINIGAVGARDVDKEDDMFVLIAPQNAVGNCIIDDMRAMTDAAGDRPVILVNPRLKDMPASSGVMQTMGRDIRLKYAASFETCYSFRLLYYTGSFYPIMGALRMAYPNKYEIYRRVDTLNGKENYILIAEFTNKPTPDEITSAFKGQKREEKASSGFWGFLSGLF

SEQ ID NO: 196376 - protein, 214 aa, Zea mays
  Clone ID: MRT4577_110681C.1.pep
FGSRDAYLLDWDTRYRIALGAAEGLRYLHSDCKPQVIHRDIKSNNILLDEMMEAHVGDFGLAKLIDISNSRSMSAVAGSYGYIAPEYAFTMKVTEKCDVYSFGVVLLELLTGQSPIQPLEKGGDLVNLVRRMMNKMMPNTEVFDSRLDLSSRRVVEEMSLVLKIALFCTNESPFDRPSMREVISMLIDARASSYDSFSSPASEAPIEYDSSPKN

SEQ ID NO: 196377 - protein, 516 aa, Zea mays
  unsure (1)..(516): unsure at all Xaa locations
  Clone ID: MRT4577_110682C.1.pep
MSAILRRVGRQDRRQGRRHHTRHLQLHVPIPTLLPCLPLMTSPGGVFSAALVAEDFPWVDMEEEMGMAPDMYREVFDLAQRGTRAFRDRLFDEAISCYTKAQNLRPDPIILGNRSLTFCRLSQLLRERSAADSEYQPLNGLDPTTHAELALKDAEKILSINSNSPRPYILKAYALFLMEHYHEARETLLAGLQVDPLSHVLQTCLNDLDRNTNIAAGARRARLARIDDFECTLCFKLLYEPVTTPCGHSFCRSCLHQSMDHGNKCPMCRTVLFIGPRTCPISVTLSNIIQKASSGFWGFLSGXLSQAICCTAMQSSLYIFIXMDVIXRKISVRIRIRRWXERWFRWNFRIXMVAIDSATGTVADCGCEVEISECEPLPDGRFYLEVEGTRRFRIVRSWDQDGYRVAEVEWLKDIPLPEGSQGRRELMELANGASELARAYIRHARDTVRTARRTRHLDLEGMPGPQDPEKFSFWLANLISLRPSDRLDTLRLRDTRERISSSISLLRDSEQGCRVQ

SEQ ID NO: 196378 - protein, 324 aa, Zea mays
  Clone ID: MRT4577_110683C.1.pep
MGSVASAAVPPPPPQSALPQAGAPPYGPGLAGILPQMSKGEEKKDEKVDYLNLPCPVPFEEIQREALMSLKPELFEGLRFDFTKGLNQKFSLSHSPNNIFHSIFMGSLEVPAQASETIKVPTAHYEFGANFLDPKLMLIGRVMTDGRLNARVKCDLTDNLTLKVNAQGSDYRAQFQIGNNAFYGANYIQSVTPNLSMGTEMFWLGHQRKSGIGFASRYNTDKMVGTLQVASTGIVALSYVQKISEKVSLASDFMYNHMSRDVTASFGYDYLLRQCRLRGKIDSNGVVAAYLEERLNMGVNFLLSAEIDHCKKNYKFGFGMTVGE

SEQ ID NO: 196379 - protein, 194 aa, Zea mays
  Clone ID: MRT4577_110684C.1.pep
MDLVLALSNTSKESTKYIHSTILKLQILDHATMVWDLRWNLNPNQTSKSPVTKEFSHISTVPKGIQLELLDKEWNLIMFQAERNLDLFEPFLAFRRALLKILGCEEHLVKHLFQSASALRKGLRFSLAAAALYELKELCFHRDESTMTNTYLLARLEDAKLLRAQGQLDMAISLGKYILQKLSDKKNLSDVYRL

SEQ ID NO: 196380 - protein, 334 aa, Zea mays
  Clone ID: MRT4577_110685C.1.pep
MGSVASAAVPPPPPHSALPQAGAPPYGPGLAGILPQMSKGEEKKDEKVDYLNLPCPVPFEEIQREALMSLKPELFEGLRFDFTKGLNQKFSLSHSIFMGSLEVPAQASETIKVPTAHYEFGANFLDPKLMLIGRVMTDGRLNARVKCDLTDNLTLKVNAQLTQEAHYSQGMFNFDYKGSDYRAQFQIGNNAFYGANYIQSVTPNLSMGTEMFWLGHQRKSGIGFASRYNTDKMVGTLQVASTGIVALSYVQKISEKVSLASDFMYNHMSRDVTASFGYDYLLRQCRLRGKIDSNGVVAAYLEERLNMGVNFLLSAEIDHCKKNYKFGFGMTVGE

SEQ ID NO: 196381 - protein, 134 aa, Zea mays
  unsure (1)..(134): unsure at all Xaa locations
  Clone ID: MRT4577_110686C.1.pep
TRAFFFFFFFLFLFFLLLLLTHAGARPGLRSATTGPAAESGARGHLPASSPQRGERRCNLSFTTRAARVGSQGGGQMLSPSEIPQRDWFPSDFTFGAATSAYQIEGAWNEDGKGESSWDHFCRXHPERILGGSN

SEQ ID NO: 196382 - protein, 334 aa, Zea mays
  Clone ID: MRT4577_110687C.1.pep
MGSVASAAVPPPPPQSALPQAGAPPYGPGLAGILPQMSKGEEKKDEKVDYLNLPCPVPFEEIQREALMSLKPELFEGLRFDFTKGLNQKFSLSHSIFMGSLEVPAQASETIKVPTAHYEFGANFLDPKLMLIGRVMTDGRLNARVKCDLTDNLTLKVNAQLTQEAHYSQGMFNFDYKGSDYRAQFQIGNNAFYGANYIQSVTPNLSMGTEMFWLGHQRKSGIGFASRYNTDKMVGTLQVASTGIVALSYVQKISEKVSLASDFMYNHMSRDVTASFGYDYLLRQCRLRGKIDSNGVVAAYLEERLNMGVNFLLSAEIDHCKKNYKFGFGMTVGE

SEQ ID NO: 196383 - protein, 63 aa, Zea mays
  Clone ID: MRT4577_110688C.1.pep
NAVMKSSVLQMVDWSAGSAIFFYVGAGIRRIRQVYHSRLRIAGYNLKRSCVVHGQAWHCVILL

SEQ ID NO: 196384 - protein, 87 aa, Zea mays
  unsure (1)..(87): unsure at all Xaa locations
  Clone ID: MRT4577_110689C.1.pep
MGAKILSLLALLALFVSATYAFIIXHCSLXAPSFIITQXLLPVTSMGFEHPALLAYMLQQAIVACCLQQPISHLQXHSLAHLTYQTI

SEQ ID NO: 196385 - protein, 141 aa, Zea mays
  Clone ID: MRT4577_11068C.1.pep
QAGHLTGPVAGHLLTTRAQCNSWLARCGTKSNPWTRHTCHGGAKHQLDGQDRPAGQHHLRTQARCSAVRPVVNTGHVLAVTPWLKTQVIVHHNIFLRLLQLAMMSRTMIRSHRTITILHDSKMLSFLSCSHLQLAPYYSDE

SEQ ID NO: 196386 - protein, 127 aa, Zea mays
  Clone ID: MRT4577_110690C.1.pep
NCGRPSRLPHLDLQTLTTDASKTLGARPMGRRKERRLAARAAAGRRVKLDLFLDLPPGEASHNDGIGGENRDQQTVVPTSSSGGFHQFPSKGYVKKTYLWIIEHKYGGNLDLCTSLYSSANLVLRYM

SEQ ID NO: 196387 - protein, 35 aa, Zea mays
  Clone ID: MRT4577_110691C.1.pep
KKKKNKKKKKKKKKKKKKKKKKKKKRKKKKKKKKK

SEQ ID NO: 196388 - protein, 80 aa, Zea mays
  Clone ID: MRT4577_110692C.1.pep
SSERVTQQTVSGPPGANGSATSSPQKADGNVDAPENMAVDHKVTSSPVKNHIDLNIQPERDDEQSPKSGAAGLLSRDHPT

SEQ ID NO: 196389 - protein, 74 aa, Zea mays
  Clone ID: MRT4577_110693C.1.pep
GVVVVQSVVRPGCHGQLGRRAPSLRPWNRISCSSPCRRCGRAHPAGAPKCPSPVALLERLYRTRAWVKPGSPGR

SEQ ID NO: 196390 - protein, 48 aa, Zea mays
  Clone ID: MRT4577_110694C.1.pep
TSDLPQHYLIYEHSNLSSINTESQLPTILSFLPIFLHHFYLSHPFSIP

SEQ ID NO: 196391 - protein, 57 aa, Zea mays
  Clone ID: MRT4577_110695C.1.pep
FKGKGPQNGRLALFSRGGFLGQALVPGKGPIKTPVAPLAGPVNTHAGAFPPPFVSGK

SEQ ID NO: 196392 - protein, 41 aa, Zea mays
  Clone ID: MRT4577_110696C.1.pep
KKKKKKKKKKKKKKKKKKKKKKKKKKKKKKKKNMCNINKNK

SEQ ID NO: 196393 - protein, 242 aa, Zea mays
  Clone ID: MRT4577_110697C.1.pep
MFLCVQKTGSVLLLLSHAPPLSKQLKPLSRKRRSIFLPLFLPDGDRQPCFFAQALSCFSVPPLLPRSPLLVRVLLPSAIATTPRRPTAPHHPNPPLTCQLSLPFHPTSALPQFASPTPRPRSAPENKERAERAAAGVAMLHKFALAVKTKTIEFFAEEEEDEDEDADRSARSPLPGADGVLAGQRVVVLKPDPANPNPSADGDGKAASGQEAAVAAALATASSFQAAYLHLQAAHAPFLPDA

SEQ ID NO: 196394 - protein, 223 aa, Zea mays
  Clone ID: MRT4577_110698C.1.pep
PPVCRCAARPAPRTRPVLEGHVLDRWRLPLAADTVPLAVSLPLADMQSQIVCHGCRTLLFYPRGAPSVCCAVCHVVTNVPPPAMEMARLICGGCQTLLMYARSATTVRCSCCDTVNLVRPVSSIAHVNCGQCQTVLMYPYGAPSVKCAVCNFITNVGGVTPMIPLPPPALPASSGTSYIIPSISVPTNQPRNVTVVVENPMTVDDKGKLVSNVVVGVTSGGKK

SEQ ID NO: 196395 - protein, 140 aa, Zea mays
  Clone ID: MRT4577_110699C.1.pep
MEMARLICGGCQTLLMYARSATTVRCSCCDTVNLVRPVSSIAHVNCGQCQTVLMYPYGAPSVKCAVCNFITNVGGVTPMIPLPPPALTASSGTSYIIPSISVPTNQPRNVTVVVENPMTVDDKGKLVSNVVVGVTSGGKK

SEQ ID NO: 196396 - protein, 136 aa, Zea mays
  Clone ID: MRT4577_11069C.1.pep
IVKSPTPDEHSPGPTERWATKPEKVNMHDGTTPRSEVVSFFRNELREGVFRTFGYPKRKRFFTGQALYEKRSGAPKGLLLGSCFVAKGPAGRKHLQQICLYEIPKLPLTKLRRYRVSKDEGSNRLKDGITFQSIRV

SEQ ID NO: 196397 - protein, 115 aa, Zea mays
  unsure (1)..(115): unsure at all Xaa locations
  Clone ID: MRT4577_1106C.1.pep
YLDRNPASSRSMNHMVNGDGILLQQIQFHLLLVLVKMSTARTSVDISSKLTEEQAXGQNPSAVXDFXLAINHQRTGVPAEILSLLYDEDIKQLSKDGLRLAASSNLMMLMNGDFS

SEQ ID NO: 196398 - protein, 243 aa, Zea mays
  Clone ID: MRT4577_110700C.1.pep
MDPPRAVAFLLILLPVLAPVASGVPFVVLHGIGDECGNDGLSSFTKMLGEWSGSKGYCIEIGRGAWDSWLMPLQEQANTVCKKVKKMKELSEGYNIVGLSQGNLIGRAVIEYCDCGPPVKNFISIGGLHAGTASVPLCGDMEDYLKGCKFLPKLNNEIPSARNTTYKERFSSLENLVLIMTKLYTEDWIGLKTLDEAGRVKFVSVPGGHLRITRSDMKKYIVPYLTPEASSKKNIHIHRMLSL

SEQ ID NO: 196399 - protein, 164 aa, Zea mays
  Clone ID: MRT4577_110701C.1.pep
DMQSQIVCHGCRTLLFYPRGAPSVCCAVCHVVTNVPPPAMEMARLICGGCQTLLMYARSATTVRCSCCDTVNLVRPVSSIAHVNCGQCQTVLMYPYGAPSVKCAVCNFITNVGGVTPMIPLPPPALTASSGTSYIIPSISVPTNQPRNVTVVVENPMTVDDKGK

SEQ ID NO: 196400 - protein, 296 aa, Zea mays
  Clone ID: MRT4577_110702C.1.pep
MDPPRAVAFLLILLPVLAPVASGVPFVVLHGIGDECGNDGLSSFTKMLGEWSGSKGYCIEIGRGAWDSWLMPLQEQANTVCKKVKKMKELSEGYNIVGLSQGNLIGRAVIEYCDCGPPVKNFISIGGPHAGTASVPLCGSGFLCILIDDLIKSEIYSDYVQDMEDYLKGCKFLPKLNNEIPSARNTTYKERFSSLENLVLIMFEGDAVLIPRETAWFGYYPDGAFSPVLPPQETKLYTEDWIGLKTLDEAGRVKFVSVPGGHLRITRSDMKKYIVPYLTPEASSKKNIHIHRMLSL

SEQ ID NO: 196401 - protein, 119 aa, Zea mays
  Clone ID: MRT4577_110703C.1.pep
GAKLGFVPPCRGGRDHFNEGGNNAGQKEKELFNLRHSSLGVTVEGAFGSKERRVQILKDASPFFHFPTQMHKGVAGRIIQKWVTQDGSDKFIRQDSNRPSPSHGTSLGGQASEHAESGM

SEQ ID NO: 196402 - protein, 169 aa, Zea mays
  unsure (1)..(169): unsure at all Xaa locations
  Clone ID: MRT4577_110704C.1.pep
MQSQIVCHGCRTLLFYPRGAPSVCCAVCHVVTNVPPPAMEMARLICGGCQTLLMYARSATTVRCSCCDTVNLVRPVSSIAHVNCGQCQTVLMYPYGAPSVKCAVCNFITNVGGVTXMIPLPPPALTASSGTSYIIPSISVPTNQPRNVTVVVENPMTVDDKGKLVSMLC

SEQ ID NO: 196403 - protein, 260 aa, Zea mays
  unsure (1)..(260): unsure at all Xaa locations
  Clone ID: MRT4577_110705C.1.pep
MPVPFPLRRTSREAVGAGREGEALAPSLPRTPMDPPRAVAFLLILLPVLAPVASGVPFVVLHGIGDECGNDGLSSFTKMLGEWSGSKGYCIEIGRGAWDSWLMPLQEQANTVCKKVKKMKELSEGYNIVGLSQGNLIGRAVIEYCDCGPPVKNFISIGGLHAGTASVPLCGDMEDYLKGCKFLPKLNNEIPSARNTTYKERFSSLENLVLIMFEHDAVLIPRXTGXWXGYYPDGAFSPVLPPQETKLYTEXDWXIGLKTL

SEQ ID NO: 196404 - protein, 50 aa, Zea mays
  unsure (1)..(50): unsure at all Xaa locations
  Clone ID: MRT4577_110706C.1.pep
RVQRASTRSLVCLVRTSFAXTFGVHMRASLIKAPVLSFIVKXKKKKKXXK

SEQ ID NO: 196405 - protein, 288 aa, Zea mays
  Clone ID: MRT4577_110707C.1.pep
MDPPRAVAFLLILLPVLAPVASGVPFVVLHGIGDECGNDGLSSFTKMLGEWSGSKGYCIEIGRGAWDSWLMPLQEQANTVCKKVKKMKELSEGYNIVGLSQGNLIGRAVIEYCDCGPPSGFLCILIDDLIKSEIYSDYVQAHLAPSGYLKIPTDMEDYLKGCKFLPKLNNEIPSARNTTYKERFSSLENLVLIMFEDDAVLIPRETAWFGYYPDGAFSPVLPPQETKLYTEDWIGLKTLDEAGRVKFVSVPGGHLRITRSDMKKYIVPYLTPEASSKKNIHIHRMLSL

SEQ ID NO: 196406 - protein, 84 aa, Zea mays
  Clone ID: MRT4577_110708C.1.pep
CASQPTARRTHTHTSYFHSVKLTKAQHSPNQAQGANVGHALCQKMENLCFQITVRPNYIITTSRTPYHTGHTCESTNLISDLCL

SEQ ID NO: 196407 - protein, 309 aa, Zea mays
  Clone ID: MRT4577_110709C.1.pep
MDPPRAVAVLLILLPVLAPVASGVPFVVLHGIGDECGNDGLSSFTKMLGEWSGSKGYCIEIGRGAWDSWLMPLQEQANTVCKKVKKMKELSEGYNIVGLSQGNLIGRAVIEYCDCGPPVKNFISIGGPHAGTASVPLCGSGFLCILIDDLIKSEIYSDYVQAHLAPSGYLKIPTDMEDYLKGCKFLPKLNNEIPSARNTTYKERFSSLENLVLIMFEDDAVLIPRETAWFGYYPDGAFSPVLPPQETKLYTEDWIGLKTLDEAGRVKFVSVPGGHLRITRSDMKKYIVPYLTPEASSKKNIHIHRMLSL

SEQ ID NO: 196408 - protein, 86 aa, Zea mays
  Clone ID: MRT4577_11070C.1.pep
MLTMREDIGHVREHLTRLHTSCMRLPLSMEKLANTVGMNPSLDQYYLNNTVDVVKMLYGLPSPPLPTRKPGTLVVVQLMFLFKGCM

SEQ ID NO: 196409 - protein, 88 aa, Zea mays
  Clone ID: MRT4577_110710C.1.pep
IMTLMFCKSRILIPTICGLKKMELYLLLPAALSCLKFHSNDNRQCAEFLEAVPIFYSELLLCDKGFSSWKKFVTRSIFEEDFSEFIPT

SEQ ID NO: 196410 - protein, 106 aa, Zea mays
  unsure (1)..(106): unsure at all Xaa locations
  Clone ID: MRT4577_110711C.1.pep
MADENHHHHHLFHHIKHEXAHPALPXYCKSSKYTHATVNPVTSPXQNQFNKYKNEDKQPQHKHHLCKAISIVDSAFALYXNHEAKNDTYHAHRHKIKDDRPSSDIL

SEQ ID NO: 196411 - protein, 138 aa, Zea mays
  unsure (1)..(138): unsure at all Xaa locations
  Clone ID: MRT4577_110712C.1.pep
QAAVQLHKHASAFVWFPNPRPARRKPPKPHLRSRTHGHGHGHAPPPAGRHTSGPGPAAXSAAKPRCPRRHLRAGTQXSAPHVPPATAREPTGPTHPPRDSRESNIPSASPPRSPARLPRRAGVAPDESRERPPRQLHI

SEQ ID NO: 196412 - protein, 203 aa, Zea mays
  Clone ID: MRT4577_110713C.1.pep
MVALNLPADVLATADGTRKLFNKWSYEDVEVKDISLQDYIQIRQQVYLPHTAGRFAVKRFRKAQCPIVERLTNALMMTGRNNGKKLMAARIVQHAFEIINLLTDANPLQILVDAIINCGPREDSTRIGSQGTVRRQAVDVSPLRRVNQAISLLTVGTRESAFRNVKTVAECLADELINAAKGSANSYAIKKKDELERVAKSNR

SEQ ID NO: 196413 - protein, 47 aa, Zea mays
  unsure (1)..(47): unsure at all Xaa locations
  Clone ID: MRT4577_110714C.1.pep
LGGAVFTACDCGHGAAGRANKAIACSVSSRSPRADIGXCGEIAVRGG

SEQ ID NO: 196414 - protein, 47 aa, Zea mays
  Clone ID: MRT4577_110715C.1.pep
SQVLGEDKWLRRSHTTRSLIRSRWRLPVDFLAPTMDFRSCYIYHLFL

SEQ ID NO: 196415 - protein, 54 aa, Zea mays
  Clone ID: MRT4577_110716C.1.pep
FGRLLKEKGFIGSFRGVGPTLFLFLQRIPIIGWVFPQPFLKLFLDRYKKKRVPV

SEQ ID NO: 196416 - protein, 53 aa, Zea mays
  unsure (1)..(53): unsure at all Xaa locations
  Clone ID: MRT4577_110717C.1.pep
VQTATKSAAFGSANNEGYGGRGRLXLGRLGGXVSLKRARGVSEAGAWTACRRA

SEQ ID NO: 196417 - protein, 86 aa, Zea mays
  unsure (1)..(86): unsure at all Xaa locations
  Clone ID: MRT4577_110718C.1.pep
NPSTPKGLSNTGSSXLFSXPLGSKKKAPLPKKRTCGIWDLANNKPSKSCCIKIFCAKDSLIMGKPTMPCFRLYPRVGVFLCQLCLC

SEQ ID NO: 196418 - protein, 43 aa, Zea mays
  Clone ID: MRT4577_110719C.1.pep
QKEEDTGTLRFSSRFHLSFKPQYRYSYKAESTVNTAFWFYSPV

SEQ ID NO: 196419 - protein, 226 aa, Zea mays
  unsure (1)..(226): unsure at all Xaa locations
  Clone ID: MRT4577_11071C.1.pep
MDETLASLRRPKRGRPPRPREDYTAYFEDVAEAGGLAPPQSKRKRAASAAAAASLEDLPLIDIIKHNGRLISHAVKRLVEDYESKKNSVTFQILTMIFEACGAKHEIYPDYLRESDVDDVVVSLVDLAKKGLVEDNYNSKHKDLKNFKENMVSFWDSLVIECQNGPLFDDLLFQKIKDYVVALSCAPPRVYRQVASMIGLQLVTXFISVAKTLSGQRETTQRQLNA

SEQ ID NO: 196420 - protein, 29 aa, Zea mays
  Clone ID: MRT4577_110720C.1.pep
DRGVITIQSPGILNIIHNDILDHYMNGLF

SEQ ID NO: 196421 - protein, 124 aa, Zea mays
  unsure (1)..(124): unsure at all Xaa locations
  Clone ID: MRT4577_110721C.1.pep
MSLYHQVTCCCGRDGCEPARMMAAKARAAHEVVKAKTRADVTFLAADGNYCKGVVTLANGLRKVGSAYPLMASLLADVPETNRRILVSQGLILREIEPDYPPENXTQRAIXYYVINYSKLRIWQ

SEQ ID NO: 196422 - protein, 128 aa, Zea mays
  unsure (1)..(128): unsure at all Xaa locations
  Clone ID: MRT4577_110722C.1.pep
IGYLEAGRVPPEVWLLXPYLVPFYPGRMWXHCRMVXVXLCYIHGKRSLXSITPLVLXLRKELFKXPYSKIXWDKXRLMCKEIAYXHPFGKDVLWATLHRFVEXAMMSWSGQSLRETALETAMQHGHHE

SEQ ID NO: 196423 - protein, 128 aa, Zea mays
  unsure (1)..(128): unsure at all Xaa locations
  Clone ID: MRT4577_110723C.1.pep
PGVICFRVCVQHQVCSIYRWFPFSHVFICIAGCIEGAWLSPGFGMEPSPFSAVLRWVVPPLFQYSSSVALYPEGRRSRSSPAAKRLRSLGFYRCSGSSRLPCALEWRLQLSRQSDIAYGFPGRXXXRV

SEQ ID NO: 196424 - protein, 62 aa, Zea mays
  Clone ID: MRT4577_110724C.1.pep
ILPKNNKKVYLSIRSNLTYTFIQHNLSYIMSPNFNSLTSKLQRSYLQNPYFSILNPLSTHPP

SEQ ID NO: 196425 - protein, 222 aa, Zea mays
  Clone ID: MRT4577_110725C.1.pep
TTDPHMKDLFVPFRCFCTRKDINCKDVVLDEHDVAKSIIEFSAQAAVEKLVLGATTRGGFVRFKADIPTTISKGAPDFCSVYIVNKGKVSSQRNSTRAAPRVSPLRSQIQSSQIAATLKPEPPQSHRWSSSSRGHEHGETPRVDNFRSPFARGGPANTRKSYADLSHMSMPDSADISFVSSTGRRSVDHHPAIPPRMSNGSVDSYDHSFEMSRTPSKWGGDS

SEQ ID NO: 196426 - protein, 165 aa, Zea mays
  Clone ID: MRT4577_110726C.1.pep
MKIIIDTDPGIDDSVAILMAFQMPGVQVLGLTTIFGNCTTEHATRNALILCEKASHLEVPVAEGSHEPLKGGKPHVADFVHGPDGLGNVDLPDPTIKKVEESATDFLVDKVSRFPGEVSVLALGPLTNIALAIKKDPSFVKNVKKIVVLGGAFFAAGNATPSAEA

SEQ ID NO: 196427 - protein, 224 aa, Zea mays
  Clone ID: MRT4577_110727C.1.pep
MLVFTNHFSLRASTSTSPASSSSSVNSKMPSPALSGFFFCFAAMVLLIFVSVSTPVWRNIYFLKATVTEEIRYGIWGYCVQGGDCSNAMLGYAPSIEQVGGNYTEGSSVLQNFTKVMILHPIAGALALFAVLWGLAGVALASRTCTILMSLTAFLALLASLVAFAIDLALWIIIRNRIRDRGFEAELGNANWLTVGAVAALILGTCTCGSCGRFATGRMGGEEY

SEQ ID NO: 196428 - protein, 315 aa, Zea mays
  Clone ID: MRT4577_110728C.1.pep
MKIIIDTDPGIDDSVAILMAFQMPGVQVLGLTTIFGNCTTEHATRNALILCEKASHLEVPVAEGSHEPLKGGKPHVADFVHGPDGLGNVDLPDPTIKKVEESATDFLVDKVSRFPGEVSVLALGPLTNIALAIKKDPSFVKNVKKIVVLGGAFFAAGNATPSAEANIHSDPEAADMVFTSGADIYVVGLNITTQVSFTDKDLLELRNSQGKYAQFLCDVCKFYLDWHTESYGAPVIFLHDPVSFAALVRPELFTFKKGVVRVETQGICVGHTSMDMLLKKWNSENPWTGYSPISVAWTVDVPKVVAFVKELVTKP

SEQ ID NO: 196429 - protein, 289 aa, Zea mays
  unsure (1)..(289): unsure at all Xaa locations
  Clone ID: MRT4577_110729C.1.pep
MKIIIDTDPGIDDSVAILMAFQMPGVQVLGLTTIFGNCTTEHATRNALILCEKASHLEVPVAEGSHEPLKLCGIECFTSLCCEQGGKPHVADFVHGPDGLGNVDLPDPTIKKVEESATDFLVDKVSRFPGEVSVLALGPLTNIALAIKKDPSFVKNVKKIVVLGGAFFAAGNATPSAEANIHSDPEAADMVFTSGADIYVVGLNITTQVSFTDKDLLELRNSQGKYAQFLCDVCKFYLDWHTESYGAXCFAALVRPELFTFKKGVVRVETHGICVGHTXMDMLLKKWNS

SEQ ID NO: 196430 - protein, 60 aa, Zea mays
  Clone ID: MRT4577_11072C.1.pep
KHPFEHCHRLFVHGFYGTILVNVYYCSVMDVYRTTCCCYLLVRQLLIHVQLGAKKRQNVF

SEQ ID NO: 196431 - protein, 203 aa, Zea mays
  Clone ID: MRT4577_110730C.1.pep
MEEQGERHIQLQLLLLPAPAGHHQVLRDVPAAVPASAVEPPQLDLDLTMSIGPRRHPAAQTPAPSPPPPRARSPPTNENRRASAMMMSTVLAPVPASARQHQKHQQYAGADVRAVKQQAADQARMASAERAYAERVRELARRELELAEREFARARAIWERAREEVERVERMKQIAARRLVGSAASSAAVLEITCHACMQRFHP

SEQ ID NO: 196432 - protein, 73 aa, Zea mays
  Clone ID: MRT4577_110731C.1.pep
SSPASTRTPLRPLLTNLTRPPPVRGHQLQYAQLLRVEATRLLLIKLRASAIMLLQRVSWFAYAQVEVLCLPLA

SEQ ID NO: 196433 - protein, 39 aa, Zea mays
  Clone ID: MRT4577_110732C.1.pep
ARCERCSISLLIHGPRHSAMRMAVLSSAIIGRAVVIDDM

SEQ ID NO: 196434 - protein, 99 aa, Zea mays
  Clone ID: MRT4577_110733C.1.pep
ISCASAAITCGHVETSMTSCITYATGTASALPSSCCRGVKSLNTAASSSAHQQAARRCLKSLFNSAKMIYMDTDATIPVKCLVSDGLPISMSTDCNKIM

SEQ ID NO: 196435 - protein, 258 aa, Zea mays
  Clone ID: MRT4577_110734C.1.pep
MALVYLKGIAIGSARLEFAAEQSALYEYLWQHAFLSDTAHTLIGQRCKNAEDNSPLCSGTKDAAYNQIGNIDAYNIYATTCHDKKVKPRGSNCMDLADPCAQYYVEAYLNQPEVMKTIRANTGLKYRWTRCRGTFYNLLKFGDSPSKSMLPYVKAVAAAGVRVWVFSGDLDAMVPVIATKRSMEKLGLGVVEDWRPWSIDAKDQEVAGYVIEYKGVVFATVRGSGHMVPIDQPGRGFALFSSFIKGQPLPKAAPMVDG

SEQ ID NO: 196436 - protein, 175 aa, Zea mays
  unsure (1)..(175): unsure at all Xaa locations
  Clone ID: MRT4577_110735C.1.pep
MQSAARLFAAAAPGSPRSLLFLRGLCSASPAGQPDPRPYPAPDPDPDPDPRLVGALCRVLSDFRGPRHDLRAALSGFAPRLTPAAAAAVLRRCRNLPVPSLRFFLFAAAMPGFTHLPDSLLILAGSLAGARLFPLLRSLLSDLPRAALSRDLVPLLVRAYARAXLPEDAIRAFSS

SEQ ID NO: 196437 - protein, 65 aa, Zea mays
  Clone ID: MRT4577_110736C.1.pep
RRAAGRARPRGPAPVFVGFFFVGAGRRCDQRSGSAIKVVSGRLWRREALHESGRHPGLADPALEG

SEQ ID NO: 196438 - protein, 82 aa, Zea mays
  Clone ID: MRT4577_110737C.1.pep
MASRRRTLLKVIILGDSGVGKTPLMNQYVNKKFSNQYKATIGADFLTKEVKFKDRLFSLQICDTAGSERFPSLGDANYRRAH

SEQ ID NO: 196439 - protein, 50 aa, Zea mays
  Clone ID: MRT4577_110738C.1.pep
FRYVNKKFSNQYKATIGADFLTKEVQFEDRLFTLQVRLVTLAVCRAVIWE

SEQ ID NO: 196440 - protein, 46 aa, Zea mays
  Clone ID: MRT4577_110739C.1.pep
TLMSTYLQAYPPGRLYRHTHIFDLHKHLQKTGFVGFKANEITAGEL

SEQ ID NO: 196441 - protein, 180 aa, Zea mays
  unsure (1)..(180): unsure at all Xaa locations
  Clone ID: MRT4577_11073C.1.pep
XXFFFFXXXXNNRGPVNLKKPTGPPPTKNPKPKKKGGPNKQKQGKDPRGGKAPTKKKKNGKNPNKPPGGRPQHSSSYKTPGGFQQKQLLIFSGARGGENPKKKKNPQFAYLKHTPIWKRQTPEVSNKQKLGPKKKNQPPFFLSKNPPPNKAHFFPACPGTHFHKKPPPPFKIKGPKRRRG

SEQ ID NO: 196442 - protein, 111 aa, Zea mays
  Clone ID: MRT4577_110740C.1.pep
MVKVVLINPVLDSQLVYVMQLPPAVDTANWQVAQGISLSRATIELSEVQTDHFDQSTRQCSIMTMRMIDDRLPLIGGPGRLHSAAIYYTSFSRQVSLEKRYSGCRCSSLFT

SEQ ID NO: 196443 - protein, 60 aa, Zea mays
  Clone ID: MRT4577_110741C.1.pep
SMIADVCGYPTFYSYTLQQAVASCNIRLSRLGDSTIARPIFGARIGPNHHGSSGATTLAK

SEQ ID NO: 196444 - protein, 86 aa, Zea mays
  Clone ID: MRT4577_110742C.1.pep
GKKIALRATFQIFSYKYTTGVWGPLFQKKKKEIPPALINLPGRAWQPLKCLGLLAWGGLPTHAVLPMGAYIYLISPRGGTKTQICQ

SEQ ID NO: 196445 - protein, 43 aa, Zea mays
  unsure (1)..(43): unsure at all Xaa locations
  Clone ID: MRT4577_110743C.1.pep
GTTTRPATVHXKYPLSHYNEKGHPTGGGRSYCSCQCQYHADGM

SEQ ID NO: 196446 - protein, 117 aa, Zea mays
  unsure (1)..(117): unsure at all Xaa locations
  Clone ID: MRT4577_110744C.1.pep
XKEPQAFFPVLRLTKIFTVGIFGQGFYLKSPKTKVLKEKKTFFLKNPPGFWPFPPQKNFFFYPKKTVFRGATPFSHPWAVGGGFFLPHPGGPPRGGPVPPPKGAGAPVCPHPFPEGT

SEQ ID NO: 196447 - protein, 93 aa, Zea mays
  unsure (1)..(93): unsure at all Xaa locations
  Clone ID: MRT4577_110745C.1.pep
RPSERRVRRIVSDRFVASTSEKSMGSLPVXVSDAANLLITDRSGGHRTSQTVLRSXLXSYKQEQLFSAVPLLWHKLIGRPQMHIAADSSSGHQ

SEQ ID NO: 196448 - protein, 80 aa, Zea mays
  unsure (1)..(80): unsure at all Xaa locations
  Clone ID: MRT4577_110746C.1.pep
XXXRXXGQGNYIEWDGNEDTLHTSNKRTTKASSGHANQAIDPPESWPSGPCGRRQLFFSXRGXXSTEQNXGHXHRPXXGG

SEQ ID NO: 196449 - protein, 88 aa, Zea mays
  Clone ID: MRT4577_110747C.1.pep
GVWGGLQFFPGISITVFFRTVYNGALWGGRFAAWVPAGIITPGGGALCRGRPLFFFFFFFFFCFFFFFFFFYQQRPALVIGFFTSYSK

SEQ ID NO: 196450 - protein, 144 aa, Zea mays
  Clone ID: MRT4577_110748C.1.pep
MVHGKLEVLLVSAKGLEDTDFLNNMDPFVILTCRTQEQKSSVANGAGSEPEWNETFVFTVSDDTPQLHLKIMDSDLTNDDFVGEATIPLEAVFQEGSLPPAVHPVVKEEKYCGEVKLALTFTPAAETRHRPDDNEEGPPYSSWS

SEQ ID NO: 196451 - protein, 74 aa, Zea mays
  Clone ID: MRT4577_110749C.1.pep
GVDVPALYGAFAACPQPQRQCLGASGLCRPWLGRPHNKQLCSMSSPSSLIDLYQSGGVYGDLATAGRSAAPASP

SEQ ID NO: 196452 - protein, 86 aa, Zea mays
  Clone ID: MRT4577_11074C.1.pep
LNYVSVNSKELQIAFVSLNSACQRTVKDLNTNHNTGYTIKHDHESAKWGSLIVDKKPVPGGNKSTTSTKDFLYTPHLMNMTTRKLK

SEQ ID NO: 196453 - protein, 91 aa, Zea mays
  unsure (1)..(91): unsure at all Xaa locations
  Clone ID: MRT4577_110750C.1.pep
LIHLLYHKSLKDTLNXSLHRHLFYQYSXYLQHKIKSNLHIYNLHLIYILIYNTQPQYINFHNPHPYIIPLSPKXTKFTINPPSPKIIQIIF

SEQ ID NO: 196454 - protein, 143 aa, Zea mays
  Clone ID: MRT4577_110751C.1.pep
MVHGKLEVLLVSAKGLEDTDFLNNMDPFVILTCRTQEQKSSVANGAGSEPEWNETFVFTVSDDTPQLHLKIMDSDLTNDDFVGEATIPLEAVFQEGSLPPAVHPVVKEEKYCGEVKLALTFTPAAETRRPDDNEEGPPYSSWS

SEQ ID NO: 196455 - protein, 69 aa, Zea mays
  Clone ID: MRT4577_110752C.1.pep
PRVRDPHAHRQHHQVQRQAQALAPHQARLLSGRRDASQRCLGRIRALQARKLLFKILLVLLKGSYQLCL

SEQ ID NO: 196456 - protein, 102 aa, Zea mays
  Clone ID: MRT4577_110753C.1.pep
SDWIHPTLEASVYKCTCQAVYAFAGQRLCRTLETVTFQQSTKKTAFTCQQPEQYIHMNNSKWQHLMLSYQSMCEEYVNHRPNHSWCVWFDKSKHPNYIQMRW

SEQ ID NO: 196457 - protein, 121 aa, Zea mays
  Clone ID: MRT4577_110754C.1.pep
LEVPEPYIAIAATGSEKKKTFTLIVISTDTEASTLTVFCYWIPIKRNRPACPSPTITIRRGGVATATLVLVLMLTVPRRRRVVPAVRRGRAVALVLGRGIIILTVRGGHSKAETCTCHSHT

SEQ ID NO: 196458 - protein, 108 aa, Zea mays
  Clone ID: MRT4577_110755C.1.pep
FKQFDLMCGLISQMHEIGGLMSLATMTKVMRRLCGANRWSDAIDAFHKMDRFGVAKDTKAMNVLLDTLCKERSVKRAIGAFQALKGTIHPDESSFNTLVHGWCKARML

SEQ ID NO: 196459 - protein, 56 aa, Zea mays
  unsure (1)..(56): unsure at all Xaa locations
  Clone ID: MRT4577_110756C.1.pep
MATDNSHIHIAVIXHVDSXXSTTTXHLIYKXGGIDKRVIERFEKEXXEMNKRSFKY

SEQ ID NO: 196460 - protein, 83 aa, Zea mays
  Clone ID: MRT4577_110757C.1.pep
HLPPRFKAEKMPCCSWKPFPRTTLNDPPPCVVVPERSPTAPGPALIMQMEPSRKPTSPPLPGKSWNLGRPMVQPFYLLLVFSR

SEQ ID NO: 196461 - protein, 112 aa, Zea mays
  unsure (1)..(112): unsure at all Xaa locations
  Clone ID: MRT4577_110758C.1.pep
WCLLGVPSSXLALRAPLLVVLVVGSRPVWLCARVVVPLVLRFGLSLCVVAVRPFLGPRVGVLFVLXPWFGLVPVVVGSACSXVPAFFFAVSARSPLXXVVFSPXVGARLGVG

SEQ ID NO: 196462 - protein, 329 aa, Zea mays
  Clone ID: MRT4577_110759C.1.pep
MNDTAVRAMIGDRFERRDEFLENVAEGVRISTGFSLGDLFPSSRLASLVGGTARRAAVNHRKMFKLMDYAIEKHEERRAAMTTDAEGVVKEDLVDVLLRIQKEGGLEVPLTMGMIKAVILDLFGAGSETSASTLQWAMSELVSNPRVMERAQAEVREKLQGKPTVTEDDLVDMRYMKLIIKETLRMHPVVPLLLPRECREPCRVMGYDVPKGTTVFVNVWAISRDPKHWEDAATFRPERFEAAGTVDFKGTDFEYTPFGAGRRMCPGMAFAQASMELVLAALLYHFDWKLPGGMLPSELDMAEEMGITARRKRDLYLHPVVVSVPPHVS

SEQ ID NO: 196463 - protein, 59 aa, Zea mays
  Clone ID: MRT4577_11075C.1.pep
VVCRSSLYFWRVLEDTKPKVTYLDIVVLKHKQFLHLRFQLVKVHFVDILLEQVLVDWLI

SEQ ID NO: 196464 - protein, 226 aa, Zea mays
  Clone ID: MRT4577_110760C.1.pep
AKQVLEHPWLQNAKKAPNVPLGDIVKSRLKQFSRMNRFKRRALRVIADHLSAEEVQDIKEMFKVMDTDNDGIVSYEELKSGIANFGSHLAESEVQMLIEAVDTNGRGALDYGEFLAVSLHLQRMANDEHLRRAFLFFDKDGNGFIEPEELQEALMEDGGADTMDVVNDILQEVDTDKDGKISYDEFVAMMKTGTDWRKASRHYSRGRFNSLSIKLIKDGSVKLGSE

SEQ ID NO: 196465 - protein, 126 aa, Zea mays
  unsure (1)..(126): unsure at all Xaa locations
  Clone ID: MRT4577_110761C.1.pep
SPSRSPPPGAFVPSISGCDGGEPDTENRIRRQGEREEMGLTFTKLCSPLFPKKDMRILMVGLHAVGKTTILYTLKLREIVSTIPTIRFNVETAEYKNIMFTLXDDAGQDKIRPLWRRDYQNTHCLI

SEQ ID NO: 196466 - protein, 79 aa, Zea mays
  Clone ID: MRT4577_110762C.1.pep
PFYPGGSFAPLGLPEAPEAFFGLKVKGLKNAPPPMFSMLGFFVQPLVPGKGPLKTLLAPIAAPVKKNVWAYPPNLVPGK

SEQ ID NO: 196467 - protein, 330 aa, Zea mays
  Clone ID: MRT4577_110763C.1.pep
HFGLSIFFKPGEKFSEIVGSPYYMAPEVLKRNYGPEIDIWSAGVILYILLCGVPPFWAETEQGVAQAILRGNIDFKREPWPNVSDNAKDLVRQMLQPDPKLRLTAKQVLEHPWLQNAKKAPNVPLGDIVKSRLKQFSRMNRFKRKALRVIADHLSAEEVEDIKDMFKVMDTDNDGIVSYEELKSGIAKFGSHLAESEVQMLIEAVDTNGRGALDYGEFLAVSLHLQRMANDEHLRRAFLFFDKDGNGFIEPEELQEALMEDGGADTMDVVNDILQEVDTDKDGKISYEEFVAMMKTGTDWRKASRHYSRGRFNSLSIKLIKDGSVKLGSE

SEQ ID NO: 196468 - protein, 91 aa, Zea mays
  Clone ID: MRT4577_110764C.1.pep
MLTEVFSSMEAEADFDVEDSRSNNELQELWPVGEIDPKRGRFPCCIVWTPLPEVSWLAPYIGHVGICQEDGSALDFAGSNLVSMDNFAYGS

SEQ ID NO: 196469 - protein, 142 aa, Zea mays
  unsure (1)..(142): unsure at all Xaa locations
  Clone ID: MRT4577_110765C.1.pep
RKSLICWIGDGYAGGPTMPDIVHEWLDLRAXIVDISKPRIXSCNSDTLPIYDPGIDDVGKKRCRRNLFFXTDGEKXVPEDDIIFVSVNNPTKTRGLGAGXAADLTYWESCARMIAHVSKSDKIAVXKXTVADKTAEVIENIL

SEQ ID NO: 196470 - protein, 65 aa, Zea mays
  Clone ID: MRT4577_110766C.1.pep
FQLMFCVFFFPPSFKNTLCRMFSFSRLPKYSVLKHLITQVIYMERFDNVSMGVCYLYLLLNLILY

SEQ ID NO: 196471 - protein, 79 aa, Zea mays
  unsure (1)..(79): unsure at all Xaa locations
  Clone ID: MRT4577_110767C.1.pep
MAMRCTSAALLVLALVATVVRAEDPYHFFEWNVTYGTNSIMGTPQXVILINDLFLGRNINCTFNNKIVINVFNMLEQLL

SEQ ID NO: 196472 - protein, 51 aa, Zea mays
  Clone ID: MRT4577_110768C.1.pep
HYTANLARLSTRREHAYIPVADLQLAGGRYAKMHLHCDPDNTYVKMEYKIL

SEQ ID NO: 196473 - protein, 76 aa, Zea mays
  Clone ID: MRT4577_110769C.1.pep
MGVYTFVCHNNCSEWTAKQHSGEIEASAATPYELHRHLVIAASATDSDYGVQASFFMVTPISDEFQVIVCAVGGGA

SEQ ID NO: 196474 - protein, 68 aa, Zea mays
  unsure (1)..(68): unsure at all Xaa locations
  Clone ID: MRT4577_11076C.1.pep
LVPRRGLHQMNPSLNKSNVQQLNLALTPPTPVDLLXYLYPLSSCARFLHERTLRLPSKDLFPLTLRPS

SEQ ID NO: 196475 - protein, 96 aa, Zea mays
  Clone ID: MRT4577_110770C.1.pep
KNHNFGPNSPLTKLKPQIGPQNAKKRPYTNTTQKISKQTRPRPKKTTGRPRQATTNQTRPETGTTLQTPYLPPNSSSSQGNRNTKFHPWAPSSQNP

SEQ ID NO: 196476 - protein, 146 aa, Zea mays
  unsure (1)..(146): unsure at all Xaa locations
  Clone ID: MRT4577_110771C.1.pep
SXXLHXVKGPQXRRXNRAHLXXXLQGGKGFXXSSXQRRYHHVVXPDPNSNLLGERWRQXYTXXCTKGPRXXSRIALXVXPCQPPVXGXGRKXXGXRARXXSXPAXVCASLFKAQVPPXXFXQGXXCEPXRGPAAPXIYXXFXEVQA

SEQ ID NO: 196477 - protein, 87 aa, Zea mays
  unsure (1)..(87): unsure at all Xaa locations
  Clone ID: MRT4577_110772C.1.pep
RGIRTIGWLVVRVHLLIEDAELXSVKDHLVTTDYMTYMFKYISVHGQWXHSDISLTVSNTLLFCEMPVNYFRIRNSEEIPWREAGAE

SEQ ID NO: 196478 - protein, 126 aa, Zea mays
  Clone ID: MRT4577_110773C.1.pep
KWPFLTVLICAENKTRISIVNTPKFQETIKRRLPTKPAHLIYCNFLRTKVRMHAPTLFLKSNPACNENSVWRTFLPRASAANRIKLIARAKSGSKKMVPKHFRIEICTVEVEEEDKHVVLSGLVPN

SEQ ID NO: 196479 - protein, 43 aa, Zea mays
  Clone ID: MRT4577_110774C.1.pep
PKTMGNIRNMTMIDSRTSTSASSQVKEHQEPSENHHAWLGRQQ

SEQ ID NO: 196480 - protein, 54 aa, Zea mays
  Clone ID: MRT4577_110775C.1.pep
RSSRHRRSCSSCQRGSTPTSSTTRRSSSRLCTARSGRLTRVAPRPLSSASRRQP

SEQ ID NO: 196481 - protein, 79 aa, Zea mays
  Clone ID: MRT4577_110776C.1.pep
RFLRIVGIEAKIIVNKKILFAPIQISPPRLYLVVLIARFFNIKKTTLLKFEYNYLIIEVYIYHLFGFFFPNSLGSIISL

SEQ ID NO: 196482 - protein, 482 aa, Zea mays
  unsure (1)..(482): unsure at all Xaa locations
  Clone ID: MRT4577_110777C.1.pep
PGDLFLVLASSSPIVAELTTEQVLKRDIPWEHYMSTKLISGTCLQLLRRYDHKPESQRAPLLEEDGPAYIRVFLNILRSISKEETVEYVLALIDEMLATNPKRAALFYDRSLSGEDIYEPFLRLLWKGNWFVQEKSCKILTVIISARPKLQNGTLPNGDASNSKSKLTSTHDVLRGLVDWLCSQLRNPTHPSCSIPTSIHCLSTLLREPYVRTLFVQADGIKLLIPLISPASTQQSIQLLYETCLCIWLXSFYDAAVDYLSTTRVMPRLVEVVKGSTKEKVVRVVVLSFRNLLAKGAFAAQMIDLGLPQMVQNLKAQAWTDEDLLDALNQLEVGLKENLKKLSSFDKYKQQVLLGHLDWSPMHKDPSFWRENINNFEENDFQXISIQLCGCDEIAPITWQILRVLMTIIDTSSDTTALAVACYDLSQFLQYHPSGRIVVADLKAKDRVMKLMNHENTEVRKNALICVQRLFLGAXYASFLQA

SEQ ID NO: 196483 - protein, 52 aa, Zea mays
  Clone ID: MRT4577_110778C.1.pep
FYPRGEKIWRMSSCYQVYVCIQQGGSIFFLDWSSWVWALYGCNDSAIRFRED

SEQ ID NO: 196484 - protein, 409 aa, Zea mays
  unsure (1)..(409): unsure at all Xaa locations
  Clone ID: MRT4577_110779C.1.pep
MDRAELTTEQVLKRDIPWEHYMSTKLISGTCLQLLRRYDHKPESQRAPLLEEDGPAYVRVFLNILWSISKEETVEYVLALIDEMLATNPKRAALFYDQSLSGEDIYEPFLRLLWKGNWFVQEKSCKILTAIISARPKLRNGTLPNGDASNSKSKLTSTHDVLXGLVNWLCSQLRNPTHPSCSIPTSIHCLSTSLREPYVRTLFVQADGIKLLIPLIXPAATQQSIQLLYETCLCIWLLSFYDAAVDYLSTTRVMPRLVEVVKGSTKEKVVRVVVLSFRNLLAKGAFAAQMIDLGLPQMVQNLKAQAWTDEDLLDALNQLEVGLKENLKKLSSFDKYKQQVLLGHLDWSPMHKDPSFWRENINNFEENDFQILRVLMKLMNHENTEVRKNALICVQRLFLGAKYASFLQA

SEQ ID NO: 196485 - protein, 104 aa, Zea mays
  Clone ID: MRT4577_11077C.1.pep
YHRRRLTHPAFTPPSPNKVPPFSDIHRGDYEISGHGLDSHHDTTHSLRACTLIEPRQVRHTQSATHTPQVHLGVLHRRCYNTRRAPLPRPSTPHATSPLSPNTP

SEQ ID NO: 196486 - protein, 283 aa, Zea mays
  unsure (1)..(283): unsure at all Xaa locations
  Clone ID: MRT4577_110780C.1.pep
ALVRVQARIRARRVRMSTEGQAVQKLLEARRTQMDILREAEEGWCDSQGTLEQVRVKLQKRQEGAIKRERAIAYAYSQQADGAAKCNPPKLTSNGLVNHSGMLLKHQNLDKGNGNWSWLERWMAARPWENRLMEEHNSSSPDFRSSXNCEDSFGVLGDFSEPNSVKVRKNNVSKRVCAKPPGPTHAHGHHQRLKAQSISSLSTELHNDESSASSSSCFASTPISFTLVASEKTEDSVRTRPNYMSMTESIKAKQKACSAQRTVALKQCDDRKAMSAELKVAQV

SEQ ID NO: 196487 - protein, 452 aa, Zea mays
  Clone ID: MRT4577_110781C.1.pep
MDRAELTTEQVLKRDIPWEHYMSTKLISGTCLQLLRRYDHKPESQRAPLLEEDGPAYIRVFLNILRSISKEETVEYVLALIDEMLATNPKRAALFYDQSLSGEDIYEPFLRLLWKGNWFVQEKSCKILTVIISARPKLQNGTLPNGDASNSKSKLTSTHDVLRGLVDWLCSQLRNPTHPSCSIPTSIHCLSTLLREPYVRTLFVQADGIKLLIPLISPASTQQSIQLLYETCLCIWLLSFYDAAVDYLSTTRVMPRLVEVVKGSTKEKVVRVVVLSFCNLLAKGAFAAQMIDLGLPQMVQNLKAQAWTDEDLLDALNQLEVGLKENLKKLSSFDKYKQQVLLGHLDWSPMHKDPSFWRENINNFEENDFQILRVLMTIIDTSSDTTALAVACYDLSQFLQYHPSGRIVVADLKAKDRVMKLMNHENTEVRKNALICVQRLFLGAKYASFLQA

SEQ ID NO: 196488 - protein, 56 aa, Zea mays
  Clone ID: MRT4577_110782C.1.pep
ARDPSKIPLPFSRLCLPGTTSAGLKELETACKNKLSILYGRIIFLENYLGKTRNGS

SEQ ID NO: 196489 - protein, 93 aa, Zea mays
  Clone ID: MRT4577_110783C.1.pep
KKGAPFRILKQRCLSRSKGVGISGKKSKMVCMNFMGHGSKNETNFFFPGVEKRIWFRGGNPPLYLFGNFFHLKKKIGCFSSANGRDFKFIFLG

SEQ ID NO: 196490 - protein, 66 aa, Zea mays
  Clone ID: MRT4577_110784C.1.pep
GSHRTDALRKRKRRKGPLLPLLAPTVVNLNRTASVFDLDKDKGTSCYRPARFVDTTSHCAQMVVAR

SEQ ID NO: 196491 - protein, 86 aa, Zea mays
  Clone ID: MRT4577_110785C.1.pep
IICDRREPGRGGLFEPEGLIRPDHRSVSGHRNGSSFLAGSALPGGDPVGQSRREDGVRPSDLGSFHSYFYGNQIVGGVLVARVLEL

SEQ ID NO: 196492 - protein, 52 aa, Zea mays
  Clone ID: MRT4577_110786C.1.pep
LFVPGFLVRLHTRFQTLNHLLHNPVHIPVSPLHCFLHSHIHIHSHSLSVGVG

SEQ ID NO: 196493 - protein, 96 aa, Zea mays
  unsure (1)..(96): unsure at all Xaa locations
  Clone ID: MRT4577_110787C.1.pep
RLEPPRLSSGTGNTYLGEXVNPPAQLRTATLTSQHITYLPPNSPDIYYXGYTSQKQSITGRVILNRPKXHGVFDDMRDAXPHASVRKNVSLIHTYH

SEQ ID NO: 196494 - protein, 94 aa, Zea mays
  unsure (1)..(94): unsure at all Xaa locations
  Clone ID: MRT4577_110788C.1.pep
MESLTFRASTAASPLKQPRLFPGRKRATYVRPTASAGEPDLSVRVNGLKMPNPFVIGSGPPGTNYTVLKRAFYEGWGXALIAKTVVLDAEKVST

SEQ ID NO: 196495 - protein, 58 aa, Zea mays
  Clone ID: MRT4577_110789C.1.pep
ENQARPTHSATNSLTKLTSLQIAALLGARRTYPRYYPGTYEPALPPSVVPRVLNQNLT

SEQ ID NO: 196496 - protein, 47 aa, Zea mays
  Clone ID: MRT4577_11078C.1.pep
VTLPFFLVGFGAITGCIFFDHSWEEGGLWSGVGLGINYYGGTWLGIF

SEQ ID NO: 196497 - protein, 57 aa, Zea mays
  Clone ID: MRT4577_110790C.1.pep
NIRTRITLLLLAGYLNKCSKEKRIGYCTYWSMRLGSHHMLVKQVKVVTVRYSSNNLY

SEQ ID NO: 196498 - protein, 108 aa, Zea mays
  Clone ID: MRT4577_110791C.1.pep
VPIAELVLPTGVANVPASQAVLWLNSRMLAVAPAGTCSRVSYLDAPPSPEGISSYLWSAAARLCICFQGRLSSCVRLWWFHGSIRPLRQPACPVALCKLWHLSGYVLS

SEQ ID NO: 196499 - protein, 76 aa, Zea mays
  Clone ID: MRT4577_110792C.1.pep
VLFGVLRSLALRRSAGNFGELVAPGEEEAACVVVKKYGGRGQPLPDVDALGGYVQGADPEGVIRVREDRASLTCAL

SEQ ID NO: 196500 - protein, 45 aa, Zea mays
  Clone ID: MRT4577_110793C.1.pep
NVLVSLLGGNWHFPLHFVWCAPKKFHGALLFLLKPVLCTFRVSKH

SEQ ID NO: 196501 - protein, 144 aa, Zea mays
  unsure (1)..(144): unsure at all Xaa locations
  Clone ID: MRT4577_110794C.1.pep
PTRPPTRPPTRPLVITRLGDCLWEEKNEVASAHSCYLVAELNIDSYSGSARMCLIGADHLRCPRTFTSPEAIQRTEVYEYAKVLGNSQYILLPFQPYKLIYAYXMLAEVGKISDSLKYCQASLKVLKSSGRAPELEAWKQLVIT

SEQ ID NO: 196502 - protein, 139 aa, Zea mays
  unsure (1)..(139): unsure at all Xaa locations
  Clone ID: MRT4577_110795C.1.pep
PPFSIFPFSSPLLPDLLPCFPRFSPFCSPPLTFLSPLPPRGRRXPRNKPRGKPPGGRTQPXQQGDPHPAPGGGQKKPPQTPPGPPQKPGKTGGKKRLPARVGGKPPPXGGPRDPPPKGTPQGRGGQKPPPRPPKGKPPG

SEQ ID NO: 196503 - protein, 43 aa, Zea mays
  unsure (1)..(43): unsure at all Xaa locations
  Clone ID: MRT4577_110796C.1.pep
LQDXRVKSLTEKQEINNQLKITRYSFSNRCSLSWDGHGCGQEM

SEQ ID NO: 196504 - protein, 81 aa, Zea mays
  Clone ID: MRT4577_110797C.1.pep
CQCPVSLVVWHYVLSSFARREVFAINKQCRSQQLKCRRENGRLAAFIASAKLSSTYCVGMSEVYAPRSPLDPPIVVPREIN

SEQ ID NO: 196505 - protein, 99 aa, Zea mays
  Clone ID: MRT4577_110798C.1.pep
LNTSRSGFSEDIHIPGVAKIDIWEASHLHLIPENHVQQIVTHQSQISIPFYCYRNPTIQHTPNKTFRTMYLNLSKDTRDTTTLNPPTSNYSNDPYNYTT

SEQ ID NO: 196506 - protein, 176 aa, Zea mays
  Clone ID: MRT4577_110799C.1.pep
CVCCCCRACVSPDGPGPRLPPPAAAFSFVGDRMQRVVVMRHGDRLDHSEPMWPANKPRPWDPPLDDAGLLRAWTVGKCIRAAAAKQGWALHRVLVSPFLRCRQTAARAVAALCAVPDDDALLAVGDPANVSIEYGLSEMMNTQAMGITVSKLAPNVSKWFPDLPELEADFPAGTID

SEQ ID NO: 196507 - protein, 107 aa, Zea mays
  unsure (1)..(107): unsure at all Xaa locations
  Clone ID: MRT4577_11079C.1.pep
MSPHTETKPIPVFKPAVNDXNGLYYTPEYETKDTDIFTAFPLTTHIQTPPEESXAAVDCQSSTSTCTTVCTDTLTRLDRYKRPCYHIEPVSRDPYQYICYVAYSLYL

SEQ ID NO: 196508 - protein, 358 aa, Zea mays
  unsure (1)..(358): unsure at all Xaa locations
  Clone ID: MRT4577_1107C.1.pep
MQPDANAPSHRLARVAAHLNPQRPQMEEGASALRPVVCRAKGGAPGFKVAILGAAGGIGQPLSLLMKMNPLVSVLHLYDVVNTPGVTADVSHMDTSAVVRGFLGAQQLDAALTGMDLVIIPAGLPRKPGMTRDDLFNKNAGIVRTLCEGVARCCPNAIVNLISNPVNSTVPIAAEVFKKAGTYDPKRLLGVTTLDVARANTFVAEVLGVDPRDVSVPVVGGHAGITILPLLSQVTPPSSFTQDETRYLTDRIQNGGTEVVEAKAGXGSATLSMAFAASKFADACLRAMRGEAGIVECSYVASEVTELPFFATKVRLGRGGAEEILPLGPLNDFERAGLEAAKKELGESIQKGIAFMSK

SEQ ID NO: 196509 - protein, 54 aa, Zea mays
  Clone ID: MRT4577_110800C.1.pep
FLLILDSAAFRKLSVQQPSFFVEHFRSVVPAKKCRIKKYRGLSAHFIKESPILL

SEQ ID NO: 196510 - protein, 171 aa, Zea mays
  unsure (1)..(171): unsure at all Xaa locations
  Clone ID: MRT4577_110801C.1.pep
KLVTESSISMYQVSIEYGLSEMMNTPSMGITVSKLAPNVSKWFPDLPELEADFPAGTIDHSAEPIYPELPKWEESIMEARSRYASIIKAXLADKYPHENLLLVTHGEGVGASISYFEMGLEIYDVEYCAYSXLERQVTAEPGDEHGGFTFTADSFKVIXKSGSTGIRYAPV

SEQ ID NO: 196511 - protein, 118 aa, Zea mays
  unsure (1)..(118): unsure at all Xaa locations
  Clone ID: MRT4577_110802C.1.pep
TLRSGSYAIICQXNGLXPIVXPEILXDGLELIVAYYXRRLAAAXKALTDHVLLEVPSEPNMXDPGSDXPKGTPEXIADTPPXLQRPXPAAVPAVVFLSGGQSEEGATRNLNAMNKLST

SEQ ID NO: 196512 - protein, 199 aa, Zea mays
  unsure (1)..(199): unsure at all Xaa locations
  Clone ID: MRT4577_110803C.1.pep
SRLAGSRIPSLLRRRRLLSAAAAVGRGPARCYRQIKNKPYPKTRDCRGAPDPKIRIYDGAMNRKGVDVFPYWXHLGGGEKDYVIXEALEAARMACNKYMTKPAGKDAFHLRXRDHPFHVLQINKMLPXAGADRVHTGTRGAFGKPQGTWAMVDIGQELLSGLRKDNNAAHAREALRRSKSKFXGAQKIIESTEGGCTTI

SEQ ID NO: 196513 - protein, 64 aa, Zea mays
  Clone ID: MRT4577_110804C.1.pep
SPCFESCWNYWQGWFAFPWTAALGHPKPFFFILLRVVLGALLAFQQHFQQVFKLFGRGPSERMF

SEQ ID NO: 196514 - protein, 183 aa, Zea mays
  unsure (1)..(183): unsure at all Xaa locations
  Clone ID: MRT4577_110805C.1.pep
MSPPPAVATGGSGEPTVPAWLRGLPRAPEYRPTESEFADPIAFLSRVEREAAAYGICKVIPPYPRPSRRFVFAHLNRSLVSSSEAANPTTASGSSATAPSLPESAAVFTTRHQELGTPRRGRPPPQVLKQVWQSGERYTLDQFEAKSRAFSKIHLAGLREPTPLEVESLFXWKASADRPIYIE

SEQ ID NO: 196515 - protein, 50 aa, Zea mays
  Clone ID: MRT4577_110806C.1.pep
HIQQSSMSSMLSKKPMQGCHTKESIFGIVNSKMKISKIKHLMCFSILGLW

SEQ ID NO: 196516 - protein, 104 aa, Zea mays
  Clone ID: MRT4577_110807C.1.pep
YSQPPGPPHRHPLPTGMPTSASGDAYYTPRGRGPGLYASLSTRGMLLKSPGRTGHHRAEGCNCLKNARPLVSGLNGANRRSIRWTGRLTIPYKLQPLPTAHGGT

SEQ ID NO: 196517 - protein, 47 aa, Zea mays
  Clone ID: MRT4577_110808C.1.pep
PLDNRNRHIGQKSPSNHNQYKVHNANMQFHVIGINIKAQSLWHPDLF

SEQ ID NO: 196518 - protein, 151 aa, Zea mays
  Clone ID: MRT4577_110809C.1.pep
GSGSNKETLRLHAPVPLLLPRETTEDTELLGYRVPARTRVLVNAWAIARDPAAWERADEFLPERFADDDMKATDYLLGHHFRFVPFGAGRRGCPGVGFAAPAMELALASLLYHFDWELPAGGPSKVEMDELKGLSVRLKTTLHLTAKPWSP

SEQ ID NO: 196519 - protein, 182 aa, Zea mays
  Clone ID: MRT4577_11080C.1.pep
MFYWSGNFIAFYNRRGYKIVMTTSLSSDVPVGYFSWAEYDIMAPVPPKTEEALAAAFISNCGARNFRLQALEMLENLDVKIDSYGSCHRNRDGKVDKVDTLKRYRFSLAFENSNEEDYVTEKFFQSLVAGSIPVVVGAPNIQEFSPGEGAILHIKELDDVASVAKTMKNIASNPDAFNQSLR

SEQ ID NO: 196520 - protein, 39 aa, Zea mays
  Clone ID: MRT4577_110810C.1.pep
ACGPYSDDKSFLPTRWGAETLFLGWNLVIRYTPRLGDDR

SEQ ID NO: 196521 - protein, 78 aa, Zea mays
  Clone ID: MRT4577_110811C.1.pep
CVASWLCLLVLLSSRRPFVVALVVFLFVAFYSSLPVFSPLLLLFCCKRHLPFKTSPLPLGRRLGLSTGRGRSPRFTVR

SEQ ID NO: 196522 - protein, 66 aa, Zea mays
  Clone ID: MRT4577_110812C.1.pep
YVHASHPRVRPRGQFFGLSATSSHQRACVWREEYKPRYAARRHDGDLQVCTTTTFLSCTRTICLER

SEQ ID NO: 196523 - protein, 264 aa, Zea mays
  unsure (1)..(264): unsure at all Xaa locations
  Clone ID: MRT4577_110813C.1.pep
RGIYFXNYQYPPGTLXVSPGMAESPSIGAIGTAVSGAPVGIKRGAFMGSCKHRVWEAIRASSAAPYYLDDFSVDANRWQDGAIVANNPTIFAIREAQLLWPDARIDCLVSIGCGSVPTKSRRGGWRYLDTGQVLIESACSVERVEETLDTLIPMLPEMQYFRFNPVDERCGMELDETDPAIWLKLEAATDEYIQKNFLAFKNLCELLVPRYQEEEKSSDIYKXPFIFKADIIKSRVXESNPTLGWRRVVLLVEASFSSEFGKKI

SEQ ID NO: 196524 - protein, 1053 aa, Zea mays
  unsure (1)..(1053): unsure at all Xaa locations
  Clone ID: MRT4577_110814C.1.pep
NSARGFLPEILPLHNLRHVTLANIRIEAVESLKSVTVQIETENSSYFXGTRHKLGAFFSLVFRFSSCHHPLLASALVKIMEDRSNHIAISKEENAVRQLISMISSDNRHVVEQACLAISSLASDISSAMQLIKCDIMKPIEAVLKSSDEEELVSVLQVVVTLTFVSDHVAQKMLTKDVLKSLKALCGHKNSEVQRLSLFAVGNLAFCLETRRTLMHSESLRDLLIRLTISQERRVSAAARALAILGENENLRRAIRGRPVAKKGLRILSMDGGGMKGLATVQMLKQIEQGTGKRIHEMFDLICGTSTGGMLAMALGIKQMTLDQCEEIYTKLGKLVFAEPIPKDEAATWKEKLDQLFKSSSQSFRVVVHGSKHSADQFERLLKEMCADEDGDLLIESAVKGIPKVFAVSTLVSVMPAQPYIFRNYQYPPGTLEVSPGMAESPSISAIGTAVSGAPVGIKRGAFMGSCKHRVWEAIRASSAAPYYLDDFSVDANRWQDGAIVANNPTIFAIREAQLLWPDTRIDCLVSIGCGSVPTKSRRGGWRYLDTGQXVESHCCVCKTKHXACSTLFHFLFKKKKLVFNREDERCGMELDETDPAIWLKLEAATDEYIQKNFLAVKNLCELLVPRYQEEEKPSDIYKXPFIFKADIVKSRFXESNPILGWRRVVLLVEASFSPDFGKKINHARSLESFCSQNGIRLALMNSTSGFGKPATALPTPITSPLFTGSFPSSPLLYSPEGTQRISRIDLVPPLSLDGHPTTKSSPPTSPLKSRQPSAHVRSLYDKLQNMPQVGVIHLALQNDSTGSVLSWQNDVFVVAEPGELADRFLQSVKTILSTLLRGCNRKGAYSLSKISCLSELVAEWPSFEIGGIHHRYIGRQTQVMEDISDLAXYMFRRTVPAVHMAPEDVRWMVGAWRERIIVCSGKYGLAHGLVKAFMDCGAKAVISSSIEPPDSQTIVYHGMDVNGSLENGKFVIGDEEADESEPEPVSPVSDWEDSDVEKGGNHDMDDEEYLAQFMCLMYDKLFREGVTVDTALQQALRSHPKLKYSCHLPHVL

SEQ ID NO: 196525 - protein, 63 aa, Zea mays
  Clone ID: MRT4577_110815C.1.pep
DTPFLGGGREVFYNATKQRSSFRVSVERLALNLSIVVWIGVQGNLGDALSQGILIFFFIGYIT

SEQ ID NO: 196526 - protein, 60 aa, Zea mays
  Clone ID: MRT4577_110816C.1.pep
HSDPNKQKAPGLLLSSLRQAAASQRRTKQHARQQTAELTSLVAGTGRDEEAGKKGQTNER

SEQ ID NO: 196527 - protein, 219 aa, Zea mays
  Clone ID: MRT4577_110817C.1.pep
MEDSAPSSAAPDPPLSPPPSTPPHPHPHPPEEEGGCWVLVPASEVEGAHAPKVIHWDDLQQELARLWSLSAALQPAEDRKAHLTARLESALQVRQAFLEQDNELAEMRQRLQERTDRLGDLKTRAKKLSEDVVVRREQLCVKIRTLSGASKALEAARSNLKEANELLSGENGCGRLKDLEQQLRMRQQYMVAQVAQIYPVRPLDEQISDHKTWIYFPHN

SEQ ID NO: 196528 - protein, 86 aa, Zea mays
  Clone ID: MRT4577_110818C.1.pep
PPSDHRRCREPGATPTGRASSWHRQPRRRPMSLGAWERLRVAGEPNDQASGWPQHLDSEAAAGLWGQWTLRDGAESAHAYLCGGPP

SEQ ID NO: 196529 - protein, 93 aa, Zea mays
  Clone ID: MRT4577_110819C.1.pep
GGAPAAAATLGLAARCARHQGRWSSGTRHGSFVDGVGVVFVRTGDGLFTIDLMSRRVTKVFKDTFFSGIFPYMSFHTPALEVASTGEGPSSGT

SEQ ID NO: 196530 - protein, 251 aa, Zea mays
  Clone ID: MRT4577_11081C.1.pep
MAAGRERDRELLLPVVGGEHVAGNEDDSDPTTPVIAGPPPPTTSARVLHLHHHPTGIEAFSRVIRSWAWKKFMSGWCATLVHMNTGLGFVTSITFIFLVGVFMSSWLGASLLGLGEFFIKRMPLVRHIYSASKQISAAISPDQSSRAFKEVVIIRHPRIGEYALGFITSTVALRGAGVRGDQDLACVYVPTNNLYLGDIFLMSRADVIVPDLSVREAIEIILSGGMSVPKIISAVEGAVGLGDYDRAVKDS

SEQ ID NO: 196531 - protein, 90 aa, Zea mays
  Clone ID: MRT4577_110820C.1.pep
KAANWWPGGRLELRGASGPADGSSSMSSAAPLLGDEAGGGEPALWTPPPPYSWVGRVVDAADARAQYGIAAPLVLTSMVYYCILLLSVLF

SEQ ID NO: 196532 - protein, 97 aa, Zea mays
  Clone ID: MRT4577_110821C.1.pep
DQTVDRMLGLDCIGEALTEIQERYFRLCSWLTFLRHHLRTPPSGENLVTDVARSANGYIIHNSLPSSLGQSVNRDVEDHTWLNIRSKTEWMIMATWE

SEQ ID NO: 196533 - protein, 135 aa, Zea mays
  Clone ID: MRT4577_110822C.1.pep
MEKARRPQVPAFGEWNYYYHYDEPEAAWYATPEPQACSDVWFKYSPPPRKPTPTPKKQQARRRRPAGCDNVSGERQHARPSLDAAAAAKGGASRRVVRPVDADLYQVPPPEFTPNRRPTKQSRSLWMMGCLGCVA

SEQ ID NO: 196534 - protein, 102 aa, Zea mays
  Clone ID: MRT4577_110823C.1.pep
EERRAPEELESVGVVGVDEGEPRHHALGQTGLGVAAVAPNVEEGRRVLVYPVMLALLADEREHADLGVRRGVVVASTHTAGGALDLHVSQLALARPDEAFPG

SEQ ID NO: 196535 - protein, 116 aa, Zea mays
  Clone ID: MRT4577_110824C.1.pep
KWSAGGGLLHLRVFREDDSLESHSLGFGQFSVSGVFVIGRSIGGDKVDGDGGTGTSKLLYMTILRCSDVGCVPVLPGVFFRYARTYVLKRPTGRSLNETNTIWLLRLTNRLMPSQD

SEQ ID NO: 196536 - protein, 40 aa, Zea mays
  Clone ID: MRT4577_110825C.1.pep
GHQLLFRAEGNCDVGYLPKAGGGRTLLKGSGNTRDHYSDA

SEQ ID NO: 196537 - protein, 101 aa, Zea mays
  unsure (1)..(101): unsure at all Xaa locations
  Clone ID: MRT4577_110826C.1.pep
KSTSVDKVFFCINRKFDLMNDKCALVHWYVGEGMEKGKFFEAGEDLSALEKDSMEVVVEAXSDDVYEERESDMRALICLAVEQGGVLKKLCLFIGKDGVFF

SEQ ID NO: 196538 - protein, 62 aa, Zea mays
  Clone ID: MRT4577_110827C.1.pep
FGFKLPMLILAKGLSLAIKILVVAQHFLGKKKFTILPFLFWNVTSWGNSPKSNWQDLAGQGC

SEQ ID NO: 196539 - protein, 88 aa, Zea mays
  unsure (1)..(88): unsure at all Xaa locations
  Clone ID: MRT4577_110828C.1.pep
PTHSCRGRGRPQAAIGHIMDVAETLILRLLEDADKRDQVQREHIYQINELCERTMAAXSLPLRADGYYTFDRLNSQLSXDPQISQAAG

SEQ ID NO: 196540 - protein, 141 aa, Zea mays
  Clone ID: MRT4577_110829C.1.pep
MVNLVEAQKPLLHFLVRRAGLRQHVVDVDGAGTVMTFWVPKDKVPKEKGTVQDITGAGPATAEAAASKVPAAPAAAKEGSSSSSRPAVVLVHGFAAEGIVTWQFQVGVLAKQYDVYVPDLLFFGGSTTPSTDRSPGFQAEC

SEQ ID NO: 196541 - protein, 111 aa, Zea mays
  unsure (1)..(111): unsure at all Xaa locations
  Clone ID: MRT4577_11082C.1.pep
FYYISNNTSYVAHPTSTHGGHDLFRMGLPKETALALDSQPLNYPNHTDTQLNLLVTHAHYDNYHHAIAALIHASYAHPTNLEVLFALPVNHTNXSEHGEALRHLYRSLDNQ

SEQ ID NO: 196542 - protein, 58 aa, Zea mays
  Clone ID: MRT4577_110830C.1.pep
EKGHLAVGEVLDPLDIDLPGSHLCAHYKQPATSQGRLPSSNLLEQEPGDARLVVVKVW

SEQ ID NO: 196543 - protein, 83 aa, Zea mays
  unsure (1)..(83): unsure at all Xaa locations
  Clone ID: MRT4577_110831C.1.pep
MALEAWNNYLNVAVVKGTPTQAAAALGVFLLLAFRLARRPGGCTATSPRWNRKRLPETXPRKLPILGHPHLYHSRPHVFFRDL

SEQ ID NO: 196544 - protein, 212 aa, Zea mays
  Clone ID: MRT4577_110832C.1.pep
EEGKKALSAAAKKFKVPSSENLGEIAEHCNERKWAGRRAEEAGQKLYMWALIKNKETVVCNARVLGLGPRFMSVYVPKLAMERRIYYAEVEGLSVEWLEVTGTLVLDTCRNKPAQRRGTQMKRRPIEEVAVVVNPSELSEEDEESGATEAGGCTAKSVLLSGDAVKAQTAPAVLPLVIHYLSDIPVVLHAIGGEDCAVDIGVRLYMASYFKL

SEQ ID NO: 196545 - protein, 130 aa, Zea mays
  Clone ID: MRT4577_110833C.1.pep
MVKGPGLYTEIGKKARDLLYKDHNSDQKFSITTFSPAGVAITSTGTKKGDLLLGDVAFQSRRKNITTDLKVCTDSTFLITATVDEAAPGLRSIFSFKVPDQNSGKVELQYLHEYAGISTSMGLTQNPTVN

SEQ ID NO: 196546 - protein, 110 aa, Zea mays
  unsure (1)..(110): unsure at all Xaa locations
  Clone ID: MRT4577_110834C.1.pep
CLSHVEDGRAFPFSTAGVIYTWVTGVSLIVAAICYAWMLPSKGDGQAAVLVVNMRRNXXAXXXQAAWLLYHVGVDASALLFTDEVDMDGLIMDQRVSLLVVGQDVLKSKA

SEQ ID NO: 196547 - protein, 44 aa, Zea mays
  Clone ID: MRT4577_110835C.1.pep
RIPQGQSPQTLQTKLKKNHRFSDLEVFIFSREIILFSKRKMRFP

SEQ ID NO: 196548 - protein, 88 aa, Zea mays
  Clone ID: MRT4577_110836C.1.pep
KFIPVFFGQGVPQHNPSRVLGQKGVGDPVKFSTKKGPKTRPNFKGGLFGKPRGKPSLVGFFPKGGGGNVSCPPFRGSVFRPTPAPGAF

SEQ ID NO: 196549 - protein, 244 aa, Zea mays
  unsure (1)..(244): unsure at all Xaa locations
  Clone ID: MRT4577_110837C.1.pep
MSSEAAKVVVPESVLLKRKREELWAAEKKTKAVEEKKKSSENVKVIYARAKQYAEEYDAQDKELVQLKREARMKGGFYVSPEAKLLFVVRIRGINAMHPKTKKILQLLRLRQIFNGVFLKVNKATINMLRRVEPYVAYGYPNLKSVRELIYKRGYGKLNKQRIPLTNNKVIEEGLGKHNIICIEDLVHEILTVGPHFKEANNFLWPFKLKAPLGGLKKKRXHYVEGGDAGNRENTXHQLVRRMN

SEQ ID NO: 196550 - protein, 68 aa, Zea mays
  Clone ID: MRT4577_110838C.1.pep
RSTQHVRNPKQGYPSSLEFGLQRESIFSIRSLHDSPPMGLISYGDILLKAQKLHLLAGMHNIMLIMTG

SEQ ID NO: 196551 - protein, 40 aa, Zea mays
  Clone ID: MRT4577_110839C.1.pep
CSVIALSVDTCVSRHVDLCTQNLGCAFVSLMIYHCIIGAC

SEQ ID NO: 196552 - protein, 287 aa, Zea mays
  unsure (1)..(287): unsure at all Xaa locations
  Clone ID: MRT4577_11083C.1.pep
MAAGRERDREMLLPVVGGEHVAGDEDDSDPTTPVIAGPLPPTTSARVLHLHHHPTGIEAFSRVIRSWAWKKFMSGXRNSRTYEYCVILLPIAITFYTTWWFIRFVDGFFSPIYVHLGIHLFGLGFVTSITFIFLVGVFMSSWLGASLLGLGEFFIKRMPLVRHIYSASKQISAAISPDQSSRAFKEVVIIRHPRIGEYALGFITSTVALRGAGVRGDQDLACVYVPTNNLYLGDIFLMSRADVIVPDLSVREAIEIILSGGMSVPKIISAVEGAVGLGDHGRAVKDS

SEQ ID NO: 196553 - protein, 86 aa, Zea mays
  Clone ID: MRT4577_110840C.1.pep
IDPTYMIRAVPANATDNLYCTLLAHSAIHGVMAGFTGFVPGPVNGTYSYIPLEDVAVAKNPVDVNDHKWAWVRSVTNQPDFLKSQA

SEQ ID NO: 196554 - protein, 131 aa, Zea mays
  unsure (1)..(131): unsure at all Xaa locations
  Clone ID: MRT4577_110841C.1.pep
LPNVRLSIGLADPSFHAARSSAACTTRPDVPPGRSEEGPRARRPEGTVGPMDRWAGGAHPPPHPGGWQXXCKYKKKKNPPXGDPSXDEVTXIIYXPARDYRRDLIRTAAVNWDRVLLVGGGGAIAPRPPFH

SEQ ID NO: 196555 - protein, 91 aa, Zea mays
  unsure (1)..(91): unsure at all Xaa locations
  Clone ID: MRT4577_110842C.1.pep
PPHPQXEPKKSPGRHEEEGQPQRAIKSEQTSPGWPPPREQAPGRKTKTPPQVLRRLSKPTQSQSPPRGGSTGTPVLEKKRMKTKVVQNFRF

SEQ ID NO: 196556 - protein, 145 aa, Zea mays
  unsure (1)..(145): unsure at all Xaa locations
  Clone ID: MRT4577_110843C.1.pep
AFAXKTDVYGFGILLLELITGPKTLSNGHGQSQKGMILDWVRELKEDKRPDKLVDRDLRDSFDILELECSVDVIIQCTQTNPMLRPKMSEILHALEANVTLAETSVELNREPLPYGVPRSFSVRHEDPHDSSSFIIEPIELSGPR

SEQ ID NO: 196557 - protein, 137 aa, Zea mays
  Clone ID: MRT4577_110844C.1.pep
RWGKWVRQLDSFKLIDGVTQEQIKVWLGSNKSIQQKVVSALHDRALGCQIYRRVKSTFSWPGREEQIKAYVQSCYHTVLGKSPFEVLDVADVAASQNALAACSNSDETPADRQKGAQMWVIGCVLETSPFTVSPQWL

SEQ ID NO: 196558 - protein, 110 aa, Zea mays
  Clone ID: MRT4577_110845C.1.pep
MSAMVASSLNPEAPLFIPAALQQVEDFSPLWWDLVKSTAWFRDHWYHQHQQLDDMADSLIAFEAEDAIAVEASQPQPQPPAALNIDGVLKALSLASPSPKGGDALRGFSE

SEQ ID NO: 196559 - protein, 58 aa, Zea mays
  Clone ID: MRT4577_110846C.1.pep
NSYEGQEGPSDVVKDQSECGVHLFQLIFDTSFFLLRTYLSLCLVVGYGFLPYLITVDY

SEQ ID NO: 196560 - protein, 61 aa, Zea mays
  Clone ID: MRT4577_110847C.1.pep
RKIVMHVACNLHVIASFYNLMTLSSAVVVTAPGDPAPIVWVTDLRYKSLLKCLLRTRQTSA

SEQ ID NO: 196561 - protein, 108 aa, Zea mays
  Clone ID: MRT4577_110848C.1.pep
AWWWWVDPIITMGRCVYAIHRFYVVFVKKKKTVFFGLQSPSAFLGAVFGLMNVRLPPCMLVSPYAFPVPIYLLGPDNLILCYIGTKPGLFFKIPPIVYSCWRVRIERF

SEQ ID NO: 196562 - protein, 54 aa, Zea mays
  Clone ID: MRT4577_110849C.1.pep
PHRFITSDQRVPYRPTQCTRLSSRYSSRDNPPLDMWSLIRMPDTDIINAPCVPF

SEQ ID NO: 196563 - protein, 178 aa, Zea mays
  Clone ID: MRT4577_11084C.1.pep
PCPGILEEAMLLFQRMPNKDMVSWNTMIAGYAQDGQMHKAIGIFRRMNRRNTVSWNSVISGFVQNDRFVDALHHFMLMRRGTNRADWSTYASCLRACANLAVLHVGRQLHNLLVRSGHINDSFAGNALISTYAKCGRILEAKQIFDEMVYKDIVSWNALIDGYASNGQRTEAIAVFRE

SEQ ID NO: 196564 - protein, 257 aa, Zea mays
  unsure (1)..(257): unsure at all Xaa locations
  Clone ID: MRT4577_110850C.1.pep
MNTGKCLEDGKRKGSGEDSSSLRSLGETSALQREVSMECADEKAGDARAKREDYVHVRAKRGQATNSHSLAERVXLPLKQHFSLSDIVNAPIEMPQFCCLRXCLSELQFRREKINERMKLLQDLVPGCNKITGKAMMLDEIINYVQSLQRQIEFLSMKLSAIGPGLNCDLDLQDILCTQDASSAFPGYNLQTSNVHINLYRASEEGFSHRNRIIPSPANVHVTRNAQLSAFPQRGVIWNEELCSIASDRNADSMKVE

SEQ ID NO: 196565 - protein, 88 aa, Zea mays
  Clone ID: MRT4577_110851C.1.pep
PHVRSSLIPSCDRSPERGLNFGDGGRNTQTQRSPPQRGHLYLKLLVKLYHLLGRMPNSIFTSAILNRTLMTKTNCPTMLMRTLCQILA

SEQ ID NO: 196566 - protein, 287 aa, Zea mays
  Clone ID: MRT4577_110852C.1.pep
MMYSPPRTDPDREEEQCFSIGSNLLASLDHYHTMDFDEPVVSPMTNAGMQEGVQLYSSTGDAQLNRNMNTGKCLEDGKRKGSGEDSSSLRSLGKRKGSGEDSSSLRSLGETSALQREVSMECADEKAGDARAKREDYVHVRAKRGQATNSHSLAERFRREKINERMKLLQDLVPGCNKITGKAMMLDEIINYVQSLQRQIEFLSMKLSAIGPGLNCDLDLQDILCTQDASSAFPGYNLQTSNVHINLYRASEEGFSHRNRIIPSPANVHVTRNAQLSAYPQVFIRRP

SEQ ID NO: 196567 - protein, 68 aa, Zea mays
  Clone ID: MRT4577_110853C.1.pep
SVSAFVRPAGSERVSPPPTGMKGSPPFRSRLKNTPLSLCVGVPLLFYRSGKAGASKLGARRPKLFSFP

SEQ ID NO: 196568 - protein, 51 aa, Zea mays
  Clone ID: MRT4577_110854C.1.pep
SVKLIQIDHHRSYFFIVIKLLNFASTYFDQRSYLYPIQQVNINIGGIRPTQ

SEQ ID NO: 196569 - protein, 152 aa, Zea mays
  Clone ID: MRT4577_110855C.1.pep
ASTSCSSAVSADARASAAAGSATATAASAGAGCTRRPFLAALAQLLHLPALAQWLCLTLPPYWPAALGVRCQPTARRKAKRRRRAGVGGWVGGGGRLSSARTLLFGVAAGWQTRSSCCCFGFPSPRFANARVGKEKPRRGRGRLWSSASCRI

SEQ ID NO: 196570 - protein, 118 aa, Zea mays
  Clone ID: MRT4577_110856C.1.pep
KSKRRPSWSAQHYKSRIRLVNLDKTKTNTPKYRLQVRFTNKDITVQIISDNIQCDMAKAYAYSYELPRYALEDGLTNYPSIYWTGLLLYRRVLKIRLLYYEYEGIVDVTAEDSSGEPA

SEQ ID NO: 196571 - protein, 69 aa, Zea mays
  Clone ID: MRT4577_110857C.1.pep
ISPQGIYKMVARLVECFPFFGVIWCSWWPGSEGPWGAASIVFLERHMLFFLSRVFNEVVGAQERCGYKA

SEQ ID NO: 196572 - protein, 180 aa, Zea mays
  unsure (1)..(180): unsure at all Xaa locations
  Clone ID: MRT4577_110858C.1.pep
MAHHRRAPLLPIILLLLLATTTEPAAPGAASHSEPTLPVPPVQAAAAVPPSAALASTPPPVSPSAAALAASYSLEQLMRASAEVLGRGSVGTTYKAVLDGRLVVIVKRLDAAKIGPAALEAEAFEQNMDAVGRLRHPNLVPLRAFFQAKEERLLVYDYQANGSLYSLIHXSRSSRAKPLH

SEQ ID NO: 196573 - protein, 81 aa, Zea mays
  Clone ID: MRT4577_110859C.1.pep
ELSIFQSAQSGTCVPSSGSRRIFAFTGLVQDPQPAVELSSRWPIVGGPKGYSPLVSARKRSGFFSLRIPVKGNSLKVPFSQ

SEQ ID NO: 196574 - protein, 46 aa, Zea mays
  Clone ID: MRT4577_11085C.1.pep
PPPHEWIKFHTENNYHYNKHNSLPSQCPHTAARASDRLAVSDSARQ

SEQ ID NO: 196575 - protein, 72 aa, Zea mays
  Clone ID: MRT4577_110860C.1.pep
ALEGHVQDTRNEIAADRHWLAIIDHKNDVLQHDVWNIIHNVLDDWDRTSQFVLLPMHYCSDTSIKTQYSNKS

SEQ ID NO: 196576 - protein, 701 aa, Zea mays
  Clone ID: MRT4577_110861C.1.pep
MAHHRRAPLLPILLLLLLLATTTEPAAPGAASHSEPTLPVPPVQAAAVPPAAALASTPPPVSPSAAALAAFLAKADPASRLRLPSPAASPCSRPGVTCTATAHIIRLVLESAGLNGTFPPGTLSRLAELRVLSLKSNALHGPVPDLSPLANLKALFLAGNRFSGPFPPSLASLRRLRSIDLSGNRLSGALPPGIEAAFPHLTLFRLDANHFSGTLPPWNQSSLKVLNVSYNNFSGPVPVTPVISQVGAAAFAGNPELCGEVVRRECRGSHLLFFHGGGANGTAAPPVQSAAASDSGPQRENLSVPDSSVPNAKRARRRMTKLAVAVAAGSVLAALLVFAMIAMKRSNKRRRPSTASYESPNPKKSAPASEVSRDNADMGYVECVPDEETAAIMVPEEKARRLERSGCLTFCAGEAASYSLEQLMRASAEVLGRGSVGTTYKAVLDGRLVVIVKRLDAAKIGPAALEAEAFEQNMDAVGRLRHPNLVPLRAFFQAKEERLLVYDYQPNGSLYSLIHGSRSSRAKPLHWTSCLKIAEDVAQGLAYIHQASRLVHGNIKSSNVLLGSDFEACLTDNCLSFLLESSEVKDDAAYRAPENMKSNRMLTPKSDIYAFGVLLLELLSGKPPLEHSVLVASNLQTYVQSAREDEGVDSDRITMIVDIATSCVRSSPESRPAAWQVLKMIQEVKEADATGDNDSDLTSNS

SEQ ID NO: 196577 - protein, 125 aa, Zea mays
  Clone ID: MRT4577_110862C.1.pep
SFARSFCALFSVSFRGFWFLPFLCFPWFLWSVLVGFLPSFGGGGCLFLAFAGRVLRVPPWFVFLGGRCPLRLWGPRFLRCFLVGSPFCPCGSPFVLPWGFLLITPGRVVSSRVFRSGACGFFPYP

SEQ ID NO: 196578 - protein, 75 aa, Zea mays
  Clone ID: MRT4577_110863C.1.pep
PRSSDLISFGFRIGLIRKPIIPIHIWTFLPLYFVKTWNWNSPRNSALISFGFRIGLIRGHNNSSFIYEHFCVSIS

SEQ ID NO: 196579 - protein, 69 aa, Zea mays
  Clone ID: MRT4577_110864C.1.pep
YMGIAVNRIVELDSRLDHTDDPCDRDAMNFTTCVLTDIAWLNMVNNTSYPLCIHGVETTTTLFKPFTNL

SEQ ID NO: 196580 - protein, 285 aa, Zea mays
  Clone ID: MRT4577_110865C.1.pep
MWSWALRARWMDAVELPLPAKVEFGKILAQAAAVEGVDGGIPGGGGGEVLRRCADADRRHGGDVKQHNQNAEGFPSHRSKRMSLEVSMQKSLGFGLKSDNGKHDYVANDTVQSLHKQDSKIVIKKTIKLLDGPPYPKRPKLEPAQTGRDAEAKGHEFISQKNVPDLAPCATSEKSRLLKQKRISDGKRIDKKNIRSGVRSKHDCFSSKAGLANFDSGFSGNSVLGAHGLKSDIRDITHHIENLSLIELLDGTYKYSSLGRDKGKKVLHTKEELLVSVRKTFSMLS

SEQ ID NO: 196581 - protein, 131 aa, Zea mays
  Clone ID: MRT4577_110866C.1.pep
PADPGPSHPVLVASKQALPACSHLDLRREAGVDQPPTTRLGVCQPPTVAAASGAELLACDCDASAPSPAPAATVGRCDGLVLSRQHHDDEVPEGSSSASRDNSHSGGRRGQRFAPRFDGLRFIETLVTAHR

SEQ ID NO: 196582 - protein, 150 aa, Zea mays
  Clone ID: MRT4577_110867C.1.pep
CRWSVTIHSPFLACLCLCEREGLRLYPACRFEQTLLYFFIYNVTHFFVPKKKKKNPRPTTDLSQYKDHGNWIEILRVDNLVITGKGNLDGQGPAVCSKNSCTKKYDCKILPNSLVMDFVNNGEVVGVTLLNSQFFHMNMYWCKDMLIKDV

SEQ ID NO: 196583 - protein, 56 aa, Zea mays
  Clone ID: MRT4577_110868C.1.pep
VISQIRPCPHSFLKVPITYVRAHPITLLEQLPFFSSSARRALLPALPLRAFSVSRY

SEQ ID NO: 196584 - protein, 85 aa, Zea mays
  Clone ID: MRT4577_110869C.1.pep
MKWGLAAAVASAATVAAASGAELLACDCDASAPSPAPAATVGRCDGLVLSRQHHDDEVPEVRLPRIEDSWVPLRPPLSFFFFFSF

SEQ ID NO: 196585 - protein, 60 aa, Zea mays
  Clone ID: MRT4577_11086C.1.pep
VAHKHNVRVHVLDPLRQPGAAKSTESNFQLVAQLILSSMRVLSGLSHSVHMAAAHGLTME

SEQ ID NO: 196586 - protein, 98 aa, Zea mays
  Clone ID: MRT4577_110870C.1.pep
MKWGLAAAVASAATVAAASGAELLACDCDASAPSPAPAATVGRCDGLVLSRQHHDDEVPEGSSSASRDNSHSGGRRGERFAPRFDGLRFIETLVTAHR

SEQ ID NO: 196587 - protein, 49 aa, Zea mays
  Clone ID: MRT4577_110871C.1.pep
WASFSSLGRSHPGKSCCPLEQYVLVKTCRFVCCSSPCGVSTHGVLNAPK

SEQ ID NO: 196588 - protein, 104 aa, Zea mays
  Clone ID: MRT4577_110872C.1.pep
MKWGLAAAVASAATVAAASGAELLACDCDASAPSPAPAATVGRCDGLVLSRQHHDDVVPEVRLPRIEDSWVPLPASPVLYGAIYNIGGITIPPRFTFQVKIGGK

SEQ ID NO: 196589 - protein, 259 aa, Zea mays
  unsure (1)..(259): unsure at all Xaa locations
  Clone ID: MRT4577_110873C.1.pep
GGHNYPAVLRDSAWEHSLIYEKENGHWKCKWCSIEGDHGLTRLMWHLVGRQNRPQCPNIPKDVAEKMKDQMMSKKEQKARSGLFDGNGCCEVLCSSNSSQLDQNHLTARIHDRCSSQAFDHANSELKGCNMLSNTILSQQSSNPQVHHEDPQVCHEQERKEVATSSEPGCEQGQRMQWQSQNKPMMEGPHDNGLCGDTNQLEEQKSGFGISDCWRYVLDGQMHLPDVQECAGIGTCIRDALLYGCAEFGTVPXQNGNGL

SEQ ID NO: 196590 - protein, 48 aa, Zea mays
  Clone ID: MRT4577_110874C.1.pep
LIRATDLYHSHEYMTKHNLFGKTKLNHRSDGNKSKNQPCMISFTFHMA

SEQ ID NO: 196591 - protein, 55 aa, Zea mays
  Clone ID: MRT4577_110875C.1.pep
GVTFEKSFPWGAGNGGGWAMPHPNLSKAQCLLCVASKNPVRIFGSNSSRMYQYQS

SEQ ID NO: 196592 - protein, 129 aa, Zea mays
  Clone ID: MRT4577_110876C.1.pep
RCYMVIKHRIPFVPLRRSRDLTARAISSALRRLLATTLNKSYRCPLLHFMLREWLNRQRHDEQTCWMTDNHLWSAHRCQTCLKPYWPQLLGSRTTHLYLPSPRLLELILNEEKDPACIYVDHIVAFQIC

SEQ ID NO: 196593 - protein, 49 aa, Zea mays
  Clone ID: MRT4577_110877C.1.pep
HNNYERGNLSLFCSHNSQRLYYLDVPATPQPPITHTSKAPSRRQKFTPL

SEQ ID NO: 196594 - protein, 31 aa, Zea mays
  Clone ID: MRT4577_110878C.1.pep
LLELLKATHIIHLHSWDIERPKSASVWSQCF

SEQ ID NO: 196595 - protein, 62 aa, Zea mays
  Clone ID: MRT4577_110879C.1.pep
KKKKKKKKKKKKKKKKKKKKKKKKKKKKKKKKKKKKKKKKKRGRRLFEGNPIFPFPRACKGK

SEQ ID NO: 196596 - protein, 119 aa, Zea mays
  Clone ID: MRT4577_11087C.1.pep
VGFFRSKISRGKKEHPGGSFKRNGAFWYSNPNDERGPPPPTGGAARVFPPPPPFLIWKRGLEEPHPASPPGVFSVLKGGKGFWAPPRCPPNRDSGGAALAPGPPEPNTLFHKIPPCVVD

SEQ ID NO: 196597 - protein, 48 aa, Zea mays
  Clone ID: MRT4577_110880C.1.pep
CIDEIWTAINPDAGVVIAYGVNSAQNAMMNSAEFKNDPRNPNAKTGGH

SEQ ID NO: 196598 - protein, 186 aa, Zea mays
  Clone ID: MRT4577_110881C.1.pep
YLPSMKAICDKLEEASGKALVVSDIKVDLDYRMAYGHRAWRNVLHRLRDARLVEIFDAEVDDKVVRCLRLLKNFDPNEFQPKSIASNFKFVKKGQATDQILELPLENCIYDMISSQGTKGITLVEPQPNQTDPEMARWYGVQWGSNADFLCQICRGLVVGSMVILDHGHIAQAQIFCKTTLHNSKL

SEQ ID NO: 196599 - protein, 128 aa, Zea mays
  Clone ID: MRT4577_110882C.1.pep
MQGGPGYGYGGYGYGAGYDMTGYGNGGAYYTNDRYPTPAPAPAAYEDPLAGRRQHDFPAPLTGLEFQPSDACPKNYVIFDQTYDRSRVMYNPSLPNNFGSSGGYDQHGNNGGYDHNYSGGHDGGKCST

SEQ ID NO: 196600 - protein, 46 aa, Zea mays
  Clone ID: MRT4577_110883C.1.pep
IENVHDKRHLHLKASSSSRNYGKATIIILHSSFLECARVLCVVTTA

SEQ ID NO: 196601 - protein, 70 aa, Zea mays
  Clone ID: MRT4577_110885C.1.pep
RTRGRTRGRTRGRANGDGGVRSFDPPLQVPNGETNIVRYLCCKAHTHQKNNPSRRATSKRNQTLFLLRYS

SEQ ID NO: 196602 - protein, 197 aa, Zea mays
  Clone ID: MRT4577_110886C.1.pep
METSSDEGSFSDPSDGEARGGRRGGDGSKSAWPQSYRQSIDMLSVVPSPTVSMLMAATPNLTRFGSSFLKAGSSFFLRKGDDSVLPLARPLLPPSLSQLSQSPLRPQPAMRQQYTGILAQPPRPPGGHEAQLPDRPSSACLRPDYIELPPPASKCSRNQSIINGFNVLCGVGILSTSYGIKEGGWSSLLLLPLLGWQ

SEQ ID NO: 196603 - protein, 117 aa, Zea mays
  Clone ID: MRT4577_110887C.1.pep
VSQTPHWQWPNTTAFYSILTDSYFNEFYQTCSMQIHQVQCGYCRSSTSIKACNRICIKPGNNLSTAGLKLWRGGEKRSFLSTFSLFLAARIAWAVAFGRPTGYLEPVVVRDLLHVGC

SEQ ID NO: 196604 - protein, 75 aa, Zea mays
  Clone ID: MRT4577_110888C.1.pep
RVTPLNPHTLNQGAERTTFISHAKLMSQTYLTNTRKNLKPLLICFTHPRTCPSNTLDLINDQKRIQHLFKKLFAQ

SEQ ID NO: 196605 - protein, 58 aa, Zea mays
  Clone ID: MRT4577_110889C.1.pep
HVDSLTTSSLQLARRRPDARCLGPTGRKMGGGNRRGVVELSQSGEAQSRRGAVQRAPV

SEQ ID NO: 196606 - protein, 139 aa, Zea mays
  unsure (1)..(139): unsure at all Xaa locations
  Clone ID: MRT4577_11088C.1.pep
VPSTQVSGSAIEXSVCALKVQVIVVIGHTXCGGISELLYIQDGAPYTFHLVDNWVKIGFRSKIKVKKFXASVPFDEQCSIIEKXSVTLSLQNFKTYPFVKDGVVNSTVNLVDVPYYLVSGEFITWINKQLSWIYIYTVT

SEQ ID NO: 196607 - protein, 48 aa, Zea mays
  Clone ID: MRT4577_110890C.1.pep
SPDAAALYVVSTSEWILIARRENLCMYSFPSLISLAIAIVRTRAGTGQ

SEQ ID NO: 196608 - protein, 43 aa, Zea mays
  Clone ID: MRT4577_110891C.1.pep
RLKGIKVCLNFSKIFMNHSLIECPQFHPSYVILAALDVHARDF

SEQ ID NO: 196609 - protein, 293 aa, Zea mays
  Clone ID: MRT4577_110892C.1.pep
MLVSHSCAFDVIQNDLLPSIELVTKMIEDVELLEEKAKVAKHELSVAGTGILAKVEELREMITYAKEANDMHAGEVLGEKAILTTEARELLSRHQRLSDERNKYLVIIEEIHQILAERLVAAQQEIAAAEKENAEKEAAAQAVLDEQEKMMNSIVEESRKLQKEAEENLKLKEFLVERGQIVDMLQGEMAVTCEDVSLLKRVVDERLPLSKLQRSAMSSLSSSLHSSHHKSWTSSDKAIGSPDKHTLAEPASPVGKDLDGNECTVEVSDGNDSGEGILKRVDSKEDGDGWELC

SEQ ID NO: 196610 - protein, 117 aa, Zea mays
  Clone ID: MRT4577_110893C.1.pep
IPLNPGVEEPTQDQEPRIGGRKRGFTKTRAKTRDLVVEKNETKGRVKTPKRGGVNSRPFFGNKIEFFTLKKRVKGSFSEKTAPTKKKPPLIKAKFEPGGGKKLAAKFAQAWKHLKLC

SEQ ID NO: 196611 - protein, 127 aa, Zea mays
  Clone ID: MRT4577_110894C.1.pep
CTLHSGSVVVREDKRLLTVLFPDGRDGRTFTLKAESSKDLFEWKTSLEEALAQAPNAALVMGHNGIFRNDTTDVYEEAIPNCWFPYSLHYHHVAVSQLEEYSETSGHLVHTKHLWMLRWYILPFLWC

SEQ ID NO: 196612 - protein, 91 aa, Zea mays
  unsure (1)..(91): unsure at all Xaa locations
  Clone ID: MRT4577_110895C.1.pep
TPEGAWFFPGVYTAGNPFGIAEDLVFTLPCKXKGYGDFQQAIDVLKDNFFWDGFKKSQSELLAXKKWVAPFSGKGKAFFVLPEDPVVPEEV

SEQ ID NO: 196613 - protein, 180 aa, Zea mays
  Clone ID: MRT4577_110896C.1.pep
MAGVGGLAWGMELLEASRRVAEWRGCLGCFAGPFKRNPTARNLNDDVDTVRAAILDCVLSIFAARTGAVDGAKASVDAGGEVALAFARERVVDSPQKSAIFSMQETKGCHDAAQTGGQRNEWMWGMELEALRHHEDMGGRRGVGHRRAPTRKEASRHCDDGGRRWLSVGDGATRSFPTCC

SEQ ID NO: 196614 - protein, 47 aa, Zea mays
  unsure (1)..(47): unsure at all Xaa locations
  Clone ID: MRT4577_110897C.1.pep
AHLFLLVDALWSQIVAFQTRXCSSWCWKSCLDLMLTPDEVALVRDMR

SEQ ID NO: 196615 - protein, 74 aa, Zea mays
  Clone ID: MRT4577_110898C.1.pep
MAMAQQASLPCSTATTWRELTNTSWRDDDYRRMVMAYLIEAVYLLELERQERRDAAAVAQQWWKPFHFRLAHEL

SEQ ID NO: 196616 - protein, 172 aa, Zea mays
  unsure (1)..(172): unsure at all Xaa locations
  Clone ID: MRT4577_110899C.1.pep
MPRARKPRREWSDGVPPELLGVIFLDLACLADRVCFAAVCRSWRSVARAVGTPPAPRQLPWLLLPSPDKPSFFSLHSGAKRRLRLPESIRGARLCGSHDGGWVALAFEQWRGYAAVNLLSGATVPLPDRLRTAHPLAPQANTACEHHMVIRTIXFSXSPSAENCLAAAHVSS

SEQ ID NO: 196617 - protein, 186 aa, Zea mays
  unsure (1)..(186): unsure at all Xaa locations
  Clone ID: MRT4577_11089C.1.pep
INCCDGVYRAXXDIYLESHPALSLEERTTLCRCLNYEKLTLEACKDLAKNRRIPPGVAVQALASQQCKLHISEPGPGGSATAAAGKERRPDPSSCSQSQTPRRRVARRATRSVDLGRRSGGDDDEKELLRLNLQRMQSRVVELERACKEMKGQMSRMAKGKSLSLSFGSGAASCHQTGGRGLPRLC

SEQ ID NO: 196618 - protein, 116 aa, Zea mays
  unsure (1)..(116): unsure at all Xaa locations
  Clone ID: MRT4577_1108C.1.pep
PEEGKAPAPXPKPAKXGGGKHKKKKXSTXQQKEKXNTAAXXDQATXDRGGGEXPKXKQXTPXXXPEXRRXNGXXARRATKDPAAXXTTRXXXGHXSQQAXTRAXNTRGRTRPAPQT

SEQ ID NO: 196619 - protein, 230 aa, Zea mays
  Clone ID: MRT4577_110900C.1.pep
FGSRESTGFVTREAFIDFWVNNNLMSMDSATQVFTILKQQNHNYLTKEDFKPILKDLLDNHPGLEFLKSTPEFQERYAETVIYRIFYCLNRIGSGHLTLRELKRGNLLNALRHADDEEDINKVLRYFSYEHFYVIYCKFWELDTDHDFFIDKENLIKYGNHALTYRIVDRIFSEVPRKFTSKVEGKMGYEDFVHFVLSEEDKSSAPSQEYWFTCIDLDGNGILTHIEIQF

SEQ ID NO: 196620 - protein, 49 aa, Zea mays
  Clone ID: MRT4577_110901C.1.pep
MPRARKPRREWSDGVPPELLGVIFLDLACLADRVCFAAVCRSWRSVARA

SEQ ID NO: 196621 - protein, 91 aa, Zea mays
  unsure (1)..(91): unsure at all Xaa locations
  Clone ID: MRT4577_110902C.1.pep
MGAQIFCPLLPPGISARAATGTIFPQRSQNAINFPFPPVPSPTGGLGWEKPILXPSRXPQGIANGIFPFSPPFLPQFLNPFPQFPLGALLG

SEQ ID NO: 196622 - protein, 75 aa, Zea mays
  Clone ID: MRT4577_110903C.1.pep
SVSPAPVQRPHRCAVPHWSQRHADPSELMGFASRGLIKHGKFLEEGYREFQQSATTLHTWWVSRANNAAHRWSTA

SEQ ID NO: 196623 - protein, 61 aa, Zea mays
  Clone ID: MRT4577_110904C.1.pep
RLLTMPRTKCNKRTTLTFTTPLPRRRNRQHRHQIDYLQHQKLQNYTNYFRSSKHINQPKVP

SEQ ID NO: 196624 - protein, 94 aa, Zea mays
  Clone ID: MRT4577_110905C.1.pep
GLFPRAIRPDGPGKKKFNRTRIGFFIWRARARTKRLVPHQVDLPTSRPPMRDFQFAQKKKRIGLGGPKQGAQGFLLHYIFLGPKKRSEVQTALT

SEQ ID NO: 196625 - protein, 92 aa, Zea mays
  Clone ID: MRT4577_110906C.1.pep
MSLSRIQNNIATASKLDQMAPLGDCGADDYTDSNNLPVIYAEMLIDLFPDLAGMSLAKSTLLFKEISGATANGDCHITNLCGSCAYVGKFGD

SEQ ID NO: 196626 - protein, 33 aa, Zea mays
  Clone ID: MRT4577_110907C.1.pep
DGASPRKVPDMSKLMFHTAVMPDGMALACAVSH

SEQ ID NO: 196627 - protein, 346 aa, Zea mays
  unsure (1)..(346): unsure at all Xaa locations
  Clone ID: MRT4577_110908C.1.pep
MDSEGVVAAKVADETTKPAIQEDGAESKAGMTDLLMLTDKSQLQALAMLLRNNEELMMSQAIKSETEXDCYTRTMKLLDDSMAARTTYERSGGTRSLVARDMDDYVVYGLNACLQNVRNCCVRLDAIDKLRAHYDALADAVADPAANVEGLAAEASEYKAAMWQYCYNQRSASARAHSRAYSQALKLEGIDFAELXVRRHQLRLGYGSKGXGEEFXDLDGGRRRLEVIIAASSLAWDVLRATTEHEVEAILKGSLNLLAGLGGFAVEAVVGAAVTKAVANVGAGVFACSLAGFVVGAIAGLIFIGVSGLLINLIIGSPRKVPDMSKLMFHTAVMPDGMALAYAVSH

SEQ ID NO: 196628 - protein, 389 aa, Zea mays
  Clone ID: MRT4577_110909C.1.pep
MDSEGVVAAKVADETTKPAIQEDGAESKAGMTDLLMLTDKSQLQALAMLLRNNEELMMSQAIKSETERIEYLKTVSDCYTRTMKLLDDSMAARTTYERSGGMRSLVARDMDDYVVYGLNACLQNVRNCCVRLDAIDKLRAHYDALADAVADPAANVEGLAAEASEYKAAMWQYCYNQRSASARAHSRAYSQALKLEGIDFAELVRRHQLRLGYGSKGEEFEDLDDTQKLEVYNSIIVESGRAGLPVRMFSSGRSAGGPKIAATTWAEAVSVFIMAAGNLAWDVFTTEHEVEAILKGSLNLLAGLGGFAVEAVVGAAVTKAVANVGAGVFACSLAGFVVGAIAGLIFVGVSGLLINLIIGSPRKVPDMSKLMFHTAVMPDGMALAYAVSH

SEQ ID NO: 196629 - protein, 88 aa, Zea mays
  Clone ID: MRT4577_11090C.1.pep
YAFWASCDFVSHVGTVEVGCGLQGWLVYWHWQFSCRPSVIWWHVSSGSYHFLYMCKDIVMNVDNAFYFECLCNLQVSIKKKKKKINKI

SEQ ID NO: 196630 - protein, 389 aa, Zea mays; identical to SEQ ID NO: 196628
  Clone ID: MRT4577_110910C.1.pep

SEQ ID NO: 196631 - protein, 113 aa, Zea mays
  unsure (1)..(113): unsure at all Xaa locations
  Clone ID: MRT4577_110911C.1.pep
MAVGKTRDLHGKEGGKQKDGNPFSKIDWYHIKAPNEFSVRNICKTLLSMTQATRIAPAGLKXHVFNVRLADLNGHEDQAYMKLRLRAEEXSGQDCADNTXGMNLTTDERTSLQ

SEQ ID NO: 196632 - protein, 361 aa, Zea mays
  Clone ID: MRT4577_110912C.1.pep
FDVSEIANKTGTGELQRKENGTAGSRTKRWFVSSLNPPPKRREVSAVRRFPPGCGRTAVTTTDSGVLEVSPISTFAPGHGRSGVNTTGIRNEGLPAEATPVNNNDALVASSVLGELASPTSALEASNKKLESKRIVGEGHSKAHNKVQVQDDFAGTKQDGGQRNVVPKATPRSVSDGKMKGKLPAHKANQVAQEVMVGKMKNKLDGSFQRSNLRTPLSNPIDAKTKVKRSDSDKMNAGVHGNAGASAGGKMENKTLSAKKEVGFPNMNTKQKKVAPKLKGDVIGKDNMHLSARELKLGKYVATDHTEEPKKQIIVQALMAPDNCPWARGRKSIASAFKSLGPMNKAKGKDASASKQCSRKC

SEQ ID NO: 196633 - protein, 389 aa, Zea mays
  unsure (1)..(389): unsure at all Xaa locations
  Clone ID: MRT4577_110913C.1.pep
MDSEGVVAAKVADETTKPAIQEDGAESKAGMTDLLMLTDKSQLQALAMLLRNNEELMMSQAIKSETERIEYLKTVSDCYTRTMKLLDDSMAARTTYERSGGMRSLVARDMDDYVVYGLNACLQNVRNCCVRLDAIDKLRAHYDALADAVADPAANVEGLAAEASEYKAAMWQYCYNQRSASARAHSRAYSQALKLEGIDFAELVRRHQLRLGYGSKGEEFEDLDDTQKLEVYNSIIVESGRAGLPVRMFSSXRSAGGPKIAATTWAQAVSVFIMAAGNLAWDVFTTEHEVEAILKGSLNLLAGLGGFAVEAVVGAAVTKAVANVGAGVFACSLAGFVVGAIAGLIFIGVSGLLINLFIGSPRKVPDMSKLMFHTAVMPDGMALAYAVSH

SEQ ID NO: 196634 - protein, 62 aa, Zea mays
  Clone ID: MRT4577_110914C.1.pep
FLRAQSTGSTWMGLGDRGQDLRLILCEQKTDRTDLLRSCLTFITVHVRSAWLKETASYNMRQ

SEQ ID NO: 196635 - protein, 72 aa, Zea mays
  Clone ID: MRT4577_110915C.1.pep
GIVARQAPPLHRPLHRPGHRASSRYVRMCDVSRHRQAPVPFSKSFSSRHSNKLLCISSDGKNAHLKTLEDAG

SEQ ID NO: 196636 - protein, 76 aa, Zea mays
  Clone ID: MRT4577_110916C.1.pep
LGGITSRVAALGFIYFVASEALELVENLGNINDFSGKTRLFLVLPVAVLDATFIIWIFSSLSRTLEKLQVTTFWPY

SEQ ID NO: 196637 - protein, 298 aa, Zea mays
  Clone ID: MRT4577_110917C.1.pep
MDRELASDMELDSVVFQVSSPDNRYEAIACSKGKTELIASGPFDQLVLHLEDAKTFQSCSSSGTFKLLLAGDGKDSSWFTKSTLQRFLHIISSFDTSKSVNGVLDEMSQLEETRKFHQSLYVKEQQNVISGALTGGLFGTGAIAQQGNDGPNSSDTTKNELLRALDLRLTALKEEILVVLNRAVGSNLSAREISDLSAFVQRFGTSESCWLMRCTLLISDCKPSELPLQQNSTTEKVDKDENAHKPCISPQTNLQMPIANNVSPAKLAQIERESSTESDDSSESSDEGEAIVERSRPL

SEQ ID NO: 196638 - protein, 74 aa, Zea mays
  Clone ID: MRT4577_110918C.1.pep
QFTTDNGFEDANIPFGPVEANGRTILSIDDRLEDDRHQLPLTAADAVATNGVNPWNWRDTSTDGINLHMSQHTS

SEQ ID NO: 196639 - protein, 81 aa, Zea mays
  Clone ID: MRT4577_110919C.1.pep
GTDPYLLPRPTHAFVFYSLSTYQGLVSFNSGGINTRKNKPSFHWDVHTKCKISSATRTLHTPLKGNNSQYDWQELNTITTV

SEQ ID NO: 196640 - protein, 198 aa, Zea mays
  Clone ID: MRT4577_11091C.1.pep
PIISHSLACLSVDDWSCPVCPLAAASSPRQMKALAVTLAYMVYDAACCHLNGDTRLDNAVHHLVSIVGIGAGLAYQRCGTEMVASMLVTEMSSPLLHLREMLKELGVRDTELNLLVDVLFAATFSAARMGVGPYLTYVTVTADNPILIKAMATGLQLVSAYWFLRILRMVRYKLAVAGKKKPLPPPTTPPKLAAANNN

SEQ ID NO: 196641 - protein, 109 aa, Zea mays
  unsure (1)..(109): unsure at all Xaa locations
  Clone ID: MRT4577_110920C.1.pep
MSCNCGSRSGCGSSCKXGNKYPALQERSTAAQATVVFGVAPQKKAAPEFVQATAESRXAAHACSIGGTCKYYPSQPLITSIDDHAYDSDLSSLWWWVTNNKRGRADGHT

SEQ ID NO: 196642 - protein, 95 aa, Zea mays
  Clone ID: MRT4577_110921C.1.pep
NHFACSINWVGNRGFGEGRSPSVTSYRDEMDTAGGRVLFAELFILMVLTILPILLWPPLSHTDTSYNHPVPTLTLHEYQCSTPSSVWLTHPLLCW

SEQ ID NO: 196643 - protein, 175 aa, Zea mays
  Clone ID: MRT4577_110922C.1.pep
AAWAAAWGGGGGRGHNQKHGASKQQQHRKLESNGSSVSDVSLEEENNFLGICSQELLARGTELLKRTRKGALHWKVVSVYINRMGLVMLKMKSRHVAGTITKKKKSVVIDVCRDVPAWAGRHLLEDGEHRRYFGLRTAEHRVIEFECGSQREHEMWTKGVARLLSIAGERRRLVA

SEQ ID NO: 196644 - protein, 399 aa, Zea mays
  unsure (1)..(399): unsure at all Xaa locations
  Clone ID: MRT4577_110923C.1.pep
MPAGFGFHFVPGYGFYTNIVQVLADELHLSSIIHYYLRTLYCRAASTPKAQAYRAGNKTVGRWLKDRREKRKEETRAHNAQVHAAVSVXGXVAAAVAAVAAATATASASGGKDERAARTDMAVASAATLVAAQCVEAAEAMGAEREHLEAAVGSAVSVRTPDQTHITSNAAATALRGAATLKARALKEVWNIAAVIPVEKGPGPVGGXATNARSTARPSSSSSXRKMDSDGSSVSDLSLEEENSFLGICSQELLARGTELLKRASKGALHWKVVSVYINRXPGKTNPFRFRMLXNLGYRTLAXGRDGVSQVMLKMKSRHVAGTITKKKKSVVIDVCRDVPAWAGRHLLEDGEHRRYFGLRTAEHRVIEFECGSQREHEMWIKGVARLLSIAGERRRLVA

SEQ ID NO: 196645 - protein, 65 aa, Zea mays
  unsure (1)..(65): unsure at all Xaa locations
  Clone ID: MRT4577_110924C.1.pep
MLNFLFPFFLEKTWNFHFNALLLLLAFGNKKKRICFLLFLFYLILTSLPNFLFFFFKSQIKLXVF

SEQ ID NO: 196646 - protein, 49 aa, Zea mays
  Clone ID: MRT4577_110925C.1.pep
VACIGQTENKNGHSLPRSPHLACMSDRLQSCSCPDTESTEDGTYIRPTP

SEQ ID NO: 196647 - protein, 64 aa, Zea mays
  unsure (1)..(64): unsure at all Xaa locations
  Clone ID: MRT4577_110926C.1.pep
FKRRLTGSMVFGVXFGQQLHTNLYGARCSCFYIFNVAQNKLIFYIYNALLLWYDFFLFHFYFYM

SEQ ID NO: 196648 - protein, 61 aa, Zea mays
  Clone ID: MRT4577_110927C.1.pep
CYIYRGTQFFSTGTIVTTMFSMIMLLVVLVGVAESATYAQSLQERIVALSAIFLQLMIAVA

SEQ ID NO: 196649 - protein, 239 aa, Zea mays
  Clone ID: MRT4577_110928C.1.pep
MGRSLLPLALLVVLSAAAAAPQLVGAAGRDHSLGIIQKDIIQTVNNHPNAGWTAGYNPYLANYTIEQFKHMLGVKPTPPGLRARVRTKTHSRSEQLPKVFDARSKWSGCSTIGKILDQGHCGSCWAFGAVECLQDRFCIHHNMNITLSANDLVACCGFMCGDGCDGGYPISAWQYFVQNGVVTDECDPYFDQVGCKHPGCEPAYPTPVCEKKCKEQNQVWQEKKHFSIDAYRINSDPNE

SEQ ID NO: 196650 - protein, 55 aa, Zea mays
  unsure (1)..(55): unsure at all Xaa locations
  Clone ID: MRT4577_110929C.1.pep
RPQEGSARATPAQTEKTRGNSNEKTHXTDGXTKRPEXDWKLFSEEGVHTHGKGIG

SEQ ID NO: 196651 - protein, 250 aa, Zea mays
  Clone ID: MRT4577_11092C.1.pep
MATAAAAAAMEEPDVVNGRDVVSWVASGVVLWSTAFLLVRALFPKRSYDFCNRAVSTMHAVAAVCLACLSVDDWSCPVCPLAAASSPRQMKALAVTLAYMVYDAACCHLNGDTRLDNAVHHLVSIVGIGAGLAYQRCGTEMVASMLVTEMSSPLLHLREMLKELGVRDTELNLLVDVLFAATFSAARMGVGPYLTYVTVTADNPILIKAMATGLQLVSAYWFLRILRMVRYKLAGKKKPTPAKLAAAAAN

SEQ ID NO: 196652 - protein, 85 aa, Zea mays
  Clone ID: MRT4577_110930C.1.pep
IRSMELARSTRSWDVTSARIQDAFSVVTVNTLLIFTCTIQMESRCYEHVSSVVAYMSSECVVWQRQAIATDLLPYAGSKGRPSRR

SEQ ID NO: 196653 - protein, 120 aa, Zea mays
  Clone ID: MRT4577_110931C.1.pep
RLPLLVGPLFVRPLVAGLSLNGSRGGGPGAPGGSVGCRLGSPRQGFVERRPGGALCTSLYRASWGPSRSPGLSLPWAWHPFWLSVWPVACGSRAGLGRPGGFVGSRPRLLRYAPALKRWE

SEQ ID NO: 196654 - protein, 62 aa, Zea mays
  Clone ID: MRT4577_110932C.1.pep
DCYAIYSHLSMQLTTIASKSIYGCRVEGLHISAIIDRSNTHHNKMVHASMKHVRCEQSSSSA

SEQ ID NO: 196655 - protein, 60 aa, Zea mays
  unsure (1)..(60): unsure at all Xaa locations
  Clone ID: MRT4577_110933C.1.pep
VLSSSKSSFSFFFHVFHNSTLFHVILSIVIRLFCMIINEKNTMYVCTYPRRXSEAEIQLC

SEQ ID NO: 196656 - protein, 151 aa, Zea mays
  Clone ID: MRT4577_110934C.1.pep
NHHTWVHTSLATPTPTHHSILPAPTFRSRPNRPGRYAPWRSTSSGQASPACSRSATSALPSPRSCSGWSTASSCRRCWSPASAPPAPCATAAAAAAAATTRSRGTTSSRTACSPCSASPSCSWTWRCRGRSIRPRRCGRPRSERRCGSPRP

SEQ ID NO: 196657 - protein, 75 aa, Zea mays
  Clone ID: MRT4577_110935C.1.pep
PRRLKTRTGWSCSLLPPRPWLCMAPRDFAYDQASFRLYGCCPIRLNPVGHRRGRSDPAVAAASYEARGGVAVIVV

SEQ ID NO: 196658 - protein, 58 aa, Zea mays
  Clone ID: MRT4577_110936C.1.pep
ASDCTNILVPTQLEELGVRLGTYDLPGLGESDPHICRNLNASALDKLYLANAFNSAEK

SEQ ID NO: 196659 - protein, 154 aa, Zea mays
  Clone ID: MRT4577_110937C.1.pep
MSEGSAKREIETGTSHGKAPSKESSAKGREESPPLIKPHRSGDKKKKMKKVVYYETDSSSPSTSGSDVASVTSKRHECKKFSKIPLRYPRISKRAPLLSVPLGKPPVFYGEDYCTWSDKMRHHLMSHPVLEGPYGEALRKQPEPPKVIIRTSSG

SEQ ID NO: 196660 - protein, 49 aa, Zea mays
  Clone ID: MRT4577_110938C.1.pep
YDIGLSFVRKKKKKKKKKERGRKKKKKKKKKKKKGKKKTNKKNPKVKKL

SEQ ID NO: 196661 - protein, 174 aa, Zea mays
  unsure (1)..(174): unsure at all Xaa locations
  Clone ID: MRT4577_110939C.1.pep
DKRGTTESSDLKKGLVNAIQDLYDVVHHEAFSVDMSGHIEDWDQINLARAEGHLFNKLKWPNDPKLKDLIKRLYSLLTIKESSATIPKNLEARRSLQFFXTTSLFMEMPVARPVSEMVSFSVFTPYYSEIVLYNMAELQKKNEDGTTTLFYLQKIYPVTSGRWLFLQLQYILIM

SEQ ID NO: 196662 - protein, 55 aa, Zea mays
  Clone ID: MRT4577_11093C.1.pep
LHPYVSRIKRRRLRERRDQPCSEGSCSGWLSCGGPPWGASCSASRRAGRLRAPAG

SEQ ID NO: 196663 - protein, 95 aa, Zea mays
  Clone ID: MRT4577_110940C.1.pep
QFPFRPTRTFNSHHPYPFISHHPSNTISNVQCTIEAVLIIHSSHILNLTPNHFSLPITTKYHYLIKTYNHIIIQTFHSSLLNMHAYMPLLYTTIY

SEQ ID NO: 196664 - protein, 167 aa, Zea mays
  unsure (1)..(167): unsure at all Xaa locations
  Clone ID: MRT4577_110941C.1.pep
DKRGTTESSDLKKGLVNAIQDLYDVVHHEAFSVDMSGHIEDWDQINLARAEGHLFNKLKWPNDPKLKDLIKRLYSLLTIKESSATIPKNLEARRSLQFFXTTSLFMEMPVARPVSEMVSFSVFTPYYSEIVLYNMAELQKKNEDGTTTLFYLQKIYPGLGFTSFRFP

SEQ ID NO: 196665 - protein, 95 aa, Zea mays
  Clone ID: MRT4577_110942C.1.pep
LALLLSVLVFLLGNPHQAVLQASKFYPDDQQSSSTYQLGGRDTARRDHHLSHPLVVSCLIWPSHLAVVLCCALLSSNLRVSTGKTKLGRKTTQNP

SEQ ID NO: 196666 - protein, 67 aa, Zea mays
  Clone ID: MRT4577_110943C.1.pep
MASPFCAAAAACRLAVPAPSPPAARAPKPRRGLLAVRAEAGGGIKPAIRKDGGKVVDNVLNGGARQA

SEQ ID NO: 196667 - protein, 55 aa, Zea mays
  unsure (1)..(55): unsure at all Xaa locations
  Clone ID: MRT4577_110944C.1.pep
MVQIVEHRAMTSEDFLGXAAVHAARQHTPTQTSQTPPRAAPGALSAARELLRHPP

SEQ ID NO: 196668 - protein, 104 aa, Zea mays
  Clone ID: MRT4577_110945C.1.pep
NKFSFRTLLSSNRFSLSLLPRRWMSKQRRRGTQWPDLATVSTEARSASSSCRSPRVASFAASPRHRRLGVLCTCLLPLCGHEHPPMPTHHGGEEMGAVGSSGRQ

SEQ ID NO: 196669 - protein, 106 aa, Zea mays
  Clone ID: MRT4577_110946C.1.pep
HPYKQCSSSVVPVDRDEDTGARSGGGSCPPCRRSGRRRGRTSRGRCCGTGSGPCPRGGGAPYTAHPRSVGRRRARPAAAASTKQTSPIAEISGGEQTGVASIGRET

SEQ ID NO: 196670 - protein, 35 aa, Zea mays
  Clone ID: MRT4577_110947C.1.pep
RVFLFFFFLNHQAPRFRSIHIQPHPNSQPIKTTKT

SEQ ID NO: 196671 - protein, 109 aa, Zea mays
  Clone ID: MRT4577_110948C.1.pep
MRALSRVGVGLAVVSALLLLALTAELYYIFVHKRRLRRRAAAISDASSSPSSSSRELLQLFCFKKPPALASTYAVPEAGDDADADDETVEAQLMRLGGVVGPTRLLFPS

SEQ ID NO: 196672 - protein, 80 aa, Zea mays
  Clone ID: MRT4577_110949C.1.pep
VICLLASASADHQGGQERHHENECFLRSSVSTIHRRAALTLKNHADAQASHLPWSTGAVDKGRGEGGARHGRHASRTVVA

SEQ ID NO: 196673 - protein, 81 aa, Zea mays
  Clone ID: MRT4577_11094C.1.pep
MAALCSASPAISAAPSLGSPARVVASFLRLRLRLRSAKRSCSHAPAPVPSWRARRRFALPASKAEECTRLETLIPADKRIP

SEQ ID NO: 196674 - protein, 96 aa, Zea mays
  Clone ID: MRT4577_110950C.1.pep
NVKRGKEIKRTRIPNGIRHCRIVTCRFVRTSADHQGGQERHHENECFLRSSVSTIHRRAALTLKNHADAQAMHLPWSTGAVVCGQGEGRRGTSVPW

SEQ ID NO: 196675 - protein, 95 aa, Zea mays
  Clone ID: MRT4577_110951C.1.pep
VNHGLAPGGFAGNPCFGPPPRGGGGAKPHVPSPGGGGWKGFLGGPPRKRALPQKGLGPTWVKKLEGSGDFAIHTRYRILLRFLSRRKPKYPPWAK

SEQ ID NO: 196676 - protein, 98 aa, Zea mays
  Clone ID: MRT4577_110952C.1.pep
KRTTPNGIRHCRIVTCRFVRTSADHQGGQERHHENECFLRSSVSTIHRRAALTLKNHADAQAMHLPWSTGAVDKGRGEGGARLYPGEDDESPGPAGLE

SEQ ID NO: 196677 - protein, 46 aa, Zea mays
  unsure (1)..(46): unsure at all Xaa locations
  Clone ID: MRT4577_110953C.1.pep
RXIASHHXDMITNSYYEVWXNQTTNDKXLYLNENQGAIQKEGSKPX

SEQ ID NO: 196678 - protein, 56 aa, Zea mays
  Clone ID: MRT4577_110954C.1.pep
GEILSLLILFLTNYKVGIKNPTPLKIILSSRFKKILGKNGKNLCEALLLFPILPRP

SEQ ID NO: 196679 - protein, 60 aa, Zea mays
  Clone ID: MRT4577_110955C.1.pep
SPFLIKGFFLQGIKFLEKLKCCWEGSSNILKGFPKKLEIRPLDQIFKCKTGVVRRFHQVG

SEQ ID NO: 196680 - protein, 78 aa, Zea mays
  unsure (1)..(78): unsure at all Xaa locations
  Clone ID: MRT4577_110956C.1.pep
MTRGAMVAAVALVALLLFPVTFAFPRAGQQQLEPHFYDHSCPQAQKIAAPIVGKVHXQDPRMEVSLLRLHFHDCFVRG

SEQ ID NO: 196681 - protein, 75 aa, Zea mays
  unsure (1)..(75): unsure at all Xaa locations
  Clone ID: MRT4577_110957C.1.pep
ARAAQKQPXSPPPPSSLVSRHVLFWLIELVTWHQLPLQSTRKCLGSISYCGPFTCPQMQNHFWCQLKDSXNPKHV

SEQ ID NO: 196682 - protein, 97 aa, Zea mays
  unsure (1)..(97): unsure at all Xaa locations
  Clone ID: MRT4577_110958C.1.pep
FVRCKYHRTRDSEAREARRKLRALIAEKSCAPMMLRLAWHSAGTFDVSSRTGGPFGTMKCPAELAHGXANAGXLNIAERLLEPIKEEFPTLFYADFY

SEQ ID NO: 196683 - protein, 272 aa, Zea mays
  unsure (1)..(272): unsure at all Xaa locations
  Clone ID: MRT4577_110959C.1.pep
TPAGIGPEFPGRPTRPEDGSCIHGSRQCNGIRDCVDGSDEVNCKNVNQCLGPGKFKCRSGECIDMSKVCDQEQDCRDWSDEPLKECHINECLVNNGGCSHICKDLVIGYECDCAAGFELIDRKTCGDIDECQNPGICSQICINLKGGYKCECSRGYQMDLATGVCKAVGKEPSLIFTNRRDIRKIGLERKEYIQLVEQLRNTVALDADIAAQKLFWADLSQKAIFSASIDDKVXGRHXKMIXHVYNPAAIAXDXWVSKTIYWTDAASXTISV

SEQ ID NO: 196684 - protein, 109 aa, Zea mays
  Clone ID: MRT4577_11095C.1.pep
MVAAPSKCRPSAAALVVAPPGAPRRRLRCRCCEDTLGVPRCRLQPQLHLKQQAPAATTAPAAAPPPRPRRIVLVRHGESEGNVDEAAYTRVPDPRIGLTAKGWREADDS

SEQ ID NO: 196685 - protein, 123 aa, Zea mays
  unsure (1)..(123): unsure at all Xaa locations
  Clone ID: MRT4577_110960C.1.pep
LFLKVSSAITIIINFNESTILHPSEEVARHMFFNSNLYLIVPNFHTPIVYFYMSNGAPNFFNGNVIKEALTNALMPFYPMADLLLLHDDARLYIDCYGHGVLFINANTGAVIDDFXDFAPTLY

SEQ ID NO: 196686 - protein, 248 aa, Zea mays
  Clone ID: MRT4577_110961C.1.pep
MAMAEQQQQIEHSHLAIRGLNLHVAQAGTGELGTVLFLHGFPEIWYSWRHQMLAVAAAGYRAIAPDWRGYGLSDQPPEPEAAVYRDLEEDLLAVLDALSVPKAYLVAKDFGAMPAYDFALRHPNRTCGVMCLGIPFLHGGSSFTAMPEGFYILRWREPGRAEADFGRYDVKRVVRTIYILFSRSEIPTAKEDQEIMDLADLSTPLPEWFTEEDLAVYTSLYEKSGFVYPLQMPYRSLHKRHPIEDPNL

SEQ ID NO: 196687 - protein, 71 aa, Zea mays
  Clone ID: MRT4577_110962C.1.pep
FLIFILSKWHSEGVFRLFPFLVRKYAFFPRWCEFLPSVLLLRVINKLPIIIKNGGSILKNTQCLLTKKKNY

SEQ ID NO: 196688 - protein, 125 aa, Zea mays
  unsure (1)..(125): unsure at all Xaa locations
  Clone ID: MRT4577_110963C.1.pep
YQDDSGLWTESSLLGKGFRCIRMGNNIRLNLDAFHGDKGHXGGVHNGTTGWLWKWAKGDNHSWKILPWGDXAYAEGGRNAVNAPCFGGGGEPSVRIYWKVVEGFSATVRNDAECLAPTIPCEEYQ

SEQ ID NO: 196689 - protein, 77 aa, Zea mays
  Clone ID: MRT4577_110964C.1.pep
MSKAALTLEEVSKHNTKDDCWLIIAGKVYDVTKFLEDHPAGDDVLLSSTAKDATDDFEDVGHSTTARAMLDEYYVGD

SEQ ID NO: 196690 - protein, 100 aa, Zea mays
  Clone ID: MRT4577_110965C.1.pep
ALLSAAALPFFLWVFSSSFAFLSLNIATCVMKLRETTCYSPLSSETPLQYLPLAGDIPIPLWQQRVAKIFSRAQAHRRYINPLKKKEPLAGYVVNTKRLH

SEQ ID NO: 196691 - protein, 35 aa, Zea mays
  Clone ID: MRT4577_110966C.1.pep
AEVDKLELMFQKAESDLDYIQYRLEYEIKTYHPDS

SEQ ID NO: 196692 - protein, 45 aa, Zea mays
  Clone ID: MRT4577_110967C.1.pep
LNLKLKCTSTTKLPYIWQLMELVCRTFFIIEKRSHIRLMCFFHEG

SEQ ID NO: 196693 - protein, 487 aa, Zea mays
  Clone ID: MRT4577_110968C.1.pep
MGRGRGGAFSCSMLDLLVLSALLPFAASQSPSSLLSPAQSASRPPTAPSARPSFPSPAAPAPRLSRPPAPPAAKPSSPPPAAPAGKPSPSPRPAPTRSPAVATPAPRASPPPPAASPAPKPPSPPPKTAPAPKPSPSVAPAPRPSPPPVTPVPPAPKPPPPPPPPPAPLQPPSNSTPTTSSALGQLSPSFYAQSCPDVELAVRDVVRSASTLDPSIPGKLLRLVFHDCFVEGCDASVLIQGNGTERTDPANLSLGGFNVIDAAKRLLEAVCPATVSCSDIVVLAARDAVVFTGGPAVPVALGRRDGLVSLASNVRRNIIDTGFSVDAMAASFTAKGLTLDDLVTLSGGHTIGSAHCNTFRERFQQVANGSMTPVDGSMNADYANELIQACSANGTVPAGTAAVGCDSGSASVFDNTYFANLLGGRGLLRTDAALVQNATTRAKVAEFAQSQDGFFASWASSYARLTSLGVKVGADGEVRRTCSSVNG

SEQ ID NO: 196694 - protein, 126 aa, Zea mays
  Clone ID: MRT4577_110969C.1.pep
ERLALLSNTFIPNLLQPFPWCVSLLPMFLSLEETPIRPTTNAYDDRSTTRTCAQRTPLRPTVPTLPKPPRQLIRPEKCATTTSETPRTMLRITDHDLEVLPNCETKPHANFTPDERPRSSTSTQQN

SEQ ID NO: 196695 - protein, 353 aa, Zea mays
  Clone ID: MRT4577_11096C.1.pep
MCLQKRRRRRAEASAGKLFAKKGSWDLKSFRILAFDEREIIEGVRDENLVGSGGSGNVYRVKLGNGAVVAVKHVTRGVATSTAPSAAMLRPAASVRCREFDSEVGTLSAIRHVNVVKLLCSITSADGAASLLVYEHLPNGSLYERLHGAAGRKLGALGWVERHDVAVGAARGLEYLHHGCDRPILHRDVKSSNILLDESFKPRLADFGLAKILSSAGGGGGHSSAGVVAGTLGYMAPEYAYTCKVTEKSDVYSFGVVLLELVTGRPAVVESRDLVDWVSRRLESREKVMSLVDPGIVEGWAREEAVRVLRVAVLCTSRTPSMRPSMRSVVQMLEDAAAARQDDDGKVLEVKVV

SEQ ID NO: 196696 - protein, 36 aa, Zea mays
  Clone ID: MRT4577_110970C.1.pep
KKKKKKKKNKKKKKKKKKKKKKKYKKKKKKKIKKKK

SEQ ID NO: 196697 - protein, 99 aa, Zea mays
  Clone ID: MRT4577_110971C.1.pep
GKSLHKKKGDSNWVLFLEEYSALQYGAHTHFTLFFSRGPVGRWGCYHQEAGVLFLRPFYWLGLKSKPFVGDRSEKEGTLPTPLGPQKKRKGGREILLVA

SEQ ID NO: 196698 - protein, 62 aa, Zea mays
  Clone ID: MRT4577_110972C.1.pep
KNPPGLKKAFNVMGLNPWASMNTGGPPTLFIYDIITPRHARAPHTYIYVCKFFCLGQGPFLG

SEQ ID NO: 196699 - protein, 141 aa, Zea mays
  Clone ID: MRT4577_110973C.1.pep
EYATLRYILTSRWAGANDDDDDGAAPVKKKSLSPADSSVAGQWKRASPEPGEVSGGRTMSRSSDSGKMSNDEKEDFEANEDDYMDVDKGHASDSDTENRMSDTDSDNEIHRPETPEREKAPHRCINMLQDCINVDEFERLN

SEQ ID NO: 196700 - protein, 146 aa, Zea mays
  unsure (1)..(146): unsure at all Xaa locations
  Clone ID: MRT4577_110974C.1.pep
VHPRIRIAVATLLVVATCKPEEEITCEENVRFTCSQTDRFSRQDFDSDFIFGVASSAYQIEGGRGRGLNVWDGFSHRYPEKGGADLGNGETTCDSYRTWQKDLDVMEELGVKGYRFSFAWSRILPRXKRSRGINEDGIKYYSGLID

SEQ ID NO: 196701 - protein, 73 aa, Zea mays
  Clone ID: MRT4577_110975C.1.pep
GWGLNETGNLLSCLKNQDHIDQRGSSSQWCEEGHPTLLPLGYCFNTVFTITNGRTVLALVGHYMHIGGTHRFG

SEQ ID NO: 196702 - protein, 90 aa, Zea mays
  Clone ID: MRT4577_110976C.1.pep
SGVWLLGSAHITWKWSTPVRPSVMFSLPLPWTPRSDRSALPISTIRQDIDNERGVDWSSLRRCVQLTCQNRKANSISVHPPRHVLSQGVH

SEQ ID NO: 196703 - protein, 221 aa, Zea mays
  unsure (1)..(221): unsure at all Xaa locations
  Clone ID: MRT4577_110977C.1.pep
PRVRPLGTIGNLTALRTLSLRLNALSGGIPADIGSCTELRHLYLQGNQLDGQVPEGFFDLGLLQRLDLSNNRIAGGVSPEFNRLQRLATLYLENNSLNGTLPSNLDLPKLQLFNVSRNNLTGPVPKSLARMPASAFDGTGLCGDPLAPCPTPPPPPQPPVPAAANGSISAKLSTGAIAGIAXGAAVAFLVLIAVILFLCFRCQRTMGEKIRRDGGRRGPGR

SEQ ID NO: 196704 - protein, 72 aa, Zea mays
  Clone ID: MRT4577_110978C.1.pep
ISPLILFHWWFKIKMGGSTPTSKQPNPQHIQRFLTFYKIYTFTKLTIGFRYMQNVTAFQQLLTTLVDPSSFL

SEQ ID NO: 196705 - protein, 52 aa, Zea mays
  Clone ID: MRT4577_110979C.1.pep
LSFSKLGTEFGYPSIAFQCVAILPCRAYICTKQLPPFSHLFYINVNPFIDYL

SEQ ID NO: 196706 - protein, 132 aa, Zea mays
  Clone ID: MRT4577_11097C.1.pep
MCGGAIIADFVPAGARRPATDDTMSASILSGSEDHPELPLPLPAPAPGRKTAYRGIRRRPWGRWAAEIRDPRKGARVWLGTYATPEDAARAYDVAAREIRGPKAKLEAFLGLQDTDEGGGVEAWDAVDLMLA

SEQ ID NO: 196707 - protein, 69 aa, Zea mays
  Clone ID: MRT4577_110980C.1.pep
QCILGGQGQGPFTVSRQGLQSVRSSSRSFRSRRIRTTMSRLSEPCLRSRRAEMTGSFNEPDSPILAISS

SEQ ID NO: 196708 - protein, 51 aa, Zea mays
  Clone ID: MRT4577_110981C.1.pep
RPRWPFGNISAPLMFHDYHFFVRACALRSAYMFLGSRPDVPKTKKRAPLMI

SEQ ID NO: 196709 - protein, 287 aa, Zea mays
  Clone ID: MRT4577_110982C.1.pep
IGYLEAGRGDHRYVHFTVVHTVRVCPPNHQAIEPSNHRFSHPSSILEMNYTGYTIGSNSDYSPAQEMLSYPDQLGGTYIPDNYTTSPGFSLESFFDQAAFPSADVSTIFPKEQGQYATFPSSGASTTNDMAGNRISSHSTSRHPSDAAPLGKLEQFSFGFSFDALSTEPFERACFSPNTHISSRTPSLCGDASEKTSSPSSLTLSPCSLKRESPSSPDSASEEQPTPPRPQRKRGRPRLDRNETISSTSSPKGPKTGRLPHNQVERKYREGLNAELERLRKAVPTLT

SEQ ID NO: 196710 - protein, 179 aa, Zea mays
  Clone ID: MRT4577_110983C.1.pep
MGVIGGTPPASCPATRHCAEWARIYLKYCLCSQKEGAALALGLISVVSWGLAEVPQIMTNYRHKSTEGLSVAFLMTWIVGDLFNLAGCFLEPATLPTQFYMALLYTITTLILTGQTIYYSHIYHHLKLKNSRAASKPQKHQHRDASLREKLLGAKGGAASRNNESDTTVLTQAHLSLGV

SEQ ID NO: 196711 - protein, 144 aa, Zea mays
  unsure (1)..(144): unsure at all Xaa locations
  Clone ID: MRT4577_110984C.1.pep
LEPAGRTLTCSLHYLVSTHCPTIICTSSVQRQRPADVGRTRSAVLCAGEAAGLLMAPVATTTDGEITCTEMRSPIXTCLSXTRGTSCRPSPCXCSPITILVSTARTRADRRPHRTCLENAIRPATTLTSIDIAEVLSESPVTIP

SEQ ID NO: 196712 - protein, 161 aa, Zea mays
  unsure (1)..(161): unsure at all Xaa locations
  Clone ID: MRT4577_110985C.1.pep
IGEDDALGGTTTYLKAVIKETLRLHPPVPLLVPHLSQEDCDVDGYTIPSGMPLLVNAWAIGRDPRLWDAAEEFVPERFVRXGGVDFRGMDFEFLPFGSGRRMCPGVNFALASTEILLANLVFHFDWELPRGVDTVDMAEVFKLTVSRKHELLLSPRAARGT

SEQ ID NO: 196713 - protein, 63 aa, Zea mays
  Clone ID: MRT4577_110986C.1.pep
FPLTEGNIGLRARAGRAFFFFFFFFFFFFFFFFFFFEINLNQYLIFLGNTRRYDPARPTPGVT

SEQ ID NO: 196714 - protein, 132 aa, Zea mays
  unsure (1)..(132): unsure at all Xaa locations
  Clone ID: MRT4577_110987C.1.pep
MGILDHMSHVCSITETKEALKLRKKRPLQTVNIKVKMDCEGCERRVKSAVKSMRGVTSVTVNAKQSRGTVTGYVEPAKVLEPRKATGKNAEMWPYVPYTLTTYPYXGGAYDKKAPAGFVRSAPQAMADPSAP

SEQ ID NO: 196715 - protein, 146 aa, Zea mays
  unsure (1)..(146): unsure at all Xaa locations
  Clone ID: MRT4577_110988C.1.pep
MSHVCSITETKEALKLRKKRPLQTVNIKVKMDCEGCERRVKSAVKSMRGVTSVTVNAKQSKCTVTGYVEPAKVLERVKATGKNAEMWPYVPYTLTTYPYVGGAYDKKAPAGFVRSAPQAMADPSAPEVKYMSMFSDEXNSTACTIM

SEQ ID NO: 196716 - protein, 91 aa, Zea mays
  unsure (1)..(91): unsure at all Xaa locations
  Clone ID: MRT4577_110989C.1.pep
GEVRVAAAEERGQVRPDQLDDLVAGRSSSCRDISHHTIRVRLLFSAHPTQELHDGEACLSRSLEVHEPLIADGVTATRHAATEAEXRRLEG

SEQ ID NO: 196717 - protein, 229 aa, Zea mays
  unsure (1)..(229): unsure at all Xaa locations
  Clone ID: MRT4577_11098C.1.pep
MCGGAIIADFVPAGARRPATDXTPCPPPSSPVLRCEDHPELPLPAPGRKTAYRGIRRRPWGRWAAEIRDPRKGARVWLGTYATPEDAARAYDVAAREIRGPKAKLNFPPAVGGGGGGARAPAPAAAKRRRKSAAAEARGRARPRLLRRRRRRPSWRAAGRRRCATACPGSRRSWGCRTPTRVAASRRGTPWTSCWRRPYAVAGGLWAPAPAPARACRRCERPPQLFWIE

SEQ ID NO: 196718 - protein, 145 aa, Zea mays
  Clone ID: MRT4577_110990C.1.pep
ECSSEQAITMPHVSQVIRFHPAETKSSDIISVTNLLRSGSTDDASSRYASLQCLIIPSTSIAVRRNTGRQSGELGEKDLGGSREDGCSQALTSLRAQTAYKRSNQRATSVISAFIVGVCGEGALWIFRSRRNLLSHGVFSGRSAR

SEQ ID NO: 196719 - protein, 60 aa, Zea mays
  Clone ID: MRT4577_110991C.1.pep
CRLCNSIRLCRVFLCRRGSQILPMSRVGMCTRLSTYSVIPRYSAGVCHRAHYRLPPLTQA

SEQ ID NO: 196720 - protein, 114 aa, Zea mays
  unsure (1)..(114): unsure at all Xaa locations
  Clone ID: MRT4577_110992C.1.pep
GFXXSLRHXWCVXTLXPXKGGTCXXCRXRXPRXSWPPXXXRYWPMXNPRXAAEREEXTYCLLSPAGXRRLRKRAGSNPVXSXXHTPASWCTAMMGIMIXXPXAPRSRRAXRPVR

SEQ ID NO: 196721 - protein, 94 aa, Zea mays
  Clone ID: MRT4577_110993C.1.pep
ARNSARAAFAELVNTCDAVVGVHGAGLTNMVFLPPGGVVIQVLPLGPLEFVASYFRGPARDMGLSYLEYRISPEESTLLDQYPRDHPVLTDPMS

SEQ ID NO: 196722 - protein, 125 aa, Zea mays
  unsure (1)..(125): unsure at all Xaa locations
  Clone ID: MRT4577_110994C.1.pep
QFTGTVPAGGVGLXEGGVLDMXHNQLSGDLRXLSALQNLVALNVSFNGFTGRLPETAFFAKLPTSDVEGNPALCLSRCAGDAGDRESDARHAARVAMAVLLSALVVLLVSAALILVGRHWRAARA

SEQ ID NO: 196723 - protein, 58 aa, Zea mays
  unsure (1)..(58): unsure at all Xaa locations
  Clone ID: MRT4577_110995C.1.pep
ARKEHALLLMQRAVLXLTAMVTERAVCACTCASQGCYLLLCASECLSCGVRYRLRLTV

SEQ ID NO: 196724 - protein, 209 aa, Zea mays
  unsure (1)..(209): unsure at all Xaa locations
  Clone ID: MRT4577_110996C.1.pep
WTPAMVRSALMTTGRTVDNRGGYILDNGHSVIVGRRIDNFRVATPLVAGAGHVQPDLALDPGLVYDAGEHDYVHFLCALNYTAEQMRRFVXRTSSTAQERSPAAXSLNYPSFVVAFENCTDVRTLTRTLTKVSEEAETYSVTVVAPGHVKVTVTPTTLEFKEQMETRSYSVEFRNXPEGTRRQAXDFGQISWENGKHKVRSPVAFHWKN

SEQ ID NO: 196725 - protein, 82 aa, Zea mays
  Clone ID: MRT4577_110997C.1.pep
THSTQPPTNNIFFFPSTLSFLSDGSLSNLPILFNILTPNYHITLQPPFTIYLHTYITITYNTYPPHSLPILIYLILSTLTIS

SEQ ID NO: 196726 - protein, 97 aa, Zea mays
  Clone ID: MRT4577_110998C.1.pep
QRTPVKRVRDTPPRRLKKTGPLFFKKKKLGPGRGGRLNPRALFFFFSSGGGGSYPSKRRGEGSLTPKTFSISNFGEEAPGGLFFFLGEERGYFPKHW

SEQ ID NO: 196727 - protein, 120 aa, Zea mays
  Clone ID: MRT4577_110999C.1.pep
MWRRALAMVLFMGGAALLAGAAGAGAQQGVWSIITRPMFQSMLSHRGDSGCQGAFYTYDAFIHSGGGGHLFDTTREEHSPRGEIFADLFVADEHQPGRKDDEPWGRENEMLIHQRSGGAK

SEQ ID NO: 196728 - protein, 189 aa, Zea mays
  Clone ID: MRT4577_11099C.1.pep
MCGGAIIADFVPAGARRPATDDTMSASILSGEDHPELPLPLPAPAPGRKTAYRGIRRRPWGRWAAEIRDPRKGARVWLGTYATPEDAARAYDVAAREIRGPKAKLNFPPAVGGGGGARAPAPAAAKRRRKSAAAEESSASSPPAAVVVAGGGEEALRDCMSGLEAFLGLQDADEGGGVEAWDAVRLMLA

SEQ ID NO: 196729 - protein, 94 aa, Zea mays
  unsure (1)..(94): unsure at all Xaa locations
  Clone ID: MRT4577_1109C.1.pep
RNTFKGEKIASKVPADDKKKFEDAIDAAISWLDANQLSEAEEFXAKMKELXSLFNPIIPKMYQGAGENMGGAGGMDEDAPAGNGGPGPKIEEVD

SEQ ID NO: 196730 - protein, 46 aa, Zea mays
  Clone ID: MRT4577_110C.1.pep
ELFVPVFHLILLVPLVLALHVPCDLLSHGEPVLVDVVHLDLGVMVE

SEQ ID NO: 196731 - protein, 61 aa, Zea mays
  Clone ID: MRT4577_111000C.1.pep
PMVHLTPSGTWGCELCGALWCASKWRWSSNEHLWFVSHEWWLGLRWLKGPVVSSVVYQTLF

SEQ ID NO: 196732 - protein, 53 aa, Zea mays
  Clone ID: MRT4577_111001C.1.pep
PTRPHTPPQMCLLYHLNLLPRRLSILIRQIQILKLALSPTIFSINLNILKPIL

SEQ ID NO: 196733 - protein, 75 aa, Zea mays
  Clone ID: MRT4577_111002C.1.pep
FSRPGKCVLTPISYCWSTEALLTGQARRELRYTLDSIAGKQFMVARLATLNGAWCSIHHRFRPSFYLHYLWFTSK

SEQ ID NO: 196734 - protein, 93 aa, Zea mays
  unsure (1)..(93): unsure at all Xaa locations
  Clone ID: MRT4577_111003C.1.pep
PPRRVDRVRLGPAQXGSRTTPSRTGRRRGRRTTSRRRTWARRCRPPGRARSRTAPAATSLPGLMASCVASTPSYSICGRNGTHVYMCAVYIVR

SEQ ID NO: 196735 - protein, 57 aa, Zea mays
  Clone ID: MRT4577_111004C.1.pep
LTRTPTPIFLFHTTASLLCNSYYYNFLIFQHIFHPIHISHIILIYHLNIPYNPSFYT

SEQ ID NO: 196736 - protein, 206 aa, Zea mays
  Clone ID: MRT4577_111005C.1.pep
MALFKCMCIFLVSLLLALTFTNAQEESSHRTLPPFPCIPGQPRPPRLPPCPPAPTECYTSLSGMMPCADFLTHNEVPPMPPTVACCDGLRSLVTNASICLCHIVNGNINKLLPAPMIPVRMVALPRFCVVRFPRAILRRCIRGHLPPMNPPPPPEASPSKPPSTSPAASPSESPPAASPPESPSTPPPESVDYTADTSSSTTEITV

SEQ ID NO: 196737 - protein, 327 aa, Zea mays
  Clone ID: MRT4577_111006C.1.pep
DAVELMFEPDALRWLARAGVSRATAVLQVCSSIAFDKGVESCLKYIEAVPWSESEEEKLKHVFARCTFGESVSKDVLARLQQQCASGSEDLAVQLVESITSGANNGARKEMQSLVSGLLSRSSVYHKDLSGVNKGGLYRICRSCLSSLVELFMEDSDGGQAMAPSGRRPMVERISQQTENLNWLLDILLNNDMAEEYVELWGTQEELIRMHERASPMFRYELSRVSASVFMALGRGRIQCPSDTRSQLFRGWFRPMLVDFGWLQRCSKGLDVRVLEENLGQALLTLPLHLQQSLFVEWFQCFASRGTGGCPNLSRAFQVWWRRSFVN

SEQ ID NO: 196738 - protein, 70 aa, Zea mays
  unsure (1)..(70): unsure at all Xaa locations
  Clone ID: MRT4577_111007C.1.pep
AGRVRSYLRPSQPSELFHLWLLKSLFXINMXRKGTHFLTVYKGNDIPNLLYILFFFYLSPPPPPPPPLTP

SEQ ID NO: 196739 - protein, 37 aa, Zea mays
  Clone ID: MRT4577_111008C.1.pep
LNSTHYSIHYNYLTIKTIELPNLFNFQNIILLTTSIL

SEQ ID NO: 196740 - protein, 118 aa, Zea mays
  Clone ID: MRT4577_111009C.1.pep
MSGVQEQFEIKFRLPDGTDIGPRRFPPASTVATLKETIIAQWPKDKEKGPRTVNDLKLINAGKILENNKTLSECKSPICDFSAMTTMHVVIRAPTSSKQSDKRAEKKAKNFRCGCAIM

SEQ ID NO: 196741 - protein, 174 aa, Zea mays
  Clone ID: MRT4577_11100C.1.pep
HIRRHLTQKARGCTYLILWLDCDREGENICYEVIDCTGIPENEAGRRIFRARFSSVTEKDISSAMDNLVLPNKDESLSVDARQEIDLKVGVAFTRFQTRYFQGKYGNLDSRVISYGPCQTPTLGFCVQRHQQITTFKPEKFWSLKTYIIKDSDEIQLEWDRKKLFDFDVTVMFQ

SEQ ID NO: 196742 - protein, 78 aa, Zea mays
  Clone ID: MRT4577_111010C.1.pep
PVMMAALTVCIHAWRVFYLKRQVSVVVVIYLHSKFLNPWGLFVFPSTVNMYRPVSAIKWSPCRFVLNSPCLKWTVMYF

SEQ ID NO: 196743 - protein, 111 aa, Zea mays
  Clone ID: MRT4577_111011C.1.pep
NHASETRSAKKMEDKVSKVVEVFVGRIRKMENDFISLNKRASMLDVQLECQDLERISIVNRLGRFHGRNHAAAVEGSSASEMTPRRIFPERHVMSFAVPGNLPEGVHCLSL

SEQ ID NO: 196744 - protein, 73 aa, Zea mays
  Clone ID: MRT4577_111012C.1.pep
RLPLREIMICRSVSKFFLQLLSTPSFLQVLSSSHPPLQLLGLRNRHHTPSHTYLPLFDPVTKSWIHFPLDFSP

SEQ ID NO: 196745 - protein, 166 aa, Zea mays
  unsure (1)..(166): unsure at all Xaa locations
  Clone ID: MRT4577_111013C.1.pep
PPAKGGGPARAKQRREGTHEAXQXXRNXDXERXAGRXDENAXXPXRXQPKTGTNGXARDXXNPDGTXKXXNETRADGRRGHNEGTARRADXASDEAKXKGRXNXPPXXPXNPXTGDNXXXHNDADXQXAXXGQPXRNHXXXXXRQPHXDEXXXKEXXEXAKEEGXD

SEQ ID NO: 196746 - protein, 89 aa, Zea mays
  unsure (1)..(89): unsure at all Xaa locations
  Clone ID: MRT4577_111014C.1.pep
IGQSFAKCAKALEHAFNTLQEFSCNKGGGAKXKFPQIXHFSHKAIEVAKAAKKANDAXYAFRLLEPPGNVVVFYFCIFFLFLFFLNVIC

SEQ ID NO: 196747 - protein, 139 aa, Zea mays
  Clone ID: MRT4577_111015C.1.pep
AVCGKTLLGRALWLNRNPPPTTVTVFHPPKTTNRRWGDRWVLSQMIRPFPVVADPLGGGADNRSKCCSWARRFGHVKDIPGTERGSLLCAAFHGLSVLRMRVPSAALGRETVLPEKRAGTELNRQGAPPERWPGRPGIK

SEQ ID NO: 196748 - protein, 47 aa, Zea mays
  Clone ID: MRT4577_111016C.1.pep
ENTHSSKSQLLFLYCRLNNNYLILNACYIPYYASNSSSLSNPLKTFT

SEQ ID NO: 196749 - protein, 234 aa, Zea mays
  unsure (1)..(234): unsure at all Xaa locations
  Clone ID: MRT4577_111017C.1.pep
PAGIASEARQQMSFRQMLGLHPMPVWFETGIPQSWAWTYLAPYISSCPANTTRLAWANFPALHVVXKRILTASPPXTKPYEVAGNRTGDXPIPPSLQTSPASTSMPPSXGYGCGPAIAHNRSEPLSFPGKLVNLTWDMPGQAVGPNNSYFTSTQAGTPTFAAWVSQLNLTYTPLTITGNNTGYTYQPDSEVYQGDPASNGTMFLAITDSGMFLTPFNLSMINPHVVALGLYQAG

SEQ ID NO: 196750 - protein, 112 aa, Zea mays
  unsure (1)..(112): unsure at all Xaa locations
  Clone ID: MRT4577_111018C.1.pep
VPSTTXWEPSDGARRGTYYRGALRAALHARAPSALLCTGAARGKPVGAALVLSXRARARFRRRAGGHSTXXASGRAARLSXTPREHIRAGVSIRPRRVHFFCVGFRKRPCVF

SEQ ID NO: 196751 - protein, 534 aa, Zea mays
  unsure (1)..(534): unsure at all Xaa locations
  Clone ID: MRT4577_111019C.1.pep
MLKESMHYAGRWIDSWEALKRTMTPWPRCNLADCCCSASLRANHPHIPCLTPSHRHCRHRALRSAPLPLGFRFLPPSTSHLLLFMPQPLPAAVGTKSASVSPLRPRRATACVSVSLSARFSPSATRRRVRSCLPRGMAAAGAWLARATATAVLGFVLAVASAEAASGDVEMVFLKAAVAKGAVCLDGSPPVYHFSPGSGSGANNWVVHMEGXGGWCRNPDECAVRKGNFRGSSKFMKPLSFSGILGGNQKINPDFYNWNRVKIRYCDGSSFTGDVEAVDTAKDLRYRGFRVWRAVIDDLLTVRGMSKAQNALLSGCSAGGLAAILHCDRFHDLFPAKTKVKCFSDAGYFFDGKDISGNFYARSIYKSVVNLHGSAKNLPASCTSKPKQSPELCMFPQYVVPTMRTPLFILNAAYDSWQVKNVLAPSPADPKKTWAQCKLDIKSCSASQLTTLQNFRTDFLAALPKTQSVGMFIDSCNAHCQSGSQDTWLADGSPTVNKTQIGKAVGDWYYDREVPRQIDCPYPCNPTCKNRDDD

SEQ ID NO: 196752 - protein, 90 aa, Zea mays
  unsure (1)..(90): unsure at all Xaa locations
  Clone ID: MRT4577_11101C.1.pep
DFLTKEVQFXDRLFTLQIWGTAGQERFQSLGVAFYRXADCCVLVYDVHSMKSFDNLNNWREESLIHASPSDPDNLPVVLVGNKVHVDRGN

SEQ ID NO: 196753 - protein, 85 aa, Zea mays
  Clone ID: MRT4577_111020C.1.pep
QSYLLWEGFYGCLIRGHLQYILMIYSDPFHFLGYSLKQSSFLQPIFLVLPVTYLIVFLLVLACNGFFFVETVFINVVVFSSLYLL

SEQ ID NO: 196754 - protein, 102 aa, Zea mays
  unsure (1)..(102): unsure at all Xaa locations
  Clone ID: MRT4577_111021C.1.pep
CAALEAGGLDXXARXGFGDRVRRQLQSVGRLAAYLGGGFLLLSATSSVAVSALSDNYEDKHKNDITCGFCKRGRRQLVQKEYEESDWPTIWHNKSRKKQHNS

SEQ ID NO: 196755 - protein, 55 aa, Zea mays
  Clone ID: MRT4577_111022C.1.pep
PTPVTSQERECSTPSEPATAATLAITHSADQGALPPRCCEHSKSISRQEPPLGHA

SEQ ID NO: 196756 - protein, 74 aa, Zea mays
  unsure (1)..(74): unsure at all Xaa locations
  Clone ID: MRT4577_111023C.1.pep
SSRVRKKRFWDVLESCKQKVEAMEAMESPLVAFQEAEDGGAVXGDGGGGGRGSGGGADGMRLVQLLVACAEAVA

SEQ ID NO: 196757 - protein, 73 aa, Zea mays
  Clone ID: MRT4577_111024C.1.pep
KKNPLVDGQRSRRGWVPADTNSPEIGDKQKEYYWLAGCNFCPGGAFIPYTRLGDGPHANNGPFFLPVDPAPPT

SEQ ID NO: 196758 - protein, 36 aa, Zea mays
  Clone ID: MRT4577_111025C.1.pep
PFEPVPERVLPKYIYVELFKDPQKFLTPNVPDDVLY

SEQ ID NO: 196759 - protein, 73 aa, Zea mays
  unsure (1)..(73): unsure at all Xaa locations
  Clone ID: MRT4577_111026C.1.pep
VVDGLTWATDHHSLLFSFSTYREGLEAKIILDWEPHRSXRGFGFLTFSTEEAMPHAIQGMNRKELDSRNITAY

SEQ ID NO: 196760 - protein, 58 aa, Zea mays
  Clone ID: MRT4577_111027C.1.pep
SPVTVYRPHKYSLNVNGPTWKPLQAHVLLLTRDTQLSASGQKCGYIYMTAYPPMFCIW

SEQ ID NO: 196761 - protein, 83 aa, Zea mays
  Clone ID: MRT4577_111028C.1.pep
NNCKKTSRIPAFAFQVTEHKSGSQGNAQPLMPFVILPYNLKGARLKMYGANCDYWSGLGLLPLDYPSPDMFFCKDAWGFWYWW

SEQ ID NO: 196762 - protein, 74 aa, Zea mays
  Clone ID: MRT4577_111029C.1.pep
FFKKKKKKKKKKKKKKKKKKKKKKKKKKKKKKKKKRKKKKKKKKKKKKKKKKKGGFFFREPKNKLGGGGVLKTF

SEQ ID NO: 196763 - protein, 91 aa, Zea mays
  unsure (1)..(91): unsure at all Xaa locations
  Clone ID: MRT4577_11102C.1.pep
AACYNLIDMLWTSACAFLLMAVLGYMDQNLASTGLSLTIAPIISVSYVLITXPTSLSTSXYNMYNAQSYCTLFVDLILYMFETDWATRGID

SEQ ID NO: 196764 - protein, 77 aa, Zea mays
  Clone ID: MRT4577_111030C.1.pep
LKGPTLKKEHLQQREEVGKKKGFSQPPQVKKKKTRHFQFDPPKREKGNLLYSFSTFPTSFINIFKNLPFLLFLFFYL

SEQ ID NO: 196765 - protein, 87 aa, Zea mays
  Clone ID: MRT4577_111031C.1.pep
RGVIARAVRCTCRSSLAARGMGERARELRPSSTRSKQACAREPLGCRRELEGKGVRHGKGSRAGRDAARSGRAPELEKGASGRDLAC

SEQ ID NO: 196766 - protein, 108 aa, Zea mays
  Clone ID: MRT4577_111032C.1.pep
DGDGRLGSAPGELPARRGASRVRRRAVLQVLHHLVSQTRRLYVFRPVPPLHFRAVIWVLRWARRCCLPFRCSRAGVRAMLSPSESYGIFVVLGYVDRPPSTYVFPGCV

SEQ ID NO: 196767 - protein, 78 aa, Zea mays
  Clone ID: MRT4577_111033C.1.pep
SSHTETISSHPGPQQSHISNTSIDGSADTSQASVASDSTDGRPVKYKLVADLLWRLSKKIYTDEEALLTEIEEPTSYR

SEQ ID NO: 196768 - protein, 58 aa, Zea mays
  Clone ID: MRT4577_111034C.1.pep
HTICTIIPNLLVIQPSSIYAIIYLCTNWQVDIKVAPGSLAYEESVNKPLNVMERVAAA

SEQ ID NO: 196769 - protein, 153 aa, Zea mays
  Clone ID: MRT4577_111035C.1.pep
MFQWYSKVAGQTDKKPDDATPPADDVLGGMMNYQRISYAGLDRATNGFADTNLIGVGKFGSVYLGALPLVPKGAPDSAPEKVAVAVKVFDLCQVGASKTFVSECEALRNVRHRNLVRILTCCVGADARGDDFRALVFEFMPNYSLDRWLGVNP

SEQ ID NO: 196770 - protein, 575 aa, Zea mays
  Clone ID: MRT4577_111036C.1.pep
MQVPVGFLGKLWSFVSFVPFFVLLLLLGSIKAAIVGPVTASIVFFGSSAVIIGLWPAHFIWTYYCVLKTERIGLQLKILTGLLLPLPLLLLPVLASIGSLLGGTGYGVFVPLMATFEAVGEGVTDKLTHCFTDGTVSAMAGACTVVRDVTDFCFHSYFSFMDDLIDKMGDNEEAPLDIKLSYLPRSMVVAFIAVPVDVLLISAVALWKSPCMLFKGWQRLCEDLVGREGPFLETVCVPFAGLAIVLWPLAVIGGLLASFFSSFFFGFRAGLVAYQEASFQMGLAYMISAVAIFDEYTNDLLYLREGSCLPRPKYRRADIMRECETEPAERQQTGHHKHRRTLPRSKTFMQTVQRLRPIQIWDWFFRSCELNGRILVSEGLITAQDMEQYITNNGKCKKLGTKLPCWCIFQCLLRSANSDSDGLVISDHVQVTTLNWPKDRVLDWLLGPLLLIKDQMKKLEVTEDEEMCLRKLIMTSKNEKPSDWDDSGFPSDDNIKRGQLQSIIRRLQGIVAYMSRVPSFRRRFINLVKAMYLEAIEAGAIDGSRKVKADVADRCAEDIAGSCSSTDTRANIHMV

SEQ ID NO: 196771 - protein, 40 aa, Zea mays
  Clone ID: MRT4577_111037C.1.pep
MPNTTGHQMLLCVLTSVPCLIWAFEGSTPRSEQLKRRGFL

SEQ ID NO: 196772 - protein, 129 aa, Zea mays
  Clone ID: MRT4577_111038C.1.pep
NRARHHRLVILKSITYMPPLHTGTLTLHIIYDEDVALPIVTYADVGVAGHAGGPHLRREAECVVLSAGPRQRIDEHGLRELGPAGRFVEHLQHQLDAVGLGLGIRERHGDKHGPTLEEDATTGRCEGFG

SEQ ID NO: 196773 - protein, 65 aa, Zea mays
  unsure (1)..(65): unsure at all Xaa locations
  Clone ID: MRT4577_111039C.1.pep
VFSRIDHKFDLMYAKRAFLHWYVGLGMDEGEFSEAREALAALEXDYEEVGAEFFQGEDGDEGAEY

SEQ ID NO: 196774 - protein, 31 aa, Zea mays
  Clone ID: MRT4577_11103C.1.pep
PNPKPIYCHQSTPPPINALSPSFFNRSPPPP

SEQ ID NO: 196775 - protein, 90 aa, Zea mays
  Clone ID: MRT4577_111040C.1.pep
FCRSRLPFFFRSATPFFRNRFSSSLFYSVLQGAFALSRSKWSKKSLLDSVMYFVVQLNFLSKSPPPPLRFRSNPGESFVFWRSMPCMAWF

SEQ ID NO: 196776 - protein, 175 aa, Zea mays
  Clone ID: MRT4577_111041C.1.pep
PGLPAAWSDETAPSRPSPDSKLSQTLRIFLWWRPPPTLVRVCLHGALECLSQGRPRRAGAAGARRNAPQDRVLVDHARRFAGEGRPTARRILPLCGDAGLQRGLRLPRLRMSLWEELHLHRKLCAKVSLLIILQISARILYDSEVDVIGIQVNTNEVIVQRKKKKIKVPVCREGI

SEQ ID NO: 196777 - protein, 54 aa, Zea mays
  Clone ID: MRT4577_111042C.1.pep
FNTNGNNRADERFILIIHPLSTLLRVCQIILITTNTTSTLLYKKIVDRRHQKLY

SEQ ID NO: 196778 - protein, 69 aa, Zea mays
  Clone ID: MRT4577_111043C.1.pep
NVNGPSFPFCLLALKKKLAPKLPRLHAAGLATLPLFRGQPRAHFSGPGGYKLFGGLHAAGGVPFFLPPP

SEQ ID NO: 196779 - protein, 144 aa, Zea mays
  Clone ID: MRT4577_111044C.1.pep
MASPERFRVGLDISESALAKANETYGSSPKAEYFSFVKEDVFTWRPTELFDLIFDYVFFCAIEPEMRPAWAKSMYELLKPDGELITLMYPITDHVGGPPYKVDVSTFEEVLVPIGFKAVSVEENPHAIPTRKGKEKLGRWKKIN

SEQ ID NO: 196780 - protein, 62 aa, Zea mays
  Clone ID: MRT4577_111045C.1.pep
RSQANHSLVSSQANQVRGRDSFQGWLAPTNAADYTSGYIPSSEHSSMSIAGTLLHILRLLSR

SEQ ID NO: 196781 - protein, 70 aa, Zea mays
  unsure (1)..(70): unsure at all Xaa locations
  Clone ID: MRT4577_111046C.1.pep
LNMLWHVPKDVMVGAFDAVTLIGLMELFYDQTLNANLSLXCEMFMTYYTLTIYLSYALITVVSRASNRRG

SEQ ID NO: 196782 - protein, 80 aa, Zea mays
  Clone ID: MRT4577_111047C.1.pep
LCCLEPGAQGSRLSRPQSRGRCGWEGLYMWPPEHSGRPAATWRHVHTHAPASTQLIPAWCLQTAGATRGQGGEKELAEGV

SEQ ID NO: 196783 - protein, 120 aa, Zea mays
  Clone ID: MRT4577_111048C.1.pep
MASRFSIMLATTALATFFVIGSCTTPLTFKVGKGSKPGHLVLTPNIATISEVEIKEHGGDDFSFELKEGPAGTWTLDTKAPLKYPLCIRFAIKSGGYRIADDVIPENFKADTTYKTTLSI

SEQ ID NO: 196784 - protein, 104 aa, Zea mays
  Clone ID: MRT4577_111049C.1.pep
NLCVWFLSFVSSVQINTDKMTLAASELCVPWFLQLFSFFSHGCREVKRKEKKIRPLSYARRFSLYSLLFRAVNCSARQANSLMQCSSFIVDGSPFFPPLWFLSS

SEQ ID NO: 196785 - protein, 48 aa, Zea mays
  unsure (1)..(48): unsure at all Xaa locations
  Clone ID: MRT4577_11104C.1.pep
LACSRSYAVYCRRPPXXFFFFFSKNQNLINLTTCLRKIFLLIAHMICV

SEQ ID NO: 196786 - protein, 149 aa, Zea mays
  unsure (1)..(149): unsure at all Xaa locations
  Clone ID: MRT4577_111050C.1.pep
SSLPCCCGASPSTVSWFALYSTLVAVIYSQTMGALIMSNAVPSELTGPDWVLLYIFETIMLTSFLGFLFIYLSIHLLVGGKTXKIYAIIECVFIVFDSYYCKYVXRSATDTYLCSVFXXFDRTFLLVYPRCCDAKIIGGMEARCNFLKF

SEQ ID NO: 196787 - protein, 61 aa, Zea mays
  Clone ID: MRT4577_111051C.1.pep
AQMKQQHSTIPGSSVGVSKHTVYNCAKKWSVISYQHLSSANPYTQLFYDYVCLSHAKPCKG

SEQ ID NO: 196788 - protein, 75 aa, Zea mays
  Clone ID: MRT4577_111052C.1.pep
NLDTRNNYEFNSFFTSFDVDCRSIFFLHVSFMCCFQLALLIKSPAEGCATTGGAVAATSGGVGPTGDPEKRGSPA

SEQ ID NO: 196789 - protein, 53 aa, Zea mays
  Clone ID: MRT4577_111053C.1.pep
VRPGACATGGLLLAQGAPHGQHDCMARGCPVSGFFHPAQKGHRRAPDAWVDPG

SEQ ID NO: 196790 - protein, 46 aa, Zea mays
  unsure (1)..(46): unsure at all Xaa locations
  Clone ID: MRT4577_111054C.1.pep
NIDLIIIINKHYNMYENKSTNNKTIYYVASTRIXEISYTFSFKLHT

SEQ ID NO: 196791 - protein, 92 aa, Zea mays
  Clone ID: MRT4577_111055C.1.pep
YGRLRRVRGFLLRRSWVAPVVASWSVRCFWLLRRLSRLSGYGFSRVRALPLGCFPLVLLGSGATPFKLSRSPGGGRRLGGSKPRVLVPGRSC

SEQ ID NO: 196792 - protein, 40 aa, Zea mays
  Clone ID: MRT4577_111056C.1.pep
PLTAAVWLDSLLSFIFELRGPLIMFFSVLDPPPYKPGIKI

SEQ ID NO: 196793 - protein, 101 aa, Zea mays
  Clone ID: MRT4577_111057C.1.pep
LACSVRVSQDSSAQQQQFPATTHAPHVRTHACRLRLRRLRAGGAEAMEMVNLKLYLENRCIIAENERLRERASALRRENLALLQNLSSRTAAVPEPGAGAA

SEQ ID NO: 196794 - protein, 66 aa, Zea mays
  Clone ID: MRT4577_111058C.1.pep
HSLHSNPFLCALFLTAGLQHPWHHPTPRYLKFSIQHGPHDPIMSVCLPSNPWVTDDDAYWAMNAPR

SEQ ID NO: 196795 - protein, 69 aa, Zea mays
  Clone ID: MRT4577_111059C.1.pep
SLSLLNTLSLAFQGRASPYCLYECMLNQEIGLGPQWLTLAMEIHITTPILTANNIPGSKDVSSIEAAND

SEQ ID NO: 196796 - protein, 130 aa, Zea mays
  Clone ID: MRT4577_11105C.1.pep
MMVMGYFRSSTTKSATAAAKQKARTTREELGLREALLDQPAAAEEEGGVPKGYFAVYAGEESRRRFVVPTGYLREPAFRDLMERAADEFGFAQAGGLRVPCAEEDLEDLLRRLQRKNAAGKGKKKATVCR

SEQ ID NO: 196797 - protein, 114 aa, Zea mays
  Clone ID: MRT4577_111060C.1.pep
MCSGSWSWSSSKKRKRPSLVVVNLKRRQLQKTPPPTPPRSSVAIRRKRLRLRRLRAGAEAMEMVNLKLYLENRCIIAENERLRERASALRRENLALLQDLSKTPPVPEAGAGAA

SEQ ID NO: 196798 - protein, 58 aa, Zea mays
  Clone ID: MRT4577_111061C.1.pep
MEMANLKLYLENRCIIAENEKLRERASALRRENLALLQDLSKTPAVPEAGAGAGAGAA

SEQ ID NO: 196799 - protein, 85 aa, Zea mays
  Clone ID: MRT4577_111063C.1.pep
LSAGRSTGRVKTVAPQRSERLTLIQPAAQDRGRAMVIPRSVSVLSSGHQWSPTKKGRGSGCFLWSYGSSAAALCYNVWTGPGGPQ

SEQ ID NO: 196800 - protein, 86 aa, Zea mays
  Clone ID: MRT4577_111064C.1.pep
LINIPFSGWASIGPFLSLLYTMAAPVLQFSLHSELSPGPTAIYCSWHLLFIFVERRWSSFLPTRIPDWTAFWYPRALRVLERGKIQ

SEQ ID NO: 196801 - protein, 91 aa, Zea mays
  unsure (1)..(91): unsure at all Xaa locations
  Clone ID: MRT4577_111065C.1.pep
RVSCFLCYXLPFLIXIXVLPFPPFFLXLVLFLGGXFVCFLRSLVICCWLRSVIFLPSFFXXTXTPFFSSLCFXXSFXLPSLCRFLLFLFRV

SEQ ID NO: 196802 - protein, 247 aa, Zea mays
  Clone ID: MRT4577_111066C.1.pep
FRFRVGHCIAGARRVLVYQFVPNKTLEFHLHGKGQPVMEWSTRLRIALGSAKGLAYLHEDCHPRIIHRDIKSANILLDNNFQAKVADFGLAKLTSDSNTHVSTRVMGTFGYLAPEYASSGKLTDKSDVFSYGVVLLELLTGRRPIDAGDARPFLDDSLVDWARPALSRALADGDYDGVADPRLRGNYDPVEMARMAASAAAAVRHWAKKRPKMSQIVRALEGDISLEDLNDNEGVRPGQSMAFGTAD

SEQ ID NO: 196803 - protein, 159 aa, Zea mays
  unsure (1)..(159): unsure at all Xaa locations
  Clone ID: MRT4577_111067C.1.pep
VFSXGVVLLELLTGRRPMDAGDARPFLXDSLVDWARPALSRALADGDYDGVADPRLRGNYDPVEMARMAASAAAAVRHWAKKRPKMSQVGGIRRQMLTPCFLSTAPSVGAAAPKRRLAMNGDGVLGADREGTRGGHLAGGPQRQRGGAAWAEHGVRHGG

SEQ ID NO: 196804 - protein, 103 aa, Zea mays
  Clone ID: MRT4577_111068C.1.pep
LRSMLPMTSSHWAKVLFVSTELAATAFLACGDSYAALSMCTGVLIVATATLATTYSPVSCFGSDFMSACSAPRYRSVVQELHSMCSRGHSSGGSRAHVYDVER

SEQ ID NO: 196805 - protein, 105 aa, Zea mays
  unsure (1)..(105): unsure at all Xaa locations
  Clone ID: MRT4577_111069C.1.pep
VRVRECRKLKVSNVLGAEQKDVQGLEQLLAANTPEAKAAEEDKGTKEPISRSSSPGLQVPVGAIHHQTKRMTKRSGRVGATAAVWXEASMQYLHDGVLELARRTT

SEQ ID NO: 196806 - protein, 98 aa, Zea mays
  unsure (1)..(98): unsure at all Xaa locations
  Clone ID: MRT4577_11106C.1.pep
MPKSRPDLHRGHRDARLPKTKPGRTLGPASRPAPMPEKVLRRRTKRERANLXRGTHQYHQQTHDRQRQATHSTGPRRADRRDTTGRRHAHGETERLAN

SEQ ID NO: 196807 - protein, 334 aa, Zea mays
  unsure (1)..(334): unsure at all Xaa locations
  Clone ID: MRT4577_111070C.1.pep
SCQPRCHLLKQPRPVAHVVGYAVSGLGFYHIPHPPLSRKKDSKTALVTIIGSTLSGDQLVAQLQRVVXQNSFIVTFPSKNELQGAIAFGGADVREKNVPMGTRMQFEEWHEEEEGFLLPKVWIRVTGIRKKLREFLNLWAIGSMLRSTQTVDMETTRKNNFGRVLVAVLDPKLLPTKLDAVIGDHYFELRFEVESVGFYENGDEVNQNFGDGNDGDNEDMDEDDPNDSSSLDREGKRSKKDLSRCQNGSDTSMGMGGAAPGGTSAAPVLALEHGVVNGGSLDGVLVDKLPAAFSVVGGVSDDGVCGGGSPSEAMLMADTEATMVAADLVQESLL

SEQ ID NO: 196808 - protein, 141 aa, Zea mays
  Clone ID: MRT4577_111071C.1.pep
CTYMRVPFDCEDKLWTQIWVESVSITEKAHHSPSLPHSSLLPRHNPVMALCAVAASTTTAFALSRLLAYTARPRGPPQVLAHAFLTVQRAVHVRRRTTPTTAGVVPPDASRGRPRIPGDAIDAVNSWSKTMATSALAAHAY

SEQ ID NO: 196809 - protein, 216 aa, Zea mays
  Clone ID: MRT4577_111072C.1.pep
YTLVFFSSFQEKNRGVKVNSVSISKSFQHPIKNREPKSSCKKKEKQEVSVLLDKKSKKGNRKSVLEIHKKDMANSVQTQSICKDQSKAGSSTAPNTTDMRCKLNSCCKSKHVTFSDGTDIFGRTAHLSADNTKQPQSVQTFQQATQEGRDHRDRDDQQLVYQQAEAISRTVEITNSLSENVVPAGVCRTIPLTKPKDITILGNSVDLNHCIETCHG

SEQ ID NO: 196810 - protein, 80 aa, Zea mays
  Clone ID: MRT4577_111073C.1.pep
IRFETDRSAFFTKHAVLGSVIVGIMTDSSAPDLLNKMRSALDAVRGSMGQDYGAATNNYRVMAGWQVDKIIKFDTACVGA

SEQ ID NO: 196811 - protein, 100 aa, Zea mays
  unsure (1)..(100): unsure at all Xaa locations
  Clone ID: MRT4577_111074C.1.pep
MVVTTDGECVSLVKVESTLATSRYAESIMDYSDPFHIYCAALVAPARQALEKWAQTXGYTETALXKLCPYGPTTKEVPHSLSKASKPTRLNRFNVPRKIK

SEQ ID NO: 196812 - protein, 193 aa, Zea mays
  unsure (1)..(193): unsure at all Xaa locations
  Clone ID: MRT4577_111075C.1.pep
VLFCLKKKKKKKKKKKKKKKKKKKKKKKKKKKKKKKKKKKKKKKKGGGGGPFLPQFPGVFFSPPPPPKGKIKRKGPEPFNPPKGLDWAPKGGKLNPPFPFPKRKTPPGGPGGAPRGPPEKKTPSPPGGPPWGGPXQRGPXGPPPPXRREPPPPNFPPGGGDWKGPPGGPPTKGPPNWLQRGKGAFFFQNPPRI

SEQ ID NO: 196813 - protein, 96 aa, Zea mays
  Clone ID: MRT4577_111076C.1.pep
HSYPVFTSDNFAQGQGLKNCFTRKQNNPTQLPKPPILKIKCSCHFVLENLEPFQPETYSRPNAKTKIRVCLSRAPKFDVKKNNGPYICLGTGAPKP

SEQ ID NO: 196814 - protein, 88 aa, Zea mays
  Clone ID: MRT4577_111077C.1.pep
LLEEVESVAYYTRSSLAKSWPDWFKQEQGINRASPHFIVTGYANCGVDGWIHKVTSFLGNLIRINMENLPMCDCLPPLGQLPMLQELR

SEQ ID NO: 196815 - protein, 95 aa, Zea mays
  Clone ID: MRT4577_111078C.1.pep
PIWEAGGPWGPVSGFPGRAPGFPCTTGRIVPPYPWNCFFVLSPVLFLFSRESFVFSPGAFFPFLACVFCCTKVCWVLGFLCFWFCFGAPGHNNSP

SEQ ID NO: 196816 - protein, 667 aa, Zea mays
  unsure (1)..(667): unsure at all Xaa locations
  Clone ID: MRT4577_111079C.1.pep
MATPNGLARIETTGKKKQDNGVWYDDSSAPVRAQTIDELHSLQRKRSAPSTPKRSAPTTPIKGGAHSPFAVAISEEERHTQQMQSISASLASLTRETGPKVVKGDPAAKGEAAAQGAPSTPRAHQQHRHPAAPAIAVSDSSLKFTHVLNNLSPAELYEQAIKYEKGSFITSTGALATLSGAKTGRSPRDKRVVKDEVTAQDLWWGKGSPNIEMDEKTFLINRERAVDYLNSLEXVRQRXQYLNWDPENRIKVRIISARAYHSLFMHNMCIRPTDEELEDFGTPDFTIYNAGQFPCNRYTHYMTSSTSIDLNLARREMVIMGTQYAGEMKKGLFGVMHYLMPKRGILSLHSGCNMGKDGDVALFFGLSGTGKTTLSTDHNRLLIGDDEHCWSDNGVSNIEGGCYAKCIDLAQEKEPDIWNAIKFGTVLENVVFDEHTREVDYADNSVTENTRAAYPIEYIPNAKIPCVGPHPKNVILLACDAFGVLPPVSKLNLAQTMYHFISGYTALVAGTEDGIKEPQATFSACFGAAFIMLHPTKYAAMLAEKMQKYGATGWLVNTGWSGGRYGVGKRIRLPYTRKIIDAIHSGELLTANYQKTEVFGLEIPTEINGVPSEILDPINTWTDKAAYKENLLRLGGLFKKNFEVFASYKIGDDSSLTDEILAAGPNF

SEQ ID NO: 196817 - protein, 124 aa, Zea mays
  Clone ID: MRT4577_11107C.1.pep
TQYSLIATYHRLTIKHSTSEANQLLRSLRPTILLAAAAATTAVLLLWPAACVADDDGTTFPPSAFPFCPTRPAGVSTGPFPWSPPPPSSVAVFPQDPGFLTSDACAVPRLPLLAVFSVLLVFLQ

SEQ ID NO: 196818 - protein, 122 aa, Zea mays
  Clone ID: MRT4577_111080C.1.pep
GPSRPAGPGKQAKPWQPTPTTASAASPQLSPTVPGLRLLPYPSSSPAGARAHEVRRLGARRPLLRFLNRRWPRGEAVSVSTEPVDVVPYRTVGSVCRVLVVCLLSPVQRAALNLRFASSSGE

SEQ ID NO: 196819 - protein, 104 aa, Zea mays
  Clone ID: MRT4577_111081C.1.pep
IRHEARRESRAGEENAPHRAANETKPSHGSQPQPLPPPPRLSSLPRSPAEARAAEADAEAGKEEEHEADGGAHVNKATGEVGGPRGPEPTRYGDWERAGRCSDF

SEQ ID NO: 196820 - protein, 117 aa, Zea mays
  Clone ID: MRT4577_111082C.1.pep
MAANPNHCLRRLASALSHGPRPPTPPLSLLFPRLALSSSGPSTGPPPPPPDAVRKGEGEEAAEARAAEADAEAGKEEEHEADGGAHVNKATGEVGGPRGPEPTRYGDWERAGRCSDF

SEQ ID NO: 196821 - protein, 74 aa, Zea mays
  Clone ID: MRT4577_111083C.1.pep
VVVSAVYEGGAAERHGGVVKGDEIMAINGKIVTDYTLAEAEAALQKAWNQGGDWIDLVVAVCPPKEYDDELTFF

SEQ ID NO: 196822 - protein, 69 aa, Zea mays
  Clone ID: MRT4577_111084C.1.pep
MEPAPLVCQTELLGPLNAPRLPTVNCLRICMLCDTILNLFCACSSCYCTLRLLPETGVSHWPMYMRTVP

SEQ ID NO: 196823 - protein, 61 aa, Zea mays
  Clone ID: MRT4577_111085C.1.pep
RLNTNSHVRGRVVNVRRWNIMNTRQQNDGARRPFVLSLCNLNRCYCRCMYIITPTVSVVSH

SEQ ID NO: 196824 - protein, 45 aa, Zea mays
  Clone ID: MRT4577_111086C.1.pep
PGQSLDPPRERNRPKSGERRESVAPTVEVAGGFSVVRDGISRGDP

SEQ ID NO: 196825 - protein, 93 aa, Zea mays
  unsure (1)..(93): unsure at all Xaa locations
  Clone ID: MRT4577_111087C.1.pep
DFYRYLAENKTGAERKEAXAENTMEAYKAGQDIALAELAPTHPIRLGLALNFSGGYYESPNSPDRACRLGKQAFDEAISELDTPSEGGRQGQD

SEQ ID NO: 196826 - protein, 220 aa, Zea mays
  Clone ID: MRT4577_111088C.1.pep
MAPRTSERAMTSAAAGLARGAGPHYRGVRKRPWGRYAAEIRDPAKKSRVWLGTFDTPEDAARAYDAAAREYRGAKAKTNFSFPACLPLAAADVAGACRSGNSSSTTTTTTVDSFGGDVQAPPMQAMPLPPSFCASGAVRFPFSSYPVTHPYYFFGQAAAGCHMLKLPPTTVTVAQSDSHSSSVASLSASPSPSPPAGVSATRSAAFDLDLNCPPPAEAEA

SEQ ID NO: 196827 - protein, 61 aa, Zea mays
  unsure (1)..(61): unsure at all Xaa locations
  Clone ID: MRT4577_111089C.1.pep
HPPILIRTICYAEGWIRMENASWWIAPSQGTFFFXEKGLGASSVRATIPGRPAAGFFEGPG

SEQ ID NO: 196828 - protein, 62 aa, Zea mays
  Clone ID: MRT4577_11108C.1.pep
KRREGRTRCSDESCLTESPGRGFKAASPHLQEKGLPQFIPSSDPTHVGASGTSYAPLKMEEK

SEQ ID NO: 196829 - protein, 61 aa, Zea mays
  Clone ID: MRT4577_111090C.1.pep
AIAHRRDLDDIIIALLGRGARHFSGCYHDHSFTAYSWPKRRGRGQSLYNTSVMFNFHYGSA

SEQ ID NO: 196830 - protein, 186 aa, Zea mays
  unsure (1)..(186): unsure at all Xaa locations
  Clone ID: MRT4577_111091C.1.pep
NGSVQFKRQDSXKCIHVDHHPRPESKQPKXIEKIMTTLREESRLREINCPVRGGVKPNSGHSNNNQVEQPLQVSRTNSDMPCSLKSGNILSHDEHVNEVEASPPLKKLSPIVEHSPKMKTAGPSTPEPAKQITENGAAASGRTKNKSPLPARRPSPQRQAGAGTXFPSHNDXRRTHTKFITEREKT

SEQ ID NO: 196831 - protein, 186 aa, Zea mays
  Clone ID: MRT4577_111092C.1.pep
MMFRDILPKLKHGNDGLIFTCRTTPYKHGTDTHILKWKPPEENTIDCRLRLTFQQVDPTESERREGITEPFIDYDSIPKAELYVYRGDSGPDKYEFFNDVHINEEEWETLKSLNDPLDWRIVECNIDEQGRWRIVRFRDDKNEANHTTTTKSVLQSIEDRVSEKDLYRAAGDIKNAWKARASRGPK

SEQ ID NO: 196832 - protein, 54 aa, Zea mays
  Clone ID: MRT4577_111093C.1.pep
NKIVEMWGRNKEHATRAETVVLETVCITTVMTCVLRKTLISSVCYPNVHNNGMN

SEQ ID NO: 196833 - protein, 104 aa, Zea mays
  Clone ID: MRT4577_111094C.1.pep
EQNQNPGVKKRPKSNIYFLNSTRGLICPPPPRGFGHYIQDPNLKLPQEPAFSLSPVPKTTQGKQFDQNPNWGNPSPLRLKKTSLDDSTPANWFVLQAPNLLESL

SEQ ID NO: 196834 - protein, 141 aa, Zea mays
  unsure (1)..(141): unsure at all Xaa locations
  Clone ID: MRT4577_111095C.1.pep
LTQSGHACDEVCENPDLQAXGLQHAIRTGTIPLSPLLFEQSSALSLVHXLAHTIRAQXVEXLMLPVINQATVPNLSPYCXLQQYLAFNQLYTLNPAAYVQQQLLPFSQLATAYSQQHQLMTFNQWDRLNAAAYLQQHILLP

SEQ ID NO: 196835 - protein, 162 aa, Zea mays
  Clone ID: MRT4577_111096C.1.pep
KKKPYSKNDSTRSTASSPANLREPSAPLYHRCRDPASGASSGSALASRAAGRPAGGGGLRGMLMRAAAALPRRSSRPSEPGSSSSRAPAPGASSSRAPAPGASFDPFDVDTDPPSRPELTPEQIGLCVDALAHFEYKGKRRDDLSDEFKSLSVSGIRHMKTI

SEQ ID NO: 196836 - protein, 194 aa, Zea mays
  Clone ID: MRT4577_111097C.1.pep
MPYYSPRPVASATKTLTLAPELRRRSRLQMDGGGTHRTPEDVFRDFRARRAGMIKALTTDVEKFYQQCDPEKENLCLYGLPNETWEVNLPAEEVPPELPEPALGINFARDGMDEKDWLSLVAVHSDAWLLAVAFYFGARFGFDKESRKRLFSMINNLPTIYEVVTGTAKKQVKEKHPKSSSKINKSGTKPSRQP

SEQ ID NO: 196837 - protein, 91 aa, Zea mays
  Clone ID: MRT4577_111098C.1.pep
DGRHCSIWSRSASASAQQSRLSQQPEFDYLFKLLLIGDSGVGKSSLLLRFTADSFEDLSPTIGVDFKVKMVTGVGEKLKLAIWDSRGFRPI

SEQ ID NO: 196838 - protein, 45 aa, Zea mays
  Clone ID: MRT4577_111099C.1.pep
PTRVTTRPICNNQRLLLSQVGCCLPPAIFFIQPNGSSQCIRLSKL

SEQ ID NO: 196839 - protein, 124 aa, Zea mays
  unsure (1)..(124): unsure at all Xaa locations
  Clone ID: MRT4577_11109C.1.pep
WLRSCIMKGNIIYARYLDSKKTVAEDRRIVVAKXCDRSSXIEIADCCSHHVIPHVIVQDKGYPRHLFQAGWIRQQIIKYDXTTSILLLNTTYDLMILAPQIAPQHHICTLNDHPASYHYVSAKN

SEQ ID NO: 196840 - protein, 83 aa, Zea mays
  Clone ID: MRT4577_1110C.1.pep
MGKFMKPGKVVLVLAGRYSGRKAVIVKNIDDGTSDRPYSHALVAGIDRYPRKVTAAMGKKKIAKRSKIKSFVKVYNYNHLMPT

SEQ ID NO: 196841 - protein, 177 aa, Zea mays
  unsure (1)..(177): unsure at all Xaa locations
  Clone ID: MRT4577_111100C.1.pep
TRSRSGRKLGGQAVTLGLMPFMHMYGMTGICXTTLQNKGTVMVMDHFDXLSAYLGALLTHRVKQAPLVPXPHMLTMEKRTEDDEFKLSGLTLKSVMTVAMPLGPYLLSVFXPKLPGGQEEEENCLTDHICINLTNAIXDAKXGYLGQVVKKNTDRFILPKQKEKLVDPRNASLAAQE

SEQ ID NO: 196842 - protein, 44 aa, Zea mays
  Clone ID: MRT4577_111101C.1.pep
DTRYKPVQQAALTRVPPKVMLANTGSMHSYFLTRSSVSRALTRL

SEQ ID NO: 196843 - protein, 274 aa, Zea mays
  unsure (1)..(274): unsure at all Xaa locations
  Clone ID: MRT4577_111102C.1.pep
MAILVITMVNVQCCHCRASITKILESHKEEFCIEKIEFEEKLNKVIVRGKFDGEKLKKAILDKAGETVKIKEIALVDKWPPPPPPSPPPPKPECKVVPYPYPYPYPYPWSCPPPRPPCHCCKPPTPPPPKPPPPQPTPCQCHCCKPPTPSPPKPPPQPTPCQCHCCKPPAPSPPKPTPCQCHCCKPPAPSPPKPPPQPTPCCKQCEDSHDKDKCKRCPPCPPCPPCPPCPPCPPNYWPPHPWPCQCPPQXTASAPSCDXVRFLSCNLPPAAIVV

SEQ ID NO: 196844 - protein, 484 aa, Zea mays
  Clone ID: MRT4577_111103C.1.pep
MHSPECSWHGDNVDDNHVLTTVPSKTLTSPREKMDTPCNVKLPESTYSYQEDMELNSRLTVYMEEGIVPESPVVEVSHLRLEMDEAADFGAVPKRGSPKSRDERAHANVARSHKGPLNFEKNDQLLCGENEFDGSSRLYMLDQTRAKTEEPMHPSNVKMATTTRHTPGNMLCDSFSGDYQLRSGGDASGSVQQAPKYRRLCKYGDKIKRVSSISLDGCDDRFEECNIANKDRPNQIKHAMGTKRKTKRRLDAYIDEEVGVSEDAYVSEDEDDNQSEDKYEDSFIDDQATPTEFTQTEQGDRHNGDMMGFYRQSLFTQSPVVLPSRYLDVSYNSASRTGNSSYSSEARHNYTETPKEIQTQHHTINPSPSYSFVQDRCERGIANCESSTKLDCRKRRLSFQQPLAIPVINLEPEPAPEPSPHVASRVADHLYFDDGFFENLDLDAIEAQATEQWRQKTTQSTQKPVEIKNASDMSFAPPSFDLGL

SEQ ID NO: 196845 - protein, 158 aa, Zea mays
  Clone ID: MRT4577_111104C.1.pep
MAPLPQAVHLLLAFALALGCLAGGATATVVTTCRAAADSDARVDYAFCVAELGMHRESPDADTWGLAKVAALTGVNNADNAVYDIKALLANKRPDGPTRAALEKCGRLYGSVGFAFAEADDEINNRRYAAGKAKVAEAVSLARQRRAGAAQLLQRADR

SEQ ID NO: 196846 - protein, 259 aa, Zea mays
  unsure (1)..(259): unsure at all Xaa locations
  Clone ID: MRT4577_111105C.1.pep
RPGNVTAHTSVLSGCPITAKAKPPPIELILIITLFPTQRGHQESPPXRRRRRWRRCRRPSTSSSPSPSRXLPGGRRHRDGXRRAGRRRTATRAWTTRSASPSWACTARAPTPTPGXRQGGRADGRQQRRQRRVRHQGPARQQEARRPDARGAGEVREAVRLRRXSRSPRRTTRSTTAATPPGRPRSRRRCPSRAXRRRPRRGRRRPXRWRSTAPTTCGSLISASPSLTSSSEYYIWYCTFTETHEYQYHGVRPVRGRSS

SEQ ID NO: 196847 - protein, 161 aa, Zea mays
  Clone ID: MRT4577_111106C.1.pep
LADCGIVDMSRTQGEETTQRSIDNTKAEIEHGDGRAEGAPSVGMRLAQQASRLSGRWSGKLSAWSGRHTNRPWPRHQQTGGGAAGQQHWRGRGQPRMVCTRESRLSVMGRKLDTRKWKKHCCHYCSEQTSMWRSRADASVWWSSDDGETTSLVEHWVEGLG

SEQ ID NO: 196848 - protein, 68 aa, Zea mays
  Clone ID: MRT4577_111107C.1.pep
RIIDLMLFQLIPQGLGKLTHEYMARTGPASLNQYVVKRCILLPRTKKNDVFHATCQQIENTVPFTHAS

SEQ ID NO: 196849 - protein, 40 aa, Zea mays
  unsure (1)..(40): unsure at all Xaa locations
  Clone ID: MRT4577_111108C.1.pep
CALTIICLNSSRRCFHKVPPYVCFCPLGSSTESAPKKDLX

SEQ ID NO: 196850 - protein, 75 aa, Zea mays
  Clone ID: MRT4577_111109C.1.pep
DAARCILLRTVFRALSQPLQDIPTLSISVWPIAPHGIESGRSGGDSLHLLCMKAKAKARLPWPSLYMTCHEHETV

SEQ ID NO: 196851 - protein, 106 aa, Zea mays
  Clone ID: MRT4577_11110C.1.pep
EEVPVPVVVLGGGGGDSPASRGVAMDMEEVRACRDLGLDLPCDWTVEIPSCALSVSGVDTASSGGNSPASGSWRISSPGDDPKDVKARLKVWAQAVALASASRLGS

SEQ ID NO: 196852 - protein, 103 aa, Zea mays
  Clone ID: MRT4577_111110C.1.pep
RLSNFFLTKSFFKGILKFFVKVIVPPQIECKYLVPPLVILTISINQVMPLYGGQTKPNLNMVKTLEVSLVCSWKPPLLRCAKSNPCFAQKKKKQKRAPARDLE

SEQ ID NO: 196853 - protein, 90 aa, Zea mays
  Clone ID: MRT4577_111111C.1.pep
PFVSEALFRIPPYRRPACRYHQPPGAAGVPHCRAIGYPPEPRIPELPLKKTYCVGLVLVSLREPYLARDTLCRNKGNVLTYLGMFGRAIQ

SEQ ID NO: 196854 - protein, 53 aa, Zea mays
  Clone ID: MRT4577_111112C.1.pep
KRKKKHIYRLSNSDLLIPPTILQPPYLFAKIHDYVQVHEYNSYHTTTFVTYIP

SEQ ID NO: 196855 - protein, 105 aa, Zea mays
  unsure (1)..(105): unsure at all Xaa locations
  Clone ID: MRT4577_111113C.1.pep
APPLYRHLVLLLLLLPLXAFSGARGVSADDLVSELQSLRARAPSGVIHLTDTSVTRFLFGPSGRRPYFVLGFFDAASLHLKADLHLAQLRTEVGLLFASLLGHNP

SEQ ID NO: 196856 - protein, 71 aa, Zea mays
  Clone ID: MRT4577_111114C.1.pep
IASRRPCFFLEEEGREFPPLDYASREKRPFYNHHKKAVAMKALIHISSVLSNAPYLLNLYCDHYINNFKSI

SEQ ID NO: 196857 - protein, 521 aa, Zea mays
  Clone ID: MRT4577_111115C.1.pep
MPSHEACCGTMFWVYLMSCVGLVVFAGLMSGLTLGLMSLSLVDLEVLAKAGTPKDKLNAARILPVMKNQHLLLCTLLIGNSLAMEALPIFLDTLVPPYVAILISVTLILAFGEIMPQAICTRYGLSVGAKAAPVVRLLLILFFPVAYPISKLLDCLLGKGHFALMRRAELKTLVDMHGNEAGKGGELTRDETTIITGALELTQKIAKDAMTPISETFSLDINAKLDLHTMGMIMTRGHSRVPIYSGIPSNIIGLILVKNLITCRAEDEVPIRNVTIRKIPRVADDLPLYDILNEFQKGHSHMAVVVKRTKEAGVSTENQKSTTADYKINPKDAHADGSSPSYASNTAGSRRINIEKHGDGRPYNKKSEKKRENILDFNTDPLPSYSMDEAAVGIITMEDVMEELLQEEIYDETDEYVDVHNKIRINMLPPGKSLSPTISPGGGPLSQGLRKTPMASPFSPYYHCNSVLRSPASNHCQSPGTLPTILSPGRSPTAQTPGQSSPNGSQVSINSNGQHKKDGEN

SEQ ID NO: 196858 - protein, 639 aa, Zea mays
  Clone ID: MRT4577_111116C.1.pep
MASHEACCGTMFWVYLMSCVALVMFAGLMSGLTLGLMSLSLVDLEVLAKAGTPKDKLNAARILPVVKNQHLLLCTLLIGNSLAMEALPIFLDTLVPPYVAILISVTLILAFGEIMPQAICTRYGLSVGAKAAPVVRLLLILFFPVAYPISKLLDRLLGKGHFALMRRAELKTLVDMHGNEAGKGGELTRDETTIITGALELTQKIAKDAMTPISETFSLDINAKLDLHTMGMIMTRGHSRVPIYSGIPSNIIGLILVKNLITCRAEDEVPIRNVTIRKIPRVADDLPLYDILNEFQKGHSHMAVVVKRTKEAGVSTENQKSTTADYKINPKDAHADGSSPSYANNTAGSRRFNIEKHGDGRSCNKKSEKKRENILDFNTDPLPSYSMDEAAVGIITMEDVMEELLQVAHICNQVPMVWNKYLHCSQHKMSTMLSKYALRSPANDAEEIYDETDEYVDVHNKIRINMLPPGKALSPTISPGGGPLPQGLRKTPMTSPFSPYYHCNSVLRSPASNHCQSPGTLPTILSPGRSPTAQTPGQSSPNGSQEVNGSQYNFALDNFSLLSGPLCVVDGWCVVGINRMIEVSHSAAPGPPLPALLAVVFVSRYYKEQRSVTKYPCGIVNDVSFGVSSGIVNDVRHCD

SEQ ID NO: 196859 - protein, 84 aa, Zea mays
  Clone ID: MRT4577_111117C.1.pep
KKQKAFPAPPKKPIKFDNPFHEPGVTTDTGGSPMDWGPNIQRGGPIPKKTSGPGETNKRFMQICHTYFEKWGGHNLRLGNPQEL

SEQ ID NO: 196860 - protein, 210 aa, Zea mays
  unsure (1)..(210): unsure at all Xaa locations
  Clone ID: MRT4577_111118C.1.pep
MASHEACCGTMFWVYLMSCVGLVMFAGLMSGLTLGLMSLSLVDLEVLAKAGTPKDKLNAARILPVVKNQHLLLCTLLIGNSLAMEALPIFLDTLVPPYVAVLISVTLILAFGEIMPQAICTRYGLSVGAKAAPVVRLLLILFFPVAYPISKLLDWLLXGKGHFALMRRAELXTLVDMHGKXSXXSGELTXDEXTIITGALELTQKXAKDA

SEQ ID NO: 196861 - protein, 70 aa, Zea mays
  unsure (1)..(70): unsure at all Xaa locations
  Clone ID: MRT4577_111119C.1.pep
APDVQSSILSHSLNPTLRRALTNLLLKKMVGNHVSQCYHYHIMRDDPLIIAREXKERPAKLEMLNRLDKG

SEQ ID NO: 196862 - protein, 77 aa, Zea mays
  Clone ID: MRT4577_11111C.1.pep
FRPTRAGFIYSRAYKNPIHTMRALFNALAVLSLAPSATSTHTTGGWGCQPPAFVHLPSAVDFATSGLPAISGGISHR

SEQ ID NO: 196863 - protein, 142 aa, Zea mays
  unsure (1)..(142): unsure at all Xaa locations
  Clone ID: MRT4577_111120C.1.pep
VRLPXGDTRCYRNHRIGCGADSEYRLLLICFASTASRVSKAATNLRGGTFVVGESRGLSGCLPRTLREFRIIFDLNGVPLYVFGTFSRNTSTQLRLPTIRRLLTMINCNNPSTHNNNILHSAVLIIYLSYEFYQAHKSAQRS

SEQ ID NO: 196864 - protein, 64 aa, Zea mays
  Clone ID: MRT4577_111121C.1.pep
SGFFTNPVCIVGSKFLSGFWSTSRAVRSQDTYSYVYEQPRFFSSGFPQSVENGINVPRMMSLAT

SEQ ID NO: 196865 - protein, 42 aa, Zea mays
  unsure (1)..(42): unsure at all Xaa locations
  Clone ID: MRT4577_111122C.1.pep
LLIVELAPSSERRVRSCSAAALLLLLAALWXGLFXRVGGRVG

SEQ ID NO: 196866 - protein, 77 aa, Zea mays
  Clone ID: MRT4577_111123C.1.pep
GREPTGHEGGVDLEAWVRRAFKEERPLSEVVDPTLLGEVHAKKQVLAVFHVALGCTEPDPEMRPRMRAVAESLDRIG

SEQ ID NO: 196867 - protein, 88 aa, Zea mays
  Clone ID: MRT4577_111124C.1.pep
RFTRNEFNLESKSTIGVEFATRSIQVDGKTIKAQIWDTAGQERYRAILSAYYRGAVGALLVYDIAKHLTYEHVERWLKELRDHADSNL

SEQ ID NO: 196868 - protein, 78 aa, Zea mays
  Clone ID: MRT4577_111125C.1.pep
MRLMNSIAALPFCTRPSAVQSGGQMMRFNKPVNQPVGNPQKNFFVFFFFFFRVTSDFKAYIDAKIDSKVTKHDRRYLG

SEQ ID NO: 196869 - protein, 74 aa, Zea mays
  Clone ID: MRT4577_111126C.1.pep
YDCFPSYIAKTSPLNNCLVYRNKKDCQLGVYITVAYKLCLERPRIIRTKQIVNIYQGGEHVNFNCWTELLVGCI

SEQ ID NO: 196870 - protein, 61 aa, Zea mays
  Clone ID: MRT4577_111127C.1.pep
IRLVCCCTILPACLSCLSATFLKPRLDRRQGLGPYALTRATRQLLWPPSSSACMTSVGYKL

SEQ ID NO: 196871 - protein, 76 aa, Zea mays
  Clone ID: MRT4577_111128C.1.pep
GLCSCLFLWSPSSIGCLAPLVSGCSPGPCLWALFPPRALSLVGRCVLRWWGLCAVLAPKASSAFLAFFVVSSHILR

SEQ ID NO: 196872 - protein, 46 aa, Zea mays
  Clone ID: MRT4577_111129C.1.pep
SIKATCVVSSPHLSNNRTRAGHPLLSLHLTVTEAWLETKTDCGHCR

SEQ ID NO: 196873 - protein, 43 aa, Zea mays
  Clone ID: MRT4577_11112C.1.pep
MAPNVLCFCRVLTNWRCVVYNLRCKTLFPPFGTGLLNLGVMFS

SEQ ID NO: 196874 - protein, 172 aa, Zea mays
  unsure (1)..(172): unsure at all Xaa locations
  Clone ID: MRT4577_111130C.1.pep
MTMRRVVRWLKWILTGRKEEHNHVRGAEKRRRTTGGQDAGARQRRAAIVIQKTFRGYLARRALRALRSLVKIQALVRGYLVRKQAAITLHRLQTLMRLQADSIAVKNAPFRKSMEQEERIFARDLQTKPPAHRRRLSDSTDSNYERSPRIVEMDDTGYXRSRSSRITTSSYM

SEQ ID NO: 196875 - protein, 64 aa, Zea mays
  Clone ID: MRT4577_111131C.1.pep
NFFGVLPLFFFFFFEKTNIYFLYLNLSKPFAQMNAPPSFGQQITPYNSPDFFPSLFAQCNTTII

SEQ ID NO: 196876 - protein, 186 aa, Zea mays
  Clone ID: MRT4577_111132C.1.pep
MMTELAPNTIQTDENIPCFIRKTYKILEDGNYSNIICWNNEGTAVVIRNPADFAQNVLPIYFKHNNLNSFIRQLNMYDFHKKKTPDGEHVYFHELFQRDKKHLLRNIKRKSTEYSGGNTEKNKLGQELSRTKQDIATIINENFLLKQINREHLATITNLEAQANEISLKNQAILSQLMKKKKKKGP

SEQ ID NO: 196877 - protein, 169 aa, Zea mays
  Clone ID: MRT4577_111133C.1.pep
GMPMAGSPPVVAGSLVVAMRSQLAEASNGAAGTAQGRRPGGGTKAGCHCCRETSEPSEQDHTAVVVDIPAPSAERPGVVAPTAATGCCSSSAREACATPTTVTTVNSAPRGCCGGIGEGDTRENARTSCCTDARDSPKKAGQQCNARCCSWGKQNTLKCQAQDTISNLK

SEQ ID NO: 196878 - protein, 105 aa, Zea mays
  unsure (1)..(105): unsure at all Xaa locations
  Clone ID: MRT4577_111134C.1.pep
ALAGWGYANCDIRGYLGALDIMQSYYPERLARVFLVHVPXVFMAAWKMVYPFMDDNPKKKFVFVPAKDLDRTLREAIDDSQLPEIYGGKLKLKLVTPPANKFPSP

SEQ ID NO: 196879 - protein, 153 aa, Zea mays
  Clone ID: MRT4577_111135C.1.pep
LEAGRAGPDPDVLLWTPPPISLSLPVTSPPPTGPDSDPVLAPGSLWTHHLPRRGRRLPQLCSHTIRSPASLDDARIAQYAATPCTIVLGKTHGKRMLKSIIQVSMKAKTARFNPPTVNSLVGDRHATWKNFTQIMRTLIHKRRASRNDADEHT

SEQ ID NO: 196880 - protein, 50 aa, Zea mays
  unsure (1)..(50): unsure at all Xaa locations
  Clone ID: MRT4577_111136C.1.pep
FEKPLSYVHYRAYYSXNHXXQSNLLXKLDNIFERXSMVCTFIYCTFPYED

SEQ ID NO: 196881 - protein, 142 aa, Zea mays
  Clone ID: MRT4577_111137C.1.pep
MTNLHHATSVTDTDTLAASLKRNWKLVSTDRAKYVLAFFAPNPNDMGCTYLEIWFNNIPVRTVGWVTNSQRPTPTTINSPLALWFAHRPRRPQPQPTATAATPLATAQPLENDNLVLRVPGAGMVWQSFDHSMDTHRRWRRR

SEQ ID NO: 196882 - protein, 347 aa, Zea mays
  unsure (1)..(347): unsure at all Xaa locations
  Clone ID: MRT4577_111138C.1.pep
STIGRLRRLQYLVFTGNSLHGXITDGLSNCTGLLIIFLGNNHLTGEIPSWLGGFPKLAALDLSKNNLTGSIPPSLGNLTNLQELYLQINQLEGSIPKELGRLKNVQWFALFANHLSGEVPKAVFNLSSVVGFGVDQNDLHGTLPSNWGNNQPDLEFIYLAKNHFTGNVPASLANATMMDTIDLGVNNFTGRMPPEIGTLCPIIFSFDSNQIEASATEGWEFVTLLTNCTRLRVLSFRNNMLAGELPPSVGNLSSTHLQVLYTGWNEIYGRIPPGISNLVNLQKLSLSQNHFTGALPNTIGRLKMMRDLGIDGNLLSGTIPPSIGNLTLLELITMDNNNLEGSLPSRG

SEQ ID NO: 196883 - protein, 150 aa, Zea mays
  Clone ID: MRT4577_111139C.1.pep
TYQAVRHYATMLSAPRRHLVLPPSPPRPPSSPTRTRWPRRSRETGSWCPPTVPSTCLHSSHWIRMTWDARTSRYGSTTFPCGTVGWVTNRQSPILGGVDVGPCQREPGHRRERDPHRPFDQQAPWRRGLGTAGGGHSHGRQQRHRAAPRE

SEQ ID NO: 196884 - protein, 50 aa, Zea mays
  Clone ID: MRT4577_11113C.1.pep
LLCANTHGAAFDVAHVLVLALRIAWARSTSPESGFVQTLLSFCFSPRLTY

SEQ ID NO: 196885 - protein, 125 aa, Zea mays
  Clone ID: MRT4577_111140C.1.pep
CHTMRACSHCLFHRFTHSQSSRLSSISTARRRWRARTATSATNCATVASAVIQRLCYHVKSRHPLYSLSVFLLCLFSYCIHFFVFQKLPQSTLHSVSIPLYKHCKSTCRPRVRPRVRPRVRPRVR

SEQ ID NO: 196886 - protein, 54 aa, Zea mays
  Clone ID: MRT4577_111141C.1.pep
MLVWLDLIMLHKNMFFFTSPHKQPESDLFLLQIHCTLWIKTIIARTTLNSPYLF

SEQ ID NO: 196887 - protein, 115 aa, Zea mays
  Clone ID: MRT4577_111142C.1.pep
MSTVLSVLNMIFLMNRRRAASGCFLTSHIHDDIDKEISGHQDISLNQMTGTPTKHMLLRARLSSRIRIQPRAGKKNSAAKTKTLDELVYIDFPGANAVRVAVDKYGTWPVLSVIT

SEQ ID NO: 196888 - protein, 107 aa, Zea mays
  Clone ID: MRT4577_111143C.1.pep
RTRGSQDSGLHLNADTELINLCMVEVNKKRIMHAEGAGLSLACVHTYRRRLGRNLCIVGKLVHLGRTGPTRTKKDALAALLSLAGQRENVRKLVSAGLAQVALFAIS

SEQ ID NO: 196889 - protein, 113 aa, Zea mays
  Clone ID: MRT4577_111144C.1.pep
GEPGKNLFWDRTCPWIFKGPRGPEKNSPQDLRGVQWGIQMPTGPLYIGRNPLSFIGPGGNPDPFGTNCSPPLGVPQQGLGIRASRPCPISTAGPVARNLGRPPPVFGKTNWGG

SEQ ID NO: 196890 - protein, 46 aa, Zea mays
  unsure (1)..(46): unsure at all Xaa locations
  Clone ID: MRT4577_111145C.1.pep
KKAKATKKNVRKPQGQSSKHXSQHASKRXKHXEXGGDKKGKGTSPF

SEQ ID NO: 196891 - protein, 162 aa, Zea mays
  Clone ID: MRT4577_111146C.1.pep
WMGSLPALVPHRSTSSLSSITDRSSVPASTQGLKAVLARACSATAPTLACWAAVVLARARCGRARTSARPQPRGGGWCCTLACPRSGGSSGRPARSPARRRLGSVLSCDKATAGTGPTHSLIPARSDDLRPVELWLLDCATHGGLCEQSSHKLMSLAGLTAM

SEQ ID NO: 196892 - protein, 141 aa, Zea mays
  Clone ID: MRT4577_111147C.1.pep
IRHEANSRRFFISNPIFIFLLAPGPLHLPLPPTRARHAGGSGGAQVRSLSDGVSGFPSRPSIVASRPRLRPSAHLPVTLRAPLSLLPPPVDRQRRPPLRLRRAWPEGSGSQQPLFHQGGRASLGALMPAVLSALQRAEACD

SEQ ID NO: 196893 - protein, 62 aa, Zea mays
  Clone ID: MRT4577_111148C.1.pep
LGGHQRITALQCITCTPISTTATRAGQQNHRLFHIRLLTACNILCRTRATGHWHSCEARLTV

SEQ ID NO: 196894 - protein, 125 aa, Zea mays
  Clone ID: MRT4577_111149C.1.pep
FWEALTRGVLDPGVFQNLFPPKNKRKLGQKKKFGKGFFWGGFPPFPKKGFFWVGPIFPKKGSPLDFAPPPHFFKKKGVWARKKKGPLFPWFNKKKGENPFPWVWKPFFLVPRLSGPKKKIFPGGP

SEQ ID NO: 196895 - protein, 84 aa, Zea mays
  Clone ID: MRT4577_11114C.1.pep
KKTTSVRQAFGAVFACVVVATFLSGVSSSLECFGVPTREGAGSATGGGRGRRPAITPLIATALWRVSGGEGKGKGWVLLAWGGE

SEQ ID NO: 196896 - protein, 87 aa, Zea mays
  Clone ID: MRT4577_111150C.1.pep
GACLGGKTGLKTTIFQGSCCSALNTGCAPPILRTGPIHFRVFVLAKSSGTSNVMFFARVCPFLSLFFTTALNTPLLLGLSVGPCEGV

SEQ ID NO: 196897 - protein, 64 aa, Zea mays
  Clone ID: MRT4577_111151C.1.pep
RHYMWALHVRRLHPIDSYDMGQNKLTQGQGRRGVHFSEREMTDTISMGGKLMARKFLFLKKKIR

SEQ ID NO: 196898 - protein, 455 aa, Zea mays
  Clone ID: MRT4577_111152C.1.pep
MVNMRDNDSSSDAQLDEPLGRVSILSYGSGHMLNDITSSCWFTYLLVFLTDLGLSPGDAAIVMLSGQLADGFTTIFVGELMDRFGHFKLWHAGGSILVAISFSSVFGSCVPCKLMGINTSTLETVGYSTFAAIFNVGWAVTQVAHMSMVNCITSNPTSRVSLVSCRNAFTMVANLSLYGVALVIFTLSQSVNVLVQYRWIAYVSISLGSCFVVIFLIGTKEPGSIRHCLDKSLSRISWTYWFKRVLYYQVALVYTLTRLVTNVSQAFLAFYVINDLEMNQSSKALVPAIIYICSLIVSVILQETRWSSWRLKLYFSAGAVLWILSGLGIVFLPSRMHNLMYAISIIIGAANALMTVTSISMEGVLVGEDLNGCAFVYGSLSFVDKVSCGIALYVLESYQGSTKIRSNLGTAFGYSVTRLGLGLVPAACSLLSAIAAYTMELPDTQKGPLVEPLLA

SEQ ID NO: 196899 - protein, 75 aa, Zea mays
  Clone ID: MRT4577_111153C.1.pep
ITSFEYFFTFSITLRAQHISTGVKGGASNQLMLTTNKTNQAAMIIQRAGKWIGATTYKGGRQIPKRAQGRWKQNK

SEQ ID NO: 196900 - protein, 128 aa, Zea mays
  Clone ID: MRT4577_111154C.1.pep
MKHDCMHESTTSSVSYRSETCTGNKRAAGIWPFYDVTIISDSVEMSLCRCPCYHESRTMANNRFEMKSKMLIRQNLSFRANTSSKQLVNLLSSESINQNQQKKIKWSKIRIELSKVYIEVVGTTCFTK

SEQ ID NO: 196901 - protein, 78 aa, Zea mays
  Clone ID: MRT4577_111155C.1.pep
LGTMEGGKKNAAGGVVYLLLLQVWLAPTTVTAHLLQHDTSTGAGLHLIRRHLDHPQRAILCDETCAYLPCYTSVMGGR

SEQ ID NO: 196902 - protein, 92 aa, Zea mays
  Clone ID: MRT4577_111156C.1.pep
LQWNEEQTMNNSGCLGLLSFLLWLSCMMATGMLVNANASAESALHLLSRQLGHPTRRILWRINLCLPTSAIPTCIGLPHGLAYTLHDEMIVH

SEQ ID NO: 196903 - protein, 46 aa, Zea mays
  Clone ID: MRT4577_111157C.1.pep
RGTDGRGGREAPRREQQPSRACGYEGACCAAHGGTGGRGEERSVGG

SEQ ID NO: 196904 - protein, 43 aa, Zea mays
  Clone ID: MRT4577_111158C.1.pep
NRARSTKQGRYLSRLLQLYCSTRFTFNVACWYQIIRMIGSPAG

SEQ ID NO: 196905 - protein, 156 aa, Zea mays
  Clone ID: MRT4577_111159C.1.pep
MGAQAHTSCNRCAGYYVREAAPPLAPVPRLLDCGTRAVTRGDPTHGPTVPTEHIDHGSVSRGRRRDGRYGQKWADSNGGSRRAEAAIKLTAGSRPLLEQQESPLPWREDDAPVFRSSNGSRTHNVCLANYSSRRINTAAGQVTPLAGEAGDASPPP

SEQ ID NO: 196906 - protein, 113 aa, Zea mays
  unsure (1)..(113): unsure at all Xaa locations
  Clone ID: MRT4577_11115C.1.pep
APAHGCEPXCSGPVVPTPPVVPTPWLHSPGRCPIDALKLKVCANVLGLVKVGLPQYEQFCPLLEGLVALYPPLCLCPPLKAKVLGIPPNGPLSPTLIPNNCGKICPEGFPCPH

SEQ ID NO: 196907 - protein, 91 aa, Zea mays
  unsure (1)..(91): unsure at all Xaa locations
  Clone ID: MRT4577_111160C.1.pep
RARDTMIPVPPSSTANASRRTVSCVTPFFLTXPNLRRKRDEIGMALFVFFFVFFDFFFFWRLTQDLKTGTVKVTAVGWIEHSQSSTVWPRT

SEQ ID NO: 196908 - protein, 41 aa, Zea mays
  Clone ID: MRT4577_111161C.1.pep
TQWTSINQDITHNKLAINPFEVTWTLGVITLVVTRIHSTKH

SEQ ID NO: 196909 - protein, 95 aa, Zea mays
  Clone ID: MRT4577_111162C.1.pep
TYSREISKPLVFLGGVPPGPQNNSSNFKKKWLDFPKTQVTGKNISYWLLDLRQAKENPLFCKACWGFLEKLGPLLKTFLNGHRAFFFGKNQPFLH

SEQ ID NO: 196910 - protein, 195 aa, Zea mays
  Clone ID: MRT4577_111163C.1.pep
MSGQSSSSYGDTDPGTDRAYSTTSSSIRWGPHGRGMTACLVVVNVVLVALVYLYFWRVFSRRSAASPSAANPTDHDDDASSTSTPPSPLSSQDQHGRIVASLPTFVVRSGSGAGAECAVCIAELRDGDEGRALPRCGHRFHAACVDAWLRRRHTTCPLCRASVVVAAEEVGPTKGSGVTDTTTTTVALEDMDAPV

SEQ ID NO: 196911 - protein, 92 aa, Zea mays
  unsure (1)..(92): unsure at all Xaa locations
  Clone ID: MRT4577_111164C.1.pep
CCLGAXSASGVLPATPLFPQWLAKASYSXXPSSPVTPLTSGCASGVWKTQXLQPLQGSNRAIAAGHSYPLCTLVSSNNHQSLLQQCPFGALF

SEQ ID NO: 196912 - protein, 123 aa, Zea mays
  unsure (1)..(123): unsure at all Xaa locations
  Clone ID: MRT4577_111165C.1.pep
RVNISEEDVLYWNSKGFLPSLTIDQIRDVARVFVNGKLAGSKVGHWVSLNQPLQLVQGLNELTLLSEIVGLQNYGAFLEKDGAGFRGQVKLTGLSNGDIDLTNSLWTYQIGXLKGEFFRIYSP

SEQ ID NO: 196913 - protein, 36 aa, Zea mays
  Clone ID: MRT4577_111166C.1.pep
YCCQQFMKRIRWHLYSFYVQFNGILVPLCILCTKYT

SEQ ID NO: 196914 - protein, 123 aa, Zea mays
  Clone ID: MRT4577_111167C.1.pep
LDGLFPCIFVFNACEHQEILLKWGSTAPARSYSAIHGGDSQPGRLWHIWALHMCTVSYVHMLRSSTPRLEPPDLDLVLQLGSCHLTLPPGPRSCALAACTWLVEGPHLYSFPEPGLGFPNIGG

SEQ ID NO: 196915 - protein, 64 aa, Zea mays
  Clone ID: MRT4577_111168C.1.pep
LHAPGRNCRDRPTPAGPLLAPMLHAISAGAQVRETALLVGDACQSGLMRSRLVHAPNRPGETRR

SEQ ID NO: 196916 - protein, 59 aa, Zea mays
  Clone ID: MRT4577_111169C.1.pep
RNQQLRSYEHGCSELLRGREEGHIVVSLHGGYLCFFLPRSRRRMVITQWQWGRQGKRGK

SEQ ID NO: 196917 - protein, 62 aa, Zea mays
  Clone ID: MRT4577_11116C.1.pep
RGVCVIRGNQITQSMYLCGLNMITNFFALLRLNLNIGEHEYLQRGRCHQIFPTPNCNLVSHK

SEQ ID NO: 196918 - protein, 54 aa, Zea mays
  Clone ID: MRT4577_111170C.1.pep
GGGIFGNLKPLLLGLEVLKKWSGMGPFLCRYKVLGPAWGFVGGVFNLLGGVFRT

SEQ ID NO: 196919 - protein, 191 aa, Zea mays
  unsure (1)..(191): unsure at all Xaa locations
  Clone ID: MRT4577_111171C.1.pep
EKVRKFEESLKEKRPGEGRVSAGKKGAKFSKPSTQEVGNTTSVSTPTEAVASVTVVSSPPMAAAPTMMAMAPPSAAVAGGMFLAPMHPHPLVFPPFPPAAPPAVAPVAPPAAPAPNVVSNTSKKRKKRKXXXGTSDADEMMNLKQDQIGEVENEFDLTLRIRPRHESELSIYLFCAGWSFEKNLFCWLCYL

SEQ ID NO: 196920 - protein, 41 aa, Zea mays
  Clone ID: MRT4577_111172C.1.pep
CLFSIIPTTFSMCIVLTLSYRQQFFSLYWGPVLYIIAMALL

SEQ ID NO: 196921 - protein, 54 aa, Zea mays
  Clone ID: MRT4577_111173C.1.pep
LHCTTVLKDHRHKIQCGVSGFPETNHNKLGVFFLKAWFKSGSPTNLRLLVHMTA

SEQ ID NO: 196922 - protein, 57 aa, Zea mays
  Clone ID: MRT4577_111174C.1.pep
EWEPSPCGSGFRVPRVLVRFTSRRQEGCLRTLINWNLCIMRLNSLFPLLNKSYIRLN

SEQ ID NO: 196923 - protein, 496 aa, Zea mays
  unsure (1)..(496): unsure at all Xaa locations
  Clone ID: MRT4577_111175C.1.pep
MPRRTGNAASTKSVELVKQDQMEFDHPDEVDEEEEVEYEEIEEEVEYEEVEVEEEEEEEEEEDDKIEGVREVDANHDSKIVDDDPKDGNEKEKHAELLALPPHGAEVYVGGLSSDVSSEDLKQLFESVGEVAEVRMRGKGDNKTYAFINFRTKEMALKAIQKLSNKDLKGKKIKVSSSQAKNRLFIGNVPHDWTPDDFKTAVEEVGPGVLKVDLMKAPGSGRNKGYGFIEYYNQACAEYAKQKMSTPEFKLDTNAPTVSWADHKNASEATSTSQVKSLYVKNLPKTVTQEQLKKLFEHVGEITKVVIPPAKSGHENRYGFVHFKERSMVMKALKNTERYELDGQLLDCSPAKPPADKKDDTGSSPTAKGRPLPPSYAPLGYGLAGAYNPLGKGLAGAYNSPGNGLAGAYGVLSAHAAQPMLYAPGASPGSTMIPMVLPDGRLVYVPQTAGQQPVHVTSPXHSKAXRFGGGGGSSSGGKRQRGDDRGSSRRGWHRPY

SEQ ID NO: 196924 - protein, 176 aa, Zea mays
  Clone ID: MRT4577_111176C.1.pep
STPTAKGGPLLPSYAPLGYGLVGAYNPRGKGLAGAYNSPGNGLAGAYGVLSAHAAQPMLYAPGASPGSTMIPMVLPDGRLVYVPQTAGQQPVHVTSPLPQQGGRRFGGGGGSSSGGKRQRGDDRGVTATVAAGAGTVRIDVCHAADLQLEVRTQQLAYLSQYHAGNCGLNYLFTML

SEQ ID NO: 196925 - protein, 88 aa, Zea mays
  Clone ID: MRT4577_111177C.1.pep
FKVQFPAWYCDKYANCWVLTSNCKSAAWQTSIRTVPAPAATATIISPLSLSAGAGSATAAESTTALLWQRRSHMHRLLPCSLWSAKHQ

SEQ ID NO: 196926 - protein, 141 aa, Zea mays
  Clone ID: MRT4577_111178C.1.pep
MLDSSPTAKGRPLPSYAPLGYGLAGAYNPLGKGLAGAYNSPGNGLAGAYGVLSAHAAQPMLYAPGASPGSTMIPMVLPDGRLVYVPQTAGQQPLHVTSPLPQQGGRRFGGGGGSSSGGKRQRGDDRGSNSNSSRRGWHRPY

SEQ ID NO: 196927 - protein, 68 aa, Zea mays
  Clone ID: MRT4577_111179C.1.pep
GVLARCPCSGRAYVVGFPTASVVASPLVSVGLLCPCPWPLASWVHSLGAVREGAHGDESPVRVTAREA

SEQ ID NO: 196928 - protein, 68 aa, Zea mays
  Clone ID: MRT4577_11117C.1.pep
MSGRGKGGKGLGKGGAKRHRKVLRDNIQGITKPAIRRLARRGGVKRISGLIYEETRGVLKIFLYGFGE

SEQ ID NO: 196929 - protein, 74 aa, Zea mays
  Clone ID: MRT4577_111180C.1.pep
SLRPASCCLTVLHHFRFFMLNFRIDCLLEMKEGSYSPWPIVARAGQDERSLSGQHGGLDCRGCVDHLHGEGAPG

SEQ ID NO: 196930 - protein, 145 aa, Zea mays
  unsure (1)..(145): unsure at all Xaa locations
  Clone ID: MRT4577_111181C.1.pep
KAQAKVCCSSIVFLPHLPLCAVIKPASQATSAILHVYKTSIDSFYHCIPNHICHFALLLSLCYRHETHSEKTNHCKVQFPASVGVCIMVVLRLRLVFCGGGGEVMGTGCCPAGCGLPKPREYMKEINXXIPLXQFCSEDCSLDLR

SEQ ID NO: 196931 - protein, 347 aa, Zea mays
  Clone ID: MRT4577_111182C.1.pep
TLLFLFFSQGKKIKVSPSQAKNRLFIGNVPHDWTHDDFKTAVEEVGPGVLKVELMKAPGLDRNKGYGFIEYYNQACAEYAKQKMSTPEFKLDTNAPTVSWADPKNANEATSTAQVKSLYVKNLPKTVTQEQLKKLFEHVGEITKVVVPPAKSGHENRYGFVHFKERYMAMKALKNTERYELDGQLLDCSLAKPPADKKDSTVSTPTAKGGPLLPSYAPLGYGLVGAYNPRGKGLADAYNNPLGNGLAGAYGVLSARAAQPMVYAPGAPPGSTMIPMVLPDGRLVYVPQAAGQQPVHATSPLPQQGGRRFGGSGSGGGGSSSSGGKRQRGDDHGSNSNNSRRGRHRPY

SEQ ID NO: 196932 - protein, 568 aa, Zea mays
  unsure (1)..(568): unsure at all Xaa locations
  Clone ID: MRT4577_111183C.1.pep
MWIPMAESTLRLLHTLASVRLPPRVPLFRSPPPPHPSPSHCAPSLPPCLRRLGGLPPPSLSRAKSAHQFPWIFELWKMPRWTENSASTKSAELVKQQDRLEFDDPDEVDEEEEVEYEEVEEEVEYEETEDEYGQTEAVRQVDAKHDSKMVDADTDEGGKGSHDELLALPPHGSEVYVGGIASDVSSDDLKKLCESVGEVVEVRMPGKSGRLYAFVNFRTKELASKAIQKLNNKDLKGKKIRVSSSQAKNRLFIGNIPYNWTENEFKKAAEEVGPGVLKVNLVKAPHSDTNKGYGFIEYYNQACAEYAKKMMSTPEFKLDKNAPNVSWADTKNGGESASTAQVKSLYVKNLPKAVTQEQLKKLFEHLGEVTKVVIPPAKAGHENRYGFVHFKERSMAMKALEDTERFELDGQLLDCSLAKPLADKKDDTSXLKEVHCSQVIPQXYGLMGAYNPLGNGLAVAGAYNPYGNGLAGAYGVLGAHAAQPMLYVPGAPPGSTMIPMVLPDGRLVYVPQPAGQQPVPMTSPPPPQKGDRHYGGSGGSSSGGRRQQRRDDSGGSNTNSRRGRRRPY

SEQ ID NO: 196933 - protein, 82 aa, Zea mays
  Clone ID: MRT4577_111184C.1.pep
TGTLPSPPWRTSFRSPTPHSRSRSSSDNSTASLYDLRPHPSTLSSRVGNLVSPLLRNIGPLRRSGSLPGQVVLLLDYLLCSF

SEQ ID NO: 196934 - protein, 107 aa, Zea mays
  Clone ID: MRT4577_111185C.1.pep
DAAAVSHLRRLSELKRIARSGPVGPPVTDGGGALTAHLEAQVRENQALLRSFDAAVNRLQAALDAKDAAAAALRLDLEALDDANARLAGRLDRALAPPSGGDAVGAM

SEQ ID NO: 196935 - protein, 165 aa, Zea mays
  unsure (1)..(165): unsure at all Xaa locations
  Clone ID: MRT4577_111186C.1.pep
RTGCWRWETVTVTNETFTDLCLGIDHNSSLTNCLKNYNTTXTFDADDKXFCYKCCRLYEAQNKMTYKKXPPXILIIYFKRLKYIEHLQRYKKLSYKGTFPLXLKLHNTGDXMSDLEYSLILVVNNVRSGPNHCHYMMWTKSHNHWIYXFDDQNYEMTDEYMVQAL

SEQ ID NO: 196936 - protein, 68 aa, Zea mays
  unsure (1)..(68): unsure at all Xaa locations
  Clone ID: MRT4577_111187C.1.pep
MDATGTGAGGTAKKGTAGRKAGGPGKKSVTRSVKAERQFPVGHIXGRYLKKGRYAHAYSSGAPVYLAA

SEQ ID NO: 196937 - protein, 362 aa, Zea mays
  Clone ID: MRT4577_111188C.1.pep
MSATALLQKATEAGATQSSSSFLKEFGLASSSSSPRPKQQQPHGRVAETSTDPWQYRNSNQQMEMERHQSHQRREMESSSQPWQHPRITQQMEMERHHQRSHQQREMESSSQPWQHPRSTQQMEMERHHQRSHQQREMESSLQPWQHPRSTQQMEMERQHQRNHRQRETESSSQQWHHHHHHPNDQMMGLESYRSNQQRQTESSSQRWPPHRSYQQMEMDPSSQQRWAQHQRSNQQQQQMEMMERHHLSNQQIRSTQQMERRAMVSGGGLGLGLAYESGNPGLPLPDLMTGPSPLLGPKPATLDFLGLGIGGTMGGSTASRGLPALMVGRELDMGPSAQVPPAAAAAPWEDAKRKTNGRTIL

SEQ ID NO: 196938 - protein, 67 aa, Zea mays
  Clone ID: MRT4577_111189C.1.pep
MLDQFHIQNFHLVRGLDLTYFRYFLWLILFSSYRTSWFRFDVKLCSPPMNSAPFLFVMKPNAGLGLT

SEQ ID NO: 196939 - protein, 57 aa, Zea mays
  unsure (1)..(57): unsure at all Xaa locations
  Clone ID: MRT4577_11118C.1.pep
TPDNVLAPSXEDYMVRVXLGFSGAVRVGNIQLTARCMHLSGLCVGGNCGVALFPRKG

SEQ ID NO: 196940 - protein, 465 aa, Zea mays
  Clone ID: MRT4577_111190C.1.pep
MLPCFLPSPSEAIGTDGSSTTCGAGGSVSNSIVPSTTTNTFAGLFASATTSTTSQSRSLRDLIGVDPTFLCLAIGAPSLFPQTSASNSGTFAPPPAPHMSATALLQKATEAGATQSSSSFLKEFGLASSSSSPRPKQQQPHGRVAEISTDPWQYRSSNQQMEMERHQSHQRREMESSSQPWQHPRSTQQMEMERHHQRSHQQREMESSLQPWQHPRSTQQMEMMERQHQRNHRQRETESSSQQWHHHHHHHHHPNDQMMGLESYRSNQQRQTESSSQRWPQHRSYQQMEIDPSSQQRWAQHQRSNQQQQQMEMMERHHLSNQQIRSTQQMERRAMVSGGGLGLGLAYESGNPGLPLPDLMTGPSPLLGPKPATLDFLGLGIGGDHGRLHGQPRPPGIDGWKRAGHGAFGTGASCCCCGAVGGRKEEDQRPHDPVTVRFSPPLSSLSVMPRLACPFFQSQLCFWWS

SEQ ID NO: 196941 - protein, 422 aa, Zea mays
  unsure (1)..(422): unsure at all Xaa locations
  Clone ID: MRT4577_111191C.1.pep
MESRRGGSAAEDASGAMTSFGPPQHGINTDVNSMQPSRVTDFGALAQSAGFRIEDLVNLNANALFNLKSNTHTINNIPLQFGSYGKSSSFPNHLETLPLSNRPLVTRPCKSPSEQGRNAPPTASDSSDKSEYKLDQKTLRRPGRKHAAXWKTMERRRAYTVAEERSRAKLTFGQQELHQTRQQGIFISTSGFYVHXLSDXGALAFDMEYARWLEEHNKHVNELRLAVNAHAGDNDLRGIVGSVMAHYDEFFRLKGVAARSDVFHVLSGMWKTPAERCFMWLGGFRSSEVLKLLAGHLEPLTDQQLVGISNLQQSSQQAEDALSQGMEALQQSLAETLASGSLGPAGPSGNVANYMGQMAMAMGKLGTLENFLRQADNLRLQTLQQMQRILTTRQSARALLAISDYFSRLRALSSLWLARPRE

SEQ ID NO: 196942 - protein, 240 aa, Zea mays
  unsure (1)..(240): unsure at all Xaa locations
  Clone ID: MRT4577_111192C.1.pep
MPCPNNARRDLFLLHHFCIAHEENEEYKGIDAKASSAGGPFHITKLRAYGXDDTDSTNAVQEPXASTRVGTVNQTILLPKADFLVRQLNFTGPSMVHTTIHWYDNLXLPTTDXLTQYNDHANWNEILREDNLLITVHIKLDDTGXPLEWSKNSCTKKYDCNILPISLLMDFXTTAEVSRVTLLNSKIFHMNMYRSMDMLINDVTVTIPXRQPNTDGXHMSDSSVITITNTXIDVDDDCIS

SEQ ID NO: 196943 - protein, 468 aa, Zea mays
  Clone ID: MRT4577_111193C.1.pep
MESRRGGSSAAAAEDAGGAMPSFGPTQHAIRADVNSMQPSRVTDFGALAQSAGFRIEDLANLNANALFNLKPNSHTIDNSPLQFGNYGKSISSHINTTEATTAATRIDPQLSAQQTGAQPILVALPTGNMENWGESAMADSPMTDTSTDPDTDERNQMFEQGLVAVPTASDSSDKSRDKLDQKTLRRLAQNREAARKSRLRKKAYIQNLESSRLKLTQLEQELQRARQQGIFISTSGDQPQSTSGNGALAFDMEYARWLEEHNKHVNELRAAVNAHAGDNDLRCIVDSIMVHYDEIFKLKGVAAKADVFHVLSGMWKTPAERCFMWLGGFRSSELLKLLAGHLEPLTDQQLVGISNLQQSSQQAEDALSQGMEALQQSLAETLASGSLGPAGPSGNVANYMGQMAMAMGKLGTLENFLRQADNLRLQTLQQMQRILTTRQSARALLAISDYFSRLRALSSLWLARPRE

SEQ ID NO: 196944 - protein, 375 aa, Zea mays
  Clone ID: MRT4577_111194C.1.pep
MESRRGGSVAEDASGAMTSFGPPQHGINTDVNSMQPSRVTDFGALAQSAGFRIEDLVNLNANALFNLKSNTHTINNIPLQFGSYGKFEQGLVAVPTASDSSDKSRDKLDQKTLRRLAQNREAARKSRLRKKAYIQNLESSRLKLTQLEQELHQTRQQGIFISTSGDQPQSTSGNGALAFDMEYARWLEEHNKHVNELRLAVNAHAGDNDLRGIVGSVMAHYDEFFRLKGVAARSDVFHVLSGMWKTPAERCFMWLGGFRSSEVLKQSSQQAEDALSQGMEALQQSLAETLASGSLGPAGPSGNVANYMGQMAMAMGKLGTLENFLRQADNLRLQTLQQMQRILTTRQSARALLAISDYFSRLRALSSLWLARPRE

SEQ ID NO: 196945 - protein, 449 aa, Zea mays
  unsure (1)..(449): unsure at all Xaa locations
  Clone ID: MRT4577_111195C.1.pep
MESRRGGSVAEDASGAMTSFGPPQHGINTDVNSMQPSRVTDFGALAQSAGFRIEDLVNLNAXNTDVNSMQPSRVTDFGALAQSAGFRIEDXLTLMQGLKYPSLLIICLSALENWGESAMAGSPMTDTSTDPDTDERNQMFEQGLVAVPTASDSSDKSRDKLDQKTLRRLAQNREAARKSRLRKKAYIQNLESSRLKLTQLEQELHQTRQQGIFISTSGDQPQSTSGNGALAFDMEYARWLEEHNKHVNELRLAVNAHAGDNDLRGIVGSVMAHYDEFFRLKGVAARSDVFHVLSGMWKTPAERCFMWLGGFRSSEVLKLLAGHLEPLTDQQLVGISNLQQSSQQAEDALSQGMEALQQSLAETLASGSLGPAGPSGNVANYMGQMAMAMGKLGTLENFLRQADNLRLQTLQQMQRILTTRQSARALLAISDYFSRLRALSSLWLARPRE

SEQ ID NO: 196946 - protein, 78 aa, Zea mays
  unsure (1)..(78): unsure at all Xaa locations
  Clone ID: MRT4577_111196C.1.pep
MFISFVQGMVEITISRGRVVWEDGVLNIALGAGRYVMLPPSGXCFDEIEKFDASYRASLRAPVQRGKVLKLLHIHHAC

SEQ ID NO: 196947 - protein, 63 aa, Zea mays
  Clone ID: MRT4577_111197C.1.pep
MVLRVFCYRSLIWNPGFDFDDKILSFIKGYKRTFNLACIDHRGTPEHPARTCTLETDHQGICW

SEQ ID NO: 196948 - protein, 111 aa, Zea mays
  unsure (1)..(111): unsure at all Xaa locations
  Clone ID: MRT4577_111198C.1.pep
SPPXAXKEGVTILDRERPDTXQXELGVVSAATPRRGERTPILRRGRRAPKRSSANTNSKGVAFFSSPNTMVYRTPRSSAVARAGRRGSRETKTRGVATRAPWFLSLHNRIQ

SEQ ID NO: 196949 - protein, 61 aa, Zea mays
  Clone ID: MRT4577_111199C.1.pep
SLAFCCLSTLCNFPLCCCWCCFFRCCSMMAANKPQGGRIDIWLRKGSVQVRSQWSIVALLE

SEQ ID NO: 196950 - protein, 50 aa, Zea mays
  Clone ID: MRT4577_1111C.1.pep
FRSRVLSLTWGTVNTTRGLAELEKRATVAVMTSVCSVGMDDSCTSATIYF

SEQ ID NO: 196951 - protein, 93 aa, Zea mays
  Clone ID: MRT4577_111200C.1.pep
GRTDSPERPTPPTRTPTRTATRTPTRTLIGGWGGRIQSGEGGQNFDRRGNPTIGGEVVWSEGNFGRAAVSSGALNGGYEALELRDGGSDYLGK

SEQ ID NO: 196952 - protein, 72 aa, Zea mays
  Clone ID: MRT4577_111201C.1.pep
PPPPPPVFFRKRPPPPPGKGQEPRPNQLVDLELNVCFSPPDRSPVFKSCVTKKKKKSSRVFFFRNAPVTLKW

SEQ ID NO: 196953 - protein, 132 aa, Zea mays
  unsure (1)..(132): unsure at all Xaa locations
  Clone ID: MRT4577_111202C.1.pep
TQAQDFLLPIPLNLSYFSFFFFTNTLLSFSFYPRSISWCNPAHLVPCPPFGGGGGVPPRRSFSGLAEFVVCXGLHFVFSVPGRPPRWGRSPGVSAPGARARPFLWGPLPPLLGLFLPFAGRPPPSLSLSLSP

SEQ ID NO: 196954 - protein, 93 aa, Zea mays
  unsure (1)..(93): unsure at all Xaa locations
  Clone ID: MRT4577_111203C.1.pep
CFGLVWCVGVVCFXPLCCCAVWSAALWVGCSWAWXLVFRLSWRVLFXVAPGCLVCSXWXSLXGVPGRFSFLXSXVXLFXXXGELVGRSRGSPL

SEQ ID NO: 196955 - protein, 201 aa, Zea mays
  unsure (1)..(201): unsure at all Xaa locations
  Clone ID: MRT4577_111204C.1.pep
IGVGTKPQEQTQDPNNLQRQQQSMNQLLPLSQSQTNLVQAQVLIQNQMQQQQQPTSMAQNQQPAASQSLILPQQQQQQQQHQQQKLVHQQQQILLQQQQLQQQQQNQQQLNKMAAQMPNLASHQPQLSDQQLQLQLLQKLQQQQQSLLSQPAVTLAQLPLIQEQQKLIIDMFXQLSNSQPLSQQQTMPQQSIQVASRATPP

SEQ ID NO: 196956 - protein, 160 aa, Zea mays
  Clone ID: MRT4577_111205C.1.pep
MAAPSSTAATIISSCCRLGPPAPPEQAAAGARRTQAPAAGVSASHALRGACVAAAACAAMGMAGGGDIALARDGASVAAWTDAMGAARTKAPAPARWSERRQCPPWRANSLENVVPENLPRPPAPRRFDSVSVSAAAPDLVAPPSSVLAAVRPGTGCFSL

SEQ ID NO: 196957 - protein, 193 aa, Zea mays
  Clone ID: MRT4577_111206C.1.pep
MATAARLLLVVVLLSAAIPIPSFATSFVVGDKRHRWAPNVNYTDWADRHQFHVGDWLEFRYERDRFDVVQVNETAYAACDASSPILSYSRGHNFVFRLNHTGRFYFICSRGYCWSGMKVSVLVQPPPPPPSLPPASHSHASSASARVRPAAGLWCAALSTLLGWAVLTPPLSFRVWSSGRPGAHTSLNSKAVC

SEQ ID NO: 196958 - protein, 63 aa, Zea mays
  Clone ID: MRT4577_111207C.1.pep
LKIQKENPKVVNEINIEDLCLTKAAYCRCWRSKTFPACDGSHNKHNELTGDNVGPLILKKKEV

SEQ ID NO: 196959 - protein, 74 aa, Zea mays
  Clone ID: MRT4577_111208C.1.pep
RLKSHTMALLSSLAIVGVHTHSYKCVVTKDPCYVVLLHTDVLRHKKQIKKKRTGGPLYRSQGIGSRARHVTALV

SEQ ID NO: 196960 - protein, 47 aa, Zea mays
  Clone ID: MRT4577_111209C.1.pep
KTMQLMSLKDHSDNRYSRNQHMIFYQIDMQKQLKVVTKGRLSSLPQI

SEQ ID NO: 196961 - protein, 103 aa, Zea mays
  Clone ID: MRT4577_11120C.1.pep
SRSGIMSKVTWVVISDLLALALSVLRGRFLALVIAASSVLTDRSFLVISSRAYWVSRCFMSPPYLWVQEVCVLCRWGTLPASRGQPHFGRNRGPLHSDIVSYT

SEQ ID NO: 196962 - protein, 116 aa, Zea mays
  Clone ID: MRT4577_111210C.1.pep
RPGNNYTITSIFTSNQHAAMYFNKNGIFGLGTSVGLVSAGLPKDNEYKSHDCSGHLNYGHHAFYLHMGTMDDSRHSGYQAGTDWYLFYGKTGNDGRCQGEILGTDISETTNCLDLE

SEQ ID NO: 196963 - protein, 121 aa, Zea mays
  Clone ID: MRT4577_111211C.1.pep
GTPRGPTCPLGVNRKKNPGGGKNPNYPQAHAVGERRGTPGNAGPGPGGEPVFLLGGRKKMGEKREKTYPGEKVYYWNNCKKKRTREQKGESPGGLKGGLHEICWGGRTAPFPRGKQLGPRS

SEQ ID NO: 196964 - protein, 60 aa, Zea mays
  Clone ID: MRT4577_111212C.1.pep
ELSLVLYGPLITICYLFGAMKQLALSVSTRTTMCTGDMKLGISIMLLHKPLFQVSSKNLC

SEQ ID NO: 196965 - protein, 60 aa, Zea mays
  Clone ID: MRT4577_111213C.1.pep
CKVVSSPWTHTSVTDRQISCINTENMRHKTFHSFLHFHFKCMYVTTLHIKLLLHIFCDNG

SEQ ID NO: 196966 - protein, 234 aa, Zea mays
  Clone ID: MRT4577_111214C.1.pep
MGFTDLLSETGAHVLNSWLSTRSYIVGQSASQADVAAFKALSGPPSGESYPHAARWYKHIASYESQFATLPGDASAPYSTYGPGSAEVTLNPAKAPEKAEEAAAEEDDDVDLFGSDDEEEDAEAARVREERLAEYRKKKENKPKTIAKSVVTLDVKPWDDETDMAALEAAVRSIEKDGLTWGASKLVPVGFGVKKLQINLVVEDEKISVADLEEEIQEFEDYVQFTDVAGMQKL

SEQ ID NO: 196967 - protein, 104 aa, Zea mays
  Clone ID: MRT4577_111215C.1.pep
LFGCSLPQRSQRLSAGRAPFSASSPHGARRPSSLLPLSSPCLRAKFLCGRAPICSGFHGAHPWCRRPQARPLRRGHWMARSPLSGALPSEREIISTFPIIIFGV

SEQ ID NO: 196968 - protein, 198 aa, Zea mays
  Clone ID: MRT4577_111216C.1.pep
RVSYAFAGLPVLIGWRLMYAIGAIPPVLIAAGVLVIMPESPRWLAMQGRHADARAVLLRTSDSPADADFRLGEIKRAADAPSPAAAARHGGGGVWRELFVRPSTTTTSVRRILGCVLGLQFFVQASGVDAILLFSPLVSMTFISLADAITMPGCFFLYAAVTAAAFVFVYTRLPETKGRSLKRHGSALRKVEGWAGHV

SEQ ID NO: 196969 - protein, 325 aa, Zea mays
  unsure (1)..(325): unsure at all Xaa locations
  Clone ID: MRT4577_111217C.1.pep
HWVPRGRPGHYVSTXAFAGLPVHIGWRLMYAIGVIPPVLIAAGVLVIMPESPRWLAMQGRHADARAVLLRTSDSPADADFRLGEIKRAADAPSPAAAARHGGGGVWRELFVRPSTTTTSVRRILGCVLGLQFFVQASGVDAILLYSPLVFKAVGVASTSAVLGATVSIGAVKTCFVLVAMLFTDRLGRRPLLLASTAGVAVTATALAVTLCVGTASPASAAACLASVLAFVAAYSIGYGSVVSTYSAEVLPLRLRAQGSSLGVAVNRLTCGVVSMTFISLADAITMPGCFFLYAAVTAAAFVFVYTRLPETKGRSLEDMEVLFRK

SEQ ID NO: 196970 - protein, 130 aa, Zea mays
  unsure (1)..(130): unsure at all Xaa locations
  Clone ID: MRT4577_111218C.1.pep
RVAVSRARKVTKCKSTQARNVEKPVCIAEGVIXPTKAMEXRITIFLIAIWDTVVYFWNNKXHTPVLTRVLGHDPXHLLDHLIGGVXDLALREHVLPELTGEFQECAHXRYDEXNKCELLRINVARNGMIA

SEQ ID NO: 196971 - protein, 60 aa, Zea mays
  Clone ID: MRT4577_111219C.1.pep
QNILSPYYYPFPFQWFIQVIVHTATRRWVTLRSIIPAEPLNWLWVVCKGIGCFITTEPRP

SEQ ID NO: 196972 - protein, 154 aa, Zea mays
  unsure (1)..(154): unsure at all Xaa locations
  Clone ID: MRT4577_111220C.1.pep
HVFPQWGFRLKKRQWRKQRPGRWTRRWGKCLWPPGFPLPTLGIDPRGVNSRANFYPSSEKEATQLGNTVLLFLPTGGFAFLGCAPYFFWFLPNPFVFVKKMFSRFFLTTRVLKGKHFMPSCFRKKKKKCLWGKKKKKKKKKKKKKKKKXXXXXX

SEQ ID NO: 196973 - protein, 200 aa, Zea mays
  Clone ID: MRT4577_111221C.1.pep
REREMREEVRSSSGAVAETPMAVARSSSPPHTPVASSAGASSPAMQTNVASIDWLGGKQASRVDSSSQVAAHAYHPSHSFDAAGTAMDSAPSCRPWERGDLLRRLATFKPSTWASKPKAASSLACAQRGWVNVDMDKIECESCGTHLIFNALTSWSPVEVANAGESFAEQLDAAHQNSCPWRGNNCADSLVQLHLTQSAL

SEQ ID NO: 196974 - protein, 158 aa, Zea mays
  unsure (1)..(158): unsure at all Xaa locations
  Clone ID: MRT4577_111222C.1.pep
WGQKAFSNYLGSTKSDWGEYAATCLIXKNSKVPPSILIGQGGADKFLXAXQLLPPKFXEGCKAAGGALPLGMQPGYDPSDYFIATFVGGPIGPHGQFFKRACLLMCRVGKTRGPPSLGVFFLPPVLFCVAALGEVNSPPPMGNKMEDLLFLSLALGGL

SEQ ID NO: 196975 - protein, 77 aa, Zea mays
  Clone ID: MRT4577_111223C.1.pep
IVAQCSNSLASVELVEPIGCMAFSLYLCVGRPTSSLLMSATFQNIALGLVIICDSVSAVHNGLSSPISFLSPYGPVS

SEQ ID NO: 196976 - protein, 90 aa, Zea mays
  Clone ID: MRT4577_111224C.1.pep
TTRPPTRPKKKKKKKKKKKKKKKKKKKKKKKKKKKKKKKKKKKKKKKKKKKKKKGGPPKGFKLYLPLNAILYLFKRVTKFNFKGVFFKTS

SEQ ID NO: 196977 - protein, 78 aa, Zea mays
  Clone ID: MRT4577_111225C.1.pep
WMTMVLGKSYKQACMHDVIWLGIVLHDVVDVVVVVLGDGRAVYADGEDLPPYYYCLYFKFVDPVLRAIVQADCIYIYI

SEQ ID NO: 196978 - protein, 409 aa, Zea mays
  Clone ID: MRT4577_111226C.1.pep
IEDVRREVRILSSLAGHINLVQFYDAFEDEENVYVVMELCKGGELLDRILARGGKYSEGDAKVIIHQILSVASFCHLQGVVHRDLKPENFLFMSKDENSALKVIDFGLSDFVKPDDRLNDIVGSAYYVAPEVLHRSYGTEADMWSIGVIAYILLCGSRPFWARTESGIFRAVLKAEPSFDEIPWPTLSAEAKDFVRRLLNKDYRKRMTAAQALCHPWIRGTQEVKINLDMIIYRLMRAYISSSSLRKSALRALAKALTTDQLFYLREQFTLLGPNKSGHISLQNMKTALIKNSSGAMNDSRILDFVNSICNIQYGMIDFEEFSAAAISVYQMEGLETWEEHAQQAYELFDKEGNRPIVIEELASELGLGPSISLHVVLKDWIRHSDGNLSFLGFIKLLHGVSSRAITKV

SEQ ID NO: 196979 - protein, 95 aa, Zea mays
  Clone ID: MRT4577_111227C.1.pep
NSLTERTGSYPSHVTTCFFRGYALVLLFALTPFLYHYFLPVYSLFCLRFSYFLPYSFHVTCSVIFFPVFFSFTYSLIFLCCFFDIRFIFLFLFFY

SEQ ID NO: 196980 - protein, 592 aa, Zea mays
  Clone ID: MRT4577_111228C.1.pep
MGLCLGKSAAVQEPAVAEDNSVADGAAAGRGDGPPVKAPRTPKQPKFSFYLPSPLQPSSYKGSPANSSAASTPARGGFKRPFPPPSPAKHIRALLARRHGSVKPNEASIPEGGELDLGLDKSFGYSRHFAAKYDLGREVGRGHFGFTCAAKCKKGELKGEDVAVKVLPKAKMTTAIAIEDVRREVRILSSLAGHINLVQFYDAFEDEENVYVVMELCKGGELLDRILARGGKYSEGDAKVIIHQILSVASFCHLQGVVHRDLKPENFLFMSKDENSALKVIDFGLSDFVKPDGRLNDIVGSAYYVAPEVLHRSYGTEADMWSIGVIAYILLCGSRPFWARTESGIFRAVLKADPSFDEIPWPTLSAEAKDFVRRLLNKDYRKRMTAAQALCHPWIRGTQEVKIYLDMIIYRLMRAYISSSSLRKSALRALAKALTTDQLFYLREQFTLLDPNKSGHISLQNMKAALMKNSSGAMNDSRVLDFVNSICNIQYGNIDFEEFSAAAISVYQMEGLETWQQHAQQAYELFDREGNRPIVIEELASELGLGPSVPLHVVLQDWIRHSDGNLSFLGFIKLLHGVSSRTFPKVQDNRLH

SEQ ID NO: 196981 - protein, 170 aa, Zea mays
  Clone ID: MRT4577_111229C.1.pep
PTLSSNRPSASVASRSSRAPPPVFRRPLWSRFAVAKPLSPRSSAPRAARAGHLTAEPLHAGAVGVLSGGHRPFTHWPSPRTMASACPSSACAVLLILRWQGCPRLIRPVRPELSSISISSSSDGCSLALWSPPLMLVHCLAQVVCPLIILARYSPSGSVVLSPHMQFRPR

SEQ ID NO: 196982 - protein, 109 aa, Zea mays
  Clone ID: MRT4577_111230C.1.pep
MSKMNKILIARKKSTLTLSVCTAVLIRHWRIGGGCTSMLELGLVWQAAVSFLSGLMNVDSPGFLVECCVIAYVSLRPDGSFADPNLSVNHKSNRCIRSGTHVLLKLENQ

SEQ ID NO: 196983 - protein, 195 aa, Zea mays
  unsure (1)..(195): unsure at all Xaa locations
  Clone ID: MRT4577_111231C.1.pep
MYSSAGGMCGQNQRFHCSPTVTRLGGMRARLVGATRGQPVVKNRXDALTVQFRAILLKIVAGKESMGETMLACSFSLAEAKYICGDGVRHVILRFVRAVSVRVRSHRENVDADKLPKFTHFIKPGAGSGGPSNALPSLTGLALEGNFDVDCRCEHDRTSRWCASSDCLRATSSLGSRTAAPAGRPSMWIDNYSEL

SEQ ID NO: 196984 - protein, 71 aa, Zea mays
  Clone ID: MRT4577_111232C.1.pep
LPTSMFTYLQRLTVRTEACWFYWRGKGKTRHPPSPGEEEQAPICPKPLLTGNSLTATFYSIRDQRATMGPA

SEQ ID NO: 196985 - protein, 95 aa, Zea mays
  Clone ID: MRT4577_111233C.1.pep
STNANTRAVTDEMTGGNTQTLLRGPETETRGHHDETLAGQPKSFMQGDQHLHRQFKSGGLREPRKGRLDEDDEHEGGARGAAASRPEPTTARLRP

SEQ ID NO: 196986 - protein, 74 aa, Zea mays
  Clone ID: MRT4577_111234C.1.pep
CLRHRPMTICSVVCLQQLHRMRVALLLILRMSVVINSLNDGVTSCERQVRFVNPRFARRASEPGSVPPFPRVSF

SEQ ID NO: 196987 - protein, 71 aa, Zea mays
  unsure (1)..(71): unsure at all Xaa locations
  Clone ID: MRT4577_111235C.1.pep
YRLQQQQQQTRSKQNSENKLIPVLLLPKESTHGLKISXLKGLLLLLQLLSWGTITNPSQAYLHINHNSVNC

SEQ ID NO: 196988 - protein, 139 aa, Zea mays
  Clone ID: MRT4577_111236C.1.pep
KTTVLLSSSPFCSNHQRPTCSLTLRLQQPPNAPVDMKSPFPHDILTHKNAPSSQPAYVIRVSVSCVNKRKKRHFKNKSHSKSKKRRRRRKYSMLLENYNSVRWKQKGLGCIMRCKLGWWACGRVCVCVFTVLSPPLLEL

SEQ ID NO: 196989 - protein, 82 aa, Zea mays
  Clone ID: MRT4577_111237C.1.pep
MASSTMGLSSTAFAGKAVNVTSSLFGEARVTMRKTAAKAKPAASSGSPWYGPDRVLYLGPMPGAPPSYLTGEIPNKYSWHTG

SEQ ID NO: 196990 - protein, 175 aa, Zea mays
  Clone ID: MRT4577_111238C.1.pep
MTVHTLSDHIVHRSMVACLLSFSSSNESFSTLHVCRSQEMHVPVSVSRAYGEPQGNHCVESNCTNGRPQSMNGRSHNACTRCTVTDGQGLPKPGRVGAWLMIILPRRDDPSVISSVHVSLKLRDHVVLEEVEEGHGGDIVVVLLNHRPVNVHKLLDQEVGGVLLNTVDDAQQSES

SEQ ID NO: 196991 - protein, 38 aa, Zea mays
  Clone ID: MRT4577_111239C.1.pep
RPFIRGRDSFRGGRILPKTLINANSKNKMYKLTGIGYV

SEQ ID NO: 196992 - protein, 130 aa, Zea mays
  unsure (1)..(130): unsure at all Xaa locations
  Clone ID: MRT4577_111240C.1.pep
AHAESHLYIPGSCDGLLALAAPXLVDDADMRKDVGAAXXLPAPLKVSGFTCKXNFRGTRFFFIXVRNPGNTNDRGGXSVVRAAYVEKFAGVNTXLGVSMGRIEXPTGGQNPANTEPRGNQIILRLQATLE

SEQ ID NO: 196993 - protein, 60 aa, Zea mays
  Clone ID: MRT4577_111241C.1.pep
YCPPWCAMRWILLLYVNNMYLQYQYTFAKFCTCKYLVLHIGQKKKKKKKSGRRGRRGATG

SEQ ID NO: 196994 - protein, 34 aa, Zea mays
  Clone ID: MRT4577_111242C.1.pep
TSIGCAAVVCSNEGGVFAICSYNPPGNLDGQSPY

SEQ ID NO: 196995 - protein, 39 aa, Zea mays
  Clone ID: MRT4577_111243C.1.pep
RIAILLFIAPMELVVLIPTDKINISGGVQRAGWPSWRAQ

SEQ ID NO: 196996 - protein, 253 aa, Zea mays
  unsure (1)..(253): unsure at all Xaa locations
  Clone ID: MRT4577_111244C.1.pep
QIWNLIITSFREEDLIDDREKDLLLVPYCKDRDMDIIQWPPFLLASKIPIALDMAADSGGKDRDLKKRMKSDPYFTYAIKECYASFKNIIYELVIDSRERGYIQKIFDAVDEHIAEETLIKELNMSNLPTLSKKFIELLDLLESNNKEDHDQIIILSQDMLEVVTRDIMVDQLSELLELIHGANNKRSEGMSSLDQQDQLFTKAIDFPVKKTQAWNEKIKRLRLLLTVKXESAMDVPYNLDARRRISFFANSL

SEQ ID NO: 196997 - protein, 84 aa, Zea mays
  unsure (1)..(84): unsure at all Xaa locations
  Clone ID: MRT4577_111245C.1.pep
MAPKAEKKPAAKKPAEEEPAAEKAPAGKKPKAEKRVPAGQARRQEGRQGKKGPEKGQENLETFQDHLXFKGLNQVHPAMGISFK

SEQ ID NO: 196998 - protein, 73 aa, Zea mays
  unsure (1)..(73): unsure at all Xaa locations
  Clone ID: MRT4577_111246C.1.pep
PLFILPGEVDMVFAPGVSKALFXKPKSQDKKLCLXKGGFPAFLEGERAQPIFQVFDDIISGVDQLSPKKGILL

SEQ ID NO: 196999 - protein, 111 aa, Zea mays
  unsure (1)..(111): unsure at all Xaa locations
  Clone ID: MRT4577_111247C.1.pep
SRVDTPDLVAPSSRIFGRRELVKEPDQIAIRYLKNDFINDLATMLPIPQMINRVVKPTVNTSSGNHNNNNKLSKIVPIQFIPRIQPKITLNSKIVXKAIELVTKIAWAGAA

SEQ ID NO: 197000 - protein, 322 aa, Zea mays
  Clone ID: MRT4577_111248C.1.pep
MGRSPCCDENGLKKGPWTPEEDQKLMEYIQKNGHGSWRALPRLAGLNRCGKSCRLRWTNYLRPDIKRGKFTQEEEQTILQLHSVLGNKWSAIAKHLPGRTDNEIKNFWNTHLKKKLIQMGFDPMTHRPRTDFFAALPQLIALANLRQLVEQRPWDDHAARIQVEAVQAAKLQCLQNLLQSAASITTTPSSSSMNTIPSDLGLLSPPQMSSLSTLPSPSFLESISGQDMVAGQLSDIQIPSSFFEQPTSNEANQQSDFTPKSSVEGENGTPKTLLSENSLPPLADFPISNLGDACGASSCDGSSIQFPSWPELFDEQFMCEFV

SEQ ID NO: 197001 - protein, 55 aa, Zea mays
  Clone ID: MRT4577_111249C.1.pep
CSCIPASVVSLPHPPSLLCADNQLPVLTILTFLYPTLARTFYVVAGLYDTCSIFM

SEQ ID NO: 197002 - protein, 118 aa, Zea mays
  Clone ID: MRT4577_11124C.1.pep
RYCPVPSLFLAYEGSADWAGSDIQHRPAHIVLYGPFYDSILLVDGDPRGVRIGGRVPGTLGKGVGFSQSERSLRRRQGGRDEGNGTRWETGVWNGGGGGVGETGRESSVGLCAACCID

SEQ ID NO: 197003 - protein, 167 aa, Zea mays
  unsure (1)..(167): unsure at all Xaa locations
  Clone ID: MRT4577_111250C.1.pep
MRLQLLASHKLLIEFCLCAPDILCLQEDGICTHPERKLXDRCYNGTWNMRSGHAADARAMXWTTTKCQSHCDQNSEITTLELRDNVGQLCDSKSXALSVCKLTLHXSTTPNHPLTDIHSIIVSTLATYDPEGGDIELGQIRTLLNIANALSKMCNDAPVIARGDCNS

SEQ ID NO: 197004 - protein, 53 aa, Zea mays
  Clone ID: MRT4577_111251C.1.pep
NKPLATYLVKSLKRNNSEKMFELNQVGASVSVNNGSMAPIQLPQPQFGPPDAW

SEQ ID NO: 197005 - protein, 212 aa, Zea mays
  Clone ID: MRT4577_111252C.1.pep
MAKVYPNSAAVAAEPATRAAAGDQQPEPPTVLTVWRKSLLFNCDGFTVYDARGDLAFRVDCYATSRRRAEVALMDAAGAPLLTLHRKRLSLAERWLIYEDGAGTTQPQPQPRRPLLSVHRHVGLRASGGKTLAHVFAPSSAAQEAFVVEGSYGRRDCAVRDARGDVVAEVRRKEAVGDDVFRLVVSPRFGAPLAMGLVIVLDEMFGGRRLKR

SEQ ID NO: 197006 - protein, 37 aa, Zea mays
  unsure (1)..(37): unsure at all Xaa locations
  Clone ID: MRT4577_111253C.1.pep
SGSPSSISIAPRXHHLAEVVLLASASADLAAARTVKR

SEQ ID NO: 197007 - protein, 95 aa, Zea mays
  Clone ID: MRT4577_111254C.1.pep
MCSCMSCVHSSPMFPFTSGSYRATLYSFSSQISRQGCIHIPIDSVGISLWDRTRIEQQHPALRPSAALVTSGAQPLPGCDVTLGRQGAARPPVRA

SEQ ID NO: 197008 - protein, 166 aa, Zea mays
  unsure (1)..(166): unsure at all Xaa locations
  Clone ID: MRT4577_111255C.1.pep
MGPTTARLLPLLPFVAVFLLASPVDADSALDAATRCAATIVSISPCLPHVAAVAPPLASCPPAPTDACCVAFLRAXSPLAAGGXEEGCLCHLLRNPLLLGFPIDAXRLAALLPACAAGIAFAAAHVEAGSLFADACRXLKVLPGLLFMPQSTTGFRVFPAAVPELM

SEQ ID NO: 197009 - protein, 89 aa, Zea mays
  Clone ID: MRT4577_111256C.1.pep
YLLGDDFKKWGNKRHPTKKGQRRGKKKLGRKKKRELYNLGGVLIKEFGGRGGALRDLKRERRAVFIMLVKTERTSLGGLNGGGPFLREL

SEQ ID NO: 197010 - protein, 69 aa, Zea mays
  unsure (1)..(69): unsure at all Xaa locations
  Clone ID: MRT4577_111257C.1.pep
PPPPPLLHLKQTPXQLELFIYTCNLSPIPPLQFYYRTTFHTNPYKFYLPKNPVCETIYFHNIYTHIITT

SEQ ID NO: 197011 - protein, 53 aa, Zea mays
  Clone ID: MRT4577_111258C.1.pep
VHSLRHPQDGVVASNTRLGVGKHRIVIQSEDHRDVIIATVNSFSIVMYSGRSL

SEQ ID NO: 197012 - protein, 243 aa, Zea mays
  Clone ID: MRT4577_111259C.1.pep
LRGLWARACGKGGQDPDLRRKEQWEKSQANKGLNLANMLGFGDLGSPPLSAAEEYSLHSRYLAKANSMNLSDVAEMKIIYRGGVDSEGRPVMVIVGAHFLLRCLDLERFVLYVVKEFESLIQKPYTIVYFHSVASLQPQPDLGFMKRLQQILGRKHKKNLHTIYILHPTLGLRTAVMAMQLFVDGEVWKKVVYVDRLVQLFRYVPREQLTIPDFVFQHDLEVNGGKGIIVDPRTKHIYQRPSG

SEQ ID NO: 197013 - protein, 63 aa, Zea mays
  Clone ID: MRT4577_11125C.1.pep
NPFWWTHQRHDGKLWNLNNYRTDVIQALGGVEGILEHTLFKGTYFPTWEGLFWESGRVMPSDS

SEQ ID NO: 197014 - protein, 42 aa, Zea mays
  Clone ID: MRT4577_111260C.1.pep
FLHLYRPTHTAIALSWTLNLASSIEPISFRASANPIRHDSCH

SEQ ID NO: 197015 - protein, 111 aa, Zea mays
  Clone ID: MRT4577_111261C.1.pep
FTFFYQGEAYNLLMTETIHGKGPQNIMAPIQVASFKVANKRTSSLNLFMAGSRRSMEATTQPSPSAFLHLTWSITILAVSSLQTMGTRQGTRWAHPRCNSCSPIRVMTDTT

SEQ ID NO: 197016 - protein, 226 aa, Zea mays
  Clone ID: MRT4577_111262C.1.pep
MVFMAALEADLRALSAEARRRHPAVKDAAEHAILKLRSLSAPSEIAQNEDILRMFLMACNVKSVKLSVIGLSCLQKLISHAAVASSALKDILATLKDHAEMTDEIVQLKTLQTMLILFQSHLHPESEESMSQALGICLYLLESNRSSDSVRNTAAATFRQAVALVFDNVIRAESLPSGKASSARLGSRVSAVADNVTHSFSHTLSLPSNSGDPTIMQNLSDGGKLG

SEQ ID NO: 197017 - protein, 154 aa, Zea mays
  unsure (1)..(154): unsure at all Xaa locations
  Clone ID: MRT4577_111263C.1.pep
MFLVDWFYGVLASLGLWQKEAKILFLGLDNAGKTTLLHMLKDERLVQHQPTQYPTSEELSIGQIKFKTFDLGGHQIARRVWKDYYAKVDAVVYLVDAADKERFAESKKELDGLLSDDSLANVPFLVLGNKIDIPIAASEEELRYYLXLSNFTTG

SEQ ID NO: 197018 - protein, 82 aa, Zea mays
  Clone ID: MRT4577_111264C.1.pep
GTMYSRVCKLLFCCMGQQFCTAWDISQIWLPLNPNGLPALCLLSKYARSLRSGEAIDHLVRISSVIEAVRHTDGDPTCWWSC

SEQ ID NO: 197019 - protein, 82 aa, Zea mays
  Clone ID: MRT4577_111265C.1.pep
LSPTVRDRAPPSSSQTTKAHPALAIHPARLDVLSKGPGPHSILAFPKNKALCVQFKKQGKSLLHAGVLLLTGHFLQHKAGYY

SEQ ID NO: 197020 - protein, 77 aa, Zea mays
  Clone ID: MRT4577_111266C.1.pep
RSHPPGWGVMATPRRGGAEGPLLGALPVGRFSGQNKTGAPSRFGGRAKNNHLLRIKEKLGDSPVFPGAKFRAPGGPF

SEQ ID NO: 197021 - protein, 104 aa, Zea mays
  unsure (1)..(104): unsure at all Xaa locations
  Clone ID: MRT4577_111267C.1.pep
MVAIVPEAQTEAQMKSILQKSQSHLSAYINKVVETXEMESLYKKVHNAIRTDHKVDQSPNHPTKEPQRNIPNKLSYDKKKATIMEKKNQLCSFGGDNPAAEAHK

SEQ ID NO: 197022 - protein, 108 aa, Zea mays
  unsure (1)..(108): unsure at all Xaa locations
  Clone ID: MRT4577_111268C.1.pep
MVKTATATATAAARHGGANKRTYKGVRMRSWGSWVXGVRXPGQKTRIWLGSHSTAEAAARAYDAALLCLRGWAAAPDLNLPPRRPLAHGXHPLPPADMSTKAIQRVAV

SEQ ID NO: 197023 - protein, 26 aa, Zea mays
  Clone ID: MRT4577_111269C.1.pep
WWFRSSSVIYYENICNHLRISLKNIS

SEQ ID NO: 197024 - protein, 1172 aa, Zea mays
  unsure (1)..(1172): unsure at all Xaa locations
  Clone ID: MRT4577_11126C.1.pep
ILFFCKTLNIGRTAIAFLRVDDEHMKVFDNRVRQILMSSGSTTFTKIVNKWNTALIGLMTYFREATVHTQELLDLLVKCENKIQTRIKIGLNSKMPSRFPPVIFYTPKEIGGLGMLSMGHILIPQSDLRYSKQTDVGVTHFTGGWGHEEDQLIPNLYRYIQPWESEFIDSQRVWAEYALKRQEAQSQNRRLTLEDLEDSWDRGIPRINTLFQKDRHTLAYDKGWRVRTDFKQYQVLKQNPFWWTHQRHDGKLWNLNNYRTDVIQALGGVEGILEHTLFKGTYFPTWEGLFWEKASGFEESMKYKEFGDLILKATEPQMVLYNIYXLVENILLYTAFSRIVLILRALHVNNEKAKMLLKPDKTIVTGPNRRLPMWGSPTMIHAKVSVGFQVQLDLTDIFMHGKIPTLKISLIQIFRAHLWQKIHESVVMDLCQVLDQELDALEIETVQKETIHPRKSYKMNSSCADILLFAAHRWQMSKPSLVSESKDVFDQKASNKYWIDVQLRWGDYDSHDIERYTRAKFMDYTTDNMSIYPSPTGVMIGIDLAYNLHSAFGNWFPGSKPLLQQAMNKIMKSNPALYVLRERIRKGLQLYSSEPTEPYLSSQNYGEIFSNQIIWFVDDTNVYRVTIHKTFEGNLTTKPINGAIFIFNPRTGQLFLKVIHTSVWAGQKRLGQLAKWKTAEEVAALVRSLPVEEQPKQIIVTRKXMLDPLEVHLLDFPNIVIKGSELQLPFQACLKIEKFGDLILKATEPXQMLYNIYDDWLKSISSYTAFSRIVLILRALHVNNEKAKMLLKPDKTIVTEPHHIWPTLNDEQWLKVECALRDLILSDYAKKNNVNTSALTQSEMRDIILGAEIAPPSQQRQQIAEIEKQSRETTQLTAVTTRTTNVHGDELIITTTSPYEQQAFASKTDWRVRAISATNLYLRVNHIYVNSDDIKETGYTYIMPKNILKKFICIADLRTQIAGFLYGLSPQDNPQVKEIRCIAIPPQHGTHQMVTLPSNLPEHEFLNDLEPLGWMHTQPNEAPQLSPQDLTSHAKILENNKQWDGEKCIILTCSFTPGSCSLTAYKLTPSGYEWGRSNKDNGSNPHGYLPTHYEKVQMLLSDRFLGFYMIPDNTPWNFNFMGVKHDPQMKYNMKLGMPRDFYHEDHRPTHFLEFSNIEEGEVAEGDREDTFT

SEQ ID NO: 197025 - protein, 497 aa, Zea mays
  Clone ID: MRT4577_111270C.1.pep
MAAEKQAAMDGRKDGVAREVIRMEREAVIPILKPKLVMRLAYLIEHEADRNEFLKLCKKVEYTIRAWYLLQFEDLMQLYSLFDPVSGKERLQQQNLTPEEIETLEFNFMTYLFQVMEKSNFKLLSDEEFDIAQSGKYLLNLPIKVDESKLDKKLLTKYFKEHPHDNLPEFSNKYIIFRRGIGIDRTTDYFFIEKVDVMISRAWRSLLRVTRIDRLFSKKQHLKPKNGTKKTDEINEDEEDPELFVERIRLEKIELSLKNLMSKMTIQEPTFDRMIVVYRRAGTKTEPDRGIFVKHFKNIPMADMEIVLPEKKNPSLTPMDWVKFLISAVIGLVTLVGSLEMPKADVWVVIAILSGVIGYCAKIYFTFQQNMTMYQNLITKSMYDKQLDSGKGTLLHLCDDVIQQEVKEVIICYYILMEQGKATIQDLDLRCEELIKEEFGADCNFDVHDAIKKLEKLSIVHRDSIGRILCVPLKRANEIIGTTTEELVMRAQQNLAS

SEQ ID NO: 197026 - protein, 83 aa, Zea mays
  Clone ID: MRT4577_111271C.1.pep
IHHRVHIIRYWELKPPTILNWPYLNQNAHGKPTGMVVEIGTSIFTNLRILAIKPLTTSESIEKKMGGATPTTPGFWLFKKENP

SEQ ID NO: 197027 - protein, 574 aa, Zea mays
  unsure (1)..(574): unsure at all Xaa locations
  Clone ID: MRT4577_111272C.1.pep
MASVAATTTLAPALAPRRRARPGTGLLPPRRASAVXAARSTVTSPTWXRQRSQRXLFPPEPEHYRGPKLKVAIIGAGLAGMSTAVELLDQGHEVDLYESRPFIGGKVGSFVDRQGNHIEMGLHVFFGCYSNLFRLMKKVGADNNLLVKEHTHTFVNKGGTIGELDFRFPVGAPLHGIQAFLRTNQLKVYDKARNAVALALSPVVRALVDPDGALQQVRDLDDISFSDWFMSKGGTRESITRMWDPVAYALGFIDCDNISARCMLTIFTLFATKTEASLLRMLKGSPDVYLSGPIKKYITDRGGRFHLRWGCREVLYEKSPDGETYVKGLLLTKATSREIIKADAYVAACDVPGIKRLLPSEWREWEMFDNIYKLDGVPVVTVQLRYNGWVTELQDLEKSRQLQRAVGLDNLLYTADADFSCFSDLALSSPADYYIEGQGSLIQAVLTPGDPYMPLPNEEIISKVQKQVVELFPSSRGLEVTWSSVVKIGQSLYREAPGNDPFRPDQKTPVKNFFLSGSYTKQDYIDSMEGATLSGRRTSAYICGAGEELLALRKKLLIDDGEKALGNVQVLQAS

SEQ ID NO: 197028 - protein, 31 aa, Zea mays
  unsure (1)..(31): unsure at all Xaa locations
  Clone ID: MRT4577_111273C.1.pep
GXXPXLHLXXSXKVSSXSCVILGYSLRIXXI

SEQ ID NO: 197029 - protein, 64 aa, Zea mays
  unsure (1)..(64): unsure at all Xaa locations
  Clone ID: MRT4577_111274C.1.pep
GLCPSLRCVPLGLCLACAVALPFFXAPPFAGAARXFSKPPLLGPARPPKGGFVGPGIWFRAGYL

SEQ ID NO: 197030 - protein, 206 aa, Zea mays
  unsure (1)..(206): unsure at all Xaa locations
  Clone ID: MRT4577_111275C.1.pep
HIEMGLHVFFGCYSNLFRLMKKVGADNNLLVKEHTHTFVNKGGTIGELDFRFPVGAPLHGIQAFLRTNQLKVYDKARNAVALALSPVVRALVDPDGALQQVRDLDDVSIPCFYFRSIKSVHQEHSFAIVSIFSKCVLFXSLITKLFCQFFSQTLVNFILTHXISFSDWFMSKGGTRESITRMWDPVAYALGFIDWDNISARCMLTI

SEQ ID NO: 197031 - protein, 621 aa, Zea mays
  unsure (1)..(621): unsure at all Xaa locations
  Clone ID: MRT4577_111276C.1.pep
PAGSRTPATIPARRHLRLPSPPSFPSHSGPHTNCPSSSPPLYTLPTTAAANHPPHPSTARSTVTSPTWXRQRSQRXLFPPEPEHYRGPKLKVAIIGAGLAGMSTAVELLDQGHEVDLYESRPFIGGKVGSFVDRQGNHIEMGLHVFFGCYSNLFRLMKKVGADNNLLVKEHTHTFVNKGGTIGELDFRFPVGAPLHGIQAFLRTNQLKVYDKARNAVALALXSVVRALVDPDGALQQVRDLDDVSFSDWFMSKGGTRESITRMWDPVAYALGFIDCDNISARCMLTIFTLFATKTEASLLRMLKGSPDVYLSGPIKKYITDRGGRFHLRWGCREVLYEKSPDGETYVKGLLLTKATSREIIKADAYVAXFFPLFCLSYFASMPNHTHLTWCSTACDVPGIKRLLPSEWREWEMFDNIYKLDGVPVVTVQLRYKWMVTELQDLEKSRQLQRAVGLDNLLYTADADFSCFSDLALSSPADYYIEGQGSLIQAVLTPGDPYMPLPNEEIISKVQKQVVELFPSSRGLEVTWSSVVKIGQSLYREAPGNDPFRPDQKTPVKNFFLXSGSYTKQDYIDSMEGXTLXRQRTSAYICXAGEELLALRKXLLIDDGEKALGNVQVLQAS

SEQ ID NO: 197032 - protein, 69 aa, Zea mays
  Clone ID: MRT4577_111277C.1.pep
NTPDLNFPLRDLGPKPYHPGGGLTNRVPGCPTPRVFGRTFLGGKMGTPTSYLSSQFGGQGPGYHGFFGT

SEQ ID NO: 197033 - protein, 94 aa, Zea mays
  Clone ID: MRT4577_111278C.1.pep
DRMFCPLVRGDKLREDAVGRLVWLPSESLFFCFRGFFYFFLTGLGFFPPKFFSFIPPVFNISFFPEGRVVFRAVRFFINPCFYIFFLRGVGRRL

SEQ ID NO: 197034 - protein, 62 aa, Zea mays
  Clone ID: MRT4577_111279C.1.pep
RAAQSVTWISVMRRALALPVREGGELLNLVLTSRSPSNHDDEHQKACACVELRDGKLLPAGS

SEQ ID NO: 197035 - protein, 138 aa, Zea mays
  unsure (1)..(138): unsure at all Xaa locations
  Clone ID: MRT4577_11127C.1.pep
TTMQLVSRPQQFDVMVMPNLYGNIVNNVCAGLVGGPGLVAGANYGHVYAVFETATRNTGKSIAXRXIANPTATLLASCMMLDHLKLHSYATSIRKAVLASMDNEDMHTPDIGGQGTTSQAIQDIIRHIRIINGRAVDA

SEQ ID NO: 197036 - protein, 224 aa, Zea mays
  unsure (1)..(224): unsure at all Xaa locations
  Clone ID: MRT4577_111280C.1.pep
SGRPGKKKKKKKKKKKTPFWKREAKQSEFFGIFLKFDYPQLVWFLLLFEKTILGALGKKGGPGMGIDLGPTXLGVGGGEHHRGENIPNDQGNPPTPAYCGLTEPEGFNGELSKNQGAMNPTKPGFNAKGLXGGGFFNPRXQKEQKLWPVKGIPRPGDKPMIGGNYQGQEKQFXVKKTPPRAQTKRREMXEAYLGSTIKNPRVTGPAXFNDLKRQAPKDPRVNWG

SEQ ID NO: 197037 - protein, 95 aa, Zea mays
  unsure (1)..(95): unsure at all Xaa locations
  Clone ID: MRT4577_111281C.1.pep
LISTSPNTVEPIIKVGCRDHTLXVLNLTHFKLSFTFDXHRGYINSFAVNPKKSLFASCRKDSVTLLLDLAXGKKLYSLDTGSIIHSFFFLPNRYW

SEQ ID NO: 197038 - protein, 68 aa, Zea mays
  Clone ID: MRT4577_111282C.1.pep
MAIRIHIVLMLIALTTCVANASLKTKCSQAPTTGLVTPYLSSIVASMCENEAIQPYMLDLAIADSNIL

SEQ ID NO: 197039 - protein, 111 aa, Zea mays
  Clone ID: MRT4577_111283C.1.pep
MMPVEEAAADDWSECAFSLTCEEDCADLGDGELFPLYSAGDVEEDEYLEQLVFKETSFCSSSDSAADCDGDEEGDEEYSSLTSEEWFRQARLAAVKWILETRGCFGFGHRT

SEQ ID NO: 197040 - protein, 82 aa, Zea mays
  Clone ID: MRT4577_111284C.1.pep
EGRFFFFFFFFLSRNDVVFNKSPIKTYMQVLYRGTYWCRFWTQLQRHEEDAKIIREACRKLETTVMQIFAFHGWQFSNRIAL

SEQ ID NO: 197041 - protein, 65 aa, Zea mays
  Clone ID: MRT4577_111285C.1.pep
PVSPAGSATSPAAVLAAPAFGSSIVTANARQNHRAAIIDHLSAAFLSGRRVLERHTHAQYSGQTS

SEQ ID NO: 197042 - protein, 351 aa, Zea mays
  Clone ID: MRT4577_111286C.1.pep
PCVMDWIKFCSDFTASDGKQHALLDNLNQELSQKSVLLGDGFKLSAADNDVFATVHPFVIRVSDSELQKYPHVLRWMDYIQNTVGAGTTLQKINVTKSDFDPPSHPRKADKKDAESSSKKAISVQKTADKSNGSADSKKSTREPPENKENPTAAGNSKTSGEKKKVQEKSAGKTTEKAPEKIADKESECDISILNIQVGLIRKAWKHPSADSLLVEEIDLGDGNVRQVVSGLAKYCSPDDLTNRHVVLITNVKPGKLRDVMSAGLVLCASTEDHAAVEPLIPPEGAKIGERISFAGFDGKPEDVLNPKKKQLDKITPHLRTDENGIAMFKGVPFTTSAGPCRSSIRNGNVK

SEQ ID NO: 197043 - protein, 68 aa, Zea mays
  unsure (1)..(68): unsure at all Xaa locations
  Clone ID: MRT4577_111287C.1.pep
CIANTGGGTRCGATVSTEGTGAPASVVGAGDWYNQELDLTLQXRMLXVQRKYMIYNYWAVPRRYQQGL

SEQ ID NO: 197044 - protein, 113 aa, Zea mays
  Clone ID: MRT4577_111288C.1.pep
VMDWIKFCSDFTASDGKQHALLDNLNQELSQKSVLLGDGFKLSAADNDVFATVHPFVIRVSDSELQKYPHVLRWMDYIQNTVGAGTTLQKINVTKSDFDPPSHPRKADKKDAW

SEQ ID NO: 197045 - protein, 158 aa, Zea mays
  unsure (1)..(158): unsure at all Xaa locations
  Clone ID: MRT4577_111289C.1.pep
EKKKVQEKSAGKPTEKAPEXIADKESECDISILNIQVGLIRRAWKHPSADSLLVEEIDLGDGNVRQVVSGLAKYCSPDDLTNRHVVLITNVKPGKLRDVMSAGLVLCASTEDHAAVEPLIPPEGAKIGERTSFAGSVYNQFKGPFAQLAFIFCLAVLI

SEQ ID NO: 197046 - protein, 303 aa, Zea mays
  unsure (1)..(303): unsure at all Xaa locations
  Clone ID: MRT4577_11128C.1.pep
MPAGNPRTGQLFLKVIHTSVWAGQKRLGQLAKWKTAEEVAALVRSLPVEEQPKQIIVTRKGMLDPLEVHLLDFPNIVIKGSELQLPFXQACLKIEKFGDLILKATEPQMVLYNIYDDWLKSISSYTAFSRIVLILRALHVNNEKAKMLLKPDKTIVTEPHHIWPSLNDEQWLKVECALRDLILSDYAKKNNGNTSALTQSEMRDIILGAEIAPPSQQRQQIAEIXQSRETTQLTAVTTRTTNVHGDELIITTTSPYEQQAFASKTDWRVREISATNLYLRVNHIYVNPDDIKVSIVIASLQLQ

SEQ ID NO: 197047 - protein, 80 aa, Zea mays
  Clone ID: MRT4577_111290C.1.pep
RFGVHIEIPLWSARSDHPFVPSGKIVKPMIKESVISLTYYCTSLKLVDHEDIICCFCIDVILDVKMLVAVGKALYAGTCS

SEQ ID NO: 197048 - protein, 43 aa, Zea mays
  Clone ID: MRT4577_111291C.1.pep
IFIIEQKLFLISFKKNVFVKQQKSKFVEFINFIEIFILINKFF

SEQ ID NO: 197049 - protein, 77 aa, Zea mays
  Clone ID: MRT4577_111292C.1.pep
MGKFSSQFKKEVFFFFKKKLIKVPPPPSQWRKKKKKKKKKKKKKKKKKKKKKKKKKKKKKKKKKKKKKKKKKKKKPN

SEQ ID NO: 197050 - protein, 78 aa, Zea mays
  Clone ID: MRT4577_111293C.1.pep
QAFFFFFFFFFFFLVFFFFFFFFPGQQNMMYLSTLHQGLRLAPKKMGGGGGTCYSKQDRTPNCNPPAFSNFGIPPLCP

SEQ ID NO: 197051 - protein, 329 aa, Zea mays
  Clone ID: MRT4577_111294C.1.pep
EREEARWLREEQRWLREEQRWLREESRWRAEREALLAEVAALRLRLRALEGVRPDHLAVAVDAVVSPAPLAAVPAPQPRPALVEEAAAVEVEVRKEVVVVQEKEVAPKAEAAGSGAAGASESRRTLRTGAEGEDVRAMQEALQKLGFYSGEEDMEYSSFSSGTERAVKTWQATVGASENGVMTSELLEWLFSGKTGEDVKTKDGTNGAAVPAVTGIAEVRKTTVAENGVSGVGVSEHRVFLLGENRWEDPTRLTHNKKTASTGTVASTKTCISCRGEGRLMCLECDGTGEPNIEPQFLEWVGEDTKCPYCEGIGSILCDVCDGKKVMAS

SEQ ID NO: 197052 - protein, 74 aa, Zea mays
  unsure (1)..(74): unsure at all Xaa locations
  Clone ID: MRT4577_111295C.1.pep
PVWQTSICSAVNICSIYVQLSSDLXKKKKKKKKKKKKKKKKKKKKKKKKKKKKKKKKKKKKGGGRFKKSKFTYA

SEQ ID NO: 197053 - protein, 106 aa, Zea mays
  unsure (1)..(106): unsure at all Xaa locations
  Clone ID: MRT4577_111296C.1.pep
SSLXXPFGXGVVXGXXXAXXXXXXXRXCXXXLLAXXXXXXCLCXXXLSFXXGCVXCVXSXVWPXCVXPPFPVCFXXRXSLXXXXALXXLCLXXXPXPXVLXXXXXX

SEQ ID NO: 197054 - protein, 46 aa, Zea mays
  Clone ID: MRT4577_111297C.1.pep
NSLAYSQQHHLPYTQLPAAYFNNSLTFNQPALFISTPYLQHQHLLL

SEQ ID NO: 197055 - protein, 122 aa, Zea mays
  unsure (1)..(122): unsure at all Xaa locations
  Clone ID: MRT4577_111298C.1.pep
MATAHGSRLIFLFEATLFSALLLVPARPASAADGRAYPAGDCPYPCLPPPPVTANCPPPPPAAASYSYPPPPGAYIPYFQPAAGGGGGXSGXGYXXYPXPPPPNPILPWYPWYYKTPPSSAV

SEQ ID NO: 197056 - protein, 111 aa, Zea mays
  Clone ID: MRT4577_111299C.1.pep
VNHAFRASREELALTWLRSALLLRRLAALPRPVDRTQEIPLHGSKATSGRAAHTSDEIPSASPRPVNPLPPVTVPRRKKQEEKKRRLSSDSLTFLSPSLSHSPRPGRPRGS

SEQ ID NO: 197057 - protein, 312 aa, Zea mays
  unsure (1)..(312): unsure at all Xaa locations
  Clone ID: MRT4577_11129C.1.pep
RPRRQPRRPPRPCPAGCAFSTDGSMALALAPISSASAGXAAAAPQPPGXQQHGGFSIGSPPSDPSAKPRGRPPGSGKKKQFEALGSWGIAFTPHILTVKAGEDVASKIMTFSQQGPRTVCILSANGAISNVTLRQPATSGGLVTYEGRFEIISLSGSFLLAEDGDTRSRTGGLSVALAGSDGRVLGGCVAGMLMAATPVQVVVASFIAEGKKSKPAEARKVEPMAAPPPQMATFVPPPLATSPPSEGTSSASSDDSGSPIHHSAMPFSNSSQHQHPHQHQHQHMPPAYASGGWSLSVHQQNRHDSDMKMMSN

SEQ ID NO: 197058 - protein, 57 aa, Zea mays
  Clone ID: MRT4577_1112C.1.pep
LVIHPSFDSADWCHLALSSSHQVVGMTVDLDEPLFYTFEPRITCFSSRKQQDGPRAE

SEQ ID NO: 197059 - protein, 257 aa, Zea mays
  Clone ID: MRT4577_111300C.1.pep
MACLLVLVIAATVLTGPPGKLTHAARTSPAEAFWHAALPGAPMPEAIRELLRPAGAAGTNAPDAARSRHHDADPPPMNFKYEDYRSSRRNEATATSAEALDRAGGAGNAAASPAVFFLEEAVRVGGVLPFRGMVPRGTASVAVASPPMRLYKVRAVRAIDGRRFMVCRRDREDGPDGDAVYGCRATGPARAYAVGVVGERGETVAATVVCRTDTSRWNRVRAAFRLLDVKPGGAAVCHAALGAQVIPVKNDSGSSLV

SEQ ID NO: 197060 - protein, 97 aa, Zea mays
  Clone ID: MRT4577_111301C.1.pep
FKQGHAFLYFDADHYSTEHRQWIRRANTTHRRALASPHAYIATTRNVASRRRRQTEHVGAFLHTKEEPLSFLTGITCAPSAAWQTAAPPSSRIPSLR

SEQ ID NO: 197061 - protein, 79 aa, Zea mays
  Clone ID: MRT4577_111302C.1.pep
FEGKRLTLCSAASARVYLMSDTSGLSHGPYLGTTTFCSLASLLILVIKASVYSTAQDIGPELLPSLPDHKVNLKNLLGM

SEQ ID NO: 197062 - protein, 234 aa, Zea mays
  unsure (1)..(234): unsure at all Xaa locations
  Clone ID: MRT4577_111303C.1.pep
LGTSRPAGNASHRLCSPPPPGPAAESGDAERSRSGGREWERHHQRLRQCRARGRPRGGLTPSTTLLKDEIDIVIPTIRNLXDFLXSWRPFFQTYHLIIAKDVEPTMTIXVCEGFDYELYNRNDINRILGPKASCISFXDSACRCFGYMSSQNKYIYTIYDDCFVGQDPSGKDITALXQHITNLLRPSTTFFFYTLYYPYREGADFARAYPFSLREGVXTAFSHGXWLNIPDYDA

SEQ ID NO: 197063 - protein, 364 aa, Zea mays
  Clone ID: MRT4577_111304C.1.pep
MKNPSKIIAVCSFCSCARTTIPTAEASYAEEHAPTTSIKPRHRPGSRRTASEHDHTTHPPPLLTDSQKARSSARGCRVQTTTYTMARRSLALLLASSLALMSAAVASADSWLYDKFNTDGTVRTQYDASGQEVAMLSLDRSSGAGFNSKEQYLYGEFSVQMKLIPGNSAGTVSCFYLSSGDGDGHDEIDMEFMGNASGQPVVLNTNVWASGDGKKEHQFDLWFDPSADYHTYTIIWNPTNILFKVDGDVIRCFKRYADLPYPNARPMALHATLWDGSYWATEKGKVPVDWSAAPFVVSYRGYSANACVSGGACGGGGDDGWMSKQPDDAEWGTIRWAESNYMRYNYCDDGWRFPQGLPPECSRS

SEQ ID NO: 197064 - protein, 256 aa, Zea mays
  unsure (1)..(256): unsure at all Xaa locations
  Clone ID: MRT4577_111305C.1.pep
MGAMMASITSELLFFLPFILLALLALYTTTVAKCHGTHQWRRQKKKRPNLPPGARGWPLVGETFGYLRAHPATSVGRFMERHVARYGKIYRSSLFGERTVVSADAGLNRYILQNEGRLFECSYPRSIGGILGKWSMLVLVGDAHREMRAISLNFLSSVRLRAVLLXEVERHTLLVLRSWPPSDGTFSAQHEXAKKFTFNLMAKNIMSMDPGEEETERLRLEYITFMKGVVSAPLNFPGTAYWKALKSRASILGVIE

SEQ ID NO: 197065 - protein, 137 aa, Zea mays
  Clone ID: MRT4577_111306C.1.pep
LWPYYCKRKTYQARSNRCFMFYPGILHGLNKHRMATTIRGSGPHPRHGEPNQRPPKVLRNLPMTHTQKARVGLPKTHLTWAYHWGRCSCNMSCRRRTVFTKTDRFSIFQGSFYQQEKQSLHLCCVDEKQSRHTRTTA

SEQ ID NO: 197066 - protein, 49 aa, Zea mays
  Clone ID: MRT4577_111307C.1.pep
PSGPHPAKQTIRMFAWFLLPIGGDLGEEGTALPQLMPTHISLAGGSQRT

SEQ ID NO: 197067 - protein, 161 aa, Zea mays
  unsure (1)..(161): unsure at all Xaa locations
  Clone ID: MRT4577_111308C.1.pep
MSRTKRNXMKTNRREAPRNHLGTNAARKPDPRPVGAKKPHRFRPFTVALREIRKDHNRSDMIIFKLPFKRLDGEILKNXRYDLRAQPLSFVEXLQEAVEEDLEGLFYXTSLSLIHATIVTIMTKDIHIARRIWIERHRAPVVQLCLVVVLQVYGGYRYLTP

SEQ ID NO: 197068 - protein, 445 aa, Zea mays
  Clone ID: MRT4577_111309C.1.pep
MDLLSAAYGATSDDEDAADRPFSMPVATRSASFSPPPMKPPRWESHPYLPPTHCFPQPPLPDAALPLASPSSGRYISKRERALLASSGAHIESGSSLPLTRVDFESAVGSITYPNLRADILHSLRCQPKPGPSTSFPLRLSVCLKGHTKAINCVDWSPTHGHLLASAGMDHTVHVWNVWDKGNTTARVLKHHTAAVKDVRWSLHRPFLLSGGLDCSLQLVDVVEGKVMEVFKEDQAVEVIKFNPSNPDLFLSGGSKGSLKLWDIRCGLVTKEFQRSLGTILDIDFSADGRQFISSTDTTRSNISENTIIVWDVLRQVPLSNQVYTEAFTCPCVRYHPREASFVAQSNGNYIAIFSARPPFKLNKYTRFEGHGVWGFPVKCSFSLGGRELASGSSDGSIYFYDYRSARLLRKIEAFKEACTDVAYHPVMPNVIAACSWAGEISVFE

SEQ ID NO: 197069 - protein, 459 aa, Zea mays
  Clone ID: MRT4577_11130C.1.pep
LDFPNIVIKGSELQLPFQACLKIEKFGDLILKATEPQMVLYNIYDDWLKSISSYTAFSRIVLILRALHVNNEKAKMLLKPDKTIVTEPHHIWPTLNDEQWLKVECALRDLILSDYAKKNNVNTSALTQSEMRDIILGAEIAPPSQQRQQIAEIEKQSRETTQLTAVTTRTTNVHGDELIITTTSPYEQQAFASKTDWRVRAISATNLYLRVNHIYVNSDDIKETGYTYIMPKNILKKFICIADLRTQIAGFLYGLSPQDNPQVKEIRCIAIPPQHGTHQMVTLPANLPEHEFLNDLEPLGWMHTQPNEAPQLSPQDLTSHAKILENNKQWDGEKCIILTCSFTPGSCSLTAYKLTPSGYEWGRSNKDNGSNPHGYLPTHYEKVQMLLSDRFLGFYMVPDNAPWNFNFMGVKHDPQMKYNMKLGMPRDFYHEDHRPTHFLEFSNIEEGEAAEGDREDTFT

SEQ ID NO: 197070 - protein, 92 aa, Zea mays
  Clone ID: MRT4577_111310C.1.pep
PRPSSSLPKYRRQPSHGGVMSPPLGRPHPPPPISSNHGLSWADVVDIICVRWRRKSAIARYLTVVIPPPVGAGTSHLGTGGSSAWSPGFGLD

SEQ ID NO: 197071 - protein, 45 aa, Zea mays
  Clone ID: MRT4577_111311C.1.pep
ICIKETLNMILHCKKNDIIGVMVGQSLVPGNEISLVPSNRGTIVN

SEQ ID NO: 197072 - protein, 134 aa, Zea mays
  Clone ID: MRT4577_111312C.1.pep
ISSLLRTVLPLTMRMPRTDPSPCRLPPALPLASPSSGRYISKRERALLASSGAHIESGSSLPLTRVDFESAVGSITYPNLRADILHSLRCQPKPGPSTSFPLRLSVCLKGHTKAINCVDWSPTHGHLLASAGMD

SEQ ID NO: 197073 - protein, 59 aa, Zea mays
  Clone ID: MRT4577_111313C.1.pep
PTPKEPIDTKVLFKGIGGFYNPTATPSYITYCMIGWLVSPCPAPNPVHALTAPRHVLGK

SEQ ID NO: 197074 - protein, 90 aa, Zea mays
  Clone ID: MRT4577_111314C.1.pep
TRPPFKLNKNTRFQEHGVWGFPVKCSFSLGGRELASGSSDGSIYFYDYRSARLLRKIEAFKMACTDVAYHPVMPNVIAACSWAGEISVFE

SEQ ID NO: 197075 - protein, 184 aa, Zea mays
  unsure (1)..(184): unsure at all Xaa locations
  Clone ID: MRT4577_111315C.1.pep
MTTASTSQVRQNYHQDSEAAINRQINLELYAXYVYLSMSYYFDRDDVALKNFAKYFLHQSHEEREHAEKLMKLQNQRGGRIFLQDIKKPDCDDWESGLNAMECALHLEKNVNQSLLELHKLATDKNDPHLCDFIETHYLNEQVKAIKELGDHVTNLRKMGAPEXSGLPEYLFDKHTLGDSDNES

SEQ ID NO: 197076 - protein, 66 aa, Zea mays
  Clone ID: MRT4577_111316C.1.pep
YTRIQSSFNIFSAASFRSLLTASSTASLAILIVSNASFMAGSASGSYGSGGGESSVVVKNKLLIRS

SEQ ID NO: 197077 - protein, 41 aa, Zea mays
  Clone ID: MRT4577_111317C.1.pep
IKAAGFLPLHGHHQRARSLHDQKTSNVIMICNSVFVKKIVF

SEQ ID NO: 197078 - protein, 193 aa, Zea mays
  Clone ID: MRT4577_111318C.1.pep
MALHSAAAAAALSALLMLSFSGLTLSDTTPSTPVSPSAACNATTDPTFCRSVLPPRGKGDLYKYGRFSVAESLAGARMFAALVDRYLARHRHLSSSAIGALRDCQLMADLNVDFLTAAGATIKTTDTLLDPQADDVHTLLSAILTNQQTCFDGLQAASGSWSDRGGLDAPIANGTKLYTLSPPTFTSKKWKTT

SEQ ID NO: 197079 - protein, 40 aa, Zea mays
  Clone ID: MRT4577_111319C.1.pep
SDCHKVFKLISAIVKSEFVVRHLNRFHHFKLGSCSCNDYW

SEQ ID NO: 197080 - protein, 86 aa, Zea mays
  unsure (1)..(86): unsure at all Xaa locations
  Clone ID: MRT4577_11131C.1.pep
AALNGLGKGEGVETNANALNEVEDLGGPLAQRVPQDAHVMLLVGRPAPAQLLLARPGLCRRERGADDEVGLALHPRVRPRVRPRXR

SEQ ID NO: 197081 - protein, 98 aa, Zea mays
  unsure (1)..(98): unsure at all Xaa locations
  Clone ID: MRT4577_111320C.1.pep
MARSMEHRATSDMLISPDXDKNVQICHICNRDPGESXKDVVKALNKRIGHHNPQVQLLALTLVQTDIRNCADILHMHVAYRDILHDMLKILNKNSDPP

SEQ ID NO: 197082 - protein, 93 aa, Zea mays
  unsure (1)..(93): unsure at all Xaa locations
  Clone ID: MRT4577_111321C.1.pep
MRTIAILAAILLVALQAQAESLQERADEATTQKQXGEDNQDLAISFAGNGLSALRTSGSQASATCYCRTGRCATRRSLSEVYEISGRLYRLCC

SEQ ID NO: 197083 - protein, 244 aa, Zea mays
  unsure (1)..(244): unsure at all Xaa locations
  Clone ID: MRT4577_111322C.1.pep
MSEDEAESSSSGAAASEPKDPRTIARKYQLDLCKRAVDENIIVYLGTGCGKTHIAVLLMYELGHLIRKPSREVCVFLAPTIPLVRQQAMVIADSTNFKVQRYYGSGKHSRDHQAWEKEMGEYEVLVMTPQILLHNLRHCFIRMDLIALLIFDECHHAQAQKRHPYAQIMKEFYNNADKHPRVFGMTASPIIGKGGSNKLTYTKCINSLEELLNAKVCSVDNVELEXVIASPKVEVYFRQHGIRA

SEQ ID NO: 197084 - protein, 52 aa, Zea mays
  Clone ID: MRT4577_111323C.1.pep
MILIYCSKKKKKKKKKKKKKKKKKKKKKKKKKKKRGVSWWGIQFYLRGLATL

SEQ ID NO: 197085 - protein, 138 aa, Zea mays
  Clone ID: MRT4577_111324C.1.pep
MQAAATAAGFSAVLPAKGRPAARSRVVARVPATRRSVRVAAVVATEAAQIDYSSSVSVFPMEACDLLGGDACNGPMFPEAKPASAAAAASRSVVGVDRDYLSYDEPKTVFPGEACDDLGGEFCEAPYQDGVSRELAHA

SEQ ID NO: 197086 - protein, 108 aa, Zea mays
  Clone ID: MRT4577_111325C.1.pep
LLILFYKLIELALLLLVSAACVERTFLAIHIIKRELHNKIEEKKKKKIIVCFTEKEIFKFIDDELIIRRSSSLMMNSLFDDFNVSLRDIVRSTNLPGCSFYLMITSWT

SEQ ID NO: 197087 - protein, 249 aa, Zea mays
  unsure (1)..(249): unsure at all Xaa locations
  Clone ID: MRT4577_111326C.1.pep
MQVCLRRGLSLVRQHTSRVLPPLSLHPTRFFLHQSASDPMGEGSVPGKDAKGKGKAKHPAQASALVARDDSYLEAVTHKRIRLFEEIQARQAVERLNIGGEVIKITLPDGAIKEGKKWITTPMDIAKEISSGFAASCLIAQVDETLWDMGRPLEGDCKLQMFKFDTNEGRDTFWHSSAHILGESLERAYGCKLCIGPCTTRGXGFYYDAYYHELTLTESTLVSFETXAKKAGAEKQXFERIEVSRAEAL

SEQ ID NO: 197088 - protein, 125 aa, Zea mays
  Clone ID: MRT4577_111327C.1.pep
GRTGAPHRTSPGSPCPKLGWGGLPPDSRVPMCSPGIGSPGGFRPPKDPVPCAEFLWPMGTTTRWGQSPPPVKPRPSPTTWLFGFPPGLFPVFDPKSPRLFVRLKKLDWGVFFYGRHETCGAPRSC

SEQ ID NO: 197089 - protein, 44 aa, Zea mays
  Clone ID: MRT4577_111328C.1.pep
QESSFAPAPAEPTLDHLRSLARKLLAGYIDIPTITNLRWSLGYY

SEQ ID NO: 197090 - protein, 92 aa, Zea mays
  Clone ID: MRT4577_111329C.1.pep
IRLELSQPQFLYLHDPISGPGECVQTARYYGTQDVGYRRDFVPVIAPDLVLYAKFIAHLDSDCIKRRGFQQRWEQHMAAKALESFFGTLSCV

SEQ ID NO: 197091 - protein, 70 aa, Zea mays
  Clone ID: MRT4577_11132C.1.pep
TARWQYSFRITVFCFCKKKKKKNKKKKKKKKKKKKKKKKKKKKKKKIKKKKKKKKKKKSFLGGNNFRGNF

SEQ ID NO: 197092 - protein, 177 aa, Zea mays
  unsure (1)..(177): unsure at all Xaa locations
  Clone ID: MRT4577_111330C.1.pep
MNSRISLLCALVVASSLLHXAYPIGHDAQLLRGIIRYGSSLEDPALSENKNAXCLVRAVXGTSREQEYHRTLTERSTTARSVHRSDARIHAHYPRYLDRCSPHTRSVTXDGQAMPACXVSGLDPAVVLDNYSMPKNNRFLYDRQFSGYGIGSXGDWIMXMLSTSTXSGDYSPCPPCS

SEQ ID NO: 197093 - protein, 59 aa, Zea mays
  Clone ID: MRT4577_111331C.1.pep
VIGTNDKAAPPTIKCSSINTTLSNACKMLDQTMLLTWDGIQQTKNSWDDGTPGTMCPIQ

SEQ ID NO: 197094 - protein, 52 aa, Zea mays
  Clone ID: MRT4577_111332C.1.pep
KDDGVQYSVQDAVLGPPLPCLASGRRDYSSTPVLLRFLLILFSCLNSVAASS

SEQ ID NO: 197095 - protein, 173 aa, Zea mays
  unsure (1)..(173): unsure at all Xaa locations
  Clone ID: MRT4577_111333C.1.pep
MALVQFNGALLPQLGEKPRTLFSPPAVARATYADARFLAPETSSRGRGKHLLSSSYSLHSQTSSEQINHVPSSRSRQKRGSSFVVRAEADFYNVLGVSRNASKSEIKSXDPGAEQKFKEISNAYEVLSDDEKRSIYDKYGEAGLKGAGMGTGDYSNPFDLFESLFEGIRGMGG

SEQ ID NO: 197096 - protein, 183 aa, Zea mays
  unsure (1)..(183): unsure at all Xaa locations
  Clone ID: MRT4577_111334C.1.pep
MALVQFNGALLPQLGEKPRTLSSPPAVARATYADARFLAPETSSRGRGKHLLSSSYSLHSQTSSEQINHVPSSRSRQKRGSSFVVRAEADFYNVLGVSRNASKSEIKSAYRKLARSYHPDVNKDPGAEQKFKEISNXAYEVLSDDEKRSIYDXXYGEAGLKGAGMGTGDYSXPFDLFESLFEG

SEQ ID NO: 197097 - protein, 57 aa, Zea mays
  Clone ID: MRT4577_111335C.1.pep
LGVRRGVVEAVRDRGHRVGYIDSRRWNYLHDLDRTSVFSTIARAPQYVWGRLGIVFK

SEQ ID NO: 197098 - protein, 1540 aa, Zea mays
  unsure (1)..(1540): unsure at all Xaa locations
  Clone ID: MRT4577_111336C.1.pep
MGRKGSEMSPSKRYPLRSPHSSGRVLRSALANDNKDSEPLNAAAATQAAVKKRSGSQLDSPNSSVRLFHSTSKNKNEACSGPLNDRIPDKPAANKRKRASPSQVGSSSNSVRVLRSAIKNKDEACSKSLSDRTAGEPAANKRKNVNRSKTGSLSCGVRVLLSASKAKDETSTKPLNDSAAVEPASGKRKGTSPSKVGSASNSVRVLRSTSKYKNETCTEPLNDSGAVEPAANKRKGVSRSKERSLNSSVRVXALASNNKIEVSIKPLGNSTAGQPAAKRRKSGSSFEAGSPVSSARVLRSTSERKNEASKPLNESTAAQPAARKKKXAGVISKTDNPKIGLRVLRSASGKKNEACIGHVNDSTSAEPTVTKRNRKPSMDRSPKKDYLKICQRVRYILNRMNYQQTFIQAYASEGWKGQSLEKIRPEKELERAKAEILQCKLRIREAFRNMDSLLSKGKLEESLFDSAGEISSEDIFCAVCGSKDVTLQNDIILCDGACDRGFHQNCLNPPLLTEDIPPGDQRWLCPACVCKADSIDALNELQGSKLSIHDSWEKVFPEAASIANGSKQVDTSDLLPDHIKHSDNPALVEGLMVDEVRLSAEDDSKADDLRLSSEDSGDGDFDPSGPDSSEDQKDGLNSEESDFTSDSDDFCAEIAKSCGQDEVSASPLSNVINHTYRMKLRASNNRSNEENHDHVFMDMELGQDMVLPVSSRRQVERLDYKKLYDEAYGKESSNSSDDKEWSGKELLEGSETDSLSERPHPVKRCSRRAQAEQQNNEHTPQRERLHGSESEQKTGILRSNGSSSTGRKFGPVATQKLKVHFEKDPYPSRETKENISEELGLTFNQVSRWFSSTRHYSRVASARKEMHPDGHTSENNDTTTVDSMQARQPNTVVMEKLTGNRNDIVSEKPMVQNNLNQGVAEKLTRDRNDIVPEKQVVQSNLNQCNNEDIPLSGTEIEMESYEQESSESSDEEWSTLSTPRKTKLQGNEKVSLTESLRSAKRCSRRAPAREQNNEHTQSEQLHGSVSKQQTEVLRSNVSSGDASKCHFGPIVTQKLKEHFEKDPYPCRATKEGLAQELGLTFNQISKWFSATHHYSRDAVAKNQKYPGENTTENNSSTIFDGIQVIEPNFGLIDKPDADTNDMISEKLMVQINLNEGIEEDIPPSQYTTRCEEKLTMTQAAISREAGPPGYGPGENFLQVSSRITSCEQSVIMAPSAIARGVGPPGYTPGEHQGNGAPWNTSYERRPFTSPATSSREVGPPGYGPEENQGSGISCNTSREQILFMSPTTISRELGPPGYLPRENQRSDTSWNTSCESGLFMSPATTSIEHGPPGYGPGENQENDSTSCELRMFTSPTIVSREVGPPGYQQGVFMSPKTISREVCPPGFGSGENQGNDTTWYKQSAFTSPTTISREVGPPGYGQEDQGNGGSWNTSCEQGVFTSPTRGISREVGPPGYGPGESQGNTTSWISTCQQRMLAGIQRTGGSRSMDLEAFPPGYGPGGASGSVISPQARSAENVEFSDEARKKAIQRELRRRQKFR

SEQ ID NO: 197099 - protein, 148 aa, Zea mays
  Clone ID: MRT4577_111337C.1.pep
MGRKGSEMSPSKRYPLRSPHSSGRVLRSALANDNKDSEPLNAAAATQAAVKKRSGSQLDSPNSSVRLFHSTSKNKNEACSGPLNDRIPDKPAANKRKRASPSQVGSSSNSVRVLRSAIKNKDEACSKSLSDRTAGEPAANKKKKKKGP

SEQ ID NO: 197100 - protein, 1581 aa, Zea mays
  unsure (1)..(1581): unsure at all Xaa locations
  Clone ID: MRT4577_111338C.1.pep
HTNPQARSAESEVSPSKRYPLRSAHSSGRVLRSALANNNKDSEPLNAAAATQATVKERSGNQLDSPNSTVRLLRSTSNIKDEAHSGPLNDRIIDKPAANKRKRANPSQVGSPSSSVRVLRSAIKNKDMARSEPQSDRTAGEAATNKRKNANSSKVGSLSSGLSVLRSASKAKDETCIKPLNDSPAVEPASSKRKCTSPSKVGSPSNSVRVLRSTSKYKNETCTEPLNDSGAVEPAANKRKGVSRSKEGSPNSSVRVLRSASNNKIDVSIEPLNNSTTGQPAAKRKKKNSSFKSSARVLCSTSERKNEASSEPLNDSTAAQPAARKKKGGAMPKTDNPKIGVRVLRSASGKKNETCTEPVNRSTSREPTVTKKRNCKPSKDRGPKKDYLKICQRIKYILNRMKYEQAFIQAYASEGWKGQSLEKIRPEKELERAKAEILQCKLRIREAFRNMDSLLSKGKLEESLFDSAGEISSEDIFCAVCGSKDVTLQNDIILCDGACDRGFHQNCLSPPLLTEEIPPGDQGWLCPACVCKADSIDALNELQGSKLSIHDSWVKVFPEAASTANGSKQVDASDLLPDHIKDSDNPALVEGLMVNEIRISEEDDSKADDLGLPSEDSGDGDFDPSGPDSSEDQNDGLNSEESDFTSDSDDFCAEIAKSCGQDEVSASPLSNVINHTDRMKLRAXNRRSNEENHDHAFMDMELGQDIVLPVASRRQVERLDYKKLYDEAYEEESSNSSDEEEWSGKELLEGSGTDSLDEPSSCKRLSRRAPAGQQNNELTPQSRPHGSNSEQKTEVLRSNGSSSTGRKYDPEVTQKLKVHFEKDPYPSRETKENLSEELGLTFNQVSKWFSSTRHYSRVASAKKEMHPDSHTCENNDETTVDSMQAKQPNAGVMEKLTGDRNDIVSEKPMVQDNLNQGAMEKLTRDRNDIVPEKQVMQSSLNQCNNEDIPLSGTEIEMESYEQESSESSDEEWSTLSTPRKTKLQDHGKSSVTESLRSAKRCSRRAPAREQNNERIQSEQLHGSASEQQTEFLRSNVSSGKVSKYHFGPIVSQKLKEHFEKDPYPCRATKESLAQELGLTFNQISKWFSGTRHYSRDAVAKNQKRPGENTTVNNNSTTFDDIQVIEPNVGLIDKPAADVNDMISEKLMVQINLNEGIEEDIPPSQYARCEEKITMTPAAISREAGLPGYGPGPGENFLQVSSRNTSCEQSVILAPTAIAREVGPPGYATGENQGNGAPWNTSYERRLFMNPVTSSRAVSPPGYGPEESRGSGISWNTSSEQILFMSPTTISRELGPPGYGPREDQCSGTSWNASCELGVFMSPVTTSREDSPPGYGPRENQENDNMRCELRMFTSPTTISREVGPPGYELTGKNKGNGASCTTNYQQGAFTSPEAFPREACPPGFVSGENQGNDTPWYMSSKQMAFTSPTTNPRVGPPGYGQENQGSRVSWNTSYEQGVFMSSTNISREAGPPGYGPGESQGNITSWISTGGQRMFTGPSTIPNEVGQQGYGPSGIPGTDGSRSMDLKAFPPGYGPAGENQGGGASGSVISPQARSAENVEFSDDARKKAIQRELRRRQKFR

SEQ ID NO: 197101 - protein, 759 aa, Zea mays
  unsure (1)..(759): unsure at all Xaa locations
  Clone ID: MRT4577_111339C.1.pep
PAWPGEKVFPEAASIANGSKQVDTSDLLPDHIKHSDNPALVEGLMVNEVRLSAEDDSKGDGDFDPSGPDSSEDQKDGLNSEESDFTSDSDDFCAEIAKSCGQDEVSASPLSNVINHTYRMKLRASNNRSNEENHDHVFMDMELGQDMVLPVSSRRQVERLDYKKLYDEAYGKESSNSSDDKEWSGKELLEGXETDSLSERPHPVKRCSRXAQAEQQNNEHTPQSEQLHGSASEQQAREQLHGSVSKQQTEVLRSNVSSGDASKCHFGPIVTQKLKEHFEKDPYPCRATKEGLAQELGLTFNQISKWFSATHHYSRDAVAKNQKYPGENTTENNSSTIFDGIQVIEPNFGLIDKPDADTNDMISEKLMVQINLNEGIEEDIPPSQYTTRCEEKLTMTQAAISREAGPPGYGPGENFLQVSSRITSCEQSVIMAPSAIARGVGPPGYTPGEHQGNGAPWNTSYERRPFTSPATSSREVGPPGYGPEENQGSGISCNTSREQILFMSPTTISRELGPPGYLPRENQRSDTSWNTSCESGLFMSPATTSIEHGPPGYGPGENQENDSTSCELRMFTSPTIVSREVGPPGYQQGVFMSPKTISREVCPPGFGSGENQGNDTTWYKQSAFTSPTTISREVGPPGYGQEDQGNGGSWNTSCEQGVFTSPTRGISREVGPPGYGPGESQGNTTSWISTCQQRMLAGIQRTGGSRSMDLEAFPPGYGPGGASGSVISPQARSAENVEFSDEARKKAIQRELRRRQKFR

SEQ ID NO: 197102 - protein, 54 aa, Zea mays
  Clone ID: MRT4577_11133C.1.pep
KKTRIKTVRGGRGQPRLRLVGSTGPVSMLQLAWGKTETSFSIARGVFLFASLVF

SEQ ID NO: 197103 - protein, 102 aa, Zea mays
  Clone ID: MRT4577_111340C.1.pep
GSRVMWPTGQEEGRIRNLMQQIGEERRKLSYFEGNVVWLEVQKHTDLIGLGSCRSRTRLHSPQVELPGCSALVRASIPPPVLAVSFLGHIIEMCSDSLSSLV

SEQ ID NO: 197104 - protein, 62 aa, Zea mays
  Clone ID: MRT4577_111341C.1.pep
LTVKKLARYRPFLFLATMTEEPKFTVLGSIGLPSLPAWRTSEKQHSDQSFSSGRIRTFFLGL

SEQ ID NO: 197105 - protein, 79 aa, Zea mays
  Clone ID: MRT4577_111342C.1.pep
MAATMKLSLTFVLLLSALVVFGDAQATCDNIRCIQGGYITCKNYPGQKLDGCACVCAPEDGKGCVLHLDSGSTNKCTKY

SEQ ID NO: 197106 - protein, 62 aa, Zea mays
  Clone ID: MRT4577_111343C.1.pep
RDTPVAVAPPLTLRYVDPIKLALNLVGGAPPDLAVKNIPAELGNLHLFNPYLGRGDSTRISN

SEQ ID NO: 197107 - protein, 113 aa, Zea mays
  Clone ID: MRT4577_111344C.1.pep
MGSNMANAPPMKGGKAGFKAGMRDPQNRIRITLSSKRVKNLKKVCGDLGKGAKGKELKVKGPGGMPTKGLHITTRKSPWGEGTNTWDRFEMRIHKRVIDLVRTPDVVKQITSI

SEQ ID NO: 197108 - protein, 101 aa, Zea mays
  unsure (1)..(101): unsure at all Xaa locations
  Clone ID: MRT4577_111345C.1.pep
YMCSALWTKAGAKKARRLLDRSMCIMWLRRNGVTCTNAVQDMLPRLIYIILYHTKFDGRILKARHIRLTATQSLATQYIIAKVYISSSRIPSLXXRXXXVI

SEQ ID NO: 197109 - protein, 63 aa, Zea mays
  Clone ID: MRT4577_111346C.1.pep
TVPLNGRLQAGIPPPLLRPLGGNPKRIRREWLCSMVVKFELLKMEGRPSISLLAISYTASPIL

SEQ ID NO: 197110 - protein, 128 aa, Zea mays
  Clone ID: MRT4577_111347C.1.pep
MAADMAYAPPMKAGKAGFEAGMMDPQHRIRITLSSKSVKNLEKVCGDLVKGAKGKELKVKGPVRMPTKVLHITTRKSPCGEGTNTWDRFEMRIHKRVIDLVSTPDVVKQITSITIEPGVEVEVTISDA

SEQ ID NO: 197111 - protein, 68 aa, Zea mays
  Clone ID: MRT4577_111348C.1.pep
NPGERLSWSLLWPCSLRCGVHCLWFDGLSLENNPPLIARGRITGLNLSALWSAKIMPLLLRLLFILRP

SEQ ID NO: 197112 - protein, 223 aa, Zea mays
  Clone ID: MRT4577_111349C.1.pep
MSFLFGKRKTPAELLRENKRMLDRSIREIERERQGLQAQEKKLITEIKKAAKEGQMGAVKVMAKDLIRTRHQITKFYQLKSQLQGVSLRVQTLKSTQAMGDAMKGVTKAMSQMNRQLNLPGLQRIMQEFERQNERMEMVSEVMGDAIDDALEGDEEEEETEELVNQVLDEIGIDINQELVGAPSATVAQPASVGRVAQAESAGNADSGIDADLQARLDNLRRM

SEQ ID NO: 197113 - protein, 420 aa, Zea mays
  unsure (1)..(420): unsure at all Xaa locations
  Clone ID: MRT4577_11134C.1.pep
METKDVSPLAAATTTTAAPVPAPTSQPPPPPAPSSMAPPQHQHQHHPPPPFAQQAAPVPSPAASMPGGMRLSFDQMSGKAPGEQHHHSAPMLYTVPPPQSAAGAGAPGANVLGMGELMRKKRGRPXKYAPDGSMALALAPISSASAGGAAAPGQQQHGGGFSISSPPSDPNAKRRGRPPGSGKKKQFEALGSWGIAFTPHILAVKAGEDVASKIMTFSQQGPRTVCILSANGAISNVTLRQPATSGGLVTYEGRFEIISLSGSFLLAEDGDTRSRTGGLSVALAGSDGRVLGGCVAGMLMAATPVQVVVASFIAEGKKSKPAEARKVEPMAAPPPPPPQMAAFVPAPVATSPPSEGTSSASSDDSGSPINHGAMPFSHSSQHQHPHQHQQHMPPAYASGGWSLSVHQQNRHDSDMKMMSN

SEQ ID NO: 197114 - protein, 49 aa, Zea mays
  Clone ID: MRT4577_111350C.1.pep
SSLLSLIPAALMKCVAPNILFYTVEFVPFQLQLLLGLERRTYRKAMDRR

SEQ ID NO: 197115 - protein, 128 aa, Zea mays
  Clone ID: MRT4577_111351C.1.pep
MASDMAYAPPMKAGKAGFEAGMMDPQHRIRITLSSKSVKNLEKVCGDLVKGAKGKELKVKGPVRMPTKVLHITTRKSPCGEGTNTWDRFEMRIHKRVIDLVSTPDVVKQITSITIEPGVEVEVTISDA

SEQ ID NO: 197116 - protein, 95 aa, Zea mays
  unsure (1)..(95): unsure at all Xaa locations
  Clone ID: MRT4577_111352C.1.pep
PRVRPRVRPRVRPRVLNAGGVLTDRSGVYAHVGEYIRFGAGVVRYHDYXSIHRAFGDSRVGLMPDAMPDHDDHKEYMNEAFLLFNEDGNXSISIV

SEQ ID NO: 197117 - protein, 328 aa, Zea mays
  unsure (1)..(328): unsure at all Xaa locations
  Clone ID: MRT4577_111353C.1.pep
MELFARAKVVRLRSHHDKFLYADEDEVRVTQDRDGSSANARWTVEAAPHSAGAVRLRSRYGRYLTASGEPFLLGMTGRKVRQTAPAAPRPANASVDWEPLRDGFQARLRTKAGHFLRANGGLPPWRNSVTHDVPHRTATQDWVLWDVEVVQLLXARAAARAHRLRARRQXPDSPPAPDLGKPPQAHGPHHRPSKSYATPXPRSSPWRRRRRRRRRPGSISSSPPFLSPPXHKVEGRAIHYHIADDLGNVDEGTVGHSFTFNGSNLEELAHKLQEETGLEDIIICTRSPINGKLTPLRLQLPPNNAAMHIVLVQESSKVAKSFPWPYGS

SEQ ID NO: 197118 - protein, 56 aa, Zea mays
  unsure (1)..(56): unsure at all Xaa locations
  Clone ID: MRT4577_111354C.1.pep
MGLFTVPKKVTIPFEGQKPGTSGLRKKVTVFQQPHXLQSFVESTFNVLPADQVKCA

SEQ ID NO: 197119 - protein, 33 aa, Zea mays
  unsure (1)..(33): unsure at all Xaa locations
  Clone ID: MRT4577_111355C.1.pep
AYKLKNMVGVLCFKNWQNTFGGWDGSMFYRSXE

SEQ ID NO: 197120 - protein, 124 aa, Zea mays
  Clone ID: MRT4577_111356C.1.pep
YVFLGDYVDRGYYSIETVSLIMALKVRYPGRIHILRGNHESRQITQVYGFYDQCLKYYGTPNVWKYFTDLFDFLPLSIVVDNKVFCVHGGLSPQLDTLDHVRQLDRFHEVPHEGTICDLIWSDP

SEQ ID NO: 197121 - protein, 196 aa, Zea mays
  Clone ID: MRT4577_111357C.1.pep
MQRVQPANGAQSSNVGKINQMEQSFILSGENEKPFTYIYSMLIDWGRQQDTKAYIQGKIKGLITSVKKFQYKQRTKYELYVYIDDGSFISEAFIDSDIVNNMLGLSPGEVTAALAGELEFASPSEVKETLKGFQKFLVKFEGMMLIELNKNSPVPVVRELNEGCSSSTAWLLLGRLKTISSQKKTIQTQDIMDTTP

SEQ ID NO: 197122 - protein, 79 aa, Zea mays
  Clone ID: MRT4577_111358C.1.pep
AFSNNILNRSPRKNGFGPAGMTLRARGKTLFFSLFLGGKTFGGLNSSFLLLNGILNFSFAALFWSTGKANQNPRAFFIS

SEQ ID NO: 197123 - protein, 132 aa, Zea mays
  Clone ID: MRT4577_111359C.1.pep
SIKMWAKAVSIFALATTAVAQTKGFNYGATNADGSCRGYNDFVRFFNEAKSLPGASGFNTARLYTSVQCGTAADPISAFQAAIDTDTQILVGLWASAGRTAYENELNALIRGARDLGSAITDKVIGISVGSE

SEQ ID NO: 197124 - protein, 77 aa, Zea mays
  Clone ID: MRT4577_11135C.1.pep
ISRRREETSGLNNVREMELQLSRCTLQSLKTGLFVKGAIYSRILRSRGCHTRQHPFIFTILDAVSTPLWTTRELPKA

SEQ ID NO: 197125 - protein, 245 aa, Zea mays
  Clone ID: MRT4577_111360C.1.pep
MAAASAPLLLALALAFAASLAAAGDTNRVYDPCTDTKIQRGDGFTFGLAFAANGAFYSGSTQLSPCDRRLTQLSQLSLFRPKVDEISLLTVNTTTGFSPASAGGYMVAFAGRKYAARSQPVFVSNSSVTVSSFTLVLEFNKGKLQNLHWKKDGCGACTGKPNFICLGKQTCAIRTNICKSNNQGSMDCSIGIQLAFSGTDKHESVLNSWYEVSNLQQYSLYGLYSNVKGSLSGQFNSSSRLSWND

SEQ ID NO: 197126 - protein, 109 aa, Zea mays
  unsure (1)..(109): unsure at all Xaa locations
  Clone ID: MRT4577_111361C.1.pep
SSPCKGKGVRCGTGAEFFPGVGGALGGGAPXASFVLLAFGLLMFLFFFFFCGLCACLVFFFFFCFFFFFFFXHTTAMIYTSLLPILEXSGYRPHLETTRXXXSSXDLSP

SEQ ID NO: 197127 - protein, 88 aa, Zea mays
  unsure (1)..(88): unsure at all Xaa locations
  Clone ID: MRT4577_111362C.1.pep
LXXLXXSXPXXLAPRXXPPXGXSPLXXLLLLLPSLVXLPCFXPPPFVCPXSPXSXRSFVCVRXXXCVCGCSSXVXVLSVXXGXPLAPL

SEQ ID NO: 197128 - protein, 61 aa, Zea mays
  unsure (1)..(61): unsure at all Xaa locations
  Clone ID: MRT4577_111363C.1.pep
CRGAGLSVSWPARFPLACSLAWRGGCXAGRARPPVGGARARRPRGPGRAVSAGPAXPVSAL

SEQ ID NO: 197129 - protein, 74 aa, Zea mays
  unsure (1)..(74): unsure at all Xaa locations
  Clone ID: MRT4577_111364C.1.pep
ITCSSRTVSSAFSSHSDRSFITLSSLDLSAMLXXLPIIVAAHLFNLSAPIEQVGPIISFVRYHNLQLHVSLAQE

SEQ ID NO: 197130 - protein, 112 aa, Zea mays
  unsure (1)..(112): unsure at all Xaa locations
  Clone ID: MRT4577_111365C.1.pep
DGRRQAIKDLFPHYSNAVYAGCGNRGTDKLSGGKAGXPMGKTVKINPKGEGAVNRRVDAXRTHPSMLVSTGRKLQYRRXXEQEDDNAWNYRKKPTPDVDLRGTRQGCTTTLH

SEQ ID NO: 197131 - protein, 71 aa, Zea mays
  Clone ID: MRT4577_111366C.1.pep
MVNVLKGVLIECDPAMKQFLLYLDESNALGKKFIIQDIDDTHVFVIAELVNVLQERVGELMDQNAFSLTQK

SEQ ID NO: 197132 - protein, 45 aa, Zea mays
  Clone ID: MRT4577_111367C.1.pep
IVEGCIHFVISIDCYFSSSITRCFLVITGSCGLASRWRDFLNRIW

SEQ ID NO: 197133 - protein, 249 aa, Zea mays
  Clone ID: MRT4577_111368C.1.pep
MCSPRPPLGRILRLAVAVAACACFPSPVSGIRKGIGFIQPIVCRSTVQGRHLISDDNGYVCSALSINPWSHCCPTTGDRFSCQGCELDLQCCNSYEYCVSFCLNPSKIKKEDVLKLKVAKPVTAGTYTNVFDFCMGRCRHSSASVVHENAYASDFHHCFSVQQNSSGSTESSSVSKLLGINVVVGRPRESCSLVCKVRGQSCVPSRLSVLNKCEIIQEHAYTCRWMSGSHVMVRTIIPGGSVHAPEKGK

SEQ ID NO: 197134 - protein, 54 aa, Zea mays
  Clone ID: MRT4577_111369C.1.pep
LHPLIQGRVSPEWHGERQDRSPVPFLPSERGSCISSGVIAQAALRCCRHPKRLP

SEQ ID NO: 197135 - protein, 568 aa, Zea mays
  Clone ID: MRT4577_11136C.1.pep
MDRNSARQSSMEDFDNVMPKSQSARYSDVRGNDTEDQSPRSTESEDDIWLTVSEIPLFTAPTIAPPPSRSPPLLKRKPLRANAKENGHARQSTPNQNHYTDLPKQPEVSSIDDLEGFSMGKPQMPAYGNTVFDEDYERSSSDTEEKDRQERLEKEREMKLREEMEREQRRLEKERELEQQRERERERQAVERATKEARERASAEARAKAEREARQRSQRAAVQRAQQEARERAAVEAKERAARVAAEARERAAAEAKERAAAEAKEKAAAEAKERERAAARERAAAERAAAERAQQEARKRAERAAVERAATEARERQAAAAAAAATAAAAAASREKQSTPDDLESFFGVGSRANSAPKQRAPTPTVDSMFGFGAQGRGTTNGSQRAASTSAPVRKVASATSFGDDLSDLFGAPASSDVFQEVEGESEERRRARLERHQRTRERAAKALAEKNERDMQVQREQAERDRIGDTLDFEIKRWSAGKEGNLRALLSTLQYILWPECGWQAVSLTDLITGAAVKKQYRKATLCIHPDKVQQKGATLQQKYIAEKVFDILKEAWNKFNSEELF

SEQ ID NO: 197136 - protein, 276 aa, Zea mays
  Clone ID: MRT4577_111370C.1.pep
MCSPRPPLGRILRLAVAVAACACFPSPVSGIRKGIGFIQPIVCRSTVQGRHLISDDNGYVCSALSINPWSHCCPTTGDRFSCQGCELDLQCCNSYEYCVSCCLNPSKIKKEDVLKLKVAKPVTAGTYTNVFDFCMGRCRHSSASVVHENAYASDFHHCFSVQQNSSGSTESSSVSKLLGINVVVGRPRESCSLVCKVRGQSCVPSRLSVLNKCEILQKYMRCKSGCFPSLGPDQPAEVVDEAPTSLNPGACLYMQMDERLTCDGSHHHTRRLCPCA

SEQ ID NO: 197137 - protein, 88 aa, Zea mays
  unsure (1)..(88): unsure at all Xaa locations
  Clone ID: MRT4577_111371C.1.pep
MAALDSDARTRCRLLHYLYRLLQSASTTXSXXTLTSRFLCYSSQVPSTPDHYPYIRIPDVRVSTXPXGFRVIKQAXPVGTRIASVGVW

SEQ ID NO: 197138 - protein, 103 aa, Zea mays
  Clone ID: MRT4577_111372C.1.pep
PRVRGRVGLFPCLLHLTNDGDEDMGFVLNPAESVDECWLEQFLERDAIVAARSTYTLILTVSWEQDNIPEYRFCEMILESWPNQNSYDSEANKEVKLTAYLST

SEQ ID NO: 197139 - protein, 53 aa, Zea mays
  unsure (1)..(53): unsure at all Xaa locations
  Clone ID: MRT4577_111373C.1.pep
DYGHVTRRNLCIELYLYLGGGKKKKKKXXXXLKDPXLPTXTCNXITLLXCXLN

SEQ ID NO: 197140 - protein, 103 aa, Zea mays
  Clone ID: MRT4577_111374C.1.pep
APQKKILGSPLGFFTKVVFPNFFWKTGVPLLIQSPESQVLFFFLSQIFWFKTNLNVAPGLIFFLRGPGSGKLFSQLGPHGPLGPYKKGAGAFLVQNERARAFL

SEQ ID NO: 197141 - protein, 77 aa, Zea mays
  Clone ID: MRT4577_111375C.1.pep
MSWCVCMQMLRGGRCGLFSLSRPHQLHQVFDLGIGRYNETCHNIVTKYISEWEAMVTRARRWIDFKNDYKTMDLNFM

SEQ ID NO: 197142 - protein, 86 aa, Zea mays
  Clone ID: MRT4577_111376C.1.pep
MAAARIAACTTSARTALALADDPAPPDTLDVVRRQRQLLRRAAALCLDPIAEESDGGIDSASDVHSLGRSRSRGQTAATSALPARP

SEQ ID NO: 197143 - protein, 74 aa, Zea mays
  Clone ID: MRT4577_111377C.1.pep
RLCQHRRAASWSRSPARRLCLATCTGLIDPTCISRTGAPSCSGGWSRYPSSSCGVKASLCGSEASSVVIWCGNH

SEQ ID NO: 197144 - protein, 85 aa, Zea mays
  Clone ID: MRT4577_111378C.1.pep
KTKPLTGGNLLKLHKGTPFIPFPTFWLTGLFWGKRPSNELSFFPPQLGILRRTNRFKPNFLRKFKGEPLSPFEQYFLDFWPFWGV

SEQ ID NO: 197145 - protein, 140 aa, Zea mays
  Clone ID: MRT4577_111379C.1.pep
HHVRSPSSSCGTHLVSDCCSLNNQSPLGSPLAPPPPAPPSPWQTTPRRRTRWTWCAGSASSYAAPPRSASTPSPRSPTVASTLPPTSTPWVGAGARPPPPPHCRRGPEDLNRQRRDLFLLALGVEFFPVGFKKYSVPCIC

SEQ ID NO: 197146 - protein, 43 aa, Zea mays
  Clone ID: MRT4577_11137C.1.pep
HTDTDVVIVGTGSADLSCAYELSKDPTVSIAIVEQSVSPGSSA

SEQ ID NO: 197147 - protein, 84 aa, Zea mays
  Clone ID: MRT4577_111380C.1.pep
LEIVSRVCLPDGLLMRLEDRWASERQADNPQVPRLRDLLQPCQPTRLLLRNRHVVVTDGTACGCRPTGTGTRTMVFAALFFFFF

SEQ ID NO: 197148 - protein, 67 aa, Zea mays
  Clone ID: MRT4577_111381C.1.pep
HSLHGALTTYGGGLETNIILHHETQKYLGLNFNTFSTEEAMRNAIDGMNGKELDGRNITVNDAQSLR

SEQ ID NO: 197149 - protein, 183 aa, Zea mays
  Clone ID: MRT4577_111382C.1.pep
KKKKKKKKKKKKKKKKKKKKKKKKKKKKKKKKKKRNKKKKKKKKKKYVFFWSGGGTRHKTPQPGYKKSSWGAFLGVGEKNMNALGVSSPVSPRETFEKGGIKERTPARGKPRCGQKVLPRPGGLSRFFLPAKGGLVCSIRSKGGGLFFWRPSFYRTKYVWAGGGPPGKKTTKGPANGRFFGWF

SEQ ID NO: 197150 - protein, 124 aa, Zea mays
  Clone ID: MRT4577_111383C.1.pep
QATLQMASRIFVHDEENIDGCRMVDSSTRDVPSDHKIDGVHGSEDGLLALCVRAAHVDIRSVALFYARPCLLTRPAARMIRSRRAASPRRRRRSPRYPRRYNYMLAWSHGHSPQPQRPCFFSRP

SEQ ID NO: 197151 - protein, 68 aa, Zea mays
  Clone ID: MRT4577_111384C.1.pep
LDWTCEMMSNPQNEQERQITLQYTKIYGTRTNPRLSPSLRNMRITQKNLAPTSTGGARWRPWSVGRDP

SEQ ID NO: 197152 - protein, 102 aa, Zea mays
  unsure (1)..(102): unsure at all Xaa locations
  Clone ID: MRT4577_111385C.1.pep
IKTINCIYSSSQKNPIDRGSWLLFALTLLSLPASSSYTHTNGLXGCHPPTTFHQPSPEHVTNPIDQPHTMHHPTPTHMSPSSHLSLQQHVPLLQHLPSVQFH

SEQ ID NO: 197153 - protein, 126 aa, Zea mays
  Clone ID: MRT4577_111386C.1.pep
PSAFVHDEENIDGCRMVDSSTRDVPSDHKIDGVHGSEDGLLALCVRAAHVDIRSVALFYARPCLLTRPAARMIRSRRAASPRRRRRSPRYPRRYNYMLAWSHGHSPQPQRPSASRRPALEQFALWS

SEQ ID NO: 197154 - protein, 142 aa, Zea mays
  Clone ID: MRT4577_111387C.1.pep
ISGPTLIGILPYAGLKFYIYEDLKSQVPDDYKDSVILKLSCGALAGLFGQTLTYPLDVVRRQMQVQSKQSQNSSDGFRIKGTFQGFLLIIRCQGWRQLFVGLSLNYVKVVPSVAIGFPTYDMMKALLGVPPRKRVHASGGNK

SEQ ID NO: 197155 - protein, 50 aa, Zea mays
  Clone ID: MRT4577_111388C.1.pep
PQSNPSNCAFPAYGAPTAGAVLLGSPATGEWAAGGEPRGGNLKGSWRRGR

SEQ ID NO: 197156 - protein, 665 aa, Zea mays
  Clone ID: MRT4577_111389C.1.pep
MAAEEGAMSPTRMLAEGHLRVATGGGAPADGGIAVRHLPHHHPTKKDNVGGKTEKDNHEGVNSLLSEELEKLANGNSKIPGTLDEYRKLVVPIIEEYFSTGDVELAASELKCLGSDQFHHYFVKKLISMAMDRHDKEKEMASILLSSLYADLLSSYRISEGFMMLLESTEDLTVDIPDATDVLAVFIARAIVDEILPPVFLTRARALLPEFSKGIQVLQVVEKSYLSAPHHAELVERKWGGSTHSTVEEAKSKIKNILREYIENEDIDEAFRCIRELSLPFFHHEVVKRALTFGIENVSSQPSILKLLKEAAASCLISPNQISKGFSRLAEGVDDLSLDIPSAKALFDKLVSTAISEGWLDASFGKSAAPDEEIQSTSVVKVKRFKEECGHIIHEYFLSDDVPELIRSLEELSAPEFNPIFLKKLVTLAMDRKSREKEMASVLLSSLRLELFSTDDIIEGFVMLLQSAEDTALDIVDAPSELALFLARAVIDEVLIPLNLDEISIKLRPNSSGSQTVQMARALLSARHSGERILRCWGGGTGWAVEDTKDKITKLLEEYNTGGDLGEACRCIRDLGMPFFNHEVVKKALVMAMEKQNDTSILVLLQECFGEGLITINQMTKGFARVKEGLDDLILDIPNAQEKFGEYVELATERGWLLPTFASVP

SEQ ID NO: 197157 - protein, 68 aa, Zea mays
  Clone ID: MRT4577_11138C.1.pep
RAPTRTVEWQTNVLVKRNEVENVGHFACGRWASLHDRGRDSDDDDVRYRDYDVAALANNLSHAFLYGI

SEQ ID NO: 197158 - protein, 277 aa, Zea mays
  unsure (1)..(277): unsure at all Xaa locations
  Clone ID: MRT4577_111390C.1.pep
MVGPGLYTEIGKKTRDLLYKDYQTDHKFTLTTYSSNGVAVTATSTKKADLIFSEIHSQIKNKNMTVDVKANSESNIITTVTVNEIATPGLKTILSFAVPDQRSGKVELQYLHDYAGVNASVSLTANPVANLSAAFGTKALAVGAEISFDSATGNFTXYNAGLMFTHEDLIASLNMNNKGXDTFTGAYYHKVSELTNTAVGAELTHSFSTNENTLTFGGQHTLDPLTVLKARINNSGKASVLIQHEWRPKSLVTISAEVDTKTIEKSSKVGIAVALKP

SEQ ID NO: 197159 - protein, 103 aa, Zea mays
  Clone ID: MRT4577_111391C.1.pep
SYFLLARTVATNNAAGETLLPSLCSGSSYWARPQGEGCADDNRPCDDVDDSHTPLGLCSCAISQTRRLITRCMCSPRRTLSRRAHCSYKSSVDTSEIDDNTHL

SEQ ID NO: 197160 - protein, 52 aa, Zea mays
  Clone ID: MRT4577_111392C.1.pep
RIWGSALCLFKRNMGGVSKLRLNCAPGLCKQCDTMTKEAGNICLKFLVVLVC

SEQ ID NO: 197161 - protein, 37 aa, Zea mays
  Clone ID: MRT4577_111393C.1.pep
DPVAIQRLGVGAMNLCSSPGDMERHDSVLKHPCAPAC

SEQ ID NO: 197162 - protein, 137 aa, Zea mays
  unsure (1)..(137): unsure at all Xaa locations
  Clone ID: MRT4577_111394C.1.pep
MVAFRFHQYQVVGRALXRPSDQDPTIYRMILWVTNXFAHKNHHCHFLRKWKKVKKSNGQVLGINEIFERNPTTIKNYGIWLRYQSRTGYHNMYKEYRDTPLDGADDXQYNEMLFXHRVRAHCIQISKTGTVHFKLST

SEQ ID NO: 197163 - protein, 50 aa, Zea mays
  Clone ID: MRT4577_111395C.1.pep
FIVFPYAFFSVLLSIVGVDLPPLPWGHGLHQKPQRFLRQAPPLRGEGDFR

SEQ ID NO: 197164 - protein, 206 aa, Zea mays
  unsure (1)..(206): unsure at all Xaa locations
  Clone ID: MRT4577_111396C.1.pep
MKSGSLFTYPLATISLIFACSAESRPFDSIVNSLHILTEQSPLRDYIMGKPEGQASTGVIISDVIGNTQEIAIFSGLTRDIDAVAGRLDNAAQNATVLAPHNSVMRDLKRKPWEDPDDYNKLGAEAYQGASGEDRAKSNLERFVQRHIVPESPWEEGKKIKTLAGNEIWWESKDGQKKIQPXNVEIKSIADKVANGEVWVLGGSLA

SEQ ID NO: 197165 - protein, 58 aa, Zea mays
  Clone ID: MRT4577_111397C.1.pep
LAGGPAAATTSSLRNTAHPSPVAVPLYSHNHILKPLLIHSYPLMGLVWGPPLILSTST

SEQ ID NO: 197166 - protein, 547 aa, Zea mays
  Clone ID: MRT4577_111399C.1.pep
MATVQDNGVLHLHPYAVAAAAAALISAYMVWFWALTRRLSGPRMWPLVGSLPSVVLNRARVHDWIVDNLRSKGEAATYQTCILPLPFLARRQGLVTVTCNPRNLEHILRARFDNYPKGPMWQAAFHDLLGQGIFNSDGETWLLQRKTAALEFTTRTLRQAMARWANRIIKYRLWSILADHCEAAASVDLQDLLLRLTFDNICGLTFGKDPETLSPGLQENPFANAFDSATEATLQRFLFPSFLWRVKKALGVGSERSLRESLAIVDQYMTEAIAARKANPSDDLLSRFMKKRDGSGRAFPEDVLQWVALNFVLAGRDTSSVALSWFFWMLMLRRDVERKVVLEIVSVLRETRGDDCGRWTEEPLDFDELDRLVYLKAALAETLRLYPSVPQDSKYVVEDDVLPDGTVVPAGSAVTYSIYSVGRMESIWGKDCSEFRPERWLSADGTRFEPAKDAYRFVAFNGGPRTCLGKDLAYLQMKSIASAVLLRHSVELVPGHKVEQKMSLTLFMKNGLRVHVKPRDLAGYVVAPEEAPQLGAFVISTTTAAAA

SEQ ID NO: 197167 - protein, 82 aa, Zea mays
  unsure (1)..(82): unsure at all Xaa locations
  Clone ID: MRT4577_11139C.1.pep
VIKNVVXTPMHNYNFFNPXTKHHSQKHDPFSKRNSPPSSAPIYSILKKPGKNKFLRDFNQQKTVISIYRCLYYHYTKFIAFL

SEQ ID NO: 197168 - protein, 187 aa, Zea mays
  unsure (1)..(187): unsure at all Xaa locations
  Clone ID: MRT4577_1113C.1.pep
KGKPPPPKKLFFFFFFWGAENSPPPAKLKWKRGGTKXXXLFLFFFFFRANPPPGKNFFFFFFLGGKKILPPGPIYRGQGGAQKFFFFFFFFFFLRQNHPPEKIYFFFFFLGGKQILRSAQINSGKGGQQIFFFFFFFFFFLRQSNPDDRIDYLSYLSEPKQLLRSAQISSDKGGQQIFFFFFFFFFF

SEQ ID NO: 197169 - protein, 99 aa, Zea mays
  Clone ID: MRT4577_111400C.1.pep
YGLISAVGLHNPQIICWCVVPVLMHIIFCSASAYTSHPTCDASGVVATQCLMLLPSLHYSASQKRTSRPQRRSKGWHGRARKAIGMLYSPGRAKRIGLG

SEQ ID NO: 197170 - protein, 97 aa, Zea mays
  Clone ID: MRT4577_111401C.1.pep
FLWLKHFTWYRNREIHPILKGHSFLARVLRLQRFQNSDTYKRHSPRQIFFYRLFQPRPTNQLSLSTHFTKQGLRQEQRAFTWVGATTYKGGGLFPRR

SEQ ID NO: 197171 - protein, 109 aa, Zea mays
  unsure (1)..(109): unsure at all Xaa locations
  Clone ID: MRT4577_111402C.1.pep
MSSSCIPTGLRLDLDMVKAAASPVGAHSSPLRPAHYSSPSSTLSSEASNASSSSATSVSLKRARAPRKRPNQAYNEAAALLASIHPFVFPVNKSPKTAPXRPPQLSVLA

SEQ ID NO: 197172 - protein, 211 aa, Zea mays
  Clone ID: MRT4577_111403C.1.pep
PGLLLPLAFPCRALWYMEFSPSATPPLGYALVLTSPPSTSTSSHHLPVFPSRGAQDADQGHQQPASQARAAAAPQRRHPLSFVSRSAAPLCSDASRAPPWRTSPAAENLQVQATSIFPHGAPAPISSPSSLFLAQTNFFSKADACFPPTSSPPRCKAVGKSLHPARPPPPVVVLVGSKPRRTLCALAASRPGTPMAASLAYLAQQPRRQFA

SEQ ID NO: 197173 - protein, 71 aa, Zea mays
  Clone ID: MRT4577_111404C.1.pep
TECYVDWTEYYSTPQYCGMIGLIKGVLDITRMPILLLYGAIRNGQGLWDSAKDLVYQVPNRSFRCGTRKHA

SEQ ID NO: 197174 - protein, 156 aa, Zea mays
  Clone ID: MRT4577_111405C.1.pep
PAGFEHEMLTATQSSALEKSYELPDGQVITIGNERFRTPEVLFQPAFLGLEAAGIHETTYNSIMKCDLDIRKDLYGNIVMSGGTTMYAGISDRMQKEITALAPSSMKVKIVAPPERKYSVWIGGSILASLSTFQQMWISKQEYDESGPSIVHRKCF

SEQ ID NO: 197175 - protein, 58 aa, Zea mays
  Clone ID: MRT4577_111406C.1.pep
MERADEDACRVALLDADGGGGAGGEGGKKQQQQLAARVWEESRKLWDIVAPAIFSRDV

SEQ ID NO: 197176 - protein, 57 aa, Zea mays
  Clone ID: MRT4577_111407C.1.pep
REDFSEKISGFSISDRYQTYCFRIRFPNKFSGFVSVLKKRPDFRKSHPNQFLPFFNF

SEQ ID NO: 197177 - protein, 59 aa, Zea mays
  unsure (1)..(59): unsure at all Xaa locations
  Clone ID: MRT4577_111408C.1.pep
FILLGLAQGDPAMDGLVSQKMRKRNNLLVKNMRCMFQVQESKPSRWAAXTNLSRSMMLH

SEQ ID NO: 197178 - protein, 51 aa, Zea mays
  Clone ID: MRT4577_111409C.1.pep
TVKTVSTWFFHEIQLSAAFLEGKKTPRTSITLYSYVKFKIKKKRHHSEHPS

SEQ ID NO: 197179 - protein, 50 aa, Zea mays
  unsure (1)..(50): unsure at all Xaa locations
  Clone ID: MRT4577_11140C.1.pep
FSLKCKLTXPAPLLLTSAGCTPKISTPIHASDLQMLILLANTRYKQSPIF

SEQ ID NO: 197180 - protein, 79 aa, Zea mays
  Clone ID: MRT4577_111410C.1.pep
FSLPVLLHKERQPYNAGRLLKIFLPTKDAASYLPILMAKDRKILCIHDFAKFTTVCLQVYILIQQQNHDAFALKYPRFF

SEQ ID NO: 197181 - protein, 58 aa, Zea mays
  Clone ID: MRT4577_111411C.1.pep
GRQGNIAPTWLVCGHQHISPNLTKGGPWPFYLGRNPLRTIFKKKKIRRLVDVSLPLPY

SEQ ID NO: 197182 - protein, 605 aa, Zea mays
  Clone ID: MRT4577_111412C.1.pep
GLSCYSHLLPRLLSFYSHHPSLLPAASSLAAGSTCPEPYNVLISNCLNHGLPHHALAAYHEMIDKDAVPPDAFTYPKVLRACAETGNLALGRAVHVRAVDAGMDGHLFFQNALVSMYAKCWDLAAARTVFDGMEHRDVVSWNSMISGYAASGQWRKAVELFLRMQAEGAEMNSVTWNTIAGGYIQMHDYRAAVGLIRDMVRGGASIDFVTLVIGSNACSRAGWLRLGKEIHGLAVRMQCHEIDSVINAVITMYARCNDMERALMLFKMIRCPGLVAWNTTIAGFALLDDAEAASRLFREMVVCGDVQPNYVTVVTYLALYARVANLQHGRELHTHIVKQGFKGYRLLWNSLIDMYSKSGRLSVAQNVFDTMDDPDMISFTSMIAGYGMQGKGIISLRFFKQMIDSGIMPDAIIMVTVLSACSHSGLVGEGEELFDKMVKSYGIKPQMEHYSCMVDLYARAGLLEKAEELLNQTPFPPTSTMVAALVGACHEQGNIIIGERSARRLLEMKTENAGHFVLIANMYAAAGCWNELATVRKLMRDLGVMKAPGLAWADLGNGFTPFLVGDRSNPLAPEIYEVLDELTEQMSNMNNCSDPDILSMEEHME

SEQ ID NO: 197183 - protein, 67 aa, Zea mays
  Clone ID: MRT4577_111413C.1.pep
SRMPSLDETFIRKPNFWDVSSHRPFYVDRCSLLKPDFPLENFAQLSVQYVILQGTDLSVTSQVTDHG

SEQ ID NO: 197184 - protein, 234 aa, Zea mays
  Clone ID: MRT4577_111414C.1.pep
MAITKFGLLTFLAASAAQVSGDSSLQPPAKSPVLNDFTPQGCFSTLPSKASVGTESTFMTTGQCFNYCQKEKNSVAILYATKCYCSDTYPAKSSLVDDDQCNLSCPGYPREACGGMKPDAYSVYNTGLNLNPEYDTAEGKDDDSSSTVSGTTTQDVTTTWVSTSTTTHAISETETEETSISTARSEETSQVAPVVNENTAAATPSASASTVPENASPRLSNPIGNIVRMIARLL

SEQ ID NO: 197185 - protein, 692 aa, Zea mays
  Clone ID: MRT4577_111415C.1.pep
MSAAAALLARPPPPTPAATVHSLFASLSDPAALHHLPAPLLAFSQLRHLLPPDAATQLLLRPIASLLQLHRSDLRIGLQLHGLSLSLGLSCYSHLLPRLLSFYSHHPSLLPAASSLAAGSTCPEPYNVLISNCLNHGLPHHALAAYHEMIDKDAVPPDAFTYPKVLRACAETGNLALGRAVHVRAVDAGMDGHLFFQNALVSMYAKCWDLAAARTVFDGMEHRDVVSWNSMISGYAASGQWRKAVELFLRMQAEGAEMNSVTWNTIAGGYIQMHDYRAAVGLIRDMVRGGASIDFVTLVIGSNACSRAGWLRLGKEIHGLAVRMQCHEIDSVINAVITMYARCNDMERALMLFKMIRCPGLVAWNTTIAGFALLDDAEAASRLFREMVVCGDVQPNYVTVVTYLALCARVANLQHGRELHTHIVKQGFKGYRLLWNSLIDMYSKSGRLSVAQNVFDTMDDPDMISFTSMIAGYGMQGKGIISLRFFKQMIDSGIMPDAIIMVTVLSACSHSGLVGEGEELFDKMVKSYGIKPQMEHYSCMVDLYARAGLLEKAEELLNQTPFPPTSTMVAALVGACHEQGNIIIGERSARRLLEMKTENAGHFVLIANMYAAAGCWNELATVRKLMRDLGVMKAPGLAWADLGNGFTPFLVGDRSNPLAPEIYEVLDELTEQMSNMNNCSDPDILSMEEHME

SEQ ID NO: 197186 - protein, 155 aa, Zea mays
  Clone ID: MRT4577_111416C.1.pep
MALPPSSSPSSLSAASAQPTPLHLHLPTKAPGRLPLLPFSRAALPPPLRLRIARTSLPPGTPLPRALLPPPSASADAAASDVGGGGAGFGGHDDDDSHNHHGGEGGGDDGGHGDDAGHGDDAPGGGDARGEALFVLAQLGRKLDSLPSDLAAAVD

SEQ ID NO: 197187 - protein, 64 aa, Zea mays
  Clone ID: MRT4577_111417C.1.pep
YSESITLSEHIANHSCFSEFCLLDARAICYRLRGGREAQGVFDPFSMDLWDAVETMFHSIVAWV

SEQ ID NO: 197188 - protein, 135 aa, Zea mays
  Clone ID: MRT4577_111418C.1.pep
MLRKSGTQRQQPAMWRRSQNLRQIKQVHALMGLQGLLSDSSELRELIFAFAVGVRGGTEHARLEFDRIPDPDRVMYNTLIRGAEHSDAPRDAVSIYARMVRHSADCDLMTLRPDKRTLPFVLRACAVMGAGETGA

SEQ ID NO: 197189 - protein, 80 aa, Zea mays
  unsure (1)..(80): unsure at all Xaa locations
  Clone ID: MRT4577_111419C.1.pep
GGVDVFPKNVNSAVATIKTKRTIHFVDCGPTGFKCRFNYQPTTXSQCGDLGGGHQDVCMISNPTSGVEGFSCIDNDFNLM

SEQ ID NO: 197190 - protein, 218 aa, Zea mays
  Clone ID: MRT4577_11141C.1.pep
MRAEVTQISALTAVAAHVLCSAGLAAAHALAGRGALVSDPALALRLLMVCEAPIVIAVFSYLRRDAKSCSFFRAVARGLIGLPVGAFLNAFGAIILGAPVGVKYWIATIYWSLVMSLFTFVPAACVFGASRIDWQDVLSHSIYFTPTDVENYMISAPCHGAVLGAWLGAWPMPLDWERPWQEWPICVTYGAVAGYLIGMAVSLVLTALHKRRVRAKAD

SEQ ID NO: 197191 - protein, 46 aa, Zea mays
  Clone ID: MRT4577_111420C.1.pep
NWTAAIITVPESMHVGHPHSDLRVTTKTPKNQRSPFNVSKGNSFKH

SEQ ID NO: 197192 - protein, 110 aa, Zea mays
  Clone ID: MRT4577_111421C.1.pep
MAAVPWLEWILSSAPISLLAPVPSLSSPWRLSAMLLCILLLSRPPDPALTPAATSPSFLSSRVPLFRVLGHQRSAAVTTSPSLSHHASVVDRLTIVVVFPASLVGRPRRG

SEQ ID NO: 197193 - protein, 103 aa, Zea mays
  Clone ID: MRT4577_111422C.1.pep
QTSRISTASGPSPAGERPAIEAAGASKKPETLQPKNRRAARPVPAAARPSNAGGRGRSPKVSGATKRRRRVRGRSRARTRGRALGPSVTDGESPWKLRAGSKT

SEQ ID NO: 197194 - protein, 71 aa, Zea mays
  Clone ID: MRT4577_111423C.1.pep
LDLNPTKLTQSTIGEPNKPEFSFMYLMAGLKTRARVIIHLCLWTESRRFATLSGCLEISSDPVCTYKNVRA

SEQ ID NO: 197195 - protein, 108 aa, Zea mays
  Clone ID: MRT4577_111424C.1.pep
LHDLALQFREPPALLPPRQCQLHLLIDLTRRDLQDPPSALPVGELVSPYVARFILPTPEQLLESSYTPIQAQHDRDVASLFPISRLQDLSAETRTKNSRSRLLLHDST

SEQ ID NO: 197196 - protein, 68 aa, Zea mays
  Clone ID: MRT4577_111425C.1.pep
GRLQMTGRPQPLRRSTTNTSLTIAFEPARASTIHDHCGNSFYGAIRPYFYTGSYPLEELSSGLSVPRR

SEQ ID NO: 197197 - protein, 71 aa, Zea mays
  Clone ID: MRT4577_111426C.1.pep
MAAAPAGGGPRALSQREQDIQMMLAADVHLGTKNCDFQVERYVYKRRTDGTNPNLSRLTKCLPPMLVVFDI

SEQ ID NO: 197198 - protein, 80 aa, Zea mays
  Clone ID: MRT4577_111427C.1.pep
TSRNLQSGRRHQSSFSTPPSWSRFASKAALRWQLRPSLVNDVRTGILLSARKPKFVSNFPNPSLQVSASASYTAHEFLRK

SEQ ID NO: 197199 - protein, 66 aa, Zea mays
  Clone ID: MRT4577_111428C.1.pep
MASRVAVLLVAVAAVLFAAASAQEMDLGVPPAPAPDTGAAAGAAASVLAVACSAVFFILVAGGLVQ

SEQ ID NO: 197200 - protein, 50 aa, Zea mays
  Clone ID: MRT4577_111429C.1.pep
RIKVTVVKVLFWCSSMIAPIMICCFVCNNVGWAVSVQDWLHLNRGKSWHR

SEQ ID NO: 197201 - protein, 157 aa, Zea mays
  Clone ID: MRT4577_11142C.1.pep
GRVGSAFAAEIGTMRVTEQLDALYMLRTDPIDYLVVPRVIACGLMLPILTGLSLFVGMAGGLVISSSLYAINPTIFLNSVQNFTQLWDVFACLFKSLVFGVIIAIIGCSWGLTTTGGAKGVGESTTTAVVTSLLAIFISNFFLSWLMFQGTGDTALG

SEQ ID NO: 197202 - protein, 66 aa, Zea mays
  Clone ID: MRT4577_111430C.1.pep
QKTTWSARRTPLSAPAATASSGHSATTTTAGSGSPPGSMPARPWRGWPRDTPTLLNSSSNGQMRML

SEQ ID NO: 197203 - protein, 47 aa, Zea mays
  Clone ID: MRT4577_111431C.1.pep
GLPAIVPNVDPAGVDLLSKMLRYEPSKRIPARQALEPEYLKALQMGQ

SEQ ID NO: 197204 - protein, 97 aa, Zea mays
  Clone ID: MRT4577_111432C.1.pep
PARPGSRPWGDRELPPPQPLPSRSRSRSPSPGPGPSLGRRLAPSPCSPASPLLTRAARRPLLPPTSASSRPRPRRRNPEPGILRPSPPPLPSPPSET

SEQ ID NO: 197205 - protein, 69 aa, Zea mays
  Clone ID: MRT4577_111433C.1.pep
LDFGFQKIEKYSEKYENLSKASPRYINMFQTPFALRNTMQRHECNHQGTSRAHFTRLMPIYNKMTLHYL

SEQ ID NO: 197206 - protein, 77 aa, Zea mays
  unsure (1)..(77): unsure at all Xaa locations
  Clone ID: MRT4577_111434C.1.pep
PGFDPRRPPTPSGSCIHCQRLTKKVSARCRRVSRCPCXAVYSMLTCXSNEPISTQSLRPFAXXHWXERYGAXLLXIG

SEQ ID NO: 197207 - protein, 63 aa, Zea mays
  Clone ID: MRT4577_111435C.1.pep
HAGNGSYSGVCLLCHQIRQLTQCIAIPLMNTALCARTTIHTANGGLLYCSPRTAKTLLARAIS

SEQ ID NO: 197208 - protein, 148 aa, Zea mays
  unsure (1)..(148): unsure at all Xaa locations
  Clone ID: MRT4577_111436C.1.pep
DQLTDDQIAEIKEAFSXLFHEDADGXITTKELGTDMRSLGPNPTEAELQDMINELDADGNVTIDFPXFLKLMARTMKDTDTDEXLKEDFRVFDKDHNVFISCAELRHDMTNLGEKLTDDEVYEMIREADVDGDGHINYQEIVKVMMVN

SEQ ID NO: 197209 - protein, 255 aa, Zea mays
  Clone ID: MRT4577_111437C.1.pep
ERSGKPISRHKGYLAMVFADYNLSVEYYRAPMIVMVHRFPAANNATAGSVRGGVRLDALPRHADRWAAADVLVLNSGHWWNQHKTVKAGNYFMVGDRLNKTMDIKEAFQRSLQTVKDWELSSAQLSESYFFFRSYSPSHYSNGTWNTGGSCAGQREPPTTNNGRSEEEYSWMNAMIAKMTEDIKSHGRKARFLNITHMTELRPDGHPAGHREPGTPPDAPEDCSHWCLPGVPDVWNQILYAHLLSAGYGTRRNQR

SEQ ID NO: 197210 - protein, 121 aa, Zea mays
  Clone ID: MRT4577_111438C.1.pep
KESSLPQRESSSKVVKSGPVEQKPCPSNSNSNLLPSYMQFSEFAKAKGFLSPKISPNVQAPPPRKRPSLPMTDNKHDFSPRMQRLFLHVHQNVKSNGPAPPRGFYRKWHILWVGPPAYLKV

SEQ ID NO: 197211 - protein, 65 aa, Zea mays
  Clone ID: MRT4577_111439C.1.pep
RFWVEATVGGQRGRTRREQRESAGRDTPSCQRPGRVPEDPVPVLTVWTGPRTAGRVSGFTLRRRR

SEQ ID NO: 197212 - protein, 75 aa, Zea mays
  Clone ID: MRT4577_11143C.1.pep
KIHTPSNVTFRSSHRIYQTSSWIDLTLTALPLLVPALKSAAADLFGDAGNTRRGPATRVQRVYLCCALLSCARVP

SEQ ID NO: 197213 - protein, 96 aa, Zea mays
  Clone ID: MRT4577_111440C.1.pep
AREAKKEAFRKYFESSGGVDTLPKAFVALFEENDKPSFAVEFVHQKLGGPSIFAYEKLKAKKLALQFKYDKLLEAPKETCRQLGELKNMKSGAPWN

SEQ ID NO: 197214 - protein, 56 aa, Zea mays
  Clone ID: MRT4577_111441C.1.pep
LIVSPSSRCRHAALPATRFQMQQCVQRLNVALRIISWREIMLQKSESNNYRVPGFQ

SEQ ID NO: 197215 - protein, 182 aa, Zea mays
  unsure (1)..(182): unsure at all Xaa locations
  Clone ID: MRT4577_111442C.1.pep
MGDESNEREATRRLQRCSSQLRMRSSTAWRAHAGMVVVQLAFSGYHVLTKSVLSAGMNQVVFCVYRDLVALAILAPVAFLGERRVRPPLTPQMLASFALLGFTGLFVNPLLFLVGLQHTNASYAAAFEPCVPVFAFLLAVIAGVETINVSTQHGVLKVXGTXSGVSGALLMALYRGPSLTIG

SEQ ID NO: 197216 - protein, 23 aa, Zea mays
  Clone ID: MRT4577_111443C.1.pep
HHTSKYSSIWHSVIRFISNITLI

SEQ ID NO: 197217 - protein, 108 aa, Zea mays
  Clone ID: MRT4577_111444C.1.pep
FPPAQEDELLPPHLALAACFSSASPPPTAAARARLRMAAAPAALQSCHISRLADLRRAKTPATTTVPQDLSASGFIEHAGAHCRDKAWHVSEKLLELGNRKSNGPKDC

SEQ ID NO: 197218 - protein, 530 aa, Zea mays
  Clone ID: MRT4577_111445C.1.pep
MAALIVGSLDTLSRTVPIQSKINQILNRLLGTRLKAREMWPTLQRAKIQGKLGESTTTSEGEPVMMGNPRDVFPEDLLGLPPERDVEFVIELKLGHVLSAKGITVDPSKVKDILEWKSPTSVHQVRSFLGLYGYYRRFIPDFSKIVKPITKLLKNDVKFDWSPKCKEAFEQLKILLTTAPVLAQPDIEKPFDVYCDALGIGLGLKYIFTQSELNMRQRRWLDLIKDYDLEIHYHPRKANVVADALSCKVFCHCLTMGFPDTTLCQEMEILNLGIVQQGTLMHLKLGSIILQKIIDAQRIDKGMKYIHEKVEAGKANCFRKDDKGIIWFKDRIVVHKDAELRQQILDEAHLSRRVKAIHMKTAGPLQSLSIPTWKWEDLSMDFVVGLPKTSKGYDSIWVIVDWHTKTAHFLQVKTDHPVAIYAQLYLARILILHGVPKTIVSDRGPQFVSMFWEELHKSLGTKLLHDSAYHPQTSGQTERVNQILEDMLHAYVLEFLQKWDDCLSLAEFSYNNSYQESIKMAPFEALYGRR

SEQ ID NO: 197219 - protein, 90 aa, Zea mays
  Clone ID: MRT4577_111446C.1.pep
PPGANLFIYHIPQEFGDHDLANAFHSFGRVLSAKVFVDKATGVSKCFGFVSYDSPAFAQAAISVMNGYQLGGKKLKVQLKRDNSKPSKPF

SEQ ID NO: 197220 - protein, 85 aa, Zea mays
  Clone ID: MRT4577_111447C.1.pep
PPPPPLPPWPPPPPLPPWPPPPIARRRARPPVPLSSGRPHALHRLLVALSLSLSLSLSLYSPLPPPPRATPARSDGIQHIHQLIS

SEQ ID NO: 197221 - protein, 82 aa, Zea mays
  Clone ID: MRT4577_111448C.1.pep
EQRSEPGRSYDNQVPKEPASAMTLLAYVRATTSINNSHNGNTFSTGAYLITSYHEFCKHCPSFYKHTLFRPMGYDKHYYLLA

SEQ ID NO: 197222 - protein, 60 aa, Zea mays
  Clone ID: MRT4577_111449C.1.pep
SLKPNTPLITSYHEFCKHRPSFYKHTLSRPMGYDKHYYLSACIGQLLETARPVPFLLKLN

SEQ ID NO: 197223 - protein, 63 aa, Zea mays
  Clone ID: MRT4577_11144C.1.pep
TPNAALVEIRCRYRPMETSFLEKMVAEIHRFILTSASQDWKVLTIAQFALNEAQTSRLADHRS

SEQ ID NO: 197224 - protein, 596 aa, Zea mays
  unsure (1)..(596): unsure at all Xaa locations
  Clone ID: MRT4577_111450C.1.pep
MEERRLDTPAMRRISEWILSLEFPSDITIQVGEATFNLHKLPLASRCGYIREQVSGINGSRVTHIDITGLPGGAAAFELVTKFCYGENFELTEDNVAMLRCAAEHLEMTDDDSRGGNLAGRTEAYLEAVALMSLAGAVTVLRRSEDLLPVSEEVDLVGRCVDAIAYFTCNDSQFSMSNGNGMDVSSSKVIIDDWLADELTSLRIDTFQRVVIAMKARGFKGIALGTLIMLYAQKSLRMLDTHGREKQKMEPRQEHEKRVVLETIVTLLPKERNSMSVSFLSMLLRAALCLDTTLACRLDLEKRMAAQLGQAVLDDLLIPIFLPDAGNTFDVDAVQRILVGYLEHEAEADRLDYNTDDDFTSTASPPNDVGMVGKLMESYLAEIASDVDLPVDKFTGLAEMIPERARFNDDGMYRSIDIYLKAHPYLSEAERKTVCRVMDCQKLSREACAHAAQNNRLPVQTVVQVLHHEQRRLREAPTSSFYGGESPTPAPSLQGRHGRSVPDEMSQLQRENEELKMELLRLKMNLRDPSAPPQPSDAPPSGRRPLPKKAAGGSGGFINNVSKKLGRLNPFXGLTPWXAKVRTKPSRTKDRRHSIG

SEQ ID NO: 197225 - protein, 80 aa, Zea mays
  unsure (1)..(80): unsure at all Xaa locations
  Clone ID: MRT4577_111451C.1.pep
LLKKKKNRKFGKKKKNQKRGGKKRRRKKKXQKKRKKKKRNKNGKRNNQQEKKIHKQKEKKKKTQAKKEKKREPKKRTNPH

SEQ ID NO: 197226 - protein, 36 aa, Zea mays
  Clone ID: MRT4577_111452C.1.pep
FHNSNLIIFKIPYNTLSTFLLHIYSFKMTYILYLYY

SEQ ID NO: 197227 - protein, 249 aa, Zea mays
  unsure (1)..(249): unsure at all Xaa locations
  Clone ID: MRT4577_111453C.1.pep
SFAEFEAGSFASLDCCRILSLEFPSDITIQVGEATFNLHKLPLASRCGYIREQVSGINGSRVTHIDITGLPGGAAAFELVTKFCYGENFELTEDNVAMLRCAAEHLQMTDDDSRGGNLAGRTEAYLEAVALMSLAGAVTVLRRSEDLLPVSEEVDLVGRCVDAIAYFTCNDSQFSMSNGNRHXNVXVVQGHHRMIWXWADELTXCGIDTFXQRVVIAMKGXRGFKGHXLGTLIMLXYAQKSLRTLDTHR

SEQ ID NO: 197228 - protein, 469 aa, Zea mays
  unsure (1)..(469): unsure at all Xaa locations
  Clone ID: MRT4577_111454C.1.pep
PRVRFRSILAERDLGSAARRHGGGQPPPRHARDSHTHLSTPRAVVLHLHPSHHGIGEVHLRTSDLPAEQLRHHRHGTIESETHLCVHGTPPQYSVVSNDIPTPIQPPRHTIAADSTLMNPNTRILALKAQIPGTTQDHLQIFNIEAKTKIKSHQMPEQVVFWKWITPKLLGLVTQTSVYHWSIEGDSEPVXLVLIGIAPGAPERPQLVKGNMQLFSVDQQRSQALEAHAASFATFKVVGNENPSTLICFASKTTNAGQITSKLHVIELGAQPGKPGFSKKQADLFFPPDFQDDFPVAMQVSQKYGLIYVITKLGLLFVYDLETAAAVYRNRISPDPIFLTAESSSTGGFYAINRRGQVLHATVNDATVVPFVSGQLNNLELAVNLAKRANLPGAENLVVQRFQELFAQTKYKEAAELAAESPQGLLRTPETVAKFQSVPVQAGQTPPLLQYFGTLLTRGKLNAFESLEL

SEQ ID NO: 197229 - protein, 44 aa, Zea mays
  Clone ID: MRT4577_111455C.1.pep
FSGAPFSLCLPYIFNNVLTLLCILSLNLRTGFFSYFFKILCPQV

SEQ ID NO: 197230 - protein, 48 aa, Zea mays
  Clone ID: MRT4577_111456C.1.pep
VRKKKKKKKKKKKKKKKKKKKKKKKKKKKKKKKKKKKKKKKKKRGGRF

SEQ ID NO: 197231 - protein, 118 aa, Zea mays
  Clone ID: MRT4577_111457C.1.pep
RPVIFSQVRYIPSASVSDEQRDMILLPLKSCGGGNSGRAVSWDAWLRRGCGRMASEMDQSKVFIQVFQRRSVAVRSYSKCDQESPSFMSGEVWGHMLEFRAVRQPLEAECHFDGRASI

SEQ ID NO: 197232 - protein, 70 aa, Zea mays
  Clone ID: MRT4577_111458C.1.pep
MRECISIHIGQAGIQDGNACWELYCLEHGIQADGKMPGDKTIGGGEDATNTYFRETGAGKQIPTAAFDEL

SEQ ID NO: 197233 - protein, 80 aa, Zea mays
  Clone ID: MRT4577_111459C.1.pep
KSHKVYVTLHINSFSVFTPPPNDMDGIASIQDHILVYHAAHCYQARHQCAEDNRIRCLVRSIHILHRQLPQGVFETGRKI

SEQ ID NO: 197234 - protein, 55 aa, Zea mays
  Clone ID: MRT4577_11145C.1.pep
VLTFIHYLILCLLILTGRTNYKNSPLKCTTTKAGQRGGHDTNTSAGLCPTKTKPK

SEQ ID NO: 197235 - protein, 173 aa, Zea mays
  Clone ID: MRT4577_111460C.1.pep
MAASDESPMVRPTVQELTAAGVEEPPRQYVLPEQDRHGDLLAADEFPEPTPLIDLSRLTDADEAERLRAALQTWGFFLATNHGIEDSLMDAMMSVSREFFRQPAEEKQKCSNLVDGNGKDYQVEGYGSDKVVSEDQVLNWSDRLHLRVEPEDERNFAKWPSHPESFRLLTSLP

SEQ ID NO: 197236 - protein, 37 aa, Zea mays
  Clone ID: MRT4577_111461C.1.pep
RGLCEMHSIGHGWPSMCLSQRVLHGDFVNDVYIVQLL

SEQ ID NO: 197237 - protein, 80 aa, Zea mays
  Clone ID: MRT4577_111462C.1.pep
THPKNTPSTTTTCKLNQTLSISPYSSTHTSSCSTTIKTTSYIIKKVFATFATHLNFPNHVSNPFNSVISVPWSNSNKLLL

SEQ ID NO: 197238 - protein, 49 aa, Zea mays
  Clone ID: MRT4577_111463C.1.pep
GPIIGVIYGNRNIPIEPVPERVKPKYIYQDLYKDPHRFPTPYVPNETIY

SEQ ID NO: 197239 - protein, 124 aa, Zea mays
  unsure (1)..(124): unsure at all Xaa locations
  Clone ID: MRT4577_111464C.1.pep
MGTGLATAPVPAPLLGPVLAALRVATRWRMRSTVLTTEGTAEPTLRTILNTKQNCNPYDNHPYTYRYHSGHYRGDSKRETESVYASGTMETTKSTTELRNGHYCGSXYPFEDPCAAAPHCSYDY

SEQ ID NO: 197240 - protein, 43 aa, Zea mays
  Clone ID: MRT4577_111465C.1.pep
HFRTDCVQSSPSEVDVVHVVFRLETVLLVLLTLVVYRYIASCC

SEQ ID NO: 197241 - protein, 232 aa, Zea mays
  Clone ID: MRT4577_111466C.1.pep
EKGGLLVPVWFCFVRALVPGLLNKLQPLPSEFRSSGLPVPPDLGFEEAPSRASGMEHCYLRQPISRAEAVPERRSRLWQMDALPLPPRAEVLCPQPRRAARIPFAVSVNKAIPSALPPYRPASACDILDDLILSKNDFSDGADSSSGQAGFLCGSPPVRANNPVVHDPQFGKRALPSMSPLGSSSHVKLKVEAGSLLGSCFGAPKVSHEEAASAEVVSKRWPKVPFHGASAF

SEQ ID NO: 197242 - protein, 49 aa, Zea mays
  Clone ID: MRT4577_111467C.1.pep
PIYLNRSGKWGFFIDCKNTKQWPQKAMTTTGGRTQTHQGVPTASEAHTE

SEQ ID NO: 197243 - protein, 52 aa, Zea mays
  Clone ID: MRT4577_111468C.1.pep
LITGCFYSNALGGLKCYENPKHKVTAVPADEEEICGATFKVVEGSTVLTALH

SEQ ID NO: 197244 - protein, 509 aa, Zea mays
  unsure (1)..(509): unsure at all Xaa locations
  Clone ID: MRT4577_111469C.1.pep
MASLWLARASSQLARRAAARRPPPRPARHGSDQPTSSWFLGSVPPPALGSAAADTCRRGFCSVRRFAGESSAAAAAAAVVDEEPESGFAAGDQQAVDFPGGKVSFVAEMNFLPESTRERINCYRVLDDDGRTISGSRFQEVSRELALKMYSEMVTLQIMDTIFYEAQRQGRISFYLTSNGEEAINIASAAALSIDDIVLPQYREPGVLLWRGFTLQEFANQCFGNKXDYGKGRQMPIHYGSNRLNYFTVSSPIATQLPHAVGAAYSLKMDKKDACAITYFGDGGTSEGDFHAALNFAAVMEAPVIFFCRNNGWAISTPTTEQFRSDGVVIRGQAYGIRGIRVDGNDALAVYSAIHAAREMAVTEGRPILVEALTYRVGHHSTSDDSTKYRPVDEIEHWRTARDPISRYRKWVQGNDWWSDAEESELRSRVRKELLQAIQVAERMPKPPVTELFTDVYDKIPSNLHEQEQLLRDTIMRHPADYPTDVPVGVVLRYAEGLTRRSSFGQSRF

SEQ ID NO: 197245 - protein, 81 aa, Zea mays
  Clone ID: MRT4577_11146C.1.pep
LLIMEYGTPAGPRPALISWVTGSLDGARPCIVVSFFMCFTSHTHRSILYQHHPPEYVYSLLVRFIPNIFLKQTLQHISSSR

SEQ ID NO: 197246 - protein, 162 aa, Zea mays
  unsure (1)..(162): unsure at all Xaa locations
  Clone ID: MRT4577_111470C.1.pep
AICVHHQGLGLGKPMEEMLMAGNANLNQNPNPPPAAPSAPGAQRAGAPAAVAAAPPSAGATGGAGPERRARPQKEKALNCPRCNSTNTKFCYYNNYSLQQPRYFCKTCRRYWTEGGSLRNVPVGGGSRKNKRSSSAVXXSAVAXAAASTSAAMSGTVPVGLA

SEQ ID NO: 197247 - protein, 70 aa, Zea mays
  Clone ID: MRT4577_111471C.1.pep
FLQGQGPPIKPSRFDKTFVKPGFTTDKVLPHGAPTFKGGGGFFWLMNRPLQIFPPFFGKLRGHYLGLGNF

SEQ ID NO: 197248 - protein, 80 aa, Zea mays
  Clone ID: MRT4577_111472C.1.pep
GCKRRTVNCRGMWGVNQTVHNTLPYTVLLKRPFQITNRPLHDHRIQHMPSARLHAYSAYSKFVNTSTILFRRSNETGENS

SEQ ID NO: 197249 - protein, 56 aa, Zea mays
  Clone ID: MRT4577_111473C.1.pep
LDILVRYEELDREDGLRTGRSSCIRCSSRFMVMYFIRYTWIFSLRFGRRLLYLSKN

SEQ ID NO: 197250 - protein, 132 aa, Zea mays
  Clone ID: MRT4577_111474C.1.pep
IIDTTNKRTLRRPPPPDLHQPPPPPQSPSIHQPCALRRRPRFLPAPRRPTSSAAPRIGPLRRVADPPPPGRSLPHGELEVRSATTAPFSSDPSRTASWMQLIPGAWAVQPIRRARSSPATPNRCDPAGPMDA

SEQ ID NO: 197251 - protein, 39 aa, Zea mays
  Clone ID: MRT4577_111475C.1.pep
SKYDSMKFKCLKIHTKSFQLFQCVSLEFLIIIFTHAHQK

SEQ ID NO: 197252 - protein, 96 aa, Zea mays
  unsure (1)..(96): unsure at all Xaa locations
  Clone ID: MRT4577_111476C.1.pep
VESVSPSTQRVGXHPDKIXFVPISGFDGDYMIERCTNLDLXKGPNLLEALDQITESKRPSDKPLRLPLHDVYKNCGIGTVPVSRVETRVIKPGMGV

SEQ ID NO: 197253 - protein, 53 aa, Zea mays
  Clone ID: MRT4577_111477C.1.pep
LGRVREQLRRRNIANVSVVILERRPTKLVLVFKISVYGQQLSPVHHKLVPRCS

SEQ ID NO: 197254 - protein, 47 aa, Zea mays
  Clone ID: MRT4577_111478C.1.pep
SGFFFGQLFAFFSSASSFSWSGTRAQLQSNNIKSRPNRSSLEPTSEL

SEQ ID NO: 197255 - protein, 98 aa, Zea mays
  unsure (1)..(98): unsure at all Xaa locations
  Clone ID: MRT4577_111479C.1.pep
FGSRLMNGLQGRWGRRTIQDATASIGQMLRPTTFGYSQGGXHKYWTPQNHLLTSGNXSPTIKPRDSGHTKFRIPEERLNELDGRPHKKNREVVHLSYS

SEQ ID NO: 197256 - protein, 84 aa, Zea mays
  Clone ID: MRT4577_11147C.1.pep
PHTQDHCPALTQLLSATCLSGTLLAQFLRSDECLRCLPALYSPASFCFHAQHIIFLLQSLPQSLTFSSNRKFRLTFGALPTSQL

SEQ ID NO: 197257 - protein, 91 aa, Zea mays
  Clone ID: MRT4577_111480C.1.pep
WRHGSERIVTGKPPFERGRRVVAGKPDRPVRVLRGAEGRSTAGSSVCASEASGRPVRRIRPVAHSRQAPARRCFSPRRGIRVPLRAQYLAL

SEQ ID NO: 197258 - protein, 81 aa, Zea mays
  Clone ID: MRT4577_111481C.1.pep
WEGSICLFFLLVSGVIGGSMNMWLVWTKGECLYMVRWLLFVRDLVGLYCNKEKGFLSLFHAYNKKSLRFFFKKKKKKKREG

SEQ ID NO: 197259 - protein, 212 aa, Zea mays
  unsure (1)..(212): unsure at all Xaa locations
  Clone ID: MRT4577_111482C.1.pep
MRVGGGRDDDDEVSGKLKSMDVDKLENGGREESPRPAVKYHGWKAMPFIIGNEKATSYQFAVLFVAFAFLVLGSAGIRPCSMPFGADQFDPNTESGKRGINSFFNWYYFTFTAAMMISATVIIYVQSNVSWPIGLGIPTALMFLACVLFFVGTRLYVRVTPEGSPFTSVVQVLSAALKKRSLKQPKDPKQDLFDXRTPAAFVTKLAHTDQFR

SEQ ID NO: 197260 - protein, 206 aa, Zea mays
  unsure (1)..(206): unsure at all Xaa locations
  Clone ID: MRT4577_111483C.1.pep
MRVGGGRDDDDEVSRKLKSMDVDKLENGGGEESPRPAVKYHGWKAMPFIIGNETFEKLGTLGTSANLLVYLTQVFHMRSVDAATLLNGLNGTTSLAPIIGAFLSDAYLGRYLALAIASVASLIGMFLLTMTAGANSLHPPECSVGETCEKATSYQFAVLFVAFAFLVLGSAGIRPCSMXFGADQFDPNTESGKRGIXSFFXWYYFT

SEQ ID NO: 197261 - protein, 243 aa, Zea mays
  Clone ID: MRT4577_111484C.1.pep
SKKKKKTKGKKGKKYKKGSHRSSVLGLAWNKEVRNVLASASADTTVKIWDIAVGKCAVTLEHHDDKVQAVAWSPQSPEVLLSGSFDKTVAMNDMKDGGQNCHKWSVEADVESLAWNPHNEHSFVVSLENGMVQAFDKRTASSSSSGQSMYTLHAHDKAVSSISFNPSAPNFLATGSVDKMVKLWDLSNDKPSCIASQNPKLGAIFSVSFSNDSPFLLACGGSKGKLKVWDTLTEPAVANKFSK

SEQ ID NO: 197262 - protein, 90 aa, Zea mays
  unsure (1)..(90): unsure at all Xaa locations
  Clone ID: MRT4577_111485C.1.pep
VKLWDLSNDKPSCIASQNPKLXVFKRTRCLLFGRNCFSCIVYTLKFFQGAIFSVSFSNDSPFLLACGGSKGKLKVWDTLTEPAVANKFSK

SEQ ID NO: 197263 - protein, 31 aa, Zea mays
  Clone ID: MRT4577_111486C.1.pep
QFIGAIMGARDLNIQTEHGHLGMPSNICCVV

SEQ ID NO: 197264 - protein, 78 aa, Zea mays
  Clone ID: MRT4577_111487C.1.pep
SGRTTVFLWAIPCLPPPSFSRESSISLPFKTAHCCAALLSEPRTLCSPAPICVEEIFLLPWCMLQEFPSPFITLGSWQ

SEQ ID NO: 197265 - protein, 107 aa, Zea mays
  Clone ID: MRT4577_111488C.1.pep
DGRHTDHERRPVSPDNTEPKGQTRQPPGEGDHDQLDKITLRRRKKQKAGHAPEPPGKGVGHTRKDATNTAAREGRQHTGATPDQTLEGTEAPAGPTAPEGGADPTAA

SEQ ID NO: 197266 - protein, 108 aa, Zea mays
  Clone ID: MRT4577_111489C.1.pep
CFFFLFGFFFFFFFFFFSFLGFCWGYVGGSRVFSRRLGPGRASAGSPGCSRAGGGGHFFFCASAGFAAGALVWYPPVGPPASAFVGCSLAPLEELVPRRPFPGGVSRG

SEQ ID NO: 197267 - protein, 67 aa, Zea mays
  Clone ID: MRT4577_11148C.1.pep
KAPLRGKHNPFFGGLTKHFNSSRHPPKTECLPSRIHWSPHYFFLHLIRLKPFFSNHPLTHYPECKFV

SEQ ID NO: 197268 - protein, 57 aa, Zea mays
  Clone ID: MRT4577_111490C.1.pep
HPFSLWSYALTGPWEVMVKPLGTITANAGVDPPPPPPLQARHCRPHQSPALAVPLAS

SEQ ID NO: 197269 - protein, 60 aa, Zea mays
  Clone ID: MRT4577_111491C.1.pep
LSGVSAVWELYEGGSVLLVVGSSSLPQVLGSASNVLSAYLIVVVPGVHRVASLWRVRVVL

SEQ ID NO: 197270 - protein, 67 aa, Zea mays
  Clone ID: MRT4577_111492C.1.pep
MNLTVSRIALVKPDKARGVEDVLLRAAQTGGISEKVSEERLISLLEQINSHTSKQTKITVCKSMVKF

SEQ ID NO: 197271 - protein, 90 aa, Zea mays
  Clone ID: MRT4577_111493C.1.pep
RSHRHRVIVETTGHYELRAHDGTNMKPTEQNKHRTDLPTYQPYYRTYDEGHYPRTRPTRGILPTRLTRGGRPGSRRRNPLMSRNLERNGR

SEQ ID NO: 197272 - protein, 54 aa, Zea mays
  Clone ID: MRT4577_111494C.1.pep
CYAQSFHFASRHLHPSAIIPQFLPPVTSMGFAHLSEHANMHQQALVASDLQQPI

SEQ ID NO: 197273 - protein, 58 aa, Zea mays
  Clone ID: MRT4577_111495C.1.pep
PRRVPSTTLELGTHPNMVNGFISRPRHADTGRPQRKLHWMPPSDPELPSGSYTPPPLT

SEQ ID NO: 197274 - protein, 99 aa, Zea mays
  unsure (1)..(99): unsure at all Xaa locations
  Clone ID: MRT4577_111496C.1.pep
MSARSRAPSVCARSSPSATRMVLCDNIXQGITKPAIHRSARRAAFKLIWGLIYEETRGVLKIFXQNLIRNSLSYTQHARRKTGIAMDFVYALKNHGRTF

SEQ ID NO: 197275 - protein, 295 aa, Zea mays
  unsure (1)..(295): unsure at all Xaa locations
  Clone ID: MRT4577_111498C.1.pep
MVGQGVYGVGPVLAALMARRREFYALYIQESMDLSGNNKKRKDKKAVEKVLRMAEETGLNVIETPKHDLNMVXDNRPHQGVVLDASPLEMVNIKELDPVRVEGGKAPVWIALDEIMDPQNLGAIIRSAYYFGAQGVVLCAKNSAPLSGVVSKASAGSLELIELLSCRNMMQFLSSSAENGWRVLGGTIANKAVPLSQVELGVPTILVMGSEGTGLRPLVERSCTHLVRIPGNVDVSVEGADADAGEEGDSSSNRDLRSFLAVESLNVSVAAGVLLYHLAAKDACPISDKPSVILM

SEQ ID NO: 197276 - protein, 120 aa, Zea mays
  Clone ID: MRT4577_11149C.1.pep
GKKGEEPFFLHFLKNPGLRGGVFPTQPKPGEKPPEQMWIYNPNSPGGPGILNPGLLKKKFFGKITMVAPQKAFLFWEQSFKPGLRRLFQKSPTLFKTLGAPLKRDWNFKTKFFFAPGNSG

SEQ ID NO: 197277 - protein, 238 aa, Zea mays
  Clone ID: MRT4577_1114C.1.pep
MAVGKNKRLSKGKKGLKKKTDTFAKKDWYNIKAPGTFAVRDVGKTLVNRTTGLKNANDALKGRIFEVSLADLQKDEDHAFRKVKLRVDEVQGKNCLTNFHGLDFTSDKLRSLVRKWQSLIEANVVVKTTDDYLIRLFCIAFTKRRPNQVKKTTYAQTSQIRAIRKKMMEIMTRDASACTLAQLTQKLIPEVIGREIEKATQGIYPLQNVHVRKVKLLKAPKLDLGALLGLHGESSQDD

SEQ ID NO: 197278 - protein, 83 aa, Zea mays
  unsure (1)..(83): unsure at all Xaa locations
  Clone ID: MRT4577_111500C.1.pep
LSLLILLAISAXLANATIFPQCSQAPIASLLPPYLPSIIASIFENPPLXPYKLQQAISSSNIPLLPLFQQSPTLSLFQSFVQT

SEQ ID NO: 197279 - protein, 79 aa, Zea mays
  Clone ID: MRT4577_111501C.1.pep
GGATAACLPPDNAGGYTNCLCPPAGHQCHLVVRRAEWHVRNKSDLVCKLKEIAYLFRFSLQNLKGLFILWKVLQIGIMV

SEQ ID NO: 197280 - protein, 68 aa, Zea mays
  Clone ID: MRT4577_111502C.1.pep
QQEHDQDIGTTIRDKMMPHAAYCVTDEAVQGEDNVELGHDYEDDDDEYDDQDDYDEKEDHDEAAHNED

SEQ ID NO: 197281 - protein, 85 aa, Zea mays
  Clone ID: MRT4577_111503C.1.pep
LWLWSVYGHFRMVQSIVPLPRTCNSGCLSYVKTQFFKPYQIPQGNTAASTLSPLFLQQSSALLHQLPLCINWHKTSGHNTYNNLG

SEQ ID NO: 197282 - protein, 53 aa, Zea mays
  Clone ID: MRT4577_111504C.1.pep
LEFGPKRLAPKEPGPKATKKYFQVSEPGNEVLFRKKGSPCRLKPNPNLRTGAC

SEQ ID NO: 197283 - protein, 97 aa, Zea mays
  Clone ID: MRT4577_111505C.1.pep
IVSCSHSYQDQRKGWSVKRGPRAHVLRLPNSLVVFPVTLRAAVPRPVLARAAPLPGDAQVGGPDTTEIRGAPMRSTIVPSTAHTTTSTLSSQRTRRS

SEQ ID NO: 197284 - protein, 75 aa, Zea mays
  unsure (1)..(75): unsure at all Xaa locations
  Clone ID: MRT4577_111506C.1.pep
LKQLXKKKKKKKKKKKKKKKKKKKKKKKKKKKKKKKKKKKKKKKKKKKKGGGRLKGSKLTNAGMQSKSFLIGQPK

SEQ ID NO: 197285 - protein, 119 aa, Zea mays
  Clone ID: MRT4577_111507C.1.pep
GGDPPSARPGGDSHSRHEPVPNPFCPRLLMESFLASQSFRFSFSAVASTRGPVSPRPLALSPSPAPGPDFSRSVLATQTQNLRCFHRTIFLTQRSLSNWRNVCHSMTYQLSRGFAFADT

SEQ ID NO: 197286 - protein, 50 aa, Zea mays
  Clone ID: MRT4577_111508C.1.pep
IPRLLTVPTIKDRTLEYIRGHPKRGAANILNWKSGKKFPCWNWRCNYTSS

SEQ ID NO: 197287 - protein, 40 aa, Zea mays
  Clone ID: MRT4577_111509C.1.pep
KKKKKKKKKKKKKKKKKKKKKKKKKKKKKKKKKKKKGRPF

SEQ ID NO: 197288 - protein, 94 aa, Zea mays
  Clone ID: MRT4577_11150C.1.pep
QRFGILDGQPTYRACPRYMSRPVQGEAVPDAELVPEQAQYQYVSAGLPSFFLFANLRLFNTQTLLCTMTIHSAKGYIMYRYPDNSCFFPRPYHI

SEQ ID NO: 197289 - protein, 102 aa, Zea mays
  unsure (1)..(102): unsure at all Xaa locations
  Clone ID: MRT4577_111510C.1.pep
MASQGSSVFAALEQAPEDPILGVTVAYIPQPTWGNHPKVFTLSGLNVRSYRYYDPATCSLHFEXLLEDLGSAPSGSIVLLHXCAQKPTGVDPTIEQWEQIXQ

SEQ ID NO: 197290 - protein, 131 aa, Zea mays
  Clone ID: MRT4577_111511C.1.pep
KLCFCEYLNSQPPSTWLKNCIIFYSGSIFKAAGLNNSNLDTCLIGAISVLATGVTTTILDRAGRRILLIISSSGMTLSLLAVAVVFCIKDNIAQDSDLYNILRMVSLVGVVAYVTAFSFGMGSIPWIIMSE

SEQ ID NO: 197291 - protein, 93 aa, Zea mays
  Clone ID: MRT4577_111512C.1.pep
MAPANVRAAQAQAPSADRRLSTLVGHLLPSSPRRAAADTSATSTLESFPYRTEEGKPLVLNVVRRAEQMLINNPSRVQEYLPITGLPEFNKLS

SEQ ID NO: 197292 - protein, 74 aa, Zea mays
  unsure (1)..(74): unsure at all Xaa locations
  Clone ID: MRT4577_111513C.1.pep
MGAKREXRPAAXTPAEEQPAAEKAPAGKRPKXRQRVPAGNAAANEGGEGKRGNNKGKKSVDTYKIYIFKVLKQV

SEQ ID NO: 197293 - protein, 464 aa, Zea mays
  Clone ID: MRT4577_111514C.1.pep
MAPANVRAAQAQAQAPSADRRLSTLVGHLLPSSPRRAAADTSATSTLESFPTMASQGSSVFAALEQAPEDPILGVTVAYNKDPSPVKVNLGVGAYRTEEGKPLVLNVVRRAEQMLINNPSRVKEYLPITGLAEFNKLSAKLIFGADSPAIQENRVATVQCLSGTGSLRVGGEFLARHYHERTIYIPQPTWGNHPKVFTLSGLNVRSYRYYDPATCSLHFEGLLEDLGSAPSGSIVLLHACAHNPTGVDPTIEQWEQIRQLMRSKSLLPFFDSAYQGFASGSLDKDAQSVRMFVADGGELLMAQSYAKNMGLYGERVGALSIVCKSADVAVRVESQLKLVIRPMYSNPPLHGASIVATILRDRIINMRHHEWTLELKAMADRIINMRQQLFNALKSRGTPGDWSHIIKQIGMFTFTGLNSEQVAFMRQEYHIYMTSDGRISMAGLSMRTVPHLADAIHAAVTQLK

SEQ ID NO: 197294 - protein, 82 aa, Zea mays
  Clone ID: MRT4577_111515C.1.pep
LFLRLSIQPALHMCMQPNTNSDKVNARGNAGRDGATNRSPWYILYPLSRCPSFLDELSMSQACHIQRANNRNVWVVRNKEMR

SEQ ID NO: 197295 - protein, 95 aa, Zea mays
  unsure (1)..(95): unsure at all Xaa locations
  Clone ID: MRT4577_111516C.1.pep
HLLTYSLFFTYFTSSLEPFTTLANVTTYHQQQHLQQFIPILSQLSIFNPTFYLQLLSSIPLSFXNSPTYLQQQLLQQILPTLTHLSYSNPSTYLQ

SEQ ID NO: 197296 - protein, 75 aa, Zea mays
  Clone ID: MRT4577_111517C.1.pep
ACSPCYHLWRKAELSIVRQSSLHLRQSVQGHHMQRVEGSLIVSNKKKCVQEHHLCYDLCFEGVTISERSIIQAGS

SEQ ID NO: 197297 - protein, 250 aa, Zea mays
  Clone ID: MRT4577_111518C.1.pep
MADMDCTSTNMYSLDTEMPSDTLESSGPVESSMPETEEDAYAISQCNKGSAPEHSSDENNFDNIQMQSEIVQGSAEENRLDDCCMSAISEEDVLISGQEDDIRNLPNDEELCAEVEGPRKQIQRCFTLEEAADTILFCSSIVHDLAYKAATIVLENKKEPKFVDSIRPTVAIVRGCFSKEESLPKLPHRRTPNRKVKRKRLEGETTTTETTEKDVVANDSPPVCSASGITRNSDNMKPPKLESKCNCIIM

SEQ ID NO: 197298 - protein, 97 aa, Zea mays
  Clone ID: MRT4577_111519C.1.pep
ENVRSLFGSVAPYVVSQVSSSSLKKAIGFKTEVSYCDALMVLKSWITSKVPFRASMSQMWKFYTLLSEGVADAKIDIKREFMSSPSIFTPLQRPRAI

SEQ ID NO: 197299 - protein, 181 aa, Zea mays
  unsure (1)..(181): unsure at all Xaa locations
  Clone ID: MRT4577_11151C.1.pep
MADQANQPTVLHKLGGQFHLRSIISESARSRNLCPSVSSYXRRFATRNYMTPRPLGPSMVGSGGLHVPVMRTPVWGNGPAEKGGXNLLIDFLEGGGSTACSKNGGGPHQRVEVVIPKPEQMIXPGKLSKTDQGIGDWFQSTTKGEGFSSLWKGNTAKGIRYFPTPGLHFAFKDYLQKVFNF

SEQ ID NO: 197300 - protein, 389 aa, Zea mays
  unsure (1)..(389): unsure at all Xaa locations
  Clone ID: MRT4577_111520C.1.pep
DARPRPVRFVTSKIIARSLEDILLDKVRKVPCIPLSDGSFTSISDGRIWLPYDVANSIPECSSIPNFLALYGNLRTVSPNLLPACCKNKYLMEEVRINDLADMLQRIGVRKLSGHDIVKNHIMVSLRNGLDANVADIVIREYVSFIMVHLQSSCTSCNFERGEIVSELRKSPIFLTNHGYKSPADEPIHFSKDYGNSVDATRLXQNVEISWIELDSTYLQHHGSQSSSFALEKWRQFFEEMGVTDFVQKSSXESSFMKCIQSFKWIASRMDEDLHYATDLFYDCENVRSLFGSVAPYVVSQVSSSSLKKAIGFKTEVSYCDALMVLKSCIMSKVPFRASMSHMWKFYTLLSEGVADAKIDIKREFMSSPSIFTPLQRPRASGRDFVKTN

SEQ ID NO: 197301 - protein, 165 aa, Zea mays
  Clone ID: MRT4577_111521C.1.pep
PRVRPRVRCELEASRGCFHLLVVHRTCFVHVVPQVSSRSLKKAIGFKTHVRYCDALMVLKSWITSKVPFRASMSQMWKFYTLLSEGVADAKIDIKREFMSSPSIFTPLQRPRARAISTISSIKTSKKIERLGSNGVPPRTSRLKVWHGLVGPCGSTWPSLLAALM

SEQ ID NO: 197302 - protein, 43 aa, Zea mays
  Clone ID: MRT4577_111522C.1.pep
QNQLTNNQIAYFKDTFNLFDNDRYNFITTKDQLTFIPSLFQNP

SEQ ID NO: 197303 - protein, 382 aa, Zea mays
  unsure (1)..(382): unsure at all Xaa locations
  Clone ID: MRT4577_111523C.1.pep
MANHWNCLYHKHIFILNGGALFTRVVRCSDYVSFIMVHLQSSCTSCNFEREIVSELRKSPIFLTNHGYKSPADEPIHFSKDYGNSVDATRLXQNVEISWIELDSTYLQHHGSQSSSFALEKWRQFFEEMGVTDFVQVVKVEKTLSQVDSILAGGLSLADVSTKQCTVYDWESPELSRILSIFSSKRCKEKCVYLLEVLDRFWDDHYRAKSRIFTDATHCGENRAVESSFMKCIQSFKWIASRMDEDLHYATDLFYDCENVRSLFGSVAPYVVSQVSSSSLKKAIGFKTEVSYCDALMVLKSCIMSKVPFRASMSHMWKFYTLLSEGVADAKIDIKREFMSSPSIFTPLQRPRASEFMSSPSILPLKFLFTRSTVTRQNSQKC

SEQ ID NO: 197304 - protein, 64 aa, Zea mays
  Clone ID: MRT4577_111524C.1.pep
PFESAVGCGVRCSYDKRVALDVSALVPCVFVCISVIILYIMFTRSIVRSAKIPYVKFEMGWYYS

SEQ ID NO: 197305 - protein, 114 aa, Zea mays
  Clone ID: MRT4577_111525C.1.pep
FVPWSCLAVVFADRIPLGAPTHKVLARLFDRFPCGWRTAIMAAGVAFGTCSGVGCRFDMHVTQFSTVSMECSAGWFFFTAFRGFCSCHLWVVGPHFCLISHLVWRLKNGKKKKI

SEQ ID NO: 197306 - protein, 129 aa, Zea mays
  Clone ID: MRT4577_111526C.1.pep
KKKKKKKKKKKKKKKKKKKKKKKKKKKKKKKKKKKKKKKPLKKKKGSPSVSKGKRIAPLNWQLLIFCPQSPPPICSAKNNMGKSFNNSPSPQKGYRKKTPTQSPRGRFGGRNTDRALQTSFWGRNFPRN

SEQ ID NO: 197307 - protein, 37 aa, Zea mays
  Clone ID: MRT4577_111527C.1.pep
IPHTYHHQFDKQIHIPCFPVIPRRKFAHLLSFINHIS

SEQ ID NO: 197308 - protein, 63 aa, Zea mays
  Clone ID: MRT4577_111528C.1.pep
MQKHYCSQVKDIDAHVLYYPRTTESRSFCFNTTGTVQNTDLFIKYILPCEVQGLFISLNNVKS

SEQ ID NO: 197309 - protein, 126 aa, Zea mays
  Clone ID: MRT4577_111529C.1.pep
SKGKKKQRERDQSPIPTHPSGGGGGGGNLNWGQRPNHDANRFPEGGERGKPKRKKNPRPPDLKLKPKGTGLLGEGPHPPGNGDGHDPAEPPGELPAPPGDSGGVPPLKGEFWGIPSPWGPLGPASR

SEQ ID NO: 197310 - protein, 92 aa, Zea mays
  Clone ID: MRT4577_11152C.1.pep
FGSRRATQLTRELAQAIYQGLLLEEARWAREYGSPHCDGAAVARPATAAPLETLDGRVTARRRLVVGGQGAEYTKRGGTDWQRQREGAVPAA

SEQ ID NO: 197311 - protein, 58 aa, Zea mays
  Clone ID: MRT4577_111530C.1.pep
RLQKDRFVGTYRTRYRPRLKVAARHMRADQLPYTYSLDVIEPINLADVDTNANLIGER

SEQ ID NO: 197312 - protein, 131 aa, Zea mays
  Clone ID: MRT4577_111531C.1.pep
MSWQAYVDEHLMCEIEGQHLSAAAIVGHDGSVWAQSESFPELKPEEVAGIIKDFDEPGTLAPTGLFVGGTKYMVIQGEPGVVIRGKKGTGGITIKKTGMSLIIGVYDEPMTPGQCNMVVERLGDYLIEQGF

SEQ ID NO: 197313 - protein, 208 aa, Zea mays
  Clone ID: MRT4577_111532C.1.pep
PLTHAQMMSMGSGLCIPPMLLPPAMQHLQIPPVAAHFPHLGMGLGYGGMGVLDMNSAAAAVPFPHMPGAHFPCPMIPGAPLPQGLGIGMPGRNTMPVFGVPPGQPIQPPFPSLAGLPVRPNLAPPHASSAAMANMVQEQQQQQHQSLNNGASTAAAAAATASDPQLQTIVQAERQHFSVPSSAQTESDQFLDGGGNRAICTGRNEAET

SEQ ID NO: 197314 - protein, 58 aa, Zea mays
  Clone ID: MRT4577_111533C.1.pep
VAVAGCCGGCIRQAMASSSASPSAVLEIHNDLEVQANALIKIHKDIVKNHQVLYAFHH

SEQ ID NO: 197315 - protein, 131 aa, Zea mays
  Clone ID: MRT4577_111534C.1.pep
MSWQAYVDEHLMCEIEGQHLSAAAIVGHDGSAWAQSESFPELKPEEVAGIIKDFDEPGTLAPTGLFVGGTKYMVIQGEPGVVIRGKKGTGGITIKKTGMSLIIGVYDEPMTPGQCNMVVERLGDYLIEQGF

SEQ ID NO: 197316 - protein, 131 aa, Zea mays; identical to SEQ ID NO: 197312
  Clone ID: MRT4577_111535C.1.pep

SEQ ID NO: 197317 - protein, 213 aa, Zea mays
  unsure (1)..(213): unsure at all Xaa locations
  Clone ID: MRT4577_111536C.1.pep
GQPAPAERPGRIRRLESHVKNAEDEERTLEESLEAKGVLLARAHEETKDLLKLLFKSFVDVLTERLPPVSVDGEIPNLRSGDQNVNFAAQNSEAATMEIDNENGADNNSEPNERNTKNAYNVGELEQWCLCTLGYLKSFSRQYASEIWSNIAMLDEVFVGDVHPLIRKAAXSLVCADLPMKGLILEFDTIPIFFIELSVLYLYDRGQLFSLFN

SEQ ID NO: 197318 - protein, 58 aa, Zea mays
  Clone ID: MRT4577_111537C.1.pep
LRAEAEDRPNRRTNSANAYMNIAACLYVENVESELREEYRSDVLWLEDRPNQKTNNAN

SEQ ID NO: 197319 - protein, 81 aa, Zea mays
  Clone ID: MRT4577_111538C.1.pep
IHPGGPKGRLVHPRQVEIVPVRVVTPFELHKSHVIKWEEIARVLRVGPVDLDKGSPSYFVVNAGRRVDVRRHARATGPALL

SEQ ID NO: 197320 - protein, 180 aa, Zea mays
  unsure (1)..(180): unsure at all Xaa locations
  Clone ID: MRT4577_111539C.1.pep
QPRPPAGGGTHQTTARPDPAAXRPAXXKXTAEXXRRSRGXAXPANPERKGAXXGAGGGXGQPXXLXKKXNPRGAPLXLXEXAGTPGXAADXXHXNXPAXXKGXKGDDQXGEAXEGXDXXXNPAGXPRKPGXXRDDXXNXNAGXXKGXXXAXAKHRPNXXXXXXSNXXNXXXPXAAEXXKK

SEQ ID NO: 197321 - protein, 78 aa, Zea mays
  Clone ID: MRT4577_11153C.1.pep
MLMVSGGRRNSYAKEMTLRRRISIIFNMTQEHLPSLKDYYDHLEQPEHMTFNLIQRIHLVEIEPKIARYQQENAEQIY

SEQ ID NO: 197322 - protein, 87 aa, Zea mays
  unsure (1)..(87): unsure at all Xaa locations
  Clone ID: MRT4577_111540C.1.pep
IREFWEIVHSFTDEQKXLFLQFTTGTDRAPVGGLGKLKMIIAKNGPDTERLPTSHTCFNVLLLPEYSSKEKLKERLLKAITYAKGFG

SEQ ID NO: 197323 - protein, 73 aa, Zea mays
  Clone ID: MRT4577_111541C.1.pep
AFTSLKCKWRDARMGAWRKGPHGAFGVVAPDTKGRTPRNPAMKGPPPPPSLLVANDKNLMPRAYPQFTPLYLK

SEQ ID NO: 197324 - protein, 66 aa, Zea mays
  Clone ID: MRT4577_111542C.1.pep
SANSRQRRGGARAHEIFAGSEAGDHSGHRGNLNTMIDGMLVTLCYDGRFLRVACSLGAIAICLNGG

SEQ ID NO: 197325 - protein, 167 aa, Zea mays
  unsure (1)..(167): unsure at all Xaa locations
  Clone ID: MRT4577_111543C.1.pep
MPALRLPLEIKIQEPSPSMDDAGGDILPSLGRVRLGDLAAVEGLASDSYKICVSTLMQSLAQYSAAIIQLPPADAALLRSGLDSARLFFHQRVYDSVGDVVHSDDAREWKTSGYYADPQMWLEMYDYRPGVTVREHGGAMELSPSGLPDIFSWLXKFXRDILDAVSF

SEQ ID NO: 197326 - protein, 55 aa, Zea mays
  Clone ID: MRT4577_111544C.1.pep
MTVGIKEIHSGYRIESAVAEKSHEDHAEHDHEHHEHENEHDHDHHHHHDHDHGKP

SEQ ID NO: 197327 - protein, 550 aa, Zea mays
  Clone ID: MRT4577_111545C.1.pep
MGTEAEQPDMDSHRNDGVVVVPAPRPRKGLASWALDLLESLAVRLGHDKTKPLHWLSGNFAPVVEETPPAPNLTVRGHLPECLNGEFVRVGPNPKFAPVAGYHWFDGDGMIHAMRIKDGKATYVSRYVKTARLKQEEYFGGAKFMKIGDLKGFFGLFMVQMQQLRKKFKVLDFTYGFGTANTALIYHHGKLMALSEADKPYVVKVLEDGDLQTLGLLDYDKRLKHSFTAHPKVDPFTDEMFTFGYSHEPPYCTYRVINKEGAMLDPVPITIPESVMMHDFAITENYSIFMDLPLLFRPKEMVKNGEFIYKFDPTKKGRFGILPRYAKDDKLIRWFQLPNCFIFHNANAWEEGDEVVLITCRLENPDLDKVNGYQSDKLENFGNELYEMRFNMKTGAASQKQLSVSAVDFPRVNESYTGRKQRYVYCTILDSIAKVTGIIKFDLHAEPESGVKELEVGGNVQGIYDLGPGRFGSEAIFVPKHPGVSGEEDDGYLIFFVHDENTGKSEVNVIDAKTMSADPVAVVELPNRVPYGFHAFFVTEDQLARQAEGQ

SEQ ID NO: 197328 - protein, 119 aa, Zea mays
  unsure (1)..(119): unsure at all Xaa locations
  Clone ID: MRT4577_111546C.1.pep
KEQPFVSAXPLLEFFAXEQTSEGRITYQTDPPTSIYKRWFIKNTQEKHFEXMIQRQRWLITNSSLSNGFFRSNTPSESYXYLSNLVISNGTLLHRMTKTIFKKRWLXSDEMKIGFHVCN

SEQ ID NO: 197329 - protein, 66 aa, Zea mays
  Clone ID: MRT4577_111547C.1.pep
ITLFARILFLFFFFLMQRAKVYEVRITHNIFAYKALDYNRCEQGRLWPHVSIFPLLYTLLLHERYC

SEQ ID NO: 197330 - protein, 117 aa, Zea mays
  Clone ID: MRT4577_111548C.1.pep
MEDRRTILMDRYEIGRQLGQGNSAKVYYGRNLAGGQAVAIKMIDKEKVSRVGLIVQIKREISIMGLVRHPNVLKLFEVMASKSKIYFVLEYAKGGELFNKITKGKLSEDAARKYFHQ

SEQ ID NO: 197331 - protein, 143 aa, Zea mays
  Clone ID: MRT4577_111549C.1.pep
GGGHAKRFWKSPKYNSRGGELRGYKWTKNAPRRALPKFTRGRPTLITGPWGSRKNGGGKKKAPGQTHKMGGLKRATPPPKRASTVWAPPGWGPIGPPPGRARNTGLKEGDFLEGALELLEGTKGGKDPLVGLGPCTKDPGVNP

SEQ ID NO: 197332 - protein, 114 aa, Zea mays
  unsure (1)..(114): unsure at all Xaa locations
  Clone ID: MRT4577_11154C.1.pep
MATKHIXLLALLALHASATNACIISXETSLALTATLVXERAPDLITFKWTCEHPSMLAYKLXQAIEASDLQQPTYQSQQHSLLHLTIHTMATQQHQQYLPALCHLAMVNPAGYL

SEQ ID NO: 197333 - protein, 86 aa, Zea mays
  Clone ID: MRT4577_111550C.1.pep
PHVCSLSFWAVSCIASYVCALQHSASQGLPFLVGAGVSYHVVVGRSCRSVDLSLARVYPRPVSPVVVCPLSACAGPAPLVAGAGAG

SEQ ID NO: 197334 - protein, 121 aa, Zea mays
  Clone ID: MRT4577_111551C.1.pep
GRRALRLELQWLRHYKEPCGHTHRDLHLITPDWPIMKTRVTLRGCYLKLLLKNTMDTKNPLRGLWRLAGSLSSLGFLRESTKRTTAERALDFVWSGWGRHANNAWVCEHEYVCRSGPVCCG

SEQ ID NO: 197335 - protein, 119 aa, Zea mays
  Clone ID: MRT4577_111552C.1.pep
LGWCPMLSPITCAGIAVHLSCNYHPQHSSSTQQQQTAGTHPFRNPERATCFQGGLCLSLHTTRVSKGCPGRSITSGPPIECSLFSLKSPAATTLYTLYLVVVYAHATDVQRGPLLVALV

SEQ ID NO: 197336 - protein, 82 aa, Zea mays
  Clone ID: MRT4577_111553C.1.pep
PSPYLIKYTRFVKHIRKRWLAARTAILRRPATASDPMQDLFAFRLQITMTGPPAASKVLFDIHTCMDSFYFFFEFIGPPSIL

SEQ ID NO: 197337 - protein, 46 aa, Zea mays
  unsure (1)..(46): unsure at all Xaa locations
  Clone ID: MRT4577_111554C.1.pep
WNNKGHEQQANCGCPSLSTVHRVVYAWNRTHASXPLATVPTLYVCV

SEQ ID NO: 197338 - protein, 76 aa, Zea mays
  unsure (1)..(76): unsure at all Xaa locations
  Clone ID: MRT4577_111555C.1.pep
GVFPGKEIIHPPVVGHPSFMVWKDQAFXIWPRGGGCMFPEGDSSRELLKKVQKTFYLVSLVYNDYVQGGLFSALKI

SEQ ID NO: 197339 - protein, 73 aa, Zea mays
  unsure (1)..(73): unsure at all Xaa locations
  Clone ID: MRT4577_111556C.1.pep
WKIRNSGRKNKRTISIFAGDRFIIEIENLFLILMCLQNTVLIHSITSXPXCDMALKGELDSCNKTSFLNEHPL

SEQ ID NO: 197340 - protein, 41 aa, Zea mays
  Clone ID: MRT4577_111557C.1.pep
PMELANTFWLREPTKAQCSKQETNSYNHTASHPIWQLHALW

SEQ ID NO: 197341 - protein, 82 aa, Zea mays
  Clone ID: MRT4577_111558C.1.pep
SLLVGGRPFCFLLREQRVPAGVYFTRSLPGNPASRAVHALSPRADSAPLSRSVHAVNLGSTGAPSDLPGLLQRNGRERHGAS

SEQ ID NO: 197342 - protein, 187 aa, Zea mays
  unsure (1)..(187): unsure at all Xaa locations
  Clone ID: MRT4577_111559C.1.pep
AFAQHTQQLEEERERSCRGSGYHHHIQPAXPRXGPNQVFKIFCRANDNYCLAVRDGCRLAGLGQPQGDHQHWYKDMRFITRFKDEEGMPVFALVNKGTXLAMKHXLGQSHPVNLEPFSPDQEDASVLWTEXKDVGKGFLCIRMVNNTRLNFDALHGDKDHGGVHDCSGVVLWEWCMGXNQSWKILPW

SEQ ID NO: 197343 - protein, 58 aa, Zea mays
  Clone ID: MRT4577_11155C.1.pep
YCSLQKYVLDLSYALCYVSQFKYDYYDMAFRRRLFCPISTLMILARSHRGSQGPIIVV

SEQ ID NO: 197344 - protein, 78 aa, Zea mays
  Clone ID: MRT4577_111560C.1.pep
SPVVLVGSLLENGRRTTSSKMLILGPILTLGSSADVHSEGNKLANHVHTYIKTGYMKYLAMYINFQGPQAHTILAMQG

SEQ ID NO: 197345 - protein, 76 aa, Zea mays
  unsure (1)..(76): unsure at all Xaa locations
  Clone ID: MRT4577_111561C.1.pep
SSCYLLKXKKKKKKKKKKKKKKKKKKKKKKKKKGGGEXKKXKKKKKKKNKKXKNKKKKIKXKKKKKXGGNFLSYKI

SEQ ID NO: 197346 - protein, 102 aa, Zea mays
  Clone ID: MRT4577_111562C.1.pep
GLVEPVAGFFLIDDTTIHIGGLSITDMWCPNFDRPHMGVTHTWILETTSFPFGSNVTYLYKTTKLAQVLAQNKSFAACDACDLSLQLLPGHNRHYYAVSAML

SEQ ID NO: 197347 - protein, 55 aa, Zea mays
  Clone ID: MRT4577_111564C.1.pep
TQRNSSNRVYRVVKSVLARILSFLSNKNVGRCKVNQLGFIPFKLLAGGIEWDNQA

SEQ ID NO: 197348 - protein, 58 aa, Zea mays
  Clone ID: MRT4577_111566C.1.pep
SVVCLVGRSTEVRSESSFRGVPVSSPFGEKFSQLISNGKPWVLFKREHKKKQNISHKK

SEQ ID NO: 197349 - protein, 88 aa, Zea mays
  Clone ID: MRT4577_111567C.1.pep
SWFWGGPYPWSRARPDLWGCLCPCLPGFQLRVFLRPALFFSRLAFSRAHGVPFFGWVGSYGPSRMALLGLVFWALLLVLSLPCVDCFI

SEQ ID NO: 197350 - protein, 247 aa, Zea mays
  unsure (1)..(247): unsure at all Xaa locations
  Clone ID: MRT4577_111568C.1.pep
GREYVTWEGQRVVFHAWEYNATVEFYWAPFLVESNSDDPKIHSIQHRIIKADTIGAHAENWRGVDYLVFNTYMWWMNTLDMKVMRPGAKSWEEHDEVVRIEAYRKVLMTWASWVNDNVDPARTSVFFMSMSPLHISPQVWGNPDGIRCAKETMPLLDWHGPLWLGMDWDMFHQARNVSRGGGASPRVPITFLDITTMSERRKDGHTSVHTIRQGKVLGPEEQADPATYADCIHWCLPGVPXIWELML

SEQ ID NO: 197351 - protein, 80 aa, Zea mays
  Clone ID: MRT4577_111569C.1.pep
HPYLSSEFGSRMVSSHIFVEPNTMALCAGAIKWTKRPAKRRYTMLNFGMKNLGRTHLLIKDTWLYLVGGSSYLHPMVLGD

SEQ ID NO: 197352 - protein, 65 aa, Zea mays
  unsure (1)..(65): unsure at all Xaa locations
  Clone ID: MRT4577_11156C.1.pep
GPNKGIMEXVXQDLVSVAFRGISSSSMXDAKAGIVLNYHVIKFVFWFSVEWGFTIRVVFVIKHMF

SEQ ID NO: 197353 - protein, 48 aa, Zea mays
  Clone ID: MRT4577_111570C.1.pep
AQFSYRQIGNFIVHFIRYFFKLRSSAFIVIIFHSIPSFSLFLINLKNR

SEQ ID NO: 197354 - protein, 164 aa, Zea mays
  Clone ID: MRT4577_111571C.1.pep
PTRPPTRPIRLSQLEQQVQVARVQGVFLGTGEQPGFPSAPSPAAVFDVEYGRWVEEHSKLMFQLRAALSEHLADEQLQSLVSGGMAQHEELLSLKGAMARADVFHILSGLWVSPAERCFLWLGGFRPSEVIKVMLKHVEPLSEGQILGIYQLQQLVQAREEALN

SEQ ID NO: 197355 - protein, 74 aa, Zea mays
  Clone ID: MRT4577_111572C.1.pep
AGSQDQETERGCSSQLGGTRTAARSAALHPRPRVLKERYEDEEPHRTPQQGIRATSGTDGSRFTSLPQRRSRSR

SEQ ID NO: 197356 - protein, 51 aa, Zea mays
  unsure (1)..(51): unsure at all Xaa locations
  Clone ID: MRT4577_111573C.1.pep
MEDLGIEAKEAAVREVAXLLPLPELLSSIASIKSDYLARQQTNDAQLSTMV

SEQ ID NO: 197357 - protein, 100 aa, Zea mays
  Clone ID: MRT4577_111574C.1.pep
FTSNREKRHADQAVSHGAGANHQSTGPPSRPRRERRLRHLQDRAHRYQNQPPYHEHPRDPAGGPSRRFHRHKRIQRTLHQERTPYAAQGQPRRHPEQGET

SEQ ID NO: 197358 - protein, 68 aa, Zea mays
  Clone ID: MRT4577_111575C.1.pep
PNSKKNPKMGQVVRKVESDDPIPKGEKRFKPPLGGSPKMDFQKDHNSHPEKSDNSILKPNRPKGLLSQ

SEQ ID NO: 197359 - protein, 241 aa, Zea mays
  Clone ID: MRT4577_111576C.1.pep
MAATGHSCLLMLLLLASFVADGQPVSMPNTEAAADHLALVSFKSLITSDPSSALASWSWGGNRSLPLCRWRGVTCGARGSHRGRVVALDLSNLGLSGAIAPSVGNLTYLRKLHLPMNRLAGTIPSELGRLVNLRHVNLSYNSLEGGIPASLSQCHQLENISLAYNNLTGGIPPDMGDLPGMRRLQVQYNMLDGPILRSLGSLRGLELLHVSNNRLTGMIPSEIGTSQPSKPNLTTSLDRSV

SEQ ID NO: 197360 - protein, 77 aa, Zea mays
  Clone ID: MRT4577_111577C.1.pep
RHLRGRGKALKRPSPTDLGKYKNRGALRHKRAILCQVRTLTDNNRGYILILGAGIQKTTSLDGKQTVYALSEEAYIF

SEQ ID NO: 197361 - protein, 86 aa, Zea mays
  Clone ID: MRT4577_111578C.1.pep
MSSFPPPPGFSGNSNWWSLQGWCPLLPRFFNPTKNFFYSCPDPGMFFFSPREEFKLLPVCPKVCPPLLSVGMCAKKGRFLVRIYVK

SEQ ID NO: 197362 - protein, 220 aa, Zea mays
  Clone ID: MRT4577_111579C.1.pep
MFHQDHSSTCYIKKKKKRFERTHPSHQPTSTPTHKTCTGSKMAASCHDVDVPGKPTETGTALLEAATGAIQGFAPINQIHQHLCAFHFYGDDMTRQVEAHHFCAHLNEDVRQCLVFDGPDAGARLIGVEYIVTEELFLTLPDEEKPLWHTHEFEVKGGMLFMPGVPGVVERRDLEQVAKTYGKTVHFWQVDRGDALPLGLPQIMMALTREGQLRQDLADC

SEQ ID NO: 197363 - protein, 73 aa, Zea mays
  unsure (1)..(73): unsure at all Xaa locations
  Clone ID: MRT4577_11157C.1.pep
PTRRRRSGTWGAPFKSDLIAIAKFKAMAPGMFVHPRAGHAGPAAGSITNGAXWLLTVAAGRMARAIRSTVRLG

SEQ ID NO: 197364 - protein, 160 aa, Zea mays
  Clone ID: MRT4577_111580C.1.pep
MPIKPVGWICGQVLKNFSGRIEGIQKAIMDLVDEFKDEFPTILRLSQSNQKREPAQKTSKIRMAIALAKINRATLIRGLNSISRSSKSVAKLLHPQLACRLLELRDISGRLLREVNAPRQPLYNIQVRKGSLFEIISFPAKTALTSIIYASYAALIYLAV

SEQ ID NO: 197365 - protein, 97 aa, Zea mays
  Clone ID: MRT4577_111581C.1.pep
RYESLKGVDPKFLRNMRFAKKHNKKGLKKMQANNAKAVSARAEAIKALVKPQAVKPKMPKGSSRKLSRLAFIAHPKLGKKIRSYMAKGRRLWQPKPK

SEQ ID NO: 197366 - protein, 59 aa, Zea mays
  unsure (1)..(59): unsure at all Xaa locations
  Clone ID: MRT4577_111582C.1.pep
TPFFLFFCPRLINFKKPFGKKKKKKKKKKKKKKKKKKKKKPPKKKKKKKKXSPLRCYHC

SEQ ID NO: 197367 - protein, 206 aa, Zea mays
  unsure (1)..(206): unsure at all Xaa locations
  Clone ID: MRT4577_111583C.1.pep
IPGLATLLLPVRVRVRVGGGGSVSRVSGIERRHSDVEYRCFVGGLAWATDYHSLHNSFITYSEVLNWGGGGHFYTQRPPGFCFVTFSTVEAMPNAIQGMNXKELDGRNITVNEAQSRGGRGCGXXGGYCGGPGGCGYRGGGRRDGCGSYXGGSSYRGGSGCYSGGGGGYRSGNRGGXYSNSDWNWTNCIVRPTQSSYPVRYRVVYP

SEQ ID NO: 197368 - protein, 148 aa, Zea mays
  unsure (1)..(148): unsure at all Xaa locations
  Clone ID: MRT4577_111584C.1.pep
WLAIKNRCWTAERLLKHGLPHHSVCPLCDQEQETIQHIMLNCXFSRETWTRILLXLVYLAPDHDAPGFSAWWSRAIRRVPKEKRKGLNSLIILVIWSLWEHRNACVFDGRHPSVSAICQEVEAESRLWVMAGDKVLQELLGRASWLHD

SEQ ID NO: 197369 - protein, 94 aa, Zea mays
  unsure (1)..(94): unsure at all Xaa locations
  Clone ID: MRT4577_111585C.1.pep
RLNALTSPIVKQKSAAETQGYYYSHNYTNPYTETKYHNTKCVSILNQIRFYIPQILPNXEKGAYLDDYDAVQKELTHLFSIDSHGNILAPRKTC

SEQ ID NO: 197370 - protein, 173 aa, Zea mays
  Clone ID: MRT4577_111586C.1.pep
CLLIIPWKRIWKSWAPLRCKFFLRLAIKNRCWNVERFLKHGLPHHSVCPLCDREQETIQHIMLNCIFSRKTWTRILLCVGLVDLAPNHYTSGFSAWWSRAVRRVPKEKREGLNSLIILVVWSLWKHRNACVFDGWDPSVSTTCQEVEAESRLWVMAGDKVLQELLGRASWLHA

SEQ ID NO: 197371 - protein, 74 aa, Zea mays
  unsure (1)..(74): unsure at all Xaa locations
  Clone ID: MRT4577_111587C.1.pep
SEVVSTSYLASMDKINNXREQIMXXEEKTSHRSVKDEAGANTEIESSXLWKPVNSLVEAASSTKALSSGPRTTL

SEQ ID NO: 197372 - protein, 72 aa, Zea mays
  Clone ID: MRT4577_111588C.1.pep
RGLGLASIKSALYAASVGCVYRDMQYTALGDDDYMNNIIPTQRTNHYSRSPSSTTTSYSSATTRMVRLHVCR

SEQ ID NO: 197373 - protein, 130 aa, Zea mays
  Clone ID: MRT4577_111589C.1.pep
RRDILFRAMNSMVSASSNKVSCEGTFVWDSGSHHPDIRSHVHNGHRISFSGLKAPQESCLSPWVAESPGGLCRGHAVVFRGSGVLLVCTVDIFCLASHLEGSSPCVFFLPASCHSRCVRIFWCNICVSRK

SEQ ID NO: 197374 - protein, 74 aa, Zea mays
  unsure (1)..(74): unsure at all Xaa locations
  Clone ID: MRT4577_11158C.1.pep
MVSAWFVLLQXAXXXHXGYXXGRGHXGGAXVXXGRARXASXAGAAALPLAVXIXXENGGLAPRYAHPYDQPFTV

SEQ ID NO: 197375 - protein, 43 aa, Zea mays
  Clone ID: MRT4577_111590C.1.pep
EAALRRPPAIARAPHPFQALGHEASPSSVLTIACGRRGSSGPV

SEQ ID NO: 197376 - protein, 115 aa, Zea mays
  Clone ID: MRT4577_111591C.1.pep
KESPAVLTLNPRGKKSPGKNSCWSEAWRRKASGNPISSSRLPAKSGVNSSGKRSRPVERDTPPPGPKLKRPPPPWFSCSFPIFGLESQSPAKKKKKKKKKKKKKKKKKKKNPTNP

SEQ ID NO: 197377 - protein, 853 aa, Zea mays
  unsure (1)..(853): unsure at all Xaa locations
  Clone ID: MRT4577_111592C.1.pep
MNVGTGVPDAAAHARAVAGLAPASAVAGLAPTGAVAGLPPAGAATTDVDERLAAPLAAGLSSPSATAAASARAADLVPFGLGLPNYPACTGALTGLLSPTRLPRQPPSGFSTTRPLVADATWASTPLSTDSTMSSAIAAIQAALATSQERERATSRALEQERALAATLIAQMATTQRLAIGPPPVDQETPPPTPEAPHASGLDADHIAALHAQAGERLQFVEIPRKREKEISKEKPCIWEIVENGMHFDSTDNPVFINEQIHKNAQATTVLLASLCRDEYNKVSGLDNAKQIWDTLKISHEGNDATVITKMELVEGELERFAMIRGEEPTQTYNRLKTLVNKIRSYGSTRWTDHDVVRLMLRSFTVIDPHLVNLIRENPRYTKMTPEEILGKFVSGRMMVKEAQYVDDALNGPMPIYEPQPVALKATSSKEALPSKVAEVEAAGLNEDEMALIIKHFKTALKGRKEYPNKNKTRGKRSCFKCGXEKSRKKEKKNNYRKAKGEAHLGKEWDSDCSSSDSDDEGLAASAFNKSSLFPNERFTCLMAKEKXDRAKVDKINELIDALNEKNRLLEKQEDILYEEHDKFVIVQKSLALEIKRNEMLSSELSACHETVSSLKSINDDLNVKLEEANKSSSCVEHVIICNRCKDFDVDACDEHLMSITKLNDEVASLNAQLKTCKINFDQLKIARDAYTVGRHPSIKDGLGFQKETKNLTSQKAPIPNKEKGKAPMANSNKRNHAFIYNDRKFSRNAHYNRSYDAFNSHAMFASSSTFVHSNGRPRRNFVSHAPRKMCNKPTTVFHACNTTFVLSCKNEKVVARKLGSKCKGDKACIWVPKAIVTNLVGPNKSCVPKTQA

SEQ ID NO: 197378 - protein, 129 aa, Zea mays
  Clone ID: MRT4577_111593C.1.pep
IYHIYIHPASYPAIPCVHVVHVCKQWLSYMISTDRIPVVFYSMVVPRFDCKSMLMQDSIQDLVRLVCVLIVCPQGRQCITLLMGSSACEPRRSASGSGLSASTDLGCAEGRSGAVAEPRVFARRAWSTS

SEQ ID NO: 197379 - protein, 74 aa, Zea mays
  Clone ID: MRT4577_111594C.1.pep
GNPEKSPFSQTLYTQLGFLGREGPIKFKALEQPAEKAFLGTCSLRGAYWGPLPLDFRVNSLNMGAKKRGGFLFF

SEQ ID NO: 197380 - protein, 200 aa, Zea mays
  Clone ID: MRT4577_111595C.1.pep
MQFHCRVATILVLVLNKSTNQGETPNVKVRLAGFILDDGSSLCCGWADDARAELLLRLQEIVHLDASVNLKLSKGGENSTKLKYTIGCCLEKMLKQHTSVTVKNCGIPPDFYCRDLDASSVSDKALSRLEDKLLKFIVLNACCKGSMNVIASALSPDDINGFNVEFPVPVQNMRMLWIEEVFPVDPLEEARRLHDILESS

SEQ ID NO: 197381 - protein, 68 aa, Zea mays
  Clone ID: MRT4577_111596C.1.pep
PVLSWVGSQRAGTDEEGGGGGGGASPVSPSSGPGSEALFIHASELFNDGRRTGRAGEHSEQGVGSEVV

SEQ ID NO: 197382 - protein, 365 aa, Zea mays
  unsure (1)..(365): unsure at all Xaa locations
  Clone ID: MRT4577_111597C.1.pep
MGDEEDDPDWLRAFQAPTVAPVMLSSGSDTSPEASPTRTSTSRKQNKGEKHASPDHARDRDGASQNKNKISAATRRKNLVSKKEGSTMDEKQANTPRRLTPKKDMVTLSSGSDASPGNSLSRAHEDNHEEGSLSTAKRKNAQQTKTKKTKDAGTKTGADQAGNGDAEDDVQDKLTGNSVSQRLPLIFPDKVQRSKALIECDGDSIDLSGDIGAVGRIVVSNGPTAKQDLLLDLKGTIYKTTIVPSRTFCVVSVGQSEAKIEAIMNDFIQLEPQSNLFEAETMVXEGTLDGFTFDSDEEGDKLYEPQANQNDLNNNEDEGQPKAKTKRKAEKTTGKAPKKAKVAGKGPKKGTRKTQPAKRGRKAKK

SEQ ID NO: 197383 - protein, 92 aa, Zea mays
  Clone ID: MRT4577_111598C.1.pep
TTSPTMLYSGDKGRAQDTLVVFERALVHKCSFASRAFRYTDIERRSNRQRRPECTSSLEANHGARWARLLPLIVNLEQLVLASQPRREDFSS

SEQ ID NO: 197384 - protein, 70 aa, Zea mays
  Clone ID: MRT4577_111599C.1.pep
SRVVCLSLHAVVWWCSRQPPCAAVVGSLPCTVPSSLVYIDRACVPPPFSLIPPLPWRVGSVPFGRCLLPY

SEQ ID NO: 197385 - protein, 284 aa, Zea mays
  Clone ID: MRT4577_11159C.1.pep
MLAASARRLSAAASFSSSSMRSSQLAAVLNQQRWMHDRNKKAMELVAKGWSALQEVDRVIDYADLNDKRLIPLLRGAKENFELALEIDNGNTHARYWLGKMHFKYHVPGACKAVGAALLVEAANMGDPDAQYELGCRLRIENDYVQSDQQAFHYIEQAVDQLHPGALYLLGAVYLTGDCVKRDMASALWCFHRASEKGHAGAAIAYGSLLLKGAEIPEVITRFNSGKSPSTGKMRKRTQQQDPVKLAKEQFQIAAEAGCDLGLRWLKRLEAYENQEEKLKQVQQ

SEQ ID NO: 197386 - protein, 303 aa, Zea mays
  Clone ID: MRT4577_1115C.1.pep
MARRAVALLVAVALATVLLHTAEVAAGQKKPATAARREDIPYIRCQVCERIAREISAQVAKKHQALPPSKKVPEIEIIEVAENVCNLKKQEADWMLRIDIVEKGDKLELVEQDEEGHCNAECKTIERACQEVIGYADTDVAEFVYKNNPSVDQLMKFLCKDLSKACAKDPPPVPKDRVPGEPFARKPSKDAEMEKILRSMEGMPGAPSMKMYSRDDLMKNNFGTEDDDEEDDEDEDDNFPKNLGKALKNKGSQKKDLKQQVVQQFKDTSKKLKGHVNKVSGMVKKWWKGAKKPAKSSKSKTEL

SEQ ID NO: 197387 - protein, 68 aa, Zea mays
  Clone ID: MRT4577_111600C.1.pep
CYLHGVAGEQGAAGGFRLEVGRDVALVNKGADALRDEYPVPPRWRVALNKGMVRGADGRWALKDFEHI

SEQ ID NO: 197388 - protein, 150 aa, Zea mays
  Clone ID: MRT4577_111601C.1.pep
MNFLRRFTPLRSFSRTFTTTRAIMSKLYVGNLSWNTTDETLRQTFSEFGEVTDSIIMRDRDTGRARGFGFVTFSTEEQATAAVDALNEQELDGRRIRVNVANARPAGGNGGGFGGGRGGGYGGGRGGYGGGDRSYGGGDRSYGGGDRGGY

SEQ ID NO: 197389 - protein, 284 aa, Zea mays
  unsure (1)..(284): unsure at all Xaa locations
  Clone ID: MRT4577_111602C.1.pep
TPLPPQFPSHGGGPLRPGGRSAAVGAAARGGXAYDPNYVPDSVKTFVVHLYRHIRDKNVYEIHQMYEGGFQRLSDRLFRDAPWPSAEAVAPYCDGDPVFLLLYRELWFRHAHARLSPLTAAHRAESWTNYCDLFRVVLHGVVNMQLPNQWLWDMVDEFVYQFQSCCQYRAKLKTKTEDELNQLKQFDKAWNVYGVLNYLQALVEKSMITQILEREKEGLEQFTATDGYDYEGGSNVLKVLGYYSMIGLLRIHCLLXDYPHWLKCLGPIDXHQQGVYSIVIGSTF

SEQ ID NO: 197390 - protein, 48 aa, Zea mays
  Clone ID: MRT4577_111603C.1.pep
PETRTESEILTIDIKPRWKKGTKITFPDKGNEQPNQLPCFGTDRCTAR

SEQ ID NO: 197391 - protein, 522 aa, Zea mays
  Clone ID: MRT4577_111604C.1.pep
MAAAHYDREDGLPPSAPPHAATDAYDPNYVPDSVKTFVVHLYRHIRDKNVYEIHQMYEGGFQRLSDRLFRDVPWPSAEAVSPYCDGDHVFLLLYRELWYRHAHARLSPLTAAHRAESWTNYCDLFSVVLHGVVNMQLPNQWLWDMVDEFVYQFQSFCQYRAKLKTKTEDELNQLKQFDKAWNVYGVLNYLQALVEKSMITQILEKEKEGLEQFTATDGYDYEGGSNVLKVLGYYSMIGLLRIHCLLGDYHTGLKCLAPIDLNQQGVYTIVIGSHISAIYHYGFANLMMRRYVEATREFNKILLYILKYKQYHQNSPQYDQILKKNEQMYALLAICLSLCPQNKLIDENVSTQLKEKYNDKMTKMQRYDDEAYAAYDELFSYACPKFITPSPPILDQPLTNYNQDAYRLQLKLFLYEVKQQQLLSGIRSYLKLYSTITISKLAQYMEVDEATLRSILMTYKHKMHAVDSEGKIVSSADFDFYIVEDVIHVVESKPTKRHGDYFLRQILKFEEMIGELEKVQLD

SEQ ID NO: 197392 - protein, 83 aa, Zea mays
  Clone ID: MRT4577_111605C.1.pep
NVLSWQKRFNRFSQLHFSPVHFKQLVQSSSSSNAGWTGQRLTDSRRKCRRRRRCERVVGTAGKKRRWRRRQGGMHPSPQVKRA

SEQ ID NO: 197393 - protein, 95 aa, Zea mays
  Clone ID: MRT4577_111606C.1.pep
LTKVKLLYSFKDSMYLLTMNTGHFRFYDQYAWSVNPATKFLWGATGRNLFPSNGGQALYDIWPCGFRVYDNTLCRQEWREVLLVQPKRPPLPLFP

SEQ ID NO: 197394 - protein, 160 aa, Zea mays
  unsure (1)..(160): unsure at all Xaa locations
  Clone ID: MRT4577_111607C.1.pep
PRVRSQLDLFQSYGGGGGTRTSASSRRPCTAAAVPSRAGSGAFAYDGMRATPLSTSTANFTRSLRKAASFAHKKAXPAXDAPPPRRALSSKENSSSATXRWRRRRRRYWSRRTXRSVPEPASAVNGSALGADKAEAEHGTVVNGGALRETVAPRRSMSRS

SEQ ID NO: 197395 - protein, 113 aa, Zea mays
  Clone ID: MRT4577_111608C.1.pep
SLWSPPNKTSQSFWSELVSSASLKNQRKVSRGGGQSSRYQDPASVENHPRPGPGYNLQAVGSSILAPTPPRVQNKNRGFEIFNFFINPGPWTNFLLLELLKKQKNKNPWTVII

SEQ ID NO: 197396 - protein, 392 aa, Zea mays
  unsure (1)..(392): unsure at all Xaa locations
  Clone ID: MRT4577_111609C.1.pep
MPSSSSLIQGISISVSDDDEATGKVRVRVRRKRSRGPASASARRRRILFRAARLGVPLLLAALAVCLLLYESYRLTPSRSSTLPPPSFADISRLSRNARAADGARKSCLKFLDPEKLQNLELPEIPETNLSIKEVLYRSSLPHIVNDTPPHTENSRFNSFTGYQTLTEREESFKMKKSVTVHCGFYNENGGFRVSDVDREYMRSCEVVVATCAFGGGDDLHQPIGMTENSIRKVCYVAFWDEVTRAAQEEEGHTISEDLVIGLWRIILVSDLPFSDQRLNGKIPKLIGHRLFPMARYSIWVDSKSQFRRDPLGVLEALLWRSNSSLALSEHGARSSLYDEAKAIVKKHKATPEEVEVQLDQYRXDGMAGARSCGERSGHGTEGVGSGGEGLL

SEQ ID NO: 197397 - protein, 161 aa, Zea mays
  Clone ID: MRT4577_11160C.1.pep
MLAASARRLSAAASFSSSSMRSSQLAAVLNQQRWMHDRNKKAMELVAKGWSALQEVDRVIDYADLNDKRLIPLLRGAKENFELALEIDNSNTHARYWLGKMHFKYHVPGACKAVGAALLVEAANMGDPDAQYELGCRLRIEVFTVHTGPFCSLGQSPSFFC

SEQ ID NO: 197398 - protein, 55 aa, Zea mays
  Clone ID: MRT4577_111610C.1.pep
ILPPLKRQRSVFSTILSDSKNLHIKTLERSGRRPRGDGAGSRGNPPVCWWLTACP

SEQ ID NO: 197399 - protein, 257 aa, Zea mays
  Clone ID: MRT4577_111611C.1.pep
NSESEKADAKGGSKSEVSGEQRVPSVRQYNRSKLPRLRWTPDLHMAFVHAVERLGGQERATPKLVLQMMNVRGLSIAHVKSHLQMYRSKKLDQDGRPRGAVSSVYSPMDFHFMRADHRRFHNMSFFQRAAASASSSGGQERGGFFASRNFSTPELSRLYGLLHHRPAPTQTFDFRNSSFRNHEWPWAASSNQQEAMTISRKHVVMPPSTSPQTHASLASSAALRSDRRWWPFTEAGAAVAAGEHRAGTGVTSVKFDN

SEQ ID NO: 197400 - protein, 57 aa, Zea mays
  Clone ID: MRT4577_111612C.1.pep
QTYMQTTCSQHPFQEIEKVVAGALLRFASLVNLRHCCWQTFGHICSTIYTSTTSIAC

SEQ ID NO: 197401 - protein, 149 aa, Zea mays
  unsure (1)..(149): unsure at all Xaa locations
  Clone ID: MRT4577_111613C.1.pep
MHQFLSEVEKSTEVSIGQWTKVEXVKXEYTRESSYIKYLGGSIGPKSTKCYLKEDMMHLDINDYISQLTVTQTPNVPSGGSFQVKTRTCISYVGQRQVRVLVTVLVEFTKSSWLKSTIETASLDGQPNYYHNLHFSHQHIFASPATPLI

SEQ ID NO: 197402 - protein, 87 aa, Zea mays
  Clone ID: MRT4577_111614C.1.pep
PIPTGHENSQRTCLYTKGARWVFIKKNFPANTHHLPKVQKGGGTYPMFLPDVQSTGPPRGRTQRPTRKKSLKGGAKISGPPKVHYNF

SEQ ID NO: 197403 - protein, 108 aa, Zea mays
  Clone ID: MRT4577_111615C.1.pep
MGCSRHVRFVSSGVKLPSASAPSPFPAPAPALLSAALPFAHIGRAIDAAARRLGACLPRVPVARADTAPPPPRRHGKDGGGAEERVLISEVAVRKDEPLERPELEAEA

SEQ ID NO: 197404 - protein, 209 aa, Zea mays
  Clone ID: MRT4577_111616C.1.pep
GEEKQQRGPRRPTDRPTCPESWCWWWVLLVPGGSIHGGVLAKGEVPASASAARSRSSRPPTDSEISPEKMKRSASVSAPPYCPCPCRAPRLPGSREAQGTMDRAVTRHGVPVSSARPTRCPFCCISIPPLARGDWRTASRAAAVLDRSCIPAWRLLALPRDLPFVFPCHLIEYTYLFLFAKPVRVPNNWYIALVEGVTLIHNSIKQFLR

SEQ ID NO: 197405 - protein, 199 aa, Zea mays
  unsure (1)..(199): unsure at all Xaa locations
  Clone ID: MRT4577_111617C.1.pep
ESHTTGGESDQQKRPXPSGGPQAGAAGHXARSGAQQGXRAATAGPRXXDDGAGTXGSAGGKRXXEAGKTDXXEXEATDHSGGRKHKTNXAGSNDEAGANRAEGENGGKTNPSRPSXNATPKRRNGRTDXDYXAQNXDKEDXGXHEEDHXQKRSEXADSAEEKGEKHAAXAHARGRDDXTSPAXQRXNEHQPNGPATPAD

SEQ ID NO: 197406 - protein, 151 aa, Zea mays
  Clone ID: MRT4577_111618C.1.pep
ADAHRTDLMTITRFVLNEQSKYPESRGDFTILLSHIVLGCKFVCSAVNKAGLAKLIGLAGETNIQGEEQKKLDVLSNDVFVNALVSSGRTSVLVSEEDEEATFVEPSKRGKYCVVFDPLDGSSNIDCGVSIGTIFGIYTLDHTDEPTTADV

SEQ ID NO: 197407 - protein, 61 aa, Zea mays
  unsure (1)..(61): unsure at all Xaa locations
  Clone ID: MRT4577_111619C.1.pep
TTLEGLVYMLVNDFSKVLFAFLGLVLGMIKRCTPTAPPFYRRPQIYICFXFFFPXXRGSPL

SEQ ID NO: 197408 - protein, 102 aa, Zea mays
  unsure (1)..(102): unsure at all Xaa locations
  Clone ID: MRT4577_11161C.1.pep
QSPRMRTRSATEIITNGPVEAAFSVYSDFVIYKSGVTSHQSGDLLGGQAVKILGWGVDYGVDXWTVAHSWIEDWAXQGFFNIKKGNDECGIESGIVAGLPRL

SEQ ID NO: 197409 - protein, 81 aa, Zea mays
  Clone ID: MRT4577_111620C.1.pep
LKHLHFLIDIFNDPSDLQFWEEKSLVSYICECRGTNEMEVGYWISMPYGMYLILYSNQPGSDTRRRFLACSPVKQSIGFNH

SEQ ID NO: 197410 - protein, 62 aa, Zea mays
  unsure (1)..(62): unsure at all Xaa locations
  Clone ID: MRT4577_111621C.1.pep
MRVLLVALDLLDLAASATSTHTXGGCGXQPPTPVHLPPTVHLTPPDHLPPPMNLTHDGKTAD

SEQ ID NO: 197411 - protein, 667 aa, Zea mays
  unsure (1)..(667): unsure at all Xaa locations
  Clone ID: MRT4577_111622C.1.pep
MAAKPFLSIPAAAVARLPFRLLCSAAPPPRLLPFFPQPFLLQRRSLSASTVPAGRRSSPPAPVISEGRDDEDAAVGRPVCPGCGVFMQDEDPNLPGFFKNPSRSSQDETGGSGEVLLAADTDAFLEEEDDNDDRRVADDASDAELEGLDSDIDEXLKNSIRGTXDGLPVKSATDTDAFASDWDSDWEEMEEDEDEKWRKELDGFTLPGVGYGNITEETIERMKKEKLSKSQRKRQAREAKRAEAEEDSALVCSRCHSLRNYGLVKNDKAENLIPDFDFDRFISSRLMKRSAGTPVIVMVVDCADFDGSFPKRAAKSLFEALEGRRNSKASETPRLVLVGTKVDLLPWQQMGVRLDKWVRGRAKALGAPKLDGVFLISVHRDLAVRNLITYIKESAGPRSNVWVIGAQNAGKSTLINAFAKKQGVKITRLTEAAVPGTTLGILRVTGVLPAKAKMYDTPGLLHPYIMAMRLNNEERKMVEIRKEMRPRSFRVKVGQSVHIGGLARLDVLKSSVQTIYITVWASSNVPLHLGKTENSDELRDKHFGIRLQPPIGPERVDELGHWTGRSIEVSGASWDVNSMDIAVSGLGWYSLGLKGTATVSLWTFEGIGVTERDAMILHRAQFLERPGFWLPIAIANAIGEETRKKNEKRKAEQRRREEEELLLEEMV

SEQ ID NO: 197412 - protein, 223 aa, Zea mays
  Clone ID: MRT4577_111623C.1.pep
MNKQQQAYGYGNGQQADVPGYCCFHPREVGVGVCAHCLKDRLLLLLAAANNNKIDDDARRKSRSRSRSISLPKVFALGSSFLQRLDSRHHRGRGRDNNCYSDDDDATASVASLDDSFISIKFEDNGKATWDSQSQHKAAAPARSSSTTTMVAVEHVKRVGVTRWRKQVVGRMLQLARWRRSSAAAGGLDGKKAAAAAAERSKARGRGWIRSLTRRRAHGDRAW

SEQ ID NO: 197413 - protein, 118 aa, Zea mays
  unsure (1)..(118): unsure at all Xaa locations
  Clone ID: MRT4577_111624C.1.pep
MIFRKSFKMGSIKEKLERMKVRVRNLGVKKGVSFFDILGKFLGKGFLMFIYGKRRLVRVGGFFKGLIGYGKKKKKREGEKLDFFLVGGKKIVLKEGRILRGGVWFVEKRKEXIKWVGF

SEQ ID NO: 197414 - protein, 167 aa, Zea mays
  unsure (1)..(167): unsure at all Xaa locations
  Clone ID: MRT4577_111625C.1.pep
LQQPSALLQQLPLVHLVGKNIRAHQLQQLVLANLAAYFQQHQFLPFNQLAALNCGAYLEQQLPLSQLVAGXPQEFLPFSQXAALSSPGYLQQQQLLPFSQLADVSPAAFLPQQQWVAFYLPGMPNAGRLLHLQQVVPFXNDLPLTNTRVFXQQPLVGGALFSIGYQP

SEQ ID NO: 197415 - protein, 201 aa, Zea mays
  unsure (1)..(201): unsure at all Xaa locations
  Clone ID: MRT4577_111626C.1.pep
MNKQQQAYGYGNGQQADVPGYCCFHPREVGVGVCAHCLKDRLLLLLAAANNNKIDDDARRKSRSRSRSISLPKVFALGSSFLQRLDSRHHRGRGRDNNCYSDDDDATASVASLDXNPIHLQFACFLSACQINDSVARRMSKKKDSFIXIKFEDNGKATWDSQSQHKAAAPARSSSTTTMVAEEHVKRVGVTRWRKQVVGRM

SEQ ID NO: 197416 - protein, 91 aa, Zea mays
  Clone ID: MRT4577_111627C.1.pep
ELCLGVQVLFFRAWGGVCGKDVCVGKGSAPLLTTPCASQSLWSCEGAVWVTVQCVVSSLKKLVRSYVFCPLVFNWCWIFARVRFSPQIEYL

SEQ ID NO: 197417 - protein, 130 aa, Zea mays
  unsure (1)..(130): unsure at all Xaa locations
  Clone ID: MRT4577_111628C.1.pep
GWCFFFFFFFWKDNLGEQVDYFFYLPYPGGLTGGPPLPMTGRQGGQDQGRGGGGFFFFWVWTVXPLRACAKGTGGPPGLKVGAAPNRGVNRGGAGGASLPHPWGGALPPGHSAGGALWGRPCTRLAPRGG

SEQ ID NO: 197418 - protein, 84 aa, Zea mays
  unsure (1)..(84): unsure at all Xaa locations
  Clone ID: MRT4577_111629C.1.pep
LNPTALRLWSMMGPSTMAARAPGCCSSAALAFFRLHPLRCAVRPAAALVGGXPLASARGCRSRLAHSIVDLVMEELASPARRVS

SEQ ID NO: 197419 - protein, 136 aa, Zea mays
  Clone ID: MRT4577_11162C.1.pep
LLCPEECPEIRADRITSRSKECDDNATAVVENTDVIVTNHDDSEGSFCIEMLDKLTQTWIASTVLVAQPQSKSQSAILINEEKISAGEKGVSLNDSIWIPEIDTRLCLTTAENQRFISCFPAARGVLGCRPKTRCG

SEQ ID NO: 197420 - protein, 40 aa, Zea mays
  Clone ID: MRT4577_111630C.1.pep
MCAADPRHGRYLTASAMFRGKMSTKEVDEQMINVQNKDSC

SEQ ID NO: 197421 - protein, 81 aa, Zea mays
  unsure (1)..(81): unsure at all Xaa locations
  Clone ID: MRT4577_111631C.1.pep
GFPHGRSVSFVRPRRQAPFLLAPVKIPPLWCYVILWLEEAMPSCELSLTGRACCHTARQLRFCLLLLSEFKNWPARVINCX

SEQ ID NO: 197422 - protein, 36 aa, Zea mays
  Clone ID: MRT4577_111632C.1.pep
GRVYADTIFAENYSGVFACSFILALESASSCVSLCI

SEQ ID NO: 197423 - protein, 99 aa, Zea mays
  Clone ID: MRT4577_111633C.1.pep
RKKSHPNICFFLGNPPLLGGPLFGPLLFLTKKRAPPPGGCPPPQTGFFKKNWLFGTILFFFKKGAPHGFPPPKGINTRGPCGGPPPNFHQTICLKGTPF

SEQ ID NO: 197424 - protein, 67 aa, Zea mays
  Clone ID: MRT4577_111634C.1.pep
MTHATANEGHPSKAGDQGSHAELDSCLAEDPDSKGACETCTKTNRGMVFGEITHQANVDYQKIGKET

SEQ ID NO: 197425 - protein, 235 aa, Zea mays
  unsure (1)..(235): unsure at all Xaa locations
  Clone ID: MRT4577_111635C.1.pep
MGKEKSHINVVVIGHVDSGKSTTTGHLIYKCGGIDKRTIEKFEKEAAELGKGSFKYAWVLDKLKSERERGITIDIALWKFETPKYNVTVIDAPGHRDFIKNMITGTSQADCAILIIAAGTGEFEAGISKDGQTREHALLAYTLGVKQLIVAINKMDTTKWSEARYQEIIKETSGFIKKVGFNPKHVPFVPISGFNGDNMIDVSTNCPWYKGWEKETKAKATXQTLLXAIDAIDPP

SEQ ID NO: 197426 - protein, 274 aa, Zea mays
  unsure (1)..(274): unsure at all Xaa locations
  Clone ID: MRT4577_111636C.1.pep
MYAEVVVGVVENKQDAVDYLTWTFMYRRLNKNPNYYNLQGVSHRHLSDHLSELIETVLNDLESSKCVAVEEDMYLKPLNLGLIAAYYYISYTTIERFSSMLTQKTKMKGLLEILASASEYAELPSRPGEEEYIERLVRHQRFSIDKPKYGDPHVKANALLQSHFARHTVVGNLAADQREILLSAHRLLLAMVDVISSSGWLTLALNAMELSQMVTQGMWDRDSVLLQXSHFTRDLARRCQXNEAKPIESIFDLAEMSIDEMRDLLQLSNSELQD

SEQ ID NO: 197427 - protein, 64 aa, Zea mays
  Clone ID: MRT4577_111637C.1.pep
LSLGRTTCRRGVPFKVGSALPSRTSDRGRHHVQQCPSKEHENSRLAVATGCSAPDQSMTRTEGQ

SEQ ID NO: 197428 - protein, 77 aa, Zea mays
  Clone ID: MRT4577_111638C.1.pep
WMTEGLFDRVLTLLAVYERWGATSIRRFFPHNQSARWSVFYQEGIHANVIQKKGLKGHCFLGRSHSSDQGWTHTLNG

SEQ ID NO: 197429 - protein, 84 aa, Zea mays
  Clone ID: MRT4577_111639C.1.pep
MASLTSASTSLLFPQASSSRSRIRLSTPLGFSAQPARLRSQGAAVGARRRGRLLVVRAARGKFERTKPHVNIGTIGHVDHGKTT

SEQ ID NO: 197430 - protein, 189 aa, Zea mays
  Clone ID: MRT4577_11163C.1.pep
HASAHASGLTIISRNGSRAIENEAELVRAAAGAGFRVAVLQPRQDTELARMYRALNASDVMVGVHGAAMTHFLFMRPGSVFIQVVPLGTDWAAETYYGEPARRLGLRYLPYKILPSESSIYRKYANDDPVLTDPDTVNAKGWQVTKQVYLDGQNVRLDMARFRRRLRQAYDHWAQRHRAGLGVEQRIYH

SEQ ID NO: 197431 - protein, 105 aa, Zea mays
  unsure (1)..(105): unsure at all Xaa locations
  Clone ID: MRT4577_111640C.1.pep
TDIHTHLQGDIIPSLEIPDKVRHHASGHVATMELNTDQIYRDYMLDSEDNWNCQLENITFTAKYGNVPQIXHVFIKLCLVIFMIIPDMLKNATMFKLLETTINRK

SEQ ID NO: 197432 - protein, 73 aa, Zea mays
  Clone ID: MRT4577_111641C.1.pep
RLDTIGEPRASFPNELFSREKLPQSFSPPQAEGSKEVGKEEEDEVTTVAVDLNKSTTSIDHDLDSSLGKEALG

SEQ ID NO: 197433 - protein, 144 aa, Zea mays
  unsure (1)..(144): unsure at all Xaa locations
  Clone ID: MRT4577_111642C.1.pep
MPKSKGKARWNRKMGKNDADDDNSDVAFKENPSENAXVTRMIANRRRHAICVRCTRRLCHIWATTPQKVXIATAYIVFTGLRYYHDDXADAILKYMNDDXRLLKAYGEVPDTLRFNEGVHLDGPDEYEDGSDYIQVEDYDIDEI

SEQ ID NO: 197434 - protein, 300 aa, Zea mays
  Clone ID: MRT4577_111643C.1.pep
LQWCQGQLRSGIKIAAKKLEACSLQGLLEFQNEIQLIAKLQHKNLVKLLGCCTRGDQEKMLIYEYMENKSLDYFIFDNVKGADLNWSKRLHIINGIAQGLLYLHNYSRLCVVHRDLKASNILLDSEMNPKISDFGMARIFCSNAKESNTTRIVGTHGYIPPEYAFHGVCSIKSDVFSYGVLTLEILSSKRTVQFYEYNQKLYNLISYAWQLWTDGKSDELIYSPPGNVREEIERHIQVALLCVQENAEHRPDMERVVTMLNSKDVDLPKPMQPAYFHVNPSEEEVSSRSINMTMSITLER

SEQ ID NO: 197435 - protein, 44 aa, Zea mays
  Clone ID: MRT4577_111644C.1.pep
IPWVAMLYLKSLIACPYRLCKLVGPYVFSCSIKDVLDLCILLVT

SEQ ID NO: 197436 - protein, 62 aa, Zea mays
  unsure (1)..(62): unsure at all Xaa locations
  Clone ID: MRT4577_111645C.1.pep
PPPGGAPAPGSPRPCWPRRGASAPGAPCRCLSLAWAAWSAPAAPLRCCRSPSPRRSRRGXCF

SEQ ID NO: 197437 - protein, 230 aa, Zea mays
  unsure (1)..(230): unsure at all Xaa locations
  Clone ID: MRT4577_111646C.1.pep
MARPPDGAPAGPDDTSPPPSSNSSTPPPSDSSTPPPKSSGSGSPSPSPPAQSLSPPPPASPQDSTAPAARGSPAAPSRDSPSPPAPKRSDSDSDNSGSSKSGSGSGSRSRSSGSTQVDVILAGVVIGVLAFSLLMCIAACVCCAKKKRRKKPPHMNMPYYTDEHGNVFYANSMPKWQSSAMDHGWHAPYSPASGDMSGSHGPGPGQMPPSPXPSLGFFKSSXSYEKLAAA

SEQ ID NO: 197438 - protein, 96 aa, Zea mays
  unsure (1)..(96): unsure at all Xaa locations
  Clone ID: MRT4577_111647C.1.pep
LACRSGQGTLVQLKQKLWLYPILISIFNPHSIKSVVYKRXPDSTVVERRRKQSIDRVMNVSWPKHRTVGITHLEPSDRASMSVTPLPQLYVPCSPG

SEQ ID NO: 197439 - protein, 126 aa, Zea mays
  unsure (1)..(126): unsure at all Xaa locations
  Clone ID: MRT4577_111648C.1.pep
XVRKKKKKKKKKKKKKKKKKKKKKKKKKKKKKKKKKKKGGPAFKGPIFSCPLLQSNSSFLGTPNSGERPAFPNLGAWKNLGFPQFNGFAKNPLFPGWLKRKGAEPTTFPNIGPPYLARGTPLLRPL

SEQ ID NO: 197440 - protein, 115 aa, Zea mays
  Clone ID: MRT4577_111649C.1.pep
MDAVELPLPAKVEFGKILAPAAAVEGVDGAVVGGGPGGGSGEVLRSCADADQRHGGDVKQHNQNAEGFPSYRSKRTPLEVSIQKSLGFGLKSENGQPVIMLQMIRFNPCISKIVR

SEQ ID NO: 197441 - protein, 81 aa, Zea mays
  Clone ID: MRT4577_11164C.1.pep
YYERLYNTVHIKVNIHAAAMRRKDATMNLHYIGIFSDYTRSKYKLQNFRRNELWVTDTQIGTGGRSPGLTFASQYDAPRVR

SEQ ID NO: 197442 - protein, 142 aa, Zea mays
  Clone ID: MRT4577_111650C.1.pep
PKVLFISSRRSRTTRGPYIRNLIYKRQRYLINLLRLRSSSSLSPPSLAAATSRKLSTLVSSLKSQSRSSSGSSLVELLLRSHISTNSSDLLRGDFLLSGVDVCLITVPIIFRGGEYKGACRRQATHATNNEYASDSSTIVEA

SEQ ID NO: 197443 - protein, 83 aa, Zea mays
  Clone ID: MRT4577_111651C.1.pep
SRSSSGSSLVELLLRSHISTNSSDLLSGDFLLSGVDVCLIIVPIIFQGGGYKGALRHNHSPNQQEASNSRNKQRICIGLISDH

SEQ ID NO: 197444 - protein, 155 aa, Zea mays
  Clone ID: MRT4577_111652C.1.pep
LSLSLSSLYKSWPCRRSFPPPLIRALSLSHTRSRPRHTVRVVPRPCVLCPLLDRTVPLLLGRTVPLLPAAPASSPPTACLPWMIPSILRFVPAHSPRARWKRTQIFIKIFKVMFELVHVFYNYLFEFVNIVNMKSCVCKRLILSVCEEKKKKKSG

SEQ ID NO: 197445 - protein, 132 aa, Zea mays
  Clone ID: MRT4577_111653C.1.pep
PEGTPTSELRKSPLGSPVKTDLALGPMDPGATVENDQKENYTEGLTSMQKAKIAGISDIESFKRLLKVLTQKVSWQSDAASAIAAVVIQCRTGSGKRRNIGTRGDIWLLFVGPDQAGKRKMVNALSELMVNA

SEQ ID NO: 197446 - protein, 48 aa, Zea mays
  Clone ID: MRT4577_111654C.1.pep
IYPGVFPAGFGYSIYLCHHTLKWRLIKDQGRSISTLGFELRRLPLPGG

SEQ ID NO: 197447 - protein, 60 aa, Zea mays
  Clone ID: MRT4577_111655C.1.pep
SGAEKRLLRSPQGGGGGGGQGGYYYPCSRPGEGYGYGQGGQRQMYPPCSPGTTDGGPRIG

SEQ ID NO: 197448 - protein, 636 aa, Zea mays
  Clone ID: MRT4577_111656C.1.pep
MGNEQYVLSRVEEVLTIGEQGEIVDAAPAPQQLEDGVQLTIDELVEINLGAEDDPRPTFDNIIAEVEKLITAGFIKEVQYPRWLANIVHVMKKNGQVRVCVDFRDLNRACPKDDFPIPITEMVVNATTGYGVLSFMDGSSGYNQIKMNEDDAIDTAFRTPKGNFYYIVMSFGLKNAGATYQRAMTVVLDDLIHHSIECYIDDIVVKTKECQRHQDDLRVVFNRLRKHQLNMNPLKCAFAVKSGVFLGFVVHHRGIEIEPKKIKAIKKMPPPKNLSGLIFAGRTQPFTRLMRKGVPFHWDEQCQNALDSLKRYLLNPPVLAAPLVARADPVRYVLNQPALMGRLGKWAVIMMEFDITYVPEKAIKGQALANFLATHPVLDDSTLVIDLPDKDVFTIDIESPWELYFDGASRIETDPDAALVLPNGEPAQIKIEERWLLPAVLELVPQECEVNHIIVMVVDESDWRKPFLDYFNRGILPKDLVERHRLQQRLPIYTYKAGVLYRRSFGQEILSRCVSREETNQILQEMRKDCLKIAKSCHSCQVHDNFKHLPPEPLHPTVPSWLFDAWRIDVNGAIEPPSARGHHFILAATDYFSKWAEAIPLREVKSDNVINFLEQHIIYRFGVPRRITSDNGKALK

SEQ ID NO: 197449 - protein, 50 aa, Zea mays
  Clone ID: MRT4577_111658C.1.pep
CGGPPGQVPAAQFPHLPLWRLPCPSALLMIHDIWEIPSIHLCLSIYVIMQ

SEQ ID NO: 197450 - protein, 231 aa, Zea mays
  Clone ID: MRT4577_111659C.1.pep
MALPLYGCRSCAVHDAIIFCHCCDARLCLHCDAAVHGATEAGALHPRARLCDACGAAPAALRCDGTVTLCAVCVGRGAPGVTRTRVATYTGCPGPAEMVRLISVDPPQLEQDFEAWLADKLPRLVVEEDVGLPPDWDVAVETARLEKMLAECCEPETEEADQQRLQMQMLLQDASAMAKKREGRERAKQRYIEKRKNRRFCKQIMYASRKARADTRWRVKGRFAKQASASF

SEQ ID NO: 197451 - protein, 143 aa, Zea mays
  unsure (1)..(143): unsure at all Xaa locations
  Clone ID: MRT4577_11165C.1.pep
RGGDETGDAGRKITKQGXNPDELELMNKEAEGPXKRPALSKGDHCPTNAARLPGLYVSEGSGGEKLMPERHSKKGIELILRTERAKAEQSTKTLTSATGANLTDESWITATGCQDKKRTEKGTQGGEANNTPDLREKDEEDKQ

SEQ ID NO: 197452 - protein, 63 aa, Zea mays
  unsure (1)..(63): unsure at all Xaa locations
  Clone ID: MRT4577_111660C.1.pep
TKSPPRISLPDFPQEIENGSLFRQFGCCIPLISLYYIRFFRRINCILFSMERTLRTAWAXPVF

SEQ ID NO: 197453 - protein, 83 aa, Zea mays
  Clone ID: MRT4577_111661C.1.pep
MAWLFAGRHVCVPALWACKVAAAFQLAFEERWLLLAAARPAVIPGPIRRARIYSWCSVACVLACRVAAGPVPARLHLLAVESS

SEQ ID NO: 197454 - protein, 217 aa, Zea mays
  unsure (1)..(217): unsure at all Xaa locations
  Clone ID: MRT4577_111662C.1.pep
FYSPNLGRRQXVGEGLETWRGFYQSIRPTQMGLSLNIDMSSTAFIEPLPVIDFVAQLLDGDISVRPLSDSDRVKIKKALRGVKVEVTHRGNMRRKYRISGLTSQATRESSFPIDDRGTVKTVVQYFLETYGFNIQHTTLPCLQVGNQQRINYLPMEVCKIVEGQRYSKRLNEKQITALLKVTCQRPQEREKAILQTVHHNAYSEDPYAQEFGIKIDE

SEQ ID NO: 197455 - protein, 46 aa, Zea mays
  Clone ID: MRT4577_111663C.1.pep
NQMYLLSLCNYRHKEMGDRLNLTYECTVCGFVKLTVGSQKLVLCLV

SEQ ID NO: 197456 - protein, 77 aa, Zea mays
  Clone ID: MRT4577_111664C.1.pep
MSSTAFIEPLPVIDFVAQLLDRDISVRPLSDSDRVKIKKALRGVKVEVTHRGNMRRKYRISGLTSQATRELSFPIDD

SEQ ID NO: 197457 - protein, 86 aa, Zea mays
  unsure (1)..(86): unsure at all Xaa locations
  Clone ID: MRT4577_111665C.1.pep
GGPCPFLSVXLPPAGGRPLPWARGPWGAFVLGLFLLPTCLCGRAPFPFGGRLGSWCSCPVSRWCWRPFAPVSLLGXVCLGLIKGXG

SEQ ID NO: 197458 - protein, 86 aa, Zea mays
  Clone ID: MRT4577_111666C.1.pep
GRDGGGGVWAGWAVLLWQCHLGSGQGVPVSFIGACSHAFRSVVLCYGRLDLDVCFVSRGGTPPPRCVCVCVLNVCRGRFSGEWVNV

SEQ ID NO: 197459 - protein, 119 aa, Zea mays
  unsure (1)..(119): unsure at all Xaa locations
  Clone ID: MRT4577_111667C.1.pep
GDATRDGNIYNTHRIVLFDIHTHQKKSNHWQVSLIGLFDRNVGAVKLGVDNKYVLVLAKNPXIFHDNSSRXKCHVTTSCLNNYLNTXNQLLAKSLGRVKFEELSARIGMVYIPRKTSKT

SEQ ID NO: 197460 - protein, 78 aa, Zea mays
  unsure (1)..(78): unsure at all Xaa locations
  Clone ID: MRT4577_111668C.1.pep
GIGFDAKSGCPVPCPHGKNNSCKSRNGGHRDPPTXGXGDNCQFSPCMCARPTKPSGPENKRLNCSYGASCNWASCTKA

SEQ ID NO: 197461 - protein, 90 aa, Zea mays
  Clone ID: MRT4577_111669C.1.pep
NPLGKASRTGPNGIWDLGWASCLAWPVGATLCRPGGPRCQWACWAANAGGGTGPAWAKGPGRSSCGVLPVGPAGSGSNPLIAVGKSWPQF

SEQ ID NO: 197462 - protein, 120 aa, Zea mays
  Clone ID: MRT4577_11166C.1.pep
KKERKKNLGPKRGGKEGPREKKLIPKGGNPRTQKTPGGGQKRRPLTPGKGNKTMAPFNWLPTGKKNFLKKKKPPKQGGVGSPPGRGRKKTTGNQILWKKALIPKKNQKKPGKKGETNNPV

SEQ ID NO: 197463 - protein, 42 aa, Zea mays
  Clone ID: MRT4577_111670C.1.pep
FLNFNYNLIIISSQFLLIKHNYVFLKFLNSEFSFYIIIVYSN

SEQ ID NO: 197464 - protein, 85 aa, Zea mays
  Clone ID: MRT4577_111671C.1.pep
GGGSGSGSGEERRRGVPWTEDEHRLFLEGLEKYGRGDWRNISRWSVKTRTPTQVASHAQKYFIRQASAASRGDTKRKSIHDITTP

SEQ ID NO: 197465 - protein, 248 aa, Zea mays
  unsure (1)..(248): unsure at all Xaa locations
  Clone ID: MRT4577_111672C.1.pep
PAGTAGTEIACPVANIPLSNVERLRSTLSAVSLTELIELVPLLVSRSSTSADAHPDKKKLFSVQDFFRYAEIEGKRFFEELDRDGDGQVTLEDLEIATRKRRLPRRXEATILRAYTTLCLSKSGTLHKSQILTSLKGAGLPANEDNAAAMLRYLNADSEGSISYGHFRNFMLLLPSERLEDDPRNIWFEAATVVAVPPPIEISAGSVLKSALAGGLASAXSTSLLHPIDSMKTRVQASTLSFSELISK

SEQ ID NO: 197466 - protein, 160 aa, Zea mays
  unsure (1)..(160): unsure at all Xaa locations
  Clone ID: MRT4577_111673C.1.pep
MAIQLRSLFPLALPGMLALLGWWWFFSRKKDRLSSSDKQVETLKVGPAIKDRRLSEEACPGVLSVAPTVTQPPGREEQRSVDKPSTEPLALPRTRQVRRRSESSGNLPSVADTRSQPGPCRDEIAKVELSLMGDKAKSIPLGCPLXPXDASFPYEAVXRV

SEQ ID NO: 197467 - protein, 521 aa, Zea mays
  unsure (1)..(521): unsure at all Xaa locations
  Clone ID: MRT4577_111674C.1.pep
AVSLTELIELVPQLVSRSSTSADAHPDKKKLFSVQDFFRYAEIEGKRFFEELDRDGDGQVTLEDLEIATRKRRLPRRYARELFRRTRSNFFSKSIGWKQFLSLMEQKEATILRAYTTLCLSKSGTLHKNQILTSLKGAGLPANEDNAAAMLRYLNADSEGSISYGHFRNFMLLLPSERLEDDPRXLMYPVRRNLXELALGNSDSAIITNSDNYLLFTYKFTXNIWFEAATVVAVSPPIEISTGSVLKSALAGGLASALSTSLLHPIDSMKTRVQASTLSFPELISKLPQIGLRGLYRGSIPAILGQFSSHGLRTGIFEASKLVLINVAPTLPEIQVQSIASFCSTVLGTAVRIPCEVLKQRLQAGIFDNVGEAIVGTMRRDGPKGFFRGTGATLCREVPFYVAGMCLYAEAKKAAQHVLRRDLEAWEVVAVGALSGGLAAIVTTPFDVMKTRMMTAPPGTPVSMQMIILSILGNEGPLGLFKGAIPRFFWIAPLGAMNFAGYELAKKAMIKDEKNSSESTC

SEQ ID NO: 197468 - protein, 225 aa, Zea mays
  unsure (1)..(225): unsure at all Xaa locations
  Clone ID: MRT4577_111675C.1.pep
PRVRPPLGSLVPSRAPHGVPSLHPWPLCSSLLLPPPAARNRLLLHVPLLPWLARSLSLSPAPRPSPSPLLARARPELPSSPTFLPVRRGFPFTELPQPWRAPLPEFLPQPRALEHPCARVLSWRPVARSTAQILPMAAPPARHRLELAMPCALLSVAARRCSAMELARDARRSVCSCLPLRQPHHHAGILLVSFSCALWCWPVFSSSSLPSLAXLAPIHGARHLH

SEQ ID NO: 197469 - protein, 82 aa, Zea mays
  Clone ID: MRT4577_111676C.1.pep
HVHIDWSQRLCHRCNPTPYVYSAGFDPGPLAYSPFIAFAALSTWEVGLVAAHGMENVFTDRFRRVYSQAHKQAHKSAQRFQA

SEQ ID NO: 197470 - protein, 127 aa, Zea mays
  Clone ID: MRT4577_111677C.1.pep
RGEASPSCFLGKSLPLEVSPLSQKNSWGGAVPRRPLLQLARRRPHPLSVHVNVIKHTTVGCGASRQAPGGLFNHGYFCVTDTELCELRDSSADEMTGDRLCFQTQTSMLDAVKSDKLVCIPATRTGT

SEQ ID NO: 197471 - protein, 123 aa, Zea mays
  Clone ID: MRT4577_111678C.1.pep
EGDNASDDDSLLQSIIKSPKSEPEKHNLPQLVNLIHRVFHSTNRTVITKEELLYKIIANQINITDRREVEEQLSLMLQLVPDWISETKASFGDLLVRINKMSTAETVRARLEEATSHDISLIY

SEQ ID NO: 197472 - protein, 75 aa, Zea mays
  Clone ID: MRT4577_111679C.1.pep
APGTAPRASAAAAAAAPSPRGTLALCFRALGRNRVPVKPRRHLFGLLGLFLSCVSGMPIHTHPSCAGYKIRPRSY

SEQ ID NO: 197473 - protein, 345 aa, Zea mays
  unsure (1)..(345): unsure at all Xaa locations
  Clone ID: MRT4577_11167C.1.pep
MPAAAGDGPRAVRVGFYDTSCPNAEALVRQAVAAPFAKDAGIAAGLIRLHFHDCFVRGCDGSVLLTVNPGGGQTERDALPNNPSLRGFDVIDAAKTAVEQSCPRTVSCADIVAFAARDSISLTGSVSYQVPAGRRDGRVSNATETVDLPPPTSTAQSLTDLFKVKELSVEDMVVLSGAHTVGRSFCASFFKRVWNTSTNPATAIVDAGLSPSYAQLLRALCPSNTTQTTPITTAMDPGTPNVLDNNYYKLPASRHGXLFFSDNQLRVNPQMAALVSSFASNETLWKEKFAAAMVKMGRIQVQTGTCGEVRLNCGVVNPSSYSSSSAVELGSSAPAAVGEEGYAAS

SEQ ID NO: 197474 - protein, 58 aa, Zea mays
  Clone ID: MRT4577_111680C.1.pep
MMGTSYPIGRTLGHSWGKAPGAAANRADLEACVQSRNEWGDPPFDTNEIIVTACKKTA

SEQ ID NO: 197475 - protein, 263 aa, Zea mays
  Clone ID: MRT4577_111681C.1.pep
ELLEASTTCMARFALVACAAAAAAALLLLGVAAADVASIITQDVYNQMLPNRDNTQCPANGFYTYDAFIQAVNFFPGFGTGSSTDELNKRELAAFFGQTSHETTGGTTGAADQFQWGYCFKEEINKATSPPYYGRGPIQLTGQANYQQAGDAIGEDLVNNPDLVSSDAVVSFKTAIWFWMTAQSPKPSCHDVILGNWTPSSADAAAGRVPGYGAITNIINGAKDCGVGQNAANVDRIGYYKRYCDMLGVGYGDNLDCYSQQHF

SEQ ID NO: 197476 - protein, 69 aa, Zea mays
  Clone ID: MRT4577_111682C.1.pep
RSGLPWKKKKKNKKKKKKKKKKKKKKKKKKKKKKKKKKKKKKKKRGGPFFGSPFFFPGLARFFFFFLGP

SEQ ID NO: 197477 - protein, 138 aa, Zea mays
  Clone ID: MRT4577_111683C.1.pep
MATVLSSPRAPAFSFSLRAAPAPTTVAMTRGGGASSRLRAQATYNVKLITPEGEVELQVPDDVYILDYAEEEGIDLPYSCRAGSCSSCAGKVVSGSLDQSDQSFLDDSQVADGWVLTCVAYPTSDVVIETHKEDDLIS

SEQ ID NO: 197478 - protein, 40 aa, Zea mays
  Clone ID: MRT4577_111684C.1.pep
ARPNYFHTLPPTYYRILTSASSCHSADILTQELSPSDRLL

SEQ ID NO: 197479 - protein, 211 aa, Zea mays
  Clone ID: MRT4577_111685C.1.pep
MSKVFTLDAVAKHNSKEDCWLIIGGKVYDVTKFLVDHPGGDHLIRISGAGKLSVHQTSTSSRSLQPLPAASKQMATVLSSPRAPAFSFSLRAAPAPTTVAMTRGGGASSRLRAQATYNVKLITPEGEVELQVPDDVYILDYAEEEGIDLPYSCRAGSCSSCAGKVVSGSVDQSDQSYLDDGQIAAGWVLTCVAYPTSDVVIETHKEDDLIS

SEQ ID NO: 197480 - protein, 70 aa, Zea mays
  unsure (1)..(70): unsure at all Xaa locations
  Clone ID: MRT4577_111686C.1.pep
PGALSSWLFGPXRXVLXRSFLPVLAPRLLSRSSSWLPGCXAXAAXAPLSPGVRPCAACRLWPAPVLPPSP

SEQ ID NO: 197481 - protein, 71 aa, Zea mays
  Clone ID: MRT4577_111687C.1.pep
PFLFFFLFLAQQQREGGGRSGGPEGWAITHYAKSCLVLTIQFSNSVASNKSSTLHLSKQRRHQRPTLLSTQ

SEQ ID NO: 197482 - protein, 102 aa, Zea mays
  Clone ID: MRT4577_111688C.1.pep
VFGSRNSREMEKINVFRGMVTNWIFIAIIAATVLFQVVIVELLGTFASTVPLDWRLWLLSVGLGSVSLVVGAVLKCIPVAKSNGAPASPNGYAPLPSGPDDI

SEQ ID NO: 197483 - protein, 89 aa, Zea mays
  unsure (1)..(89): unsure at all Xaa locations
  Clone ID: MRT4577_111689C.1.pep
MASRWVRPEVYPLFAAIGAXASGIXCGFXLFRNITANPEVMPNKAWRAAAVLENHDEGRRYAMHGLRSYAHHKTPEIMPAVNKFFTDPK

SEQ ID NO: 197484 - protein, 123 aa, Zea mays
  Clone ID: MRT4577_11168C.1.pep
MGSFAKLAKRCVETEAPVMVKIQELLRGVTDVMSLAQGIVYWQPPETALNKVKEIVWEPATSKYGADDGLPELREALLGKLHRENKLTKSSVMVTAGANQAFVNLVLTLCDAGDSVVMFAPYY

SEQ ID NO: 197485 - protein, 208 aa, Zea mays
  Clone ID: MRT4577_111690C.1.pep
MSPSPPPSSGCSLAVLVGGTSTAGSSNMSLRERRDAVRHAADAALAAARGAAPRWSRALAAELSSQSQSQQHGRWHWHDDDAPHLLVAGADARPSGHQTCLPCGTAAAVAAAGCRKTVPRRRRLRVRARPKSGATTAWSAGAVARVVARRRARAGALRRMVPGGRGMADECTLLGETLDYAVSLRAQVDAMQLLLRTLQPPGHANNNP

SEQ ID NO: 197486 - protein, 132 aa, Zea mays
  Clone ID: MRT4577_111691C.1.pep
SSSGLGFIPSSFHWYGTVAKLIKKPTPSVVDRACASNCYLLPHVSFTAAKQRLQPSSTSRRHEYCRVVQQVQARHPQEPAPTAQQQGRRCVAVVVQCHEPAREEGRRQARRRRRPRRRTGRRAALEPGFGGG

SEQ ID NO: 197487 - protein, 81 aa, Zea mays
  Clone ID: MRT4577_111692C.1.pep
PQEKVRNLFPGGRKLENGAPLKKKFFPHPSWGGFIFQKGIFFFVPDQPPFIYSSVGLQPAVHMRPTGVPNGDVYISFSTPP

SEQ ID NO: 197488 - protein, 96 aa, Zea mays
  Clone ID: MRT4577_111693C.1.pep
PAVIPGRLITGAPLFGTRTSWWLFYNRLGVNPEPFYHFHNWWPLANLVCGDPRASYKKHYLGGPLFKWLIRGNQKKKFLGEGRGPPKKRRYNGQKF

SEQ ID NO: 197489 - protein, 70 aa, Zea mays
  unsure (1)..(70): unsure at all Xaa locations
  Clone ID: MRT4577_111694C.1.pep
MASPTLGATAXDVGVSSEAGCXXGVCGQWTASSLGLYTYSSEHDSFTSIFFHEQILYHNTLKHVGVRSSF

SEQ ID NO: 197490 - protein, 72 aa, Zea mays
  Clone ID: MRT4577_111695C.1.pep
PLQFPMKLYFVFPSPFLHNGILSVDPTPTCLYMGYSGLNVMLILVCKVDLAPFISVWAMHAFLGQSASPSGV

SEQ ID NO: 197491 - protein, 420 aa, Zea mays
  unsure (1)..(420): unsure at all Xaa locations
  Clone ID: MRT4577_111696C.1.pep
MDAVPPARAARPTSPSRAPKAIRSTKPRGLDEDTAAPPAFPKAKSLPSSAAGAEASLLHHNHHADVPMDARVWAGLPDDLLVEVLARVSPFLLFRLRTVCRRWESVLHDPAFLAAHAAVPSHGPCLLTVSRGGNGTHSPPQCSVLSVPLHARYKLPFAFLPAWDLWLVGSSGGLVCFSGFDGAAFRTVVCNPLTQAWRVLPDMHCNQQRQLVLTVDKNRRSFKVIAASDVYGDKTLPTEVYNSKEDKWSVHQMMPTANLCSSKMAFCDSTLYLETLSPLGLMMYRVDAGRWEHIPAKFPRSLLDGYLVAGARTRLFLVGRIGLYSTLQSMRIWELDHGRSVWVEISRMPPRYFRALLRLSAERFECFGQDNLICLTSWNQXKGLLYDIDKKAWSWIAGCASQLCNSQVCFYEPRFDTSIY

SEQ ID NO: 197492 - protein, 69 aa, Zea mays
  unsure (1)..(69): unsure at all Xaa locations
  Clone ID: MRT4577_111697C.1.pep
TRPCLEHCQELAGLHPRRGTTIMGGXDSAADIEKAGLDYKMSHISTSRGASLKLLEGKTLPGVLALDDA

SEQ ID NO: 197493 - protein, 38 aa, Zea mays
  Clone ID: MRT4577_111698C.1.pep
AEYSPSPGETTREYLVGVSIQIFRNLLCSVTAYLFPHG

SEQ ID NO: 197494 - protein, 109 aa, Zea mays
  Clone ID: MRT4577_111699C.1.pep
VCAKFMSQQCPLFSFKYICAGLASAAPRDNWGGCVVETPSRRRRRRCVLLACCCAVLTQALNCVRTPHSSRPCQQPSFSEMAARGGPRTRRSPVMTKRNLSKRVRVFGP

SEQ ID NO: 197495 - protein, 30 aa, Zea mays
  Clone ID: MRT4577_11169C.1.pep
HHPPRLGGMPQIFTTQRHNKKTTMVHLDTL

SEQ ID NO: 197496 - protein, 64 aa, Zea mays
  Clone ID: MRT4577_1116C.1.pep
AVSNHGIFSFIELVVHTMFPLFISRIVPIRKCQQKKQRMVIPWHHTSPGTRCAYSPPQTIPNAA

SEQ ID NO: 197497 - protein, 193 aa, Zea mays
  unsure (1)..(193): unsure at all Xaa locations
  Clone ID: MRT4577_111700C.1.pep
LCAEAICPRCSRVRVPRSGLPDSAPAQGIPSPGPGASPAPPRXPPPRGXACAEQPRPPSXPVCAKPPRGRGAARLNRAPAPAXGAGSRRAKTTGPGPAQPRPRAEAWDGPPPPCGATSGTPVSHRPHPRVRRGCAPLGXAPRQPLPAPPWPPRXPWPRPPGGGWSPPRLGPGLGPHARATGGPPXTGPRQCRC

SEQ ID NO: 197498 - protein, 85 aa, Zea mays
  Clone ID: MRT4577_111701C.1.pep
LGIRLELSSTAFFSLFARLGQAGQFPQSGVVIQFGLNIVIMAASGDMLPYYIAPQYSSGKPNWLILGCMLSHSTYMNNVALNNLF

SEQ ID NO: 197499 - protein, 424 aa, Zea mays
  unsure (1)..(424): unsure at all Xaa locations
  Clone ID: MRT4577_111702C.1.pep
MGSLCCVAARPHGASTASREWSSISRSDPPWRTGAGFSPPLSRGWEYRINSEGLSYGSHGDSGVAVNYGSSLSSNSKGASRSWERNELPQDHRYSTSEGAISYLNSPDISFQNHHIMLPMLQDXSSVDEYMRVSVAEPIGSLLLSDGMSGQHNSGGSTSSCSDGSEYDIVPKSYTSTPRNFPSRRSFLSKPIHPVSFPEHALEAQETRSHVASASSNNPLCSEYKGTGELCFPDYGSGRHGESGNWSAASSMDLTDLSEQPEAGQAGLLRPNNAMQKTRCDLCERLLTKRSPCGSRRIVRTGDLPVAGVLPCSHVYHAECLERTTPKGQKHDPPCPVCDKLAGKDTEQWSICRLKNGFPRFRSLGEGPSRVFSCADAGDCVAGAVQIPRSNSIGLLTRSGHKRHASSKGEPSKDSAETSRNACM

SEQ ID NO: 197500 - protein, 99 aa, Zea mays
  unsure (1)..(99): unsure at all Xaa locations
  Clone ID: MRT4577_111703C.1.pep
GRVGKILRTPPPTSELWRWRGGCSEISFLDNSAPPPPPPPPKPFTIEDRPGEQWARLRRVFPAAEGEEEEVRVDATLVDGALPPSRSGADTGGXAQMHI

SEQ ID NO: 197501 - protein, 230 aa, Zea mays
  Clone ID: MRT4577_111704C.1.pep
MALARRLLRLTPYLGTLSLPPPNSHLLRNRTYISDMRRSAFVDRLLRSVRSEISFLDNSAPPPPPPPPKPFTIEDRPGEQWARLRRVFPAAEGEEEEVRVDATLVDGALPPSRSGADTGGPPRMHISVKVEVSKAARPGVALTFECSAWPDEMEVRRVFPVRRGGPAPVQQYVGRQFSELDEEMQSAVQDYLEKIGVNDDLAAFLHAYMENKEHTELIRWLKNVECHIKK

SEQ ID NO: 197502 - protein, 75 aa, Zea mays
  unsure (1)..(75): unsure at all Xaa locations
  Clone ID: MRT4577_111705C.1.pep
KERGFQQDPFGAFWGVFNPPITLYFSFPVGFSWKLPCTFSGRVFLATFLHYLXEVXPAPFXXILPQVFLATFLGG

SEQ ID NO: 197503 - protein, 95 aa, Zea mays
  Clone ID: MRT4577_111706C.1.pep
MLTLNPDNYRVGCTHGIEAVSVHVSAFVAVTCFVAIGISKVCMRFGISIQAVIVITGGDMRRYKDITASVRQCRPSRTLARPRSDHLAGGTNTCV

SEQ ID NO: 197504 - protein, 270 aa, Zea mays
  Clone ID: MRT4577_111707C.1.pep
MGPPAMAFQALTLTPLPFSLHSSSRRVRVLAVAADQTPPPAPPSEPANSPSRLLRELAQRKKAVSPKKKHPPRRFILKPPLDDERLTRRFLSSPQLSLKALPLLSSCLPSAPLSTADRTWMDEYLLEAKQALGYPLAPSETLGEGDDCPARHFDVLFYLAFQHLDPSSERTRMRHVRNGHSRLWFLGQYVLELAFCEFFLQRYPRESPGPMRERVFALIGKKVLPRWLKAASLHNLVFPYDDLDKMIRKDREPPSKAVFWAIFGAIYLCF

SEQ ID NO: 197505 - protein, 610 aa, Zea mays
  unsure (1)..(610): unsure at all Xaa locations
  Clone ID: MRT4577_111708C.1.pep
VTLDGNYFNGSVPDWLDSFSNLIVLRLQSNQLKGSIPASIGKAAMLTELALAGNSISGDVPNGVNLNKLEMLDLRDNKLDGELPEMPTSVVTILLSKNSLKGEIPEQFGQLNRLQHLDVSFNFLVGSPPAELFALPNISYLNLAANMLSGSLLSSLTCSSTLGFVDLSTNRLTGDLPSCLNGNLNNKVVKFDGNCFRVDPAHQHEDKYCQQSHNGRGSKKDVGLVVTVVGILFVILVLSLLLMASNKRSCQKVLAEQAWADAWAQDNLLSGMSSELLVNARCISQAVKLGTQIQPSYHIFSLEELKEATKSFERSAFLGEGAIGKLYKGRLENATLIAIRCLPLHQRYSIRNLKLRLDLLAKLRHPNLVCLLGHCIDSAVDESTVKRVFLVYEYVPGGTLSSYLSACSPDKTLKWCDRLQVLIAIAKAVHFLHTGIIPGSLSNRLKSSSILVDEHHTAKLSDYGLSIITEEIYRHEIQTXEVIGQKEKYLQNDATEMENLEDDVCSFGYILLEVLMGPKLNEKGGPFILKDLVVSMSTLEERDQVVDPVIIGTCSQDSLSIVVSIMIKCLSIECSARPSMEEVLWNLQYAAQVQTMADSDQRSEVSSQAC

SEQ ID NO: 197506 - protein, 168 aa, Zea mays
  unsure (1)..(168): unsure at all Xaa locations
  Clone ID: MRT4577_111709C.1.pep
WVVRSNQQEDALSGSLADVPAALVAVRFRTPHLKTNACHLLVRFLGXYEPGQSAHLVDASEHLSLLLTHNQAAPTAPPPFAATRSTYYPLLQGVLHNLGXLSHHPGLSSKVPNNALLVIHAYNTLRYRTPYPTCLMLPQFTCFYAFVLLNKXTNYLLVASYLDSSMPL

SEQ ID NO: 197507 - protein, 122 aa, Zea mays
  Clone ID: MRT4577_11170C.1.pep
DISISQWATPQNPNNYRGPGFSHPLTPREVEEFKASPGQSGRGTDPQPSGEPWEEPFSCSPPCPPLVLLPGPPPWSFFPHLPPAFAAPWQLLKDPLIPYPPQKPIPGGRPPQRPKILPSPKS

SEQ ID NO: 197508 - protein, 49 aa, Zea mays
  Clone ID: MRT4577_111710C.1.pep
IAVIVSSKWELTYSCIPRHTYYLPLQKFNLLLFLIPCNQFFYPSLYKNK

SEQ ID NO: 197509 - protein, 235 aa, Zea mays
  unsure (1)..(235): unsure at all Xaa locations
  Clone ID: MRT4577_111711C.1.pep
MAATQLLLAALLLLPLAALLLGKRHGPRKGKNGARLPPGPPGLPFLGNLLLLRRYSSDVEALLRRLVARYGPVVSLRAGPSLSVFIADRRVAHAALVESGAALADRPAVTRALLGESGNTISRSSYGPVWRLLRRNLVSETLHPSRVKLFAPARAWVRRVLAEKLGREAEEAQARAQAPPPAMEAFRYAMFXLLVLMCFGERLDEPAVRAIASAQYGWLMFVAKNTSPLAFWPAL

SEQ ID NO: 197510 - protein, 188 aa, Zea mays
  unsure (1)..(188): unsure at all Xaa locations
  Clone ID: MRT4577_111712C.1.pep
RPSSVECTQDRSEGFTGSGRSSPRXRRGLPMVSAAVQWLRCAGPRLRESRRPSRALIYTRSPSXHHFPRAPSFSEFWWSTNCAENHGKKRIASKVGPASKRLIQPARSVCCAYPQGPTSQRKGERAARGEVGPCASGGKVGRRREDLAHAQVSPFLFLLCYIFCFSFSLSLKFKVQNSILLYGKSSSI

SEQ ID NO: 197511 - protein, 63 aa, Zea mays
  unsure (1)..(63): unsure at all Xaa locations
  Clone ID: MRT4577_111713C.1.pep
GKQLEDGRTLSDYNIQKESTLHLVXSLHGGDKLRWKKSYTAPMKYNLKRXRLSLAVLKYYRGV

SEQ ID NO: 197512 - protein, 99 aa, Zea mays
  Clone ID: MRT4577_111714C.1.pep
RRMHVVARNKRNNTRPPRMGILHIYMYSPCPCPPLYQYKPRLVDVLLLLLLRYHIHVPLLPEDGCVSSYQIKTPAAKKKKKRAAAGAPNPGQSLMVTGR

SEQ ID NO: 197513 - protein, 64 aa, Zea mays
  Clone ID: MRT4577_111715C.1.pep
SPFQTRTFSLEHGMLIGKRNRQYWILVSITITGYFETEMRLYRVGGGASDTVEGFGRAKNWIQA

SEQ ID NO: 197514 - protein, 55 aa, Zea mays
  Clone ID: MRT4577_111716C.1.pep
HQASNQVSVEGLPPGNMFNPGRSSLPSRGLSSPPQFLHSYHRIPPAPLIPSQIRP

SEQ ID NO: 197515 - protein, 140 aa, Zea mays
  Clone ID: MRT4577_111717C.1.pep
MGKQGPCRHCGVTSTPLWRNGPPDKPVLCNACGSRWRTKGSLANYTPMHRKDDIDDDEPRVSKLKPPTSKLKSQKKKPNHIIMENGPFSGQNFRKMGDVDQSYRSSSGSAVSYSESCAPYGAADASEMTGSAQSHAWGSP

SEQ ID NO: 197516 - protein, 71 aa, Zea mays
  unsure (1)..(71): unsure at all Xaa locations
  Clone ID: MRT4577_111718C.1.pep
QLKEHMQYCVDHTEXGSKLAKVKAQVSEVKGVMMENIEKVLXDRGEKIELLVDKTENLRSQAQDFRQQGTN

SEQ ID NO: 197517 - protein, 279 aa, Zea mays
  Clone ID: MRT4577_111719C.1.pep
MPCTRRRGARVFLRMVDACMHGRHAGPTRVDKWKRMGITSNDAAPRAVLLRFLFLLCIGCKCLASEVEATQTATLAVDASPQLARKIPDTLFGIFFEEINHAGAGGIWAELVSNRGFEAGGLHTPSNIDPWSIIGDDSSVFVETDRTSCFSRNIVALRMEVLCDNCPTGGVGVYNPGFWGMNIEEGKVYNLVMFVKSPETTDLTVSLTSSNGLQNLASATVTVSGESNWIKVEQKLVAKGTNRTSRLQITTNKKGSVWFDQVSLMPEDTYKGHGFRTDL

SEQ ID NO: 197518 - protein, 70 aa, Zea mays
  Clone ID: MRT4577_11171C.1.pep
KLKKQKKIKKKKKREKKILIASGLSGELILSLFRLASSCTPTSIVIIAPFQTFMLITAFIYSTAIGSHSS

SEQ ID NO: 197519 - protein, 126 aa, Zea mays
  unsure (1)..(126): unsure at all Xaa locations
  Clone ID: MRT4577_111720C.1.pep
NGGVGTTRPELEEPFWTAAVPDSSCGAIREETATLKVPTGRTHITVFLEPDNRCEHADPAGMQGXAKNYSEDVSTPVYTRQEEPRTVDVEEEEERDAAGEGTNGAKTKKTVTEKYWDWEQLNETKT

SEQ ID NO: 197520 - protein, 81 aa, Zea mays
  Clone ID: MRT4577_111721C.1.pep
CYMSMRVVDLNSTNYTHMKKLLGIKCDCVMMSDAPVQQISYEQWWKSCRSATASAHHIVLGCSSAVYDRDKTASSPSPRFC

SEQ ID NO: 197521 - protein, 172 aa, Zea mays
  Clone ID: MRT4577_111722C.1.pep
MIHALLKASLVGLALLASESIGCLPATYKYGTNLGGWLLSEPWMNPVEWLAMGGEYCPTDSSSCAASEWRLSRKLGQKAANEAFLKHWQSWFTQDHVNQLKALKLDHVRIPLGFWIVEELVEAPAELYAQGGWMELKRGLRQLRDAGFHVTLDMHALPGVSASNQQFAGNVT

SEQ ID NO: 197522 - protein, 91 aa, Zea mays
  unsure (1)..(91): unsure at all Xaa locations
  Clone ID: MRT4577_111723C.1.pep
SKRRAWPAVXAALFGAGFLLGPLLDGIHSRVGLQVYGNGALEAGALRTHVLVPPLLGAFYLTVGLLHLFLDERAPPKSRATGTARRTATSL

SEQ ID NO: 197523 - protein, 73 aa, Zea mays
  unsure (1)..(73): unsure at all Xaa locations
  Clone ID: MRT4577_111724C.1.pep
VLLRGVSLSLAERKKTGGLVLPRLIHGPTAHCLPKNPMNTWSTKNRKEVPFSQNXHPFFKNGNWYPHKLFRAN

SEQ ID NO: 197524 - protein, 164 aa, Zea mays
  Clone ID: MRT4577_111725C.1.pep
MRIHPASPTAGGKKDLRRLPHVYSKVLELPLPADTDVQVFEGPDAFHFVAAPAAGARAAATVRVRTVRIHPGVTKVVVQAGAAERAADDDAASDSMELDRWRSRLPEPTCPGHGGGRVRRRPSFVVNGCPKAPLPRKAPTQGQGEVNLECGAGGKITGRLVVVQ

SEQ ID NO: 197525 - protein, 166 aa, Zea mays
  unsure (1)..(166): unsure at all Xaa locations
  Clone ID: MRT4577_111726C.1.pep
MRIHPASPTAGGKKDLRRLPHVYSKVLELPLPADTDVQVFEGPDAFHFVAAPAAXACGGRRRXTTVRVRTVRIHPGVTKVVVQAGGAERAADDDDASDSMELDRWRSRLPEPTCPAMAVAGYVDGQLVVTVPKGPGAEEGADAGQGEVTWRCGGGGKITGRLVVVQ

SEQ ID NO: 197526 - protein, 81 aa, Zea mays
  Clone ID: MRT4577_111727C.1.pep
RRPTRPRTPRTKKHPVLSRKFDSRTTGQHKTGTTSHPSDIILKTALITPAPCSITASTDTITTLTYKLTATLNAPPQLTYP

SEQ ID NO: 197527 - protein, 162 aa, Zea mays
  Clone ID: MRT4577_111728C.1.pep
MRIHPASPTAGGKKDLRRLPHVYSKVLELPLPADTDVQVFEGPDAFHFVAAPAAGARAAATVRVRTVRIHPGVTKVVVQAGAAERAADDDAASDSMELDRWRSRLPEPTCPAMAVAGYVDGQLVVTVPKGPGAEEGADAGQGEVTWRCGGGGKITGRLVVVQ

SEQ ID NO: 197528 - protein, 43 aa, Zea mays
  unsure (1)..(43): unsure at all Xaa locations
  Clone ID: MRT4577_111729C.1.pep
QTTKHTPRPSLNTPLHPPIRTPRPPNSQXKLLPVRSPLLKQSS

SEQ ID NO: 197529 - protein, 478 aa, Zea mays
  Clone ID: MRT4577_11172C.1.pep
MSDPRGHAAGPDRDGDDPLAEDANSEEAWQTPEKEPVAVSKEAAARGGDTTPDAEPESDDGEGGVGSPDQMEPNADGERAPPVAAAEDPEGIVGSAKVETNGEDAISLDADGEEEDDDDDGDEEEEEEDDDDDDSTPDASPRAEVKVEGESSTGMTQSGAGHRVEVEPDPFLDGDDSGTEEEQGAFMAELERFHREHSLEFKPPKFYGKGLNCLKLWRQVAHLGGHEQVTVCKLWRQVGETFRPPKTCTTVSWSFRIFYEKALLEYEKHKVRTGQLQIPPPGLPQPSGADREVVVNQSSSARVRRDAAARAMQGWHAHRLLTNGTYGDNILKDKDTMPLPNRDKNLSFGVLKRKKASSPEYALKSSRSKTNKSQEDSMVVDVGEPADWVKINVRQTKDCFEVYALVPGLLREEVHVQSDPAGRLVITGDPEQPDNPWGITPFKKVVNLPSRIDPHQTSAVVTLHGQLFVRAPFGHPDM

SEQ ID NO: 197530 - protein, 339 aa, Zea mays
  Clone ID: MRT4577_111730C.1.pep
SEMPEKGFPPHEVTYTTLMKGYIKKKAFDNAYALLNEMRQNGVSCGDYTYNILINGLYMVNRVCEVDEMLKRFLSEGFVPTTMTYNSIINGFVKAGMMGSAFGMYRQMRKKGITPNIVTYTSFIDGYCRTNCCDLAVKLLIYVRRDGIQPDIAAYNAFIDTFCKQGNMSRALHFLVLLLKDGLTPDVTVYNSFVTGYKNLKMMAEASKFYYSMIKQRVVADTEIYTTLIDGFSKVGNVAFALELYSEMMANHVIPDDKTFTALTHGLCRSGDIDGAKRLLDDMRRLDVSPNIVTYNMLINACVRDGKLQEAFQLHDEMLSSGVVPDDTTYDILPRTNNS

SEQ ID NO: 197531 - protein, 137 aa, Zea mays
  Clone ID: MRT4577_111731C.1.pep
MSAGFDKQILAQKLSKLNSSQQTIETLSHWCVFHHRCCQQVVETWDSEFHAAPGERRVSLLYLANDIMQNSRKEGNGYIAEFMRVIPAALNGVLTVRDDFGRNVPKRLADYSIKHACCFASNQHRSMEAENSLTTNV

SEQ ID NO: 197532 - protein, 78 aa, Zea mays
  Clone ID: MRT4577_111732C.1.pep
ALTVPFLLDRLDGQEWAPRFAALMLTDRWTSCLTWQAVTKQICGQGTTLAKWTNTPRMISRPSSSCTRAHVYYIGPST

SEQ ID NO: 197533 - protein, 88 aa, Zea mays
  unsure (1)..(88): unsure at all Xaa locations
  Clone ID: MRT4577_111733C.1.pep
MAPAAPRPLPTARRQRPGRARLRQGRDGPLSELDVMKEKFAKLLLXEDMXGTGKGVPFALALFNAVTNLAXSVFGEHRKLEPMAPDTK

SEQ ID NO: 197534 - protein, 59 aa, Zea mays
  Clone ID: MRT4577_111734C.1.pep
LVVVASIDRVVALLCDCVTQGLLYVLAGALSNVLVQLLFGSKKKKEKKKREKKGQPLAI

SEQ ID NO: 197535 - protein, 109 aa, Zea mays
  Clone ID: MRT4577_111735C.1.pep
MAELQTKVEPVTVPAPVDPEPPLAEAPPLEKKAVAVPPPVPAAAEETKALVIVEKEKENEKIPEPVKKNASRGSLDRDIALAEIEKEKRLSNVKAWEESEKSKAENKAQ

SEQ ID NO: 197536 - protein, 140 aa, Zea mays
  unsure (1)..(140): unsure at all Xaa locations
  Clone ID: MRT4577_111736C.1.pep
MTEILHIQRAQXGNQIGANVCEVVRDEHDIEPTERYTATSDLQXNESMTTTYEASXSXGPRAPLMHLEXPGNCYSVRTGXPYGQIFRPDNFXVNGQSDVHNNXSEAHYTDSAGLINSRLHDYRKEDDNCDCPQGFQVCHS

SEQ ID NO: 197537 - protein, 76 aa, Zea mays
  unsure (1)..(76): unsure at all Xaa locations
  Clone ID: MRT4577_111737C.1.pep
KAKEVGQYLPLGNASXVRHFFETTCXRVGTRLKTFEPGRRESEASRPFLSLAANNTNXITSQAGACRTRRRRPGXS

SEQ ID NO: 197538 - protein, 115 aa, Zea mays
  Clone ID: MRT4577_111738C.1.pep
MSDLDVQIPTAFDPFAEANAGDAGAAAGSKDYVHVRIQQRNGRKSLTTVQGLKKEFSYSKILKDLKKEFCCNGTVVQDTELGQVIQLQGDQRKNVSNFLVQAGIVKKEHIKIHGF

SEQ ID NO: 197539 - protein, 55 aa, Zea mays
  Clone ID: MRT4577_111739C.1.pep
SSSSMHYVPTPCWHAALSVLQVRRVSVVGGLVRARSSASVGCRSVAPTRQRTRGV

SEQ ID NO: 197540 - protein, 85 aa, Zea mays
  Clone ID: MRT4577_11173C.1.pep
MAVMKSSTIVALLLAVAILSSLSPCYEAGGCIGKPKKSPPPPRRPYFSSYSEDHQNCRLICSSKGFKDGGWCDESVEHKVCCCSH

SEQ ID NO: 197541 - protein, 132 aa, Zea mays
  unsure (1)..(132): unsure at all Xaa locations
  Clone ID: MRT4577_111740C.1.pep
RGRGHRCKHGFPYIECSRLFFLFRREKGGPGAGTGALRGPMNXGRSKSKFQEVPETGVTFLDVAGADHAKLELQEGVDFLKNPDKYAAARAAKIPKGCLLVGPPATGKTLRARDVAEEAAEPFFSCAASELV

SEQ ID NO: 197542 - protein, 105 aa, Zea mays
  Clone ID: MRT4577_111741C.1.pep
DCAAYTKYVSSSATNRPTAVISAAAFSLMDVDEGVAELPRGQYDSHTIAALGCRDRSDYSPSEFMSPGVDRGTKTADRVRRWRTMSDTVPVFDRAPFLHDVSVAG

SEQ ID NO: 197543 - protein, 136 aa, Zea mays
  Clone ID: MRT4577_111742C.1.pep
GGKNISWAPTNFFRIEELFKTILKNGFFSTRGQIFVLKARDLPFPEKVNPLWALFLGKPPQKVPFFRFKKKKKKALVFLAYKKKTKPFFFQKKKSREGQGFWEVPQPFFRVPPLRPLPKFPKGGGGLFSPSKNPPG

SEQ ID NO: 197544 - protein, 110 aa, Zea mays
  Clone ID: MRT4577_111743C.1.pep
PGCSFGIPSSSGPVTAVAHAPSSSSPTMAGPSLHDHPFQSFSSRFVWASLTTSFPSSRLWGRLSPCVHCCRQASLFHVPVRFERHTCVLRALGWVVFELWYVSNNQQFLM

SEQ ID NO: 197545 - protein, 346 aa, Zea mays
  unsure (1)..(346): unsure at all Xaa locations
  Clone ID: MRT4577_111744C.1.pep
MAVVPAAPVVLGVAMVLVVGLAASAGAAGQLRMGFYAQSCPGVARVVGDFVRQHVRRVPTDAAXALLRLHFHDCFVRGCDASVLLNSTAGSVAEKDAPPNLTLRGFDLVDRIKALVGEDCDGVVSCADLLALVQLDAVVDIGGPASLVATWRRVCTVSAMQEALDDIPKHTMTFPQLASLFASKGLGVRDLVWLSGAHTIGIAHCSSFADRLYGYPGGGVGAAGNDTAEADPALDATYAANLRRRKCRAASGGYAEDGVVEMDPGSHLTFDLGYYRALLKRRGLLRSDAALLTDAAARADVEGVAAGPEEVFFQLFARSMARLAALQVKTGAEGEVRRNCAVVNGG

SEQ ID NO: 197546 - protein, 175 aa, Zea mays
  Clone ID: MRT4577_111745C.1.pep
GRAGHAKERGAKIYAEVRGYGMSGDAHHITQPQSGGRGAILAMKRALDQSGLHVNEIGYVNAHATSTPLGDAVEANAIKSVFGDHAASGDLAISSTKGAIGHLLGAAGSVEAIFTVLAIHHGLAPPTLNLERPDPLFEGAFTPLAAPKKMSIRAAISNSFGFGGTNTSLLFSCPP

SEQ ID NO: 197547 - protein, 98 aa, Zea mays
  unsure (1)..(98): unsure at all Xaa locations
  Clone ID: MRT4577_111746C.1.pep
KKKRKKKINLILIFFFAWASAAPPLRAGPGHFPGGGGGLGLGGAGPLGPGGSPITLAWSSFYKAGTDQNLALTNFNCLEAHFPFLELVXYGGARSPCP

SEQ ID NO: 197548 - protein, 47 aa, Zea mays
  unsure (1)..(47): unsure at all Xaa locations
  Clone ID: MRT4577_111747C.1.pep
VHWYVGEGMKQXKFSEAREALVALEKDSEKVGAEFDQGXDGPKGEEY

SEQ ID NO: 197549 - protein, 122 aa, Zea mays
  Clone ID: MRT4577_111748C.1.pep
WVGPRGWDRLLLGLFGEFDCFLAVLGGPVFRIVPHCVERPQFWGSVVHLWSRRLVWCSLSVHGPVEGLSGYCKLIRMVKTPSSSVFFFFWLALYPKCGSGRFVLGVVLVGSKPFRVGRVACF

SEQ ID NO: 197550 - protein, 324 aa, Zea mays
  Clone ID: MRT4577_111749C.1.pep
AGLMLLAVRALFGLAEGVAFPTMSTFLPKWFPTHERATAVGISMGGFHLGNVISFLATPIIMSHIGLSGTFAFFASLGYLWISVWMMNVESDPLDSHTISKSELQLILAGRAGSKVQGSNKFPSLRELFSRTEFLAVTLANVVNNWGYFVLLSWMPVYFKTVYNVNLKQAAWFSAIPWAVMAMSGYVAGASADFLIKSGFPIGLVRKIMQSIGFMGPCVALLCLRFAQTPSVAAVLMTIALSLSSFSQAGYFCNIQDIAPKYAGSLHGMTNGIGTVAAIVSTIGTGYFVQWLGSFQAFLTLTAALYFSATVFYNVYATGDLIFD

SEQ ID NO: 197551 - protein, 93 aa, Zea mays
  Clone ID: MRT4577_11174C.1.pep
SSFLTAVMKSSTIVALLLAVAILSSLSPCYEAGGCIGKPKKSPPPPRRPYFSSYSEDHQKDHQNCRLICSSKGFKDGGWCDESVEHKVCCCSH

SEQ ID NO: 197552 - protein, 62 aa, Zea mays
  Clone ID: MRT4577_111750C.1.pep
SSFSSAITFGPIILRFTGWKLVPISLDILALGYKARAFNMHEWNGPLTLTGGVPGPTLAPYA

SEQ ID NO: 197553 - protein, 96 aa, Zea mays
  unsure (1)..(96): unsure at all Xaa locations
  Clone ID: MRT4577_111751C.1.pep
LELFLVCKICIIDFLIGTEEVGDSFEDISGSPGVEAAKDFNASANAGTRSSVDTHISWNNKPKIASXCRGYYKSSSLSEIISARDTNSKTNEEVKT

SEQ ID NO: 197554 - protein, 94 aa, Zea mays
  Clone ID: MRT4577_111752C.1.pep
MGRWLKPDVYPLIAAMSFVTGMCVFQLARNVLMNPDVRVSKSSRQSAVLDNAVEGQRYSQHAFRRFLATQRPEVFPALNSFFSDSNNNNTPADK

SEQ ID NO: 197555 - protein, 46 aa, Zea mays
  Clone ID: MRT4577_111753C.1.pep
IHVTTQKFEGVKGFQKTILMSLGVFGTMPITYYSFLLTARVNGPKA

SEQ ID NO: 197556 - protein, 147 aa, Zea mays
  unsure (1)..(147): unsure at all Xaa locations
  Clone ID: MRT4577_111754C.1.pep
KTGTCSQXILLXXFXQQGNKPRFHSLXILQXRLSLHRCTLPLKLPRXPLLTHGXCWLVPRPKPYRXSIAFSLISVFPPXTGSCXGRRPWVTRRPSTPGSQPSSPXAVCLLPYTTDLTAPSVRMRCRSPGSPSDVKSLPIATYPVMLY

SEQ ID NO: 197557 - protein, 102 aa, Zea mays
  Clone ID: MRT4577_111755C.1.pep
LTAYPSLLALAQEGARLIYDWAHNGMLSDGEPPLHRLTQGAIAAQNVAELESLLSGMIDVEEHRDVTYHMMFLEGYKQASLGNCWLSLLATSDSCSRRALAS

SEQ ID NO: 197558 - protein, 106 aa, Zea mays
  Clone ID: MRT4577_111756C.1.pep
YLCRCIRYGGGGGGDTCATLNRLDRQRRLASPSWPYLCSPDSPCFCDAVSGGHGSLRRCHDAFWGGVWVYPRWCCAERCFSGGQVVFSSAAGGLGSWCLVPAQGVC

SEQ ID NO: 197559 - protein, 48 aa, Zea mays
  Clone ID: MRT4577_111757C.1.pep
AGLNVAFLLSQFGTARGGPRVGDAGPARPPTLCGYIQSSCTNATRVGL

SEQ ID NO: 197560 - protein, 278 aa, Zea mays
  unsure (1)..(278): unsure at all Xaa locations
  Clone ID: MRT4577_111759C.1.pep
MEVTWFQGDLDYEFDAPRWFDLAQEEAPLDAAAAQEWFTSAPSYPPSPLIAKMLAEDLGLQTIRSIADTDDLHCSTASHECSSGMGPKIRQLEVKIGRKACNGASENERRSHYQTTMECRGXXXSTLMKPTASQLAKQNRPAQLKNLTQNKKSVGVIRERSTISSNDCNYQSTKRQRLENGHLNKAAATAIQHEFIHKNHEKNVMNQNMDQPTVLPRLKITIPRSPDLATKLRAERSKAQRAVPTLPKQLNDLIQRVAPSAPTVQVAPTRKVVVPFWA

SEQ ID NO: 197561 - protein, 127 aa, Zea mays
  Clone ID: MRT4577_11175C.1.pep
KKKKKKKKKKKKKKKKKKKKKKKKKKKKKTLGLSPLRGNFCKFPSPWGPFDLPFRGPISPFLGGFYNPLAGVFHRVAGETPGVPHFISLGGLPLFPVWPIANWARPVRLSKNWPTLFGKCTPPVRGL

SEQ ID NO: 197562 - protein, 252 aa, Zea mays
  unsure (1)..(252): unsure at all Xaa locations
  Clone ID: MRT4577_111760C.1.pep
MRPRGRGDDVEDDEDEYEDITPPRRTPEPEADPVRSPSPSPSPAPAPAPPHPARAPLSSLVVRPPPQXRRTAADPPRPHPPPARFLPAPXTPRPRXASPPRRRRDFSPPPPRGWVRRRSPLPPPPERRRPGSPPPQRRRFSPPPRSHLPRHPRFHDEQEGYGMHAGPSPPRRAEASKFDDDVSPRYTHGYQGGGRGGARFREGPPPYGRGRSYGRGYGAPHGKDLINIDGEYGHRNDPDLSPREGDWICQNP

SEQ ID NO: 197563 - protein, 72 aa, Zea mays
  Clone ID: MRT4577_111761C.1.pep
TRSRKGEIVTNVLGVCAPDMQFIYVLPGWEGSAHDGRVLRDAISRPNGLRVPQGEFCPFILKKQLFRHSYWY

SEQ ID NO: 197564 - protein, 91 aa, Zea mays
  Clone ID: MRT4577_111762C.1.pep
ASTERRASMKATTALPLPGNGPLLRVCRRAPPGRCHCGKSSCAYALSTSPPAGPLPRGSPPAPAHHDAGLTPARYRTLGWMRPAPAVFDTR

SEQ ID NO: 197565 - protein, 159 aa, Zea mays
  Clone ID: MRT4577_111763C.1.pep
SSARSASFSRAGAAAPVPPAGQHPAPRRRHVRARDRYRGRGGEKKVNMRGGRKTEHYSLANGVAPLKPADKKRRGGPFGAHMNADGEILRNGGTKNGHRLVGGARGVVLLRLEAAVEESEYGAWPCHCRLSPKAEDCFTNREIYNQLHAFDSIYCGTNA

SEQ ID NO: 197566 - protein, 58 aa, Zea mays
  Clone ID: MRT4577_111764C.1.pep
VQAIPHSISDTGIRACIERNLFIHIVCGDHLGLQDCNFKIQLFVLIVSAAEAAYVIAS

SEQ ID NO: 197567 - protein, 63 aa, Zea mays
  Clone ID: MRT4577_111765C.1.pep
KQEHCLCSPRDIEKTGTSRLHVGLLLYHECSKDVAQRQNAVTTVLLLSSTWGTLRILRSREKE

SEQ ID NO: 197568 - protein, 96 aa, Zea mays
  unsure (1)..(96): unsure at all Xaa locations
  Clone ID: MRT4577_111766C.1.pep
KYLLFLHKTHNKSRNYYENGGNVCFDNFGDKVKNWLTFNEPYTFTSFSYGTTVSCPXRCSPVLDCTISTDNSLVXPYIADHNILLAHAXAVDLYYK

SEQ ID NO: 197569 - protein, 90 aa, Zea mays
  Clone ID: MRT4577_111767C.1.pep
QALLDNTHRTPDLPAGAVATTVADCQSVRAMNLAVPARQQNNQDADHSGKTEADDVLGTEACAQPKLPLILRDDNTYDAMLPPVILPMAD

SEQ ID NO: 197570 - protein, 95 aa, Zea mays
  Clone ID: MRT4577_111768C.1.pep
SLYQLLCHLQSRGHHQCHYHAHKLPIIPIPEITHNKGNKSWRLAAIYLQAVKNYDIHQAAKIPHIIQRDLQPLGLALDNIPTIARRITRIHYAPD

SEQ ID NO: 197571 - protein, 206 aa, Zea mays
  Clone ID: MRT4577_111769C.1.pep
LLFTDVLYLPKNNKGVLVLESCIDSTSTWPLKQLSFFMDMSDVFLNNCANFPFIIFVVGGQEPGGVRAGAVHAGHAAGPLPGLLDGAMAESGDGRSAATRWTWRSSGRGAPCGMRWTCSSSMSLATARCCPYIFTDIFNNDLSGPYAFLEPPFVQRSLLYKIQARRKNRLIGLEASDTLSSHMSHEMDLTRNQTPLNRSHPRRQQE

SEQ ID NO: 197572 - protein, 127 aa, Zea mays
  unsure (1)..(127): unsure at all Xaa locations
  Clone ID: MRT4577_11176C.1.pep
ERRQVRRGGVVQGRPQSLEGGLDYLGNPTCAPRASAIGVPVVLMGLRGLPRRRRPSGRLTGVPRGPSTRGPARPDTXATQVKTKNGRLPCFHVRLSSGHLPAGPLETFRPLAAPSHNPGHRTTSPRH

SEQ ID NO: 197573 - protein, 88 aa, Zea mays
  unsure (1)..(88): unsure at all Xaa locations
  Clone ID: MRT4577_111770C.1.pep
KKXFFPHNKPPPPGKFLTDFEWEPPTKEGEEGTGGHDYRGRSGPATDIGAHDHTSGWVCPPLASSITRSFGLIRDTEKLTIMAARTTG

SEQ ID NO: 197574 - protein, 46 aa, Zea mays
  Clone ID: MRT4577_111771C.1.pep
SSESRPLFFRLMRGYLDANPGSVMALAVSTDIVQFWVRIIQHGAQG

SEQ ID NO: 197575 - protein, 53 aa, Zea mays
  Clone ID: MRT4577_111772C.1.pep
VFCGFHEPRSGSDCLQQQRELGARTFNTCELVHMQTYRGIPAYHKQGRLCYLH

SEQ ID NO: 197576 - protein, 185 aa, Zea mays
  unsure (1)..(185): unsure at all Xaa locations
  Clone ID: MRT4577_111773C.1.pep
MMQTILASETMYIPAGVTVTVAAKLLTVAGPRGKLTPNFAHLNLDFQLQEGGRXLKVHAWSPTRXTMAAIRTVIPHVPSLIKGVTLGYRYKMRFVYAHFPINVSITHSNIAIEILHFLXEKKVRTLYMLDRLTILRSEKAKXXLFLDGNDVELVSLSGSLIXQKCHXKKKDIRKFLDGIYVSTRV

SEQ ID NO: 197577 - protein, 74 aa, Zea mays
  Clone ID: MRT4577_111774C.1.pep
LLLPILSHTIIKHTLVHIMQHIITYGTFLTYQKNPNCKLTLTNFYVCKSLATRTTCLISLKHELSLNVQTILLP

SEQ ID NO: 197578 - protein, 91 aa, Zea mays
  unsure (1)..(91): unsure at all Xaa locations
  Clone ID: MRT4577_111775C.1.pep
MGLSLAAVSSTFLGTRLGDRAPQNGRIVAQFGFRLGXKANPASKKVAKTSTSSDRTLWFPGAVAPDYLYLLLVGDYXFDPFSLWKPVEYLQ

SEQ ID NO: 197579 - protein, 296 aa, Zea mays
  unsure (1)..(296): unsure at all Xaa locations
  Clone ID: MRT4577_111776C.1.pep
MAVDLMGCYAPRRANDQLAIQEAAAAGLRNLELLVTSLSTQAAAPHRAADQPFGEIAGQAVSKFRKVISILDRTGHARFRRGPVEPPPPTXRLLSSPVLPLAPVSVAQPPQSLTLDFTKPNLAVSAATSVTSTSFFSSVTAGEGSVSKGRSLMSSGKPPLSGHKRKPCAGAHSEATTNGSRCHCSKRRKNRVKRTIRVPAISSKVADIPPDEYSWRKYGQKPIKGSPYPRGYYKCSTVRGCPARKHVERATDDPAMLVVTYEGEHRHTPGAVQGPSPLATASPVPVAVSAGNGLVV

SEQ ID NO: 197580 - protein, 72 aa, Zea mays
  Clone ID: MRT4577_111777C.1.pep
IRGLVPTDVADIVTLPRCCSPWTPDTTMTTTARTLNYVLRIFKGSLRRILHRAMCRSISSSVPYLWLNRFLE

SEQ ID NO: 197581 - protein, 53 aa, Zea mays
  Clone ID: MRT4577_111778C.1.pep
LSGLQILQRLNLSYGLDTGIRVNKIYAKSPMKTANLDNRQIPDHLLDVLIIYT

SEQ ID NO: 197582 - protein, 315 aa, Zea mays
  unsure (1)..(315): unsure at all Xaa locations
  Clone ID: MRT4577_111779C.1.pep
MAVDLMGCYAPRRANDQLAIQEAAAAGLRSLELLVSSLSTQAAAPHRAAAHQLQKPPSQPPIGEIADQAVSRFRKVISILDRTGHARFRRGPVVEPATGACSGRRRSRSXAPALHVVAPVAVAQPQSLTLDFTKPNLAVSGGATSVTSTSFFSSVTAGEGSVSKGRSLVSSGKPPLSGHKRKPCAGAHSEATTNGSRCHCSKRRKNRVKRTIRVPAISAKIADIPPDEYSWRKYGQKPIKGSPYPRGYYKCSTVRGCPARKHVERATDDPAMLVVTYEGEHRHTPGAPAPAPSPLSDSLFCSKPTHCCRQLLSMA

SEQ ID NO: 197583 - protein, 57 aa, Zea mays
  Clone ID: MRT4577_11177C.1.pep
DAMALIGTWLLAHLLQILFSARPGHNLWHLGTKPLSPAMHAFAVPFRTPPALAAGPC

SEQ ID NO: 197584 - protein, 83 aa, Zea mays
  unsure (1)..(83): unsure at all Xaa locations
  Clone ID: MRT4577_111780C.1.pep
EERGFPSTIESIDXCIYWKRRNCPIGWGGQFTRXDIKSPIIMLKAIAAYDLRIXNMFFGXVGSNNDVNKFNQSPLFADALKGE

SEQ ID NO: 197585 - protein, 681 aa, Zea mays
  unsure (1)..(681): unsure at all Xaa locations
  Clone ID: MRT4577_111781C.1.pep
MDAAELPLVYHIGLVLAALWAAAAVGFRGSLLYLLAFLYLYMVNARCAVRLRKRIQHEEMKSAYQRRLLSDAESARWLNHAIDKMWPVCMEKIVSKLLRPIIPWFLDKFKPWTVSKASIQELYMGRNPPIFTSMRVLPETSDDDHLVLELGLNFLSAEDMSAVLAMQLHKSVGLGMTAKMHLTSMHVEGKILVGVNFVRSWPFLGRVRLCXVEPPYFQMAVKPLISHGLDVTEFPGISGWLDKLMDTAFGQTLVEPNMIVINVEKFASTPSENNWFSIEERPPIAYVKLEILEGTDMKPSDINGLADPYVKGHLGPFKFQTQIQRKTLSPKWFEEFKIPITSWEATNELIMEVRDKDPMFDDSLGQCTISLHDLRGGQRHDKWISLNNVKKGRIHLAVTIDDISEDQNTSSLDQSLKQADTELPVSTSVCSEVDASEPPEEKKVLMDEVEHINIDGQEQPGGLYVHRPGTGVPRTWESRKGRARNPDTQIHQEVDKQKEVPTPKGSGQGGLFNVGSFFRWNSRKGSSRNLDASPPATPGSQSVTELDPKLPQTPRPNLKELGEKRTSIKIVVDEEASPADKVGGAENSGEDVAKVIEKNAGEPGRSLTSTLSRKICRRRADDRLSDIPEKIEARGSKPVSEGPILVRGEPMITVDHPTTEHSDGGGTEQDAVGAKVATQTS

SEQ ID NO: 197586 - protein, 89 aa, Zea mays
  Clone ID: MRT4577_111782C.1.pep
CSSIKITNRRVNAIEHVIIPRIERTLAYIITELDEREREEFYRLKKIQEKKKILKEKSEKDLEQRRAAGEVLEPANLLAEEKDEDLLFE

SEQ ID NO: 197587 - protein, 704 aa, Zea mays
  unsure (1)..(704): unsure at all Xaa locations
  Clone ID: MRT4577_111783C.1.pep
MDAAELPLVYHIGLVLAALWAAAAVGFRGSLLYLLAFLYLYMVNARCAVRLRKRIQHEEMKSAYQRRLLSDAESARWLNHAIDKMWPVCMEKIVSKLLRPIIPWFLDKFKPWTVSKASIQELYMGRNPPIFTSMRVLPETSDDDHLVLELGLNFLSAEDMSAVLAMQLHKSVGLGMTANMHLTSMHVEGKILVGVKFVRSWPFLGRVRLCFVEPPYFQMAVKPLINHGLDVTEFPGISGWLDKLMDTAFGQTLVEPNMIVINVEKFASTPSENNWFSIEERPPIAYVKLEILEGTDMKPSDINXRMNCAASVLLLIGVTQLMIQCTGLADPYVKGHLGPFKFQTQIQRKTLSPKWFEEFKIPITSWEATNELVMEVRDKDPMFDDSLGQCTISLHDLRGGQRHDKWISLNNVKKGRIHLAVTIDDISEDQNTSSLDQSLKQADTELPVSTSVCSEVDASEPPEEKKVLMDEVEHINIDGQEQPGGLYVHRPGTGVPRTWESRKGRARNPDTQIHQEVDKQKEVPTPKGSGQGGLFNVGSFFRWNSRKGSSRNLDASPPATPGSQSVTELDPKLPQTPRPNLKELGEKRTSIKIVVDEEASPADTVGGADNSGEDVAKVIEKNAGEPGRSLTSTLSRKICRRRADDRLSDISEQIEARGSKPVSEGPILVRGEPMITEDHPTTEHSDGGGAEQDAVGAKVATQIS

SEQ ID NO: 197588 - protein, 33 aa, Zea mays
  Clone ID: MRT4577_111784C.1.pep
TLNHIRISVRSTVNDYAFCEASHLGRVSIRGRS

SEQ ID NO: 197589 - protein, 54 aa, Zea mays
  Clone ID: MRT4577_111785C.1.pep
REGPRGGSPLGSWGNRVRVLSRKGCSPGGFLSQASWGPLRVLKRFSFWGVSPHF

SEQ ID NO: 197590 - protein, 41 aa, Zea mays
  Clone ID: MRT4577_111786C.1.pep
LKSQVLHTGGYHAQRGGYVDETGQVWQDQTVSHPGGCRSKV

SEQ ID NO: 197591 - protein, 186 aa, Zea mays
  unsure (1)..(186): unsure at all Xaa locations
  Clone ID: MRT4577_111787C.1.pep
GKSGHYFAKCPXTSDSDRDDDKKGKKXMEKKKYYNKKKGGEAHIGXEWDSHEGSIHSSDEDAANIAINKGLLFPNVGHKCLMAKDSKKKKVHSRDIPKYIISNEXGSSSEKDDDLSSLFANLTIEQKGKNNESLKTINEKDEILECQEDLLVKKNKKIVKLKDAFALEVEKXKNLNKELNTXNDSI

SEQ ID NO: 197592 - protein, 39 aa, Zea mays
  Clone ID: MRT4577_111788C.1.pep
IGRRFKKVLRLKEADVVEFSGHTDSAHSGSTRAKAKYSV

SEQ ID NO: 197593 - protein, 84 aa, Zea mays
  unsure (1)..(84): unsure at all Xaa locations
  Clone ID: MRT4577_111789C.1.pep
EQGGAXRPFPWEGELTMRCAQETRCAHWVCLNRRXGTYXSGGGGIXIXKXVRRYNXLNPLHLGKFGNKDWGVPISKHMMLLVVN

SEQ ID NO: 197594 - protein, 95 aa, Zea mays
  unsure (1)..(95): unsure at all Xaa locations
  Clone ID: MRT4577_11178C.1.pep
FFRAXLLRVRLVQMDWTWSSDRTQMVLLSGSTMQDGLAVTELGAGACYYHWERGGQLGESYKSKWCRVCCSHILSLALWGRSYLGGNSQSSTSLL

SEQ ID NO: 197595 - protein, 99 aa, Zea mays
  Clone ID: MRT4577_111790C.1.pep
RVLNFPLRIGSEIAAAAAAVAATAPAAGDKRASPEPTASSDSSPSASSATPKRRKRGEAAAATMAMALVPPPPAAQAPVQLTLPARPWFAAGPVQQLVS

SEQ ID NO: 197596 - protein, 664 aa, Zea mays
  unsure (1)..(664): unsure at all Xaa locations
  Clone ID: MRT4577_111791C.1.pep
MPPASRPAAASSALPAPPRRLRRRRPLKATLATTPAADAGAAAGAARHGGPETPHLCWAASSGESNANAERPRGDPPSSVRRLAAAVWRLRPPEEAPTAGQYDAASRVGLEHXETSTSSPPAQXNPLTYHRSFKKDISSPNSVLEPHSEELHKIHLGLSSGVEDATKWEHIKHKEHXPDGAYVIASQLNLVEEQQGGSYVASLELELQQARDRVSKLEAERLSAKKQLNHLFKKLAEEKAAWRNREHKKVQAILEDMKADLEHEKKNRRQLETINFKLVDELKEVKMAAKQLLQEYDNEQKTRELTDEVCNKLVREIEEHKSEIEALKQDSVKLRGDLDEDRKLLQMAEVWREERVQMKLVDAKLILEAKYEQLSKLQEEVEAFILTFSSSKGDSTIVEAAHNIVQAIGSARDQEVEFTYEPPRASEDILAIFEELRPSEEMEKKETEPCLKQEIQEASPTADIFLENRARLFPDGSHSDESDKEDGSSWETMSHEEMQGSSHSPYESEHSVNKIFDRISWTSGNDSEGEQANKLCDDLSSVYLTDMEQSKKKESAISKLWKSSPLKNCEFRTKDVADMINGRLSSASLPNGVYSTAKGLNLDMGDSTPSTTQWSSPDSMNSQLNRGFRGCMEMVQRQSLKAKLLEARMESQKIQLRHVLNQKT

SEQ ID NO: 197597 - protein, 111 aa, Zea mays
  Clone ID: MRT4577_111792C.1.pep
FKPNPRSHVQEYCLVVSFLSHLAESLHTFFFLFDYLVVPSDYRHMEGFGVNTYTFVSSAVKAHYFKFHWNLYFCIRFILTFYFSFLFSYSFLSFFFLFYFFYFYLSFYFFF

SEQ ID NO: 197598 - protein, 106 aa, Zea mays
  Clone ID: MRT4577_111793C.1.pep
AGAMSARKPPIRSEQRKCARTSFGVGVCGMVRLPRPIPSVFRWRPCRARHRCDLRQGLHQSPEQGLGCWRGTDSGGLLRLGLRLHAQLGAETRSRRRRRARARETG

SEQ ID NO: 197599 - protein, 252 aa, Zea mays
  unsure (1)..(252): unsure at all Xaa locations
  Clone ID: MRT4577_111794C.1.pep
MAAAGWSSAAFLALLLLLLPFAPSPARAATPGKSPSPTSTAVFQLQGAVYPIGHYYVTMNIGDPAKPYFLDVDTGSDLSWLQCDAPCQSCNKVPHPWYKPTKNKIVPCAASLCTSLSPNKKCAVPQQCDYQIKYTDKATSLGVLVADNFTLSLRNSSTVRANLTFGCGYDQQVGKNGAVQAATDGLLALGKGSVSLLSQLKQQGITKXNVVGHCFSXXNGGGFLFXFGDDIVPTSXXVTWXPMARTTSGEYY

SEQ ID NO: 197600 - protein, 122 aa, Zea mays
  Clone ID: MRT4577_111795C.1.pep
SIISGTSWRRVRQQQSQALVFSRDDGNGIREVLSLTAAGPDALLQGLFYRGALQDLVVALAWCSRIVKEQGTFFFTASATPIRNFTPSANAPRLSWGKIIEVIARYEGIGFPCHSYPRPASK

SEQ ID NO: 197601 - protein, 133 aa, Zea mays
  unsure (1)..(133): unsure at all Xaa locations
  Clone ID: MRT4577_111796C.1.pep
MATIIAGTPTTSITRTGHVLKRPVGASSSTVLGLPAMAKAGRVRCSMEEKPSSSSNLGMGASLLAAAAAATMSSPAAMALVDERLSTEGTGLPFGLSNXLLGWILFGVFGLIWALFFVYTSTLEEDEESGLSL

SEQ ID NO: 197602 - protein, 52 aa, Zea mays
  unsure (1)..(52): unsure at all Xaa locations
  Clone ID: MRT4577_111797C.1.pep
TGSGKTITIYGWEINTGLTPRATSVLFXVIKRDGNKYSFSLMAYIAEHHQDN

SEQ ID NO: 197603 - protein, 146 aa, Zea mays
  unsure (1)..(146): unsure at all Xaa locations
  Clone ID: MRT4577_111798C.1.pep
MPSIAAIQWPXNFKVSNVDKYDPKQDPGDWLAVYTTAARAAGATKDVMTTYLPIVLGQDTLQWLRHLPRHCIDDCSDFSRRFIANFQSLFDNLVQPWDLKSIRRQSDETLGSYLKRFQTMRNRIPEVAEAAVIEDFYRGSNDSAFV

SEQ ID NO: 197604 - protein, 56 aa, Zea mays
  Clone ID: MRT4577_111799C.1.pep
TVRVKSGEDPHVDLEEAVAAGTANNVVAGAAQGHGAAELKNQKTTKDYSLGRRGEV

SEQ ID NO: 197605 - protein, 61 aa, Zea mays
  Clone ID: MRT4577_11179C.1.pep
SLTLHNGINPLHLFIIRCTRPTITHILYFLTPHYIHTFSSLQIFTLSHIFFTYFLYLISLI

SEQ ID NO: 197606 - protein, 148 aa, Zea mays
  unsure (1)..(148): unsure at all Xaa locations
  Clone ID: MRT4577_1117C.1.pep
VQQLEAELPLLEEDSCQRTYLHVVASNRGVDWHPNPRVXHGVVAGGDTPRFIMESVKQCRGPPKLFVLDKYDVGGDGACLKRYTDPSSFRTGSACPTTLLQEGTRDDRRPLRAVEISPNLQNAEIFRSPNAADNFSKLETGSSGWSSG

SEQ ID NO: 197607 - protein, 17 aa, Zea mays
  Clone ID: MRT4577_111800C.1.pep
MAAAINNNDGMYPCFSQ

SEQ ID NO: 197608 - protein, 99 aa, Zea mays
  Clone ID: MRT4577_111801C.1.pep
LKKQKWLNGNYLCIGVPDECFKFPYRLVLMSLFKCATDSSENPWGFAKPNLRSFSQLNSTRGGGKGGGAYRRRDCSGEVAEGVGEVMTDTPMCECLRVS

SEQ ID NO: 197609 - protein, 53 aa, Zea mays
  Clone ID: MRT4577_111802C.1.pep
DSWAKVHTIWLRVVITKPTFPPWMGYFKHVNAILHNNIFKKYFHNGKNHTYSS

SEQ ID NO: 197610 - protein, 69 aa, Zea mays
  Clone ID: MRT4577_111803C.1.pep
LIRKPHKRIIISKPKKKGNTREIQIKKVEKQRTVNSIYFYIIKYFFFFYLFFFIFFFFYIFFFFFFFFL

SEQ ID NO: 197611 - protein, 98 aa, Zea mays
  Clone ID: MRT4577_111804C.1.pep
RGLRHLRRELEEPNRWGPTAQVILFATVLFTLVQSVYLRSSRVCCCPSVFLIKGRSVVKLLVAVFILGLQQTHASTSMDSGSMGAPTPVRLYSKLNPK

SEQ ID NO: 197612 - protein, 76 aa, Zea mays
  Clone ID: MRT4577_111805C.1.pep
QITKIFYPWPETPMRIKRFKRQTKKAKKKIYIKKIIRIRNTTRLPNHKNPKTPFPTPHLPLRGFQGGTNNRHSQSF

SEQ ID NO: 197613 - protein, 49 aa, Zea mays
  Clone ID: MRT4577_111806C.1.pep
PLTNVKARLIPGISHSYRLTNKISLYQELLYLWPIVPFAPNFKKKVSLN

SEQ ID NO: 197614 - protein, 89 aa, Zea mays
  Clone ID: MRT4577_111807C.1.pep
MAGSVISLDNLEGRLGEAGDAAVFTEENQCPDTVWTASVPVGGGRQLNRGEIWRITAPAGTTAARIWARTGCQYDASRLGNWRTADCSG

SEQ ID NO: 197615 - protein, 56 aa, Zea mays
  Clone ID: MRT4577_111808C.1.pep
SIYHMQITCLSCSPRGLIARPKSPRSRGDPRIASDPYCALKAATSFFTSHGRSLGC

SEQ ID NO: 197616 - protein, 53 aa, Zea mays
  Clone ID: MRT4577_111809C.1.pep
TNIFSQNITTTDATIFFFMGLYGHHVSATSQASYRQSLTRCSCHHCTVPYTKT

SEQ ID NO: 197617 - protein, 177 aa, Zea mays
  Clone ID: MRT4577_11180C.1.pep
APSRVFFFFFFFFFFFFFFFFFFFGNKPWVLLGFPFVLQNLTGSGFIEQTFRPKGFEEAKKVPSLLLTGIPNYRGGGTNVNKLKNPTGNFTATRRKKKKKSNSVERVIRGGVPTGGGGSSRGGRRFRRTFARPSLGWPPCWGGRRRWSWTTTGAPRTRWAFRSRSSCWGPRGGTPPG

SEQ ID NO: 197618 - protein, 199 aa, Zea mays
  Clone ID: MRT4577_111810C.1.pep
SLTEVWRFLKELTQFISRSSHSRSDVLKKLNFVMTVRHKLYHFLSTLQQYLHCHLSDISWRRFQHSLKNQVRDILDLEYVHMCYITDALDICLLSDESKQVATIIKSMLQLALELRSCFQSGDTCDLSVNQLSNLQYLINFSQVDVIRTKFEDNIKDLYILHSKSSKYGELGLSRFWGYLNYNEYHSTKVSKDMDSFCF

SEQ ID NO: 197619 - protein, 87 aa, Zea mays
  Clone ID: MRT4577_111811C.1.pep
EKIHISFLYVKLFRGTKGKETKNKESMWTLKHRSNSLLPDRWTALDTPGRIGMKSILHQTERETSSLITRKMGLAVLTGVPLTFIRS

SEQ ID NO: 197620 - protein, 332 aa, Zea mays
  Clone ID: MRT4577_111812C.1.pep
MPPPPPPAARIRGRCSALSFAAARDRCFSHRFRRAGLRPLAVPLPGPGPGPDADPATTVHMWVPAGPPPRNPLLLLHGFGASATWQWAPYLRPLIAAGFDPIVPDLLFFGASCTRLPDRSDAFQASAIKAAMDAIGVPRFGLVGVSYGGFVAYRMAAMFPEAVHRVALVCAGVCLEERDLAEGLFPVAGIGEAAALLVPHRPEEVRRLVRLTFARPPLIMPSCFLWDYIKVMGSDHIQEKAELLYALINGRQLCTLPKLTQPTLIIWGEQDRVFPMELAHRLNRHLEGNSRLVVIKNAGHAVNIEKPREVCRSIIEFFKEPVAGAANADDKV

SEQ ID NO: 197621 - protein, 275 aa, Zea mays
  Clone ID: MRT4577_111813C.1.pep
MKACAKAAGERLSLVCAPSTRQPLARSFVKARRLPSQHETKSQVSCSVRVSENTAHRIDATAENIFPAVKDHVLKATDAINRGEVIAVPTDTIYGFACDACSAGAVNRIYEIKGRIQTRPLAICVGDVSDISRFALVDHLPHGLLDSLLPGPVTIVLKRGENSILERSLNPGLDSIGVRVPDLDFIRSIARGTGSALALASANLSGQPSSVCVKDFEGLWPHCSFVFDGGVLPSGRAGSTIVDLITPGVYKILRDGSSRKETAAVLGKFGFVEAL

SEQ ID NO: 197622 - protein, 121 aa, Zea mays
  Clone ID: MRT4577_111814C.1.pep
ELDDEMFNEDQLKSMVKLAPLSTDPELLKDYAHAPPEVLATLGDAEQYYLAIMDIPRFEARVRAFLFKRTFFGIVNTLSEEVDNALSAIKKIATNFQFAKLLEVMLHLGNLLNYETVAGDC

SEQ ID NO: 197623 - protein, 221 aa, Zea mays
  unsure (1)..(221): unsure at all Xaa locations
  Clone ID: MRT4577_111815C.1.pep
MKACAKAAGERLPLVCAPSTRQPLARRSPCHLGPRPLDALPLLLLWDTWACFVKARRLPSQHETKSQVSCSVRVSENTAHRIDATAENIFPAVKDHVLKATDAINRGEVIAVPTDTIYGFACDACSAGAVNRIYEIKGRIQTRPLAICVGDVSDISRFALVDHLPHGLLDSLLPGPVTIVLKRGENSILERSLNPGLDSIGVRVPDLXFIRSIARGTGSAL

SEQ ID NO: 197624 - protein, 43 aa, Zea mays
  Clone ID: MRT4577_111816C.1.pep
IRSLILAEKIHMRAPSPNLEPTHPSITNADWTIVYRQMLAQRR

SEQ ID NO: 197625 - protein, 129 aa, Zea mays
  Clone ID: MRT4577_111817C.1.pep
APPIFWAPIYGPLPDSDGFRAPPDRVFQGGGLPGQKYLVQEGQLSRQDPWPPQMFLCRVGLFRPFWLKTSRKKTPFRPWGSVLGALKNLSPAPRYKKKPPWVPPPGDHKAPFFSLSGPEMQAPSFFGCG

SEQ ID NO: 197626 - protein, 124 aa, Zea mays
  Clone ID: MRT4577_111818C.1.pep
GAVNLSCCHRFKKNNSNCLALDQVHFPIEIAICLKSKQLYFWQTQRASFIYSVQLMAAHPVESEASSETDNHPLLIDHMENTAHLEIAIESPRDDVASSSTTRREDNDGLDRLPHISESSSETT

SEQ ID NO: 197627 - protein, 189 aa, Zea mays
  unsure (1)..(189): unsure at all Xaa locations
  Clone ID: MRT4577_111819C.1.pep
LRKGRLPAGGGGGVKPFPLLPIPSPGRPSIPVRLHLGGECIXIHIXGRGGIQVXNAYSELGGGGHAIHAYSQMPGDKXTIGGGDDAFNTFFIXTGAGKHMPLAGFVDLKPTVIYKGRTGTYRQVFHPKQFITGKEDSSNNFTRGHYTIGKEIVDLYLDLIKKLHDYCTDLHSFPLLNAVDRRTGSGLTY

SEQ ID NO: 197628 - protein, 82 aa, Zea mays
  Clone ID: MRT4577_11181C.1.pep
SILRPEKQEPCVTRTNNSTESTPNAEIIISPANAYSTNQIHIIKQSIPPPPHISKLAQPKITTAAPGRFQVQIKTGKPLLKE

SEQ ID NO: 197629 - protein, 76 aa, Zea mays
  Clone ID: MRT4577_111820C.1.pep
CQGFYHAYGVHQKLIEYFQVGIIFTSTFSQSLRTTLLWQLMTKGERLEQRYVNVQVGTKIWKYAQEKIGHELRGSF

SEQ ID NO: 197630 - protein, 55 aa, Zea mays
  Clone ID: MRT4577_111821C.1.pep
RFERLSLPFLHHGWWRMLFFWLGVRFLCASWVLLCRLLLIAAVCLEKCPPRLVWG

SEQ ID NO: 197631 - protein, 67 aa, Zea mays
  Clone ID: MRT4577_111822C.1.pep
MTEVPFLPRERLFKQQHYFQNLTKHTYLKGRYDVITSVAIPLALAASSMFMIGRGVYNMSHGVGKKE

SEQ ID NO: 197632 - protein, 67 aa, Zea mays; identical to SEQ ID NO: 197631
  Clone ID: MRT4577_111823C.1.pep

SEQ ID NO: 197633 - protein, 50 aa, Zea mays
  Clone ID: MRT4577_111824C.1.pep
PTGFFWIKGVFFLNYQWVGAGLNSVPFPGLGSEHCLSWIPQHNNFNHTLR

SEQ ID NO: 197634 - protein, 95 aa, Zea mays
  Clone ID: MRT4577_111825C.1.pep
RGRDQTLKRRKGLFPPKGPKGAPFLFPHMEGCFKLAGPPFPIGPIWFLIWGPVCNKPPVFFWGGKKFFKGDPKPGRGKASGSPKKKKKKKKKPPH

SEQ ID NO: 197635 - protein, 67 aa, Zea mays
  Clone ID: MRT4577_111826C.1.pep
MTEAPFLPREKLFKQQHYFQNLTKHTYLKGRYDVITSVAIPLALAASSMFMIGRGVYNMSHGVGKKE

SEQ ID NO: 197636 - protein, 97 aa, Zea mays
  Clone ID: MRT4577_111827C.1.pep
SIKPPPSGLGASPIGLRGTVNLPLISGVKPLGHVSCDKCGNYKSILSPAALASFSMCFCSVGPATKAPRTVNVNGSPLTKAKKCCLVTFSPKGQPVP

SEQ ID NO: 197637 - protein, 52 aa, Zea mays
  unsure (1)..(52): unsure at all Xaa locations
  Clone ID: MRT4577_111828C.1.pep
ILIPFISLYNLKSNCYNTKNPSPNHLQPSSFIXXYSIICTSTPPKKLTSFQP

SEQ ID NO: 197638 - protein, 248 aa, Zea mays
  unsure (1)..(248): unsure at all Xaa locations
  Clone ID: MRT4577_111829C.1.pep
WVPRGRPGVKWNPVANVAAXDIWTFLRTMDVPVNTLLAQAYVSIVCEXCTKPVLPAQHVREGRWRWEDAKAKECGLHKGYIDNYDQAAAPRFANDNGSAYSPDIFEXSSAVVSLTRTEIENLLLLENLDEPWLLVLYAPWCPFCHAMEVSYMELTKKLATSRPNLANFCSDSXSRIRSRRXLQMQRFPSVLLFTARTGRPIMYPSEKRDCDSLLDFVNMLRGYTTSSVREPSLSVSLYDLMLGFMSLS

SEQ ID NO: 197639 - protein, 85 aa, Zea mays
  Clone ID: MRT4577_11182C.1.pep
CWIQWIYSQPAISCQEYKRRAKFTKKEYIDWLRKEDISMLGLLCLHLSFLEPTDIASVGSQDTLIIPTPSLEPSFLHSSYMEAVN

SEQ ID NO: 197640 - protein, 64 aa, Zea mays
  Clone ID: MRT4577_111830C.1.pep
MKRKKYCSKKKKKKKKKKKKKKKKKKRKKKKKKKKKKKKKLNQKKKKKKKKGLSLGRNHLKGKF

SEQ ID NO: 197641 - protein, 64 aa, Zea mays
  Clone ID: MRT4577_111831C.1.pep
MLGGAKPSTPQIKLGRVQDGPVRFNLDFGQALARVRKGPLKKNLLTEFWFFQNFGRGLFLFGGG

SEQ ID NO: 197642 - protein, 60 aa, Zea mays
  Clone ID: MRT4577_111832C.1.pep
YYSFHVTLIISLCNIVAKLCIFLVPVVIPWLYYFLFLYLCLCPFFEPPMELIQLSKYQFR

SEQ ID NO: 197643 - protein, 103 aa, Zea mays
  Clone ID: MRT4577_111833C.1.pep
FSVAVTIFGGRGHAATWGKKLDAEAYDCNNVVEQELPCGGVLIYQSFAANEEVAVSAGSPRSVFHCFEAETVESHPLVKEGKLANLLAWRAEDSLEEGVVLCE

SEQ ID NO: 197644 - protein, 151 aa, Zea mays
  Clone ID: MRT4577_111834C.1.pep
MLQLALAFALCVLAGGGVRAQPFDYPTAKPSTTWANTDASLPHHVTYADGSVARAALLRLNPAGYGPSYAFGFFCTNHLASPCAEFLLGVAVVYCNSGGLMTSVVAGIPQVVWSANRGSPVGEGAAAELTDAGDLVLRSAQGAVVWSAART

SEQ ID NO: 197645 - protein, 64 aa, Zea mays
  Clone ID: MRT4577_111835C.1.pep
LQGEKDDKIIGVWADDPEYRHYHDIREVFPYRLQENRRFFEDWTRAWSFFFFFFLLGKILLFIF

SEQ ID NO: 197646 - protein, 98 aa, Zea mays
  unsure (1)..(98): unsure at all Xaa locations
  Clone ID: MRT4577_111836C.1.pep
SKQGTAAEDKHEHMLLKIEXRLPRPVRPIVSAITCFKSMCLADILSVPELFSTHTVHLVLAPSGGGTHIGLEVTVLDVGLLHRHSCGGSTSGGASRPT

SEQ ID NO: 197647 - protein, 164 aa, Zea mays
  Clone ID: MRT4577_111837C.1.pep
MADRGVAPCATTYNTLLDGLLKAGHVTNAFRMFRYLQRAGLPVGIVTYNTMINGLCKSGKVGYARMVLKELGRTEHAPNAVTYTTVMKCCFRYGRFEQGLETFLSLLEGGYISDAFPYTTVISALVKKGRMQEANTYCELMIQSGSTLDNACYNTLIHLRCQEG

SEQ ID NO: 197648 - protein, 92 aa, Zea mays
  unsure (1)..(92): unsure at all Xaa locations
  Clone ID: MRT4577_111838C.1.pep
GFWQHLLTVLDTTFDADVTVLAGFYTIMTHTARVQRHCLIDAVLHCVCHIITVSDMIAFSSHIIIYAHAXQCQIHARTIRYRRILLVIYGYS

SEQ ID NO: 197649 - protein, 220 aa, Zea mays
  unsure (1)..(220): unsure at all Xaa locations
  Clone ID: MRT4577_111839C.1.pep
MDGSISSALALLVLALHLAVDGCSAVNFEGSVLLKFQSRVEEDLYGAMVSWSPGDGDPCSWNGVRCADGRVVMLNLKDLSLKGTLGPELGTLSHLRALELSNNFFSGAIPKELSALAMLEILDLSNTTGSGEVPQEIAEMPSLRQLSLSNNCFQWPLIQHSYGNFDQENGFNIYDXGRGNMNQRAENGLESGSSSHENKKDTSNLSARLHSQYEAINPAA

SEQ ID NO: 197650 - protein, 146 aa, Zea mays
  unsure (1)..(146): unsure at all Xaa locations
  Clone ID: MRT4577_111840C.1.pep
AWTFGLIYVLVYVLVYVLGNAKTRGILLDLTDVLEDRKRPNVTSEESXPNSXKGGTVRSELDVPVTVLEAGHFAAACLLHASGGWVTETAHNDEKSTKHSVIVAXADLERFAPADKHSTDVAETDADVPVDIVGNAATGGTTEYTE

SEQ ID NO: 197651 - protein, 78 aa, Zea mays
  Clone ID: MRT4577_111841C.1.pep
FPGGDGRIPVPFYPPVMEDVIFFFWKNASEKVVRGFFSSVVNRPFTPFGKGFLVPSPPGVFPQNSVFRFLGGGFFALS

SEQ ID NO: 197652 - protein, 73 aa, Zea mays
  Clone ID: MRT4577_111842C.1.pep
GLDIVKGTFGVNPQTPGVYGAVKGGVHLAFRVGKFLERGMGGGFLVFTQLGKRGFFSKGFNLGKARVFQVRRF

SEQ ID NO: 197653 - protein, 27 aa, Zea mays
  unsure (1)..(27): unsure at all Xaa locations
  Clone ID: MRT4577_111843C.1.pep
LGSRRTAISRIXSRIRIVKMHKXSREG

SEQ ID NO: 197654 - protein, 109 aa, Zea mays
  Clone ID: MRT4577_111844C.1.pep
LEGYRCFFIKRGMILSAECVTQYGATLTQLGLDLTLTHRTRRMDISQLARPAGSLRCQLTSGFRPDTVLEVTGRGVDAAVVRPQESEIVIRHTYQLRESSSYCRMVLSM

SEQ ID NO: 197655 - protein, 53 aa, Zea mays
  Clone ID: MRT4577_111845C.1.pep
YNWIQFTHSTTLMSNTLAVDIKLSILSHLSSLVGSCSNVTKNLNTHMHYIFLS

SEQ ID NO: 197656 - protein, 74 aa, Zea mays
  Clone ID: MRT4577_111846C.1.pep
NDDSSLCLRIIHSVVSNYKIHCHKGPPSISISRLHRDNKSIELFRVQENLDHYDEKKSFCLVSLLIMMDEGDIL

SEQ ID NO: 197657 - protein, 406 aa, Zea mays
  unsure (1)..(406): unsure at all Xaa locations
  Clone ID: MRT4577_111847C.1.pep
CASLEEEKESLKAKISKLQSNLRMGLEIEQHLQRNARILEKRQALYDGFLRNGLSELQKFYTCQKAEIMKILEEESLRLMKVVAEIQDKLTEICINTEVSDHPADEIQCCDSSCKDVHVTKDISXAHVVRVIILLILTPCRXDESKALAQALQEKMEALMLFSQEQERYLLEKQRDLIVIEELQKNLSQVKDEKVKVLMELTKLKEQYLLLKGSAVKEGHDTGDSSKLIPGHDQQGMLKTMLKRTSLRHWMRKESNTIGHGSSDGNXIQFAKNIQWXARLRVENAMLLEGVGTVEHLTSSVHRLHIVLLKAYDDIKSADPLESTFEALNSLITEANLMKTALNVVLPVSWSGDSSDAIKYEAMCDPSDSPKSKSGKVDPLSSAGMEMVELLILAAEILKESFLVKK

SEQ ID NO: 197658 - protein, 84 aa, Zea mays
  Clone ID: MRT4577_111848C.1.pep
IWPLYRPRPFVESWSPKIISIIPYLSVVYFDFHRMPPFPQSVSFLLYIPRVSVVSRGIDPASASNMHSSTSPAMSSFCSFGAFH

SEQ ID NO: 197659 - protein, 73 aa, Zea mays
  Clone ID: MRT4577_111849C.1.pep
LFTQHRFNILNNTKKAGGRGHFIFDVAPKSNLLAHNAQNNDWVIPHASHLNSQVYNPTFSNRRYNQESYTDYP

SEQ ID NO: 197660 - protein, 722 aa, Zea mays
  unsure (1)..(722): unsure at all Xaa locations
  Clone ID: MRT4577_11184C.1.pep
MDTAFLSPPLARNLVYDEFAVLHPTSYPFHTLRYLRCNPMYSRPLLTIAPASPSRGLIQRVAALPDVDDFFWEKDPTPILDTIDAPIHLKNLSXEELKQLADEVRSEIAFIMSRKCQPCGADRSVVELTIAIHYVFNAPMDKILWDAGQHAYAHKILTGRRSLFHTITQKNGLSGFTSRFESEYDPFGAGHGCNSLSAGLGMAVARDINGRKNRIVTVISNWTTMAGQVYEAMGHAGFLDSNMVVILNDSCHTLLPKADGGAKMSVNAFSSALSKIQSSKGFRRFREAAKGLAKWFGKGMHEFAAKVDEYARGMIGPHGATLFEELGLYYIGPIDGRNIDDLICVLKEVASLDSTGPVLVHVITGTENDTGGIIGSEINAVEEGPSNSSPDLLKFLGTGLSRTYNDCFVEALTAEAENDKRIVVVHGGMGIDRSLRLFQSRFPDRFFDLGIAEQHAVTFSAGLACGGLKPFCIIPSTFLQRAYDQIIEDVDMQKIPVRFAITNAGLVGSEGPTNSGPFDITFMSCLPNMIVMSPSNEDELIDMVATAAMIEDRPICFRYPRGAIVGTSGSVTYGNPFEIGKGEILVEGKEIAFLGYGEVVQRCLIARSLLSNFGIQATVANARFCKPLDIDLIRTLCQQHSFLITVEEGTVGGFGSHVSQFISLDGLLDGRTKWRPIVLPDRYIEHASLAEQLDLAGLTAHHIAATALTLLGRHRDALLLMK

SEQ ID NO: 197661 - protein, 510 aa, Zea mays
  unsure (1)..(510): unsure at all Xaa locations
  Clone ID: MRT4577_111850C.1.pep
MATPNGLARIETNGATKPDNGVCHDDSSAPVRAQTIDELHSLQRKRSAPTTPIKDGAASTFAAALSEEERHRQQLQSISASLASLTRETGPKVVKGDPARRGEAPATGAPPTPQAHHQHHHPAAPTIAVSDSSLKFTHVLYNLSPAELYEQAIKYEKGSFITSTGALATLSGAKTGRSPRDKRVVKDEVAADEHCWSENGVSNIEGGCYAKCIDLSQEKEPKRGILSLHSGCNMGKDGDVALFFGLSGTGKTTLSTDHNRLLIGDDEHCWXNVVFDEHTREVDYADKSVTENTRAAYPIEYIPNAKIPCVGPHPKNVILLACDAFGVLPPVSKLDLAQTMYHFISGYTALVAGTEDGIKEPQATFSACFGAAFIMLHPTKYAAMLAEKMQKYGATGWLVNTGWSGGRYGVGKRIRLPYTRKIIDAIHSGELLTANYQKTEVFGLEIPTEIKGVPSEILDPINTWTDKAAYKETLLRLAGLFKKNFEVFASYKIGDDSNLTDEILAAGPNF

SEQ ID NO: 197662 - protein, 222 aa, Zea mays
  unsure (1)..(222): unsure at all Xaa locations
  Clone ID: MRT4577_111851C.1.pep
MAKALVFLVSGASCGPPKVPLPTGAGLDDNGGGYGYKDVNKPPFNSMGACGNIPIFKDGLGCRPCFKIKCNKPAECSSKPMVVHITDMNYEPIAVYHFDLAGTAFSAIAKKDEEEKPCKAGIVDMQFRRVKCKYGSKITFHLEKGCNPNYLALLVKYVDGDGDXXVVVDVKEKGSDTCEPLKHSWGAIWRKDSDKLLKGPLTVRLIAEGGXNTIYDDVIPAN

SEQ ID NO: 197663 - protein, 229 aa, Zea mays
  Clone ID: MRT4577_111852C.1.pep
MAVNVRTMWSSMRAHVAMAVALVFLVSGAWCGPPKVPPGKNITATYGKDWLDAKATWYGKPTGAGPDDNGGGCGYKDVNKPPFNSMGACGNIPIFKDGLGCGSCFEIKCDKPVECSGKPVVVHITDMNYEPIAAYHFDLAGTAFGAMAKKGEEEKLRKAGIIDMQFRRVKCKYGSKVTFHLEKGCGPNYLALLVKYVDGDGDIVAVDIKEKGSDTYEPLKHSWGAIWRK

SEQ ID NO: 197664 - protein, 122 aa, Zea mays
  unsure (1)..(122): unsure at all Xaa locations
  Clone ID: MRT4577_111853C.1.pep
MTGSWCGPPKVXPGKNITATYGKDWLDAKATWYGKPTGAGPDDNGGGCGYKDVNKPPFNSMGACGNIPIFKDGFPRGSCFETKCHKPWECSSKPVVVHITDMNYXPIAAXYHFDLASTALRA

SEQ ID NO: 197665 - protein, 107 aa, Zea mays
  Clone ID: MRT4577_111854C.1.pep
ELHRNSLRDMPVFAIGMSYSVWVDLQMFFFQHLSASGTPPYISRLLELLTALFFLWPPHLGDSLALGLLEVTTYRPVIFGGALRKSLPTCVSFPGGTICCPDIPRAE

SEQ ID NO: 197666 - protein, 171 aa, Zea mays
  unsure (1)..(171): unsure at all Xaa locations
  Clone ID: MRT4577_111855C.1.pep
MAKALVFLVSGASCGPPKXPPGKIITTTYGKDWLDAKATWYGKPTGAGLDDNGGGYGYKDVNKPPFNSMGACGNIPIFKDGLGCRPCFKIKCNKPAECSSKPMVVHITDMNYEPIAVYHFDLAGTAFSAIAKKDEEEKPCKAGIVDMQFRRVKCKYGSKITFHLEKGCNPN

SEQ ID NO: 197667 - protein, 94 aa, Zea mays
  Clone ID: MRT4577_111856C.1.pep
MQFPVVTAAALVFLVSGAWCGPPKVPPGKNITATYGKDWLDAKATWYGKPTGAGPDDNGGGCGYKDVNKPSFNSTVACGNIPIFKDGLGCGSCL

SEQ ID NO: 197668 - protein, 270 aa, Zea mays
  Clone ID: MRT4577_111857C.1.pep
MAVNVSTMWSSMQAQVAMAMALAFLVSGAWCGPPKVPPGKNITATYGKDWLDAKATWYGKPTGAGPDDNGGGCGYKDVNKPPFNSMGACGNIPIFKDGLGCGSCFEIKCDKPVECSGKPVVVHITDMNYEPIAAYHFDLAGTAFGAMAKNGEEEKLRKAGIIDMQFRRVKCKYGSKVTFHLEKGCGPNYLALLVKYVDGDGDIVAVDVKEKGSDTYEPLKHSWGAIWRKDSDKPLKGPLTVRLTTEGGTKTVYDDVIPANWKANTAYTAK

SEQ ID NO: 197669 - protein, 65 aa, Zea mays
  Clone ID: MRT4577_111858C.1.pep
STYRDPYDHAPHLTLDHKIPPILPSTPPNYLKAIPGLIRNHASTHYDPHYDLPYSNSETNQSWSP

SEQ ID NO: 197670 - protein, 270 aa, Zea mays
  Clone ID: MRT4577_111859C.1.pep
MAVNVSTMWSLMQAQVAMVVALSFLVSGAWCGPPKVPPGKNITATYGKDWLDAKATWYGKPTGAGPDDNGGGCGYKDVNKPPFNSMGACGNIPIFKDGLGCGSCFEIKCDKPVECSGKPVVVHITDMNYEPIAAYHFDLAGTAFGAMAKKGEEEKLRKAGIIDMQFRRVKCKYGSKVTFHLEKGCGPNYLALLVKYVDGDGDIVAVDIKEKGSDTYEPLKHSWGAIWRKDSDKPLKGPLTVRLTTEGGTKTVYDDVIPANWKANTAYTAK

SEQ ID NO: 197671 - protein, 72 aa, Zea mays
  Clone ID: MRT4577_11185C.1.pep
RMHALRHRHEVHDPPLGSGKRHQDVTERKKDACASADDSDSVTVALDREALVPVPTNAFFADYPADGALLRV

SEQ ID NO: 197672 - protein, 69 aa, Zea mays
  Clone ID: MRT4577_111860C.1.pep
DPLSLILLSGLDTCSRNYIISVLALVAITRGGGHGGCEGGSNPGARVAPRGRCLSDAADAYVSRPAGTT

SEQ ID NO: 197673 - protein, 270 aa, Zea mays
  Clone ID: MRT4577_111861C.1.pep
MDVNVRTMWSSMRAQVAMAVVLVFLVSGAWCGPPKVPPGKNITATYGKDWLDAKATWYGKPTGAGPDDNGGGCGYKDVNKPPFNSMGACGNIPIFKDGLGCGSCFEIKCDKPVECSGKPVVVHITDMNYEPIAAYHFDLAGTAFGAMAKKGEEEKLRKAGIIDMQFRRVKCKYDSKVTFHLEKGCGPNYLALLVKYVDGDGDIVAVDVKEKGSDTYEPLKHSWGAIWRKDSDKPLKGPLTVRLTTEGGTKSVYDDVIPANWKANTAYTAK

SEQ ID NO: 197674 - protein, 68 aa, Zea mays
  Clone ID: MRT4577_111862C.1.pep
SLWKFRKGSLTGTAFDPLPLPSGVPVPMCFCGDPCKVDKSEDHDTYRQRYWMCANFAFEPTVVQRYMN

SEQ ID NO: 197675 - protein, 270 aa, Zea mays
  Clone ID: MRT4577_111863C.1.pep
MAVNVRTMWSSMRAQVAMVVALVFLVSGAWCGPPKVPPGKNITATYGKDWLDAKATWYGKPTGAGPDDNGGGCGYKDVNKPPFNSMGACGNIPIFKDGLGCGSCFEIKCDKPVECSGKPVVVHITDMNYEPIAAYHFDLAGTAFGAMAKKGEEEKLRKAGIIDMQFRRVKCKYDSKVTFHLEKGCGPNYLALLVKYVDGDGDIVAVDVKEKGSDTYEPLKHSWGAIWRKDSDKPLKGPLTVRLTTEGGTKSVYDDVIPANWKANTAYTAK

SEQ ID NO: 197676 - protein, 87 aa, Zea mays
  Clone ID: MRT4577_111864C.1.pep
VQAEIFKLRDKLEMALALAEENEAAAIEVRQTAEISKIYAEEKEEEVKILERSVEELEGTVTVLEEVVCNLKEEVRNYQIHKQSEAH

SEQ ID NO: 197677 - protein, 77 aa, Zea mays
  Clone ID: MRT4577_111865C.1.pep
FGSIIPCCGSMSPTVHWRCGWNNGSLVLAIYSLFDLMMQSRSILHQQPVWFPLLMRALVCSNDDDTFPFSAAMLWTA

SEQ ID NO: 197678 - protein, 128 aa, Zea mays
  Clone ID: MRT4577_111866C.1.pep
GWEEFSQNRPFYPKKYSGQVPRWASPKEAPMPSFCRQKLKKTPAPGNFSSGHPGNFTPPPPPVKKKGPFLGNQPPFFYRENLVIFGREMDKPTTFFKRKTKPRLGVWPKKKKKKKKKKKKKKTKKTPT

SEQ ID NO: 197679 - protein, 133 aa, Zea mays
  unsure (1)..(133): unsure at all Xaa locations
  Clone ID: MRT4577_111867C.1.pep
GRVVSGSILNVSDEDKTTALKNKMTITNDKGRLYKEEIENMDHDAEKYKSEDEEHTKKVDAKNLVXNYLYNMRITIKDEKIAFKLTADDKKMIDDAIDPGIIWLDPNHLAMADEFYDTMKELESLWNPIIGKM

SEQ ID NO: 197680 - protein, 79 aa, Zea mays
  Clone ID: MRT4577_111868C.1.pep
PLIRTTFRRLLSLFIPHLNTSTVRSFIPNIDNYLFQHSTLIITHNLHFKDHPHFSTTYNSQIYLPFINQFNPYILLFLS

SEQ ID NO: 197681 - protein, 154 aa, Zea mays
  unsure (1)..(154): unsure at all Xaa locations
  Clone ID: MRT4577_111869C.1.pep
DGFGAIRLEQQMVLVQEVDGTVRAIDAHVTSLSVGDRVAVNPTRPXGAYRYCLXGVPTQCLHMRFCVSTIWMPQVQGAFWRAIESIASQCVIVPIDSDGVAXALRQRYTALLHAVLGAGPVKGERVHRSAFERVDQHRLVDAVNEARFRQAAQL

SEQ ID NO: 197682 - protein, 68 aa, Zea mays
  Clone ID: MRT4577_11186C.1.pep
MDWDCSPGINWQGGPGPPKRFIGLFRAHNKKKKKKKQKKKKKKKKKKKKKKKKKKKKKKKGRLLGNPA

SEQ ID NO: 197683 - protein, 58 aa, Zea mays
  Clone ID: MRT4577_111870C.1.pep
SINVVTRTRLTPANRLTARVFSQSRLSGMLKHFFIKVIHSHEFNYCNSEQCNSKKVSH

SEQ ID NO: 197684 - protein, 74 aa, Zea mays
  Clone ID: MRT4577_111871C.1.pep
AVGPRIACAHAECEPIRDPGVSLTQRSSLPAGHLDPRQGPDNQPAWHELPRNIIPHTRQTVRLQLAMLGIAHHA

SEQ ID NO: 197685 - protein, 185 aa, Zea mays
  unsure (1)..(185): unsure at all Xaa locations
  Clone ID: MRT4577_111872C.1.pep
MGSLTSASTSLIFPQASSSRRRVRVSTLPGIIRTGGAAANVVTKEGRNGHRILMVERSDTGKHESTKTHVNIGTIGHVXHGNTTLSDWLNMVLXSGYREMTTIITTSIDARPEELCRXITINTDTVRVRETRPMHYSXHKDCAHGTXYLXKNMIHXGTAEKDDHILDTAGVYIPMPDTKDDISPR

SEQ ID NO: 197686 - protein, 121 aa, Zea mays
  unsure (1)..(121): unsure at all Xaa locations
  Clone ID: MRT4577_111873C.1.pep
TGPSDASVGLQRFRECLLNHGRWAILAAVCTLSGEWITGLTCQDAGKVELEDGSSYLGQPLPFSISTLICIEVLEIGYIEFHRNAELDPQNRLYPGSSYFDPLGLAADPXKKERLHLADIK

SEQ ID NO: 197687 - protein, 65 aa, Zea mays
  Clone ID: MRT4577_111874C.1.pep
AGLGLQKKKKKKKKKKHPKEPKRAKKNKQNKKEKKRHKREKREKKDEKKKKKGALGPLELRFLSP

SEQ ID NO: 197688 - protein, 130 aa, Zea mays
  Clone ID: MRT4577_111875C.1.pep
KKKKKKKKKKKKKKKKKKKKKKKKKKKKKKKKKKKKKKKKKKKKKKGGAVFKGSKFTSPCLEGKIFFLGPPNLISLAGFLKRGDGKNLGFPKFIAFEENPLFPSWVNDKKAPPIPLSKNLPTLNGKGNPP

SEQ ID NO: 197689 - protein, 130 aa, Zea mays
  Clone ID: MRT4577_111876C.1.pep
QPRADGVQPLPQWPPGGPPFRPGPPFLRGTVVPLKGPSFVLAWSHACSSPIPVFLLGVAYGYAPSVPFKKKAWLPPVQFSRMAYAGSTSSFVVPPRFFFCVCPMTVLLLQCSYSFSPRAPIWFAGGPVRL

SEQ ID NO: 197690 - protein, 75 aa, Zea mays
  Clone ID: MRT4577_111877C.1.pep
GPAPSPLAPTSPVPAYRQHQPSPPATTGLSSLEPRISLFILQFELIPTARYDARVKKKANEPGCCRNPRPRTPST

SEQ ID NO: 197691 - protein, 52 aa, Zea mays
  unsure (1)..(52): unsure at all Xaa locations
  Clone ID: MRT4577_111878C.1.pep
FQGTVTFFFLLLFRLRILLRLSILAPLVIGVGVSQSNNKMFVLLFXXXXKKK

SEQ ID NO: 197692 - protein, 338 aa, Zea mays
  Clone ID: MRT4577_111879C.1.pep
PAGLCLEDPSSAMAINYKIGDALEILPSQNPSAVDAFIERCNLDPDCYITVMSFFATSEREKERLQYFASPEGRSDLYQYNQKESRTVLEVLEDFPSVQMPFEWLVQLTPPLKKRAFSISSSPLAHPNQIHLTVSVVAWVTPFKRTRRGLCSTWLAGLNPNKDNLIPCWIHQGSLPPPRPLVPLVLIGPGTGCAPFRAFVEERAAQAAAEPTAPVLFFFGCRNQENDFLYKDFWLTHAQDEGVLSSKRGGGFFVAFSRDQPQKVYVQHKIKEQSSRLWNLLLSDAVIYIAGSSTKMPADVTAALEEVICKEGGVKQADASKWLRDLERAGRLNIETWS

SEQ ID NO: 197693 - protein, 41 aa, Zea mays
  Clone ID: MRT4577_11187C.1.pep
KGQIISKWRGPSRGRMSFKELMLVINRCVEIYMSVNNNEDE

SEQ ID NO: 197694 - protein, 136 aa, Zea mays
  unsure (1)..(136): unsure at all Xaa locations
  Clone ID: MRT4577_111880C.1.pep
ILVPKTGIGKRRITHTTGLHSTCVCLNTKHHAXRNXTRIHGMKFRGXXRLNSRRNDTPNFSPWYALDRCVWRLALDHXPSXSLSHDPPGVTQSGMHHXGALXCSPPILRFPLVASKVIHSTRPLGFXXRTQRNTRS

SEQ ID NO: 197695 - protein, 47 aa, Zea mays
  Clone ID: MRT4577_111881C.1.pep
VNDWSAFVGMSSTSTEISVIESIFKLNDAQPVNVTSSLRQSLIEAMS

SEQ ID NO: 197696 - protein, 163 aa, Zea mays
  unsure (1)..(163): unsure at all Xaa locations
  Clone ID: MRT4577_111882C.1.pep
MASNTMAPILQGFVGKEXNRPSXTAFGEARXTMRKRAXARAKPAEAYGSPRNGHDRWLYLGPLFGETASYLTVYLGTKXWNTVKVPADQXTLAKNRELDVIQFRWAXLGTLXCINWEXFARYGQKGCEVAXREMAIDTYRXGGLDYLTEPGLIHTQYILGLCA

SEQ ID NO: 197697 - protein, 89 aa, Zea mays
  Clone ID: MRT4577_111883C.1.pep
HWVPRGRPGSSSRGQLLAAAPTTLTLSAPCSCSLMPPSLAPSYGVLLPCSSPAAPSPVMSSPLPPAMDAAGNDTWFGRRSRHGLDLHHP

SEQ ID NO: 197698 - protein, 69 aa, Zea mays
  unsure (1)..(69): unsure at all Xaa locations
  Clone ID: MRT4577_111884C.1.pep
MAPKAEKKPAAKKPAKEEPAGPAEKGPAGKKPKAGKRVPAGKFGGKGSGVDKKGREKGKKSXGTYKNYI

SEQ ID NO: 197699 - protein, 112 aa, Zea mays
  unsure (1)..(112): unsure at all Xaa locations
  Clone ID: MRT4577_111885C.1.pep
VVGCPXACLXPLVVXPLXFPXLRXCXXRGXRVSLLGXXPWXCPPPSAXGXXLXXXXXLXXXCXXXLXXRALXXXWXXXPPFLPPXLXFSXFSXRRPLSLFALAVXGRVGXPG

SEQ ID NO: 197700 - protein, 74 aa, Zea mays
  Clone ID: MRT4577_111886C.1.pep
TPKTGSPRSTDMTGTTKLWSRRPPTTHSMHRSANTGTSSDNRHNKVGGKNHEGVARHHLRTLNGCLVFENCWHA

SEQ ID NO: 197701 - protein, 89 aa, Zea mays
  Clone ID: MRT4577_111887C.1.pep
ANHKRKLCKDSLYQRESRHRVVIFKGECRFKSACDERVSLCRFIRPYDWRMNVIAYCELHVPLCRVMGLSAYSESVLYALQVINRLYYT

SEQ ID NO: 197702 - protein, 289 aa, Zea mays
  unsure (1)..(289): unsure at all Xaa locations
  Clone ID: MRT4577_111888C.1.pep
MFGGGLDIIGGITGSKTRLKGSVVLTRKNALDFNDLGATVMDNVTEFLGRGVTCQLISSTIVYSNNGNRGKVGAEASLEQWITSLPFITVGENKFSVNFDWAVDKLGVPGAIIVKNNHASEFFLKTITLDNVPGHGKVVFVANSWVYPQAKYRYSRVFFANDTYLPSKMPAALKPYRDDELRNLRGDDQQGPYEAHDRVYRYDVYHDLGDSRQILGGSKEFPYPRRCRTGRKLSQTNPDRESRLLPLVQSIYVPRDELFGHLKKSDFLGYSLKXWVGGIIPAIRTYVDL

SEQ ID NO: 197703 - protein, 69 aa, Zea mays
  Clone ID: MRT4577_111889C.1.pep
NCFYMYPARINSSVHTVYPPFGKTVQRLLTYKPENEHQCQSINTNMLCRSSAQKVQVVLLQKLERFLPA

SEQ ID NO: 197704 - protein, 203 aa, Zea mays
  unsure (1)..(203): unsure at all Xaa locations
  Clone ID: MRT4577_11188C.1.pep
KGKKKKKKKKRGKGGRKGKAEKKKEDXEKNGKNNKKKKKKKKRGKRGEKRKKKEAQKKKKRKKKRKKKGTREKKKKRKKGRKKKKGKRKKKREKKKKKKKKKRKKKRXKEKKKKKRKEKKRKKEKQDKAEKREKKGRREKPQEQNHQKERRKRRKKKKEKRKEGPRAEQADEERIQKQKLALXWTTPRSARVGGEAAIKNERG

SEQ ID NO: 197705 - protein, 516 aa, Zea mays
  Clone ID: MRT4577_111890C.1.pep
MAVHLLLAVAVALLLCPGDASVHDYRGLSFANKGNAFILHAGSEGLYAASHANTTAEDDTAAVADAFIRFDKITFRRPEDTNDSVKETSSAKVQVLVFEVEDREMIGGSAYGGQKAICCSSDLAKLGACTEGSVIYRPSQVNPGWPKLFVASFEGSDLIATLPSRTIPITKTGMYNMYFIHCDPSLASLEIEGKTIWKNPTGYLPGRMAPLKNFFGLMSFAFVVLGIYWFYQYMKSWKEVLPLQNCITLVITLGMFEMALWYFEYAEFNETGVRPKGITFWAVTFGTVKRTAAEVIVLIVSMGYGVVAPTLGGLTSKVVMLGGTFFLATEILELVENLGAVNDLSGKARLFLVYPVAILDAAFVIWIFISLAKTIGKLQARRLMAKLDIYRKFATALIISVLVSVGWIGYEIYSKSTDVFNERWQHAWIIPAFWHVLSFLLLCVICYLWAPSQNSMRFSYDASEFFDRKDNISLIRPAPSASKNGWNLSSTPEPKATKDVNTVADFEGDDEENKRE

SEQ ID NO: 197706 - protein, 233 aa, Zea mays
  unsure (1)..(233): unsure at all Xaa locations
  Clone ID: MRT4577_111891C.1.pep
MAARFLLVVAVALLLRPGDASVHEYRGLSFANKGNAFILHAGSEGLYAASHANTTAEDAAAVAEAFIRFDKITFRRSEDTNNSVKETSSAKVQVLVFEIEDREMIGGSAYGGQKAICCTSDLAKLGACTEGSVIYRPSQVNPGWPKLFVASFDGSDLIATLPSRTIPITKTGIYNMYFIHCDPSLASLEIEGKTIWKNPTGYLPGRMAPLKNFFGLMSFAFVXLGIYWFYQYM

SEQ ID NO: 197707 - protein, 46 aa, Zea mays
  Clone ID: MRT4577_111892C.1.pep
SYEARLPWPSATCYLYGMLECAARNSRRSSRHAMDGRTGCGGLIGT

SEQ ID NO: 197708 - protein, 94 aa, Zea mays
  Clone ID: MRT4577_111893C.1.pep
KNGKACRSKCARFFSIEGRYTRLFMGRNQPTKKTVACMKHRLIPHAWLTQRGWWQTPSETGDHNASNQPKLGFLGKRSLLCLGKPGQGATLVIV

SEQ ID NO: 197709 - protein, 53 aa, Zea mays
  Clone ID: MRT4577_111894C.1.pep
ISIPVPHLFKPDHTKPPCHPMIFISRTFERTLNNALSAFGYLFMPFSPPKIIK

SEQ ID NO: 197710 - protein, 95 aa, Zea mays
  unsure (1)..(95): unsure at all Xaa locations
  Clone ID: MRT4577_111895C.1.pep
PPPPGYITLVPAPSSVSPARPPLNFARPAPSYAFLPPLLPNAPAPVSPGCHEHRNVVALGAPPGITPLAFSPPPVKNRHTTPSVLLXXXXLIVCF

SEQ ID NO: 197711 - protein, 736 aa, Zea mays
  unsure (1)..(736): unsure at all Xaa locations
  Clone ID: MRT4577_111896C.1.pep
MGGLLKEEGPAVDVSVEGTLVWLRRPNGSWWPSIVISPQDVPEGCAPPPRCPATPIMLLGRRPDGPTFVDWCNLARCKRVKPFRCGELDFEQRITNALTLAASGNRSSWSYNKGRYARMEGAILQALDIEKDSALGPVTKAYLHAPSCSPSPKVGMPNGQVKDAAPKDPSPAIQPPLPPPRSKRKRKTPYDSEDDTPQGSCRMRDLRDIGSKTVPTMDLANAAAVSAPKYDDLTNAGQAKRIVHSQATAKRKHAGLHQDQPCGIPRKKDRSRPLSELCNGDMWGGSRPNGQKADEHLLGVATCSSSSSGTSTLDTPLDMNNCHRSMAFKTDQAKGTEISCMTRLLSDDSRHGNDFVGTPAAQNIVEPDHLHRYQPCGLAKNPTWKPNKQTNDARKAEKHARKNMKMRTISSVDQENKNRTRDSNDHDHHKPKTGKHKSPRDGVVLLEKRQEKRSLDKNKPAEHDIKMHIAVVPSGMDCVGAFQQQRFKSRCDPEESLESLSNHSNCESGSVSSLVFEKPLQALPPGKNLLGYEICHAAKPIKTLHLNPALYDVELSVLGSSNTGRRVPLVSLMSRWNCKAVVGYPVSVEVSDDVFGCPSPSSEKDIQQAATNSVNGIVLKKDETEGLEXASLHQPEXTSRPRCKSRSRRASEKAVDKLWQPHTKWPASSSRKMRRLSSFGPGQRDGKSAVRKVSGATVACIPLRVVFSRINEALSFSVNENALAGCGTASRLRNTW

SEQ ID NO: 197712 - protein, 61 aa, Zea mays
  Clone ID: MRT4577_111897C.1.pep
LAEQSIDSSLTYHMNQNHPCSCTVASDSLFVCLLVSQSDRQTDRQTEETTLLVITFFSFFL

SEQ ID NO: 197713 - protein, 173 aa, Zea mays
  unsure (1)..(173): unsure at all Xaa locations
  Clone ID: MRT4577_111898C.1.pep
ACMNRLQXIFISILXPPIQKRLKYIQDVESHELFAWILXRTSSEVVPPRAFVVRAFSGCVVGALQCNAPSWKNRTGHSPREFCACELSGAEEAASAAIACPRTERRHGREPEPSSITGGITSSRIDGPNRPSFFSLNKKNMLPVQNIMRGLKSYRYSQVSRTSFPPRSYLLHT

SEQ ID NO: 197714 - protein, 115 aa, Zea mays
  Clone ID: MRT4577_111899C.1.pep
HPKDAILTEGFLREQVHIYQPCGLAKNPTWKPNKQTNDARKAEKHARKNMKMRTISSVDQENKNRTRDSNDHDHHKPKTGKHKSPRDGVVLLQKRQEKRSLDKNKPAEHDIKMHI

SEQ ID NO: 197715 - protein, 56 aa, Zea mays
  Clone ID: MRT4577_11189C.1.pep
TTRAQKTKLLLSTLANKNWAVFIKKPEPTHTSIQPHTYTIPTPNNKSLPVFLQLTY

SEQ ID NO: 197716 - protein, 57 aa, Zea mays
  Clone ID: MRT4577_1118C.1.pep
LLDLRLLSVIKHFCCCWSSMLSLIFIKSLKVYHDVLTSLASDINAIGQLFIKGVKIN

SEQ ID NO: 197717 - protein, 259 aa, Zea mays
  unsure (1)..(259): unsure at all Xaa locations
  Clone ID: MRT4577_111900C.1.pep
MKKKNRPDPTAPPRLTPPRGEREPAFCALRAAAVPPPVQAERSGCRSGGGIGIGAPAPPQMGGLLKEEGPAVDVSVEGTLVWLRRPNGSWWPSIVISPQDVPEGCPXPPRCPATPIMLLGRRPDGXLRSVNLLLTPQVLELWSAASYSKPNEHLLALXSDWCNLARCKRVKPFRCGELDFEQRITNALTLAASGNRSSWSYNKGRYARMEGAILQALDIEKDSALGPVTKAYLHAPSCSPSPKVGMPNGQVKDAAPKDP

SEQ ID NO: 197718 - protein, 97 aa, Zea mays
  unsure (1)..(97): unsure at all Xaa locations
  Clone ID: MRT4577_111901C.1.pep
AYRXSSYVLSHTIVGFPSLIVLSFAFALTTFFAVGLAGGADGFFFFVAIVLASFWAGSGFATFLSGVVTNVMLGFPVVVSTLAYFLLFSGFFINRDR

SEQ ID NO: 197719 - protein, 59 aa, Zea mays
  unsure (1)..(59): unsure at all Xaa locations
  Clone ID: MRT4577_111902C.1.pep
STDNLETGSSSTSLWPTQTDGLLHQGFPTNFNQQQMFKDALPDVGIXKMDPAYNALFGI

SEQ ID NO: 197720 - protein, 135 aa, Zea mays
  unsure (1)..(135): unsure at all Xaa locations
  Clone ID: MRT4577_111903C.1.pep
GQKHQGTQKTTREANPTRGDKASNEKTDSAGQKKEKQTETGTDRTKTGKRXKHAGRGAKTSHTXGETEDTPDEDHKKGQPTGQSKTGDPRPTERQAKHNQXDRTEEEHGDARDHAGTNAKAPEEADQKRKTTTKG

SEQ ID NO: 197721 - protein, 45 aa, Zea mays
  Clone ID: MRT4577_111904C.1.pep
VANTHNIKGAFCDWTHNFQLIFWPIGLLILPRILSLAIAQPDSYY

SEQ ID NO: 197722 - protein, 82 aa, Zea mays
  Clone ID: MRT4577_111905C.1.pep
MVLAVDLLNPSPAAEARKHKLKTLVPAPRSFFMDVKCPGCFTITTVFSHANTVVVCQGCSQVLCQPTGGKARLTEGCSFRRK

SEQ ID NO: 197723 - protein, 92 aa, Zea mays
  Clone ID: MRT4577_111906C.1.pep
KSPFGDFFFFSHIGGFFFKIFAPYFGIQDPPKKVSPPPPKKGGRGVPPQKMKALAFLLSGKGVRIFFPFVFGGPILEVFQVIWLKMDPPFLF

SEQ ID NO: 197724 - protein, 77 aa, Zea mays
  Clone ID: MRT4577_111907C.1.pep
GIFGYPNEDVVSKDFVGDFRSSIFYSKAGFGLSFFFIKLLFWYDNQWGSSNRVLDLIAPMAFVRAPPKLLCPYSFFP

SEQ ID NO: 197725 - protein, 74 aa, Zea mays
  Clone ID: MRT4577_111908C.1.pep
QPLLPIFNKSSLLHSLALDAMGSASYSHCDSKPFSQLSAASVYHFLPFSCIAALIFSCIIHSSPFSYHSASYLV

SEQ ID NO: 197726 - protein, 80 aa, Zea mays
  Clone ID: MRT4577_111909C.1.pep
TLQATADFRQKPSPRLFFWHQYEKSLNAQIKTLSMREGNLWKNQIPRRKTPLNYKPRAARFEMNKKFFFAFTPCVAKKTV

SEQ ID NO: 197727 - protein, 91 aa, Zea mays
  unsure (1)..(91): unsure at all Xaa locations
  Clone ID: MRT4577_11190C.1.pep
FTLGDIAATIRLVGPACLAPVIDTADGIVDRTGGHXECTYDLSXGQVTRRVDTEYGQRSTVKRDTIGAILRACQLPLLIVVVGVGDXSWDM

SEQ ID NO: 197728 - protein, 110 aa, Zea mays
  unsure (1)..(110): unsure at all Xaa locations
  Clone ID: MRT4577_111910C.1.pep
MDMRGVLFTTLIPSVPAILDRFIDAVIKIAGEKVGLTIKRFDFAYXLILASIEGSWFGSCXLDRMIWDTIIYKXILPLLVGRERFVXCGGAPLSCDTHRSMNICLGVPFV

SEQ ID NO: 197729 - protein, 255 aa, Zea mays
  Clone ID: MRT4577_111911C.1.pep
MTSARLFTCCCCSRDRPSPTTRMRASSSSSLLLLLAAAAVGVLLQARPSECARAFFVFGDSLVDNGNNNYLMTTARADSPPYGIDYPTHRPTGRFSNGKNIPDIISEHLGAEPTLPYLSPELRGQKLLVGANFASAGVGILNDTGFQFVDIIRMSRQLHYFGEYQGKLSALVGAARARQLVRRSLVLITLGGNDFVNNYYLVPFSLRSRQFALPEYVGYIVSEYKKILIRLYAMGCRRVLVTGTGPLGCAPAILA

SEQ ID NO: 197730 - protein, 203 aa, Zea mays
  unsure (1)..(203): unsure at all Xaa locations
  Clone ID: MRT4577_111912C.1.pep
MASFSDVEALPETGEVDHQAKECEAETAVTEENLATLQEQHDDKAPVPYHQEVFAPEHAGEAPAPEEHGDEKDLQVAEPKAAADDQESTRDRLKRHRREMAGRVWVPETWGQEKLLKDWVDCAVFDRPMVPMGLLTARRALIAECCTRRPDRAASSSSSXQQLQPAPGAERLLLIGCSPLLQTSASHQRARLNQQAFFYFLLK

SEQ ID NO: 197731 - protein, 222 aa, Zea mays
  unsure (1)..(222): unsure at all Xaa locations
  Clone ID: MRT4577_111913C.1.pep
MGGEAEPDNAVLFVGVSLVLGIASRHLLRGTRVPYTGALLVLGVALGSLEYGTQHGLGKLGAGIRIWANINPDLLLAVFLPALLFESSFSMEVHQIKRCMAQMVLLAGPGVLISTVLLGAAVKLTFPYNWSWKTSLLLGGLLSATDPVAVVALLKELGASKKLSTIIEGESLMNDGTAIVAYQLFYRMVLGRTFDAGSIIKFFVXVSLGAVALGLAFWIMSI

SEQ ID NO: 197732 - protein, 247 aa, Zea mays
  Clone ID: MRT4577_111914C.1.pep
LGTSTPAGSGISWKFSPALELPGARPSQRRPQARGPLLPSPSLLGFHPGSRCSLALLPAQRPWLLCWPRGRLLLLACARLASCVTAAGHLQLQLGFSHGAPIPSPHLLHARLARPCFLLHLAPPVFPWPPMALAQSGRRRQGRSWHLPYVQLDAHLSAQSSSLASRVDLPTRHTLLGSVLNRASCTPSARPAEVSSMDDAWTSPSRPSPARPITLCSDRASLLAGTCVFSSQAAPSTIRVAVAHHGN

SEQ ID NO: 197733 - protein, 196 aa, Zea mays
  unsure (1)..(196): unsure at all Xaa locations
  Clone ID: MRT4577_111915C.1.pep
RVTLLVATSVAEEGXDIRQCNVVIRFDLAKTVLAYIQSRGRARKPGSDYILMLERGNMSHEAFLRNARNSEETLRKEAIERTDLSHLDGTSMLSPVDISPDSMYQVESTGAVVSLNSAVGLVHFYCSQLPSDRYSILRPEFIMQKHEKPGGSTEYSCKLQLPCNAPFEKLEGPICSSIRLAQQAACLAACKKLHEM

SEQ ID NO: 197734 - protein, 218 aa, Zea mays
  unsure (1)..(218): unsure at all Xaa locations
  Clone ID: MRT4577_111916C.1.pep
MFKEMIVHRSXNVLLTTYEYLMNKHDRPKLSKIQWHYIIIDEGHRIKNASCKLNADLKLYRSSHRILLTGTPLQNNLEELWALLNFLLPNIFNSSEDFSQWFNKPFESNGDNSPDEALLSEEENLLIINRLHQVLRPFVLRRLKHKVENELPEKIERLVRCEASAYQKLLMTRVEENLGGIGAVKVRFVHNSVMELXNIXHHPYLSQLHXERDEGYLP

SEQ ID NO: 197735 - protein, 38 aa, Zea mays
  unsure (1)..(38): unsure at all Xaa locations
  Clone ID: MRT4577_111917C.1.pep
NGNSSLFHNVMNINSILIIQSIKLMLDPIPTDCAXSDX

SEQ ID NO: 197736 - protein, 139 aa, Zea mays
  unsure (1)..(139): unsure at all Xaa locations
  Clone ID: MRT4577_111918C.1.pep
MAFLLFSSPALLPGGMGKPHISCAQTPHPAFAHNQPPFSELPEPQKQRHSVQAQPQQAAAAARPKHAGVADSTDWIASSXTLRSGIGAALAWAVFLSVDDESEQRKTRSEVAHQQANTKDVEQEHXVVLPNGIRYYQML

SEQ ID NO: 197737 - protein, 45 aa, Zea mays
  Clone ID: MRT4577_111919C.1.pep
SPHPKSFVSKKKKKKKKKKKKKKKKKTKKKKKKKKKKKKKKKPQT

SEQ ID NO: 197738 - protein, 174 aa, Zea mays
  Clone ID: MRT4577_11191C.1.pep
MKLEVMPKQRVLEAEQREEAMEMSGLDLWKHEKPPRICSLPPPLPAPPACDEAALVPPLNFAMVDDGIFRSGFPETANFRFLKSLNLRSIVYLCPEPYPETNTEFLEKNGIRLHQFGIEGRKVRKTWFQRNPLLLRGWLAIVHGGVELLLEGLKYGLLSVTSMMYGLFAPSRRC

SEQ ID NO: 197739 - protein, 53 aa, Zea mays
  unsure (1)..(53): unsure at all Xaa locations
  Clone ID: MRT4577_111920C.1.pep
LLAFLYACGWYAVAAARYGQPPELHAVRNRHTSAVELEXRQGDYAGPMEKCAI

SEQ ID NO: 197740 - protein, 122 aa, Zea mays
  unsure (1)..(122): unsure at all Xaa locations
  Clone ID: MRT4577_111921C.1.pep
GPTHAGGXKXASFSFYNAAXDEGAAGKADRXTPDTQEEERDTDETPERHREKSNRDGDASXDXGANNRXNGKPAGADARQXXETXRSQXQXHGXTGTDGDXGRGKDRDAKRXNXTGXEATAA

SEQ ID NO: 197741 - protein, 126 aa, Zea mays
  Clone ID: MRT4577_111922C.1.pep
MANRVTVASVIAAVGIVTVIGTMATVTSADDNDGNMLSSVKVSTVCAFTRYPEKCEQSLKHVVSDTSSPEDVFRDALNVALDEVSTAFQRSAHIGKDAQDKLSRNAMDVCKKLLDDATEDLRALAR

SEQ ID NO: 197742 - protein, 79 aa, Zea mays
  Clone ID: MRT4577_111923C.1.pep
EWIDRELEAKQRHKLYRPTWGTGPHYHHLTKRRTLYLAHVTRSPYRAVHATATGIATTHCHTHRDGEKPPRSRFSLTKR

SEQ ID NO: 197743 - protein, 78 aa, Zea mays
  Clone ID: MRT4577_111924C.1.pep
GHENVVKLIEAVKLEESYIIIMEYCSKGDLLHHAQTKLRLSEAEALPFFHQMVNALDHTHEKGYIHRDIKLENMFLDD

SEQ ID NO: 197744 - protein, 237 aa, Zea mays
  Clone ID: MRT4577_111925C.1.pep
APSPSSPISWPELALLSPMTRAGAQLGLRFFLFALGIQRPAPAPSAIPSLLGRHLPWPAAAPWCSSPSSDCARLPAPWSRQDPCRARPCAHVFLHAASSNRGVPSSLQLAGRVSPSRSDPAVNVQSCVLFPQLGSRQPPFSNLCLGRHRGVLVDRLVVDLADVVEPSNFVLPCSISSNHESWTLDKIKQGHCASLIKYSVEDFNQRSSLFRASSRNPKDRMKTKLAARYSPSARQIA

SEQ ID NO: 197745 - protein, 56 aa, Zea mays
  Clone ID: MRT4577_111926C.1.pep
LPRPRSTGWARASCSGSAALRVIHHIDQVFEIIWTLSAAEPEQDGLAQLVGLGAGV

SEQ ID NO: 197746 - protein, 245 aa, Zea mays
  Clone ID: MRT4577_111927C.1.pep
MAMGATVRAAAADAVVTFLWVLCASALGASTAAVTSYLGVQEGAGHYALLVTTSLLSVLLFTFDLLCGALGGASFNPTDFAASYAAGLDSPSLFSVALRFPAQAAGAVGGALAISELMPAQYKHTLAGPSLKVDPHTGALAEGVLTFVITLTVLWVIVKGPRNVILKTLLLSTSIVSVILAGAEYTGPSMNPANAFGWAYVNNWHNTWEQLYVYWICPFIGAMLAGWIFRVVFLPPAPKPKTKKA

SEQ ID NO: 197747 - protein, 47 aa, Zea mays
  unsure (1)..(47): unsure at all Xaa locations
  Clone ID: MRT4577_111928C.1.pep
ELKKQRELASATKEKEKKKREETKAPATARVQTKLYSXXGKGKGKGK

SEQ ID NO: 197748 - protein, 82 aa, Zea mays
  unsure (1)..(82): unsure at all Xaa locations
  Clone ID: MRT4577_111929C.1.pep
MVRLAFGSVGECFRVRSIEAYVAEFIATVVFVFGGVGXSRIGFRQVTSGGAVDPAGLVASRCAHAVAVFVGVSVAANRSGGQ

SEQ ID NO: 197749 - protein, 61 aa, Zea mays
  Clone ID: MRT4577_11192C.1.pep
KRKRSMKDGFHFDNFAIMPVSCLNILFFIYFLGMMPCKVSQVTVSASSNCTVTFSYVKYKC

SEQ ID NO: 197750 - protein, 93 aa, Zea mays
  Clone ID: MRT4577_111930C.1.pep
CSSATMTDDPCLHPLAASDPRLFLAVHWFPATMYPCTFCAVLCCVAPATVLQFFTPKSYNGKDVPRGVSACIFLCICSVQKGWKKQKNFSSTA

SEQ ID NO: 197751 - protein, 292 aa, Zea mays
  Clone ID: MRT4577_111931C.1.pep
MKQWRDDFDRLLSMAHSTSTRSRPRSSRCQNEASASVRSPSVRGAQTNDLRAELNRRRAGEDAREELCARFVANFASAYQQHGVEAHLHAVRQEPRETLRKFISRFTKVRGTIPRIFDASIIMTFQQGVRDEKMLEKLATHDVETVPMLFALADKCARAAEGRAWHSAPQTGVAQSRGSGAIPWDVVAAATGGRGDHNKRPRPQRGCSGPCPVHPNDCHSAVECREIIDLAKRVNERREQSSKDDSPPRRRPSKEKVDDGEVATVERDLGYQSPEGDLKEVFAEGSYSGGNN

SEQ ID NO: 197752 - protein, 128 aa, Zea mays
  Clone ID: MRT4577_111932C.1.pep
EQVERPSSEELLADVSLGLGKVEPHKTEPALAALVSIQQHGFKQAENGNTEPKSMDNANGDDDPISRLQLADGTAISEAAVNAKFLVEHEEGYIPHLAALVIEKQFHKMDTVQSFLTEDGNLVLRSRD

SEQ ID NO: 197753 - protein, 77 aa, Zea mays
  unsure (1)..(77): unsure at all Xaa locations
  Clone ID: MRT4577_111933C.1.pep
HVLWPNGRPGCSFTGVGAFXDNGPIRPTGNALTRSEYSWNKQAYMLHLESPAGVGFSYSTDPASSEGAGDSMTARDN

SEQ ID NO: 197754 - protein, 100 aa, Zea mays
  unsure (1)..(100): unsure at all Xaa locations
  Clone ID: MRT4577_111934C.1.pep
MPVARSWVCRKTYVTPRRPFEKSRLDQELKLIGEYGLRNKREVWRVKFTLAKIRKAARELLTLDEKDPRRLFEGNALLRRLVRIGXVLDEGKMKLDYILG

SEQ ID NO: 197755 - protein, 330 aa, Zea mays
  Clone ID: MRT4577_111935C.1.pep
MIATSLSLLIPGCKLPFRHNNHCTSRFGSPLPTLHISHPDLHSSPNHTRSAYIAPSDLERKFLSVHPMSAIYMSQLSTALPLMEGDHQDHHHHHQGHFQAFTLPKETPILFPFVISNSSASEGSLSYGSAADHHLLRQRHQAMLEPQHMIGGSSTATGNSVFSTPFPTVESIRDDMIEPASYDPYDMGKLQVGGSMDACSWTPAAAKMRITRKATADPSAGKKPRRRAQAGYDDTMSGQPNLGVIRVCSDCNTTKTPLWRSGPCGPKSLCNACGIRQRKARRAMMAAASGSVSAVPTDSGKASPSNAAVAAAAAHPKVKKEKRVDVDRSL

SEQ ID NO: 197756 - protein, 34 aa, Zea mays
  Clone ID: MRT4577_111936C.1.pep
QDPNDTVLSWNDDIQGLRALSGRFSMNYVRMIYL

SEQ ID NO: 197757 - protein, 53 aa, Zea mays
  Clone ID: MRT4577_111937C.1.pep
REAQGLYLYWTGQSPICRVDLRFLSFLAMLAFECSIFKSTVPLVVGSKMYDFM

SEQ ID NO: 197758 - protein, 333 aa, Zea mays
  unsure (1)..(333): unsure at all Xaa locations
  Clone ID: MRT4577_111938C.1.pep
CYGFSGIKLHYFGPNPVYPAHIFQRRFRMQRPLFLRILRGVQQVDXDFFTVRCDATGLAGLGPLQKVSAALRVLAYGLPTDAVDEYIQIGQTTARDCLIRFCHAIISCYSQRYLRIPNRNDVARILRVNADRGFPGMLGSIDCMHWEWRNCPTVWRGQFCGRNSRPTMILEAVASYDLWIWHAFFGMPGSNNDLNVLHRSPIFDPLHNDAMPPVHYTINGTQFNFGYYLADGIYLNWPTFVKAIRHPFEEKKIHFTMMQESARKDIERTFGVLQSRRAVLRGPAYGWVRNHLTEMMIACIIMHNMIVEDEGEGAENVDFVGATPPPDLSTAIP

SEQ ID NO: 197759 - protein, 119 aa, Zea mays
  Clone ID: MRT4577_111939C.1.pep
VRCRCHSARRRRARLTCLCEGRRPMHRHLLHRIHSNAEIHEPPQSDSASFNTRDALRYCCFTCGNVDTVNMLRAELPNDEAPLLRGHSDRTYRRMQKPVLVPTTYVEYYELTILLPLGA

SEQ ID NO: 197760 - protein, 127 aa, Zea mays
  Clone ID: MRT4577_11193C.1.pep
MSSVEIPLRGASAMLVMNGSFTFVDPVQPAQMRGPGGKKRDRCGDLLLADDSEAAGWSSAILDRSLALRRRRGPSPSSFHRGCLVVTEAQNSRDQETAPAVVAEEILDRQGSEKEPTVEELVYWTVI

SEQ ID NO: 197761 - protein, 78 aa, Zea mays
  Clone ID: MRT4577_111940C.1.pep
NSFTEISTGKPGKLDQRGIGWDMQGPLGGEPHPQTGQNGAQHEHGDFYGGALNGFPGKKKGAPHKKDGLPAQWAWEPG

SEQ ID NO: 197762 - protein, 97 aa, Zea mays
  Clone ID: MRT4577_111941C.1.pep
EPGHAIPGLGLIHSVSGTNLLYMLHVFSPRLRRQSRCHPQCEVEPRLCFRSGGELPLICMIPSPLLAHHVCLPSSSSLCTGARACSVVKPSKLKNEG

SEQ ID NO: 197763 - protein, 85 aa, Zea mays
  Clone ID: MRT4577_111942C.1.pep
GCPWYRSAVARPTRLRKLSRNLGRGEGEGQLGVVTKLQRWHTAPGQTGLGDGKGLLRPENQNSSSHAMDTSSSSRAGERLHKTKP

SEQ ID NO: 197764 - protein, 79 aa, Zea mays
  Clone ID: MRT4577_111943C.1.pep
MNRAAAAEALSLPRLAAPELNPGALALLLLVRPATCWLGSRPCHRHPIFGQIPLMVQCTGFKLIHGHPRPEGTDILSPS

SEQ ID NO: 197765 - protein, 57 aa, Zea mays
  Clone ID: MRT4577_111944C.1.pep
KKIKKKKKKKNKKKKLKVYMDVHFELSKIEISSLKAITVLLDDLIQFECSSFQNDND

SEQ ID NO: 197766 - protein, 35 aa, Zea mays
  Clone ID: MRT4577_111945C.1.pep
SLRAFKLRPTVSQDCVLGTFTEVDVIRSYDAGSVE

SEQ ID NO: 197767 - protein, 91 aa, Zea mays
  Clone ID: MRT4577_111946C.1.pep
RSFWPRFKNPFPNPPACKWLVVQKTRRPFNKQVSRKPCPLMNVCFFKGVEVKCYPLDIWCGVSDPFVFGEDNNNKACVKKKKNKPKKKKKG

SEQ ID NO: 197768 - protein, 128 aa, Zea mays
  unsure (1)..(128): unsure at all Xaa locations
  Clone ID: MRT4577_111947C.1.pep
PRPELSQHISTAGISAXATRALEIXXRGXMLLATLDGAPGRFSQEGGEAESFLVASAGAGVRPEXPDRAQRAFQPDPXSEXVKEFVRRGVFGTHGFAELMGSLVGNEGSGRADYFLVGKDWPSYIECP

SEQ ID NO: 197769 - protein, 70 aa, Zea mays
  Clone ID: MRT4577_111948C.1.pep
PRSVRCLIFVRSFSLHALSRFCPHGLSALFVAGSGYSERFHHILCILLRGSHISPRLPSAIIKTCFLVVM

SEQ ID NO: 197770 - protein, 61 aa, Zea mays
  Clone ID: MRT4577_111949C.1.pep
RAPPLTSLLSVRTDPKVPALLPRRRKAGGALLTQPIVPTRVTQFTRPHLDRYTCLKPSWRR

SEQ ID NO: 197771 - protein, 106 aa, Zea mays
  Clone ID: MRT4577_11194C.1.pep
NHKAFRVPMNFVNHCKNTRCFIRMDKMIHAWEKTIFLIRTGQAPHGPLLLDALDLCGMKHIGGHYLYQGQVVVIVETWIDWCDWASSHIERCGTGYIMCHYRTAGP

SEQ ID NO: 197772 - protein, 179 aa, Zea mays
  Clone ID: MRT4577_111950C.1.pep
RAASTNILLGQNLQAKIADFGLSKTYLSDTQTHISVTPAGTAGYMDPEYYLTGRLSESSDVFSFGGVLLEGATGESPTSPGQGHITQRVKQKIATGNVGSIADSRLGSAYDISSMWKVIDTAVMCTADSTAQRPTMATVVIQLKESLALEETREKGSSNRVSRGSDVETMASTLGPFAR

SEQ ID NO: 197773 - protein, 62 aa, Zea mays
  Clone ID: MRT4577_111951C.1.pep
QLIYVIKAKSRTVEDRFLYADTVFSKSTCSTCVVSFRPPTPPAAPRRAPRGRPRRGGGTTGA

SEQ ID NO: 197774 - protein, 278 aa, Zea mays
  Clone ID: MRT4577_111952C.1.pep
METDRWACLAGGASVVVVNRDLPPGFGYSRTSPQGEHTSHSSRWQKKQRTNVRTLATHVHTVWCKDISHGQGWGSCEWSTATSGRHGACTWMSDDWGFRDEWRRSRCREGDSESMMSYGIMGVTTTPEIGHHRQPWVRTTTLQEWMEYQKAVSYYAKALTFPTKSLSAFAGLAYTYHLMDDFEAAINYYHKALWLKPDDQFCTDMLTYALESICQITARRKPGREIGSVRGRFVPATYTMEKLGRDRSCKIRLFRGIFANPNRNAFTEIEHRVRQEIG

SEQ ID NO: 197775 - protein, 76 aa, Zea mays
  Clone ID: MRT4577_111953C.1.pep
TTKTSGCPSVQYNQLYADKLNYNGWSTSKSSIKEAVFIMFSKTLLFFFRKEAVHNRTLTSLTVSIEQECSKFLVRL

SEQ ID NO: 197776 - protein, 105 aa, Zea mays
  Clone ID: MRT4577_111954C.1.pep
GIRPPVASGSERPTRVEAICLLSQCHRGRRGPAETRTTAACRRLCLLWGHGHGPAGGGTLPRPRTSVHGRMSRGCPALSGQRGEHGPPSIRLWSLLLTCILTTTC

SEQ ID NO: 197777 - protein, 86 aa, Zea mays
  Clone ID: MRT4577_111955C.1.pep
PTRPRSLSLSLSSGTGTHARVNTGAISCSLPPSFSSARARSRAHTYGACEHRHGGGRRRRRRARPWSGGRATWTGGTGRRPGAGTR

SEQ ID NO: 197778 - protein, 246 aa, Zea mays
  Clone ID: MRT4577_111956C.1.pep
MAAATATVTFSPSPPSFLNSHIPRGHRPASTTTIAFARRFRGVKPSPDRSRGKVDQVAHPDDGFGALEAELWRLRRLVELKIHRLGTEADAAYRDLRSAVREVSGDRVVLTFRRSSLRYLTGALLFLLACAIAARLLLGMVLRAWQRRGLRRGLWGEGGRAVVRRRDRSLGGKEVVVAVSSPPKEAARTSRVAEPAKEVWRGYSQAKLPDWWPNVGATVMEPWQRWRSGQEWQTDWSEVNACKFSF

SEQ ID NO: 197779 - protein, 649 aa, Zea mays
  Clone ID: MRT4577_111957C.1.pep
EAGGRGCSRVLGRDSSRGGHGTSRRLRARARGASPRGCRVYARTHAATISASPARTPGARTWIKKESGCAGTSNRSACPSGTRRNGGQAELKRHAKRCGPREPRSARATLFTRRDSVVTHRAFCGALGAETGRVLAPPAPPSPRPPDLEADEKGADLEADENVDKDNGKQGEEENEDSAVAEVEEPQRVEVVPEEPQRIPSPPPLPKEPPCRPSPPPLPQEQLSPPPSPNEPPCCHPSPPPLPKEPQRLPFPPEQHAVVVALVPNVDEPEVVAVPSVTAELEDETDQDEDACFLEADQYKDSELEVSNLLDKDTPMLPCFLASPSEAIGTDGSGTTTCGAGGSVSNSIAPSTTTNTFAGLFASATTSTTSHSTSLRDLIGVDPTFLCLAIGAPSLFPQTGASNSGTFALLPPAPHMSATALLQKATEAGATQSSSSFLKEFGLASSSSSSSSQPSSKQNHHQQREMEPSLQQWHPSSTQQTEMERRHRNHHQQREMESSSQQWHRHHRNDRQMGPESYRSNQQMQMESSSHQWLQHRSSEQMVGRRHHLERGESRGMLLSGGLGLGLAYESGKSGLPDLMTGPSPSPSPLLGPKPATLDFLGLGIGGTMVGSTGLPALVAGGELDMGSSAQVPAPWDDAQRKANGRTIL

SEQ ID NO: 197780 - protein, 100 aa, Zea mays
  Clone ID: MRT4577_111958C.1.pep
ILWIEKIIWSTGKIRQFDERLTRRKLSMRFNLFSKFLQNSYVTGHYIGIARDLSKPNPFSPRGYSYRVSILYWGLDTTWGIDWFPALESVSLPANFVFSL

SEQ ID NO: 197781 - protein, 101 aa, Zea mays
  Clone ID: MRT4577_111959C.1.pep
MERGESRGMLLSGGLGLGLAYESGKSGLPDLMTGPSPSPSPLLGPKPATLDFLGLGIGGTMVGSTGLPALVAGGELDMGSSAQVPAPWDDAQRKANGRTIL

SEQ ID NO: 197782 - protein, 160 aa, Zea mays
  Clone ID: MRT4577_11195C.1.pep
PEDRRLLASHAVWCVPVPRVGLPYFLHGCHCHVGPVKRFRRPWAMTLPGLGEPNRSVGKPSRSLSGYGCPLSPGAQAAAYPFCCRQQVLPSSANGRLLHKLPRMRCAKKAVTTSSPFPAPTCSATGATLPRWSPRVPITAITYLANLSVSYILYFIIPIP

SEQ ID NO: 197783 - protein, 217 aa, Zea mays
  unsure (1)..(217): unsure at all Xaa locations
  Clone ID: MRT4577_111960C.1.pep
MAAQEHEHEHEHEKQQAKTSTTSSLPSSSERSSSSAPNNLREGGXAAPAPIPRTAHPLRSPAPSLVSSASPLAEAAGAGVESDEEIRRVPELGGASASASASSGAGKEDGXAGGGRGGAGAPSGGREXKRGRAPGDKEQNRLKRLLRNRVSAQQARERKKAYLTELEVRAKDLELRNAELEQRVSTLQNENNTLRQILKNTTAHASKRSGGGGGKGG

SEQ ID NO: 197784 - protein, 149 aa, Zea mays
  Clone ID: MRT4577_111961C.1.pep
SVSSSNSAVTLGTATTSGSSTFGTNATTACCSGGNGSRCGSFGSGGGDGWQHGGSFGDGGGDSCSCGSGGGDGRHGGSFGNGGGDGMRCGSSGTTSTRRGSSTTATAESSFSSSPSLSLSLSTFSSASSKSATFSSASKSGGRGDPRAE

SEQ ID NO: 197785 - protein, 66 aa, Zea mays
  Clone ID: MRT4577_111962C.1.pep
ATTIPKKTLKRSSFHVQYVNLLRIQCSRNMVVSVHGASSMKKLCGNGIQNVYCKILMFRRWACWNY

SEQ ID NO: 197786 - protein, 196 aa, Zea mays
  unsure (1)..(196): unsure at all Xaa locations
  Clone ID: MRT4577_111963C.1.pep
MAAQEQEQEQEKQQAKTSTTSSLPSSSERSSSSARNNLTEGGAESDEEIRRVPEMGGASASASSGAGADERPKGEDGKQXAGGGGGAAXAGGKKRGRTAGDKEQNRLKRLLRNRVSAQQARERKKAYLTELEAKAKGLELRNAELEQRVSTLQNENNTLRQILKNTTAHASKRSGGGGGGGGKGGDGGKKHHLAKS

SEQ ID NO: 197787 - protein, 97 aa, Zea mays
  Clone ID: MRT4577_111964C.1.pep
LEPPFPSPSIRPATLVELTLGCNVALVGWDTREEDQRLTETWLCLQPALVGQPRAWLPIMWPHPIKGRRRNAGLEAPGARWQEGDSFLSCVYSVQFL

SEQ ID NO: 197788 - protein, 157 aa, Zea mays
  Clone ID: MRT4577_111965C.1.pep
WSDELRRCMRSGPSRRLTLTAAFSQTPSTRPPFRRHSTAHGPAQTVNNAPRRVQPFTPLPQQGLTVHGVFVTVPRATPFPAAAALPCSLSPLRARLREAIGTHNRACAMTLPQWRSQYFWREERSRRRFSCAGGRRSSSEQARKHDWLETGMGNKNE

SEQ ID NO: 197789 - protein, 140 aa, Zea mays
  Clone ID: MRT4577_111966C.1.pep
MGTSAQESPLWKRIDDAEYYLVSGSFDQAVLTALSVADEIHMASLESASDQDELLEMLESAGMVLVQALKELRRASEMFAQLKMMFGSVPSVPARVFLTGATIQMAEGSISDLRPIFEEYLANWRYTDDEGYVFYGGNDS

SEQ ID NO: 197790 - protein, 178 aa, Zea mays
  unsure (1)..(178): unsure at all Xaa locations
  Clone ID: MRT4577_111967C.1.pep
TGYRPIWAGSNHPDLLTVTSRGDRLRGVRSDHPHMRGGAHNFFFSAADHACPARLIESXRAPPPQGVXIGGCSAFLLTDSQKKNARLRQARYTSLVGGTAVVHPVGVGGGTIMEHLATLRPGTVEWPRCCSLSVGLVLLSSLAEIGARCRGGRAWTGLLGCLAFCRCVLPGAPCCGGP

SEQ ID NO: 197791 - protein, 45 aa, Zea mays
  Clone ID: MRT4577_111968C.1.pep
FSKLQYSASTHGLLTVNTTCCVSHIDVTHSTPQRYDVVILCYLEG

SEQ ID NO: 197792 - protein, 59 aa, Zea mays
  unsure (1)..(59): unsure at all Xaa locations
  Clone ID: MRT4577_111969C.1.pep
DVEKTPFPSSFERLPLGSQDEGFPDFDIHGHLSTKALWYRLTNLVLCPXLLPFHLSAET

SEQ ID NO: 197793 - protein, 98 aa, Zea mays
  Clone ID: MRT4577_11196C.1.pep
HTLKPMVAFHLADGRDAQESAKAYMTSSSYMSVNKHKAHDVTSVEHGNAALQEIKSYTELYLAVLLSLYCICRIPPIQHVKGLAMQKLYRTDADAARK

SEQ ID NO: 197794 - protein, 248 aa, Zea mays
  Clone ID: MRT4577_111970C.1.pep
MALSTPASILVDENQQINRGKRADGPRAKGLKPSENPGNQGRRALKDLSNFSKGTGLKDTSTLKEKSQQKPRSNVANTIKGNALKDKPILKEKSTQEQRSKALKNPMKILVDEEIKMCHEWAKDGVEGFHSTQNNSQKLDKDLLDKRVKKKVAAVNSALCGWPDTVFDSLMYPSMEVAELFYEQNVLEVEPEILPDISWRLSSSVDGKAKIAEDRLTDDELDQYHSLENNPIIFELRDEPAIPQLGVY

SEQ ID NO: 197795 - protein, 69 aa, Zea mays
  Clone ID: MRT4577_111971C.1.pep
HIIDHRYWCLCCGLLNAFSCVLKSNLLLREFNCYSELLMLYQIQRLQHLISAPSAQQTHQICHMKRSNL

SEQ ID NO: 197796 - protein, 126 aa, Zea mays
  Clone ID: MRT4577_111972C.1.pep
DEELVRCHESQNNSQKLDKDLLDKRVKKKVAAVNSALCGWPDTIFDSLMYPSMEVAELFYEQNVLEVEPEILPDISWRLSSSVDGKAKIADDRLTDDELDQYHSLENNPIIFELRDEPAIPQLGVY

SEQ ID NO: 197797 - protein, 83 aa, Zea mays
  Clone ID: MRT4577_111973C.1.pep
YLQANQGVVVVVVRIKVPAVQALLLRLIGCWLAMDLPLRCGVVVGRGTSRERSRRNPAAGRPVHLSCKQQYLLVKYSYHSVSA

SEQ ID NO: 197798 - protein, 591 aa, Zea mays
  unsure (1)..(591): unsure at all Xaa locations
  Clone ID: MRT4577_111974C.1.pep
PAGHGPPAWPINLALHNNSFTGALPPQIGSLSNLEVLSLXHNGLTGGIPPEIGRLQKLKLLFLYENQMSGTIPDELTNCTSLEEVDFFGNHFHGPIPERIGNLRNLTVLQLRQNDLSGPIPASLGECRSLQALALADNRLTGSLPETFGQLAELSVITLYNNSLAGPLPESLFQLKNLTVINFSHNQFTDSIVPLLGSTSLAVLALTDNSFSGVIPAVVARSRNMVRLQLGGNRLTGAIPAELGNLTRLSMLDLSLNKLSSDIPAELSNCVQLAHLKLDGNSLTGTVPAWLGSLRSLGELDLSWNALTGGIPPELGNCSDLLKLSLSDNHLTGSIPPEIGRLTSLNVLNLNKNSLTGAIPPALHQCDKLYELRLSENSLEGPIPPELGQLSELQVILDLCRNRLSGKIPASLGGLVKLERLNLSSNRLDGQIPSSLLQLTSLHRLNLSDNHLSGAVPAGLSGFPAASFVGNELCAAPLQPCGPRSPATARRLSGTEVVMIVAGIALVSAVVCVALLYTMLRVWSNWRAVSVSNSDGEESAHGGGGGKWVDGKYRKVGSSVSWSSEQKHNSGSETTSVLHGKSTEAAGAGKS

SEQ ID NO: 197799 - protein, 125 aa, Zea mays
  unsure (1)..(125): unsure at all Xaa locations
  Clone ID: MRT4577_111975C.1.pep
AAHSGVHVLVRRGSHRIFSSPLNHIYLHKQSSSEQRRNFFFRRQRDISHSIVLAAAVSSADPGPKHIKKPDYVTTGIVPDWGDSIVVQSEDQIQGLHQACQLARHVLLXAGKSLKGDMTTVEIDA

SEQ ID NO: 197800 - protein, 212 aa, Zea mays
  Clone ID: MRT4577_111976C.1.pep
MPSATRQDQILLDPWDPSSTEHVNRIYEQRVQCGWDKQRVDGWKTKQTSGEKCIFWITLRPENPQTRESLELHFDAFPAEKEPLVDTADSLRAKPRTPSHTKFYPVGHISLDHTNEKMGDFVLDLPKKGVYWIKTFYISKALRSKGIGRAAMDLVESMAIDEPLCAKTLAIDTAQKDTQKRIYREKGVELASTNQEWYERRGYRVIHTEPDF

SEQ ID NO: 197801 - protein, 92 aa, Zea mays
  Clone ID: MRT4577_111977C.1.pep
VIALINYTNAILYTPAPQKHGTIPTGTGALTCHPHNHPEFALQHLPIQTLLITDTMIHHADIYTNQTLLRLLKYFKKNIITLHIISSMHVSN

SEQ ID NO: 197802 - protein, 54 aa, Zea mays
  Clone ID: MRT4577_111978C.1.pep
INQIKMVSQGISGIPSDTRIITWDWITQYCSVFHSCCCRPKKLVMIHHLYIDRC

SEQ ID NO: 197803 - protein, 164 aa, Zea mays
  unsure (1)..(164): unsure at all Xaa locations
  Clone ID: MRT4577_111979C.1.pep
PEKKKKKKKKKKKKKKKKKKKKKKKKKTRAPQPTGTNPGGGHGGPEPPPPKRKGNEVDGGEVGREQGXPTRQSPSTSPPGERPTRPPRAGVSTARGGPTPSSGAGRPAAPPEKGXGQGQRPREPPRXPKRSPGPPPTGKQSSRQRTPSPPDSPPTPETGSPGEN

SEQ ID NO: 197804 - protein, 50 aa, Zea mays
  Clone ID: MRT4577_11197C.1.pep
SKYEFVSTVRCMSRFNACRDTSNGRYVKFSECTSQRQISTGRIECIRASH

SEQ ID NO: 197805 - protein, 55 aa, Zea mays
  Clone ID: MRT4577_111980C.1.pep
VQYCFLYQMIFRRLLCTVLSSNIYVRTIIKWTLLRIGSTKSTDSYGANDDDEDDL

SEQ ID NO: 197806 - protein, 89 aa, Zea mays
  Clone ID: MRT4577_111981C.1.pep
FRRGSFMINRGAYGAHPLDLGRTMGIGQACEKRRSIQDCRNHSKRKPTVESVGRLMSHPTHNKGAYRPDWGGVNRRVSSREMRRATRRN

SEQ ID NO: 197807 - protein, 85 aa, Zea mays
  Clone ID: MRT4577_111982C.1.pep
QGKKKPGKATGIKFLFKKTLKGAFGEKKNIQKPPLGRVSGPPYPIRGYVEGGFLKIKGAGWGGAYEIRGGKKELLHSYLAPGSGG

SEQ ID NO: 197808 - protein, 114 aa, Zea mays
  unsure (1)..(114): unsure at all Xaa locations
  Clone ID: MRT4577_111983C.1.pep
AFGAKSNNLALEVVPGHTARDTLLGARLAWTNAGGDCRLVLRVRRHNRTRVVGPYLXHIKRRVDEMEARRRELLVHANAVGGAPRWGGAPLTHPDTLDTVGKDPDLKARVRADL

SEQ ID NO: 197809 - protein, 39 aa, Zea mays
  Clone ID: MRT4577_111984C.1.pep
DRAAIYRASHACAHVRSQAEVREGARPNRAEVLRAQSDI

SEQ ID NO: 197810 - protein, 66 aa, Zea mays
  Clone ID: MRT4577_111985C.1.pep
HYSQDSFSFRRWMPANWGILLISGMNTALSEINLLMNTTCQNTVLIHIANDIMRLTIAVLEIYHVE

SEQ ID NO: 197811 - protein, 34 aa, Zea mays
  Clone ID: MRT4577_111986C.1.pep
YRQTPFYLISQERTATNILKNSSRLLFSHLCTDF

SEQ ID NO: 197812 - protein, 130 aa, Zea mays
  Clone ID: MRT4577_111987C.1.pep
VRYARSTPRPPRVRPASAQRPRTRGRTRGGALRPGRAAVRGGSQARADARARRRQPAAPRSSPRRSSCCSVLVVVADCLCSWSTRRQRLAAGFPKLVALIFYWANPRYCLGITRPYWALRPWCVAYWSGG

SEQ ID NO: 197813 - protein, 41 aa, Zea mays
  unsure (1)..(41): unsure at all Xaa locations
  Clone ID: MRT4577_111988C.1.pep
YKLIQRKVHXTXIEIFTVSSQFRLSYPTESSTIASSLSLPS

SEQ ID NO: 197814 - protein, 79 aa, Zea mays
  Clone ID: MRT4577_111989C.1.pep
RLVPKTKKPKTPGGLREKNPYFPSKGIVIKKNLGGLGHIFILKFGGRALKRFGGGGLPLFLGKKNCLLVSFWIHFRRIP

SEQ ID NO: 197815 - protein, 54 aa, Zea mays
  Clone ID: MRT4577_11198C.1.pep
MFSNIKTKGLFVLAFLFLKKKKTQKKKKKKKNKKKKKKKKKKKKKKRKKKKKKR

SEQ ID NO: 197816 - protein, 54 aa, Zea mays
  Clone ID: MRT4577_111990C.1.pep
DYTSHQGWDVSILTLLPLSLLQPITVFQYGAFVGSLDQDTTAPPPRALVPGYLV

SEQ ID NO: 197817 - protein, 64 aa, Zea mays
  Clone ID: MRT4577_111991C.1.pep
SLAIAGFLFVSSCQVIQFKVSCHTKSALIAFNGRAIICDLVIDALHQELVQHEEHVNDATVGLR

SEQ ID NO: 197818 - protein, 230 aa, Zea mays
  Clone ID: MRT4577_111992C.1.pep
MGPSSLEDQEDRGAAFTHMDEGDLFATPSTTIRLSEENPGSKFSDATEGDGGIVNNTSRDCGERYPSNQEPARRPPPMGQQRYDDPGPCWRQEPSSGQTKEQFVAEMLARPSSAAGSGPGRPQQARPRQQRQEDASSPSQGSRPQSSAASDKPVAQQQPDANSVRAKLELAKNAKLEAAKRKLQEGYQEFDNAKKQRSIQMVDPQNLPKQANGTRNSNLAASQGMAAAGI

SEQ ID NO: 197819 - protein, 104 aa, Zea mays
  Clone ID: MRT4577_111993C.1.pep
PALGTDLAGAGVLGLEELLDRRLFCNDRPAALVLSLGSLNCGATVCCSSASGVEGALRSGRGVRVLLVRPGAGFKAAHRVPRESHCYPWDAPLAFSSTRLGLLS

SEQ ID NO: 197820 - protein, 133 aa, Zea mays
  Clone ID: MRT4577_111994C.1.pep
FIRSSRRLRPAALSWGGGVLLTLLPGPRLLRSPGARPRRTRGPSEHLRDELLLRLPAARFLPPARPWIVVPLLAHRRRPSSCLLVRWVPLAAIPAGVVHDASIPLRCVGELGSWVFLRRYEMGCSVRSRHGHI

SEQ ID NO: 197821 - protein, 74 aa, Zea mays
  Clone ID: MRT4577_111995C.1.pep
LCLLLRSSSSWQSFSSPSCSWPPLLPLLFHCKVLCAGVDFLLHINMEDFIITFNDITANQVPLDPYFDHTLHIP

SEQ ID NO: 197822 - protein, 506 aa, Zea mays
  Clone ID: MRT4577_111996C.1.pep
MAASAKGRLVPVLAVAAALAAVLLYRAPFSKSLGGEGCSLLPHDHFWVASDRVVTLGRVGPAAVEVKGGLINAIAVGDYRSFVLRRPLLDYGDAVIMPGLIDVHAHMDEPGRAEWEGFSNGTRAAAAGGITTLVDMPLNSFPSTVSEETLKLKLEAARDKLYVDVGFWGGLVPENAFNPSALEGLLKAGVLGLKSFMCPSGINDFPMTNSTHIEEGLVTLAKYKRPLLIHAERIPEAEDHDLQDDELDPRSYMTYLKSRPPSWEEAAIRDLQRAMKDTELGGRSEGAHIHIVHLSDAKTSLELMKDAKRSGASLSIETCPHYLAFSSEEVPDGDTRFKCSPPIRDDTNRENLWKALLDGHIDMLSSDHSPSTPDLKLMEEGDFLRAWGGISSLQFVLPVTWSYGRKYGITLNQLASWWSERPAKLAGQKNKGAILPGYHADIVVWKPETEFQLNNNHAIYHKHQNISAYLGKQLSGKVLSTFVRGNLVFAEDKHANAACGVPILAK

SEQ ID NO: 197823 - protein, 523 aa, Zea mays
  Clone ID: MRT4577_111997C.1.pep
LSRGLACSFAWDAVPGYLFPTLTSISWVCWVFSRSVTAQQLGSGMSGLGLGAFTLDWSTVSSFLFSPLISPFFATANIFFGYVFFVYVIMPAAYWGFDLYSAKTFPIFSSHLFMSNGSSYDVQSIVNNRFELDLDAYGKNGKVSLSVFFALSYGFSFATIAATITHVGLFYGKEIYYRFRSSQKEKPDIHTKLMERYSEIPAWWFYSLMALSIVVSLLLCTVLKREVQLPWWGLIFACGMAFVFTLPISIITATTNQTPGLNVITEYAMGLIMPGSPIAVVCFKVYGYMSMAQAVAFLSDFKLGHYMKIPPKSMFLVQFVGTIVAGTVNIGTAWWLLGSIDGICSDSLPPDSPWTCPNDRVFFDASVIWGLVGPRRIFGPDGNYGALNWFFLIGAAGPVIVYALHRTFPGQRWIPLINLPVLFGATAYMPPATAVNYNSWLLVGTVFNFFVFRYRKKWWTRYNYILSAALDAGVAFMGVVLYFSLTMQNKSIDWWGTAGEHCPLARCPTAKGVDLGDGVCPVF

SEQ ID NO: 197824 - protein, 72 aa, Zea mays
  Clone ID: MRT4577_111998C.1.pep
VCANSARYMDIIMSHMVKCLKPIFTIVAWWPLSRFFIRSNMTPFRTCGQADMNRSWIFKTVHATAHASVNEW

SEQ ID NO: 197825 - protein, 125 aa, Zea mays
  Clone ID: MRT4577_111999C.1.pep
MSFNKSSGSRGWGQGAAAGGDELVLRGSISKKWTFLLCFGSFCIGLLFTNRMWTVPEPKEIIRRSTLEVEKMSLVDGDCAPKSAGDARDVPGEVPRTQDVSQTLDRTISNLEMELASAKATQESM

SEQ ID NO: 197826 - protein, 74 aa, Zea mays
  Clone ID: MRT4577_11199C.1.pep
IGSYFRVHGPIVPIGDFSCVDLFSVPLWLSSSQIPGFTSFMVVTLTISYILLCIHVLPLFHTSLLTRSLYLLAC

SEQ ID NO: 197827 - protein, 36 aa, Zea mays
  Clone ID: MRT4577_1119C.1.pep
GLPRGSCFGWYIPVFTWNKNLSCNSKSTTYWPSCLI

SEQ ID NO: 197828 - protein, 828 aa, Zea mays
  unsure (1)..(828): unsure at all Xaa locations
  Clone ID: MRT4577_111C.1.pep
TTAAGHLLRPPPASPAPITSPARLRPSPRPPTATAAREGVSGSGHLLRPACLPDTSATRQALPDARVGRRRPPADARGDLARSAPSRCEVMEVLCIGTADTKFEELLFLAAQLRSALAASGSDSKVQVSIVDVSTTEKTTANDFKDIIFIPRNTILSCHLGVDQHNLPDNRGEAIALMSKALQSFLKKRYDSGMLVGAVGLGGSGGTALIAPALRLLPLGVPKLIVSTVASGHTTPYVETSDLVLFPSVVDICGIXNSVSRVILSNAAAAFAGMVHGILSASNESDETSTKPTVGITMFGVTTPCVNAVKDRLNKEGYETLIFHATGVGGKAMEDLVRGGFIQGVLDVTTTEVADHIVGGIMACDETRFDAIIENKIPLVLSVGALDMVNFGARDTIPLAFADRNIHVHNEQVSLMRTTVEENKKFARFIADKINKSSSKVTVCLPQKGISAIDAPGMPFYDPEATSTLLGELNTLIQRTDIREVKLFPYHINDPEFANALVDAFLSMDVQASSSAQPKQDLNIGKSCSGQKISDSSIIWRTPVDFPDAKPEILRRTRSILHKLKEQISDGTPVIGAGAGTGISAKFEEAGGVDLIVLYNSGRFRMAGRGSLAGLLPFGDANDIVLQMANEVLPVVKGVPVLAGVCATDPFRRMEYFLRQLETIGFCGVQNFPTVGLFDGNFRQNLEETGMGYSMEVEMISMAHRMGFLTTPYAFNPDEAAAMAKAGAHIVVAHMGLTTAGSIGAMTAATLDDSVLRVQAIADAAFGVNPDIIVLCHGGPISGPLEAEFVLKNTKRVHGFYGASSMERLPVEQAITNTMREYKRISLK

SEQ ID NO: 197829 - protein, 83 aa, Zea mays
  Clone ID: MRT4577_112000C.1.pep
AKPGARAQTKRPAGRILVVAANMPNENYEGPKGERIHVNGTCTWLMHNIKDGGNPGDSTITHVTLKGIILRISEHKRYRRRQR

SEQ ID NO: 197830 - protein, 190 aa, Zea mays
  unsure (1)..(190): unsure at all Xaa locations
  Clone ID: MRT4577_112001C.1.pep
MPTGDFDSKPSWADQVEEEGEDDKCVTSELLKGIPLATGDTSPEPELLPGAPLPPPKEVINGNIKTVTEYKIDEDGKKFKIVRTFRIETRKASKAVARRKNWKKFGNSEFDPPGPNVATTTVSDDVSMTFITSKEDLNCQEEEDPMNKLKGQKIVSCRICKGDHWTTRCPYXDTLGPMQKELAEQLGLST

SEQ ID NO: 197831 - protein, 74 aa, Zea mays
  unsure (1)..(74): unsure at all Xaa locations
  Clone ID: MRT4577_112002C.1.pep
MWRDPLELKQIENKINRQSTLVKRLNGLLKNAYEHFELCNTXVSLNILFNRRKLYKFCIRQNITKTLDRTKKTL

SEQ ID NO: 197832 - protein, 89 aa, Zea mays
  unsure (1)..(89): unsure at all Xaa locations
  Clone ID: MRT4577_112003C.1.pep
PIDAGRYVCFGLRYDWSELGAFKTFYDPANRLRVLWGWVFETDSXRSDVSNVWASLQGIPRTVLLDTMTGINLLQWPVYDVETLSTSCT

SEQ ID NO: 197833 - protein, 37 aa, Zea mays
  Clone ID: MRT4577_112004C.1.pep
GGAILFFFHLNCAFRGLVKTTLRIMGRRDTLLLNHRG

SEQ ID NO: 197834 - protein, 52 aa, Zea mays
  Clone ID: MRT4577_112005C.1.pep
NKTLVLLVSPVKKNYSVSPFESPFGKNIIIFLLTHLFFPMCPTFFPQTNAFF

SEQ ID NO: 197835 - protein, 404 aa, Zea mays
  unsure (1)..(404): unsure at all Xaa locations
  Clone ID: MRT4577_112006C.1.pep
LDYYSQFDWDAKGISLFGPVSLSSLPDLVTDPPAIHDDGFLLXEKFLRECADAFSVPPRNSEKDAQLFSRKFLNIVDPLKQSNNLGRSVSRGNFYRIRSAFDFGARKLGKILQRPVCYTVDEVNQFFGNTLKRNRIGFRQDVLVSSSDDGGLTYHATNGSLSLGLDCKRVNNCSAPLYSNPCGDFSYRFNNINISDSINHDDSIKQKQCNSIAGEKAIKSISDGLLDSEGSSHASTDDSVSVRNSGDFYEALTTISPSGRRYAPHQFYQLENGKVVVRHNTNMSHHGMPTKQFTSRSYHSFEDAKYHNEFSGSFLPPIEHNAYSSAGFVNFLATSNSACTHENSQLGGANNNILKDLTGDFETYFHNLQYAQGFQQDNPVNPFSSGRPAPPSLQCQDTCPSNGR

SEQ ID NO: 197836 - protein, 75 aa, Zea mays
  Clone ID: MRT4577_112007C.1.pep
VYNQRWQTTRPGALQRARMQISGHHFDADERACRRRYASGLLLVTCICDSSLHRMTLGKQRRNACRQANSPGLMN

SEQ ID NO: 197837 - protein, 69 aa, Zea mays
  Clone ID: MRT4577_112008C.1.pep
GPVMTVASPSVSPATMAWRASVRAPTSSPVSPPPGATASPTGPGGFFPVGPAGPRNMLGPALSTLVPMV

SEQ ID NO: 197838 - protein, 96 aa, Zea mays
  Clone ID: MRT4577_112009C.1.pep
RQVQEQLNSTHVEKEEVAAKLAEHERTVEHLTEVHSRGIELQSAAESRNAEIEAQLREALEAAGQKEAELRNLNEKLVALESEIESLTDVNQALKQ

SEQ ID NO: 197839 - protein, 91 aa, Zea mays
  Clone ID: MRT4577_11200C.1.pep
KLFLLPLLPSPVPTWHMWESGRPEANDVLAVVSSVTASLVSDHRVTWVKSLGLTVKARIMKVTRQRWSEGAHNFLKFSGEGKVGMMSFKAT

SEQ ID NO: 197840 - protein, 252 aa, Zea mays
  Clone ID: MRT4577_112010C.1.pep
MDSIREDEIDLDMENVDKSSIKKKKRKLELNKAILDDDRFKEMFENKDFEIDEESKEYLALHPQAATKEPRLIEEHFDSVSEDDQQSDGNISDTLAESDSDDVMHNSKRIRLYEVKDEHHAEAFLNSVSLSNEDAVPLEDRIAALERKQNSKALDAVKYGPGGSREISFFSKSRRRHKEESSSDDEPKGVKKRAVQPLGLKQGKAEFYMFGGNRGRGRGGGGRGGGGRGRGGGGGGKGRGRGGGRGRGRGRG

SEQ ID NO: 197841 - protein, 101 aa, Zea mays
  Clone ID: MRT4577_112011C.1.pep
LAHPSNIIASYVHHKVKPLPLPPPYLSDVEVSGVVGVGVIVWRRAVDVVTVSDDAYQEFRVKYEERKPGSLLDIRSSLGWCAHASPQRRPATDALGRPDAW

SEQ ID NO: 197842 - protein, 76 aa, Zea mays
  unsure (1)..(76): unsure at all Xaa locations
  Clone ID: MRT4577_112012C.1.pep
VPLGPAGXKKKKKKKKKKKKKKKKKKKKKKKKKKKKKKKKKKKKKKRVGDPFPKNWGPLTRGGGFFFAPPPGPGGA

SEQ ID NO: 197843 - protein, 83 aa, Zea mays
  Clone ID: MRT4577_112013C.1.pep
LMTPPRALRSSCTTTMIMSTAPDLPTRGTANRTTPTTRRTFYACAQPPSRLDSSLPRHRRLVEPERQTRAARDRAAHRGCRLN

SEQ ID NO: 197844 - protein, 106 aa, Zea mays
  Clone ID: MRT4577_112014C.1.pep
GSNFFPTLQGCQGPPKVLGVFICPLGFRLLKDMCFKTDVVLPRPMVKPCLSFFVPRQDFSLSPKGFPLEIFVLKRACFGYPPPLRFFLALVKFFSGCFFVGGPVIF

SEQ ID NO: 197845 - protein, 253 aa, Zea mays
  Clone ID: MRT4577_112015C.1.pep
PRPVKKKKGRNISSETSQKVKPVISCPESDGCARASINGWEWRNWARNATPSERARVRGYHVRTILSASNDNVWKNSQAKVSSARTNRVKLRNLLAAAEGSELLKITQMKARKKRLRFQRSKIHDWGLVALESIEAEDFVIEYVGQLIHRRVSDIRESQYEKSGIGSSYLFRLDDDFVVDATKRGGLARFINHSCEPNCYTKVITVDGQKKIFIYAKRRIYAGEEITYNYKFPLEEKKIPCHCGSRRCRGSMN

SEQ ID NO: 197846 - protein, 602 aa, Zea mays
  unsure (1)..(602): unsure at all Xaa locations
  Clone ID: MRT4577_112016C.1.pep
MRRRPVLPAHHDDVDKGGGKPASSRLCFLATLCAMFWVLIFYFHFAVVSNDPAASAAQXAPRLALPAPTPAFPNATARPASXPLAFASEPPPPPPPPPAARPKEAEDEVAAGVRREEAPPEVAAPYPFERALRTAENQSDPCGGRYIYVHDLPPRFNEDMLRDCEKLSVWTNMCRFMSNDGLGPPLGNEEGVFSDTGWYGTNQFSVDVIFGNRMKQYECLTKDSSVAAAVFVPFYAGFDVARYLWGYNITTRDAASLDLVEWLMNKPEWSVMGGRDHFLVAGRITWDFRRLTEEEADWGSKLLFLPAAKNMSMLVVESSPWNSNDFGIPYPTYFHPAKDAEVFLWQDRMRSLERPWLFSFAGAPRPGDPMSIRGQLIDQCRSSSLCKLLECDLGESKCHSPSTIMKMFQSSMFCLQPQGDSYTRRSAFDSMLAGCVPVFFHPGSAYVQYTWHLPKNYTTYSVFIPEDDIRSGNASIEERLKSIHPDVVKQMREEVINLIPKVIYADPRSKLETLKDAFDVSIEAIINKVTKLRRDIIAGQEDKDFIEENSWKYSLLDDGQQAIGPHKWDPFFSKPKDKGGDSSGSSAEAAKNSWKSEQRGQD

SEQ ID NO: 197847 - protein, 76 aa, Zea mays
  Clone ID: MRT4577_112017C.1.pep
CTVNDPGIRTWPTLPWAHTTNLRDRITELPYKTYSCKTYQLTSHLHYYLPKKVKLYAESLSIACLVEYADRKAHSH

SEQ ID NO: 197848 - protein, 83 aa, Zea mays
  unsure (1)..(83): unsure at all Xaa locations
  Clone ID: MRT4577_112018C.1.pep
RFFLTGLTVVAVKSTPYGTIRSFCKSWYRGINKFXDVLVWFQIEWLVDWHTHVKAQLHADEETYRQTSHEHALIIXNHRRAID

SEQ ID NO: 197849 - protein, 47 aa, Zea mays
  Clone ID: MRT4577_112019C.1.pep
NLGENGHWLTSCSRFNSKSPSQEQFSSPLAHKSLRAVLNDRRTDCYR

SEQ ID NO: 197850 - protein, 209 aa, Zea mays
  Clone ID: MRT4577_11201C.1.pep
MKFTTAAAVASMAAISSALPQASTPFPRPEAGDVFRLMSLRTGTEIQYGDVQAKDGNLVINSPDQNNKTCAINGDRENVTSGINYASFTLDQDDGSVYIYTFNPPLQLYVDRSGMGQGNVRYSTGVQPIGKNQERGPFKINDEGDLVFAAGGLTGDVGFQACPGAVGGGWKIWLSGVDKPAGSEGCTPFTMKALKETETKKCLYSSAPA

SEQ ID NO: 197851 - protein, 98 aa, Zea mays
  Clone ID: MRT4577_112020C.1.pep
PPRIVHFPTSNGVKIHMSLSRLHKNSTSALFIFLESQTTHLVTNYRESIQNRPMQLPHNFPTIICTPETGHTYVIWSGGTSIIVAQELRPLLGTGNAN

SEQ ID NO: 197852 - protein, 99 aa, Zea mays
  Clone ID: MRT4577_112021C.1.pep
HLDEEKFEIFFLSIFSSIQFLSFSLFTHFLSSDTEGNAVTCNCGSEGLPRNLCLSIICPSPFEQTECLTSKMVGLVIHDLLNRDFGFCCLQLSLDQCSI

SEQ ID NO: 197853 - protein, 91 aa, Zea mays
  Clone ID: MRT4577_112022C.1.pep
PCLGDESLDQRVCSGDQPTFLFLHRVNLVTQFDTTSLLKCRGKACLGYLSLDSTHVGATTIGCVVFGRWCAGCIGGKLEGGAWWLVAWKMV

SEQ ID NO: 197854 - protein, 148 aa, Zea mays
  unsure (1)..(148): unsure at all Xaa locations
  Clone ID: MRT4577_112023C.1.pep
MQNHAYSRLGISGTGAVVPSPPSSPRRXGGRRASAKGGWSARASADAGWGXGAVRRVARAVLAALLRRQAVFLFAPLLYVAAMLLYMGSISLDSVPRIIPRPAPGSMYRSPQLYARLRADMDADNATDALAAVWRHAYRGGVWRPCIS

SEQ ID NO: 197855 - protein, 38 aa, Zea mays
  Clone ID: MRT4577_112024C.1.pep
GWTANMDRIMNAQSLRDNSMAGYMSSNKTTEINPENPI

SEQ ID NO: 197856 - protein, 589 aa, Zea mays
  unsure (1)..(589): unsure at all Xaa locations
  Clone ID: MRT4577_112025C.1.pep
MQNHAYSRLGISGTGAVVPSPPSSPRRAWGRRASAKGGWSARASADAGWGGGAVRRVARAVLAALLRRQAVFLFAPLLYVAAMLLYMGSISLDSVPRIIPRPAPGSMYRSPQLYARLRADMDADNATDAWFCLIGCQISGVPYYCLTHLTLAAVWRHAYRGGVWRPCISNNTNGLPESNGYIYIEANGGLNQQRTSICNAVAVAGFLNATLVIPNFHYHSIWRDPSKFSDIYDEDYFIERLKNDVRVIDKVPEFIMERFGHNLSNAFNFKIKAWSPIQFYEDIVLPKLIEERLIRISPFANRLSFDAPPAVQRLRCLANFEALKFSKPITTISNTLISRMREKSAENNGKYVAVHLRFEEDMVAFSCCVFDGGDNEKKELDAAREKGWRGKFTRPGRVIRPGAIRMNGKCPLTPLEVGLMLRGMGFNNNTAIYLASGRIYKAEKNMSPLLEMFPLLQTKETLALDEELAPFKNFSSRMAAIDYSVCVHSEVFVTTQGGNFPHFLIGHRRYLYGGHAKTIKPDKRRLAILFDSPRIGWKSLKRQLFNMRAHSDVKGIEIKRANESVYTFPCPDCMCRSNKXRNSKSIMAR

SEQ ID NO: 197857 - protein, 66 aa, Zea mays
  unsure (1)..(66): unsure at all Xaa locations
  Clone ID: MRT4577_112026C.1.pep
MEQLEAGCQQPEGPILCINNCGFFGSAATMNMCSSXHKEMITKQEQAQLAASSIDSIVNCGYGGKR

SEQ ID NO: 197858 - protein, 77 aa, Zea mays
  unsure (1)..(77): unsure at all Xaa locations
  Clone ID: MRT4577_112027C.1.pep
DAGRPRMSGPAKKDFDGALLLFSLSXRNVDTVGEAILKVKKAFFRFDLIILFNXTHNISYFYPFIFLTSPHICFFFL

SEQ ID NO: 197859 - protein, 196 aa, Zea mays
  unsure (1)..(196): unsure at all Xaa locations
  Clone ID: MRT4577_112028C.1.pep
MVIYLNAPPPDLVCQDGPNDRLKFELSSMHPWRATMXDXAHSRLLSFDNDTASLAVFDGHGRKVVAEFCAKYLHLEGLHTERYGGVDLRAAAHRCYLXRMHEMMLRQRRWRHTPSTSXERNLFADITDGLIGPPNXAVHDDRHDXLSFXEEPHSDYSVPNXGSTACAPLETNRLLVVTSGVDSRXVISRNAPMYTL

SEQ ID NO: 197860 - protein, 95 aa, Zea mays
  Clone ID: MRT4577_112029C.1.pep
FSWGLTGDTMDLYKLIALAGHHGYDKRNALAGEIYIKYLRVGQYIGDKHLLLDSERKVGILGARQLRTDTYQPMYIRVTMNLTKIHLDYPWYHIF

SEQ ID NO: 197861 - protein, 57 aa, Zea mays
  Clone ID: MRT4577_11202C.1.pep
PVSVCALYIDLVLKLETVCRSVINVLLVYVLISFGAIQSSAWSLIRRSAVIFSRIIP

SEQ ID NO: 197862 - protein, 70 aa, Zea mays
  Clone ID: MRT4577_112030C.1.pep
CLWLPASLPGGRTSVQNGVRVGGHSFSPLVSPPRPHFFCLTEFFYFHCARFWGVCCLPRPSYVWCRVVVF

SEQ ID NO: 197863 - protein, 142 aa, Zea mays
  unsure (1)..(142): unsure at all Xaa locations
  Clone ID: MRT4577_112031C.1.pep
RGNTKGPRGLRGDSPCPHLTFPKARGRPGGGXGPPGPPGAGANYHSSTLPLPREGGRAPPXATPPGTPPGPXTPGAQGGPRPKGTVVTRVGPFEPXGPGGPKNNGGMGXKKGRGGKNQFLLPAKRPPPRAKVEGLKAPPKNR

SEQ ID NO: 197864 - protein, 54 aa, Zea mays
  Clone ID: MRT4577_112032C.1.pep
GHMFPPSILGRQHDVPNNGRQSCHLTNQIVYPKKMLHIQQINITSQKKLYPIDG

SEQ ID NO: 197865 - protein, 51 aa, Zea mays
  Clone ID: MRT4577_112033C.1.pep
RMEIAGHSSHQHGFSSPSTVVHVEYIGTDVLMRSSTRCQNRVESKISQIFI

SEQ ID NO: 197866 - protein, 331 aa, Zea mays
  Clone ID: MRT4577_112034C.1.pep
PGAGPGDCISVFNNAVNQLAEEILAAANANCSQWPAPEIDLLERTSNERIYAEMFLPSIGWSSPSRIQPLLAAINSCKIPEFSYDLSWLNHGSHMGKQIQDQKKLLEECLARYLTESARLLDESQVVTEVNVMVQNCVGLELQDSSYYLAPRWVAIFRRIYNWRLAKLSTGKLSEAYVLTQHLYQAPTAAGSNGTTQGLTANTASSDAVDHIMMPAVSTGITLDEIIEISCDLDAVDAQTVTLAPRLPVHVHEEPQALADNNGVHGVDEMYIPRRVELGEVMPIETDDKLSRLRVELGEVMPIETDDKLSRLLEQCTKLQDRIDETLSIYF

SEQ ID NO: 197867 - protein, 82 aa, Zea mays
  Clone ID: MRT4577_112035C.1.pep
THTHTHIQVVGKAKCMYYQPAGSGRIRRPSCLRRSTTTYSTTTRRTSSISTASTDTPRPKSSPSPAKAITRGTRRTITSTNS

SEQ ID NO: 197868 - protein, 131 aa, Zea mays
  Clone ID: MRT4577_112036C.1.pep
LGTSRPAGKKFLSSPPRPLPPLRSCRPCRAPRRSLIAASIQRRSPRVPVGARLPDELRLSLAHVRAAGCRENAGDATLRPQRCSVSDAAAAARNINCIGGVPPRRCWTNYSRLPGATVSTTAALGRNITRI

SEQ ID NO: 197869 - protein, 174 aa, Zea mays
  Clone ID: MRT4577_112037C.1.pep
ASEISKILLGGGKKSSVAAASRLPEVTIPEQSALATTSSVVPLPCHQQNRAARRSSTSSGHHHQSIGKWFQVHHRETRRAKQSSKEKQRAEKAHVHAMVSVARVAAAVAAVASATSSNAQATTTKMATAMASATELLASHCVEAAQHAGARHDQVAAAVQAAVGVRSPGDLMTL

SEQ ID NO: 197870 - protein, 145 aa, Zea mays
  unsure (1)..(145): unsure at all Xaa locations
  Clone ID: MRT4577_112038C.1.pep
QPPKEEEIQSACGRPRSIHRSNSNLPVITAFGRLGTMFGCDMYNIKPDLVSIAKVLSSAYMPIGAILVSPGITDVIYSQSNKLGXRNIVEHVNKIAPRFQEGIKAFSGSPIVGEIRGLGLILGTEFVDNKSPNDPFPAEWGSLVY

SEQ ID NO: 197871 - protein, 65 aa, Zea mays
  Clone ID: MRT4577_112039C.1.pep
HTVIDSDPVLDLSDEKITMGETLYRLLNDKSSIFIQLASEYSTHSRCIYRGLGGDCITIKRQCCP

SEQ ID NO: 197872 - protein, 255 aa, Zea mays
  unsure (1)..(255): unsure at all Xaa locations
  Clone ID: MRT4577_11203C.1.pep
MISPDAARNVVGIIGNVISFGLFLSPVLTFWRIYKAKDVEEFEPDPYLATLLNCMLWVFYGIPVVHPNSILVVTINGIGLVIEAVYLTIFFLYSDSQKRVSVXHVVRPIHDLSLLLFPSTCXIXSSGGWFLSLMQKKAFAILAVEILFMVAVVXLGVILGAHTHEKRSMIVGILCVIFGSMMYASPLTIXXEWIKTKSVEYMPFXLSLVSFLNGXCWTXYALIRFXDLYVTIPNXLGAFFRLVQLILYFCYYSRP

SEQ ID NO: 197873 - protein, 78 aa, Zea mays
  unsure (1)..(78): unsure at all Xaa locations
  Clone ID: MRT4577_112040C.1.pep
APGGVGCSYQGTXTNSRFWKISPSVFAFQPTPTLNAWPVPFSLTFPXPPHALLSLAGALFFFFSLSHHHFSXTSSLFF

SEQ ID NO: 197874 - protein, 100 aa, Zea mays
  Clone ID: MRT4577_112041C.1.pep
QPSKEEEIQSACGRPRSIHRSNSNLQIRGLGLILGTEFVDNKSPNDPFPAEWGVGSIFGTECEKRGMLIRVAGDNIMLSPPLIMTPNEVEEIISKFGDAL

SEQ ID NO: 197875 - protein, 203 aa, Zea mays
  unsure (1)..(203): unsure at all Xaa locations
  Clone ID: MRT4577_112042C.1.pep
RFSAPVEFDDETPSRHTSPPPVFQTSPIEAPSVSEKRSSTAGRLWRGRLLSHPNPVSSRPRRRRSNRRAGVRGPSIDPIPICRERNIVEHVNKIAPRFQEGIKAFLGSPIVGEIRGLGLILGTEFVDNKSPNDPFPAEWGXVGSIFGTECEKRGMLIRVAGDNIMLSPPLIMTPNEVEEIISKFGDALKATEERIGELKSRKN

SEQ ID NO: 197876 - protein, 248 aa, Zea mays
  unsure (1)..(248): unsure at all Xaa locations
  Clone ID: MRT4577_112043C.1.pep
VITAFGRLGTMFGCDMYNIKPDLVSIAKALSSAYMPIGAILVSPEITDVIYSQSNKLGXRNIVEHVNKIAPRFQEGIKAFSGSPIVGEIRGLGLILGTEFVDNKSPNDPFPAEWGXVLLISCPLFKHFRSNPTLRRPKIVLXELTXVMNXVACRGKIRHYPQSXRNLAELINGDSILILLRLVTPGVGSIFGTECEKRGMLIRVAGDSIMLSPPLIMTPNEVEEIISKFGDALKATEERIGELKSRKN

SEQ ID NO: 197877 - protein, 49 aa, Zea mays
  Clone ID: MRT4577_112044C.1.pep
PQCPEAEVDSVTTTTTLADSCQPPSEHSRGTGVLRCSKVSMQVLRITTD

SEQ ID NO: 197878 - protein, 82 aa, Zea mays
  Clone ID: MRT4577_112045C.1.pep
MVLLMSSIIFLKKKKKKKKKKKKKKKKKKKKKKKKKKKKKKKKKKKKKKKKKKKKKKKKKKGGPLLKEKNFWPRVWKKNFFF

SEQ ID NO: 197879 - protein, 53 aa, Zea mays
  Clone ID: MRT4577_112046C.1.pep
PYSKGPNPLNSGPFFFSFHYNRLFRPLVHTHTDTHGDAAPIITKPSPLNDSPS

SEQ ID NO: 197880 - protein, 224 aa, Zea mays
  Clone ID: MRT4577_112047C.1.pep
MPLFPSTAVALPRLSIPFPFPLHHSPIPLPLLLRRHHSSPHPRLLPLAASLPPPPPEELLHSQATGLVAASQANFMRVIVDATAPGLDHHRGSDLLCVVRALLKKIRRRVLVGDRVLVGAVDWTDRRGMIEDVFERRSEVVDPPVANVDRLVVLFSLDQPKPEPATLTRFLVEAESSGIPFVLVFNKVELVDEQTIAYWEDRLRSWGYDPLFLSVDKQSGFTAL

SEQ ID NO: 197881 - protein, 59 aa, Zea mays
  Clone ID: MRT4577_112048C.1.pep
CGSPPALASSSPIAVGRRDLPARPSTGSRFLGSPHGSPSLQRDSPRHERVRISPAQPRG

SEQ ID NO: 197882 - protein, 71 aa, Zea mays
  Clone ID: MRT4577_112049C.1.pep
TTKSSNTFFRVTKPIEGGTSRPFQRSAPRGAPEEHEYRSDLRRLTGETDAPGLRPTARATTDHAPSRSADQ

SEQ ID NO: 197883 - protein, 170 aa, Zea mays
  Clone ID: MRT4577_11204C.1.pep
MAPTVMMASSATAVAPFQGLKSAASLPVARRSTRSLGNVSNGGRIRCMQVWPAYGNKKFETLSYLPPLSTDDLLKQVDYLLRNGWIPCLEFSKLGFVYRENSTSPCYYDGRYWTMWKLPMFGCTDATQVYKELQEAIAAYPDAFHRVIGFDNVRQTQCVSFIAYKPPGSE

SEQ ID NO: 197884 - protein, 76 aa, Zea mays
  Clone ID: MRT4577_112050C.1.pep
QRHWACENPILQPYRIQHGNRAGILPLSPLFLQQSSSLLQQLPFVHLLAQNIRAQQLPQLVLANLCGYSQEQQFFS

SEQ ID NO: 197885 - protein, 139 aa, Zea mays
  Clone ID: MRT4577_112051C.1.pep
PAEGSFFQERKKKRGCSCPGDEQKQAPNRAAGDIKLFIHFFSPPQPERSKLGLGSHAEPKKKTPATPLWGRRLRAPALAKVWENLPQPSGTTGPWPMPGPNPPPTLTQFMHPGWHPLAHTSLRRPSGGCFLLQTPHLWQ

SEQ ID NO: 197886 - protein, 132 aa, Zea mays
  Clone ID: MRT4577_112052C.1.pep
GSETSGMANRADERGGGTNSDGGGGGSKDAGSFKCNICLDLAQDPVITLCGHLFSWPYLYERLHAHAHYKECAVSKGDVQEGKLAHLYGRTGSCAVPRARSGATVEIPIRPTEQSASTALLPDHNNHYPHQN

SEQ ID NO: 197887 - protein, 64 aa, Zea mays
  Clone ID: MRT4577_112053C.1.pep
GSRMQAIRMGSSSSRLVKCIVPLGRRSHSSASDQIGRRRARLHDPGVGDDAWRGALFVAPPLFF

SEQ ID NO: 197888 - protein, 695 aa, Zea mays
  Clone ID: MRT4577_112054C.1.pep
MGFDGLVVVSDPYLQRRFTQAELRALQAQYAALRDASPNGRLRMRDLPAAISGVRGAAKSRDAEKENSAPEPGPCHGLTDEEWASVLKAVARADEKPHQDASFELFLRVYAEMQLRLKAVSVCSGRAGGIVRSSSSSAVAFLTAATTTLLHTISESEKASYVGHINAYLADDPSLKSALPIDPATDHIFHITKDGVLLCKLINLAVPGTIDERAINTKRVLNLWEKNENHTLCLNSAKAIGCTVVNIGTQDLAEGRPHLVLGLISQIIKIQLLANVNLKSTPQLVELVEDSKEMEELMSLSPEKILLRWMNFQLKKAGFQKRVTNFSSDIKDSEAYACLLNVLAPECSAKPSAMSVKDLLHRARLILEHADRMGCKRYLTPKDIVDGLPNLNLAFVAHIFQKRNGLSKQMKQVSFVDGLSDDAQVSREERSFRLWINSLGISTYINNVFEDLRNGWVLLEVIDKIAPGSVNWKMANRPPIKLPFRKVENCNQVLKIGKELKFSLVNIAGNDIVQGNKKLILAFLWQLMRYNILQLLKNLRFHSNGKEITDNDILAWANKKVKDSGKHHSYMQSFKDKSLSSGTFFLDLLSAVEPRVVNWSLVTKGEKDEEKQMNASYIISVARKLGCSIFLLPEDILEVNQKMMLTLTASIMYWYLKRPTSQSLDSENGSSCETTSITTSDDSASESSIDDNTTR

SEQ ID NO: 197889 - protein, 99 aa, Zea mays
  unsure (1)..(99): unsure at all Xaa locations
  Clone ID: MRT4577_112055C.1.pep
HEPSAGVGVERELKKVAVVHNVVDGQAGLYHVVELGRRRRRRHPGAQQRRHGRSHQHNRRGTGSITXTIXXXNRXTILIPHSRIVPPLASSYPLLRTRG

SEQ ID NO: 197890 - protein, 105 aa, Zea mays
  Clone ID: MRT4577_112056C.1.pep
KTWQPKGPNKSRVWGFTKNLTRTCRKLSSYPNAQGAHGPNTSAHGRGPLPIGWGSEDAKTQCPGGLGDSPHPYAWGPARWGEVIKPLSLRPFCLEDPTDPYDRGP

SEQ ID NO: 197891 - protein, 130 aa, Zea mays
  unsure (1)..(130): unsure at all Xaa locations
  Clone ID: MRT4577_112057C.1.pep
MAAAVPRLLLAAAGLLTLAVLAAAVSPTXTGAGRAAETQAELVRLDKEPDFADCMVGERRWIHQNPELGYEAFQISELVRRELDAMVILYKQPFAETGVVATVGTGCPPFFALRADMDALSLQESDEREH

SEQ ID NO: 197892 - protein, 140 aa, Zea mays
  unsure (1)..(140): unsure at all Xaa locations
  Clone ID: MRT4577_112058C.1.pep
NYGEEDFLTYAQLPTEHYMIDXPIAXNDYGKDLARCLGGEKQKQTCIKGAYQYSYACAYYLQKHHSEVLELAAGVFPQTGDISTAFALHPYHRESRRLKGQQVITXRDILPQGQVASQPIYSQEVPSIGVGNYANDPLES

SEQ ID NO: 197893 - protein, 249 aa, Zea mays
  unsure (1)..(249): unsure at all Xaa locations
  Clone ID: MRT4577_112059C.1.pep
MATLLRRSAAPARQLLLLPRQLGAARSMSRYYARDEVSRFDALSTPVNWGVSIVPEKKAFVIERFGKYLKTLDSGIHGLVPLVDRIAYVHSLKEEAIPIPDQSAITKDNVVIQIDGVLYVKIVDPYRASYGVENPIFAVIQLAQTTMRSELGKITLDKTFEERDTLNEKIVRSINEASTDWGLKCLRYEIRDISPPPGVKNAMEMQAEAERRKRAQILQSEGAMLDQANRAKGEAEAILSSXQATAEGI

SEQ ID NO: 197894 - protein, 45 aa, Zea mays
  Clone ID: MRT4577_11205C.1.pep
IKMPPRPFFCDNQGDSSYFAIFKLDPIKKKVVVVKNTCENVILMY

SEQ ID NO: 197895 - protein, 65 aa, Zea mays
  unsure (1)..(65): unsure at all Xaa locations
  Clone ID: MRT4577_112060C.1.pep
LFSFVGLQRICEGXPXNYKGHGHNNRVAPQDIGPIKVPFLDHPLKITKIPSNPYYLFCKKRDLPP

SEQ ID NO: 197896 - protein, 53 aa, Zea mays
  Clone ID: MRT4577_112061C.1.pep
VVLRVAPLPAEYWPWAPLEFLSILWGQYRAPPMYYGPGLNVIQSVVGSSPLLS

SEQ ID NO: 197897 - protein, 48 aa, Zea mays
  Clone ID: MRT4577_112062C.1.pep
PRVRLRLGTSILQALGHNHPSVDILASYGHIFCCVYLYVYRRSHHLPL

SEQ ID NO: 197898 - protein, 52 aa, Zea mays
  Clone ID: MRT4577_112063C.1.pep
FLYTDFIINFVINAFNLASLDFLFDELDSFCPVYDLCCLASYIICSYHFSLP

SEQ ID NO: 197899 - protein, 114 aa, Zea mays
  Clone ID: MRT4577_112064C.1.pep
NRFQKKGPGEEIGFSSQKGAHMGSPSPAGFWPRKLKMMPPGKKTPKCEGGPICPGGFAPVNKAPPPPPFFSPSVEFKALEKNSFGPMKRFFFVGKNTKEKNQKPKKKKKKKKKN

SEQ ID NO: 197900 - protein, 342 aa, Zea mays
  Clone ID: MRT4577_112065C.1.pep
HWVPRGRPEPSPTNLSPITRRTAATPLSPIAMENPPPSSAGPYSAPAPAAQHQDAAKEDQDVAQLVLNLCIPELREKAIIILSKKREKCEDLALLLWHSFGTMAALLQEIVSIYRLLSPPQLSFDQSTRVCNVLVLLKCVASHPDTRMPFLNAQFPLYLYPFLNTTYKTREYEFLRISSLSVIGALVKSDDHEVIVNLLCSEIVPLCLRAIEMRRELSKKVATFILQKIMLDDTGLAYVCASSERFCAVANVLAQMVEALAEQPSPRTLKNTIRCYLRLTDDRRACQALRDYLPIALRDGTFNGLIEVDLTARLWLHQLLHNVMMSDSGGGPRPAPGPVMGM

SEQ ID NO: 197901 - protein, 99 aa, Zea mays
  Clone ID: MRT4577_112066C.1.pep
MARIVSRALPFASRSSLRLPLPPPFPGAALVRSAAAGSPLPPAAEAALAASLLSWRGHTATPEPSVAAPPPFAGFLAGIRRFRKGRRGQASAKRSQPQD

SEQ ID NO: 197902 - protein, 119 aa, Zea mays
  Clone ID: MRT4577_112067C.1.pep
KRVGAGSRLDSVRTSSSEEKLAHTRTGPPTLRDPGPPRTRRRRPKSPERPKRRQSTEGRSQNPQKTGANTKHQEKPYTLNQEHKELELTKDKALKRQAEHLTPRPEEPQAHQMVRPPPP

SEQ ID NO: 197903 - protein, 77 aa, Zea mays
  Clone ID: MRT4577_112068C.1.pep
VLTKKSGLKRRGSPRKSRTGTRRGPIFPYRGPLLMLGKQRPKRSPGGNCYPVKIPKKKQLGTKKGAPGGALKGAHPK

SEQ ID NO: 197904 - protein, 508 aa, Zea mays
  Clone ID: MRT4577_112069C.1.pep
MESLVAALPAGGAAAAAAFGGLVAAAALAGKVGLVGSKKHLNAPPAVSGLPLIGNLHQLKEKKPHQTFTKWAEIYGPIYTIRTGSSTVVVLNSAQVAKEAMIAKFSSISTRKLSKALSALTRDKTMVATSDYGDFHKMIKRYIMTFMLGTSGQKQFRDTRNMMVDNMLNTFHTLLMDDPNSPLNFREVFKNELFRLSLVQALGEDVSSIYVEEYGKVISKEEIYKATVVDMMMCAIEVDWRDFFPYLSWIPNRTFETRVLTTEARRTTVMQALIKQQKERIARGETRISYLDFLLAENTLTDEQLLMLVWEAVIEAADTTLVTTEWAMYEIAKHPEKQEYLYQEIQKVCGNKTVTEDHLPELPYLNAVFHETMRRHSPVPLVPPRLVHENTNLAGYEVPAGTEIIINLYGCNMNKNDWAEPEEWKPERFLDGRFEAVDMHKTMAFGAGRRACAGSMQAMNISCTAIGRFVQEFAWRLEEGDEDKVDTIQLTTNRLYPLHVYLAPRGRK

SEQ ID NO: 197905 - protein, 99 aa, Zea mays
  Clone ID: MRT4577_11206C.1.pep
FGSSSSRFGSFLGWVWPARLASTSLLRCSCRSLRPGAGRIHRARTDDGEQHPGLRLEGADPDFGRADGRIKAHLSPVPHGERILHLTARRRTLTPRTAS

SEQ ID NO: 197906 - protein, 73 aa, Zea mays
  Clone ID: MRT4577_112070C.1.pep
TRVSNQKSRKKFFINKGDGAKEIDHKETLIVIHGQKEYLNGDTCAVTWRVLNPRGIKLVRNLVSLIYAGRNAT

SEQ ID NO: 197907 - protein, 122 aa, Zea mays
  Clone ID: MRT4577_112071C.1.pep
GVGFFCFWVFFFFFYGPKPNIYIHYLGVLGPEHLHTGYQTLVTYPELGQRIQGPLTETNKDPTYKQNFHGETFQFLAHGALKNPRFFFLYGVYTRGGDLPVDFQDAFFGQKTPSLIFWGWGG

SEQ ID NO: 197908 - protein, 136 aa, Zea mays
  Clone ID: MRT4577_112072C.1.pep
FNIARGQRATRDNERRARPNDTRSLSTQRTDDAQTTHKQHVTTREPDAWRERANERRRRRNSARMKRETTCAAPRKQRNKREQCPTTRGQRAAMHTIYTRDTRRRRVVTSTKQHANDTRSSTPSRAEQYALHTRNT

SEQ ID NO: 197909 - protein, 101 aa, Zea mays
  Clone ID: MRT4577_112073C.1.pep
MKPLEHSSSISSTTPSAMPIKPISDNEFENKLNYSRRSTDPVNLVAYSSSDLQAATGSFHSSRLLGQGTIGGVYKAKYADGTVLAVKKFDPLSFSGSSDFM

SEQ ID NO: 197910 - protein, 122 aa, Zea mays
  Clone ID: MRT4577_112074C.1.pep
FHPTKFCRHHRSFYKHTAKCYTSLALWVMANITRDSKCSFYLSHTPMHALQTTYYLLACISQLLGTACPARFLLRLSCFSSLSATATSLLEAPPNSSLGLLRGLEFGFWEYAGSWAAWVQPG

SEQ ID NO: 197911 - protein, 260 aa, Zea mays
  Clone ID: MRT4577_112076C.1.pep
MAAPSSSLTPPPPAAAVASTTLSGNFTASSLLSITRPRLRLAASHRRAVVAAAASPRPPPTPEGDGDEQEVERAMGMDGGIPGTSGEFLRRVSSRAYGMRRHLMESLDSLAYDVLETNPWREDSKPVYVLATSDNHLWTMKTRRSRNEVERELGKLFSNGGGSGVGTKSKYSGTKFNMVVEDIREGVLVFEDEDDAVKYCNLLQGGGQGCEGIAEIEASSVFSMCRKMKALAVLFRRGKTPPLPQSLERDLRARKRSLED

SEQ ID NO: 197912 - protein, 53 aa, Zea mays
  Clone ID: MRT4577_112077C.1.pep
KTRKERRFDEMIQLKKDDPLDKRSRSLMSPFSLYSAFASKMDDAGFHMIFVFK

SEQ ID NO: 197913 - protein, 86 aa, Zea mays
  unsure (1)..(86): unsure at all Xaa locations
  Clone ID: MRT4577_112078C.1.pep
XXRXGXVSGTSXLXXRSXXXXXXVXXGXXPSSVVGMPXXXXRXXKHSXTSNSSGXTWVQCQXXLPXRVTVLVGVAMAVASTSTRTL

SEQ ID NO: 197914 - protein, 39 aa, Zea mays
  Clone ID: MRT4577_112079C.1.pep
DGWSLMHAHIGQKNVKRKLTTTWHARVLQIYHHPTKLDD

SEQ ID NO: 197915 - protein, 64 aa, Zea mays
  Clone ID: MRT4577_11207C.1.pep
PLDFLRPKVIQNKLRSDDPLICTDRGGFLFSFHIGHVCPCRRRLLLLSIALQSSIYLFDPLIVT

SEQ ID NO: 197916 - protein, 70 aa, Zea mays
  Clone ID: MRT4577_112080C.1.pep
IRLELTKNKVATALPTRAMWGISKPVWHVDKQSNLDECKCSMDQDSYVRCRAKALCINADAVCKSITPLC

SEQ ID NO: 197917 - protein, 104 aa, Zea mays
  unsure (1)..(104): unsure at all Xaa locations
  Clone ID: MRT4577_112081C.1.pep
MPGRFHVLLEYPRAPTTTHLCRPISNWGIILAMVTETEWSPEMISGNMNXAVCEHSALFXLRFAXMVRPRNYFLMPTHICYQRVSAATRLSRCDIWNRLLDSKE

SEQ ID NO: 197918 - protein, 60 aa, Zea mays
  Clone ID: MRT4577_112082C.1.pep
MSRDPLVVGSIVGDVVDYFSASALLRVMYGGREMTCGSELRPSQVASEPTVHITGGPRRE

SEQ ID NO: 197919 - protein, 76 aa, Zea mays
  Clone ID: MRT4577_112083C.1.pep
IGGTLHVLLRIVTPNKLFGYIIRNHGYLIAKPVFRTTRRRIYSYKSRNDGTATLTHISSGSSTLLPPRLNWYTGQW

SEQ ID NO: 197920 - protein, 135 aa, Zea mays
  unsure (1)..(135): unsure at all Xaa locations
  Clone ID: MRT4577_112084C.1.pep
MSKNRNEFLHAKASPRVAPRVAAPSEDVEHRASDDLLITKDYMTYMVKHHTAHGHCKHXSDMTLKDSKTIVFXDKPLSVFGIRNPEEQQESEAIAXYVEEFNVVFTDKDNAAAHLKGAAKKVAIYDTCKDAPMFV

SEQ ID NO: 197921 - protein, 238 aa, Zea mays
  Clone ID: MRT4577_112085C.1.pep
MSLWIAGTGAMLAASASSGQMAGLCVPRRSPTPPLLARRGRGRGRLLPRRPATLLRRDLRPAAAASPPPPSTGSALEHRVRKKCSPLLESALLPGGSDSTLHEWKAVPDIWRTAAEKYADLVAVVDPYHEPPTEWTYTQLEQEILDFSQGLRAIGVAPDEKLALFADNSCRWLVADQGIMATGAINVVRGTRSSDEELFQIYTHSESIALVVDSPQFFNRLAESFMSRINTRFIVLLW

SEQ ID NO: 197922 - protein, 140 aa, Zea mays
  unsure (1)..(140): unsure at all Xaa locations
  Clone ID: MRT4577_112086C.1.pep
RVDPTSFEIGAHSSGGGRVIHTLNRVWEPVPGAVLLAGLLHTXLNFLLLRLKVGMLFQLLFMFHGGGGGNVRYNPQFRPKKRGEEXTKSLVNMLDLXPDLYSNLGSKLSVEQAQGDALGGTLANDLEVLLLDQPTNELNP

SEQ ID NO: 197923 - protein, 280 aa, Zea mays
  Clone ID: MRT4577_112087C.1.pep
PTRPLGLQWPPPDGGICHVGRDEAPARGFDVNRAPSVAGSALALEDDEEEPGAAALSSSPNDSAGSFPLDLGGPRAHAEGAAARAGGERSSSRASDEDEGASARKKLRLSKEQSAFLEESFKEHSTLNPKQKAALAKQLNLRPRQVEVWFQNRRARTKLKQTEVDCEYLKRCCETLTEENRRLHKELAELRALKTAPPFFMRLPATTLSMCPSCERVASGPSPASTSAPASSTPPATAATTAISYAAAAAAPVRADHRPSSFAALFAATRSFPLASQPRP

SEQ ID NO: 197924 - protein, 208 aa, Zea mays
  Clone ID: MRT4577_112088C.1.pep
MASDRVLGTVKWFNGTKGFGFITPDDGSEDLFVHQSSIKSDGYRSLNDGDAVEYTVGSGNDGRAKALDVTAPGGGPLAGGERPDGGNGGGRGGYGGGDRGYGGGGDRGYGGGGDRGYGGGDRGYGGGGDRGYGGDRGYGGGGGYGGGYGGGGGGGGRGCFKCGEEGHMARDCSQGGGYGGGGGGGRGSECYNCGQEGHISRDCPNKRR

SEQ ID NO: 197925 - protein, 82 aa, Zea mays
  unsure (1)..(82): unsure at all Xaa locations
  Clone ID: MRT4577_112089C.1.pep
HTFKDPTXCXFYSSQIRPRXLYNXVXLFRWLXCMQWMHTYTRXDLDLALAARAGRXNFESSVEVAHRXXAVXXWXGXSLTAC

SEQ ID NO: 197926 - protein, 52 aa, Zea mays
  Clone ID: MRT4577_11208C.1.pep
LFVDPVDCHVIQTLRGFHVVQRCRGIMMVLFSSFLDFVCSLSLRLFMMPVSL

SEQ ID NO: 197927 - protein, 107 aa, Zea mays
  Clone ID: MRT4577_112090C.1.pep
RARRITWLTGGLHSRAAALTCFSGNSALEFPHRESALNMDGPLCRTAYPTWYGPPNGAVYNGGARGYHSAGKQPPFSPMNTSGRQSVFQDGKGWAHLLPRGRGHRRS

SEQ ID NO: 197928 - protein, 124 aa, Zea mays
  Clone ID: MRT4577_112091C.1.pep
RKKMGCSTLQLRHLDMECMVARTFEQIFYIVDIFTTILSEYCQKTTLSCRLISIAVIRLFDLKCTIEDGRIKERLSDFYGLNVSSYNHLLRLSTTVHPNFGPKYPTISPRQSQCMKKEYIAATV

SEQ ID NO: 197929 - protein, 102 aa, Zea mays
  unsure (1)..(102): unsure at all Xaa locations
  Clone ID: MRT4577_112092C.1.pep
ILRGDYXEDTTGLSVNPDTFTKNRKLKVIHSCWAMLSALCCXVFPEPXGLNGDKFGEVXVWLKEXTHIFSEGGLXYLGNPSLIHAHSILRHLSLTSLCSCSP

SEQ ID NO: 197930 - protein, 77 aa, Zea mays
  Clone ID: MRT4577_112093C.1.pep
ALLTVVLSWLYSTGPTSNQPRRISRFPGAERAGGTCRDGGWVGLDWIGLEPTDGQLVYPTWPRAVCAFAARGARRLA

SEQ ID NO: 197931 - protein, 87 aa, Zea mays
  unsure (1)..(87): unsure at all Xaa locations
  Clone ID: MRT4577_112094C.1.pep
KFVSKFPPDYKKKIEDPFNPPLSWLDPNHLPKADNFXAKIKKLENLFNPFFSKIYQGPGKNMGGPAAIKKNPPSGKGGPAPKIKKVD

SEQ ID NO: 197932 - protein, 65 aa, Zea mays
  Clone ID: MRT4577_112095C.1.pep
KKKKKKKKKKKKKKKKKKKKKKKKMGGPSKGIQPSLSVKATIFNSSSVALNFQLTGRGFTLSLPG

SEQ ID NO: 197933 - protein, 98 aa, Zea mays
  unsure (1)..(98): unsure at all Xaa locations
  Clone ID: MRT4577_112096C.1.pep
SKVKSISAVDPVQMTYYISDILDAGQNGPLFVVTEENCPGEILIHIFSTKGWNMAXERLNLEIRRLLNKGRANLSTLQPXGSVDWPXMFGVVTPAIIP

SEQ ID NO: 197934 - protein, 73 aa, Zea mays
  unsure (1)..(73): unsure at all Xaa locations
  Clone ID: MRT4577_112097C.1.pep
MLQASSERAAGLPWVPGMSPCPPSERAQEIARRREEMLGMLHDLPESEYELSLTDLVEKAAXGATVAKPRSRP

SEQ ID NO: 197935 - protein, 420 aa, Zea mays
  Clone ID: MRT4577_112098C.1.pep
MAAMMVAMTARSKNSILPMEKKQGWSIQLPELRFPWDSHEDKGFSLSLQGSGPSHGGLFASVGLKVSTGAPAVAPGPGDKDIKIPFTDHCMKYVSEAVGYQVISTEAESVEEVVDAKAKKAAKKRGLQLKIKIGNPHLRRLVSGAIAGAVSRTCVAPLETIRTHLMVGSNGDSMTEVFQSIMNTEGWTGLFRGNLVNVIRVAPSKAIELFAFDTAKKFLTPKADESPKTFLPPSLIAGALAGVSSTLCTYPLELIKTRLTIEKDVYNNFLHAFVKILREEGPSELYRGLTPSLIGVVPYAATNYYAYDTLKKLYRKTFKQEEISNIATLLIGSAAGAISSTATFPLEVARKQMQVGAVGGRQVYKNVFHALYCIMEKEGVGGLYKGLGPSCIKLMPAAGISFMCYEACKKILVEDNEDSE

SEQ ID NO: 197936 - protein, 46 aa, Zea mays
  Clone ID: MRT4577_112099C.1.pep
DTQRSFTNTSQSWWHSYLKALSKRAHYSSRVHHEFGYKAPCSRHYV

SEQ ID NO: 197937 - protein, 143 aa, Zea mays
  Clone ID: MRT4577_11209C.1.pep
REAKHNHHILVKIQERRGELAELLDEDGGLSPGRLCPRTTVVAVIVPRQPRRPCFAMGLCGAPSCRAGKRRAPIRAWDSKRVHGSELGNYRRAACIVASGLCRVHTARGYESPEDHPGTWNLKSQVKNRYHRMRRMEDAAMCS

SEQ ID NO: 197938 - protein, 110 aa, Zea mays
  unsure (1)..(110): unsure at all Xaa locations
  Clone ID: MRT4577_1120C.1.pep
PPPPTHPPPAPPALGARVQPGPKGHPNLXPLHGYYYSKXEKPPVLXYXXXXSXXXRPPPTHGTGRTXMEWNARVRXALCXAXGVAHLHTAHGLAHGDVKSSNXXLRPDPD

SEQ ID NO: 197939 - protein, 84 aa, Zea mays
  unsure (1)..(84): unsure at all Xaa locations
  Clone ID: MRT4577_112100C.1.pep
QVGTTLFLVVQATGVFSIKIRSYWSYESGSEXADPLGAFISSQRSRPLTQEVLEVGEYQHSGSYSRPIQFSSPQVSASLRRWTV

SEQ ID NO: 197940 - protein, 531 aa, Zea mays
  Clone ID: MRT4577_112101C.1.pep
MGQCCSRATAPDSGRGGANGYGYSNQAKPAQAPPSYNPPQQAAEVRYTPSATNSSAVPPVAVPPKPTADTILGKQYEDVRSVYSLGKELGRGQFGVTYLCTEIASGRQYACKSISKRKLVSKADREDIRREIQIMQHLSGQPNIVEFRGAYEDKSNVHVVMELCAGGELFDRIIAKGHYTERAAATICRAVVNVVNICHFMGVMHRDLKPENFLLATKEENAMLKATDFGLSVFIEEGKMYRDIVGSAYYVAPEVLRRSYGKEIDVWSAGVILYILLSGVPPFWAETEKGIFDAILHEEIDFESQPWPSISESAKDLVRKMLTRDPKKRLTSAQVLQHQWLREGGEASDKPIDSAVLSRMKQFRAMNKLKKMALKVIASNLNEEEIKGLKQMFMNMDTDNSGTITYEELKAGLAKLGSKLSEAEVKQLMEAADVDGNGSIDYVEFITATMHRHKLERDEHLFKAFQYFDKDNSGFITRDELESALIEHEMGDTSTIKEIISEVDTDNDGRINYEEFCAMMRGGMQQPMRLK

SEQ ID NO: 197941 - protein, 85 aa, Zea mays
  unsure (1)..(85): unsure at all Xaa locations
  Clone ID: MRT4577_112102C.1.pep
MGQCCSRAPAPDSGRGGTNGYGYSNQAKPAQTPSSYNPPQQPAEVRYTPPATNPPVVPPVPVPXPKPTADTILGKQYEDVRSVYS

SEQ ID NO: 197942 - protein, 532 aa, Zea mays
  unsure (1)..(532): unsure at all Xaa locations
  Clone ID: MRT4577_112103C.1.pep
MGQCCSRAPAPDSGRGGTNGYGYSNQAKPAQTPSSYNPPQQPAEVRYTPPATNPPVVPPVPVPXPKPTADTILGKQYEDVRSVYSLGKELGRGQFGVTYLCTEIASGRQYACKSISKRKLISKADREDIRREIQIMQHLSGQPNIVEFRGAYEDKSNVHVVMELCAGGELFDRIIAKGHYTERAAATICRAVVNVVNICHFMGVMHRDLKPENFLLATKEENAMLKATDFGLSVFIEEGKMYRDIVGSAYYVAPEVLKRSYGKEIDVWSAGVILYILLSGVPPFWAETEKGIFDAILHEEIDFESQPWPSISESAKDLVRKMLTRDPKKRLTSAQVLQHSWLREGGGASDKPIDSAVLSRMKQFRAMNKLKKMALKVIASNLNEEEIKGLKQMFMNMDTDNSGTITYEELKAGLAKLGSKLSEAEVKQLMEAADVDGNGSIDYVEFITATMHRHKLERDEHLFKAFQYFDKDNSGFITRDELESALIEHEMGDTSTIKEIISEVDTDNDGRINYEEFCAMMRGGMQQPMRLK

SEQ ID NO: 197943 - protein, 158 aa, Zea mays
  unsure (1)..(158): unsure at all Xaa locations
  Clone ID: MRT4577_112104C.1.pep
MGQCCSRATAPDSGRGGANGYGYSNQAKPAQAPPSYNPPQQAAEVRYTPSATNSSAVPPVAVPPKPTADTILGKQYEDVRSVYSLGKELGRGQFGVTYLCTEIASGRQYACKSISKRKLVSKADREDIRREIQIMQHLSGQXNIVEFRGAYEDKSNVH

SEQ ID NO: 197944 - protein, 93 aa, Zea mays
  Clone ID: MRT4577_112105C.1.pep
FGTGCIKSYGTIIKRAPREPPSAMAWLKTVRPFLKVRIRLLRGAAIRNPNHAQVQAQFKLSRAVQRNTLTWALLLAPHPLFYPTIREMLLVTR

SEQ ID NO: 197945 - protein, 537 aa, Zea mays
  unsure (1)..(537): unsure at all Xaa locations
  Clone ID: MRT4577_112106C.1.pep
MGQCCSRAPAPDSGRGGTNGYGYSNQAKPAQTPSSYNPPQQPAEVRYTPPATNPPVVPPVPVPPKPTADTILGKQYEDVRSVYSLGKELGRGQFGVTYLCTEVASGKQYACKSISKRKLTSKADREDIRREIQIMQHLSGQPNIVEFRGAYEDKSNVHVVMELCAGGELFDRIIAKGHYTERAAATICRAVVNVVNICHFMGVMHRDLKPENFLLASKEENAMLKATDFGLSVFIEEVAIHIXGKMYRDIVGSAYYVAPEVLKRSYGKEIDVWSAGVILYILLSGVPPFWAETEKGIFDAILHEEIDFESQPWPSISESAKDLVRKMLTRDPKKRLTSAQVLQHSWLREGGGASDKPIDSAVLSRMKQFRAMNKLKKMALKVIASNLNEEEIKGLKQMFMNMDTDNSGTITYEELKAGLAKLGSKLSEAEVKQLMEAADVDGNGSIDYVEFITATMHRHKLERDEYLFKAFQYFDKDNSGFITRDELESALIEHEMGDTSTIKEIISEVDTDNDGRINYEEFCAMMRGGMQQPMRLK

SEQ ID NO: 197946 - protein, 149 aa, Zea mays
  unsure (1)..(149): unsure at all Xaa locations
  Clone ID: MRT4577_112107C.1.pep
GAGFFSAPFVWGGXFXWLFAVPPFGSLPLALFXVLLSPXAVSLPCFFGPVGPFGVPFGLFXSVSSGLVXALLFGXFGCVPFXGCFFGVVPFXXFFLLRPXFVFXFFCPLVPFXXGLWGVFPSAWAAFXXFXXXXIXXAAALVAPCFRSR

SEQ ID NO: 197947 - protein, 58 aa, Zea mays
  Clone ID: MRT4577_112108C.1.pep
STMITGHMKETQIFQLCDTGLDNSQFSPTWDGWQVQQTLFDQRGIWIFTPYLCPQVEH

SEQ ID NO: 197948 - protein, 52 aa, Zea mays
  Clone ID: MRT4577_112109C.1.pep
SLTPSFRLQDCGYRGRGPSQVLYYIELKSTNPITTQDIHTSAKPNTVHLLIL

SEQ ID NO: 197949 - protein, 82 aa, Zea mays
  Clone ID: MRT4577_11210C.1.pep
KCLKEYCEMPEKIDYSSASREQSSSFTKEEKVLHPQTSGQPSPPVSAFNSTESHEPLSSTYLPITVSSYPEVGATQGMLQQV

SEQ ID NO: 197950 - protein, 399 aa, Zea mays
  Clone ID: MRT4577_112110C.1.pep
MAAAGTIPGAAAAIGASVSQRQRRVGAPSFVAAYVSEGTRLVCRRQLRPAPVLASSFISLSHPARRRFLCDAAAGASSGPAGEAKPQGFAERYPALVTGFFFFLWYFLNVIFNILNKKIFDYFPYPYFVSVSHLFIGVLYCLIGWSFGIPKRAPINSTLLKQLVPVAVCHAIGHVTSTVSFAAVAVSFAHTIKALEPFFNAAASQFILGQPVPLTLWLSLVPVVIGVSVASLTELSFNWTGFINAMISNISFTYRSIYSKKAMTDMDSTNLYAYISIIALFVCIPPAIIIEGPQLVQHGFKDAIAKVGLTKLISNFFVVGLFYHLYNQVATNTLERVAPLTHAIGNVLKRVFVIGFSIIAFGNKITTQTGIGTSIAVSGVALYSFIKAKIEEKKQIKSA

SEQ ID NO: 197951 - protein, 116 aa, Zea mays
  Clone ID: MRT4577_112111C.1.pep
VCTVTVSLGGLSRLEHSGGTGVCVSPRGETNITSLGVGVRREGGRVQSLGAASRSTRVKFARERVVRAAGQECASDSEGSGQAQRRERHKVEKRRCGLCRHATRADRRTARLALRA

SEQ ID NO: 197952 - protein, 66 aa, Zea mays
  Clone ID: MRT4577_112112C.1.pep
FIFFPINNSGESPQLKGEGHHGQLELPHHQPCYWPCPFLQVHHNLIAYVQLWINKQAGDPNAHELC

SEQ ID NO: 197953 - protein, 52 aa, Zea mays
  unsure (1)..(52): unsure at all Xaa locations
  Clone ID: MRT4577_112113C.1.pep
LNPLYPLIKHPPXNYLIKXNPTNPNIXKPPFQNXXFSFINXPFLXXXLSPLN

SEQ ID NO: 197954 - protein, 161 aa, Zea mays
  Clone ID: MRT4577_112114C.1.pep
MGKKGALTSIFSRSSSLASDSSTAAVIPWPWPSCRDPQTDSFRAGEEPCATAADGSRCGPVAARHCKLVGGPAEMYKTVNSVYIDPDDGESFSCLSAEEEETVVVEDDGFLTPTASEEWSEAVIRSLSRTTSSTGRFFFDQGPATNSILSAAAGSTTGRTP

SEQ ID NO: 197955 - protein, 111 aa, Zea mays
  unsure (1)..(111): unsure at all Xaa locations
  Clone ID: MRT4577_112115C.1.pep
VPPRLLRVFXSLRSLSGAGGFPSRVPLRRVXVVLPAKKKKAVPPPGCACARLRLGSVSVRRGAGRCLFRRGPSLLLARCGPCGAGAPRPXXCRARRRAARRXGQRXRRPVA

SEQ ID NO: 197956 - protein, 95 aa, Zea mays
  unsure (1)..(95): unsure at all Xaa locations
  Clone ID: MRT4577_112116C.1.pep
RGWRRTKXDLDADQNRVXEIADLLCWEKFAEKVEMAVWRKRVNTESVASRQEGSAWQVYESANPDDVWYEKMEACFTPLPDVKXRTDELGGAIKP

SEQ ID NO: 197957 - protein, 85 aa, Zea mays
  Clone ID: MRT4577_112117C.1.pep
DPHPSFQIIRCLAFLHTYSLNPKILVILILDFMSMFKWMMMNLDTYVRQIYSLLHVSTKKVKHILFWDGGGIFYSALKYTLYLNT

SEQ ID NO: 197958 - protein, 51 aa, Zea mays
  Clone ID: MRT4577_112118C.1.pep
DQQNSACYVMSHVFVFFYRQYMRAKIHRATAMVYPRLSLVNVYMIINYPVR

SEQ ID NO: 197959 - protein, 90 aa, Zea mays
  Clone ID: MRT4577_112119C.1.pep
RSLKPKLLPWLLVNLGRRERSPIEMRRSTTIWAPPSMEIAEQVLPYAEMKPCRTCTYNMNMVTCELQTNDNRDNSRRTALRTCSPVKTIR

SEQ ID NO: 197960 - protein, 56 aa, Zea mays
  Clone ID: MRT4577_11211C.1.pep
PIKSFFSSTPGGASNSFWKQIKGASLFYLVGTKRPKEHFFFKFFIPPSKVGWKLWV

SEQ ID NO: 197961 - protein, 53 aa, Zea mays
  Clone ID: MRT4577_112120C.1.pep
HWGLVHWSNLESPGAAITVATRWRWTAAGSIRSQRLTGWKSTGRCTTGPPVIC

SEQ ID NO: 197962 - protein, 199 aa, Zea mays
  Clone ID: MRT4577_112121C.1.pep
FSAMKGTRVKKGITTKLSVSWAPDVYDPPITSDSHTVKGHHTSSTKGNYKYKTSKSSSTTRRKKDKKHSRHSSSNGGGSKRDKKHSYRSSASSSRAITSGSQYCDAYSGGGINSRTVPESAKISPLVVAENVTPQEMVPVLKTLEPIKCTTSCGKEKPFALLSRQFSPARYKDVHLLEPKPTGFLTICYAEAHLVPCQG

SEQ ID NO: 197963 - protein, 59 aa, Zea mays
  Clone ID: MRT4577_112122C.1.pep
SRSQLLKQYVIGAQGLCSARIVRSNSEVSSEPSGCAFTFDTCRGYSWSLHFVRLIIEVG

SEQ ID NO: 197964 - protein, 65 aa, Zea mays
  unsure (1)..(65): unsure at all Xaa locations
  Clone ID: MRT4577_112123C.1.pep
IGPREKTAHKAAGPTESTRVPSIRTKGTGGGLSSETARGNRTNPSPSPEHDFCSPHLCGRVGSXP

SEQ ID NO: 197965 - protein, 360 aa, Zea mays
  Clone ID: MRT4577_112124C.1.pep
MGQQQQGPAARRMATLASHLRHPSVSHPQMEDVPLLRGSNCRAKGAAPGFKVAILGAAGGIGQPLALLMKMNPLVSVLHLYDVVNAPGVTADISHMNTGAVVRGFLGQPQLENALAGMDLVIIPAGVPRKPGMTRDDLFNINAGIVRTLCEGIAKCCPNAIVNVISNPVNSTVPIAAEVFKKAGTYDPKRLLGVTTLDVVRANTFVGEVLGLDPREVNVPVIGGHAGITILPLLSQVNPSCSFTSEEVKYLTSRIQNGGTEVVEAKAGAGSATLSMAYAAAKFADACLRGLRGDAGIIECSYVASQVTELPFFASKVRLGRCGIEEILPLGPLNEFERSGLEKAKKELAESIQKGVSFIK

SEQ ID NO: 197966 - protein, 70 aa, Zea mays
  unsure (1)..(70): unsure at all Xaa locations
  Clone ID: MRT4577_112125C.1.pep
VRVVGLFVVNPRVVSSTXASSSPLEMFAGVDAYGYFCVGFEDFKMMMCPQPQAEAGAVVRDKDKAVAKEE

SEQ ID NO: 197967 - protein, 44 aa, Zea mays
  unsure (1)..(44): unsure at all Xaa locations
  Clone ID: MRT4577_112126C.1.pep
FSLSRRCSXSACVLLLGASIAVPWRRLLASVRLVPLARPPPGAL

SEQ ID NO: 197968 - protein, 59 aa, Zea mays
  unsure (1)..(59): unsure at all Xaa locations
  Clone ID: MRT4577_112127C.1.pep
TDQIGVLEHTRVXVIARKFGLLSMCRVWXYNASIRXSGXXWXLGLLHDPGIILACCWSC

SEQ ID NO: 197969 - protein, 364 aa, Zea mays
  Clone ID: MRT4577_112128C.1.pep
MELSPNNSTDQSLLDAQLELWHTTFAFMKSMALKSAIHLRIADAIHLHGGAASLSQILSKVHLHPSRVSSLRRLMRVLTTTNVFGTQQPAGGSDDDSEPVYTLTPVSRLLIGSQSSQLAQTPLAAMVLDPTIVSPFFELAAWFQHELPDPCIFKHTHGRGIWELTKDDATFDALVNDGLASDSQLIVDVAIKQSAEVFQGISSLVDVGGGIGAAAQAISKAFPHVKCSVLDLAHVVAKAPTHTDVQFIAGDMFESIPPADAVLLKSVLHDWDHDDCVKILKNCKKAIPPREAGGKVIIINMVVGAGPSDMKHKEMQAIFDVYIMFINGMERDEQEWSKIFSEAGYSDYRIIPVLGVRSIIEVYP

SEQ ID NO: 197970 - protein, 54 aa, Zea mays
  Clone ID: MRT4577_112129C.1.pep
GHFSCVSNFSRDPPCVSINYQPLFCFRILSALSAFFLRFPPTPKRPSLLIKWGT

SEQ ID NO: 197971 - protein, 65 aa, Zea mays
  Clone ID: MRT4577_11212C.1.pep
NNTFFFSFKMVIQGIGHTDTATHGDAGHIITQLLPFNDLTSLLARGFSTAHSFFSGGQPRQQRMG

SEQ ID NO: 197972 - protein, 68 aa, Zea mays
  Clone ID: MRT4577_112130C.1.pep
AVKPKNKRQRDFAHSQGNKAYGCGFVCVCLDIHLHDTLHHTFAFINIHLDIHRIIIIITYRHRQMLRL

SEQ ID NO: 197973 - protein, 63 aa, Zea mays
  Clone ID: MRT4577_112131C.1.pep
PRAGGIHQTQIHLRSYREDVPVVANTITTCLVSCPTNMTCAHDKLHAQGARYYGVPIRPTCPS

SEQ ID NO: 197974 - protein, 51 aa, Zea mays
  Clone ID: MRT4577_112132C.1.pep
TRLQISLDVLRVHVPSQGSTTVEVVGTNNLAFIHSNEPPTPPKKKGVTLKR

SEQ ID NO: 197975 - protein, 100 aa, Zea mays
  Clone ID: MRT4577_112133C.1.pep
RHADLTKLFAWMAHFAHHYSRSRLADITFPCGHRCDLHVTCCMLSTRSFRKSYAVDEVSFALRLLQHLLGGPLSAPGGTSPVVGGVDFDPLPLLMTWTQT

SEQ ID NO: 197976 - protein, 109 aa, Zea mays
  Clone ID: MRT4577_112134C.1.pep
PRVRKELIKYKGFQIAPAELEGLLLSHPEILDAVVIPFPDAEAGEVPIAYVVRSSESSLTEVDVQKFIEKQVAYYKKLRRVTFVDSVPKSASGKILRRELISKVRSSKL

SEQ ID NO: 197977 - protein, 88 aa, Zea mays
  unsure (1)..(88): unsure at all Xaa locations
  Clone ID: MRT4577_112135C.1.pep
EFQARPTPYPMHDLYKDFILTQRLIQCSVWINGKTLTFTKITISAYHPRNALFTPILNRRTSCXYHDFVPFTLYALSYASSPLTHTHY

SEQ ID NO: 197978 - protein, 199 aa, Zea mays
  Clone ID: MRT4577_112136C.1.pep
PTQASPSTTSSSAAPTCAPPLSRWSTPPPASAAASKPQGASVTLYSDLVSGARETEYRRPPTKQSDTTALMYSSGTTGASKGVILTHRNFISAAAMMTADQDALGEGPNVFLCFLPMFHIFGLSVITFAQMQRGNSVVVMSRFDMDSVMAAVQRHRVTHLFCVPPVMIALAKLGSVGKYDLSSLRFIGSGAAPLGKDVM

SEQ ID NO: 197979 - protein, 662 aa, Zea mays
  unsure (1)..(662): unsure at all Xaa locations
  Clone ID: MRT4577_112137C.1.pep
MARTAAPAAGYGEDGVYRSPRPAVRIESDTGLSLNDLLFRRADVCPSALALVDSATGQSLTFAAFRSAVLTTAVALSSRAGVRRGDVVLFFAPNCFLYPVCFFAVTALGAVATTANPLYTPREVAKQATDSRAKLAITVSELLPKIVDLGFPTILLDGGGDXTRPVPPPPSXGASVTLYSDLVSGARETEYRRPPTKQSDTTALMYSSGTTGASKGVILTHRNFISAAAMMTADQDALGEGPNVFLCFLPMFHIFGLSVITFAQMQRGNSVVVMSRFDMDSVMAAVQRHRVTHLFCVPPVMIALAKLGSVGKYDLSSLRFIGSGAAPLGKDVMEGVAKNFPEAVIAQGYGMTETCGIISLEYPEKGQIRQFGSTGALVSGVEAKIVDVETLICLPPNQLGEICVRGPNIMQGYFNNVQATEFTIKQGWLHTGDIGYFDEGGQLFVVDRLKELIKYKGFQVRFSFFCKQMFSFCKLLFIIMXGENXNLNSAYXRRLCPASFGSFLQLTFAVLLSIYIHTKYYSVDXILCLLFDLTIIKWIILHICYFTFXSYIMCFFSLVEFHIFLRQIAPAELEGLLLSHPEILDAVVIPFPDAEAGEVPIAYVVRSSESSLTEVDVQKFIEKQVAYYKKLRRVTFVDSVPKSASGKILRRELISKVRSSKL

SEQ ID NO: 197980 - protein, 110 aa, Zea mays
  Clone ID: MRT4577_112138C.1.pep
SPPPKNRGKRWFVWPLGMGLIGAQPLGAEKTAQKRFGGYTLPAVGSQGGGGSPQKQMGDPLFPGILSGGPPPGVFPIKKTKGFFFGPPYLFLGGAKNENQSGPVLSPQLF

SEQ ID NO: 197981 - protein, 99 aa, Zea mays
  unsure (1)..(99): unsure at all Xaa locations
  Clone ID: MRT4577_112139C.1.pep
MATKILSLLMLLALSACAANATIFPQCSQAPITILLTPYLTSTIASVCENPSLQPYRLQQAIAASNIPXSPLFQQSPALSLAQSLVHTIKAQHLQQLVL

SEQ ID NO: 197982 - protein, 54 aa, Zea mays
  Clone ID: MRT4577_11213C.1.pep
HVCVEVNNTIKLTIFLQSSSRFKNSHTTMTSEPITWYDSYEYKEKHWVTTINAS

SEQ ID NO: 197983 - protein, 91 aa, Zea mays
  Clone ID: MRT4577_112140C.1.pep
NSPCNVVILVGVKNTTCPSERHLMSLHDPAGVDKTSIQPRARVKSPKTGLLDDRHQARIVERARGCWRRRDHLRRPVMGVSALFTAPVAVS

SEQ ID NO: 197984 - protein, 55 aa, Zea mays
  Clone ID: MRT4577_112141C.1.pep
PMVQHHHPDLLGLSRGRGGLPFIAGELMWTVRQTLKPEVTLWFKYAEVIYLVGTD

SEQ ID NO: 197985 - protein, 183 aa, Zea mays
  Clone ID: MRT4577_112142C.1.pep
AGPGTIPRARYRALDCPRSRLLDPVGLVAAQRVHVHNARGELPCQNTSAAHPTTPTPPTRSQATTASPAPGTAVAVEDGLLALDTWDPDGYCGRGNHEATCDRRSRQSYANVRRRFYKNGSESARVLCTTCSSRKAHIYGGYHFSTDVDQDIRKWGEQARAGFKLGLSMMGLEWAHPEPTYVS

SEQ ID NO: 197986 - protein, 829 aa, Zea mays
  Clone ID: MRT4577_112143C.1.pep
MASFNNQAEASSATKPVFPITGDSSSEPVNKKQKKEAQRRVQHVGVQGPFIKSKWSHIPITFSQEDLQLKYYPHNDAMVISCVIKGFLVHNVLVDIGSAADIIFAKAFRQMQEPEDKIHDATHPLCGFGGRNIVALGKITMPVVFDIADMEYPYNAIIGHGTLNAFEAILHLAYLCMKIPSEQGPIAVHGSQEAARKAEGNWTDSKAIHNIDGAKACEQYRYKREKVASADQPKPMLLCEDIAEQKVLLGSQLSEEQEKNLLRFLFNNKDVFAWSANDLCGVNRDVIEHSLNVDPSFRPRKQRLRKMFDDKVEGARNEVKRLLSAGVIREVKYPEWLANTVMVKKANGKWRMCIDFTDLNKACPKDEFPLPRIDSLVDAAASSELMSLLDCYSGYHQIWMKKEDEPKTSFITPSGTYCYLRRLEGLKNAGGSFSRMTARVLHSQIGRNVLTYVDDIIVKSTKQENHIADLQETFANFRQAGLKLNPEKYVFGVMKGKFLGCLVSTKGIEANPSKIKAILCMELPSTKKGAQRLAASHSAVSAALVQEKLDGQVKKQAPVYFVSEVLSPSKKNYTELEKVLYAVLMASRKLQHYFQAYHIIIPSSQPLKDIMRNREATGRIGKWAAELNEFTIDYVHRSSIQSQALADFITDWTPGAHEEEVNKDAEAWIVFCDGSWGTFGAGAAAILVAPSKVKTCYAAKLDFSCTNNIAEYEALLFGLRKLRAMGTRRAILKTDSQVISGHVDKSSKARDPKLERYLDTVQRLEASFEGFSVKNIPRGENEHADLLAKSMAQGLPLPSEVFFETIKAPSVELMERAVLTISPVHRLED

SEQ ID NO: 197987 - protein, 62 aa, Zea mays
  Clone ID: MRT4577_112144C.1.pep
GPPAPGPQAIFGLVPQSILEQQPQKGPVPGVLGGPKAPPLSGMLGLQQPIPCPYGGAGGVPP

SEQ ID NO: 197988 - protein, 70 aa, Zea mays
  Clone ID: MRT4577_112145C.1.pep
ITFLLFIFFLVVVFLFIFFYGLFPRETTAPKGLFFFSRTDTILLGGASSIGGQTKIMGRGNAPSPGENKI

SEQ ID NO: 197989 - protein, 713 aa, Zea mays
  unsure (1)..(713): unsure at all Xaa locations
  Clone ID: MRT4577_112146C.1.pep
MASFSNQAEASSATKLVLPITCGSGSEPANKKQKKEAQRRVHHVGLQGPFVKSKWSHIPITFSQEDLQLKNYPHNDAMVISCVIKGFLVHNVLVDTGSATNIIFAKAFRKMQEQEDKIHDATHPLCGFGGRKIVALGKITMPVTFGFVHNTRTEQVVFDIVDMEYPYNAIIGRGTLNAFEAILHPAYLCMKIPSEQGPIDVHGNQEAARKAEGNWTDSKAIHNIDGAEAYEQYRYKREKATSVNQPKPMLLCEDIAEQSVNRDVIEHSLNVDPSFRPRKQRLRKMSDDKAKGARNKVKRLLSTGVIREVKYPEWLANTVMVKKANGKWRMCIDFTDLNKACPKDEFPLPRIDSLVDAAASSELMSLLDCYSSYHQIWMKKEDEPKTSFITPSGTYCYLRMPEGLKNAGGGFSRMTARVLHSQIGRNVLTYVDNIIAKSTKQENHIADLQETFANFRQAGLKLNLENCVFGVKKGKFLGCLVSTKGIEANPSKIEAILRMEPPGTKKGAQRLAGRLASLNRFISRSAERNLPFFEILNSADVFQWGPAQKKAFEELKQYLIDLTTLTPPLSGAPLLLYVAASHSAVSAALVQEKLDGQVKKQAPVYFISEVLSPSKKNYTELEKVLYAVLMASRKLRHYFQAYHIIIPSSQPLKNIMRNREATGRIGKWAAELNEFTIDYVHRSSIQSQALTNFIADWTPGXHEEETSRVKWTC

SEQ ID NO: 197990 - protein, 47 aa, Zea mays
  Clone ID: MRT4577_112147C.1.pep
KWSPLNHKNQIHSRGAMQQQGASRFVYEVKQAKAPVLAMKRTPEVGT

SEQ ID NO: 197991 - protein, 61 aa, Zea mays
  Clone ID: MRT4577_112148C.1.pep
QSNIRMHNMKQTDFMINRNKVAHDEHSGRQGVKPDAHNRSGGRDEVACKSDPGPKVRPRVR

SEQ ID NO: 197992 - protein, 32 aa, Zea mays
  Clone ID: MRT4577_112149C.1.pep
VPPALQEVILCSPLSILVFFIHHELTEPSHYF

SEQ ID NO: 197993 - protein, 84 aa, Zea mays
  Clone ID: MRT4577_11214C.1.pep
VSVAGASGGQPEGYGQGSSACSISFHKWIQMCMMWVEMHFLMVSWSGGSGGRRKEVQKGERLTAEVLSSSAYYGAEIPPARGTN

SEQ ID NO: 197994 - protein, 419 aa, Zea mays
  Clone ID: MRT4577_112150C.1.pep
MGNCWGARIKDGSPHPGASGMFSKSSGKDGSRLSGCSSRASSASMPPSAKTECEILRSANVKIFTFNNLKAATRNFRPDSVLGEGGFGSVYKGWIDENTLSPCRPGTGIAVAVKRLNHEGLQGHREWLAEVNYLGQFCHPNLVKLIGYCLEDEHRLLVYEFMPRGNMENHLFRRGSYFQPLSWNLRMKVALGAAKGLAYLHSAEAKVIYRDFKTSNILLDTDYSAKLSDFGLAKDGPVGEKSHVSTRVMGTYGYAAPEYLSTGHLTAKSDIYSFGVVLLEMLSGRRAIDKNRPQGEHNLVEWARPYLTHKRKIFRILDTRLEGQYNLNGAQTIAALALECLSYEAKMRPTMDAVVAILEELQGSGEAEKKLQEPKAGTKQAPAAVSASMSSSRKPRRKSLGDTKETVGGPDPKPLAHSR

SEQ ID NO: 197995 - protein, 224 aa, Zea mays
  unsure (1)..(224): unsure at all Xaa locations
  Clone ID: MRT4577_112151C.1.pep
MDGPKRSQLRVRLRVTARRRGADGDGAGGAAGHGGRKRRMEAPVRNSVAKLQRREIGGRQLAARGGGPAAAVPERFRNMQLQEEFDTYDENAHLFVKLQFLKRRSKIIEIVAAKDIVFALANSGLCAAFDRVTNKRIAFLNLSPDEVIRSLFYNKNNDSLITVSVYAADKFSTLKCRTTPIEYIXRNQLDAGFPLFESESLKWPXXFVEFDDVNGKVLTYSAQD

SEQ ID NO: 197996 - protein, 79 aa, Zea mays
  Clone ID: MRT4577_112152C.1.pep
LIVIEHTPCGRVAMSNYNACFLHVVTPQALEFYKAPFYLLMASQWPPATDRIRRYACFPQPTAIVHSLKNNQEKTQPSA

SEQ ID NO: 197997 - protein, 295 aa, Zea mays
  unsure (1)..(295): unsure at all Xaa locations
  Clone ID: MRT4577_112153C.1.pep
MGNCWGARIKDGSAGASGMFSKSGGKDGSRLSGCSSRASSASMPPSVKTECEILQSANVKIFTFNNLKAATRNFRPDSVLGEGGFGSVYKGWVDENTLSPCRPGTGIAVAVKRLNHEGLQGHREWWAEVNYLGQFCHPNLVKLIGYCLEDEHRLLVYEFMPXRGSLENHHHLFRRGFEPLSWNLRMKVLLGAAKGLAYLHSAEAQVIYRDFKTSNILLDRDYTAKLSDFGLAKDGPVSEKSHVSTRVMGTLGYAAPEYIATGHLTAKSDIYSFGVVLLEMLSGLRVIDKNRPQDQ

SEQ ID NO: 197998 - protein, 58 aa, Zea mays
  Clone ID: MRT4577_112154C.1.pep
HILRRNGTVVCRGRRSLKRWGLFWSMGSVPLALVLESMLPLMATRQGGKNPPNPLGKL

SEQ ID NO: 197999 - protein, 71 aa, Zea mays
  Clone ID: MRT4577_112155C.1.pep
VTSLFSGKEPLPSYEVIHDCRLRTSGMAPMDVAIPANGASAKRGSLRSRLLVAAIRRMDECSSCTPRGRGC

SEQ ID NO: 198000 - protein, 68 aa, Zea mays
  Clone ID: MRT4577_112156C.1.pep
LTIYGALSRVCQPMSSGPPDKTHSFSSASIGPAITVAVSCDPFVPPALVRFVSTSAVNQTLTVCVCPS

SEQ ID NO: 198001 - protein, 147 aa, Zea mays
  Clone ID: MRT4577_112157C.1.pep
LNLIPTPTAVCGDAGASADNNIPSERGENCIPQSVGEIPALRRLLDSAQPTRCALEATGTTSSSGPPTTIWTSRERARDVPKGYRRRLRERLDGDEIEIIVLTAINDQVDAVRPATAVRHVRYAMIKMCPATMRFALGQVKQLMKLM

SEQ ID NO: 198002 - protein, 859 aa, Zea mays
  unsure (1)..(859): unsure at all Xaa locations
  Clone ID: MRT4577_112158C.1.pep
MDSDNDCGSDAGAEWVWVRRPSEVGAAAAAAGWLADEEARPLKVVFGSPAKYFTDAAPIGNGRLGAMVWGCVESERLQLNHDTLWTGGPGNYTNPNAPAVLSKVRSLVENGKYPEATSAAYDLSGDQTQVFQPLGDIDLVFGEDIKYTNYRRELDLHTATVTVTYTVGDIVYTREHFSSNPHQVIVTKISANKPGNVSFTVSLTSPLDHKIRVTHANEIIMEGSCPGQRPEEIKTAADQPIGIKFSAILYLQINGANSTVEVLNDNMLKLDCADSVVLLLAATTSFQSAFIKPSESKLDPTVSAFTTLSIARRTSYSQLKAYHIDDYQTLFQRVSLQLSQGSNYDLRRSRLVQSAETSSQGANVSDYGFQISGCTRLTSLNSFVKPTVERIVTFKDNEDPSLVELLFQFGRYLLISCSRPGTQISNLQGIWSNDTSPPWDAAPHPNINLQMNYXDILKTALVSFTNTXSFTDCNIWIVYFDXHGEVSVLMPLTRRERMSIAXTDCFLLTNCMLTFPEYFKIYIKLNKIXMRVIPLSLQHFLEKTAYPLLEGSARFLLDWLIEGHRGYLETNPSTSPEHYFIAPDGKEACVSYSTTMDISIIREVFSALILSADILGKSDTNVVQRIKKALPNLPPMKVARDGTIMEWXHKTFRILRFITDMCLTCLVFILDILCHLRKHLTSAELLPIVFIKEVTKAQAGLLHGKWSYGLAFTTXHAYKMILQLITLVDPEHEVSREGGLYSNLFTAHPPFQIDANFGFPAALSEMLVQSTGTDLYLLPALPRNKWPQGYVKGLKARGGVTVNISWKEGSLHEALLWSSGGQNTLSRLHYGDQIATVSLSSGQVYRFSMDLKCLKTWPL

SEQ ID NO: 198003 - protein, 74 aa, Zea mays
  Clone ID: MRT4577_112159C.1.pep
FGTRVVFLPSIWIGAYHELMGNVICRFYLTKVCITVPLLFFLLVNSALFLSLMIHKVWWSKILIRPKILVVLVF

SEQ ID NO: 198004 - protein, 119 aa, Zea mays
  Clone ID: MRT4577_11215C.1.pep
MECVLGVVGRDFALVAADTSAVQSILVHKTDEDKVMVLDSQKLMGASGEPGDRVQFTEFIQKNLHLYQFRNTIPLSTAAAANFTRGELATALRKVLIRINLVSLFVRFGRSKVPLDGYY

SEQ ID NO: 198005 - protein, 38 aa, Zea mays
  Clone ID: MRT4577_112160C.1.pep
MEVVLGSAARRCLASTAVAAARALLQRVSRPGIAARFF

SEQ ID NO: 198006 - protein, 70 aa, Zea mays
  Clone ID: MRT4577_112161C.1.pep
IDKPHCERGTRPDLPDLRGNIHRCEIIHPRPSWAAAEPGKAGSTSSENVITNARMRLTNMLIAEPIHFDH

SEQ ID NO: 198007 - protein, 66 aa, Zea mays
  unsure (1)..(66): unsure at all Xaa locations
  Clone ID: MRT4577_112162C.1.pep
KKAGKNKPTVWGSPKKRNFPGRMGPKKGQIYRGSPXNGGASTLTGDVRDPKDFLKKSLETTTNFIM

SEQ ID NO: 198008 - protein, 75 aa, Zea mays
  Clone ID: MRT4577_112163C.1.pep
TFHHPSHPQKKSPSNNTKLPIYSKITSQKKKTSHSPHYLLPQQTTIISPLTKHLPKKPHTNHLKLPSITTQINPQ

SEQ ID NO: 198009 - protein, 46 aa, Zea mays
  Clone ID: MRT4577_112164C.1.pep
SCTRRKRMLMKCGYKFLKKHDNTRDRWMFMRINAKNYSNKPLYRAY

SEQ ID NO: 198010 - protein, 262 aa, Zea mays
  unsure (1)..(262): unsure at all Xaa locations
  Clone ID: MRT4577_112165C.1.pep
GRVGGRVGAMKPDEAFGLIFSWDNVIADTDSLKLNAWSQLALEEGKDIPSAAHVRKSILHGAADHVLRKVLYWAKEEDKMEKMKARLIELYYENLFKLDTPVEGLREWLDAVQTAGIPCAVASSLDRRCMIEALDRMALSKYFKWLXQAIVTDEDDMDSIANRFLSAAMKLDRKPSKCVVFEDDPRGVTAAHNCTMMAVALIGAHPAYELVQADLAIAKYSELSVINLRRLFANKGISFMDLQKQIIEKSPPKRRLTVDTIF

SEQ ID NO: 198011 - protein, 391 aa, Zea mays
  unsure (1)..(391): unsure at all Xaa locations
  Clone ID: MRT4577_112166C.1.pep
MESCSFRAATAPSPFPSAPSSSSSPRAPCPILRFPVGDFLLRLPRKGRQIGVRRRASGFDAFASFAGKVFVDEAIGAEYGEGFETFRMDGPLKVDVDYLNEKLQECFLQRIRHAMKPDEAFGLIFSWDNVIADTDSLKLNAWRQLALEEGKDIPSGAHVRKSIIHGAADHVLRKVLYWAKEEDKMEKLKARLIELYYENLFKLDTPVEGLREWLDAVQTAGIPCAVASPLDRRCMIEALDRMALSKYFKAIVTDEDDMESIANRFLSAAMKXAPAPLLIVVHHVNIYRSHICGFSFLPXLDRKPSKCVVFEDDPRGVTAAHNCTMMAVALIGAHPAYELVQADLAIAKYSELSVINLRRLFANKGISFMDLQKQIIEKSPPKRRLTVDTIF

SEQ ID NO: 198012 - protein, 330 aa, Zea mays
  unsure (1)..(330): unsure at all Xaa locations
  Clone ID: MRT4577_112167C.1.pep
STRRASPRISSAASPHAWGWISTAPLAIRVSCGNGKVRSXMQKDSLAAPCSSLWAEASNNVGGDWSIFEEQTPIKHCTDFEFQFCDVGGEXVLMAKRTRMLQFCPENLEMTCSVTEDGLLESLQEMIXGTDCLLNSDGTDELPEEWLVSXSQDIEPGFPAEEMYLFHSIVHXVWIPELLSSLSLKMRYCYLWCRKSSXRNNPAAATEETADXGLSSSPVVVHDNPACSRPTSLKGAAGKXIIGAKKARPSVSLPFVLIKPYSIHGDITLNDINEKIHAPSPHKIRHRSDEEPDPLQASAAISGKPVAHKTKIHTEGGKGXGSITITRTKG

SEQ ID NO: 198013 - protein, 86 aa, Zea mays
  unsure (1)..(86): unsure at all Xaa locations
  Clone ID: MRT4577_112168C.1.pep
AYLVQFVPSGRAHDYLHSFMVLITTETTRVSTGPCXAAXXXLAXDPXAXLXALTLALLATGXXIWSSWXSLGPLPVSLAWAFFSIL

SEQ ID NO: 198014 - protein, 68 aa, Zea mays
  unsure (1)..(68): unsure at all Xaa locations
  Clone ID: MRT4577_112169C.1.pep
FRRNLKGEVYIFPSHLMKTXVPVFPPXINGSLLRKIKGGTEPXKMHCAPPKFFIEFDPKNKGLISFFE

SEQ ID NO: 198015 - protein, 165 aa, Zea mays
  unsure (1)..(165): unsure at all Xaa locations
  Clone ID: MRT4577_11216C.1.pep
MVASVQVQARAATVMQPAKIRGRAPTVLIPAXPAVELARAFGVDPDTAMMMCSLHSHVRDDGSHCGDFAILLLVASHXSGLPVSEPEGEGTALTVTYDQIQSNTYLEVNDTDTGNQRPIMEHRRESLPLQPDQHPMNNLCLHPTLFPGTAVGMTXKAPNELHKTH

SEQ ID NO: 198016 - protein, 232 aa, Zea mays
  Clone ID: MRT4577_112170C.1.pep
MWATAASILALASTAVAQSKGFNYGATNADGSCRGYNDFVRFFNEAKSLPGTSGFTTARLYTSIQCGTGADPISAFQAAIDTDTKILVGLWASAGRGVYENELNALLRAARELGSAFTDRIVGMSVGSEDLYRSSPQGVANNAGVGATGAEIEGYIGWMRDWIRGTALESKPIGHVDTWTAWVLPENRGVANSVQWLGHNSFPYFENTRPNSIDQAYENFYAAVGQTRERLW

SEQ ID NO: 198017 - protein, 78 aa, Zea mays
  Clone ID: MRT4577_112171C.1.pep
ARGIFQQEINHLKEFRVEWTDKISTVILRGFDARSRDYLKNKRQWLEKSDGPAVSRTFIESLDYMQEQLSKLQGGLNT

SEQ ID NO: 198018 - protein, 49 aa, Zea mays
  Clone ID: MRT4577_112172C.1.pep
VKLYRILDDQVWCMFFKKKKKKKKKKKKKKKKKKKKKKKKKRKKKKKKG

SEQ ID NO: 198019 - protein, 162 aa, Zea mays
  unsure (1)..(162): unsure at all Xaa locations
  Clone ID: MRT4577_112173C.1.pep
MCRRLLPHRGYISTSGGSNSTPTLYSDGTIPFSILSGGRGASGQVGGGKGERRLYPSPVAHLLLPESDPRLAPTPGRLPSAEETAGGGGGISCGRFHSSLLXXGGAWVWGKGDGGRLGLXDEASGFVRRANPNLRDLRLLARGGIHCGGRTTCGDVFTWGYG

SEQ ID NO: 198020 - protein, 102 aa, Zea mays
  unsure (1)..(102): unsure at all Xaa locations
  Clone ID: MRT4577_112174C.1.pep
GDEAAEREVSVTTFSWEEIQKHNLRTDRSLVIDRKVYNITKWSIQHPGGQRVIGHYAGEDATDAFRAFHTDLEFVGKFLKPLLIGELXPEEPSRXHGKNSRY

SEQ ID NO: 198021 - protein, 95 aa, Zea mays
  Clone ID: MRT4577_112175C.1.pep
HLLERQVPWTTISRSDEVIHPPAMEMKKALLPRLLPPLSDDARGGNVGMHRVWFIRLINCFFYLRGLRLVNCLFVRSFRGRVNCRRVCSVIVTRC

SEQ ID NO: 198022 - protein, 92 aa, Zea mays
  unsure (1)..(92): unsure at all Xaa locations
  Clone ID: MRT4577_112176C.1.pep
LITSPRTPGSLXPLYPPPRPPPCWPRSPPRRPPRRPPARPVVRLALAQAAPPPPPCPPPGRSSPPSSPTTSTERRRAGRQRWDASCLVHPIN

SEQ ID NO: 198023 - protein, 42 aa, Zea mays
  Clone ID: MRT4577_112177C.1.pep
WVENYDDYEFNLGLFLLEEKIERPLGMRVEYIDWVLEYGWVS

SEQ ID NO: 198024 - protein, 123 aa, Zea mays
  unsure (1)..(123): unsure at all Xaa locations
  Clone ID: MRT4577_112178C.1.pep
RRSSAPPSSPPPRPPPCWPRSPPRRPPRRPPARPVVRLALAQAAPPPPPCPPPGRSSPPSSPXPPLSDDARGGNVGMHRVWFIRLINCFFYLRGLRLVNCLFVRSFRGRVNCRRVCSVIVTRC

SEQ ID NO: 198025 - protein, 142 aa, Zea mays
  unsure (1)..(142): unsure at all Xaa locations
  Clone ID: MRT4577_112179C.1.pep
PPTAGAVGERGTHTTPALCSLFSSLSAPSXSLXPHPDFTRXLSRFXXXXLPNVXSSLLVRPSXFRLPRAGGGXAGTGNPWXWRPSNXSSAGXGLEYRRWXLXGXVCRWPXXPGGRPRDSGLRSRGGRQXLTRHRHFAIHAPQ

SEQ ID NO: 198026 - protein, 69 aa, Zea mays
  Clone ID: MRT4577_11217C.1.pep
CILTLVRVVIFPYWSLFLCIPVTYLDDILPVFLIVNCPFRIYVSSVMCAARLFQLSPALPSFWVGIIRG

SEQ ID NO: 198027 - protein, 106 aa, Zea mays
  Clone ID: MRT4577_112180C.1.pep
HLLERQVPWTTISRSDEVIHPPAMEMKKVLCAARRRGARRLLPRLLPPLSDDARGGNVGMHRVWFIRLINCFFYLRGLRLVNCLFVRSFRGRVNCRRVCSVIVTRC

SEQ ID NO: 198028 - protein, 231 aa, Zea mays
  Clone ID: MRT4577_112181C.1.pep
MWCGMWEQQGCGCKESDVETMPWIHSATRHSGAAWIEQRTGIKVDDVVLDTVLHTDSLTTPKRGEQGCAQHKQDNTQSATHIVEQVVCVVEQRHGKGQRRPGKQGGHWLGEGLGLQPPWLGAAALIRSLLLDVWDKEKAGKCHEHMGSPASRSPARPRRRPAGDPRRATPWQGGDQHREQRLIQSTEKGRARQGETAMDGKAPAPLLLRPSHRKGARRRAQWRRKGVVPCT

SEQ ID NO: 198029 - protein, 99 aa, Zea mays
  Clone ID: MRT4577_112182C.1.pep
MDMLVESWHAVGRHKGDQGMAAHVVVPGSGGYWVPAMIRGAAKSSHASGGGRYSYWGRHKGKAKRCCEIAGFAAQVVISAVLGDPTALIAGAIGSLIAR

SEQ ID NO: 198030 - protein, 76 aa, Zea mays
  Clone ID: MRT4577_112183C.1.pep
NSTLGGRPPGLVPAAGGGEPPPPPGGGGVGEKKKKKKKKKKKKKKKKKIKKKNKKKKKKLVKKKKKKKLVPARAAV

SEQ ID NO: 198031 - protein, 48 aa, Zea mays
  Clone ID: MRT4577_112184C.1.pep
ILSVIESLAREIIDHLFSNVVDKKQGNTIVNYYGPSSSEAVSPKQGRS

SEQ ID NO: 198032 - protein, 38 aa, Zea mays
  Clone ID: MRT4577_112185C.1.pep
IIYRDYVDVSVAVGTSKVPYCLLPDPKRMQPWVALRAR

SEQ ID NO: 198033 - protein, 68 aa, Zea mays
  Clone ID: MRT4577_112186C.1.pep
ARTEGCTAGTWAACHGGACAVTASHFRIWSTRVKVVACVSIVGYCGSPPADQTAIAGPVCPAGPSSPR

SEQ ID NO: 198034 - protein, 39 aa, Zea mays
  Clone ID: MRT4577_112187C.1.pep
VEEGLKLAEAVNNKKEVIATAVAAFTLGVFVSSRLFSRT

SEQ ID NO: 198035 - protein, 186 aa, Zea mays
  Clone ID: MRT4577_112188C.1.pep
GRDQIKELAAGLEACGHRFLWVVKGAVVDRDDAGELSELLGEAFLRRVQGRGLVTKSWVEQEEVLRHPAVALFVSHCGWNSVTEAVSSGVPVLAWPRFADQRVNARVVVRCGLGVWAKQWSWEGEEALVRAEEIAALVMEAMGDDAMAVKTANVREAASRAVVDGGTSYLCLAAFVRRCIAPREVI

SEQ ID NO: 198036 - protein, 48 aa, Zea mays
  Clone ID: MRT4577_112189C.1.pep
LVLTKQSVGGVPNPLYYTAHKPRRKLCVRGARWKPRRLNLRNTQCLDP

SEQ ID NO: 198037 - protein, 80 aa, Zea mays
  Clone ID: MRT4577_11218C.1.pep
IYRIISTPPISTTQAHLAQRIIVTLPLALLLFAGSGHGLVNPDAARSPKPPIHNAISDLTDTIVKVLGFHAKGLKVSSFY

SEQ ID NO: 198038 - protein, 56 aa, Zea mays
  unsure (1)..(56): unsure at all Xaa locations
  Clone ID: MRT4577_112190C.1.pep
LAXXXXSTSARAXXPXAFAPAXXMXESXGXXGGGIWXRTEGSXGREXXGRRGXATG

SEQ ID NO: 198039 - protein, 977 aa, Zea mays
  Clone ID: MRT4577_112191C.1.pep
PISDLNPLWIAVGAKFHIIDVNGNVRTTLAKDFFLGYRKVDIKPEEILLSIILPWTRPFEYVKEFKQAHRREDDIALVNAGMRVYLQETERNWIISDVSIVFGGVAAVPLSASRTENFLTGKKWDSGLLDDTFNLLKEDISLSENAPGGMIEFRRSLTLSFFFKFFLSVTHEMKIKGLLADGLHADHLSAVQPYSRPVTVGTQSYELVRQGASVGQPMVHMSAMLQVTGEAEYTDDTPTPPNTLHAALVLSKKAHARILSIDDSLAKSSPGFAGLFLSKDIPGVNHTGPIIHDEEFFASNIVTCVGQIIGIVVADTHDNAKTAANKVHIEYCELPAILSVEEAVKIGSFHPNTKKCLVKGDVEQCFLSGACDRIVSGQVHVGGQEHFYMEPQCTLVWPVDSGNEIHMVSSTQAPQKHQKYVASVLGLPQSKVVCKTKRIGGGFGGKETRSAIFAAAASVPSFCLRRPVKLVLDRDVDMISTGQRHSFLGKYKVGFTNEGKILALDLEIYNNGGHSLDLSLAVLERAMFHSENVYDIENIRINGQVCFTNFPSNTAFRGFGGPQGLLIAENWIHHIATELQRSPEEIKELNFHNDGVVLHYGQLLQNCTISSVWDELKASCNFVEARKAINNFNSNNRWRKRGIAMIPTKFGISFTAKFMNQAGALVQVYTDGTVLVTHGGVEMGQGLHTKVAQVAASSFNIPLSSVFISETSTDKVPNASPTAASASSDLYGAAVLDACQQIKVRMEPIASKGTHNSFAELAQACYMERVDLSAHGFYATPNIGFDWTIGKGTPFNYFTYGAAFAEVEIDTLTGDFYTRTADIVMDLGFSINPAIDIGQIEGAFIQGLGWAAIEELKWGDDNHKWIRPGHLFTCGPGSYKIPSVNDIPLNFKVSLLKGVPNPKAIHSSKAVGEPPFFLGSAVLFAIKDAISAARAEEGHLDWFPLDNPATPERIRMACVDSITKKFAGIDYRSKLSV

SEQ ID NO: 198040 - protein, 74 aa, Zea mays
  Clone ID: MRT4577_112192C.1.pep
RGFDDVSSDGYWHHRLRQVVSPGRDQSVDIRGSTTSSFRELSSTRLIDIVDGRGRRHREHDMERPLVLRNNAPR

SEQ ID NO: 198041 - protein, 72 aa, Zea mays
  unsure (1)..(72): unsure at all Xaa locations
  Clone ID: MRT4577_112193C.1.pep
MGMLPRTTALVASAVVAAALVLGMASAHGPAAAPAPGPAPGISDECFNAVLNMSDXLTYVTAGIKARHPDTA

SEQ ID NO: 198042 - protein, 79 aa, Zea mays
  Clone ID: MRT4577_112194C.1.pep
FAHAAEPARGRRQRLIAAPYAPACAWSRARRCAPGPSLQHRGLLDRRGAGTEVRPRGRASGTSPCPPSTRCSPSPVRGP

SEQ ID NO: 198043 - protein, 669 aa, Zea mays
  Clone ID: MRT4577_112195C.1.pep
MLLGAAAARMEEKRVITGRERDQFPVGMRVLAVDDDPVCLKVLETLLRRCQYHVITTNQAITALKLLRENRDMFDLVISDVHMPDMDGFKLLELVGLEMDLPVIMLSVNGETKSVMKGITHGACDYLLKPVRIEELRDIWQHVVRDAWGKRERSNLDVYKDFNRLPGADPCHSHGHGHGQTTAGASDQSGRIGRKRKEMHSDEEDDGEENDFQEGDEPSAAKKPRVVWSIELHRKFVAAVNQLGIDKAVPKRILELMNVEKLTRENVASHLQKYRLYLKRLSAVASQQASIVAAFGGRDPFLHMGAFEGLQSYQPFAPCAALSSFIPHHGSLGRTTAAAFGVPELAPAITVQAAASNGMISHCAGDASKFQLSGIQENQQPNLGQGSATSLGLPQLQQKWIQQETGDLSAVFSGSALANTLSGALQRVASSPLPPQELLEGVQTKVSAQPPITMASVSSELVERTVGVSANLQDSGISPQGTLPINDGFTADKLQLQDPFDSNGGTNFSVNMPVCPSGSLTASSNAKGGASSCSPVLLAPDTGRHSNYLQFGVAGNSGHDMNDIKQDHLHQGLSTGGFNHDFGTCMTEQTDPNVPYLMPQMKPNTLSSEDKLKQRNIYDLGIPKLHGGFSSSSCNFDGLLNSMIKAEKDDLSFTDSDLGCDFFPLGACI

SEQ ID NO: 198044 - protein, 48 aa, Zea mays
  Clone ID: MRT4577_112196C.1.pep
LGVLLVLFLIVAFSSNVVVDFIFHHCLKISLALNLSASCYLSPAPSHL

SEQ ID NO: 198045 - protein, 75 aa, Zea mays
  Clone ID: MRT4577_112197C.1.pep
SHRATPTTRLTFILPHCSPMATSTLDLSTNSIACHQRSSSFVTLALNHFRRTLPLTDVTIRVSYSSTYTSLLLLT

SEQ ID NO: 198046 - protein, 58 aa, Zea mays
  Clone ID: MRT4577_112198C.1.pep
SSTRTTTRSSTRAFPLHRLLKAGGHRPKGAQTIYAMIQRSLLVRRQIISLVHVHASPT

SEQ ID NO: 198047 - protein, 64 aa, Zea mays
  Clone ID: MRT4577_112199C.1.pep
SRRGYAPPIASYTRYIPNAYPAQNITKQNQCRVQVGNVTLRLHLAQQMHAERMTVFSDHHHRRN

SEQ ID NO: 198048 - protein, 116 aa, Zea mays
  Clone ID: MRT4577_11219C.1.pep
FEAWCSPCFPGFPLFGFFGTPPPPVAPGGFCLGVSPGRAPLWFIWGGFGWVSHGGLLYSVPPQPLPGSSWVFVCSAGPSFGYPFFCVFIRPFQRLCLLLLVLTWLQVLFGSPVFFR

SEQ ID NO: 198049 - protein, 78 aa, Zea mays
  Clone ID: MRT4577_1121C.1.pep
LGYIMHFVTYTESNDISHFFSPSKKERNRFFFSLLHCPMFLKQGFFFCTKKENILAYSKKNRFCPQKQPPFLLLLAPG

SEQ ID NO: 198050 - protein, 138 aa, Zea mays
  unsure (1)..(138): unsure at all Xaa locations
  Clone ID: MRT4577_112200C.1.pep
SRIMQRKLARGDLVVCPKGTTXREPYLLRFSPLFAEIADKVTPTAVRAGGXMFHGSTVRGHKWLDSVFFLMNPAPWYEIRILATCSGSGGASSLDVANGVQRMIGDELGFECTGLTRRDKYRMIAGHDGVDARSSPSS

SEQ ID NO: 198051 - protein, 310 aa, Zea mays
  Clone ID: MRT4577_112201C.1.pep
MGVGSSARFALFFVRCGRAGSTNLSMELWWLNILCEICTGFLKDGKPVKSTREQEITITTDYSIKGDENMISMSYNKIVVHLKPRSTILCADGTITFTVLSCNHVQGLDKISRWSEVCLVSMPSQYYLCPSGETATRAYPELVVQTMSRTCLQAESHTYYGIVFKLISNTAPMPMSPLESLASSAVRTTNISNASLILVLIRGSTTARLMAKYKPTIPVITAMVPELKTDDNFNWTCSDERPARHNMIVRGMILMLLAATAKAFDTESTDEAISFAIDYAKKLKICKSGDSVVTLHRIGASCVIKILTIN

SEQ ID NO: 198052 - protein, 85 aa, Zea mays
  Clone ID: MRT4577_112202C.1.pep
DRPGFNSCLYRAWFGLVLPLVIGLCSQFRLVGIFGSNDRAYCDEFLIIVLCAVRPEMDPGIGLNLINRWLLLVPRQNSVKSTPVS

SEQ ID NO: 198053 - protein, 71 aa, Zea mays
  Clone ID: MRT4577_112203C.1.pep
LSHDRSCAFNAWLTLPLTNCHEVRKQSAAPLSTGYSEQPVCINLIILQPVYITLLYLLLLFTAIEILVIEV

SEQ ID NO: 198054 - protein, 138 aa, Zea mays
  unsure (1)..(138): unsure at all Xaa locations
  Clone ID: MRT4577_112204C.1.pep
SPFFFFFFFFFLLKWHAYEKGKGWTLTPTPNPTNHNIDCAPGPPKKGDHXPPGAKGGAKKPXPPKLKREPPPASGPXGGEPQGDHHKKPPPPPPXLVFSPAPKXEAPGPPKKDPPCPPCPKXPMKKPAPPQGAKKTPP

SEQ ID NO: 198055 - protein, 813 aa, Zea mays
  Clone ID: MRT4577_112205C.1.pep
DAGIDQETYLLYLVDDLLQKPTVSELAEGHAILDDGRALLDTGIIAATGKAWQDLVTLAHSSSHSVVKELMSCNKELSLYEDLVAAWVPAKHVWLRNRPLGKELISALGKQRLFSFCSYDFSFLHFGTSAEVLDHLAGSYSGLVGRRHMCSLPETTACDIAATAIILCTKISSGVSIGEDTLVYDSVLSGRIRIGSIRHVVTVNIREFDGSACFTLPDRHCLWEVPLANSAGRVLVYCGLHDNPKVSIQKDGTFCGKPWINVLEDLRIQDTDLWGSTSQDKCLWTAKLFPVMSLPEMLNVGMWLMGSECDPDGRIASLWQKSQRISLEELHRAIDYRQLCTDSSKHQANLAADIAKACMNYGLLGRNLFQLCEEMLQKDTCLAVYEELLSFFPSHSEQYPGVLPQSREYQVKMDLLRASGDLSTACTVEEKVWASIASETATAIKYGSKEPSSGKMSSNHESLHPRKTVVELPVRVDFVGGWSDTPPWSLERPGCVLNMAISLQGSLPVGAMVETTEDHLGVRIEDDAGRHVYIDNLASISSPFKESDPFRLVKSALIVTGILGHEILSKSGLNIRTWSNVPRGSGLGTSSILSAAVVKGLFQVMEDDESDDSVARAVLVVEQIMGTGGGWQDQIGGLYPGIKCTQSFPGQPLRLQVVPVLTTPQLIQELEERLLVVFTGQVRLAHQVLQKVVTRYLRRDSILISSIKRLAELAKIGREALMNGELDELGGILLEAWRLHQELDPFCSNRPVDELFAFADPYCCGYKLVGAGGGGFALLLAKNPSCARELRRALEESDTFDVKVYDWNVAMPR

SEQ ID NO: 198056 - protein, 327 aa, Zea mays
  Clone ID: MRT4577_112206C.1.pep
MATELDVSKSRRFDIAMSRRTRRSTSLVACFQDQYTPSLAQHRHQELKAFLQCQDEELKALQRCEDAEHKTLCLNEDEELKIPQVPMQYEDDKQETPEQYEDGQEKESQQYPDQEQEIPDSCQDDEKTPNQYLDEGKMLEQYQDEDDELPSQYQDHELVTQKLPEEDEGTASERFQDEERKELHQHQEADEQTSQSEDEEELKSQQERHDVEQKAPKQFQVLKKVAAPPRPVENVPRFSLQELIRQKQQLPTGEAMATSKVGGRGESVLADHMVSGAGAAAAEGTALAMVIKRPEGGKKPMGMIRRCVKALNQMIKAKHGSKKNLHF

SEQ ID NO: 198057 - protein, 44 aa, Zea mays
  Clone ID: MRT4577_112207C.1.pep
RLFSTELLVSYLSQKTDNIYLNVRVYINHKLMSHCTDVSKVQRL

SEQ ID NO: 198058 - protein, 351 aa, Zea mays
  Clone ID: MRT4577_112208C.1.pep
MATELDVSKSRRFDIAMSRRTRRSTSLVACFQDQYTPSLAHHRHQELKAFLQRQDEELKSLQQCQEEELKALQQCEDAEQKTQCLNGDGDLKIPQAPLQYEDGEQKTPEQYEDEHKESQQCSDEEQEIPDTYQDDEKKPDQDQYLNEDKMPEQYRAKDELPSQYQNQELMIPNLPEKETASERFQDAEQLVTPNLPEEDEETAPKQFQDEEQKGLQQHQEPDEQASQPEEQKSQQECHEKAPEQFQTLKKLGAPPRLADNVPRFSLQELIQQKQLPTGEAMPARKQGSRGESVLADHNVSGPGAAAGGTTLAMVIKRPEGGKKSMGVIRRCVKALNGMIKAKHSSKKNLHF

SEQ ID NO: 198059 - protein, 49 aa, Zea mays
  Clone ID: MRT4577_112209C.1.pep
CNKAVRGTPGQLTPSSDLTYNGSPRYYALAWAHCPSNYRNKCISLFPSE

SEQ ID NO: 198060 - protein, 100 aa, Zea mays
  Clone ID: MRT4577_11220C.1.pep
AQPPLRINSEKKEGEKKKSIASAKSGDPNRRKRRRSLASPARKFLRAVEEQTNCGLEKANKEWNRVMPPKRVTLKTLLQMHLHLQQEVQKLLWIYKLLPQ

SEQ ID NO: 198061 - protein, 64 aa, Zea mays
  Clone ID: MRT4577_112210C.1.pep
LGLRLAVHTNNTALDVSEFMHALVAISWIMFSLDLLSPMDSRQFAHWSRSFINTKMCLCTPTSQ

SEQ ID NO: 198062 - protein, 74 aa, Zea mays
  Clone ID: MRT4577_112211C.1.pep
QLIHEDAAKITVLLKLAICLSPRRQSHSHPIPNANTTCSLPPPLHSTTASWTTKQLKHITAFPPPRWISRCASC

SEQ ID NO: 198063 - protein, 41 aa, Zea mays
  Clone ID: MRT4577_112212C.1.pep
EWISQSARPQAYIDPEPMPFTNNLLIPSKHCNQRPAVIHCE

SEQ ID NO: 198064 - protein, 96 aa, Zea mays
  Clone ID: MRT4577_112213C.1.pep
RDKLAFQPKLYELNPFRFPNSETELLILLKTPMLQLWAFSLMGFCVRGSSIRVSMGPKLLAIVNKIVIFLNFFFFFFFFFFFFFFFFFFIFFFPGP

SEQ ID NO: 198065 - protein, 81 aa, Zea mays
  Clone ID: MRT4577_112214C.1.pep
MPPPATPCDSRVRRHTPVPNPCTIVHSPPITPSRPPLRAIVDDHRGLRPHVCGQAEIWICSPLLRRSAVSSWRKNKQLAVE

SEQ ID NO: 198066 - protein, 171 aa, Zea mays
  Clone ID: MRT4577_112215C.1.pep
MRDARAPQLQQRAHGGVGVVVVLLVLLAGAASGQQQAQPPPVVPPADLPDVERQLNNLTNDIAVTISDKFSFCVADLEEDWNEAFNYTSDLSFVDRCLTETQGDLVQRLCTPDEVKFYLASLYDRDGDKNINLKTNINCNISSWGRGCDAGWACAADPVVVVRDPRNGVPL

SEQ ID NO: 198067 - protein, 113 aa, Zea mays
  Clone ID: MRT4577_112216C.1.pep
VVPPRSRPQNKLGFLLEGPLVFLLRMPVVILNRGINLRAGFFRANSFSLSLRGPKLIPPVCGTRTWTWPCVTQIILLLGPGWEFPGKKMGPVCVLSFSPVNCKCDAKTVFPPA

SEQ ID NO: 198068 - protein, 85 aa, Zea mays
  Clone ID: MRT4577_112217C.1.pep
QRRRASPRSTAGGGAGLVPLHLRRLRVRLAWPMMLKLSAGGSRDHDGRQGQAGARAAARESCWMVGCDACACERRSTVCSRPARG

SEQ ID NO: 198069 - protein, 86 aa, Zea mays
  Clone ID: MRT4577_112218C.1.pep
KINFIPPNLGCYTFESSFFRYLDKCVEMDSLSLNNYAIPHSGSMHPPLTPRERTMHCQSFWLTLINHKIILTFDVVSSKCIATISH

SEQ ID NO: 198070 - protein, 69 aa, Zea mays
  Clone ID: MRT4577_112219C.1.pep
HTFDHALQVSLGNTSSESQSGQPNSRGDQYIISFLSYSRSLTSQQMRLLIHNAYLIQDSLLQMFYHQFL

SEQ ID NO: 198071 - protein, 282 aa, Zea mays
  Clone ID: MRT4577_11221C.1.pep
GDWLPPAERGKPSRVLELELHSAFTAPAITHRVLRLVLFPQPNPHPARFLRSHIESDMKRAAPSQEPLDVSSGDSSGSDSDQLGGKDKGGSASKAAAGAEDVKRVVLHKESQDVSSDDDLSSDSDDDAGKGNAWNAFGLPNSSKAASTAEAQVKEEENRCGFQCSEPARIPRRPIRLDSSSGSGGTELVLVHWERPRRQRGRTRVLRGTRAYQGRSNRRGEVHRAAERAAEPAVAGERQEGEGRLLLAEREAEEGPGPSQQGEELRRGGEAAPEGQRRVLWL

SEQ ID NO: 198072 - protein, 583 aa, Zea mays
  unsure (1)..(583): unsure at all Xaa locations
  Clone ID: MRT4577_112220C.1.pep
MGRDMPTAQRGHPPEQHGRHALPARHQKGNSSDPSGFLTSWNTNNSSPDYCGWNGVTCSRTHPGRVIELKLSSQSLQGRISPSLGNXLQQLIELDISSNKLEGEIPYTLSECRQLNVLQMDSNFITGNISPLRSLTSLNMINLSHNMLSGIIPAELGGMSSLTQLDLSYNDLQGKIPMDGVFRNASAVSLVGNSRLCGGLSDLHMPPCPIALKEKAAQYYIIRVLIPIFGFMSLLMLVCFVLTKKRTAQQSSLLSPLGDQFPIVSYNDIAQATKNFSESNLIGRGGCGSVYRGILMENNLKVAIKVLDSDMRGAEKSFLAECEALRNIRHRNLVPIITACSTVDINGNVFKALVYEFMPNGDLDSMLHSQGNGKVRKPLDLNQRASVAANIADVLDYLHNGSGKTIIHCDVKPSNILLDDDMNARLGDFGIAKFYLDSRTTSTADYSKPINSTGVKGTIGYMPPEYARGGHASTCGDVYSFGIVLLEMLTGRRPTDHVFVDELNIVKFVERSFPDKILEVIDGSLQDDMKSAQINMVTESEAYRCLFSILQLALSCTREIPSERMTMKEAASRIGLIKTTYIC

SEQ ID NO: 198073 - protein, 108 aa, Zea mays
  Clone ID: MRT4577_112221C.1.pep
IASAQLCYQYIRDRFLPDTAIDLIDGAGSSVSLRHAQLHNKSKDLFKDVRQIFYQSNEAVRVQYFEKGKLLFCTAVTKPIRSHLSNKVYMVNSKHYVVSFLDKKFVTD

SEQ ID NO: 198074 - protein, 71 aa, Zea mays
  Clone ID: MRT4577_112222C.1.pep
NAVLIPQIDSPSAHLWFTVSRCPLKNSFVPIQSLCRPGPARPGPGPVEPLLKLGPTKQGRLDFSRSRRRRR

SEQ ID NO: 198075 - protein, 65 aa, Zea mays
  Clone ID: MRT4577_112223C.1.pep
LVLHYCMQIVLYVTCTVLESVVCMIAREKQVTIRVKGLVCVYRYCRLVGLELTDSRYAFSFGDIH

SEQ ID NO: 198076 - protein, 481 aa, Zea mays
  Clone ID: MRT4577_112224C.1.pep
MGKQQEGKRRRGEKDGKRKGRGKTAAAAVPEDAAPVAGCWIRFPRLRGCMPSRAKVDSSTSARGGGRETKPSTDDACQDQSVPPASGSATTSNTGSISPSSIVGEELKLAFQLRRFTFSELKCATRNFRPESLLGEGGFGCVFKGWIEENGTAPVKPGTGLTVAVKTLNHDGLQGHKEWVAEVDFLGNLQHPHLVKLVGYCIEDDQRLLVYEFMPRGSLENHLFRKSLPLPWAIRMKIALGAAKGLAFLHEEAERPVIYRDFKTSNILLDADYNAKLSDFGLAKDGPEGDKTHVSTRVMGTYGYAAPEYVMTGHLTSKSDVYSFGVVLLEMMTGRRSMDKNRPNGEHNLVEWARPYLGERRRFYKLVDPRLDGNFSIKGAQKTAQLAHACLSRDPKARPLMSQVVEVLKPLQNLKDMASSSYYFQSMQHERRTALANPYGSQSMKAQSTFARNGQQPMRSLSYGPHASPYRQSPRLDSKRQ

SEQ ID NO: 198077 - protein, 98 aa, Zea mays
  Clone ID: MRT4577_112225C.1.pep
WTGCGWLQQKIGATKQPRRIVCRMRRLQHQMYRRSRLLHLHTRQLMPNTQRYVQEHQQRPSCSCRRVPSVLETPTTTDARAKLASSMVTIDPSIDRDC

SEQ ID NO: 198078 - protein, 62 aa, Zea mays
  Clone ID: MRT4577_112226C.1.pep
CIGTGAWFVKKKKKKKKKKKKKKKKKKKKKKKKKKKKKKKKKKKKKKKKKKKKKKKKKKNIF

SEQ ID NO: 198079 - protein, 323 aa, Zea mays
  Clone ID: MRT4577_112227C.1.pep
MKQPRGRQEPRRVGNAAMVVTMVVSLCVLTYIKARYCSNPFPKAVAEVEVDEDYDSTRYKLTGPVGEEDFDPSRPTCYNTSKRSERCAAVGDIRVDGNHSRIYISPLSREWRTKPYARRHDAVAMDDVREFTLVPFGGPNDTAVPPFCTRTHSVPGFLFSSGGFAGNLYHDYADVLVPLFASTNHLGGEVQFLLADIKDWWADKFRPVFRQLSRYDVIDVNNDREVHCFPRIIIGSTFHRAMGIDPSRSPGGVTVADFKRLLRRAFRLERAVASRSGAPRRRDRPRLLIISRKSSRRFVNERAMARAAAAALFFFFFRGNGCG

SEQ ID NO: 198080 - protein, 81 aa, Zea mays
  unsure (1)..(81): unsure at all Xaa locations
  Clone ID: MRT4577_112228C.1.pep
PGYDPRAQFPANTDRMSKEITSLAPSSMKINVVAPPDRNYSVWIXRSILXSLSTFQQRXISKGEXMGSGPAICHRKCVQVS

SEQ ID NO: 198081 - protein, 213 aa, Zea mays
  unsure (1)..(213): unsure at all Xaa locations
  Clone ID: MRT4577_112229C.1.pep
MDANWGVGVGVDLNAPPPTGGDDWRAQLLPEARSRVVNKIMECLKKHLPVSVPEGLNELQIIAVRFEDKIYAAATSQSDYLRKISLKMLSMETKTQPGNAQVIPNQMNLGQASCLRMPDGTPXGPPRGQTPLQLPQPSPPXGVDPNASAPTGGDWRPQLQPEARGRIGNNIMXDXLKKHLPVSRPEGLNELGKIAVRFEEKIYNEVTMHMDYL

SEQ ID NO: 198082 - protein, 193 aa, Zea mays
  unsure (1)..(193): unsure at all Xaa locations
  Clone ID: MRT4577_11222C.1.pep
PPKKGGPPRGXPPQKTKKPKGPPKPKKKKGXEEQTPAGDKKKEKKKXPFRNREPPPRGTKPPTRKKKKTPGPPKPERRRGPPGETPPPRGPXPNLRNPPRPPGPKPTPPFGXPKNGGNTPEEEPXLIENRGPHLDGTPKKKKKTPPPQKETPSLWFLNKPSPPGKTVGPSPPPPGSPRRGPTPSGPWAKIPAP

SEQ ID NO: 198083 - protein, 67 aa, Zea mays
  Clone ID: MRT4577_112230C.1.pep
DALGADSGGHSAGQACAGLGRLFVGPPSRVGGPVETPLTRYVGIAGRVRLPHGSSPGHPFFLQPIFW

SEQ ID NO: 198084 - protein, 154 aa, Zea mays
  unsure (1)..(154): unsure at all Xaa locations
  Clone ID: MRT4577_112231C.1.pep
IARRDGSKGNGIVINDKKKETLNIDEPKGDKPTDXGSNKKRKDGKKKRRIKKIIYYDSDASSSSPKEDDDEDSXKEETVNFXFDYSCIPYNLNAHLLSIPLGKPPHFDGEDYSFWSHKMRSHLFSLHPSIXEIVENRMHFDSSDNVVFINEQVH

SEQ ID NO: 198085 - protein, 75 aa, Zea mays
  Clone ID: MRT4577_112232C.1.pep
TCSWDMLRVSRLASGACSDAGNNGTLRLPSSLPFDLDQQPPGCLRRNRRRGEEVAQEWLQEGWKEQYTDGFIMFV

SEQ ID NO: 198086 - protein, 86 aa, Zea mays
  Clone ID: MRT4577_112233C.1.pep
MVSLTKWFPTPACVLVSAAVFALAHLTPGQFPQLFILGVALGFSYAQTRNLLTPITIHAFWNSGVILLLTFLQLQGYDLKELLGAS

SEQ ID NO: 198087 - protein, 68 aa, Zea mays
  unsure (1)..(68): unsure at all Xaa locations
  Clone ID: MRT4577_112234C.1.pep
PAGTGPELIPGSTSSLVGGRPFFFFFFFFFFFFFFFFFFFFFFXKXGLETRPFHCFPRGDFSAHELKT

SEQ ID NO: 198088 - protein, 57 aa, Zea mays
  Clone ID: MRT4577_112235C.1.pep
HASGLTILNIFRIFVFKINTRIYCLNLLFTQPIDQGYFQPGRSLYWFHTFLRLLTQI

SEQ ID NO: 198089 - protein, 44 aa, Zea mays
  Clone ID: MRT4577_112236C.1.pep
FSGPSRTLVHSSSDKPDEMRSIAILAAKGPHSHSGTNHTPALRM

SEQ ID NO: 198090 - protein, 61 aa, Zea mays
  Clone ID: MRT4577_112237C.1.pep
VGVFFFLVFFFFNKKRPVLGFFYRVKSYHRGPINFWLQQTQSVQPTCILTHVLGPKDCPQT

SEQ ID NO: 198091 - protein, 122 aa, Zea mays
  Clone ID: MRT4577_112238C.1.pep
LFWPPRGFSVFGSGLYGVGDWERITIFHREPLCPWFGPGFVRLPIWGVGPPAGAGPGFPGCPTGPVGCRRVLVPPIAPNNGVLCCALCGQAFVLGRPFQGRSFFGLGLPLVGGAVVPPALFV

SEQ ID NO: 198092 - protein, 173 aa, Zea mays
  unsure (1)..(173): unsure at all Xaa locations
  Clone ID: MRT4577_112239C.1.pep
YHLLPLSSPHPPLPDSHLPTATHTLARPPSIPIPTSTALRRGSGTGPRAAAAPWRPSPPSSAPRAPNLPPTLPEAATASDAPPTCPPPPEHLPRLPPAAPPHLLLPSPXAPPLPCIASPHPVPXAPPLLPATTCSSSSAQPPRSWWRSDDWPFLYGPDPVRFYQSHTSSSQIR

SEQ ID NO: 198093 - protein, 96 aa, Zea mays
  Clone ID: MRT4577_11223C.1.pep
QRRVLFFFFFFFFFIFFFFFFFFGPIDLNHYYRGAEAGISFDWSLINPIQTDLLNKSETGSWKKARSFGGIPDPGLLGSSIFLFLPVPGRLLCRLF

SEQ ID NO: 198094 - protein, 46 aa, Zea mays
  Clone ID: MRT4577_112240C.1.pep
YEFSTESFRVFWSARALGQHVCSYSNTIVMHLTRHVKNQTEIPNSQ

SEQ ID NO: 198095 - protein, 93 aa, Zea mays
  Clone ID: MRT4577_112241C.1.pep
RECPLLLLWAAGPLEAAGCQKKSLQHASRTSGTASSNSAIPASILLSEPQSIGLCICNFTLISGLVFIKYFYLYVWKLYQFKQSSLILISKGP

SEQ ID NO: 198096 - protein, 76 aa, Zea mays
  Clone ID: MRT4577_112242C.1.pep
DRPINNYEPAPNAGGSSKNTKGVKEKRRCTIIELVCRSAHTIHYTIANKKLPWTFMLETQRLLSEPAPVISASPSG

SEQ ID NO: 198097 - protein, 205 aa, Zea mays
  Clone ID: MRT4577_112243C.1.pep
MHFITPALVALLAAPLALAAPTQASDYKETCKKDFDKVWNSHDDKWWKKEKTFYFDAEYVVKATPDQVIANSGVPTPGEHGARGLFKYGINIAENVICYNITLSGVTGEYQSPAITATHIHEGVKGKPGPPRLAFPNPTGPDYRRNSVGCLKGPFFVNVTNPATGKDQADGFHVSQIVKNPKGFFTDSHTSKFTAGAVRGQLPGY

SEQ ID NO: 198098 - protein, 261 aa, Zea mays
  Clone ID: MRT4577_112244C.1.pep
MSSRSPPPKDRRMRTERTSYRGAPYRRDSRHGPSRFRNDLCNNCKRPGHFARECPSVAVCHTCGLPGHIAAECSSKGTCWNCKEPGHMANSCPNEGICRNCGKSGHIARDCTAPPVPPGEVILCSNCYKPGHFREECTNEKACNNCRQSGHIARNCTNDPVCNLCNVAGHLARQCPKSDTLGERGGPPPFHGVGAPFRGVGVPFRGGLSDVICRACNQIGHASRDCMAGAFMICHNCGGRGHTAYECPSVSLIERFPPRRF

SEQ ID NO: 198099 - protein, 582 aa, Zea mays
  unsure (1)..(582): unsure at all Xaa locations
  Clone ID: MRT4577_112245C.1.pep
MLRPEPALGFLAAGPVRACKPPPERRRKKQPPTRRRRPASAATVVGLGPRGAADPDPAHSSALLPLTSGGSGSGFASRGTVAPDEEEGRDGASSAESQEVAEAANDSFSYSLRECQKQRRLKSERSALVRPPASHKLNNAGGIELLVLSPRCLIGGNPGGMSKSSTTSSRSRSGTGTFPSPGTPSCNRHCAGSMQYSKGWSSERVPLGTGRNRRYGGSGVVLPFNNGRKLPSKWEDAEKWILSPVSCDGMGRMSAPAPHHRRPKSKSGPLGHPAGIPGAYAAVSPLVPCFDGVLAAANFAAHSPFSAGVLIPEXGALATSAVEETDVVMTVAADPTXEKESYILRSASIHAWTETLMEASAFANISEETVQDDKLQRQTEATSMISSPIIKKDIGTQMSPEDSISSPKARHSCSSLPSRHLIKETNSHIPKPEIRDVQVDDQVTVTRWSKRHVTRGXIRGQQILLNGGRRLLKPELHLLMKKKEKDACQSXREEAKITAWENLQKAKAEAAIRKLEMKLEKKRSSSMDKILGKLRSAQKKAQDMRSVVSSSEGQCSVRATKKTSSSVKTGRPFSCCFTYRAC

SEQ ID NO: 198100 - protein, 300 aa, Zea mays
  Clone ID: MRT4577_112246C.1.pep
SARGPRTGLLPSAASPVLHSCIRSRFTPSGRPPRSFSPPSLSLRRLGRLPPPPYARSRGPRHSYSSVSSPGDARFRNDLCNNCKRPGHFARECPSVAVCHTCGLPGHIAAECSSKGTCWNCKEPGHMANSCPNEGICRNCGKSGHIARDCTAPPVPPGEVILCSNCYKPGHFREECTNEKACNNCRQSGHIARNCTNDPVCNLCNVAGHLARQCPKSDTLGERGGPPPFHGVGAPFRGVGVPFRGGLSDVICRACNQIGHASRDCMAGAFMICHNCGGRGHTAYECPSVSLIERFPPRRF

SEQ ID NO: 198101 - protein, 73 aa, Zea mays
  Clone ID: MRT4577_112247C.1.pep
RNRKFPGRLPGLFCSCTALIPRGGGGGEHSIPRPAGTKIAPPRTVNLLHLPIGGIIAPSFSYRWDEEAYAVLL

SEQ ID NO: 198102 - protein, 44 aa, Zea mays
  Clone ID: MRT4577_112248C.1.pep
TCFQVRGVQNKLVTQWLGGAPDAYQFRSYNHYVNVMSVRSGRTR

SEQ ID NO: 198103 - protein, 129 aa, Zea mays
  Clone ID: MRT4577_112249C.1.pep
SYTIFFFAISKKENSYTEDINLLHFVFRDLFICVLRCKREEAKITAWENLQKAKAEAAIRKLEMKLEKKRSSSMDKILGKLRSAQNKAQDMRSVVSSSEGQCSVRATKKTSSSVKTGRPFSCCFTYRAC

SEQ ID NO: 198104 - protein, 88 aa, Zea mays
  Clone ID: MRT4577_11224C.1.pep
AGGSAACPSSRRSRARAAPRTAPPPRAGAPPRAGAGSGRRATWTSESRRSRSRREKLLWTCTVWARAVHQLSDRQVMYVLAKLSVNHQ

SEQ ID NO: 198105 - protein, 234 aa, Zea mays
  Clone ID: MRT4577_112250C.1.pep
LFPFPLCRFRNDLCNNCKRPGHFARECPSVAVCHTCGLPGHIAAECSSKGTCWNCKEPGHMANSCPNEGICRNCGKSGHIARDCTAPPVPPGEVILCSNCYKPGHFREECTNEKACNNCRQSGHIARNCTNDPVCNLCNVAGHLARQCPKSDTLGERGGPPPFHGVGAPFRGVGVPFRGGLSDVICRACNQIGHASRDCMAGAFMICHNCGGRGHTAYECPSVSLIERFPPRRF

SEQ ID NO: 198106 - protein, 166 aa, Zea mays
  unsure (1)..(166): unsure at all Xaa locations
  Clone ID: MRT4577_112251C.1.pep
ASDKRTNSHIPKPEIXDVQVDDQVTVTRWSRRHVTRGXIRGQQILLNGGRRLLKPELHLLMKKKEKDACQSLRCKREEAKITAWENLQKAKAEAAIRKLEMKLEKKRSSSMDKILGKLRSAQKKAQDMRSVVSSSEGQCSVRATKKTSSSVKTGRPFSCCFTYRAC

SEQ ID NO: 198107 - protein, 71 aa, Zea mays
  unsure (1)..(71): unsure at all Xaa locations
  Clone ID: MRT4577_112252C.1.pep
NRCRLAASPCSSVRPVIRAPPASVQDLSAPIHNRACSTMPTRPSCTTMHTPMHPYLTGHFTSKMDXXIIFS

SEQ ID NO: 198108 - protein, 57 aa, Zea mays
  Clone ID: MRT4577_112253C.1.pep
MAAKAISSPVPVEWYPTLAVVMVSVGLMFTASFFIYEATSSRRSRSLFVLLASGVYV

SEQ ID NO: 198109 - protein, 61 aa, Zea mays
  Clone ID: MRT4577_112254C.1.pep
SLDLLRQVSLLRYTKPGEGTLSSGSRITSNIYKSAFSNNTNYFLTGASKTSIILISVLLLV

SEQ ID NO: 198110 - protein, 76 aa, Zea mays
  Clone ID: MRT4577_112255C.1.pep
MAAKAISSPVPVEWYPTLAVVMVSVGLMFTASFFIYEATSSRRSRSLSKEIATAVVASVFLGFGSLFVLLASGVYV

SEQ ID NO: 198111 - protein, 137 aa, Zea mays
  unsure (1)..(137): unsure at all Xaa locations
  Clone ID: MRT4577_112256C.1.pep
KKRGGGLHPSIRPVFYPFKSKTLNSRPMGGGIPGAKNSLQGAPPGYNRPGQPHTKANFLGVPMLLGGAGPPLGGGPGRGPHWAQIVAYPDVPRRVVPPTGGGNGHGHRPGHGPPXELGLGGGEIFLQQNGPPPGVPW

SEQ ID NO: 198112 - protein, 89 aa, Zea mays
  Clone ID: MRT4577_112257C.1.pep
HNLRLTSKINTYRTSLPARFSKRNARPSFFNPAWPPDLLRSCLSRSRGIRHARARTSGFLLGPLAAKIAGTIRGRHLSDAPGGPTSWFF

SEQ ID NO: 198113 - protein, 50 aa, Zea mays
  Clone ID: MRT4577_112258C.1.pep
QCYTQLIGIVIKKLELYQPNCLCVDQFMGAFAFLITYCFKTYMETWFSLL

SEQ ID NO: 198114 - protein, 47 aa, Zea mays
  unsure (1)..(47): unsure at all Xaa locations
  Clone ID: MRT4577_112259C.1.pep
AEIVFVCAFKCAVVVNKLKXTLDXMGTKLKHKFLSFTTTAHLNPDAW

SEQ ID NO: 198115 - protein, 230 aa, Zea mays
  Clone ID: MRT4577_11225C.1.pep
MKKIFGAKKDKGPPPSIQDATERINKRGETVDEKIKKLDEELARYKEQIRKTRPGPSQEAIKARAIRLLKHKRMYEEQRNMLYNQTYNLDQVGFAADGLKDAQQTMNAMKAANKELKGMMKTVKIDEIDNMQDEMTDLMDVSNEIQETLGRSYNIPDDVDEEELMGELDALESDMEFDSAAVPSYLQPDSDFDADLNLPAAPSRPAMVPAGGLQEDELGLPAVPRASLRS

SEQ ID NO: 198116 - protein, 77 aa, Zea mays
  unsure (1)..(77): unsure at all Xaa locations
  Clone ID: MRT4577_112260C.1.pep
QHRKHRGPTRAXXKXXLRKLXGXTEXXETATKNPQXXQATIXNLITPYLXPTVSKECEKRRXKPYRIQQEMEDGILP

SEQ ID NO: 198117 - protein, 166 aa, Zea mays
  unsure (1)..(166): unsure at all Xaa locations
  Clone ID: MRT4577_112261C.1.pep
GTDSSTSNYDSFDSGSSWSGSEGDDXLKPFSDAVVFRYCLDSTYDRSKFLRGASLTVNKDDLEGLDDRVSLYSGCSHHRNQILMSKRLFTEGADTWNMISKNNERALRAGSIPQIRPALGNIVHSVRRGLSEQDLEVLRGIAGXGEDIXREEIGWLWSGLFPVGTI

SEQ ID NO: 198118 - protein, 121 aa, Zea mays
  Clone ID: MRT4577_112262C.1.pep
TGGAISAMSSLWMVPQLMILGLSEAFNLISQIEFYYKEIPEHMRSVAGALAFCNLALGNYLSGFLVTIVHRTTGSGQNWLAQDLNKGRLDLFYWTIAGIGVFNFIYFVICARWYRFKGASN

SEQ ID NO: 198119 - protein, 77 aa, Zea mays
  Clone ID: MRT4577_112263C.1.pep
QKTTVGAYIMLRTNLPLHTVYLARLHDAYNRHAPNLKKARARPSQGRADLLRSDGRIVLIVHILISMHALVLDFLKH

SEQ ID NO: 198120 - protein, 111 aa, Zea mays
  Clone ID: MRT4577_112264C.1.pep
KNHWAVMGVNVWRRAHSAFTASLEELETTNFTGAEDDTEFLKLLFECKNKPERSFNTIQITITHTHTQFCALGGCQPLPIYQSSYSQITEGAGVSRQLARLRAERAATWRH

SEQ ID NO: 198121 - protein, 85 aa, Zea mays
  Clone ID: MRT4577_112265C.1.pep
MEGDKKAGAVAEKKAAAADQSREVAAGDVSLKELSRRLNDFAKERDWEQYHSPRNLLLAMIAEVGELSELFMWKGEVRKGLTNWH

SEQ ID NO: 198122 - protein, 77 aa, Zea mays
  Clone ID: MRT4577_112266C.1.pep
WRVQALRGSNFLDQRVLFLLRSCPLCKEFAACFFRGQVLWGPWCIGYEAIVFSLVEAGFLRSGAPRRVGYYAGGPVF

SEQ ID NO: 198123 - protein, 138 aa, Zea mays
  Clone ID: MRT4577_112267C.1.pep
MDPKGKNTKWERPNSKPQRQNSPPWGRHRNLSWRLRPPHVKTEIKNDSQISSSGEGADPGNKNPPTHPAAMDLDIGRRLFCQKCGDEGHHARDCFKPLWCEICRKETHVTAKCVWPKQSKPTMPIVGMAADGLGFYAS

SEQ ID NO: 198124 - protein, 621 aa, Zea mays
  unsure (1)..(621): unsure at all Xaa locations
  Clone ID: MRT4577_112268C.1.pep
MAKEQDGSPKVRHPEFQRMRVTLTIGVIGLCVTAYILGAWQGTSNGISSPLISTRTQCKDPVRSSGARLDFQAHHQVGFNESALAVEKFPPCQLKYSEYTPCQDPRKARKFPKKMMQYRERHCPKKEDMLRCLIPAPRNYSNTFQWTKSSDYAWCNYIPHRELSIEKAVQNWIHVEGDLLRFPGGGTMFPHGADAYIDDINALVPLNEGNIRTALDTGXCGVASWGAYLMTRNIITMSFAPRDSHEAQVQFALERGVPAMIGVMGTERIPYPARAFDMAHCSRCLIPWNKLDGVYRIEVDRVLRPGGYWILSGPPIHWKSHYQGWERTEGDLKQEQDEIEDLAKRLCWKKVVEKGDLAIWQKSINHVECVDSRKVYDAPQICKSNDVDSAWYKKMDTCISPLPDVKSEDEVAGGVLETWPKRAFAVPPRVIRGSVPGLTPEKFQEDNKVWSERVDHYKKLIPPLGKRRYRNVMDMNAGIGGFAAALMKYPLWVMNVVPSGLAHDTLGVIYERGFIGTYHDWCEAFSTYPRTYDLIHADKVFSSYQDRCDITYILLEMDRILRPEGTVIIRDNVEVLVKVQAITGGMRWKSQIMDHESGPFNPDKILVAVKTYWTGKLVQKQ

SEQ ID NO: 198125 - protein, 34 aa, Zea mays
  Clone ID: MRT4577_112269C.1.pep
KDRTEPTQFGAVHAFILQCCSQYILSWTGYENGV

SEQ ID NO: 198126 - protein, 200 aa, Zea mays
  Clone ID: MRT4577_11226C.1.pep
MKKIFGAKKDKGPPPSIQDATERINKRGETVDEKIKKLDEELARYEEQRNMLYNQTYNLDQVGFAADGLKDAQQTMNAMKAANKELKGMMKTVKIDEIDNMQDEMTDLMDVSNEIQETLGRSYNIPDDVDEEELMGELDALESDMEFDSAAVPSYLQPDSDFDADLNLPAAPSRPAMVPAGGLQEDELGLPAVPRASLRS

SEQ ID NO: 198127 - protein, 73 aa, Zea mays
  Clone ID: MRT4577_112270C.1.pep
LSCSLSCPALAVLGHSVIQVHCLLALLVVSDTIQQQGFHILNTPIVRGILLVINPPQHVGSVGQIQREQRLAR

SEQ ID NO: 198128 - protein, 48 aa, Zea mays
  Clone ID: MRT4577_112271C.1.pep
PMAFGGSHEPAAYGVPVSIGGLNPECNKKLQAGIDFILELKVSVTKSR

SEQ ID NO: 198129 - protein, 61 aa, Zea mays
  Clone ID: MRT4577_112272C.1.pep
RRVQGVRSMMRPPCCRPGAAVCSENSLALPRVLSIENTIYRFAERDVDENVPFSMSCVCNH

SEQ ID NO: 198130 - protein, 91 aa, Zea mays
  unsure (1)..(91): unsure at all Xaa locations
  Clone ID: MRT4577_112273C.1.pep
MGWALPLRLLALAASAVYSTSGGCGCQTSLLHLPPSFYMPSPNYLPPQHPPQTWQYPTQPPQLNPCXXFKSWGDYSDYNPYLGQCEKFLRH

SEQ ID NO: 198131 - protein, 51 aa, Zea mays
  Clone ID: MRT4577_112274C.1.pep
VVLIDNNNEKEVVLAVVHKEHAYDIKNLLARKSRRTWKGECRRCEADGARG

SEQ ID NO: 198132 - protein, 89 aa, Zea mays
  Clone ID: MRT4577_112275C.1.pep
MTKKRRNNGRAKKGRGHVQPIRCTNCARCVPKDKAIKKFVIRNIVEAAAVRDISEASVFDAYVLPKLYVKLHYCVSCAIHSKVVRNRSR

SEQ ID NO: 198133 - protein, 76 aa, Zea mays
  Clone ID: MRT4577_112276C.1.pep
SHSVGIVDRRGTTAQKCGSHMEASASAFLVNVALEFAEEFCSLFFWFQDSLAYATSGSQFSRRISAPRCSGVVGKT

SEQ ID NO: 198134 - protein, 37 aa, Zea mays
  Clone ID: MRT4577_112277C.1.pep
SSLVLIVSHRVSQYRLYIVYILSWHRRDTYITVYDVC

SEQ ID NO: 198135 - protein, 97 aa, Zea mays
  unsure (1)..(97): unsure at all Xaa locations
  Clone ID: MRT4577_112278C.1.pep
ALHFRVGKRERGCREIEIRRSRVGALQQRLLQLAXTVTVPGSSTPSTPLLKDELDIVIPTIRKLDFLEMWRXLFQPXQLIIVQTGPTRHKVPRVDTT

SEQ ID NO: 198136 - protein, 126 aa, Zea mays
  Clone ID: MRT4577_112279C.1.pep
DTRAFFKRARAWRGGNPYRLANPYICSVLQRQQKVLHDKNDRDEGSDRSGNNGHYQCGHVHAGRQNATGTGTITHLRPLIYHNKNREHHFALGRAAKLLKPIYAHDVPLQGVQNPASLSMCMHLSG

SEQ ID NO: 198137 - protein, 64 aa, Zea mays
  Clone ID: MRT4577_11227C.1.pep
PPKSSGPKKRGKTEIQETLVTPLLYTRDFDEMERLLDGEINKQLNQAEFYALLQEFRTDYNQTH

SEQ ID NO: 198138 - protein, 59 aa, Zea mays
  Clone ID: MRT4577_112280C.1.pep
AASSELTYLGDNGQHRVIGAARTQPSPYPSLPPYQEAARRGRRGRSRRVKKASEEASRP

SEQ ID NO: 198139 - protein, 74 aa, Zea mays
  Clone ID: MRT4577_112281C.1.pep
RRAVPAQQRAQDGALHSVAALDGLAGIHQAQENTHLFVHSFYTTPIKLEQEQLNVFRFPPFVTPIKSTPFPLVK

SEQ ID NO: 198140 - protein, 72 aa, Zea mays
  Clone ID: MRT4577_112282C.1.pep
RPGPRLLPDRALRWQPHGKCQVVSYAAAAMHVVLNMDRWWSIMKVIKHSYSSKKKKKKKKKAVLRAPTYCTK

SEQ ID NO: 198141 - protein, 327 aa, Zea mays
  unsure (1)..(327): unsure at all Xaa locations
  Clone ID: MRT4577_112283C.1.pep
KPKLTCLAASQATEDATVHDNVPLAAADTITQSAPVPNSAGTEDSLKVDICLNDLQLSDKQHVIIPDHLQVSESEKYVLSFGSFDVSFQQTKGSSDPDYVKSSLPKFSSSHELDGNIDELQSMQRDQNSTSVVQEEAGHVPQPSAKLEKCAPSAMEISSIALMESKDCDDDSATSGDPQSTGTHSAPSYVTYGFAPQSHVNQIEKSESHSQSYHPTTDADERLSPSLATQAAHKYGNIPVVPTQTGQDQEGNDSPVIISSVSASVATPAAGVLSASVAIPQQSVPVFRQPLGVHIXHLPMNYVPYXYISPFFFRKIGSILLGSRPTA

SEQ ID NO: 198142 - protein, 83 aa, Zea mays
  unsure (1)..(83): unsure at all Xaa locations
  Clone ID: MRT4577_112284C.1.pep
WVSDIVTPLNLSGLQQYLNLXDALRGVVLTQEADRHVWIHSSSGQFSSKSCYKALFLVSITFEPCKRLWKTWAPLKCXFFIWV

SEQ ID NO: 198143 - protein, 109 aa, Zea mays
  Clone ID: MRT4577_112285C.1.pep
QGLDGGPCFPLFPFQTGGAPGCSALINFSPRGPPPGVPGGPPLSPDLSWGSTGGFPVFPFFCLGHIVASPCFPRWRAFLGPTNLSKTPSLWLPRGWPARKTPSLHFLEA

SEQ ID NO: 198144 - protein, 260 aa, Zea mays
  unsure (1)..(260): unsure at all Xaa locations
  Clone ID: MRT4577_112286C.1.pep
DSPVISSVSASVATPAAGVLSASVAIPQQSVPVFRQPLGVHIPHLPMNYVPYNQYISPFFIPPPTLHPFMGNATFSQPPSTGVMYPTPGTARVLPPVKFPVPXFKPGANIGSQASIGVPGCYGTYGSSPSVYTNNAPVSSGNLAENDNVTSSQFKENNIYFAGLQTDGLTLWVPTPGRDISALQVNSFYGLPPPGHQVTYAPQAGHGPYGGIYHPAHSVAGATVTPLLQPSHTMAGAVEIVGAPGGVYQHPQAHMNXGSY

SEQ ID NO: 198145 - protein, 279 aa, Zea mays
  unsure (1)..(279): unsure at all Xaa locations
  Clone ID: MRT4577_112287C.1.pep
MALPSSTNTTMWISVATSWSSSSAAPSTSRASTSVTPPSVGXTXSPTTTTTCAARASSTFSSPDDRRLPTKNSSSSATSTTTASPSASTSNSGTTTTNRSPMHGLSSTRNLSTVLPLSCPTVLATASARSSTPTRPWSSTVXYWAATSTTTPSAASITPPTLGCDPSAADCAAATSSIKEKVLANTRTKCSMLVLNRGAYYVPNLPQALPVGFTRSTSSAPAPAPGTTASSPLLNRASLPHHDVRYLHAVYQAMFLLHEICKRFDAVDAQFDQHFARLP

SEQ ID NO: 198146 - protein, 366 aa, Zea mays
  unsure (1)..(366): unsure at all Xaa locations
  Clone ID: MRT4577_112289C.1.pep
MAGVSKTALLKKFNNDLLINSHDINVTIEGDRLGVSWEKWTPKEHVGVMNFVLLLDDVWEPLLDDYRPPGMQSLKFRKFPLGNMSPKIEETKIQYTLKVIRGSPTAVQELFVQLGVNVDTSDWELKPLGCLSVTVATQDKFDHFPVTVADWGVQAIVSRLLSGYFHDEDISIIAEEDDGTLASSDGATLLQYVVEAVNGCLVDAPNYGRRFPEKKLGAHDVIPAIRKCISTGGLKGRFXVLDPVIDTLGFVIGDQYAIALALIEDREVMLGVLECPNYPMKEWLNYHQQYYMLMSKVAPPLSRTWHKGCVMYEQKGGDQAWMQPLVHDLAGLAHSVGFKQQWPPPKEFECLDCTWPPTTWRLWSAA

SEQ ID NO: 198147 - protein, 39 aa, Zea mays
  Clone ID: MRT4577_11228C.1.pep
LHDVVHPLKVCLEDLYNGTSKKLSVSRNVICSKRKGTGS

SEQ ID NO: 198148 - protein, 111 aa, Zea mays
  unsure (1)..(111): unsure at all Xaa locations
  Clone ID: MRT4577_112290C.1.pep
VFGVVGLAGCVLAFVFVGVCGVPGVAGAVAVARPLLAWRLAAXGRAAPAPAPAAAAPGRGVRLRPSKNGSVSPLLXGFFLFVSKRGDPPRVQKMGTWXLRRCLWVAAXGGP

SEQ ID NO: 198149 - protein, 190 aa, Zea mays
  Clone ID: MRT4577_112291C.1.pep
PLLRRGARHRPGTEFHYCDNNHVRVDVDILPTSEFDIEQPFFRTSCVEDAYAQPHHQFLTNGLMPQHSMAPPWCYRAATSTTTPSAASITPPTPGCDPSAANCAAATSNIKEKVLANTPTNCSMLVLNRGAYSVPNPPQALPVGFARSTPSAPAPVPGAAASSALLNRAPLPHHDVWYLHAVYQNGRSER

SEQ ID NO: 198150 - protein, 365 aa, Zea mays
  Clone ID: MRT4577_112292C.1.pep
MWHEGKVAKKEQQKRKRKRAGELADPKTLTPRTHLAAAAAAMADGGGEGGPPAASAALKDQGNEQFKAGSYLKAAALYTQAIKLDPDNATLYSNRAAAFLQLVKLSKALADAETTVRLKPQWEKGHFRKGCVLEAMERYEEAIAAFQIALQHNSQNTEVSRKIKRLSQLAREKKRALDVENMRSNVDIAKNLESLKTELATKYGDAETGQSVFSFIVNVVESAVKVWHDTGKVDPRVHFLLDDQKTDTEKYAPVVNIDKAFESPNTHAECFTYLRQYAENCSAKAACMVAPKSIISYPQVWKGQGSRKWKLDQSDGFFVQFEAPALRKIWFVPSTKEKGRTLCRSPEALDIGIHEVLPRIFKEAA

SEQ ID NO: 198151 - protein, 153 aa, Zea mays
  unsure (1)..(153): unsure at all Xaa locations
  Clone ID: MRT4577_112293C.1.pep
MERVXRIFGASGMGXQPPTDSPLFDSSEXGYISSLSLLXKMLKEGRAGAPMEVMCLMLEELVDDYTGSVADVFAMPHRGTGVTGEAVYRGFQTNRLDMLKQIGGPEMVVAXDHSHCVFRCWVXGAHIDTQQSCEDSKQRVEAVEKDPVHRVKS

SEQ ID NO: 198152 - protein, 117 aa, Zea mays
  Clone ID: MRT4577_112294C.1.pep
SSGRSTALNSIVAADSGLTKQVGMLQVACDMKPESMDFRPNQYHNSFDLGREVTYMIIQLHLDSSFGGFILSEFLVIPDAEHTGEESFATASFSVVSVVVVSPSNLFLLTLRFGVRL

SEQ ID NO: 198153 - protein, 440 aa, Zea mays
  Clone ID: MRT4577_112295C.1.pep
MLSTASVPSTSFAAAFLSSRARRRRRAPWLRSVAAAAASGVGDGEVERFATSSSITDYLRYRRPELGCAGGAGGGGLPGGELQTAVVRFKKRFPWSLLHPFLHVDLVSTVHIADKEYFDRLQRELEDYDCVLYEMVTTRENLSNPKGPMAAKKMKSSRRGFSIIGFIQKQMARVLSLDYQLDCLDYGNEKWQHADLDYETFKQLQSERGESILTFAIDMTLKSTKALVQPSNMPDGLNFWRSKLLWASRVLPMPLVGLLVITGLCLPVEKQDGFPELEALSRLDFGAALKIFLAKQLTSEFTAVPTPVEEKSVIIGERNRVAAEKIREAINGGYKRIAVLYGGGHMPDLGRRLREELDMVPADVQWVTAWSIRSREIDSESLPLLKTLAEASGWPLNRYETLALLIFSSVLAVDLWFWELFFGTAVNCASLAGSWIGQLA

SEQ ID NO: 198154 - protein, 58 aa, Zea mays
  Clone ID: MRT4577_112296C.1.pep
VPSLPGTYNSYNDVSTLSISCVHLRHYANRSYDCGYIYIYGSGVTIMTATFQSYSTMT

SEQ ID NO: 198155 - protein, 105 aa, Zea mays
  Clone ID: MRT4577_112297C.1.pep
LSLEQNYRAIVEAGHPHNMQLGNLVRAASTTLRHMPLSTVGAMEITVNRVLAHLLLIFRPDCHRYIPWNMGSRSNRQQLVTVQWTNGHKQSCGQAHTDQICMRDR

SEQ ID NO: 198156 - protein, 50 aa, Zea mays
  Clone ID: MRT4577_112298C.1.pep
GRVGGRVGKKKKKKKKKKKKKKKKKKKKKKKKKKKKKKKKKKKKKGGGRF

SEQ ID NO: 198157 - protein, 76 aa, Zea mays
  Clone ID: MRT4577_112299C.1.pep
DKFFGRDSPKINFLGKQNICNPATVWRKSITQQKLLGKLFGNNNYWYGGENPNFGVKLLKNFPKTNWGALLKGFET

SEQ ID NO: 198158 - protein, 93 aa, Zea mays
  Clone ID: MRT4577_11229C.1.pep
YSVLAFSSTPVSVCAVTCLSPQCIDYLTSLRQCHFISQLIGSSSSMHQAYQQHCSHCLVKSQPCQLLSFMLPSCHVMCHTEHHKQLPSNRMLR

SEQ ID NO: 198159 - protein, 195 aa, Zea mays
  unsure (1)..(195): unsure at all Xaa locations
  Clone ID: MRT4577_1122C.1.pep
MSLADELLADLEEAAEEEEGGSYGEEEEEPALEDVQEETQLDLSGDSVKSIAKLWDSKMFAEIMMKIEEYISKQANASEVMGPVEAAPEYRVIVDANNLTVEIENELNIIHKFIRDKYSKRFPELESLVPNALDYIRTVKELGNSLDKCKNNENLQQILTNATIMXVSVTASTTQGXQLSDEELXRVEEACDMAL

SEQ ID NO: 198160 - protein, 90 aa, Zea mays
  Clone ID: MRT4577_112300C.1.pep
KIVPAFKQQIRYHSSAEKSRSQNARLCTEFYIMLSTNSPKDIHLFLRSLVEKDAKNNIHTDRTGHALTSHVINYIECLFDYHYIFTHFFW

SEQ ID NO: 198161 - protein, 125 aa, Zea mays
  Clone ID: MRT4577_112301C.1.pep
NWGAWFTLRGKPTRCYKRLAERGAKNRKKKGRPRPLGHPPIQNGGTHLEQQGEPALSLRPGVNKKILLGAAAAWGKNSWGGQHIRGRGGTTGASAWTKRDSTALGERCHMGGGGSSAFMYPTRRG

SEQ ID NO: 198162 - protein, 68 aa, Zea mays
  unsure (1)..(68): unsure at all Xaa locations
  Clone ID: MRT4577_112302C.1.pep
PSKGKKAELKGQTFRVLFKGQSPXGSPEALGSSYETPRFWNVFGTPETAKAATKTFPPGMFHNFQHFR

SEQ ID NO: 198163 - protein, 78 aa, Zea mays
  unsure (1)..(78): unsure at all Xaa locations
  Clone ID: MRT4577_112303C.1.pep
MPPKLDPSQVXVGVYPCDTRERTVHSLSLDRKIRTLGLXPREIGDYIAEDTSKDWKGLRVAGELTDQNRQCNVSVVTS

SEQ ID NO: 198164 - protein, 82 aa, Zea mays
  Clone ID: MRT4577_112304C.1.pep
GVQNTMTIYVHFDNTNVAALKRKALQQKTHFIHAGMEMQVTRLSLLLLVQCAWKGCLRAQPVCWFCLTACNGTSYLDCHCFC

SEQ ID NO: 198165 - protein, 86 aa, Zea mays
  Clone ID: MRT4577_112305C.1.pep
YASVLTTTKGYKNSPEKTPTNENSVNRATPNNFIPCKGDPHKNATKNANNSVATYKIYIFKELKHVHSYISISTKAMCIMNSFIND

SEQ ID NO: 198166 - protein, 129 aa, Zea mays
  unsure (1)..(129): unsure at all Xaa locations
  Clone ID: MRT4577_112306C.1.pep
LGPSRPAGRXPHRPIXCQFKVLHGGVXALAALASMGAHMAGYRRVAGVQLSINHFRSAALGDTVLAQAVPVHVGRSTQVWEVKLWKMDQSTGEKGPQIAESRVTLLSNLPLPEEHKRAGDALKKYSSKL

SEQ ID NO: 198167 - protein, 73 aa, Zea mays
  Clone ID: MRT4577_112307C.1.pep
PPPRALMVSVTLLVSDPASMSSPICSQFSCSKRMVRSRPDSNPAPTRSLFSSCPHSNRFKNRPFDAYNNYTSP

SEQ ID NO: 198168 - protein, 51 aa, Zea mays
  Clone ID: MRT4577_112308C.1.pep
VDRREPINHSPCDHQGKTAHEAPQALSPVRSTQIARRDGTEANSLRDPASP

SEQ ID NO: 198169 - protein, 177 aa, Zea mays
  Clone ID: MRT4577_112309C.1.pep
MDDDATVGSRQRQQQPASPAAADSRAMMAELDAPLHALGFEMEELSPSRLTGRLPITPICCQPFKVLHGGVSALVAEALASMGAHMASGYRRVAGVQLSINHFRSAALGDTVLAQAVPVHVGRSTQVWEVKLWKMDPSTGAKGPQIAESRVTLLSNLPLPEEHKRAGDALKKYSSKL

SEQ ID NO: 198170 - protein, 78 aa, Zea mays
  unsure (1)..(78): unsure at all Xaa locations
  Clone ID: MRT4577_11230C.1.pep
MPDPTTKPLSPRPRRRRRLCGLCLGTALLALLVAVLVHVVVPLPRAASVSARFSVIIDRGSTGTRAHXFLTGHDGSPG

SEQ ID NO: 198171 - protein, 67 aa, Zea mays
  unsure (1)..(67): unsure at all Xaa locations
  Clone ID: MRT4577_112310C.1.pep
GRVRDARHXRRPHLPAGDARRRGRSQQRHHHQHGHHVRGLPAVQHSRAGRPQLARDGNKSSFVSVDH

SEQ ID NO: 198172 - protein, 66 aa, Zea mays
  Clone ID: MRT4577_112311C.1.pep
SANETGLSTPQDEAHIGALMGIRNRPRISPDNRECGGQPTTTCSTETTPSYCIVNNCRTTTSEFNM

SEQ ID NO: 198173 - protein, 105 aa, Zea mays
  Clone ID: MRT4577_112312C.1.pep
GRVGGRVGYQTGHTSNIESAPSAESPISCKTQVKKDHSLRVDESPISDIPGRQDLSPISMNEGFISCVMTDGRVEINKTIPEECLVENTHKINSAEIKRRCRKVE

SEQ ID NO: 198174 - protein, 54 aa, Zea mays
  Clone ID: MRT4577_112313C.1.pep
NKQLNTARETKTGRQEIKTGMKEHGSLGPMQLRNHVAPKDGGSDPPEAEFFWWG

SEQ ID NO: 198175 - protein, 125 aa, Zea mays
  Clone ID: MRT4577_112314C.1.pep
QNRLTPEEIERMVNDAEKIAEEDKKLKERIDTRNELESYAYSLKNQIGDKEKLGGKLSSEDKETMEKAVEDKIEWLESHQDADIEDFKAKKKELEEIVQPIISKLYGSAGPPPTGEEDTADKDEL

SEQ ID NO: 198176 - protein, 127 aa, Zea mays
  Clone ID: MRT4577_112315C.1.pep
MAGEGRPDAQLFQLLTDLLQEVESMSNQEEVELRAKIEALGLEVTKVPEKAPKQLGELEIAAELDRLSARLDNVDKMISSAITSDPEVKSLLSSTADVWMPVITASADERRGFAETSGDKEEQEKSK

SEQ ID NO: 198177 - protein, 74 aa, Zea mays
  unsure (1)..(74): unsure at all Xaa locations
  Clone ID: MRT4577_112316C.1.pep
VHAGNXDRECFPVPIPVYPSXDKFSXPSTSSNGEILRGESGIESPLPSLTEHDPRDERDGFARGHLRRCQCRER

SEQ ID NO: 198178 - protein, 209 aa, Zea mays
  Clone ID: MRT4577_112317C.1.pep
MGARNSAAATPVLLNVYDLTAANDYLYWLGFGVFHSGIEVHGTEYGFGAHDYPSSGVFEVESKSCPGFIYRRTVWLGTTDMSQEEFRSFIEKLAGDYHGDTYHLINKNCNHFTDDVCQNLTGKPIPSWVNRLARVGSVFDCLLPESVQVSPVGRVPTSRRISDDDLYSIHSPMADKDDNDEDEAKHLLPAPSNDQLSVDVPPKLAKDLL

SEQ ID NO: 198179 - protein, 79 aa, Zea mays
  Clone ID: MRT4577_112318C.1.pep
DQPFRTITFINSRGKTSPLSTWWPSLAAHHGYALVLDATLPIQVAFAGYSYWRRTIYRRRCICHLGFTCYLLCISHRRS

SEQ ID NO: 198180 - protein, 77 aa, Zea mays
  Clone ID: MRT4577_112319C.1.pep
LSTDIQFQNYHYYSHFPQPFLKKEGTSRSGPSKTILSLTKFVKIISTLNITNKYTMELYSMMNLMVLIWYHITFIYL

SEQ ID NO: 198181 - protein, 110 aa, Zea mays
  Clone ID: MRT4577_11231C.1.pep
RPSGLVGYSGPLVSKRQTQIPAATARVSPTASRTPSPLPPPPATLTRSYSIPSNSQRIPIVTADRLLEARNSRDGSDIYSPPLTPLSLTDLSQQQGTKTTAGGTRMKGAL

SEQ ID NO: 198182 - protein, 63 aa, Zea mays
  Clone ID: MRT4577_112320C.1.pep
EKTPRGQPYHPLFINSFYLKNCAQLYPVLFAMGFLAINDALWFFEKMFSLHRENALKTVFKPR

SEQ ID NO: 198183 - protein, 55 aa, Zea mays
  Clone ID: MRT4577_112321C.1.pep
EVCHLLVRGLMRGFLASPITHEGCVSFRKVDLCDPIVFSVSWLKGDGLQIDFRGH

SEQ ID NO: 198184 - protein, 62 aa, Zea mays
  Clone ID: MRT4577_112322C.1.pep
LQVGKPFQKNITLQRGVEFCRASPILCNNVIHDCVQSILLSIIKYHICHGLYKCINCLKPRS

SEQ ID NO: 198185 - protein, 114 aa, Zea mays
  Clone ID: MRT4577_112323C.1.pep
HPQPYARKKGTAATSLSLPEWVRSVVREEWTSQVFYVELLRYRDIEEEMVALLHVALACVAPLPEQRPSMGDVVRMIESVPVEQSPAPEEDVDVSVTSPSIGITTDDGDGRLSY

SEQ ID NO: 198186 - protein, 145 aa, Zea mays
  unsure (1)..(145): unsure at all Xaa locations
  Clone ID: MRT4577_112324C.1.pep
IQRSRYNNVRQRVLAIIDGYSYXAEAHALNQLVALNLXSYWQQQQLPXRRLPGAYLQRLLSCSQVYMYNXICLLXQQQQLLPYSQVAEASRATSLMQAQLLPHYQNAGPNAGILLQLQQLLPFNQLALTNPAAFYQQPIIGGALF

SEQ ID NO: 198187 - protein, 53 aa, Zea mays
  Clone ID: MRT4577_112325C.1.pep
VKRQKERLSKHTRAGHPNKYARRPGVPLTDKSYFQENVSFMYLRVREQLTERV

SEQ ID NO: 198188 - protein, 85 aa, Zea mays
  unsure (1)..(85): unsure at all Xaa locations
  Clone ID: MRT4577_112326C.1.pep
EYVLEDGVRIYRGTXIINGVGIKKHACIXSAYIGWHLTVGQGARIKNMTMMGRNVYVCDKVYSNVGVVFPHEKIKSSTLKPEIVM

SEQ ID NO: 198189 - protein, 122 aa, Zea mays
  unsure (1)..(122): unsure at all Xaa locations
  Clone ID: MRT4577_112327C.1.pep
IDYAXAHAXAHAGAHATARGEQAAHTRKGTTTSAKEPDHRDENXAEAATDEGAPRRRGAPPRRRAPRQRRCRLSRGGGRPAGRGRPWRPPTTGEHGGSLASRRLPHRDTLTYAEERRNLGAT

SEQ ID NO: 198190 - protein, 129 aa, Zea mays
  unsure (1)..(129): unsure at all Xaa locations
  Clone ID: MRT4577_112328C.1.pep
SPWTPRGSSYRSPSPRSTTASXETAAAPPVVXSAASAALHLFRKRPSSTRPAAGAPPPQYGSPASPXPCLCTSPTAMLAGTTAAARPRARAGHRPCGPAAWPPPSSAPRQWRFPTSASGPLALALEALR

SEQ ID NO: 198191 - protein, 70 aa, Zea mays
  Clone ID: MRT4577_112329C.1.pep
GDMVTHAPGISLPPVFWAPIPPDVVRVTHKMLCCKKEHDYSVFSRGGDHKIWAYSGAPRAPFFISPVSRG

SEQ ID NO: 198192 - protein, 85 aa, Zea mays
  Clone ID: MRT4577_11232C.1.pep
KVFKLISPRGSRFKLGLEWERGQPKKANFPAGLWKRNKPDRGLKPCFEKFCFWESMLWHWGENKNNSTQSSRVPATPPAKSLSSS

SEQ ID NO: 198193 - protein, 56 aa, Zea mays
  unsure (1)..(56): unsure at all Xaa locations
  Clone ID: MRT4577_112330C.1.pep
GYVLMCLLPINVCITYCNHDKQTYRDNNCSSATSAFKLQSLAGFTXRPSGHVQPMR

SEQ ID NO: 198194 - protein, 56 aa, Zea mays
  Clone ID: MRT4577_112331C.1.pep
KPLPKQAVASCRLDRAKWRVSQYTPGPHYILGVYKKNLAGAPSTYYYFRLIIEDPK

SEQ ID NO: 198195 - protein, 41 aa, Zea mays
  Clone ID: MRT4577_112332C.1.pep
LNKINKKPPQKKKKRYKGSHDKKKNKSRGEGKKKKKTPGKV

SEQ ID NO: 198196 - protein, 66 aa, Zea mays
  Clone ID: MRT4577_112333C.1.pep
TFSKAFGLFSSPISYVDRRTHRDYGSTVDISRRLRKDEAEVGATACTGGAELGLDPAPLLLGPTRV

SEQ ID NO: 198197 - protein, 288 aa, Zea mays
  unsure (1)..(288): unsure at all Xaa locations
  Clone ID: MRT4577_112334C.1.pep
RPGRVAWTGWVCVWTAILLFLLAILGACSIINRFTRVAGELFGLLIAMLFMQQAIXGWLRGFIADYGVPLMVLVWTGVSYIPYGNVPKAIPRRLFSPNPWSPGAYDNWTVIKDMTQVPLLYIIGAFIPATMIAVLYYFDHSVASQLAQQKEFNLRKPPSFHYDLLLLGFLTLMCGLIGIPPSNGVIPQSPMHTKSLATLKHQLLRNRLVATARKSMSQNASLSQLYGSMQDAYQQMQTPLVYQQQSVRRGLXELKDSTVQLASSMGNIDAPVDETVFDIEKEIDDLLP

SEQ ID NO: 198198 - protein, 170 aa, Zea mays
  Clone ID: MRT4577_112335C.1.pep
MEESFVPLRGIKDDLHGRLACYKQDWTGGFRAGIRILAPTTYIFFASAIPVISFGEQLERNTDGVLTAVQTLASTALCGIIHSIVGGQPLLILGVAEPTVLMYTFMFNFAKDRPDLGRNLFLAWTGWVCVWTAILLFLLAILGACSIINRVTRIAGELFGLLIAMLFMPQ

SEQ ID NO: 198199 - protein, 142 aa, Zea mays
  unsure (1)..(142): unsure at all Xaa locations
  Clone ID: MRT4577_112336C.1.pep
MHVLASPVLKIPLADLQFYTAAISTVSGTPLRAITVTNTMGDLPKVTYGAXXLTLEHGRXPLYWFQMKIXTNMMNLNDHICKEMNELYLFMRAHITKRAICDWNYLPDYNANLLNGQXGDLIPKRLSMTFKRHSQRKRLNIM

SEQ ID NO: 198200 - protein, 191 aa, Zea mays
  Clone ID: MRT4577_112337C.1.pep
MEESFVPLRGIKNDLHGRLACYKQDWAGGFRAGIRILAPTTYIFFASAIPVISFGEQLERNTDGVLTAVQTLASTALCGVIHSIVGGQPLLILGVAEPTVLMYTFMFSFAKDRPDLGRSLFLAWTGWVCVWTAILLFLLAILGACSIINRFTRVAGELFGLLIAMLFMQQAIKGLIDEGELFWASDRYALH

SEQ ID NO: 198201 - protein, 88 aa, Zea mays
  unsure (1)..(88): unsure at all Xaa locations
  Clone ID: MRT4577_112338C.1.pep
MGMGDGIDSESDRGELSAMDYTDPPAAPLIDSAXELMSWSLYRAVIAEFNVTLLFLYITVATTXIGTKHRDGRRMRLRARRCARQGVR

SEQ ID NO: 198202 - protein, 387 aa, Zea mays
  unsure (1)..(387): unsure at all Xaa locations
  Clone ID: MRT4577_112339C.1.pep
ALLCIPPSNGVIPQSPMHTKSLATLKHQXVMKYLKIPCEHLXLTHMANISVQILRNRLVATARKGMSQNASLSQLYGSMQDAYQQMQTPLVYQQQSVRRGLNELKDSTVQLASSMGNIDAPVDETVFDIEKEIDDLLPIEVKEQRLSNLLQASMVVGCVAAMPLLKKIPTSVLWGYFAFMAIESLPGNQFWERILLLFTAPSRRYKVLEEYHTTFVETVPFKTIAMFTVFQTAYLLVCFGITWIPIAGVLFPLMIMLLVPVRQYILPKLFKGAHLTDLDAAEYEESPAIPFSLAAQDIDVALGRSQSAEILDDMVTRSRGEIKRLNSPKITSSGGTPVAELKGIRSPSISEKAYSPRLTELQHERSPLGGRSRPRTPSKLGEGSAPK

SEQ ID NO: 198203 - protein, 62 aa, Zea mays
  Clone ID: MRT4577_11233C.1.pep
KQQLPYPLLSFMYPSCCSPHSEPFFSKACIPTANATTSSISFTSTTADLDALQNTQKSTFDQ

SEQ ID NO: 198204 - protein, 93 aa, Zea mays
  unsure (1)..(93): unsure at all Xaa locations
  Clone ID: MRT4577_112340C.1.pep
PNHGPLVPSVVMEISTFRXELCPTYMNERIYYRTYFSLVHSHIDALEKKYFELLKVLAAQEQRFPLPSIPCIYNCRTVRHKSAMQDRFDKSRT

SEQ ID NO: 198205 - protein, 702 aa, Zea mays
  Clone ID: MRT4577_112341C.1.pep
MEESFVPLRGIKDDLHGRLACYKQDWTGGFRAGIRILAPTTYIFFASAIPVISFGEQLERNTDGVLTAVQTLASTALCGIIHSIVGGQPLLILGVAEPTVLMYTFMFNFAKDRPDLGRNLFLAWTGWVCVWTAILLFLLAILGACSIINRFTRIAGELFGLLIAMLFMQQAIKGLVDEFRVPERENTKALEFVPSWRFANGMFAIVLSFGLLLTALRSRKARSWRYGTGWLRGFIADYGVPLMVLVWTGVSYIPYGNVPKGIPRRLFSPNPWSPGAYDNWTVVKDMTQVPLLYILGAFIPATMIAVLYYFDHSVASQLAQQKEFNLRKPPSFHYDLLLLGFLTLMCGLIGIPPSNGVIPQSPMHTKSLATLKHQILRNRLVATARKGMSQNASLSQLYGSMQDAYQQMQTPLVYQQQSVRRGLNELKDSTVQLASSMGNIDAPVDETVFDIEKEIDDLLPIEVKEQRLSNLLQASMVVGCVAAMPLLKKIPTSVLWGYFAFMAIESLPGNQFWERILLLFTAPSRRYKVLEEYHTTFVETVPFKTIAMFTVFQTAYLLVCFGITWIPIAGVLFPLMIMLLVPVRQYILPKLFKGAHLTDLDAAEYEESPAIPFSLAAQDIDVAFGNTQSAEILDNMVTRSRGEIKRINSPKITSSGGTPVAELKGIRSPSISEKAYSPRVIELWHERSPRTPSMLGEGSAPK

SEQ ID NO: 198206 - protein, 242 aa, Zea mays
  Clone ID: MRT4577_112342C.1.pep
TTSFSPSPPPLLRRLQTLTRALASSAPQPMASSPPLKKVLVPIANGTEPMEAVMTIDVLRRAGADVAVASVEPGAAQVAASWGVKLAADALLADLAEADFDLISLPGGMPGASTFGDCKILENMVKKHAEKGKLYAAVCAAPAVALGAWGLLNGLKATCHPSVMDKLPSEMQAVQSRVQIDGNCVTSRGPGTTMEYSVVLVEQLYGKEKADEVAGPMLMRPQHAAEFSMKELNSTSWNVGEN

SEQ ID NO: 198207 - protein, 78 aa, Zea mays
  unsure (1)..(78): unsure at all Xaa locations
  Clone ID: MRT4577_112343C.1.pep
TEQIEQDIALVPSLTLSSASAYAIKMPYPCAGLEGLYXAVSGLTTMIGACGLFPFSEXLKQSQCNHLAEEPYYTGSGQ

SEQ ID NO: 198208 - protein, 108 aa, Zea mays
  unsure (1)..(108): unsure at all Xaa locations
  Clone ID: MRT4577_112344C.1.pep
ATRPASDDNKTVNVIXRPDVSQVMAANEFESKDPMDGSMSKHHGIRYLFGDGSRLVFRLYITVHVXATIRVYTRRYENDSFKTVRDSQDALAPMDDVALKLXSKIQEY

SEQ ID NO: 198209 - protein, 55 aa, Zea mays
  Clone ID: MRT4577_112345C.1.pep
RRNRAGSTGSCRPRPRQRLVRCASARRRPSPQARPVPPYAVAGTARGTSPTSTLP

SEQ ID NO: 198210 - protein, 48 aa, Zea mays
  Clone ID: MRT4577_112346C.1.pep
VPDYCGVCSLFKSRPLPEADTGIYRCLSGPNRLDLLHGLGTLMGHPNS

SEQ ID NO: 198211 - protein, 88 aa, Zea mays
  Clone ID: MRT4577_112347C.1.pep
ASFVQYDPGFLLEFWNCLCWCHQGGFASVCRLGSSDCTPARIGSWLAPSALRLLRGLVCSSRRVLRCRVLPGWSVLGWYYQIALLNTP

SEQ ID NO: 198212 - protein, 171 aa, Zea mays
  unsure (1)..(171): unsure at all Xaa locations
  Clone ID: MRT4577_112348C.1.pep
LGNLCPLPPGQTEGEKSQRPNRKKGKTNPPGKRGHLGILGARKKKGKKKKGXGGGPTPPGKKTPKSPPEGGXXKKKKKTRTPGGATRPPPHPQKNHPKGAXPQKGKXKGPPPKRARKAGGPTGKRANPPPQNRGAKPANPKKKKQKRXTPKPEGTREQGPQPQNAGGKPEK

SEQ ID NO: 198213 - protein, 111 aa, Zea mays
  Clone ID: MRT4577_112349C.1.pep
ATKVAPMTGCGVVVACPHRREIAEATRAPTTELASMRFYPRQWSPQPWFELRAAPLARHQRWRSSLDSTTVHNEGVHRLVFPMAGFIRLGGGHSWLVPETGARCSPIDGGD

SEQ ID NO: 198214 - protein, 30 aa, Zea mays
  Clone ID: MRT4577_11234C.1.pep
SRRDHISISCAHERLKECYYTIAIDLELKC

SEQ ID NO: 198215 - protein, 66 aa, Zea mays
  unsure (1)..(66): unsure at all Xaa locations
  Clone ID: MRT4577_112350C.1.pep
LAVALLXNMIQTTVAARRGLPCHCWTDGLREGWAXHTPCMMRALRQATSLASSWGPPQGSAVVLSL

SEQ ID NO: 198216 - protein, 140 aa, Zea mays
  Clone ID: MRT4577_112351C.1.pep
MEEEAGRSWTTDERGDDDDDDDDQLRGTTAATGSRRVGRRRRRRWCRDRDAQPEAAATVVVVGGGALASASVQQGGSDADDECGFQQTPNWKRFLTHAGPGFLVSLAYIDPSNVQTDLQAGSSHKFEVLWGLILGFFFDL

SEQ ID NO: 198217 - protein, 138 aa, Zea mays
  unsure (1)..(138): unsure at all Xaa locations
  Clone ID: MRT4577_112352C.1.pep
PTRPPTRPPTRPRTRGRDFWGRRWNLVVSDILRPSVYGPVRARAGKAPAVLATFLVSGLMHEVMIYYLTLRSPTGEMTAFFLLHGVCLYWRGVVRAAEXQWGWRPPPRPVATLLVVVFVAGTVFWLFFPQNCLEGMEE

SEQ ID NO: 198218 - protein, 63 aa, Zea mays
  Clone ID: MRT4577_112353C.1.pep
VSASTLYSPIVPVICNFYEHIGRRPSHLERHLCMLMMQAFSPLMRELVGTSMNPLVVECGLIE

SEQ ID NO: 198219 - protein, 142 aa, Zea mays
  unsure (1)..(142): unsure at all Xaa locations
  Clone ID: MRT4577_112354C.1.pep
CWDSPLSXGNNAEXAXAXALSAXRGRGALLQRGXTXXGAEEPSWXPSAPTSRRGTPRPXTTRPAQPAATGKXTNXKGPRNASRGGAXTDASXTGPRFCCRVPISANKVLSRTSGRRFPPLFIKTARTGATYAAHLGXGDTIG

SEQ ID NO: 198220 - protein, 65 aa, Zea mays
  Clone ID: MRT4577_112355C.1.pep
LPQSCGVLRLRLKTFPTAITEHRNTYSCNCINDADKVPSASLHQDYYHPHLTNADYMYSLYYWLM

SEQ ID NO: 198221 - protein, 72 aa, Zea mays
  Clone ID: MRT4577_112356C.1.pep
NQQYRFFSEPASVIGILFQNRYRKQYKIFPTVLIGSRFQTKFTEFRYRNFSKNKKLSRLFKSPHSIMAHAVG

SEQ ID NO: 198222 - protein, 107 aa, Zea mays
  Clone ID: MRT4577_112357C.1.pep
IGDYYLNPYVSAEPEVTVVERTERDEFLILASDGLWDVVSNEAACKIARSCLSGRAASRFPGSVAGRTAADAAALLAELAMSRGSRDNISVVVVELRRLQTDQKTRV

SEQ ID NO: 198223 - protein, 76 aa, Zea mays
  Clone ID: MRT4577_112358C.1.pep
KKAEPNRPSSADVRVTLLERAMQGSQLQQAQKTVSMHGAQNELLPLKVFMQMLFYEKACVVTLYSPSQQAAARFGT

SEQ ID NO: 198224 - protein, 137 aa, Zea mays
  Clone ID: MRT4577_112359C.1.pep
RPEKKTKKKGKKPKKDREKSAKKRRRQVETTNRAKPHKEGEKGQEEGPATVEKGEKRGLHKASNARRPPGKPPTETGKKSQEIAPKGTEKRPPTTESNVGQLNKFKFFYIIFYFFFIFFFFFLFFFFIFFFFFFFFF

SEQ ID NO: 198225 - protein, 49 aa, Zea mays
  Clone ID: MRT4577_11235C.1.pep
KVSELCRIGMVVCSSIEGCKCPQPMQVSLCLMSWLIASVVEVTFHLPCV

SEQ ID NO: 198226 - protein, 60 aa, Zea mays
  Clone ID: MRT4577_112360C.1.pep
SSVMISGTIIVIGKYVTRIMRHGLTPKQLEVVSLHKHTLGCTSHTLSQVTRFVVMRARVV

SEQ ID NO: 198227 - protein, 83 aa, Zea mays
  Clone ID: MRT4577_112361C.1.pep
PCKTFCPEIISYELPSCILRLPLLVSRLSILPSLSSPSIPLELGTLSQLVVAIYYWFPFTYFRMNYSAICWNKAKFSGALFFC

SEQ ID NO: 198228 - protein, 122 aa, Zea mays
  Clone ID: MRT4577_112362C.1.pep
GTHLSLPAPSSVLVHHAPKFHGHRTGCPLSPPFSLQPVSPFSIRSAPGASDLPAAMSCLPSGRGMALQVPTNYLAFGSNPRRSISLTILNSLFSPPFPFLAARCSLCSSLRETKEEEAILGL

SEQ ID NO: 198229 - protein, 48 aa, Zea mays
  Clone ID: MRT4577_112363C.1.pep
TEHHGPYTSGREMMDCYALKAYVKELVPRSFLPKPNNDVYLPVLLPKM

SEQ ID NO: 198230 - protein, 102 aa, Zea mays
  unsure (1)..(102): unsure at all Xaa locations
  Clone ID: MRT4577_112364C.1.pep
CYYDGEDGLKNDYLENMTLREHLYTIGKPALDVERSLLVERXSASRGLHXLQTDGLYTVMHLYTKTTSMLGEDXLPVTGCDLXLSNAGLAGTNDTHATTMAK

SEQ ID NO: 198231 - protein, 68 aa, Zea mays
  Clone ID: MRT4577_112365C.1.pep
PLFFFFFCQTNLCFNDLEMFLRMEKQKLQTLKTSLDVVHTWPECVDTYQPRRCINNVKLDVAYKSSSE

SEQ ID NO: 198232 - protein, 51 aa, Zea mays
  unsure (1)..(51): unsure at all Xaa locations
  Clone ID: MRT4577_112366C.1.pep
LINFNFPHVYLSHPSHMVKTYPYPLHKTTVQYNIMYYXPFFFHPPPPNMPV

SEQ ID NO: 198233 - protein, 173 aa, Zea mays
  unsure (1)..(173): unsure at all Xaa locations
  Clone ID: MRT4577_112367C.1.pep
ISGEKKKGGIHPLGPNLYGNRGSGGEIPPQKQKNPPLALPGKGPQGGRTPPGGKSWGPLPPPGKPFPFFPQQKCRPRLGTPTPAGPKKPETPTRPPEFPXPRGKKTPPPPXGGEGTPPPPRCGPARRPXRRVGGPFDFGPRRGVPDXPGPPKKSLEPRGEPKVGGPPQGSPNG

SEQ ID NO: 198234 - protein, 74 aa, Zea mays
  Clone ID: MRT4577_112368C.1.pep
PASIAAAFGRHESTRVYAYRTRDATTVSYTKPTPLTHASTPDYLGLYNGQTGIFRKIDIMISDQISSGPLTVRT

SEQ ID NO: 198235 - protein, 112 aa, Zea mays
  Clone ID: MRT4577_11236C.1.pep
MALALRLRRVLAAASTAAPLLRPSTSVARPCPLVPLASPAAAARGGTDYGTDDSKISPDEILFEGCDYNHWLITMDFPDPKPSREEMIETYLQTLAKVVGSHEERKKRMYVF

SEQ ID NO: 198236 - protein, 136 aa, Zea mays
  Clone ID: MRT4577_112370C.1.pep
RYRDWTQPVYLSPVSFRMFEITGQVFMEPHTSICQPKDAVGAAPVQEFGGLVLNGVPLRFEVLDPLVVGGRCVLGIGPPPQHVEPRCILEQNLPFAATREKGGARTVREGARRRGAPRSPPWPPFRCAPARASYRY

SEQ ID NO: 198237 - protein, 68 aa, Zea mays
  unsure (1)..(68): unsure at all Xaa locations
  Clone ID: MRT4577_112371C.1.pep
VVEVFFRIVPKLDLMDAKWAFVHWVCGQGMQXGEFSXALKDLPALEKXNRRLAFSSIXGEDGDEGVEY

SEQ ID NO: 198238 - protein, 1052 aa, Zea mays
  unsure (1)..(1052): unsure at all Xaa locations
  Clone ID: MRT4577_112372C.1.pep
MFVKKLVERASKKQHIGSISSLRPENVSPRLAFHYGVPADAALLAYDPVLHVLAVATRNGQIKLFGRDNTQALLQSPSPLPSRFLQFAEGQGVLLNVNTQNQIEVWDIDAKKLCYLHPAEKAITAFSVLQKSFYIYVGDSSGSVSPLKLDLAQRCLADLPYWIPFTESYGSTTSAGNDVEVVFVSPQPLSESNRVLIIFRDGVMSLWDIKASKAVSISGKTTQQQSQKEAKNVTSACWVCAKGSKIAIGYDNGDLYIWAIPEVTSTQNSSSMGGQNLPIQRLNLGYKLDKLPIVSLQWIPSDGKAGRLYINGFNDHGHLFQVLILNEESESRIVKMVLPIAESCQGMELVTGLSDPNKHRQSALALLLKSGHICLYDDSEIERYLLHSQSRSPGTLPNCSYVKLPYGDSGISVAKFYTSNPAALASLDEDYFSSATKYPCLFSMKGKGQTLTSFTNIHKTRNLYITGHLDGTISFWDASCPHLLQIFMIKQQNKDDTSTGNPITSLQFDMSSSILLSGERSGMVHIITFKKDSSDNIFSFLNAKQGDNYDVRSIKLKGAVTTMSSISKSKHFAVGTEKGIVSVINVEDATILYQEQFECRLPGGIASLQFEIYSHNGYDKDILIIAMEDSSIFVIEEETGKLLNPNPVQTDKPSKAILLQMLELSPNDTPAVSDNQDTVSKESLLLLCTENAIRLFSLGHAIQGTKKIINKKKLSSCCCFASLIHSSSNDIGLILVFSNGKLEIRSLPDLSLLKDAFLRGFVYSRNLNSSSSITCSSDGEAILINGEETYFFSTLCQDEIYRHVDSISTVYRKENSTREDSSFVVKSPKEKKKGLFGMIMKDNKGSKSKESDAIGSEQCIATTSEELASIFSSTNFAPPSEGRNSSLRDDENAELDIGTCXIFAITCVAVYTYVYSIYYLSEDDIDIDDNPQKPKGPHFPGISKDKISKGLQTLKGKLKPKTEEKISSGNKKTEDETSVSQVDQIKMKYGYANTTNDDSTSVTKMIGNKLQENMKKLEGINLRAADMASGAQSFSTMAKELLRTTKNEKGTS

SEQ ID NO: 198239 - protein, 105 aa, Zea mays
  Clone ID: MRT4577_112373C.1.pep
MAMRVVKIFGTPQGDAPHVRLSRSYPNPLNPILSLRTTPNSSPCMLQREVKGSQSRSRELKDSSVVGTCALGEGELDGGAERGRCRRSKVWPEKFAPRPASRYPM

SEQ ID NO: 198240 - protein, 463 aa, Zea mays
  Clone ID: MRT4577_112374C.1.pep
WSKPTKSYDVTKSMFQVSVINVEDATILYQEQFECRLPGGIASLQFEIYSHNGYDKDILIIAMEDSSIFVIEEETGKLLNPNPVQTDKPSKAILLQMLELSPIDTPAVSDNQDTVSKESLLLLCTENAIRLFSLGHAIQGTKKIINKKKLSSCCCFASLIHSSSNDIGLILVFSNGKLEIRSLPDLSLLKDAFLRGFVYSRNLNSSSSITCSSDGEAILINGEETYFFSTLCQDEIYRHVDSISTVYRKENSTREDSSFVVKSPKEKKKGLFGMIMKDNKGSKSKESDAIGSEQCIATTSEELASIFSSTNFAPPSEGRNSSLRDDENAELDIDDIDIDDNPQKPKGPHFPGLSKDKISKGLQTLKGKLKPKTEEKISSGNKKTEDETSVSQVDQIKMKYGYANTTNDDSTSVTKMIGNKLQENMKKLEGINLRAADMASGAQSFSTMAKELLRTTKNEKGTS

SEQ ID NO: 198241 - protein, 67 aa, Zea mays
  Clone ID: MRT4577_112375C.1.pep
FRVISGELKKSGGPETHNGVSFNMKHDLHIGLIFKLTMHHLHEILQTKQPSSHILAQARQNMGTHIL

SEQ ID NO: 198242 - protein, 123 aa, Zea mays
  Clone ID: MRT4577_112376C.1.pep
MILYSIQGTKKIINKKKLSSCCCFASLIHSSSNDIGLILVFSNGKLEIRSLPDLSLLKDAFLRGFVYSRNLNSSSSITCSSDGEAILINGEETYFFSTLCQDEIYRHVDSISTVYRKENSTED

SEQ ID NO: 198243 - protein, 202 aa, Zea mays
  unsure (1)..(202): unsure at all Xaa locations
  Clone ID: MRT4577_112377C.1.pep
MFVKKLVERASKKQHIGSISSLRPENVSPRLAFHYGVPADAALLAYDPVLHVLAVATRNGQIKLFGRDNTQALLQSPSPLPSRXAGTTAPPSRRQSHCLVCVSNVAWRDLEATHSKLXFQFAEGQGVLLNVNTQNQIEVWDIDAKKLCYLHPAEKAITAFSVLQKSFYIYVGDSSGXVSPLKLDLAQRCLADLPYWIPFTES

SEQ ID NO: 198244 - protein, 228 aa, Zea mays
  Clone ID: MRT4577_112378C.1.pep
MEDKSCQIALGNLRSEVITLRNEALAKDKIIFGRKAEIQLQKNVEELRQAKEECNNVATECAKNLKNSFSKVGAFSTEQNFICGDPDGVGCEHAKAVVQPGFSFLAYDIKNSPIDATALSRKFYSEVWLKGGREIADKAIRRNEKESHNALEEVKRAEETVEHARLIAELSPPPESYDPKADPSLKGALNIIRIANEAVDEAVNRLLNEATDKVLKEEFRVFVCSFHF

SEQ ID NO: 198245 - protein, 109 aa, Zea mays
  unsure (1)..(109): unsure at all Xaa locations
  Clone ID: MRT4577_112379C.1.pep
YISEDDIDIDANPQKPKGPHFPGLSKDKISKGLQNXKGKLKPKTEEKISSGNKKTEDETSVSQVDQIKMKYGYANTTNDDSTSVTKMIGNKLQENMKKLEKYRMLATVT

SEQ ID NO: 198246 - protein, 412 aa, Zea mays
  Clone ID: MRT4577_11237C.1.pep
MALALRLRRVLAAASTAAPLLRPSTSVARPCPLVPLASPVAPLPLPPWRFLPGGGAGFRSTAAAAARGGTDYGTDDSKISPDEILFEGCDYNHWLITMDFPDPKPSREEMIETYLQTLAKVVGSYEEAKKRMYAFSTTTYVGFQAVMTEEMSEKFRGLPGVVFILPDSYLYPETKEYGGDKYDNGVITPRPPPVHYSRPSRTDRNRNYRGNYQDGPPQQGNYQNNRPPPEGGYQNNPPQQGNYQTYRSQQDGRGYAPQQNYAQGGQDGRGFGRNDYTDRSGYNGPPDFRSQTQYQGHVNPAGQGQGYNNPQERSNFSQGQGGGFRPGGPSAPGSYGQPSAPGSYGQPNTLGNYGQVPPSVNPGGNRVPGVNPSYGGDGRQGAGPAYGGDNWQRGSGQYPSPGEGQGNWQGRQ

SEQ ID NO: 198247 - protein, 83 aa, Zea mays
  Clone ID: MRT4577_112380C.1.pep
DQFYAVWGGGIPAVPVNNSWGDVAVGHLKSERFKIILPSLILSKKWSCCTSLVFDAWIMLETLRQDKICYFLARTLSEKGSED

SEQ ID NO: 198248 - protein, 84 aa, Zea mays
  Clone ID: MRT4577_112381C.1.pep
QLPGFVPPQPAHIIFPRAPPWGTKQLYRGGGVLLGALLQPPPQDGFPPKKRAPRVPFCLSRFKAFFSPPGGFFLNLRFGGVNPN

SEQ ID NO: 198249 - protein, 140 aa, Zea mays
  Clone ID: MRT4577_112382C.1.pep
MSAPAAAPAPLRSVLLSSCCGGGVTRTSRYDDEQDYAVSTATLLKHRMDALVDFVKELPKLYRLNVLDLGGCKGLRRRHLVALTELECLRYLSLRDTDVPGLVPDRHMNRFEQLETLDIRGTRIPPCDTKRIYLPKLKHL

SEQ ID NO: 198250 - protein, 64 aa, Zea mays
  Clone ID: MRT4577_112383C.1.pep
CLIPSESQECRTTGHQGKYRNLLPLTNPVSEVVLLPYTASGHTINRRILRDNSIETEDIKRRRV

SEQ ID NO: 198251 - protein, 85 aa, Zea mays
  unsure (1)..(85): unsure at all Xaa locations
  Clone ID: MRT4577_112384C.1.pep
LYXGMGXDXXXXNGAXRLSIXKXSAMLEAGYPLRAFIXELFIATXSVXISXMLXXRHGXEEXXRIGKLLXKSPTRXWXWXLXXGG

SEQ ID NO: 198252 - protein, 102 aa, Zea mays
  unsure (1)..(102): unsure at all Xaa locations
  Clone ID: MRT4577_112385C.1.pep
RLDPRVRADNQLSGDIPPGIGNLTDWQVLDMSNNRLFGSVPAXLARCFQLMDLQLVGNQLFGALLPELDALSSLTVLDLSNNKISGEIPVALAGYTSLEVDD

SEQ ID NO: 198253 - protein, 66 aa, Zea mays
  Clone ID: MRT4577_112386C.1.pep
SHWQGSIQTTHSLPPSPLGPVERLSLFFIVFFCFFFLQRNTLFSDHAYCRLQQFCYYYYKGYPGKF

SEQ ID NO: 198254 - protein, 136 aa, Zea mays
  unsure (1)..(136): unsure at all Xaa locations
  Clone ID: MRT4577_112387C.1.pep
AALVEVALRRCRLERRRRYGSIGRRGGSVRGSIFVVAIRYYXALFDSLDTSYGASYSEDSPERHAVEQLLLSREIRNLLVVGGPAPTDDVKFXRLAQYRFHEASLASSPAAQASLLLGMPLYACSPRQLRGINSRL

SEQ ID NO: 198255 - protein, 69 aa, Zea mays
  Clone ID: MRT4577_112388C.1.pep
GTSPAYSIQIRERRPPLTAAARLATSAMAPSILECLVVFPGARGWAGMEIQRSSLSHHAIRGRPPTRRH

SEQ ID NO: 198256 - protein, 94 aa, Zea mays
  unsure (1)..(94): unsure at all Xaa locations
  Clone ID: MRT4577_112389C.1.pep
EXSPXLVFKAPTPMFFPTQTTXSFFTSKPQSKILFPQARKFHLLKKFFPIGFFLTLRVHLSFFERTFSFSKKNKFLSCFFFFFEFYNFPPPLFF

SEQ ID NO: 198257 - protein, 48 aa, Zea mays
  Clone ID: MRT4577_11238C.1.pep
RTRGEFVNFERYRDLIKHRRRGCRYLFGFSVLLAVAVEISYLASIYIT

SEQ ID NO: 198258 - protein, 429 aa, Zea mays
  Clone ID: MRT4577_112390C.1.pep
MDSMEQPEPKTAGHYYALQVGSVFLTGYYNVLTNQPHLANQFYTDNSSVVRLDCETGRWSFGETVEVINDMMMSMKLSKVEVKTANFLESWAGAITLLVTGLVKLKHYPVRKRFAQNIVLAPKEDGYFIFSDIFKLICDEYDDQYPFSDYNCADNMPQVEASYTMAEIGSDYLDGEPEAQETVDPAENHVQHQDYLEYKAGNVIDDETHLEEHIPPFPSSTDVKRDSPLALPHPPSPTLEEPVEEAPKTYASVLRTKSKATLAITESQQAQQLAQQPQSASVHEKSNLDNHRDVSVPEDEEEFLSVYVGNLSPSTSVFDLEKVFQAFGRIKPDGVAIRSRKEAGVFFGFVEFEDMSGIQNALSASPVELNGRFVHVEERRPNCGFPRGRRGRGRADFSRDQAGGRYDGEYATRSKGIGHQKKTGRQYDY

SEQ ID NO: 198259 - protein, 101 aa, Zea mays
  Clone ID: MRT4577_112391C.1.pep
KERGLRALQILRVPLGLPPPPPGFIGRLEGGSLCPLGLANFWKGEWVGPFWFFPHLGKGDFFPRLLIWVTPGFSRSHVFKTRPIYFILGALLKNFFVAMQG

SEQ ID NO: 198260 - protein, 72 aa, Zea mays
  Clone ID: MRT4577_112392C.1.pep
GFPPCKGASWPPPINVGELPHWAPQGFPFRVPDRMLGGIVRGDQFPPGAGCALFSPRVGPESGPHRTGPQWV

SEQ ID NO: 198261 - protein, 75 aa, Zea mays
  unsure (1)..(75): unsure at all Xaa locations
  Clone ID: MRT4577_112393C.1.pep
AYEAARDAHAVCILAEWDEFRTLDYKRMFDAMHKPAFIFDGRNVVDXAKLREIGFVVYAIGKPLDDWLKDMPAVA

SEQ ID NO: 198262 - protein, 112 aa, Zea mays
  Clone ID: MRT4577_112394C.1.pep
MERDYSSTDGGGCEMPGKKARKPYTITKPRERWSTEEHARFVDALLMFGRDWKKIEEHVGTKTTVQIRSHAQKYFLKVQKLGLAAGLPPMYPRRHFAIQQQQSSVADGSSAA

SEQ ID NO: 198263 - protein, 153 aa, Zea mays
  unsure (1)..(153): unsure at all Xaa locations
  Clone ID: MRT4577_112395C.1.pep
GQKGKGRAVLFFLPQELEFVISLKAAKVPXRRNMSPITRMCPICNXLDNIVGENCFWSRFAKXAYRXFDLAYPAPFIRCLFHVQQLYVQKVPASLGFNDPPKLSLALDTSRWQHRKNISKVDGGNRHGTSVSYAVRKEGTKSGPSITFSLSIF

SEQ ID NO: 198264 - protein, 168 aa, Zea mays
  Clone ID: MRT4577_112396C.1.pep
GVFSRRPRLHRRRRGHRRMMLVLLRAVHRRRRPRVTPRRRVREGPRRVHLQRLHRLAVLLHGRAPGRRRRGPAYAAAAGVERRARRHPPLRPPGLPVHVHVHVHVRRRRRWVPPNLCFVCNHKRTMGDELMMTTTLLSLSVSLPANLAPAEGNNTARIRKKKKIMSYL

SEQ ID NO: 198265 - protein, 96 aa, Zea mays
  unsure (1)..(96): unsure at all Xaa locations
  Clone ID: MRT4577_112397C.1.pep
SHQTTQGTGRQTTLQCPSLECQLIGQNRSAAQNARLISAQRQLIHSSEFKASRGVQQYTVQRRISSDDRQVMHSYHKFAGNDDEDDSDMETDFAXI

SEQ ID NO: 198266 - protein, 152 aa, Zea mays
  Clone ID: MRT4577_112398C.1.pep
LLSKCVQPYSLFFPLLGLFRCFSIVAIHSFSQTQRFLLHMHSECICMSLVLSMVIYLNQVNHDIVESNYIKLCSGPFELVFHVSEKLTTSLLFYFSIKLYPWFLISVRMTARCLLSVLIYFPESCIFKHSNQYNALLYPPGPLAGLLLTPVM

SEQ ID NO: 198267 - protein, 61 aa, Zea mays
  unsure (1)..(61): unsure at all Xaa locations
  Clone ID: MRT4577_112399C.1.pep
RTHVTEHRARRSTTKTCSYDAIVPWESRRSSLFXXFLXRPALLLLXAPFCVLCLRGGCGVS

SEQ ID NO: 198268 - protein, 109 aa, Zea mays
  Clone ID: MRT4577_11239C.1.pep
KKKGLQWVFLHFPGATFYNLESQLKRAAPVAQSLFFPTQISPPIFPFFQGLLVNKKQASPIFPKGDPFLNPWGPHFSSPPFFFSSTGSSLEPPKGPSFLVTGPFSTTHF

SEQ ID NO: 198269 - protein, 32 aa, Zea mays
  Clone ID: MRT4577_1123C.1.pep
KLMNVMSCAPPSTGTSQSTKATPGLMRNIPRD

SEQ ID NO: 198270 - protein, 91 aa, Zea mays
  Clone ID: MRT4577_112400C.1.pep
KRTLARTPPRGKSHPMGGPYHREPNLGPNLGETRAKVVPGGKWYPVKNPTKKTTRNQKGKTRGAQRGGQPKLNGVAPTARFQAGKPAGPLD

SEQ ID NO: 198271 - protein, 121 aa, Zea mays
  Clone ID: MRT4577_112401C.1.pep
KRIGKKKIKKKKALPLFYGLKLADPLTSLLRLPGWGKPVTTCGPRLTVAGSLCITRVGDRWVPPVSLMFYRNKIALLCLRSSGVFGDRPCGFLVLIQTASVWILSVAVYKYEPLPSVHQHR

SEQ ID NO: 198272 - protein, 217 aa, Zea mays
  Clone ID: MRT4577_112402C.1.pep
MATPSESPDNKAEKLVVIYVPALTISHLFSSVELGELLAAHSLGVSIVVCGRTADTAAGSFAEGLAAAHPQLSFHLLPHVTRPRDVPAHDHVAQTFGLARASDSDFREFLRVASPSPSALVLDFFCGSAVDVGAELGIPTYFFFTSSISGLAELLYHAFALIHEQASPGISHQNLGGELLHVPGIPPISADDFPAAWHDRDSLWHRLFLTLPDQMCS

SEQ ID NO: 198273 - protein, 85 aa, Zea mays
  Clone ID: MRT4577_112403C.1.pep
DAAGKRLGMDKQLVQLWGRHPAIPVTDAERESTTHDLWRIKTEAETPADDTVGSAVYILRGYQHYKDPILPDMMQSTKLPVLKYM

SEQ ID NO: 198274 - protein, 84 aa, Zea mays
  Clone ID: MRT4577_112404C.1.pep
TVQRRSAHKFSVGRLLLHVQLELLNLAGSVAVLSLLAALGVRVVVHMITLGPGKSRLRKVVRWSNHRLLCPPPAVEQGRFRWHA

SEQ ID NO: 198275 - protein, 111 aa, Zea mays
  Clone ID: MRT4577_112405C.1.pep
MGRSSSTEKLVCFVLAVLAVLSPLYIDRRPVAEREEEDEDDGGGPSALWLPAVLLALILAINVTCFMDRRVVRFDPYWIHRVWGSSGGLLAMLLLLGFVLRCKASLLYTSY

SEQ ID NO: 198276 - protein, 76 aa, Zea mays
  Clone ID: MRT4577_112406C.1.pep
AHLSADLACGLAGLAAGMAIGMAGDAGVKANAQQTTQHAGMILILILTETLALYRLIYGIILWIIACHSPAHYRPD

SEQ ID NO: 198277 - protein, 194 aa, Zea mays
  Clone ID: MRT4577_112407C.1.pep
MAATALLLPSLAAPTDTPRRAHRLLQPQLQLQRGSLVSRSLRPPRRRRLAVSAVQETKEGEAKTADEITEKYGLEFGLWKVFSSKEEEGGEGKKSRTDQAKELLAKYGGAYLATSISLSIVSFTLCYLLVSAGVDVQDLLAKVGIVTGETGGKVGTFALAYAAHKAASPIRFPPTVALTPVVASWIGKIRKGGD

SEQ ID NO: 198278 - protein, 87 aa, Zea mays
  Clone ID: MRT4577_112408C.1.pep
KHLFSVRGDRAAHLRRHVPAGAQDLPRERPSGVGRLRSTRVGPTSSNTTPPGGSACPPGSAQDRRLRVRRRNVVTHLPPVNYRLGQA

SEQ ID NO: 198279 - protein, 59 aa, Zea mays
  Clone ID: MRT4577_112409C.1.pep
KKPIDVTERHLRSTGSLFIVAIPVNRVTVHSKSRRPKEVEDDRIEVSNSDDCHTKVHLC

SEQ ID NO: 198280 - protein, 54 aa, Zea mays
  Clone ID: MRT4577_11240C.1.pep
SCVVIQACPSSFISVAIVQLMDHGYMRLRSRFSQQEVRAYAVGQWAIYCSTGVL

SEQ ID NO: 198281 - protein, 97 aa, Zea mays
  Clone ID: MRT4577_112410C.1.pep
AQEFRKKSPNGGQIFEGCVVKTNWMTICWFYPGGHLLPEKPCQGPRSKIFRAPKFILIFFGWVPPKSFLLFLGFPQKFFGPMYSKFFLCKKWGHFWP

SEQ ID NO: 198282 - protein, 69 aa, Zea mays
  Clone ID: MRT4577_112411C.1.pep
GPRPVALWVARLVVLASSSRSVLLGVGPPPLMFWQLARSPSWFRAARSAFPRVSSSPSPSSLSPPRALA

SEQ ID NO: 198283 - protein, 211 aa, Zea mays
  unsure (1)..(211): unsure at all Xaa locations
  Clone ID: MRT4577_112412C.1.pep
NVPXKNSDYQAICELGSTIGAVEEIDVEALETKDIVRFKVNVKSVSMIPSVIEIGIKPFLYDIFFKVESLDEERWNDDTVCLGKRATIESLQLDDNITENLMKKVKSEKGKGMADHMLTGILEDNSFKGGKSGNAQKVSKDGEKGIEGYSEEKVDFDGSGDDLLSSHELEDLVKEANIEMSASQEIAGVDNTDPGMSKELQAAKIKKAKGR

SEQ ID NO: 198284 - protein, 62 aa, Zea mays
  Clone ID: MRT4577_112413C.1.pep
DPPCRGPLTAAGVGVSPRVTFTFASALPPLLLGFFPSFPARVPGFPRQVLKGGLPYGARLRA

SEQ ID NO: 198285 - protein, 688 aa, Zea mays
  unsure (1)..(688): unsure at all Xaa locations
  Clone ID: MRT4577_112414C.1.pep
MPGVASAAGSGIWSRRRDEITFDRLQKQLICTVFALILVYCSEDMFWDDLPPQAREELLKLDKQTLIEQARKNFYCSRCNGLLLESIAXIDMYGKSLQQEASDICHLRTAIESRITQGEQDGAQDPSIHPWGGLSTTKDGFLTLLDCFIKAKSLCGXLQNVFDNARAREREREMLYPDACGAGGRGWISQGMANYRGHGIREMCALHTAHLSCTTLVDFWSALGEETRSSLLRMKEEDFIEKLMYRFDSKRFCRECRRNVIREFKDLKELKRMQREPRCTSWFCVADTAFKCEVFEDAVVIDWHQCLSEPDESYDHFEWAIGTDEGESDIFGFENVGMNAQVHRNGIDLDQFEDYFITLRAWRLDGQCTELCVKAHALKGQSCAHHRLVVGDGFVTMTKGESIRNFFEHAEEAEEEDEDDAMDRDGNDFDGDDAHSQKHAKSPELAREFLLDAAAVIFKEQIEKAFREGTAQQNARSVFVTLALKLLEQRVHVACKEIITLEKQNKLLEEEEKEKREEQERGMKRRTREREKKNKRKDRLKEKDHSKGKRLVESKSPDNISSSAPSNSTASINDYSTNTLDSRDSGTEEEYSAEGVNLCTPDSCVNQSSCKKINGENSVHCNAVTEFSPMDNSDISTSDQPKSLRRSPRSRDYFPQDQSCWYDDCGDESGRIGELRWKSREKKGRIQL

SEQ ID NO: 198286 - protein, 41 aa, Zea mays
  Clone ID: MRT4577_112415C.1.pep
QAVPSFHAIVTSYLAASASHHGSSAVSLVCKSVHPLDNCHT

SEQ ID NO: 198287 - protein, 51 aa, Zea mays
  Clone ID: MRT4577_112416C.1.pep
KKKKRGKIWGVLGAPFGKRAWLLLEKCSNLNPGLFLGFYKKGLGGRGFFSL

SEQ ID NO: 198288 - protein, 698 aa, Zea mays
  unsure (1)..(698): unsure at all Xaa locations
  Clone ID: MRT4577_112417C.1.pep
QVEKAFREGTAQQNAHSIFVSLALKLLEQRVHVACKEIITLEKQNKLLEEEEKEKREEQERRLKRRTREREKKNRRKERLKEKENNKGKKLVESKSRNDIPSSAPSNSTTSINDYSTNTLDSRDSVKEDEDSAEVVNLCSPDSLVTFVXDQSKSSRRGPRSREDFPQDQSCWYDDCGDESGRIGELQWKSRERTRSINRSRNAASTSNNRTRERQSYNSCSCGHLEDYGVMDSCFLPTARSGKETKIARKSGVEKPRVQYHRCYTLDSFIVSKGNRAGSTQKNAIPKQIWEPMDARRKTKLHNTVHDSGSVNDVDSLKHVVFDNSGSQNFGVGCESQPQASESSRDECNSDQPCANGGRNQTISCASSTLMVNQQNCCAGNDEGSRHDEELMMNSAGSDSSSSCMSEGDRESSSSSTTSSSAQNPESSSESEESPERINSTVGTQSSRAAASRSLLEACAGNGFREYQPKATGLAHNDMFGYNVSPVQDQLLHYQSMYPPQHRPITMGFHDGSWAAPTNGNFQYARPSHLYSSPLVFGIPGNHFIDYPYMAPAFSHIPPEPIHKAASSFRAMPLSLPFQNGHRQAASLTQRDMNLERRPAKLTKPTGKDPPENKNKSGLKDLPEDKSKSWDADASFSLFQFNLPIASPVTPSSKDKSGELAARTPLTQVQAQLCSREQADVKEYSLFSSKDNGIFSFM

SEQ ID NO: 198289 - protein, 80 aa, Zea mays
  unsure (1)..(80): unsure at all Xaa locations
  Clone ID: MRT4577_112418C.1.pep
FFKCXKLKGGFLSGFFQNKTPGAFNLFKTCLKAEWTLPTDSWXTPKKKNNNFKGINLKNGGKQNQNKHAGRLDLLKKNQK

SEQ ID NO: 198290 - protein, 163 aa, Zea mays
  Clone ID: MRT4577_112419C.1.pep
MPGVASAAGSGIWSRRRDEITFDRLQKFWDDLPPQARQELLKLDKQTLIEQARKNFYCSKCNGLLLESFAKIVIYGKSLQQEASDICRLRTAIESRVTQGEQDGAQDPSIHPWGGLSTTKDGFLTLLDCFIKAESLCVLQNVFDNARAREREREMLYPDACGA

SEQ ID NO: 198291 - protein, 128 aa, Zea mays
  unsure (1)..(128): unsure at all Xaa locations
  Clone ID: MRT4577_11241C.1.pep
NNDQSRKPIVWSNIGVGAVLQLFEVTTRGQPFEVIKTQLAANRKDSMISALKTIYSRGGILGFXQGLIPWAWIEASTKGGVLFLAHNEASTFVASLGFSPTVSDTVGCTFGGVAQAYTTMGFCTFMKT

SEQ ID NO: 198292 - protein, 61 aa, Zea mays
  Clone ID: MRT4577_112420C.1.pep
PPFKGTQKKERKRGSTLISTFYGRPNKAISFFFLNGNFPIKLLGFCYPIQNFLTPKIFNIL

SEQ ID NO: 198293 - protein, 111 aa, Zea mays
  unsure (1)..(111): unsure at all Xaa locations
  Clone ID: MRT4577_112421C.1.pep
TKEQVEKAFREGTAQQNAHSIFVSLALKLLEXRVHVACKEIITLEKQVLIIPLDKIKMRLTXRICQHQPWLNLLQNKLLEEEEKEKREEQERRLKRRTREREKKNRRKERL

SEQ ID NO: 198294 - protein, 106 aa, Zea mays
  Clone ID: MRT4577_112422C.1.pep
GGIASIPCDLSPLPLPLFLASRYSHPRPSARGHAAYAHTSAAVSVLRALRVEAATLPVLCLNGSDGPGAKPRPRIRGTLHRGRCCRPRYRCRSTSRASTDLLHAHS

SEQ ID NO: 198295 - protein, 99 aa, Zea mays
  unsure (1)..(99): unsure at all Xaa locations
  Clone ID: MRT4577_112423C.1.pep
MAALRLAYFTLRPAAAEFSASFGATPAASGSVSFARAARGLXPSLRLAPPRRRGDLARPRAARAVLVEEGLMGFLISKLRARGIELSPPKIRIGAAVFF

SEQ ID NO: 198296 - protein, 193 aa, Zea mays
  unsure (1)..(193): unsure at all Xaa locations
  Clone ID: MRT4577_112424C.1.pep
IRHEAKLHNTVHDSGSVNDVDSLKHVVFDNSGSQNFGVGCESQPQASESSRDECNSDQPCANGGRNQTISCASSTLMVNQQNCCAGNDEGSRHDEELMMNSAGSDSSSSCMSEGDRESSSSSTTSSSAQNPESSSESEESPERINSTVGTQSSRAASRSLLEACAGNGFREYQPKATGLAHNDMFGYNVSXVQ

SEQ ID NO: 198297 - protein, 180 aa, Zea mays
  Clone ID: MRT4577_112425C.1.pep
MAGGGAPSAWGPSPALVTALVALLGLGLAAYIVGPQLYWHAAEVLTAAAACPACDCNCDARPLLDLPEDCAKHFKGVKSRASGEETEKSFTELLVEELKQREEEATQAQQEADVKLLEAKKLASQYQKEADKCSSGMDTCEETRENSAEALVQQKKLTSLWERRARELGWRPENAKARLK

SEQ ID NO: 198298 - protein, 172 aa, Zea mays
  unsure (1)..(172): unsure at all Xaa locations
  Clone ID: MRT4577_112426C.1.pep
HASAPSNSTTSINDYSTNTLDSRDSVKEDEDSAEVVNLCSPDSCMNQSSCTKINGENSVHFNAVTEFSPMDSSDLCTSDQSKSSRRGPRSREDFPQDQSCWYDDCGDESGRIGELQWKSRERTRSINRSRNAASTSNNRTRERQSYNSCSCGHXEDYGVMDSCFLANSLLAK

SEQ ID NO: 198299 - protein, 122 aa, Zea mays
  Clone ID: MRT4577_112427C.1.pep
MIYSNHLLKKDCAKHFKGVKSHTNGNNAEYAGTELLVEELKQREEEATQAQQEADVKLLEAKKLASQYQKEADKCSSGMDTCEETRENSAEALVQQKKLTSLWERRARELGWRPENAKARLK

SEQ ID NO: 198300 - protein, 99 aa, Zea mays
  Clone ID: MRT4577_112428C.1.pep
GSTLCNGSYVRLLVKGCQQDQVKWWFHLHMVLFRYVLTFPYHGPSLQMEIRIILISFASNALKSFRADRRLHVCSVLVSHSDMQMAQPTIVSKCSLCNL

SEQ ID NO: 198301 - protein, 280 aa, Zea mays
  unsure (1)..(280): unsure at all Xaa locations
  Clone ID: MRT4577_112429C.1.pep
MPGVASAAGSGIWSRRRDEITFDRLQKFWNDLLPQARQELLKLDKQTLIEQARKNFYCSRCNGLLLESFAQIVIYGKSLQQEASDIGHLRTAIELRITHGEQDGAQDPSIHPWGGLSTTKDGFLTLLDCFIKAKSLRVLQNVFDNARAREREREMLYPDACGAGGRGWISQGMANYRGHGIREMCALHTAHLSCTTLVDFWSALGEGTRSSLLRMKEEDFIEKLMYRFDSKRFCRECRRNVIREFKDLKELKRMQREPRCTSWXCVADTAFKCEVFEDAV

SEQ ID NO: 198302 - protein, 134 aa, Zea mays
  Clone ID: MRT4577_11242C.1.pep
MLGRLCLRPLDWTMSTLWYRGQLIECDHLCQFCLKHKTPSIAILIKSMALATIPVAHRPRHSTEAIIVHAVWTWRWEFVACLVRGQKDTTTTNNNTNNNNNSNGERPLGAARCRYSALMQDKFSRVEHEDKDED

SEQ ID NO: 198303 - protein, 123 aa, Zea mays
  unsure (1)..(123): unsure at all Xaa locations
  Clone ID: MRT4577_112430C.1.pep
MIYSNHLLKKDCAKHFKGVKSHAYGEEIEKSFTKLLVEELKQREEEATQAQQEADVKLLEAKKLASQYQKEADKCSSSMDXTYEEARENSAEALVQQKKLTSLWEQRAWELGWRPKNVKALLK

SEQ ID NO: 198304 - protein, 66 aa, Zea mays
  Clone ID: MRT4577_112431C.1.pep
RTLFFHVSLAVTAVAVVPKGPGSRFTWVCNRSRNPVRLCQLLFWSTSFGTPRHQGHFCLFVNRVFK

SEQ ID NO: 198305 - protein, 89 aa, Zea mays
  Clone ID: MRT4577_112432C.1.pep
LRGVVPFDEFPKKMGAPPSPQMVGISFRKTRQKKRGPLLNRVPGGGPHYGGPNPCNLLKGPPFQRGVIFREKNGPLTRYLSQLGGFKEI

SEQ ID NO: 198306 - protein, 68 aa, Zea mays
  Clone ID: MRT4577_112433C.1.pep
STLLQDEFAGMNEQAHSQMSYVMSGANMFNKHVNCLHIQCKVFEIHDSKYKTCYRISYKSMTIVYVFI

SEQ ID NO: 198307 - protein, 68 aa, Zea mays
  Clone ID: MRT4577_112434C.1.pep
SALVPIFLWPRGTLYFLKRGFSRTAEFSSQWARFEFSNLGVMMKIPFFSVLSRFYTPPRMFLFFLCFF

SEQ ID NO: 198308 - protein, 120 aa, Zea mays
  Clone ID: MRT4577_112435C.1.pep
SACIRIIMRLAGLAWHLAGIVHIFNDEEEQTTEYTGDVFPQMMIIIPICRHPRPRLLRRRHKQQSLRTATWTYGPVTPAAPSSSSSSSTEPLVPPTARRSARRPNQKRKEQKAARGAARR

SEQ ID NO: 198309 - protein, 53 aa, Zea mays
  unsure (1)..(53): unsure at all Xaa locations
  Clone ID: MRT4577_112436C.1.pep
IGKGFFFFFVGDKRFKWSGMVDESNTHYRIALHDFEKEMEIVSLFCXLGACIQ

SEQ ID NO: 198310 - protein, 99 aa, Zea mays
  Clone ID: MRT4577_112437C.1.pep
GGESPAVVGRHPQLLAPLVFRHVVELPRARGLPQQQVLMPRAAGPVSSARRRGHVVARARAPPGPVKLADRTRPGARARRERERERERESPRAKSLVPN

SEQ ID NO: 198311 - protein, 130 aa, Zea mays
  unsure (1)..(130): unsure at all Xaa locations
  Clone ID: MRT4577_112438C.1.pep
IISQTLSMFSLMLDKALSKSEAVVSAFASMTPMLIGSVVLDSTQGVLCGVARGCRWQHLAAWTNLVAFYVIGLPLAILFGFTLAFQTKGLWMGQICSLLCQNYVLFFITLXTNWQELDLTMFNKDNDFVC

SEQ ID NO: 198312 - protein, 85 aa, Zea mays
  Clone ID: MRT4577_112439C.1.pep
MKVPRVWQRGSKDMTAMPHPRHRTAKKPMWIIVLLSIVCVSLIGAYVYPPRRYSTCYFFASSVCTPFKDWLPAVTRREPTDQEVF

SEQ ID NO: 198313 - protein, 43 aa, Zea mays
  Clone ID: MRT4577_11243C.1.pep
PSISGQLNKCNGLVFKNLLMGKPWGFPNLIPLKKIAICQVEKF

SEQ ID NO: 198314 - protein, 66 aa, Zea mays
  Clone ID: MRT4577_112440C.1.pep
RVAAPGGVDQPGGFLCHRLAARHPFRIHARLPNQELRPLFYHSANQLVGVRPDHVQQGQRFCLLGI

SEQ ID NO: 198315 - protein, 125 aa, Zea mays
  Clone ID: MRT4577_112441C.1.pep
MRHSLFGCAWFMVPSFLYECLGLGHDLWVHLFTTSEAVVSAFASMTPMLIGSVVLDSTQGVLCGVARGCRWQHLAAWTNLVAFYVIGLPLAILFGFTLAFQTKGLWMGQICSLLCQNYVLFFITL

SEQ ID NO: 198316 - protein, 188 aa, Zea mays
  Clone ID: MRT4577_112442C.1.pep
THDSIAMCQNTEAISYMITYGFAAVISTRVSNELGARNIANARKALTVSLALSLMLGVAFLLLLGLGHDLWVRLFITSEAVVSAFASMTPLLIGSVVLDSTQGVLCGVARGYGWQHLAAWTNLVAFYVIGLPLAILFGFTLAFQTKGLWMGQICSLLCQNCVLFFITLRTNWQELDLTIFNKDNDFVC

SEQ ID NO: 198317 - protein, 65 aa, Zea mays
  unsure (1)..(65): unsure at all Xaa locations
  Clone ID: MRT4577_112443C.1.pep
ALAELKLKKIKXGFLSMFSMLGLFVQAVVTVKGPLVTLAALIADTVYSYGWAYATNLVPGKLARA

SEQ ID NO: 198318 - protein, 391 aa, Zea mays
  Clone ID: MRT4577_112444C.1.pep
MGKSCVPPVAMVLVQLGFAGMNVVSKLALDAGMSPYVLIAYRNLIAAAVISPVAYLLERRSGATITKKVLLQIFVSSIFGATLNQVLYFVGLKSTSPTVACALTNTLPALTFVMAAALKMESVRPGTPAGQAKLVGTAVCVGGSMVIPFYKGPVLGLWASPLHWRFVADHAPSPAAAAAHSGAAVLGDVLIIASCVAWAVWFILHTKMSEGFSAPYTSTAIMCLMAGVQCAGVSAAMDRSLDVWKLGCDIRLYSVLYIGIVGSGIGFTLMSWCIQVRGPLYVSMFSPLLLVVVAIIGWAILGEKIRVGTAVGSVLIVAGLYMVLWGKGREMDRPDLDNDDDIADEETAVGLVGFSGKGGGAVAIASSRVEAISLPVSFSTTSPKRLQHIHG

SEQ ID NO: 198319 - protein, 42 aa, Zea mays
  Clone ID: MRT4577_112445C.1.pep
SYDIWTCQSTFVTPLVPATQRKNDTPLKHDQSKAKPVDTSRD

SEQ ID NO: 198320 - protein, 126 aa, Zea mays
  unsure (1)..(126): unsure at all Xaa locations
  Clone ID: MRT4577_112446C.1.pep
EAGRYPYLRGVYSXMKEWAGRLRRSMSGVRISIEVCPQYPQGSVFSMSGPCLIRVGLQSRPGYVRVVASVPGPSSSMVGASTRAWWLTDVSEGHASARHPRTPKVAVSSTSPEHLLGGRSWLSLVG

SEQ ID NO: 198321 - protein, 55 aa, Zea mays
  Clone ID: MRT4577_112447C.1.pep
CDNSKLYVMTYGLYILENKFSDEITLSSSLKHAICQLHAIEYSGAYALYSITSGI

SEQ ID NO: 198322 - protein, 77 aa, Zea mays
  Clone ID: MRT4577_112448C.1.pep
VRHSKTIENRWNELGKNVWTDGKKSTWIMSILHEDNHVIWANAGARASWGYLTTPILGLYLFGPWGRLPCIPGPGLL

SEQ ID NO: 198323 - protein, 102 aa, Zea mays
  Clone ID: MRT4577_112449C.1.pep
MGSSCFTARAHPPATTGLPLRHLATDQRDGATWAQSTAFPEFKPEEMAAIMKDFDEPGHLAPTGLILGGTKYMVIQGEPGAVIRGKKGSGGITVKKTGQSLI

SEQ ID NO: 198324 - protein, 63 aa, Zea mays
  Clone ID: MRT4577_11244C.1.pep
RAKKKKKKKKKKKKKKKKKKKKKKKKKKKKKKKKKKKKKKKRGGGFKKNQSLLTLAWKGKVFL

SEQ ID NO: 198325 - protein, 80 aa, Zea mays
  Clone ID: MRT4577_112450C.1.pep
GHDGLKHGMKAEGPMPGDKTKGGGEDTSKTSFSATGGGKQTPRSATADLRSRASKEGRTGTSRQLPHTAGRTRAKGAATC

SEQ ID NO: 198326 - protein, 131 aa, Zea mays
  Clone ID: MRT4577_112451C.1.pep
MSWQTYVDEHLMCEIEGHHLTSAAIVGHDGATWAQSTAFPEFKPEEMAAIMKDFDEPGHLAPTGLILGGTKYMVIQGEPGAVIRGKKGSGGITVKKTGQSLIIGIYDEPMTPGQCNLVVERLGDYLLEQGM

SEQ ID NO: 198327 - protein, 131 aa, Zea mays; identical to SEQ ID NO: 198326
  Clone ID: MRT4577_112452C.1.pep

SEQ ID NO: 198328 - protein, 170 aa, Zea mays
  unsure (1)..(170): unsure at all Xaa locations
  Clone ID: MRT4577_112453C.1.pep
ERSNRYDVITXFSAYLHRRNKEGGALQREFIRFLNGGAYGTGADGHKMTAEATRETMLVXVNNLLQGYSGIRFKILKTIFKLLNDNVTTSLPLRGTITAWGDLIPLSYIAGLITGRQKSGARTPNGRKARAAQAFEMSXIKDGCCKMHAKEGLNMVDCTNQXSGLGSTVI

SEQ ID NO: 198329 - protein, 112 aa, Zea mays
  unsure (1)..(112): unsure at all Xaa locations
  Clone ID: MRT4577_112454C.1.pep
AHHPAEQTKTAAAAGAAGERLQRRGAYAQPSRAGRHGPXGSVTDRTPPPPPHGRARPDRRHGQLDPTTRSAPARGTSRARHTASGAAWLAVTIRGARQGIPGSXARRARPDA

SEQ ID NO: 198330 - protein, 137 aa, Zea mays
  Clone ID: MRT4577_112455C.1.pep
MSDRAKMSWQAYVDEHLMCEIEGHHLAAAAIVGHDGAAWAQSTAFPEFKTEDMANIMKDFDEPGHLAPTGLFLGPTKYMVIQGEPGAVIRGKKGSGGITVKKTGQALVVGIYDEPMTPGQCNMVVERLGDYLLEQGM

SEQ ID NO: 198331 - protein, 143 aa, Zea mays
  Clone ID: MRT4577_112456C.1.pep
LLQGIPRLFGSDVLCVAIEGQVLIISVFVALALQVLLSSHVSVPTVAECSCEFPSHSISVSPQQPSQLYVSFYPPYALFSSARRRVWVFFPALRPVVLLVRSFFCVVILLACRYMRPGSPCIPLVLCAIWSLTFVCFWESKKQ

SEQ ID NO: 198332 - protein, 90 aa, Zea mays
  unsure (1)..(90): unsure at all Xaa locations
  Clone ID: MRT4577_112457C.1.pep
GKIDAELSNICXDGILXCIDSHXVPXSRTAAXESKVFYLXMKGDYHRYXLAEFKTGAERKESAESTMVAYTAAQDIALAELAPTHPIRLG

SEQ ID NO: 198333 - protein, 137 aa, Zea mays
  Clone ID: MRT4577_112458C.1.pep
MSDRAKMSWQAYVDEHLMCEIEGHHLAAAAIVGHDGAAWAQSTAFPEFKTEDMANIMKDFDEPGHLAPTGLFLGPTKYMVIQGEPGAVIRGKKGSGGITVKKTGQAMVVGIYDEPMTPGQCNMVVERLGDYLVEQGL

SEQ ID NO: 198334 - protein, 162 aa, Zea mays
  Clone ID: MRT4577_112459C.1.pep
VFFIGGPPLKPFTKNGEPPRRGKYVGGGLKATLAGDKTPPRGGGGGQKKKPAGCWAKGQPPWAYKHRGFWMGGTNPLTRRRLIRGERPPGPEGARYGAPQTQAGGEKPGRQSPQSPRPPTDNQRGGPEPEGGENTPGENQPGKRMPLLDTQKNPWPGGKTPP

SEQ ID NO: 198335 - protein, 48 aa, Zea mays
  unsure (1)..(48): unsure at all Xaa locations
  Clone ID: MRT4577_11245C.1.pep
AALSRLYLSSLCSQRHHSKAWKQGEGKEGMVPLEPXGGGXXYATHRRS

SEQ ID NO: 198336 - protein, 137 aa, Zea mays
  Clone ID: MRT4577_112460C.1.pep
MSDRAKMSWQAYVDEHLMCEIEGHHLAAAAIVGHDGAAWAQSTAFPGFKAEEMAAIMKDFDEPGHLAPTGLILGGTKYMVIQGEPGAVIRGKKGSGGITVKKTGQSLIIGIYDEPMTPGQCNLVVERLGDYLLEQGM

SEQ ID NO: 198337 - protein, 48 aa, Zea mays
  Clone ID: MRT4577_112461C.1.pep
SSESGVTPCYARRMFYIFHICGFEESYSIVVLTRCIILGGWMLQPLLS

SEQ ID NO: 198338 - protein, 174 aa, Zea mays
  Clone ID: MRT4577_112462C.1.pep
GREAPRHQSENSGIELFHCTSTSSGDHRPPSPSSSDRPTRRAKMSWQTYVDEHLMCEIEGHHLTSAAIVGHDGAAWAQSTAFPEFKTEDMANIMKDFDEPGHLAPTGLFLGPTKYMVIQGEPGAVIRGKKGSGGITVKKTGQALVVGIYDEPMTPGQCNMVVERLGDYLLEQGM

SEQ ID NO: 198339 - protein, 116 aa, Zea mays
  Clone ID: MRT4577_112463C.1.pep
MAVSSPRRALIAAVSLCFLLGAASSVRTATFSPSQQQNLAEDKSRLGSTPPSCRNRCSACNPCMPVQVTTVPGLGRGARATDVDDDTVAVAAGFSRYSNYKPLGWKCRCDGRLYDP

SEQ ID NO: 198340 - protein, 137 aa, Zea mays; identical to SEQ ID NO: 198330
  Clone ID: MRT4577_112464C.1.pep

SEQ ID NO: 198341 - protein, 152 aa, Zea mays
  unsure (1)..(152): unsure at all Xaa locations
  Clone ID: MRT4577_112465C.1.pep
IPKFYALKSQLQGVFLGIQTLKSPQPLGEPMKGGTKTMGQMNPQMNLPAPQKIMREFXRXNQKMEMVSXVINPPLDNPLEGVXGEEKPKELVSQVLYEIGLDINSELVKGPATPVWKPVPTGKVPAQAETPGGPNGGKNNDPQGGVENPRKM

SEQ ID NO: 198342 - protein, 100 aa, Zea mays
  unsure (1)..(100): unsure at all Xaa locations
  Clone ID: MRT4577_112466C.1.pep
DRLRLTARRVSRLREAQQQNLAEDKSRLGSTPPSCRNRCSACNPCMPVQVTTVPGLGRGARAXPTSTTTTVAVAAGFSRYSNYXXPLGWKCRCDGRLYDP

SEQ ID NO: 198343 - protein, 137 aa, Zea mays
  Clone ID: MRT4577_112467C.1.pep
MSDRAKMSWQAYVDEHLMCEIEGHHLAAAAIVGHDGAAWAQSTAFPEFKTEDMANIMKDFDEPGHLAPTGLFLGPTKYMVIQGEPGAVIRGKRGSGGITVKKTGQALVVGIYDEPMTPGQCNMVVERLGDYLLEQGM

SEQ ID NO: 198344 - protein, 134 aa, Zea mays
  Clone ID: MRT4577_112468C.1.pep
PGSLLPGPGGGPRKFKSPVCLGSWAPRALERFFLPPPVFKGQKGFGPGGPSGDFVRRQGPVPPYPFGVFFCERAGPRGIFSKGGVFFPPGGPFLEKKRALSIFWNGGPLNFFFSRFWGAPPFVFFGPPFGEKNV

SEQ ID NO: 198345 - protein, 56 aa, Zea mays
  Clone ID: MRT4577_112469C.1.pep
CPNSDEIAHRIRGTLLNPIYLVPHYRRNVERAKPGDKKKKKKGGCLRGLKSMHVRT

SEQ ID NO: 198346 - protein, 63 aa, Zea mays
  Clone ID: MRT4577_11246C.1.pep
NLLKGDSICQEINCETICTVPEKSIKHYINLGSSFLNSQQGKVPVRPFNGCENLNLGNKTIPS

SEQ ID NO: 198347 - protein, 38 aa, Zea mays
  Clone ID: MRT4577_112470C.1.pep
QIRQVVSRGCKLYIRVTPCGRRRWLGNIPVSPLWTMTR

SEQ ID NO: 198348 - protein, 53 aa, Zea mays
  Clone ID: MRT4577_112471C.1.pep
PHASRDQTQGQSIEVLLHNSGARGVMRNPVACHLLSCLLRSDAKRHAGDGRGT

SEQ ID NO: 198349 - protein, 131 aa, Zea mays
  Clone ID: MRT4577_112472C.1.pep
MAAQARMGGARGSSGAVVLALVLLCVLLHGEFAESAVYTVGDRGGWSFNTANWPKGKRFRAGDVLVFKYDPKAHNVVPVSAAGYSSCSAPRGVRALTTGNDRVTLKRGVNYFICSFPGHCQAGMKVAVTAA

SEQ ID NO: 198350 - protein, 80 aa, Zea mays
  unsure (1)..(80): unsure at all Xaa locations
  Clone ID: MRT4577_112473C.1.pep
PPRGPIRLVXEGNIGPAKHFGYMFLVGFQGFLSEPRGQNAFAEVQEFTSFFRVVGGFPMGIRPITAGFFFPVFLSGSLLL

SEQ ID NO: 198351 - protein, 52 aa, Zea mays
  Clone ID: MRT4577_112474C.1.pep
PPHMASSSLSSPQVLPARSACPSVAMQPPITTCACTPYTPQLSVAHSNPAPA

SEQ ID NO: 198352 - protein, 66 aa, Zea mays
  Clone ID: MRT4577_112475C.1.pep
QGKGDYIFTGGLIFLPGFRLPGKKCPRPCTPVLPPGTCYTGGLQLHNKWDNFFMGKKTTTINKKNN

SEQ ID NO: 198353 - protein, 75 aa, Zea mays
  Clone ID: MRT4577_112476C.1.pep
GSRFCTGCSASGASRPCLICHVSTWPSLLLGRALGSGDARSTSPSAAVLRSETAAICALLARSRRSSSRHRLMDA

SEQ ID NO: 198354 - protein, 55 aa, Zea mays
  Clone ID: MRT4577_112477C.1.pep
NPRHSRGPQHSGSRPKSLGRAGQPPTINPSPKFPCETDGLVDFKRTQPTGACHVR

SEQ ID NO: 198355 - protein, 59 aa, Zea mays
  Clone ID: MRT4577_112478C.1.pep
SIKLGNDCCFLRCERTGTNKQKDLLRLDTSRRTLVNVQKLPCDCGKKEQFHRVSFTLGA

SEQ ID NO: 198356 - protein, 475 aa, Zea mays
  Clone ID: MRT4577_112479C.1.pep
MKIGKGRKKMRNKQRKSSALGSDAGCGSSLSCIVWSLVGFGLVCFIFLKHQADSGQTHVYFSPLHATRELEDIEEDHFRLPPPHKVNPRAVKRRGPRKQPKVIDDYLEESSAVHALFFPDQMTAVDPTKGGNDSMYFYPGRVWLDTDGNTIQAHGGGIMYDHKTARFYWYGENKDGPTYQARPKGTQRVDIIGVSCYSSKDLWSWTHEGIVLRGEPSNVIHDLYKSKVLERPKVIYNDRTEKYIMWMHIDDANYTKASVGVAVSSSPTGPFTYLYSFRPHGCESRDMTVFKDDDGMAYLFYSSRDNTELHVSPLTEDYLQITAAMKRILIRRHREAPAVFKHQGTYYMITSGCSGWAPNRALAHAAESIMGPWETLGNPCVGGNRFYRLTTFLSQSTFVLPLPGLSGAFIFMADRWSPSNLRDSRYVWLPLFVGGLADEPLDYSFGFPLWSRVSIYWHKKWRLPEDWKIANTANT

SEQ ID NO: 198357 - protein, 75 aa, Zea mays
  Clone ID: MRT4577_11247C.1.pep
CVFGFFLVLEGYRNQTTITFPVIRVNTSCGSKYMLLYSAPPPPPPVCQLTLALLCSIGSWLMNVRITRHVTFYLP

SEQ ID NO: 198358 - protein, 39 aa, Zea mays
  Clone ID: MRT4577_112480C.1.pep
LLTPTVPLLRSVHSLGAQRVLMEVVSYYFLNVVHQRLFL

SEQ ID NO: 198359 - protein, 399 aa, Zea mays
  unsure (1)..(399): unsure at all Xaa locations
  Clone ID: MRT4577_112481C.1.pep
LQQVLAWSFSGEEHLRQVRIMGKFMHDNPMLSCSEVNRHHYSLAAVAVGLGLGVAGLCKALYSGLSIPWVSPRNLFSGSGRAYYVGGLRNLGNNCFLNVILQALASCDGFISFLDNLLATDGLLPEEKAVRMPLLLALSSLLEDLSIVRDERTVLNPHGLMHALSLYVGHFNLTRQQDASEAFLHLLISLRDEFAHCYVPHRSSLADITLSDSKVYKQREGNLPECKRWXKPIWPXMGQLAAYCXRNCSSVLSLDFENFHCLPLSPVLNANGDITSGCSLVDCLKYFTVVEHLDNYRCDRCWHIIAAKYLSLRSEVDEEKVSKLQSCVDYGTCSCRDMFPLESLPCSSSSRATKQLIISQCPKILCIHFLRALVGLDGEPIIHXGHISFPXLFLNLSPF

SEQ ID NO: 198360 - protein, 270 aa, Zea mays
  unsure (1)..(270): unsure at all Xaa locations
  Clone ID: MRT4577_112482C.1.pep
MSALTRRIPPRWPQLFLADGDAGPTGMEHRRLTGDVLMEPAICTFMHGSYPLRGKHYHEMINPFRVLTDVSYIHVFQVKKLIKEKKNDAGISEYIDINKELQEVYGTMIHLRVSDSYVLSQGQDDKREFFHRFYLSIVRDERTMLNPHGVMHALSLNVGHFNLTRQQLSLDFENFHCLPLLPVLNANGDITSGCSLVDCLKYFTVVEHLDNYRCDRCWHIIAAKYLSLRSEVDEEKXCRDMFPLESLPCSSSSRATKQLIISQCPKVSKI

SEQ ID NO: 198361 - protein, 352 aa, Zea mays
  unsure (1)..(352): unsure at all Xaa locations
  Clone ID: MRT4577_112483C.1.pep
DDSISSEVDDIDIIPNEEMLLILSEKGYAKRMNPDTFSLQHRGTIGKSVGKMRMNDSTSDFIVCQPHDHVLYFSDKGIVYSARAYKIPECTRTATGTPLVQLLPLSDGERITSIIPVSEFGENQYLVMLTVNGYIKKVPLNAFSSIRSTGIISIQLVPGDELKWVRHCGNDDLVALASQKGRVIVNSCDKLRALGRNTRGVCAMKLKEGDMMAAMDIIPATVHKMPERCNSRLRDSSPPWLLFIAESGIGKRVPLNAFRQSNFNAVGLQGYKLPADCRXPLYLLLVFXTEDGESDEQVVLVSQSGTANRIKVKDISVQSRRSRGVILMRLEHAGKIQSASLISAAAAEVTED

SEQ ID NO: 198362 - protein, 153 aa, Zea mays
  unsure (1)..(153): unsure at all Xaa locations
  Clone ID: MRT4577_112484C.1.pep
RLSAGSGAIMGKFMHDNPMLSCSEVNRHHYSLAAVAVGLGLGVAGLCKALYSGLSIPWVSPRNLFSGSGRAYYXGGLRNLGNNCFLNVILQALASCDGFISFLDNLLATDGLLPEEKAVRMPLLLAXRSLLEDLSIVRDERTVLNPHGVMHAL

SEQ ID NO: 198363 - protein, 101 aa, Zea mays
  Clone ID: MRT4577_112485C.1.pep
LVLNQSPVPMVQTGRGLQRRKRSISVQVSFLAKKSRPQGVSKAHGPLIDSSDRPSNGAQIKQAGRQAARPRNSSSVSISSPEPPAILHGGKQQRSKRRGAI

SEQ ID NO: 198364 - protein, 44 aa, Zea mays
  Clone ID: MRT4577_112486C.1.pep
RSTGLGHLYSEGLHPSFHRPSLASHLELRLWIHVVSTAYRTTCP

SEQ ID NO: 198365 - protein, 124 aa, Zea mays
  Clone ID: MRT4577_112487C.1.pep
KVPPQRPEVHLNPWGGPKGLPPQFFLSGDYPPPNAQKGVARFPFSQPMFGGVPCCLGAFFPGLVFGFFLNPNKFGSSPVLGSPPPNPPFFFNSNGQKAQGPFFSSLASLCGALVIKDRALFFVL

SEQ ID NO: 198366 - protein, 57 aa, Zea mays
  Clone ID: MRT4577_112488C.1.pep
ISNDLYINVVGPMLCRGRSYRKNRFSPKPVCIRCPKVPLSEDSPSHTDLKIECLFSP

SEQ ID NO: 198367 - protein, 81 aa, Zea mays
  Clone ID: MRT4577_112489C.1.pep
LYLLQSAKKPDRHHEGGARWPCSSGFWLERQLHPYQRGVAVATNRRRLILPPPGHWQLRVNRQLRGIFHRRCNWRRRVNWQ

SEQ ID NO: 198368 - protein, 140 aa, Zea mays
  Clone ID: MRT4577_11248C.1.pep
PRPKWAAVSAYCRRHGVERGPMQCRKRWGNLSWDLKKIVAWEGKAIAGAGAGAAQHESFWDMRGDQRRARQLPSSFDREVYDALVCGASAGEDAAAAAVLPPDFGDGEPEGVYRQPPIMVMPISGQYSYYVHVNEYRRAS

SEQ ID NO: 198369 - protein, 75 aa, Zea mays
  unsure (1)..(75): unsure at all Xaa locations
  Clone ID: MRT4577_112490C.1.pep
YLRVSSSIIPPAADGLXTGITELNPQRQSFSCSYGSVLRTSLAYIVPLARGCSPXKPYAVMSATASVRTALLRIF

SEQ ID NO: 198370 - protein, 172 aa, Zea mays
  unsure (1)..(172): unsure at all Xaa locations
  Clone ID: MRT4577_112491C.1.pep
MPREGRNVPVPDSELRWRKRLDLRXLLQQRESSIAXKKKSIEIHKLIFTRGKQYLEDYNAQKKELVHLNREARLKGVFYDGTEDXLLFVFSIRGXNAMHSINMXILKLLRLRKIFIGVFLKDNYGCINMLQMYEPYDAYGDPNLNSVRYLIYKMRYAKLNELRFSLSDNQVI

SEQ ID NO: 198371 - protein, 170 aa, Zea mays
  unsure (1)..(170): unsure at all Xaa locations
  Clone ID: MRT4577_112492C.1.pep
MTPSVSCPVKCRPHPCLAPQPPAPSLELLAARGAPIAGDLRACRSPPYLPLSRSADSLELRAACRGAPPARRARAAVALGGDGPSAALIAGAQSRHAIFRDELVRRAFSAAEAAHRGQVRASGDPYLQHCVETAALLAELGAGPAVXAAGLLHDTVDDAGLGYXFISEHF

SEQ ID NO: 198372 - protein, 59 aa, Zea mays
  Clone ID: MRT4577_112493C.1.pep
ASSDRRLKHKIGLESWDNVKKRIAANQVDGGHGEETNRKSVSIHGLRIMMAANGICRQR

SEQ ID NO: 198373 - protein, 538 aa, Zea mays
  unsure (1)..(538): unsure at all Xaa locations
  Clone ID: MRT4577_112494C.1.pep
MGNCCRSPAAVAREDVSSSHFPASNAKKKPHQARNGGGGGGQKRLSVLGDEGCEVVGIDDKYVLDRELGRGEFGVTYLCMDRDTKELLACKSISKRKLRTAVDVEDVRREVAIMRHLPKSPSVVSLREACEDDGAVHLVMELCEGGELFDRIVARGHYTERAAASVTRTILEVVQLCHRHGVIHRDLKPENFLFANKKENSPLKAIDFGLSIFFKPGEKFSEIVGSPYYMAPEVLKRNYGPEIDIWSAGVILYILLCGVPPFWAETEQGVAQAILRGNIDFKREPWPNVSENAKDLVRHMLEPDPKLRLTAKQVLEHHWLQNAKKAPNVPLGDIVKSRLKQFSRMNRFKRRALRVIADHLSAEEVEDIKDMFKTMDTDNDGIVSYEELKTGIAKLGSHLAESEVQMLIEAVDTNGRGALDYGEFLAVSLHLQRMANDEHLRRAFLFFDKDGNGFIEPEELREALVDDGAADSMEEVVNDILQEVDTDKDGKISYDXEFVAMMKTGTDWRKASRHYSRGRFNSLSMKLIKDGSVKLGVE

SEQ ID NO: 198374 - protein, 138 aa, Zea mays
  unsure (1)..(138): unsure at all Xaa locations
  Clone ID: MRT4577_112495C.1.pep
TRPSTPSDAAGRGGRGQGRRDPGAGPRRSGEREKKPXPAPRXXGTAGGPPXTAPRPRXRDGRHPANRESGXPRTQARGAXXXXHGNTGXREDSXRAXQEXAEEXGXXKXXXDRXGXGQSDPNPNPAXKSGGXDREEPA

SEQ ID NO: 198375 - protein, 95 aa, Zea mays
  Clone ID: MRT4577_112496C.1.pep
MAPWEWEPCIPWRPALGKKTGWELGHGKNRERGWGCAAVGRQQEEDAGGGGRCAEEAWHGKASSLLELGADPARGEQGRAKLACALDSRGSGLWT

SEQ ID NO: 198376 - protein, 53 aa, Zea mays
  Clone ID: MRT4577_112497C.1.pep
VQIFLFAYFQLYAVLSPEKKHIVKKRMGHNIKEIFFLNKAQSNAIVMILAVCS

SEQ ID NO: 198377 - protein, 1480 aa, Zea mays
  Clone ID: MRT4577_112498C.1.pep
MENPWLIRISYCSEEEGFPHLLRSCALRLGIRKKPEYVWKEYRENGIEKCSMAVYLGESQNYPNHPPFQITFIGHSFPDTCQSVARKALKQLCQNYSREISETPLRYFPPSNKNTPTWRKRLQSLSGGDPTEDDPTIVYMAGYLHTLDNHYDELSSHCTHLNSRVESLEQQVKELKQEKASLQESLNIAEGEEANTREAYRTLKMDYDKKLKKLAPKKKIQKKTTNQGCQTEKKKKKAPLALPPPRIDDWSDDEDVSLASLDDLLKAFGDTLDKEFATWWDTFNVTIRDATWAEFEAAFREHHVPQGLVQLKEDEFRELTQDGRSVSEYVHKFTELARYAPDDVSTESKKMARFLKGLRPELKTILASQDFLNFSHLSNKAMQVERAKEEEKGHLKRKFQVLRAQQQDRHQKTRSFGFPPKGPNFSRPAGPTPSRFSQQSQSSFHSPSVASNQPPANACWHCGDPSHFKNNCPQLKVPVPAYSNSVNGPKNTSTSTPKAPSAVSQQNKAPYQGRARVNHVDAQEAQQAPGVVLEELPGMPPEREVEFYIDLIPGTAPIAKRPYRMAPTELAELKLQIVDLQQKGYIRPSSSPWGALVLFVSKKDGSMRMCIDYRSLNEVTIKNKNPLPRIDDLFDQLQGAKYFSKIDLRSGYHQLRIKEADIQKTAFVTRYGQYEFTVMSFGLTNAPTFFMNLMNKVFMEELDKFVVVFIDDILIYSKSREDHKRHLRIVLGKLRAHQLYAKLSKCEFWLEKIAFLGHILTAEGIEVDPSKVEAVSKWRQPTNVSEVRSFLGMAGYYRRFIKGFSSIARPMIELLKKDHKFAWTQKCEGSFQVIKEKLTTALVLSLPDIHQDFVVFCDASRQGLGCVLMQNEKVIAYASRLLKSHEHNYPTHDLELAAIVHALKIWRHYLIGNKCHIFTDHKSLRYIFTQPDLNLRQRRWLELIKDYDLEIHYHPGKANVVADALSRKPFGIKGTNFLEDWKKESAQLNACLGNNDSLEVKPMLEDLICKAQRLDSETARLVEKARKEQLPDLRTDDQGVLWFKHRLCVPKGEAREVLLKEAHDSAYSIHPGTTKMYLDLKTRYWWKGMKNEIAQYVARCDICQRTKAEHQKPAGLLQPLLIPEWKWEEIGMDFVTGLPRTQKGNDSIWVIIDRLTKVAHFIPVKTTFGGATLARIYLKEIVRPHGIPRKIVSDRGTQFTSKFWTSLQKAMGTKLDFSTAYHPQTDGQTERVNKVLEDLLRACVLAFDRSWESSLPYAEFSYNNSYQASIKMSPFEALYGRKCQTPLMWSNVGGKALEGPAFVKEAEEKVALIRRRLLEAQSRQKSYTDNRRRELRFEEGDFVYLKVSPMHGVRRFQVKGKLAPRFVGPYPIIGRVGPAAYRLELPESMSDIHNVFHVSQLRKCLQAPESHLEEETVQIQKDLQYREKPVKILDSAVRKTRTSEVKLCKVQWSREGEEEATWESEDFLRREYPYLFPNPV

SEQ ID NO: 198378 - protein, 930 aa, Zea mays
  Clone ID: MRT4577_112499C.1.pep
MGDFLRLKPPTFAGSSNPLDADDWMHTIKRKLEAIGCPENQRVQLAAHQLSGMALAWWDTFNVTIRDATWAEFEAAFREHHVPQGLVQLKEDKFRELTQDGRSVSNYVHKFTKLARYAPDDVNTESKKMARFLKGLRPELKTILASQDFLNFSHLSNKAMQVERAKEEEKGHLKRKFQVLRAQQQDRHQKTRSFGFPPKGPNFGRPAGPTPSRFSQQSQSSFHSSLVASNQPLANACWHCGDPSHFKNNCPQLKPPGPSYSNSVNGPKNTSATAPKAPSAVSQQNKTPYQGRARVNHVDAQEAQQAPGVVLGEFLVEFTPATVLFDSGASHSFIATSFVEKYGIPSTPLEIPLVTRTPGSDLLCQLKCSQVRILLSGVVYLADLTVLPSKGIDVILGIDWLTKHKSIISCADKTVLLTDQQGKSVSCQAQPPASDPMMFYLTTESISVVEEFMDVFPEELLGMPPEREVEFYIDLIPGTAPIAKRPYRMAPTELAELKLQISDLQQKGYIRPSSSPWGAPVLFVSKKDGSMRMCIDYRSLNEVTIKNKYPLPRIDDLFDQLQGAKYFSKIDLRSGYHQLRIKEADIQKTAFVTRYEQYEFTVMSFGLTNAPAFFMNLMNKVFMEELDKFVVVFIDDILIYSRNREDHKRHLRIVLGKLRAHQLYAKLSKYHLTKVAHFIPVKATFGGATLARIYLKEIVRLHGIPRKIVSDRGTQFTSKFWTSLQKAMGTKLDFSTAYHPQTDGQTERVNKVLEDLLRAYPSHVVQRGGKALEGPAFVKEAEEKVALIRRRLLEAQSRQKSYADNRRRELRFEEGDFVYLKVSPMRGVRRFQVKGKLAPRFVGPYPIIGKLRKCLQAPESHLEEETVQIQKDLQYREKPVKILDSAVRKTRTSEVKLCKVQWSREGEEEATWESEDFLRKEYPYLFPNPV

SEQ ID NO: 198379 - protein, 446 aa, Zea mays
  Clone ID: MRT4577_11249C.1.pep
MDVEYDVIVLGTGLKECILSGLLSVDRLKVLHMDRNDYYGGDSTSLNLNQLWKRFKGEETPPAHIGASRDYNVDMVPKFMMANGTLVRVLIHTGVTKYMSFKAVDGSYVFNKGKIHKVPSTDMEALKSPLMGLFEKRRAGKFFLYVQDYKENDPSTHKGYNLTKLTTKELISKYGLDDNTIDFIGHAVALHRDDSYLTEPAIDTVKRMKLYAESVARFQGGSPYIYPLYGLGELPQGFARLSAVYGGTYMLSKPECKVEFDDEGKVCGVTSEGETAKCKKVVCDPSYLPDKVKKIGKVFRAIAIMSHPIPNTAESHSVQIILPQKQLGRRSDMYVFCCSYSHNVASKGKFIAFVSAQAETDNPEKELKPGIDLLGKVDELFIDIYDRYEPTNDSSADNCFISTSYDATTHFESTVMDVLSLYTKITGKTVDLSVDLSAASAAEDDM

SEQ ID NO: 198380 - protein, 83 aa, Zea mays
  Clone ID: MRT4577_1124C.1.pep
RKGLDLVLLTKTKTLRLDHTQGEELPLAHLCKTILFGAGRTKERNHPYQLPGQSLDCGSEQPPGIFSRPRTQENLNHTCVLDP

SEQ ID NO: 198381 - protein, 62 aa, Zea mays
  unsure (1)..(62): unsure at all Xaa locations
  Clone ID: MRT4577_112500C.1.pep
MKRNPRVTSSRRKCRKXHFTAPSSVLRVLMSAALSTELRHKXNVRSIPIRKDDEVLVVRGTY

SEQ ID NO: 198382 - protein, 1261 aa, Zea mays
  Clone ID: MRT4577_112501C.1.pep
MALAWWDTFNVTIRDATWAEFEAAFREHHVPQGLVQLKEDKFRELTQDGRSVSEYVHKFTELARYAPDDVNTESKKMARFLKGLRPELKTILASQDFLNFSHLSNKAVQVERAKEEEKGHLKRKFQVLRAQQQDRHQKTRSFGFPPKGPNFSRPVGPTPSRFSQQSQSSFHSPSVASNQPPANACWHCGDPSHFKNNCPQLKPQGPAYSNSVNGPKNTSAPAPKALSAVSQQNKTPYQGRARVNHVDAQEAQQAPGVVLGEFLVEFTPATVLFDSGASHSFIATSFVEKYGIPSTPLEIPLVTRTPGSDLLCQLKCSQVRILLSGVVFLADLTVLPSKVIDVILGMDWLTKHKGIISCTDKTVLLTDQQGKSVSCQAQPPASDPMMFSITTENISVVEEFMDVFPEELPGMPPEREVEFYIDLIPGTAPIAKRPYRMAPTELAELKLQISDLQQKGYIRPSSSPWGAPVLFVSKKDGSMRMCIDYRSLNEVTIKNKYPLPRIDDLFDQLQGAKYFSKIDLRSGYHQLRIKEADIQKTAFVTRYGQYEFTVMPFGLTNAPAFFMNLMNKVFMDELDKFVVVFIDDILIYSKNREDHKRHLWIVLGKLRAHQLYAKLSKCEFWLEKIAFLGHILTAEGIEVDPSKVEAVSKWRQPTNVSEVRSFLGMAGYYRRFIKGFSSIARPMTELLKKDHKFVWTPKCEESFQIIKEKLTTAPVLSLPDIHQDFVVFCDASRQGLGCVLMQNEKVIAYASRLLKPHEQNYPTHDLELAAIVHALKIWRHYLIGNKCHIFTDHKSLRYIFTQPDLNLRQRRWLELIKDYDLEIHYHPGKSNVVADALSRKPFGIKGTNLLEDWKGESAQLNACLGNNDSLEVKPTLEDLICKAQHLDPETARLVGKARKEQLPDLRTDDQGVLWFKHRLCVPKGEAREKGNDSIWVIIDRLTKVAHFIPVKTTFGGATLARIYLKEIVRLHGIPRKIVSDRGTQFTSKFWTSLQKAMGTKLDFSTAYHPQTDGQTERVNKVLEDLLRACVLAFDRSWESSLPYAEFSYNNSYQSSIKMSPFEALYGRKCQTPLMWSNVGEKALEGPAFVKEAEEKVALIRRRLLEAQSRQKSYADNRRRELRFEEGDFVYLKVSPMRGVRRFQVKGKLAPRFVGPYPIIGKVGPAAYRLELPESMSDIHNVFHVSQLRKCLQASESHLEEETVQIQKDLQYREKPVKILDSAVRKTCTSEVKLCKVQWGREGEEEATWESEDFLRREYEST

SEQ ID NO: 198383 - protein, 114 aa, Zea mays
  unsure (1)..(114): unsure at all Xaa locations
  Clone ID: MRT4577_112502C.1.pep
FSVVSLLRLGLLVVLFRRGGLPCLSMDLVWHFSFSMSSVRXALGAGIVAGLCSGPRSWWRGWECGVVGGGGLGETDDAGNRREEERVDWGKASTAAAAAAVVAWEESAMGKGWG

SEQ ID NO: 198384 - protein, 1242 aa, Zea mays
  unsure (1)..(1242): unsure at all Xaa locations
  Clone ID: MRT4577_112503C.1.pep
NPPPXPPPLPLDLAQVLANQTRLIEVLTRNLENQRPNGGRPQDRMGDFLRLKPPTFAGSSNPLDADDWMRTIKRKLEAIGCPENQRVQLAAHQLSGVALAWWDTFNVTIRDATWAEFEAAFREHHVPQGLVQLKEDEFRELTQDGRSVSEYVHKFTELARYAPDDVNTESKKMARFLKGLRPELKTILASQDFLNFSHLSNKAMQVERDKEEEKGHLKRKFQLKPQGPAYSNSVNGPKNTSAPAPKAPSAVSQQNKTPYQGRARVNHVDAQEAQQAPGVVLGEFLVEFTPATVLFDSGASHSFIATSFVEKYGIPSTPLEIPLVTRTPGSDLLCQLKCSQVRILLSGVVFLADLTVLPSKGIDVILGMDWLTKHKGIISCADKTVLLTDQQGESVSCQAQPPASDPMMFNITTENISVVEEFMDVFPEELPGMPPEREVEFYIDLIPGTAPIAKRPYRMAPTELAELKLQISDLQQKGYIRPSSSPWGAPVLFVSKKDGSMRMCIDYRSLNEVTIKNKYPLPRIDDLFDQLQGAKYFSKIDLRSGYHQLRIKEADIQKTAFVTRKCEFWLEKIAFLGHILTAEGIEVDPSKVEAVSKWRQPTNVSEVRSFLGMAGYYRRFIKGFSSIARPMTELLKKDHKFVWTPKCEESFQIIKKKLTTTPVLSLPDIHQDFVVFCDASRQGLGCVLMQNERVIAYASRLLKPHEQNYPTHDLELAAIVHALKIWMHYLIGNKCHIFTDHKSLRYIFTQPDLNLRQRRWLELIKDYDLEIHYHPGKANVVADALSRKPFGIKGTNFLEDWKEESAQLNACLGNNDSLEVKPMLEDIIYKAQHLDPETARLVEKARKEQLPDLRTDDQGVLWFKHRLCVPKGEAREVLLKEAHDSAYSIHPGTTKMYLDLKTRYWWKGMKKEIAQYVARCDICQRTKAEHQKPAGLLQPLPIPEWKWEEIGMDFVTGLPRTQKGNDSIWVIIDRLTKVAHFIPVKTTFGGATLARIYLKEIVRLHGIPRKIVSDRGTQFTSKFWTSLQKAMGTKLDFSTAYHPQTDGQTERSNVGEKALEGPAFVKEAEEKVALIRRRLLEAQSRQKSYTDNRRRELRFEEGDFVYLKVSPMRGVRRFQVKGKLAPRFVGPYPIIGKVGPAAYRLELPESMSDIHNVFHVSQLRKCLQAPESHLEEETVQIQKDLQYREKPVKILDSAVRKTRTSEVKLCKVQWSREGEEEATWESEDFLRREYAYLFPNPV

SEQ ID NO: 198385 - protein, 245 aa, Zea mays
  unsure (1)..(245): unsure at all Xaa locations
  Clone ID: MRT4577_112504C.1.pep
MASGTGIGTGNGNGGSVLGVVAACMCACLILSVPAADAQLKVGYYDATCPDAESLITTIVHASVRMDAGNGPGLVRLFFHDCFVRGCDASVLLDDPTGSPGNRTVEKTAAPNFPSLRGFGVIDRAKRVVECRCPGVVSCADIVAFAARDASRIMGGIIFAMPSGRLDGRVSNATEALANLPPANFNLTQLITRFASKNLTADEMVTLSGAHSIXRSHCSSFSSRLYPQIDPTLNNTLAKGLRAGK

SEQ ID NO: 198386 - protein, 553 aa, Zea mays
  unsure (1)..(553): unsure at all Xaa locations
  Clone ID: MRT4577_112505C.1.pep
MRVYITATATAGEGDATKPKAPPPHQQQQQQARRGCRSAAATGLLAGLLLFRAALLAIEAGASLCPSTAAGCLDWRAGLGRWLYGDGGDATEEFMEEWRRRSREATLLDPVVVEAAPDSMDALLAEMATMLASYDRVDVEAVAIKMMAMLSKMDRKVKSSRTRALLNRHLASLGVPKSAHCLALRLAEEFAVNAAARSPVPPPEHAPRLTDASRLHVALVTDNVLAAAVAVASAARSAADPARLVLHVLTDRKSYVPMHSWFALHPVEPAVVEVRGLHQLAWRDAGAVASVMRTVEEVRRSSLDWYRXDSAVVGRRXEETRPSAFSLLNYLKIHLPELFPELGRVVLLDDDVVVREDLAGLWEQDLDGNVIGAVGAHEGGGVCVDKTLGDHLNFSDPDVSGSGPLHSSRCAWSWGVNVVDLDAWRRTNLPGASEQFVADGLAATGGGSESDISSRGHVQNRESGFRLWQMASLPPALLAFDGRVQAIDPRWNLPGLGWRVPHPDLVRLSAVLHFSGPRKPWLEVAFPELRQLWLAHLNASDSFLQGCGVVEWQ

SEQ ID NO: 198387 - protein, 62 aa, Zea mays
  Clone ID: MRT4577_112506C.1.pep
KYEVGSVLVFCRCFLRLVKVCNQTNVNNCFLPLVEVHGSTTFKKNSCIHKIYYIKSMISKKK

SEQ ID NO: 198388 - protein, 1384 aa, Zea mays
  Clone ID: MRT4577_112507C.1.pep
MGDFLRLKPPTFAGSSNPLDADDWMRTIKKKLEAIGCPENQRVQLAAHQLSGMALAWWDTFNVTIRDATWAEFEAAFREHHVPQGLVQLKEDEFRDLTQDGRSVSEYVHKFTESARYAPDDVNIESKKMARFLKGLRPELKTILASQDFLNFSHLSNKAMQVERAKEEEKGHLKRKFQVLRAQQQDRHPKTQSFGFPPKGPNFSRPAGPTPSRFSQQSQSSFHSPSVASNQPPANACWHYGDPSHFKNNCPQLKPQGPAYSNSVNGPKNTSAPAPKAPSAVSQQNKTPYQGRARVNHIDAQEAQQAPGVVLGEFLVEFTPATVLFDSGASHSFIATSFVEKYGIPSTPLEIPLVTRTPGSDLLCQLKCSQVRILLSGVVFLADLTVLPSKGIDVILGMDWLTKHKGIISCADKTVLLTDQQGKSVSCQAQPPASDPMMFNITTESISVVEEFVDVFPEELPGMPPEREVEFYIDLIPGTAPIAKRPYRMAPTDSSPWGAPVLFVSKKDGSMRMCIDYRSLNEVTIKNKYPLPRIDDLFDQLQGAKYFSKIDLRSGYHQLRIKEANIQKTAFVTRYGQYEFTVMPFGLTNAPAFFMNLMNKVFMEELDKFVVVFIDDILIYSKNREDHKRHLRIVLGKLRAHQLYAKLSKCEFWLEKIAFLGHILTAEGIEVDPSKVEAVSKWRQPTNVTEVRSFLGMAGYYRRFIKGFSSIARPMTELLKKDHKFVWTQKCEGSFQIIKEKLTTAPVLSLPDIHQDFVVFCDASRQGLGCVLMQNEKVIAYASRLLKPHEQNYPTHDLELAAIVHALKIWRHYLIENKCHIFTDHKSLRYIFTQPDLNLRQRRWLELIKDYDLEIHYHPGKANVVADALSRKPFGIKGTNFLEDWKEESTQLNACLGNNDSLEVKPMLEDLICKAQHLDPETARLVEKARKEQLPDLRTDNQGVLWFKHRLCVPKGEAREVLLKEAHDSAYSIHPGTTKMYLDLKTRYWWKGMKKEIAQYVARCDICQRTKAEHQKPPGLLQPLPIPEWKWEEIGMDFVTGLPRTQKGNDSIWVIIDRLTKVAHFIPVKTTFGGATLARIYLKEIFRLHGIPRKIVSDRGTQFTSKFWTSLQKAMGTKLDFSTAYHPQTDGQTERVNKVLEDLLRACVLAFDRSWESSLPYAEFSYNNSYQSSIKMSPFEALYGRKCQAPLMWSNVGEKALEGPAFVKEAEEKVALIRRRLLEAQSRQKSYADNRRRELRFEEGDFVYLKVSPMRGVRRFQVKGKLAPRFVGPYPIIGKVGPAAYRLELPESMSDIHNVFHVSQLRKCLQAPESHLEEETVQIQKDLQYREKPVKILDSAVRKTRTSEVKLCKVQWSREGEEEATWESEDFLRREYPYLFPNPV

SEQ ID NO: 198389 - protein, 968 aa, Zea mays
  unsure (1)..(968): unsure at all Xaa locations
  Clone ID: MRT4577_112508C.1.pep
MDWLTKHKDIISCADKTVLLTDQQGKSVSCQAQPPASDPMMFNLTTESISVVEEFMDVFPEELPGMPPEREVEFYIDLIPGTAPIAKRPYRMAPTELAELKLQISDLQQKGYIRPSSSPWGAPVLFVSKKDGSMRMCIDYRSLNEVTIKNKYPLPRIDDLFDQLQGAKYFSKIDLRSGYHQLRIKEADIQKTAFVTRYGQYEFTVMPFGLTNAPAFFMNLMNKVFMEELDKFVVVFIDDILIYSKNREDHKRHLRIVLGKLRAHQLYAKLSKCEFWLEKIAFLGHILTAEGIEVDPSKVEAVSKWRQPTNVSEVRSFLGMAGYYRRFIKGFSSIARPMSELLKKDHKFVWTPKCEGSLQIIKEKLTTAPVLSLPDIHQDFVVFCDASRQGLGCVLMQNEKVIAYASRLLKPHEQNYPTHDLELAAIVHALKIWRHYLIGNKCHIFTDHKSLRYIFTQPDVNLRQRRWLELIKDYDLEIHYHPGKANVVAGALSRKPFXNKRDQLSRRLEGRISTTKCMSXGNNDSLEVKPMLEDLISKAQCLDSETARLVEKARKEQLPDLRTDDQGVLWFKHRLCVPKGEAREVLLKEAHDSAYSIHPGSTKMYLDLKTRYWWKGMKKEIAQYVARCDICQRTKAEHQKPAGLLQPLPIPEWKWEEIGMDFVTGLPRTQKGNDSIWVIIDRLTKVAHFIPVKTTFGGATLARIYLKEIVRLHGIPRKIVSDRGTQFTSKFWTSLQKAMGTKLDFSTAYHPQTDGQTERVNKVLEDLLRAXTPLMWSNVGEXALEGPAFVKEAEEKVALIRRRLLEAQSRQKSYADNRRRELRFEEGDLVYLKVSPMRGVRRFQVKGKLAPRFVGPYPIIGRVGPATTYRLKLPESMSDIHNVFHVSQLRKCLQAPESHLEEETMQIQKDLQYREKPVKILDSAVRKTRTSEVKLCKVQWSREGEEEATWESEDFLRREYPYLFPNSV

SEQ ID NO: 198390 - protein, 132 aa, Zea mays
  unsure (1)..(132): unsure at all Xaa locations
  Clone ID: MRT4577_112509C.1.pep
GGXQTXAKFQPGXRGDEERDAKTXAAGGXXXXKXDNRNNGDXKPXERXPEXSRAXXKXGRPTHXGRSEXGDXHPATRGATHGNSXRTTNDXADTXDSXNATADQNEXXXENARPGGRNEPDXXEXGNGGXTN

SEQ ID NO: 198391 - protein, 98 aa, Zea mays
  unsure (1)..(98): unsure at all Xaa locations
  Clone ID: MRT4577_11250C.1.pep
MGSLVNNIMXEGAVLAALVAGGSSGPPIVSPGPLITSKYIGKRLTVRACWCGQPYNAGATDNSGACGIKNVNLPPYRGMTAGYNEPIFXDGKGCGSCY

SEQ ID NO: 198392 - protein, 1383 aa, Zea mays
  unsure (1)..(1383): unsure at all Xaa locations
  Clone ID: MRT4577_112510C.1.pep
NPPPXAPPPLPLDLAQVLANQTRLIEVLTRNLENQRPNGGRPQDKMGDFLRLKPPTFAGSSNPLDADDWMRTIKRKLEAIGCPENQRVQLAAHQLSGMALAWWDTFNVTIRDATWAEFEAAFREHHVPQGLFMELARYAPDDVSTESKKMARFLKGLRPELKTILASQDFLNFSHLSNKAMQVERAKEEEKGHLKRKFQVLRAQQXTGTRRLDHLGFHPKGPTSVDQLDPLRRDSASRVRALSIPPQWQATNPRQMHVGTAXSKSLKEQLSAAEATGTRLLQLGEWPXIPRHXAPKAPSVVSQQNKTPYQGRARVNHVDAQEAQQAPGVVLGEFLVEFTPATVLFDSGASHSFIATSFVEKYGIPSTPLEIPLVTRTPGSDLLCQLKCSQVRILLSGVVFLADLTVLPSKGIDVILGMDWLAKHKGIISCADKTVLLTDQQGKSVSCQAQPPASDLMMFNLITESISVVEEFMDVFPEELSGMPPEREVEFYIDLIPGTAPIAKRPYRMAPTELAELKLQIADLQQKGYIRPSSSPWGAPVLFVSKKDGSMRMCIDYRSLNEVTIKNKYPLPRIDDLFDQLQGAKYFSKIDLRSGYHQLRIKEADIQKTAFVTRYGQYEFTVMSFGLTNAPAFFMNLMNKVFMEELDKFVVVFIDDILIYSKNREDHKRHLRIVLGKLRAHQLYAKLSKCEFWLEKIAFLGHILTAEGIEVDPSKVEAVSKWRQPTNVSEVRSFLGMAGYYRRFIKGFSSIARPMTELLKKDHKFVWTPKCEGSFQIIKEKLTTAPVLSLPDIHQDFVVFCDASRQGLGCVLMQNEKVIAYASRLLKPHEQNYPTHDLELAAIVHALKIWRHYLIGNKCHIFTDHKSLRYIFTQPDLNLRQRRWLELIKDYDLEIHYHPGKANVVADALSRKPFGIKGTNFLEDWKKESAQLNACLGINDSLEVKPMLEDLIGKAQRLDSETARLVEKARKEQLPDLRTDDQGVLWFKHRLCVPKGEAREVLLKEAHDSAYSIHPGTTKMYLDLKTRYWWKGMKKEIAQYVARCDICQRTKAEHQKPAGLLQPLPIPEWKWEEIGMDFVTGLPQTQKGNDSIWVIIDRLTKVAHFIPVKTTFGGATLARIYLKEIVRLHGIPRKIVSDRGTQFTSKFWTSLQKAMGTKLDFSTAYHPQTDGQTERVNKVLEDLLRAXTPLMWSNVGEKXLEGPAFVKEAEEKVALIRRRLLEAQSRQKSYADNRRRELRFEEGDFVYLKVSPMRGVRRFQVKGKLAPRFVGPYPIIGRVGPAAYRLELPESMSDIHNVFHVSQLRKCLQAPESHLEEETVQIQKDLQYREKPVKVLDSAIRKTRTSEVKLCKVQWSREGEEEATWESEDFLRREYPYLFPNPV

SEQ ID NO: 198393 - protein, 78 aa, Zea mays
  Clone ID: MRT4577_112511C.1.pep
LVRLGLQAKGVFSRRDGSKIFLQIHPLNTLRVSTLNIIVHALRRQILHYDPINNARWTNERALTVISVRNHACIHAYE

SEQ ID NO: 198394 - protein, 220 aa, Zea mays
  unsure (1)..(220): unsure at all Xaa locations
  Clone ID: MRT4577_112512C.1.pep
IVRLHGIPRKIVXDRGTQFTSKFXTSLQKAMGTKLDFSTAYHPQTDGQTERVNKVFEDLLRACVLAFDRSWESSLPYAEFSYNNSYQASIKMSPFEALYGRKCQTPLMWSNVGEKALEGPAFVKEAEEKVALIRRRLLEAQSRQKSYAGNRRRELRFEEGDFVYLKVSPMLGVRRFQVKGKLAPRFVDPYPIIGRVGPAAYRLELPESMSDIHNVFHVSQ

SEQ ID NO: 198395 - protein, 83 aa, Zea mays
  unsure (1)..(83): unsure at all Xaa locations
  Clone ID: MRT4577_112513C.1.pep
MQNGHGTHDDTQKTAEKHSNSNIDIHALNHRQYPRIDTRDFLPLTTGGKSGMAGXDPPGHGDVCPTLNNTGKLDIAXSQGKEY

SEQ ID NO: 198396 - protein, 1429 aa, Zea mays
  unsure (1)..(1429): unsure at all Xaa locations
  Clone ID: MRT4577_112514C.1.pep
TRNSLAPRRTPSWLRIKPSLPPQGLEQGFPRRAEGEVDREESETHLPAPPPLPLDIAQVLANQTRLIEVLTQNLENQRPNGGRPQDRMGDFLRLKPPTFAGSSNPLDADDWMRTIKRKLEAISCPENQRVQLAAHQLSGMALAWWDTFNITIRDATWAEFEAAFREHHVPQGLVQLKEDEFRELTQDGRSISEYVHKFTELSRYAPDDVISEAKKMARFLKWLRPELKTILASQDFLSFSHLSNKAIQVERAREEEKGHLKRKFQVLRAQQQDRHQKTRSFGFPPKGPNFSRPAGPTPSRFSQQSQSSFHSPSVASNQPPVNACWHCGDPSHFKNNCPQLKPQGPAYSNSMNGPKNTSAPAPKAPSAVSQQNKTPYQGRARVNHVDAQEAQQAPGVVLGEFLVEFTPATVLFDSGASHSFIATSFVEKHGIPSTPLEIPLVTRTPGFDLLCQLKCSQVRILLSGVVFLADLTVLPSKGIDVILGMDWLTKHKGIISCADETVLLTDQQGNISVVEEFMDVFPEELPGMPPEREVEFYIDLIPGTAPIAKRPYRMAPTELAELKLQISDLQQKGYIRPSSSPWGAPVLFVSKKDGSMRMCIDYRSLNEVTIKNKYPLPRIDDLFDQLQGAKYFSKIDLRSGYHQLRIKEADIQKTAFVTRYGQYEFTVMLFGLTNAPAFFMNLMNKVFMEELDKFVVVFIDDILIYSKNREDHKRHLRIVLGKLRAHQLYAKLSKCEFWLEKIAFLGHILTAEGIEVDPSKVEAVSKWRQPTNVSEVRSFLGMVGYYRRFIKGFSSIARPMTELLKKDHKFVWTPKCEESFQIIKEKLTTAPVLSLPDIHQDFVVFCDASRQGLGCVLMQNEKVIAYASRLLKPHEQNYPTHDLELAAIVHALKIWRHYLIGNKCHIFTDHKSLRYIFTQPDLNLRQRRWLELIKDYDLEIHYHPGKANVVADALSRKPFGIKGTNFLEDWKEESAQLNACLGNNDSIEVKPMLENLIRKAQHLDPETARLVEKARKEQLPDLRTDNQGVVWFKHRLCVPKGEAREVLLKEAHDSAYSIHPGTTKMYLDLKTRYWWKGMKKEIAQYVARCDICQRTKVEHQKPAGLLQPLPIPEWKWEEIGMDFVTGLPRTQKGNDSIWVIIDRLTKVAHFIPVKTTFGGATLARIYLKEIVKLHGIPRKIVSDRGTQFTSKFWTSLQKAMGTKLDFSTAYHPQTDGQTERTPLMWSNVGEKALEGPAFVKEAEEKVALIRRRLLEAQSRQKSYADNRRRELRFEEGDFVYLKVSPMRGVRRFQVKGKLAPCFVGPYPIIGKVGPAAYRLELPESMSDIHNVFHVSQLRKCLQAPESHLEEETVQIQKDLQYHEKPVKILDLAVRKTRTSEVKLCKVQWSREGEEEATWESEDFLRREYPYLFPNXSKSRGRDSFKWVGL

SEQ ID NO: 198397 - protein, 84 aa, Zea mays
  unsure (1)..(84): unsure at all Xaa locations
  Clone ID: MRT4577_112515C.1.pep
RLNTHQLLPTLYFYNNTKVIPFAGLIRHLARKPYNHNKELTSCPAKQQANATNXVQPSTCTTSHDRSSRNATSKLVFCSDGNRT

SEQ ID NO: 198398 - protein, 46 aa, Zea mays
  Clone ID: MRT4577_112516C.1.pep
IAGVLWVDLQILVTGLLLYGGIREDSFLLFTLLYDDIRMNGAWMDM

SEQ ID NO: 198399 - protein, 131 aa, Zea mays
  unsure (1)..(131): unsure at all Xaa locations
  Clone ID: MRT4577_112517C.1.pep
CGLAPGRPGRVGAGXRLGSXFFFGASWARVVRAAPCVLRFLARGGGLRXLGLGLWARLLLPRGGGCFGGAPLFGAPARPXGVGNKSACLGXCVVPSLGKKLSLVWXLGCAAXGXWFLPPGXVWSLFALGGL

SEQ ID NO: 198400 - protein, 50 aa, Zea mays
  Clone ID: MRT4577_112518C.1.pep
PLASCMLLIRTQCSGRQLRTLASSTKHVARYLPSNHMYNRHVMSKPVYPL

SEQ ID NO: 198401 - protein, 65 aa, Zea mays
  Clone ID: MRT4577_112519C.1.pep
PPGSYHCGRPGPSTVQAFQPRAGARAFALQRPCKLTKQGTRRKPCPSPCCSVNRSTLRTSAYLIW

SEQ ID NO: 198402 - protein, 123 aa, Zea mays
  unsure (1)..(123): unsure at all Xaa locations
  Clone ID: MRT4577_11251C.1.pep
KHLYRNVGRHQCCPGDILLREKDCRKLLSSSTIIACLHQTPRMELEMLRHLYIRRRLLYNQSTPYVQSGSASTIFLELGRVQRGCMFVGLLWCHHGRSHSLSMIMAPCTVVLYHMRCSISSXF

SEQ ID NO: 198403 - protein, 72 aa, Zea mays
  Clone ID: MRT4577_112520C.1.pep
LEAHGHPIGDARPVRVTLRSVHASLVTRLGHHLRQAASRGGTHQRIGIAPRKPGPVSGSGVDKEGKTGRTGK

SEQ ID NO: 198404 - protein, 131 aa, Zea mays
  unsure (1)..(131): unsure at all Xaa locations
  Clone ID: MRT4577_112521C.1.pep
ICYGKAYEGGHEQSLIRSMTXGMHFSQGRPKKDAELLYXTTHATKGGGRMTREHHGERKLNIAGTYHDFFLLYVXADGQXVEEGXVDIMCDICKKVPPRHPRLVDKLGGYALHACLENPIPTNFLGKIFAG

SEQ ID NO: 198405 - protein, 208 aa, Zea mays
  unsure (1)..(208): unsure at all Xaa locations
  Clone ID: MRT4577_112522C.1.pep
YLPLSTSTPRPESPASQRNPASSVGFQEPTRQLPSEYGAGDDVVAQSHTRKAVLLCNYILLGGSSSXIFLTLSMCLLPSPRGLLLLLLHALTAVFSAVDWSVSFTVPDTTAQRNNXAHTXGAALTGIFQGAIALLWITRTXDFLAELQSYDRDEDRADIRKIXVRGLGTTVICPLDGAKPARRLLPSPATRMTNHDDLRVNICESYHA

SEQ ID NO: 198406 - protein, 48 aa, Zea mays
  Clone ID: MRT4577_112523C.1.pep
DNFHAIHGETNSNLFTTKQWIKLHFGSKIRYIVLSWESSGITCVTPMP

SEQ ID NO: 198407 - protein, 68 aa, Zea mays
  Clone ID: MRT4577_112524C.1.pep
KTVMFAPLFYILPPPGGKPFWVSIIPFKQSSTLLLTKLAERNRNGLGLKIFASQGYIFINEPLKGFVV

SEQ ID NO: 198408 - protein, 46 aa, Zea mays
  Clone ID: MRT4577_112525C.1.pep
FHCYGIKPAYMTMCLLLVSISNSTRQTFILIHHQMVISNLCSILSV

SEQ ID NO: 198409 - protein, 109 aa, Zea mays
  Clone ID: MRT4577_112526C.1.pep
DYRRRTHRSGMNNTTRVDFSTTKTTGQSNRDRRPLNCVEARMSVLTRRSYRNVSRQRSTSNESPSPAVVASAAFLAASNVSSSSFFVALVSGRCSLDGACRIKLTRREW

SEQ ID NO: 198410 - protein, 607 aa, Zea mays
  unsure (1)..(607): unsure at all Xaa locations
  Clone ID: MRT4577_112527C.1.pep
MATMARSGAVKLCCCTSALLLLCCFLLPGALAEERFYEFVVRGTPVKRLCKTQEIITVNGQFPGPTIEVYSGDTLAVRAVNLARYNVTLHWHGLRQLRNGWADGPEFVTQCPIRPGGSYTYRFTVEGQEGTLWWHAHSSWLRATVHGALIIHPRRGVPYPFPKPHTEAPVILAEWWRRDPIAVLRQSMITGAPPNVSDALLINGQPGDLLPCSSQETSIIPVVAGETSLLRIINAAMNTELFVSLAGHRMTVVAADAMYTKPFETDVVLLGPGQTTDVLVTAHAAPGRYYLAARAYASAQGVPFDNTTATAIFQYKNAPGCPTTSGXGWSRCRCRQHLQRPSRPXSRSSGYLGRAGPQPMLPFLPAFNDTNTATAFSNRLRSPVPVKVPGPVTQEVFTTVGFGLFNCRPGPFCQGPNNTRFGASMNNVSFQLPDTVSLLQAHYHHIPGVFTDDFPALPPVFFDFTSQNVPRALWQPVKGTRLYRVRYGAVVQIVFQDTGIFAAEEHPMHIHGYHFYVLATGFGNYDPRRDAARFNLVDPPSRNTIGVPVGGWAVVRFVADNPGVWLVHCHIDAHLTGGLAMALLVEDGESELEATVAPPLDLPICVL

SEQ ID NO: 198411 - protein, 62 aa, Zea mays
  Clone ID: MRT4577_112528C.1.pep
KTVINGLFIYNGGKTGDRYKQQQHNNIIIIHESTEAKKQTNPQRGNRPTEGKTLTAEHTNNG

SEQ ID NO: 198412 - protein, 64 aa, Zea mays
  Clone ID: MRT4577_112529C.1.pep
KKKKKKKKKKKKKKKKRKKKKKKKKKKKKKKKKKKKKKNFKKKKKKKKKKFFFLPGGAFKGGIF

SEQ ID NO: 198413 - protein, 52 aa, Zea mays
  Clone ID: MRT4577_11252C.1.pep
RVVPNMWGPPYLGGLWHGQISCPCFLYLDPKWVLQFPRGPCLRTIGFWDLFF

SEQ ID NO: 198414 - protein, 62 aa, Zea mays
  Clone ID: MRT4577_112530C.1.pep
SRVGFGSQDPLRHRNRVTGRAAGDSDSATRARPGRRHVAVGADPGGERVHGQACGASGAVPG

SEQ ID NO: 198415 - protein, 93 aa, Zea mays
  Clone ID: MRT4577_112531C.1.pep
PRQGATTQLRLRLLILLLPRSFQTAITKQSASLQTLLLIQPESPSSANRSTGWKLMMMLIPTRLLGAIKTQPARKKLLLLTDAGRPAAHDTVS

SEQ ID NO: 198416 - protein, 55 aa, Zea mays
  Clone ID: MRT4577_112532C.1.pep
ILKNVWSINFIMCQGFFHFTSTYCVSYMQNHRRYPSFNIINISLYHFHIGTSYYL

SEQ ID NO: 198417 - protein, 294 aa, Zea mays
  Clone ID: MRT4577_112533C.1.pep
MDPSHHVAAIDPSHHDAAIDPSHHVAAIDPSHHDNSIRKSTTRHRSDGSVYQKHLVCSCEGYAKVEPSKGVTRTGCGARIQFSVSKEGIWSVQKVVLEHNHYLASPNKKKNLRSQRRVIEADRKLIGHIREAGMRPAQVYEFMKEFYGGADKVPFTKMDCNNEIGRERTKVPRVVKGPKSKRSTISLEKRKGKKKKGGDNKGEDSNNTSGNRDNDVDTNFSVGYDQSSTMAIPVMQGGNANATMPCFNMYMSSSVMDGGGIQGGYTSLLLGVDQDAASAVRKLHFDGVPNNKNI

SEQ ID NO: 198418 - protein, 112 aa, Zea mays
  Clone ID: MRT4577_112534C.1.pep
ITLQLPLSKELADENYSAQLIKLNPPSQYPLIMEATLILTMERIAKNYQQHCHSVLLITFRVPSNSQLSYNGVLSLFYLNAELSSVWFLYAYGILCLFPFTLVFKSEWVVFA

SEQ ID NO: 198419 - protein, 74 aa, Zea mays
  Clone ID: MRT4577_112535C.1.pep
MARNERLEKPSPSAPSARKLALFRRSAKPGRRFANRDSVSPPKRVAPMDGACESVAAAEEEKKGRSPIGSRNRR

SEQ ID NO: 198420 - protein, 126 aa, Zea mays
  unsure (1)..(126): unsure at all Xaa locations
  Clone ID: MRT4577_112536C.1.pep
HXTAKHPSSPQFNPSHGGGEATRRCAHRQHGRPTPIALTRALTGANGRGRDAEPNGSDFTVNHVAGLAAHGDMRVHGGKSNTGDEFPRPKLTALPEESSNTRSKRRRSSSMVWRNQFPTMAENRAR

SEQ ID NO: 198421 - protein, 51 aa, Zea mays
  unsure (1)..(51): unsure at all Xaa locations
  Clone ID: MRT4577_112537C.1.pep
FVGLSVHSXAGLTAPXAGRVGGAATIPRRRPRRPSAVLPATGCRPLAQLPT

SEQ ID NO: 198422 - protein, 61 aa, Zea mays
  Clone ID: MRT4577_112538C.1.pep
LGCPARCRGTDPKCYYSVVSGRNRDVNNGCYYKPGEPPGHFTRARHSHEGRTWNSCGHTQM

SEQ ID NO: 198423 - protein, 69 aa, Zea mays
  Clone ID: MRT4577_112539C.1.pep
MCWPLFGGTSVAFCVSGPEMAPNFKTLTRLVVPKKKKKKKKKKKKKKKKKKKKKKKKKKKKKLEEGRRY

SEQ ID NO: 198424 - protein, 156 aa, Zea mays
  unsure (1)..(156): unsure at all Xaa locations
  Clone ID: MRT4577_11253C.1.pep
MGKDKIGINGSXGIGRLVARVALQSEXVKLVAVNDPFMTTDYMTYMFKYDTWHGQWKHRYITLKDSKTLLFGXKPNTVFGIMNPEEIPRCEAGAEYVVESTVADKAVSKVLPELNGKLTGMSFRPPTVDVSHDDLTVRIEKGACYDEISKAIQGCF

SEQ ID NO: 198425 - protein, 60 aa, Zea mays
  Clone ID: MRT4577_112540C.1.pep
HASALAKGCKPETLMAPVLHHMTDSLCIIIRRQSVRTWQNKYSSVLARSPLTSWKNVASN

SEQ ID NO: 198426 - protein, 88 aa, Zea mays
  Clone ID: MRT4577_112541C.1.pep
CVSVGSGLFGVVFVCRCWLVLSLSVHGCLPFFPPPLKDNLPSALSFCVCLSCRASLAVFGYFLCTVSLQVVALSGCALSCSVRVRSPC

SEQ ID NO: 198427 - protein, 151 aa, Zea mays
  unsure (1)..(151): unsure at all Xaa locations
  Clone ID: MRT4577_112542C.1.pep
QTIKAQQLQQLVLPVINQVALANLFPYYQQQXFFPFNQLXTLNPAXYLQQQLXPFSQLGXAYXSQQQFFXFNQLAALNPCYLQQQIFYXFSQXSAANRVPFXTQQQXVPFYTVWANPATLFNQHCCPCQLFANPAASYQQPXLGGALFRCY

SEQ ID NO: 198428 - protein, 108 aa, Zea mays
  unsure (1)..(108): unsure at all Xaa locations
  Clone ID: MRT4577_112543C.1.pep
MAGCDGAKSSASMEEEACAEKKYGGMAPKKPLISKDHERAYFDSADWVLGKQAANSSSSSTRTAAAVESLKPKLXTDETELANRSVPLSXQRTPHHQLPPRKPTCASS

SEQ ID NO: 198429 - protein, 98 aa, Zea mays
  unsure (1)..(98): unsure at all Xaa locations
  Clone ID: MRT4577_112544C.1.pep
MQDHERAYFDSADWVLGKVRQRSXEGKKNTRSRTQELGNVSNPCSSFLGLLCLCVLQQAANSSSSSTRTAAAVESLKPKLKRTPHHQLPPRKPTCASS

SEQ ID NO: 198430 - protein, 92 aa, Zea mays
  unsure (1)..(92): unsure at all Xaa locations
  Clone ID: MRT4577_112545C.1.pep
LQRSEAGCDGAKSSASMEEEACAEKKYGGMAPKKPLISKDHERAYFDSADWVLGXKVAQLASQLATGLHEQEPYLLIAERPQPPRKPTCASS

SEQ ID NO: 198431 - protein, 153 aa, Zea mays
  unsure (1)..(153): unsure at all Xaa locations
  Clone ID: MRT4577_112546C.1.pep
MRGEEVRRDRTQEALDIQGALLLSRYWTKQHPWISSLCLEALIITSLSSDPCLPCLIIMQDHERAYFDSADWVLGKVRQRSXEEKKNTRSRTQELGNVSNPCSSFLACLCVLQQAANSSSSTRTAAAVESLKPKLKRTPHHQLPPRKPTCASS

SEQ ID NO: 198432 - protein, 68 aa, Zea mays
  unsure (1)..(68): unsure at all Xaa locations
  Clone ID: MRT4577_112547C.1.pep
MVADRLRLALLLSACLCSAWARPRLEPTIRLPSERAAADDAVGTRWTELIAGSNGYYNYRHQMDIXCH

SEQ ID NO: 198433 - protein, 95 aa, Zea mays
  Clone ID: MRT4577_112548C.1.pep
KFLCSICNAPFSSCYTCQLIFDLLHVDQASIYRVPRVLCLEVYTQRKDLTIVVNVSLIQKVLTEVRPQFKCVHSVSANCAPQKIGAARPDRGTCI

SEQ ID NO: 198434 - protein, 60 aa, Zea mays
  Clone ID: MRT4577_112549C.1.pep
PHIREELMMFCFLHHDHYVQNLSAHCIYTHPLQYFKRIRPCLLPLRPKLQRGARQRHTTL

SEQ ID NO: 198435 - protein, 187 aa, Zea mays
  Clone ID: MRT4577_11254C.1.pep
PRVRPRVRPRVRPRVRSSTTNIADDLSAIFGGAPTSEEFQEVDGESEERRRARMERHQRTRERAAKALAEKNERDMQQQREQAERHRLAETLDFEIKRWAAGKEGNLRALLSTLQYVLWPECGWQPVSLTDLITAAAVKKVYRKATLCIHPDKVQQKGANLQQKYIAEKVFDLLKEAWNKFNSEELF

SEQ ID NO: 198436 - protein, 44 aa, Zea mays
  Clone ID: MRT4577_112550C.1.pep
LNFFFFCKPQLQSGGDLYKKNGRTTSLYSITNPITLLLSYKIQP

SEQ ID NO: 198437 - protein, 86 aa, Zea mays
  Clone ID: MRT4577_112551C.1.pep
IRLENVIWLFLRAESQEAGASIHLQVVLFIQDSVSRHHHDAVVKTCRSLNGLWRAGRIARAITEDASVAGVLYCIAFAHCATDRGY

SEQ ID NO: 198438 - protein, 112 aa, Zea mays
  Clone ID: MRT4577_112552C.1.pep
PRVRPRVRPRVRQNQTNEWYGAYPVAARNLREDELGGVIFGCKHNTIGECLSKQLFGLPSSHFSYVKNVKPGMPLFLFNYSDRKMHGIYEAASAGKLNIDHFAWSDGGRIKT

SEQ ID NO: 198439 - protein, 56 aa, Zea mays
  unsure (1)..(56): unsure at all Xaa locations
  Clone ID: MRT4577_112553C.1.pep
SGLVMISLPNVVLLSYLYIVXVIIADMVSIDTTILANVLSAFTDGLRSLGIWHQES

SEQ ID NO: 198440 - protein, 69 aa, Zea mays
  Clone ID: MRT4577_112554C.1.pep
GVVASQFGKNKGDLPVPGGTPVVVNQFLKNNLGIHHALPGYVVLAHFPKAIVFFLELGYPTKFFTSQKR

SEQ ID NO: 198441 - protein, 79 aa, Zea mays
  unsure (1)..(79): unsure at all Xaa locations
  Clone ID: MRT4577_112555C.1.pep
RCPSVGLGFWVRXPIPDLFFGKGRPVFLGPGGIAYEGLALVFFGAPPNGSLSGAFSFQAEHMYIFRGGVFPLDFLSPRP

SEQ ID NO: 198442 - protein, 135 aa, Zea mays
  Clone ID: MRT4577_112556C.1.pep
LRALPCSCALHGRRDRRPNQRNHCSALSRRGRDCGLDPRSPGSPRSTASAPRLPRLTKFAVSRRESGARYSWKARRDDASALDPRSTWKVRQIGGVARGRRLGGVLRAVRRGVVQARRRRLRDCGRAQRQRRRAP

SEQ ID NO: 198443 - protein, 40 aa, Zea mays
  Clone ID: MRT4577_112557C.1.pep
HTDHVKHSRTLRSSCKSRSSFIYTPFLSCWSTGGLQSHCR

SEQ ID NO: 198444 - protein, 99 aa, Zea mays
  unsure (1)..(99): unsure at all Xaa locations
  Clone ID: MRT4577_112558C.1.pep
MVSGSGVCAKRIGADAPHHMLGRLWSIIGTELFIGQKAVRGAVXEMWMSVGLVRKMMNYLRLLXMRMNIKAXKGPIHXRDSAMILWRNILEIIPNIIKR

SEQ ID NO: 198445 - protein, 48 aa, Zea mays
  Clone ID: MRT4577_112559C.1.pep
KERVHHWILSETALYLTGSSSNLTPDMPSQQTQMLPCSIAITAKAVRT

SEQ ID NO: 198446 - protein, 885 aa, Zea mays
  unsure (1)..(885): unsure at all Xaa locations
  Clone ID: MRT4577_11255C.1.pep
MDDFQGLLARDFGLRPQGKAAPMSAARSSSPSGSAWTNTRSAVGSAAPSAPSYDELFGSAPPPPPKATPSLDNIFNSFKEPASTAPPPKPKHSSAPVFDKPVYDDDIFIGVPGVKSSSVPYDDVFGGSQNREAPPAFDDLLGGFGKSSQVRGEVDDKRKPEAPTAAAATGFDYLIPGGFGGRSSPRQRDAIGAKQKKISMSTSKQPASLSDPFVVLETTSSSAHPFADPLDEFGKAAKYQGKSRESTSVGSSLFEDSSTFNQAPKSEPIFYPRGXNGLKDKNESSRAQNSNPVQSFSKGNSSQQPSVEDFENIFSKPQSARYADVHVDIGSEKYSGNGINDQSPRSDESEDEIWLTASEIPLFTQPTSAPPPSRPPPPLAVKQKHGSKSTRKDEHLRRSRKNNDHQRSSSNHAGVSTVDGLEDFPMGKSQNVHALNEEEFERSTAAAASAAAMKEAMDKAEAKFKHAKEVRERERDAKLRNREQRERDSVTRSYAQDREDKERKERLEQEREMKQNEEKEREQRRLEEERELERHKERERARQAVERATKEARERAAVEARAKAEREARQRSERAAVQRAQQEARERAAVEAKERAERATAEAKERAATEGKEKAASQARDRAAAERAAVERAQQEARKRAERAAVERAAAEARERQAAAARDKTSKPDDLESFFGMGARANSAPKQRAPTVDSMFHSQTQNRGTSTSTSMKKASSTTNIADDLSAIFGGAPTSEEFQEXMGRAKKEDALGWNGIKELVNERQRLWLRRMNATCSNKESRLKDIGLXETLDLEIKRWAAGKEGNLRALLSTLQYVLWPECGWQPVSLTDLITAAAVKKVYRKATLCIHPDKVQQKGANLQQKYIAEKVFDLLKEAWNKLNSEELF

SEQ ID NO: 198447 - protein, 73 aa, Zea mays
  Clone ID: MRT4577_112560C.1.pep
AEVVVVVLLCPGAYHEQVIELGNIVDGEVMEVLNLRQIVVFCGQCSRFRASPSISLGIKETRCSPYLVVVLLS

SEQ ID NO: 198448 - protein, 210 aa, Zea mays
  Clone ID: MRT4577_112561C.1.pep
MSAGLVTDEATVGRLYRIRRTVMQMLRDRGYLVVDHELATSRRDFLRKFGESFHREDLLINKYKKNDPSDQIYVFFPNDDKVGMKHIKKYVEMMTHENVSRAVLVLQQNLTPFAKSFLIELEPKIHLEIFQEAEMLINIKEHVLVPEHQVLTNEEKKTLLERYTLKETQLPRIQITDPIARYYGLRRGQVVKIIRPSETAGRYVTYRYVV

SEQ ID NO: 198449 - protein, 77 aa, Zea mays
  Clone ID: MRT4577_112562C.1.pep
PVRLNLICKLFVIQFKNLKKKKKKKEKRKISNESNKNQPLQSHPIHALSFLYNHLIFNFLALLFHLCKPGKPPPYPT

SEQ ID NO: 198450 - protein, 171 aa, Zea mays
  unsure (1)..(171): unsure at all Xaa locations
  Clone ID: MRT4577_112563C.1.pep
MGIRLGNAKRLGNERSRRVLTSPYRTSSSATWTPSRPTTSPTSAASCHVSDSHDRKSLIYTGRNSYAHINMLDSNAXRNPSVDSILEMKDCELYNLPNIDVKASIXLMHEAAPHLLQGSSEIYXITPNAGYNPQHXLTLHAVTNTDLIGLTNALAGQMLHDTHANCVTPEI

SEQ ID NO: 198451 - protein, 210 aa, Zea mays
  unsure (1)..(210): unsure at all Xaa locations
  Clone ID: MRT4577_112564C.1.pep
MSAGLVTDEATVGRLYRIRRTVMQMLRDRGYLVVDHELATSRRDFLRKFGESFHREDLLINKYKKNDPSDQIYVFFPNDDKVGMKHIKKYVEMMTHENVSRAVLVLQQNLTPFAKSFLIELEPKIHLEIFQEAEMLINIKEHVLVPEHQVLTNEEKKTLLERYTLKETQLPRIQITDPIARYYGLRRGQVVKIIXPSETAGRYVTYRYVA

SEQ ID NO: 198452 - protein, 210 aa, Zea mays
  Clone ID: MRT4577_112565C.1.pep
MSAGLVSDEATVGRLYRIRRTVMQMLRDRGYLVVDHELATSRRDFLRKFGESFHREDLLINKYKKNDPSDQIYVFFPNDDRVGMKHIKKYVEMMTHENVSRAVLVLQQNLTPFAKSFLIELEPKIHLEIFQEAEMLINIKEHVLVPEHQVLTNEEKKTLLERYTLKETQLPRIQITDPIARYYGLRRGQVVKIIRPSETAGRYVTYRYVV

SEQ ID NO: 198453 - protein, 183 aa, Zea mays
  unsure (1)..(183): unsure at all Xaa locations
  Clone ID: MRT4577_112566C.1.pep
EYILTGHLTAKSDVYSFGVVLXELLTGRXSVDKSRRGREQNLVXWARPXLRRADRVGRFMDPGLEMQYSARAAEKAAGVAHQCLQSVPKARPTMRDVVDALEPLLALDDDVPMGPFVFTVGGGAAEAAPAQAGVAGDDNADAEAAGRQGKRHVMSAVHAESPLRSRYASAVKRPESPPTLSRA

SEQ ID NO: 198454 - protein, 87 aa, Zea mays
  Clone ID: MRT4577_112567C.1.pep
KPLNISYNHAPRTTDSTVHMQSILIHLIQPHLRYECIHKFNLKTLSYAEYHNKPATTLNYGIMKSLLYNVTNNPNQYQTYTPLKIIP

SEQ ID NO: 198455 - protein, 434 aa, Zea mays
  unsure (1)..(434): unsure at all Xaa locations
  Clone ID: MRT4577_112568C.1.pep
MGLRESLLGCFGAGGGDQQEQGHEPAAARPAASRRPGGKPTLRRLSTANLRSLSLQDLSRKLETTKLHAFTLDELRAATRNFSAANFLGEGGFGPVYKGFVDGRLRPGLQPQHVAVKYLDSDGVQGHREWLAEVVYLGMLSHPHLVELVGFCNQDDHRMLVYEYMPRXGLENHLFKNLLASLPWSTRLKIAVGAAKGLAFLHEAETPVIYRDFKASNILLDSDYTAKLSDFGLAKEGPQGDATHVTTRVMGTHGYAAPEYILTGHLTARSDVYSFGVVLLELLTGRRSVDKSRRGREQSLVDWARPYLRRADRLHRFMDPGLEAQYSPRAAEKAAGVAHQCLQSVPKARPTMRDVVDALEPLLALDDERAHRPVRVHGRRRRRGGGGRRRCRRRRRRPGGRGGGRPAGQQDARHVRRARGEPAAEPVRQRRQEA

SEQ ID NO: 198456 - protein, 67 aa, Zea mays
  Clone ID: MRT4577_112569C.1.pep
RIFQGWPHRLWFMICTQICLCRKQKNTRKRLRLSKPFYIAADLPCVEDGPQSWFTTQDQGSGETLMD

SEQ ID NO: 198457 - protein, 75 aa, Zea mays
  Clone ID: MRT4577_11256C.1.pep
GEGSMDIWDYLNLEVKGLQHDMKLGWLYKIWFSGDEGKNPLRGERPWTFLGLHVQMLGGLRFAPQVRDIPLQLGV

SEQ ID NO: 198458 - protein, 97 aa, Zea mays
  unsure (1)..(97): unsure at all Xaa locations
  Clone ID: MRT4577_112570C.1.pep
LPPSPWSGLSXWXXVXCXXXCXXVXPPPPPXXXXXXXGXXXVPCSGXPPXXXXXXGXXPPRXXXGXRARSXXXSXXASSRPRWRRGETAGASGXSAV

SEQ ID NO: 198459 - protein, 74 aa, Zea mays
  Clone ID: MRT4577_112571C.1.pep
KRYVYSLKACASSINLYKSSKIPSDIHQSPPPPPSGPLKVPRRPEPHRITQQPAPHALKMQRKLKRRRRKKIAS

SEQ ID NO: 198460 - protein, 72 aa, Zea mays
  Clone ID: MRT4577_112572C.1.pep
HRGAAAVRSRSPIDDDDDDMYMLQTRSRSHKLTSSRARARLARGGRCRIRRCIQARCRRRDPARRRTLGFRG

SEQ ID NO: 198461 - protein, 86 aa, Zea mays
  Clone ID: MRT4577_112573C.1.pep
KTLIFFFYLCTLKDLKFAKNKQKGNTTLSKHGITFYITFRSTTLTLPAGCPLRTGLNYDLKRRPDKRCILTLHECYHCVHNRYGPK

SEQ ID NO: 198462 - protein, 95 aa, Zea mays
  unsure (1)..(95): unsure at all Xaa locations
  Clone ID: MRT4577_112574C.1.pep
IFKGGKVEXIVPSSHNCDXPDVNRTECXLIGISXGGGGXLLTSXGNTKDXLXLPTXXTLXAXIKGGVXRGKELXXTVXSAMGEEXIXAVEEGGPK

SEQ ID NO: 198463 - protein, 132 aa, Zea mays
  Clone ID: MRT4577_112575C.1.pep
FVCRPEGMGELVLRSMHQHLLQEPKVVGVQCRLDRGWWGRPGDVSQIAFGLLQQRCEDEVLEVAQRDHELVTEPAQQPRALDLAPTGDPHCGLLSRITPHLELHRRLNLPGQGHVPCGGYKNVGGLYNSIAW

SEQ ID NO: 198464 - protein, 139 aa, Zea mays
  Clone ID: MRT4577_112576C.1.pep
MKGKANASKKDEGRLRAGGGGAGKRKKAAASGKPKRPPSAFFVFMSEFRQEYQAQHPSNKSVAAVSKAAGEKWRSMSEQEKQPYVDQAGQKKQDYEKTKANIEKESTSSKKAKTDDDDGSKSEVDDEDGGSDEENDDDE

SEQ ID NO: 198465 - protein, 127 aa, Zea mays
  unsure (1)..(127): unsure at all Xaa locations
  Clone ID: MRT4577_112577C.1.pep
MKGKADTSKKDEGRLRXSGKPKRPPSAFFVFMSEFRQEYQALHPGNKSVATVSKAAGEKWRAMSDQEKQPYVDQAGQKKQDYEKTKANFDKKESTSSKKAKTEDEDGSKSEVDDEDGSSDEENDDDE

SEQ ID NO: 198466 - protein, 188 aa, Zea mays
  Clone ID: MRT4577_112578C.1.pep
MKGKADTSKKDEGRLRAGGAAGKRKKAAASGKPKRPPSAFFVFMSEFRQEYQALHPGNKSVATVSKAAGEKWRAMSDQEKQPYVDQAGQKKQDYEKTKANFDKKESTSSKKAKTEDEDGSKSEVDDEDGSSDEERYALPHPKGKPTTSPTTLRLRLRHSCRFESPRPDPSQNPSSNHHEGQGQRLQEG

SEQ ID NO: 198467 - protein, 45 aa, Zea mays
  Clone ID: MRT4577_112579C.1.pep
ILLSGLKKPLGGPLPGPEIRKGVSCVTKGEKNIYGNPGNSFEVWS

SEQ ID NO: 198468 - protein, 99 aa, Zea mays
  unsure (1)..(99): unsure at all Xaa locations
  Clone ID: MRT4577_11257C.1.pep
GNPPLPQIPAHYLRIKDGSIPASSIQKYIMQKLSLVSESEVEISCCGQTVGNLGQPVRNLVERWLRVXARHARCTPXIGSSGGDYVMVISYGRPKSASS

SEQ ID NO: 198469 - protein, 139 aa, Zea mays
  Clone ID: MRT4577_112580C.1.pep
MKGKADTSKKDEGRLRAGGAAGKRKKAAASGKPKRPPSAFFVFMSEFRQEYQALHPGNKSVATVSKAAGEKWRAMSDQEKQPYVDQAGQKKQDYEKTKANFDKKESTSSKKAKTEDEDGSKSEVDDEDGSSDEENDDDE

SEQ ID NO: 198470 - protein, 90 aa, Zea mays
  Clone ID: MRT4577_112581C.1.pep
MDHAAEAQRTDLMTITRHVLNEQSRHPESRGDFTILLSHIVLGCKFVAAAVNKAGLAKLIGLAGETNVQGEEQKKLDVLSNEVFVKALVS

SEQ ID NO: 198471 - protein, 50 aa, Zea mays
  Clone ID: MRT4577_112582C.1.pep
SSNLTHIIMCGMTNNICMVIIKFCVLMNTIGRLMYYDAQKKKNKKKKKAC

SEQ ID NO: 198472 - protein, 145 aa, Zea mays
  Clone ID: MRT4577_112583C.1.pep
GFARGQDEGFRIGSCGAGGGGAGKRKKAAASGKPKRPPSAFFVFMSEFRQEYQAQHPGNKSVAAVSKAAGEKWRSMSEQEKQPYVDQAGQKKQDYEKTKANIEKESTSSKKAKTDDDDGSKSEVDDEDGGSDEDNDPRVRIFFFF

SEQ ID NO: 198473 - protein, 123 aa, Zea mays
  Clone ID: MRT4577_112584C.1.pep
IPHASAKLEIQRLRQKRFKKEKKKKNVSNSRSLHLGNERKKRGGCALLARGSNKESGSSTDGFVPYEWKRTIFSWLIDLDVLSVNTKHKCMDGSHSKVLLEGFATKDGINCSCCNEVYSVLEF

SEQ ID NO: 198474 - protein, 139 aa, Zea mays; identical to SEQ ID NO: 198469
  Clone ID: MRT4577_112585C.1.pep

SEQ ID NO: 198475 - protein, 116 aa, Zea mays
  Clone ID: MRT4577_112586C.1.pep
MGETHRTAPHRTAAHGGPPSLVAWRMSCGGYPEPGALTGAPPSLGLALVWKEGKGTAACMEDAGRVGDRDKGPRVRDHQAKRQPQPRPNNQAKPANRKPKPTSRAIACARASRFPH

SEQ ID NO: 198476 - protein, 320 aa, Zea mays
  Clone ID: MRT4577_112587C.1.pep
MKGKADTSKKDEGRLRAGGAAGKRKKAAASGKPKRPPSAFFVFMSEFRQEYQALHPGNKSVATVSKAAGEKWRAMSDQEKQPYVDQAGQKKQDYEKTKANFDKKESTSSKKAKTEDEDGSKSELDDEDGSTASEPGNALGASPPKKENQPPLPPPSASACATAADSKALVLTPRKTLAPTTMKGKANASKKDEARLRAGGGGAGKRKKAAASGKPKRPPSAFFVFMSEFRQEYQAQHPGNKSVAAVSKAAGEKWRSMSEQEKQPYVDQAGQKKQDYEKTKANIEKESTSSKKAKTDDDDGSKSEVDDEDGGSDEDNDDDE

SEQ ID NO: 198477 - protein, 60 aa, Zea mays
  unsure (1)..(60): unsure at all Xaa locations
  Clone ID: MRT4577_112588C.1.pep
TPHHSPINSINLNYNIPQNSIITPPFFSITPLLPTLSYTLLPFLSXLPSLIPSYNLNKPS

SEQ ID NO: 198478 - protein, 208 aa, Zea mays
  Clone ID: MRT4577_112589C.1.pep
MSSNEERVGGRVGGRVGGRVGGRVGALGASPPKKENQPPLPPPSASACATAADSKALVLPPRKTLAPTTMKGKANASKKDEGRLRAGSGGAGKRKKAAASGKPKRPPSAFFVFMSEFRQEYQAQHPGNKSVAAVSKAAGEKWRSMSEQEKQPYVDQAGQKKQDYEKTKANIEKESTSSKKAKTDDDDGSKSEVDDEDGGSDEDNDDDE

SEQ ID NO: 198479 - protein, 44 aa, Zea mays
  Clone ID: MRT4577_11258C.1.pep
LLLILPCNTMVISFLCRHSWQYLSNFRFMCMFMFFYSYSYKSLI

SEQ ID NO: 198480 - protein, 92 aa, Zea mays
  Clone ID: MRT4577_112590C.1.pep
QLARPAAPSCLWNHTVLASPAVPGPHAIRPWRRHAWHDLLAAAALGVVERAQAAAESFSVGHTGSGRVEGRLALSVSVPCKSDQIRRLCIGS

SEQ ID NO: 198481 - protein, 54 aa, Zea mays
  Clone ID: MRT4577_112591C.1.pep
CSSRDQKTPQTWAAQHRRADEMIATGHDYGPDNTPRGFVHRGAAVHTRGDNSLR

SEQ ID NO: 198482 - protein, 105 aa, Zea mays
  unsure (1)..(105): unsure at all Xaa locations
  Clone ID: MRT4577_112592C.1.pep
YWQQQQFPFSQVFFAYPQQFFPINQRDTFNSPXYLQQQQLFPFNQLIGVNPGTFLTKPQLFPFYQPVGPKGGPLLQMQQLLPFNQPALTNPTAFYQQPPIGGAPL

SEQ ID NO: 198483 - protein, 113 aa, Zea mays
  unsure (1)..(113): unsure at all Xaa locations
  Clone ID: MRT4577_112593C.1.pep
MASLSCAAITGPYFTGARALAMFNRRSFTGRASLRKDTATDAEDDVASVLLAGGGAMAQEVLVVARDGGLVLQPSQFTDKAGDTITFKNNDGXPHNVXFDEDYVPSGVDSFKI

SEQ ID NO: 198484 - protein, 104 aa, Zea mays
  Clone ID: MRT4577_112594C.1.pep
YSFSITEMSGGGRAGVGPTTPGHAHRELLRPRDRNGCQLLVIHLLKIHLLQRMMGPIKMLLFAPDKPIATTWCDGQNTGNLRRDCPFFYVNAGHGGGSSLLYLL

SEQ ID NO: 198485 - protein, 222 aa, Zea mays
  unsure (1)..(222): unsure at all Xaa locations
  Clone ID: MRT4577_112595C.1.pep
AAQSKDVEKPSLLPNVDDANGSWTXPEGPDNKGSDGPPPWFFGRKASPPSQVMDPSPTICLWGIRPPVQGDGGIEEPARAIGIFPRLGHQRRSHRRAPSPRIELPPASATTAEATGAPSPRMEPPCLGQQRRRYDRAPPPRIDVPPASPSTAEDYTAASSTADRVSRSSHAETSVVAACIEARAVVPSTITTTVREAKKTRESSHGSRRCSDWGNPSTRIFV

SEQ ID NO: 198486 - protein, 45 aa, Zea mays
  Clone ID: MRT4577_112596C.1.pep
VYNSLWVRKCTYGTLYIEGAQESTEQLILCDLPKKKKKKIIKKKK

SEQ ID NO: 198487 - protein, 73 aa, Zea mays
  Clone ID: MRT4577_112597C.1.pep
IGGTPFSFFFCGFIQYAGCHTGLSKGQEKKMSRDCHGTSGLPDRRMHTTFILHVVAVYQLRDRDHTTTAILFR

SEQ ID NO: 198488 - protein, 73 aa, Zea mays
  Clone ID: MRT4577_112598C.1.pep
MAGSEQRVVAVIMVGGPTKGTRFRPLSLNVPKPLFPLAGQPMVHHHISACRRIPNLAQIYLIGFYEEREFALY

SEQ ID NO: 198489 - protein, 155 aa, Zea mays
  Clone ID: MRT4577_112599C.1.pep
PAGAPLHRACSLVLPRCALPASSSLASALWPSPSRALVSLLCPAPSSCAWLPARVSGHLKLVGALCSLARSACASAMALHRRSSLSSTRSAFCTREFVVFVPVIHTIFSVVVVARLRAAHALLAPATGCRALCPRLARSLLVCRAHEFYLLATAC

SEQ ID NO: 198490 - protein, 133 aa, Zea mays
  Clone ID: MRT4577_11259C.1.pep
ERLLCFTLLSRLSPTKWMGEGGRNKQINARPYLPFFFSFNLYPPIYPGPRREESGEGGRSAANQMSQQNYIYHQEALRLHQPIPPFKFNHPKLSCCPAYFLSSFHKVIYPCTEAATQFAATSAALCLIISFTA

SEQ ID NO: 198491 - protein, 102 aa, Zea mays
  unsure (1)..(102): unsure at all Xaa locations
  Clone ID: MRT4577_1125C.1.pep
RFQEQYALLSDGVFTTLDXQATGCKPALAHSSLPEPYALFYAAFPWQFYASDMTHAXPNSTAYPWAGGRAAYLYCTASAGTMPSVYQNAYRDQSKQGAFRSY

SEQ ID NO: 198492 - protein, 67 aa, Zea mays
  Clone ID: MRT4577_112600C.1.pep
NGSHEATSPALFSTATAEKQIHRSDTVVFMAELILLARVTKLVPFAHMANMENPVWVSMRRANGSSN

SEQ ID NO: 198493 - protein, 404 aa, Zea mays
  Clone ID: MRT4577_112601C.1.pep
IRLGGFPVQTAPVPLVHSPAFNLDPFTNAAVFSLEESDLKALAAPGCFRAPRSSCLEVAVYYLARFGASRCGVLACGRKRLVGVFRVELASSEWRDGKPVLLHHGWAGIGKGAARPELHLRVKLEADPRYIFQFDDEIALNPQVVQLHGSIRQPVFSCKFIRDRRPSQSDPLGGGQYWSSSSSEEQDMEMVRRERKAWKVVIHDLSGSAVAAAFMATPFVPAPGGDTVARSNPGAWLIVRADTTGSSDSWQPWGRLEAWREAAAAAASSGKDTVRLRLHLLPDRHDDCVLVSEAPLSSDKGGEFFIDMDRQAPSATAAEHCAASLGAACAGGGFVMSCRVEGEARSSRPFVQLAMRHVTCMEDAAMFVALAAAVDLSVKACRPFRRKPNKKAASPSPDHLELDT

SEQ ID NO: 198494 - protein, 96 aa, Zea mays
  Clone ID: MRT4577_112602C.1.pep
KEYQEVQELRARAVVMLTRWVGISYSLGPANPLGMLEAVPLPVCAAVLKQVDLKMGFTMDSCLSAALGTCCTKRVLDKVNAWHVKQYLHERGSTVM

SEQ ID NO: 198495 - protein, 113 aa, Zea mays
  unsure (1)..(113): unsure at all Xaa locations
  Clone ID: MRT4577_112603C.1.pep
SSEEQDMEMVRRKRKAXKVVIHDLSGSAVAAAFMAPPFVPAPGGDTVARSNPGAWLIVRADTTGSSDSWHPWGRLEAWRKAAVDLSVKGCRPFRRKPNKKAASPSPDHLELDP

SEQ ID NO: 198496 - protein, 272 aa, Zea mays
  unsure (1)..(272): unsure at all Xaa locations
  Clone ID: MRT4577_112604C.1.pep
MAAAALVALLAVLVVMHSGASGAQAAMNRTSAVRQLRSSGGGGWQAAKATWYGAPNGAGPNDNGGACGFKNTNQYPFMSMTSCGNQPLFQDGLIIGACXQIRCTAKNNPACSGEVRTVMITDMNYYPVARYHFDLSGTAFGSMARPGMNDRLRHAGIIDMQFRRVACDHRGLTVNFHVEAGSNRNYLAVLVEYANKAGTVVQMDAMESGSGGQWMLMRRSWGSVWRLDSYRPLRGPFSMRIRSESGSTLVAYNVIPANWRPNTDYRSYVQFT

SEQ ID NO: 198497 - protein, 401 aa, Zea mays
  unsure (1)..(401): unsure at all Xaa locations
  Clone ID: MRT4577_112605C.1.pep
FSLEESDLKALAAPGCFRAPRSSCLEVAVYYLARFGASRCGVLACGRKRLVGVFRVELASSEWRDGKPVLLHHGWAGIGKGAARPELHLRVKLEADPRYIFQFDDEIALNPQVVQLHGSIRQPVFSCKFIRDRXECLARDQSYCNCTCTHASSSSECLCLHAXSQSDPLGGGQYWSSSSSEEQDMEMVRRERKAWKVVIHDLSGSAVAAAFMATPFVPAPGGDTVARSNPGAWLIVRADTTGSSDSWQPWGRLEAWREAAAAAASSGKDTVRLRLHLLPDRHDDCVLVSEAPLSSDKGGEFFIDMDRRAPSATAAEHCAASLGAACAGGGFVMSCRVEGEARSSRPFVQLAMRHVTCMEDAAMFVALAAAVDLSVKACRPFRRKPNKKAASPSPDHLELDT

SEQ ID NO: 198498 - protein, 70 aa, Zea mays
  Clone ID: MRT4577_112606C.1.pep
TPPQHQPPLCTFPPQRQPPPRPRLSSLTPTSTATLPTTSVSNRRRRVAARRSRPSQVSANQPWLFVEPRV

SEQ ID NO: 198499 - protein, 126 aa, Zea mays
  Clone ID: MRT4577_112607C.1.pep
PRVRIADQALLSRRQLLGRVLQYAVSTSSARNAPFDIRANSSPPPKQCAYRQTMFAFKHSLSYLDGTLPSDYRLDPLGLSDPEGTGHFIEPKWLTYGEVINGRYAMLGAEGAIDPEIFSKMGIMPP

SEQ ID NO: 198500 - protein, 58 aa, Zea mays
  unsure (1)..(58): unsure at all Xaa locations
  Clone ID: MRT4577_112608C.1.pep
AAAITHIYVVTESPNTQGEXNYVLLYFWHLRHVTKKFKIQLLVFIDFTDRPTRRGEQY

SEQ ID NO: 198501 - protein, 165 aa, Zea mays
  Clone ID: MRT4577_112609C.1.pep
PGKSLVIFYPFESIYWLLPVTMSNSVFPYLSFRCYRALEFYYTLVSLETPVGHVKTISTGDGQVFLQLVLPLAYYVCHHSRLDLFYFDHKSNATYTFSQHLCVEHIIFCRQHSPPYSISGLIVVLYNLSFSFYSTILSYRKSQMPLHPPCFDSMANVFINISVCL

SEQ ID NO: 198502 - protein, 52 aa, Zea mays
  unsure (1)..(52): unsure at all Xaa locations
  Clone ID: MRT4577_11260C.1.pep
LHARACKDSECKVPXCRDLKEHLRRLQQQSDSRRRAAVNEMMRQRAAEVAAN

SEQ ID NO: 198503 - protein, 121 aa, Zea mays
  unsure (1)..(121): unsure at all Xaa locations
  Clone ID: MRT4577_112610C.1.pep
PLHWDNAEKFNSERWPLDGPNPNETNQNFXYLPFGGGPRXKCIGDMFASFENVVAIAMLIRRFNFQIAPGAPPVKMTTGGSIHTTEGLKLSVTKRTKPLDIPSVPILPMDTSREEVSSAFF

SEQ ID NO: 198504 - protein, 180 aa, Zea mays
  unsure (1)..(180): unsure at all Xaa locations
  Clone ID: MRT4577_112611C.1.pep
MAPPNDSEPCTHHRLPADELQPPPPATCCGAALDDRAPAAAWASSPSEPDQVAAAPAAQEAEKKQNSATTTEAEAAAGSGAGRELVAARRPAAAAEESARERLKRHRAEMAGRVRIPEMWGQERLLKDWVDCAVFDRPLADTEGLLTARDALVAECAXARRPAVSHGSAGRPLRVHNGWS

SEQ ID NO: 198505 - protein, 156 aa, Zea mays
  Clone ID: MRT4577_112612C.1.pep
GSSIALIREEGPCMAYGLDTPFTTSFLLAFVAASMPASAPVLWYGSAGHVSLDLALSVAKSRPGYQFDAGSCMSGEAPCSVEVSKIEVYTLDGRGPCIGGSIRWVVVGCECKLAPEEVPIFENVDVKAVDLNLGGQYNGPENVAALSPVKLAVGFE

SEQ ID NO: 198506 - protein, 117 aa, Zea mays
  Clone ID: MRT4577_112613C.1.pep
ISKKKKKKKKKKKKKKTKKQKKKKKKKKKSLYLARAAGWKGQMAEIFHNPVRLFGPPSMRAQGPPMGVSGYNLPGRGFTTSQPGKPLKLSPFTRFWALPPFPLLAYCEKGQSPSPFP

SEQ ID NO: 198507 - protein, 149 aa, Zea mays
  unsure (1)..(149): unsure at all Xaa locations
  Clone ID: MRT4577_112614C.1.pep
KDGRCSTPRPXVLLSRKPFWVKNPGFCLLLTSLALGRLALALPHDGPASPSPAPPLLSRETTFLNLAHASSVPRAMLLACAGSCGWESKASTLWQLSITLAIAPAQIICNSLSGRSPRRSGGAVGANPGEPRPGGRKAAVVAPRDGTGR

SEQ ID NO: 198508 - protein, 73 aa, Zea mays
  unsure (1)..(73): unsure at all Xaa locations
  Clone ID: MRT4577_112615C.1.pep
MEEVEEANREAVESCHRVLALLSQPHDPAQARSIALGTDEACARFRKVVSLLSNGXGARRSRAVRRKRKRKPS

SEQ ID NO: 198509 - protein, 55 aa, Zea mays
  unsure (1)..(55): unsure at all Xaa locations
  Clone ID: MRT4577_112616C.1.pep
MAMTVEVLAGLACMFSTSVLLQILACALYNNWWPMLAALMYIIVPMPXXFFGDGS

SEQ ID NO: 198510 - protein, 35 aa, Zea mays
  Clone ID: MRT4577_112617C.1.pep
KTGIFRFSKAFCRISQEPNRLKPRFQARGRHGCSQ

SEQ ID NO: 198511 - protein, 104 aa, Zea mays
  Clone ID: MRT4577_112618C.1.pep
LLCVYIDSCRYRCLCMVDFNGGVDVCWGRRIRLPWSLCSSPKRSRMSCVTYAAPCCRPWLRHRCRTQGEPELVFVERVEASARRIEEGTVVARRAAPRGGIIYG

SEQ ID NO: 198512 - protein, 43 aa, Zea mays
  Clone ID: MRT4577_112619C.1.pep
MQSFWRTPLFMLLSGFFKRREDFLHDMMACEASSFSPQPLSWP

SEQ ID NO: 198513 - protein, 52 aa, Zea mays
  Clone ID: MRT4577_11261C.1.pep
EAFFLDFQKKILTKKPHFETYFVGGISKTAPQKKTTNFLGSLTGRFLGWGEK

SEQ ID NO: 198514 - protein, 100 aa, Zea mays
  Clone ID: MRT4577_112621C.1.pep
HPYAQDALFASDNVKPSGSLTASCRRGFAGRSCTRRPGACRSRQSDTVEDDNTRAVESPHRLGNWRREFPDEKTHFVVWWRANGLIVDWDEDPGRPRGSQ

SEQ ID NO: 198515 - protein, 135 aa, Zea mays
  Clone ID: MRT4577_112622C.1.pep
LMKILTERGYSFTTTAERERVRDIKEKLAYVALDYEQELEAAKSSSSVEKSYELPDGQVITIGAERFRCPEVLFQPSLVGMEAAGIHETTYNSIMKCDVDIRKDLYGNIVLSGGDNHVPCIGDRMSRETLPCPST

SEQ ID NO: 198516 - protein, 106 aa, Zea mays
  Clone ID: MRT4577_112623C.1.pep
VLAGGLRKGRHPDGRHGTVATAQEAPDPLCRSRLPARWWKIDRLVFALESTRPFVPRFVSWGACSSPWQLVPVATVVLAGGPWTQFRRPLLYWLPFQLSLCLSYGG

SEQ ID NO: 198517 - protein, 254 aa, Zea mays
  Clone ID: MRT4577_112624C.1.pep
MPPPSLVSILPAASISPRRRQAKHPKTPTASHPFFSRRLVSQPPRHASISPSAAGGSGSDELHLLEKPLPAVAEDNEAEEELESAPVSSTEEALAPFLKFFQVKSTDPDVGADTADGEVPEEASRRDVLSAAGERGVSYYDPKPGDFVAGVVVRSDGRTLDVDIGSNGEPALMLTKESAPVPGEEFGYLACDVASKCAPEFAAEGRVGVVVRQFRGGGEGYGEAIIGRNGKEKVAPVLRAGTIVFAEVLGRTLG

SEQ ID NO: 198518 - protein, 103 aa, Zea mays
  Clone ID: MRT4577_112625C.1.pep
GTTGTTHAPAYNRPGTKLKQGPWREESDGEREKTEQKPPTRDKDRRPAPKPQVNRKTEHEKQNPAKQGGAPSLLATIDHAGIRIEETKNETLQSRNEQTRPRH

SEQ ID NO: 198519 - protein, 133 aa, Zea mays
  unsure (1)..(133): unsure at all Xaa locations
  Clone ID: MRT4577_112626C.1.pep
FPVSPRRPXKKNKKKKKKKNKKKKKKKKKKKKKKKKKKKKKKKKRAPNFPYWRPGLKPLGFQKGLGASLTALGGERFPPVWKKWAPRFNLLKGAGPFLVEELAIFFQSGRVLFPKAAFFKKIAGGRKKNLLGF

SEQ ID NO: 198520 - protein, 38 aa, Zea mays
  Clone ID: MRT4577_112627C.1.pep
GQNNCTNNMSFDRVLIPNKNQPFQPNGSVLNLNTFYLG

SEQ ID NO: 198521 - protein, 91 aa, Zea mays
  Clone ID: MRT4577_112628C.1.pep
ILYQCNTSSSFCFPQCCWRWLRHSLKKKKKKKKKKKKKKKNKKKKKKSKLAYFYKTIEKIKKKKKGGGPFKGPKFTTPAWQRKTFFLGAPN

SEQ ID NO: 198522 - protein, 80 aa, Zea mays
  unsure (1)..(80): unsure at all Xaa locations
  Clone ID: MRT4577_112629C.1.pep
ARTRMRSATSKPYRVWSLTASTSSPPGPLWPGQTSQLPLPDLAKLRVXFSNAPPSTNPLHRQTVLLENTIHGLLRGLLCL

SEQ ID NO: 198523 - protein, 49 aa, Zea mays
  Clone ID: MRT4577_11262C.1.pep
RFVNAKSKKKKYRGSRLSMSVAPEAAEIDFWHVPGIAQLIASHHPVLFF

SEQ ID NO: 198524 - protein, 60 aa, Zea mays
  Clone ID: MRT4577_112630C.1.pep
QKEGAGLNNLRVFCTTYFAHVLQTRSMWTLRPHLTFTKVLQCWLKTTRYTLFHTVFLFQP

SEQ ID NO: 198525 - protein, 85 aa, Zea mays
  Clone ID: MRT4577_112631C.1.pep
RFMNHNSQPKCETLKWTVNGDTRVGLFAVCDIPAGTELTFNYNLDCLGNEKTVCRCGASNCSGFLGDRPKTSTTLSSEEKGKKTK

SEQ ID NO: 198526 - protein, 94 aa, Zea mays
  unsure (1)..(94): unsure at all Xaa locations
  Clone ID: MRT4577_112632C.1.pep
PRVRTLTGNGFSKAFTMRGRRLGYLASHKHFVSTRGXIQSQFTXSANSIXTKAGIANLNLAYAGWKTILTIVKALHERRDYFVKKFMELPGMKI

SEQ ID NO: 198527 - protein, 55 aa, Zea mays
  unsure (1)..(55): unsure at all Xaa locations
  Clone ID: MRT4577_112633C.1.pep
MATLTVPXTMVPPVXHDCTHLSYAFPGWCTCQVLIISILMHQDSTLRLAVRLVYH

SEQ ID NO: 198528 - protein, 69 aa, Zea mays
  Clone ID: MRT4577_112634C.1.pep
QTKGILYDHKCFWAPLLPSNTIFTSVWRPKIPSKTNRLNNSSLHELLILFDLKRKNSITFSLERTDNPY

SEQ ID NO: 198529 - protein, 99 aa, Zea mays
  Clone ID: MRT4577_112635C.1.pep
HTALSVYPSLSFNLTLRQCLLGGTRLASIHWSCPSFFRSSTNCILWLAPHQWLDHHLSIHKQTQSAFARTTVIPICASLRHRRASSGLPSPRKTRGSLL

SEQ ID NO: 198530 - protein, 545 aa, Zea mays
  unsure (1)..(545): unsure at all Xaa locations
  Clone ID: MRT4577_112637C.1.pep
MLALTASASSASSHPYRHASAHTRRPXRLRAVLAMAGSDDPRAAPARSVAVVGAGVSGLAAAYRLRQSGVNVTVFEAADRAGGKIRTNSEGGFVWDEGANTMTEGEWEASRLIDDLGLQDKQQYPNSQHKRYIVKDGAPALIPSDPISLMKSSVLSTKSKIALFFEPFLYKKANTRNSGKVSEEHLSESVGSFCERHFGREVVDYFVDPFVAGTSAGDPESLSIRHAFPALWNLERKYGSVIVGAILSKLAAKGDPVKTRHDSSGKRRNRRVSFSFHGGMQSLINALHNEVGDDNVKLGTEVLSLACTFDGVPALGRWSISVDSKDSGDKDLASNQTFDAVIMTAPLSNVRRMKFTKGGAPVVLDFLPKMDYLPLSLMVTAFKKDDVKKPLEGFGVLIPYKEQQKHGLKTLGTLFSSMMFPDRAPDDQYLYTTFVGGSHNRDLAGAPTSILKQLVTSDLKKLLGVEGQPTFVKHVYWGNAFPLYGHDYSSVLEAIEKMEKNLPGFFYAGNSKDGLAVGSVIASGSKAADLAISYLESHTKHNNSH

SEQ ID NO: 198531 - protein, 517 aa, Zea mays
  unsure (1)..(517): unsure at all Xaa locations
  Clone ID: MRT4577_112638C.1.pep
MLALTASASSASSHPYRHASAHTRRPRLRAVLAMAGSDDPRAAPARSVAVVGAGVSGLAAAYRLRQSGVNVTVFEAADRAGGKIRTNSEGGFVWDEGANTMTEGEWEASRLIDDLGLQDKQQYPNSQHKRYIVKDGAPALIPSDPISLMKSSVLSTKSKXVGSFCERHFGREVVDYFVDPFVAGTSAGDPESLSIRHAFPALWNLERKYGSVIVGAILSKLAAKGDPVKTRHDSSGKRRNRRVSFSFHGGMQSLINALHNEVGDDNVKLGTEVLSLACTFDGVPALGRWSISVDSKDSGDKDLASNQTFDAVIMTAPLSNVRRMKFTKGGAPVVLDFLPKXMDYLPLSLMVTAFKKDDVKKPLEGFGVLIPYKEQQKHGLKTLGTLFSSMMFPDRAPDDQYLYTTFVGGSHNRDLAGAPTSILKQLVTSDLKKLLGVEGQPTFVKHVYWGNAFPLYGHDYSSVLEAIEKMEKNLPGFFYAGNNKDGLAVGSVIASGSKAADLAISYLESHTKHNNSH

SEQ ID NO: 198532 - protein, 181 aa, Zea mays
  unsure (1)..(181): unsure at all Xaa locations
  Clone ID: MRT4577_112639C.1.pep
MLALTASASSASSHPYRHASAHTRRPRLRAVLAMAGSDDPRAAPARSVAVVGAGVSGLAAAYRLRQSGVNVTVFEAADRAGGKIRTNSEGGFVWDEGANTMXYGSVIVGAILSKLAAKGDPVKTRHDSSGKRRNRRVSFSFHGGMQXGDDNVKLGTEVLSLACTFDGVPALRQWSISXDSK

SEQ ID NO: 198533 - protein, 68 aa, Zea mays
  Clone ID: MRT4577_11263C.1.pep
TPTATHYHKGLAGTKISKPGLKEKKLQIVPYHEFNIKTPPALLTPFPRDFNKTKTYQVSYHPFLIWFF

SEQ ID NO: 198534 - protein, 322 aa, Zea mays
  unsure (1)..(322): unsure at all Xaa locations
  Clone ID: MRT4577_112640C.1.pep
VSDTWIVLSFGRGVKRCAALFRKCFLHLRDNFRSIVDPXLLQQTSTIPRKQIVLDGPRSCGKSIALAMLVHWARTEGWLVFYVPQGKDWTHGGFFYRNTYSDFFDTPVQAANILQNFLKYNETRLQQLPCQIFEPIPLGEGAGVGMMKGVDTMEMPEGSTLYDLIQTGITQTHASVGVMVRLRKELSLVKDVPVLFAIDQYNSWFTFSDFQEPVTVRSCRSIHAKELTMVNAYRSMLHNDMMVGAFSHSTAVGKLRQELPDVPSDARLIFPRYTLDEAETACHYYMRQKIIRRENFSEEKWKKIYYLSNGNGAEMRWLAAFV

SEQ ID NO: 198535 - protein, 371 aa, Zea mays
  Clone ID: MRT4577_112641C.1.pep
RTRDNRIILFENICSVGSFCERHFGREVVDYFVDPFVAGTSAGDPESLSIRHAFPALWNLERKYGSVIVGAILSKLAAKGDPVKTRHDSSGKRRNRRVSFSFHGGMQSLINALHNEVGDDNVKLGTEVLSLACTFDGVPALGRWSISVDSKDSGDKDLASNQTFDAVIMTAPLSNVRRMKFTKGGAPVVLDFLPKMDYLPLSLMVTAFKKDDVKKPLEGFGVLIPYKEQQKHGLKTLGTLFSSMMFPDRAPDDQYLYTTFVGGSHNRDLAGAPTSILKQLVTSDLKKLLGVEGQPTFVKHVYWGNAFPLYGHDYSSVLEAIEKMEKNLPGFFYAGNNKDGLAVGSVIASGSKAADLAISYLESHTKHNNSH

SEQ ID NO: 198536 - protein, 353 aa, Zea mays
  unsure (1)..(353): unsure at all Xaa locations
  Clone ID: MRT4577_112642C.1.pep
LFAFTDTFGSFAHRDANIYVDFTLDEWNAMLPEGLPAGMMKEFQETRRCAVMVRKSFLDLRDNFRRIVDPAVTTNLKDTRKQIVLDGPRSCGKSIALAMLVHWARTEGWLVFYVPQGKDWTHGGFFYRNTYSDFFDTPVQAANILQNFLKYNETRLQQLPCQIFEPIPLGEGAGVGMMKGVDTMEMPAGSRXYDLIQTGITQTHASVGVMVRLRKELSLVKDVPVLFAIDQYNSWFTFSDFQEPVTVRSCRSIHAKELTMVNAYRSMLHNDMMVGAFSHSTAVGKLRQELPDVPSDARLIFPRYTLDEAETVCHYYMRQKIIRRENFSEEKWKKIYYLSNGNGAEMRWLAAFV

SEQ ID NO: 198537 - protein, 79 aa, Zea mays
  Clone ID: MRT4577_112643C.1.pep
MLIFWTITLVRLGAAKGKEVCYEDLGCFSDTEPWGGTAIRPLKILPWSPEKIGTRFLLYTNENPNNFQILLLSDPSTIE

SEQ ID NO: 198538 - protein, 98 aa, Zea mays
  unsure (1)..(98): unsure at all Xaa locations
  Clone ID: MRT4577_112644C.1.pep
APPPARRTARRAPSARRAALISAGPRCTARCVPSGSQRSRPEPGPATVPSGARTFCRSVVWRRCARRRXCPEKYISFYVQXAGGXIQELVVTSSRTRG

SEQ ID NO: 198539 - protein, 57 aa, Zea mays
  Clone ID: MRT4577_112645C.1.pep
EHFLSSTLQSLVRLIVCNSPPWHRHVLAIVVCRSTMQEFQAFTVIQFCLLRSRIRYP

SEQ ID NO: 198540 - protein, 31 aa, Zea mays
  Clone ID: MRT4577_112646C.1.pep
ARKASLRFRLPSGDLLGSVRLTSLSALLHEN

SEQ ID NO: 198541 - protein, 114 aa, Zea mays
  Clone ID: MRT4577_112647C.1.pep
AKFWNFNPLPQQGVGEKIKGWGKWGRAHSKGVLREPTKYEPPPPPSNKKRPPAAFHKRKELLSYEQLCCLDKVNFANAVIFGNKSCFCYQTLNLVLVTVFNLKIQKSSSFPWAP

SEQ ID NO: 198542 - protein, 67 aa, Zea mays
  Clone ID: MRT4577_112648C.1.pep
RDLDLRLYNKGDEEYSMCSRGWRALPGLEEDYVGLCISSGGLLPCCYCDKVFTLSISGLVINVTLAM

SEQ ID NO: 198543 - protein, 57 aa, Zea mays
  unsure (1)..(57): unsure at all Xaa locations
  Clone ID: MRT4577_112649C.1.pep
KGQPHFFFFFFFFFLFLFLFFLFFFIFIFXFIFFFIFLFFPFLFFGISKYQTCLLLH

SEQ ID NO: 198544 - protein, 49 aa, Zea mays
  unsure (1)..(49): unsure at all Xaa locations
  Clone ID: MRT4577_11264C.1.pep
LWRKSSHWSEVLRNRKLVFCLLTKNVGVKFSVCERIDKKLXXRVGDGWV

SEQ ID NO: 198545 - protein, 61 aa, Zea mays
  Clone ID: MRT4577_112650C.1.pep
LMRPWILYMCTCQPSCAGRSHTTRNKENFLNLRETLDECRNMSGALQRPKGPRSSELHGIA

SEQ ID NO: 198546 - protein, 491 aa, Zea mays
  Clone ID: MRT4577_112651C.1.pep
FIPEEPRSLKGIVWKCRSCGDTLLRFTNQGPPSDACCIENDDINASCGNMLCYWHNHKNDCSGTYEKTMKLEAPSQKKVAGGAQLLLTLPSEMSNIQESSSSILQLEWSTKSTEPNAEDKHLCLGSGSNGKPQGSSSSKKAGKRNSPEMVGETSVLPAAAQGKPNQNHGLVAMAKQAPASVEGYSDAESPGRHTSKKAGKRHKPDDLQKSSVLPSVPQGTTKPKHALVATENNPLPSAERRNDAKSPKTNTSKKPGDWHELQIAQKACSQPADPHKKLKQDLGAPEKKELFSLMGPSNEKLLGRRSSKKASRQHDREDIQEKNTILPTAPGIRPKASAFAASEKRRKGKCKRKPVEEKEYAVMSAWLNYYESDRSSGSPEPLVNKRTERRRRERARILTYSRSKKNKTEPLASSGTHASVSSHKIEMAPQDHAVVTTGNQVAVAPATEDQAQPSADSAPCLDLVPFLQPADPLTSPDQSTARDMIVISDDD

SEQ ID NO: 198547 - protein, 108 aa, Zea mays
  unsure (1)..(108): unsure at all Xaa locations
  Clone ID: MRT4577_112652C.1.pep
MESGSSVRFGHQDVTAAGGVHAGNAGAASSHQQVIPGTGMTMPAGMASLLVGRLGMQAPPGMVLPGGALAAASAGYGGIMSSALRAAWSXAQQQLPPHAGGGIGGHRA

SEQ ID NO: 198548 - protein, 478 aa, Zea mays
  Clone ID: MRT4577_112653C.1.pep
MQTNNSDKELASSAMERIDSVKNRTSKETGFVTEAYNNDAFSGGITEKGFAQFSNSSTHIKPNASGHCSLPESKTPTNGSDINCIKGSSVNRGDVSFTNGSFVNRPINNNEPNVARLEVMEKLNNVMQNRYNDHAPGFDPHAAASASRNANGLMPMHANFGCMSSTVQSVANVSTTSTSQDQCDLQLGFGVQKQHIFSRHGELRTATARSPLPGSIAKRNSVPTESSQFESMDGPKSFPNGTSQFGGFARPTFVPAAPSQFGSMAQPNYVHSSQSSQFTSLVQPNSVPPAESSQFGSKAQSSSAPLAKTSQFKGMAGPNSVPPAEPSQFGSMIRPNLVPPASSQFLGSMVRPNSVTPESSQFGSMTRPNSVPPVSSQFVNMPSQNFVSASEPTLVLGYAPQIGSDPPHQVQLGWDLSLPRMVTGGSMVTCLCIWCNSQFHHFGPVDGQQASSFGFICPTCKDRMSGHHSMPSNGSWQP

SEQ ID NO: 198549 - protein, 77 aa, Zea mays
  Clone ID: MRT4577_112654C.1.pep
PEHQTFLFPYQLHILSIFNCALKARAAYRSQKTLNIGKTRTYQGPSDIKVSSARCVFMGRSLPSISSKVEARHERVL

SEQ ID NO: 198550 - protein, 236 aa, Zea mays
  unsure (1)..(236): unsure at all Xaa locations
  Clone ID: MRT4577_112655C.1.pep
RTAPPQIENCGAYRSRGGHGGDGARLLRPRQEGXSDLFVVDDLLALPCDDEEEEEXGRRGAVPAGQXAAVVVKQEAGFGNVSADSSTVTALDSCSNSFSGLADGDFSGGLCEPYDQLAELEWLSNYMGEGEESFATEDLHKLQLISGIPSGGFPSANGPPAPAATAATAQPGMFLPEGPVPAKARSKRSRVAPGNWSSRLLVLPPXPGLPXSPGVMAISPAESGVSAQAFHVKKPS

SEQ ID NO: 198551 - protein, 134 aa, Zea mays
  unsure (1)..(134): unsure at all Xaa locations
  Clone ID: MRT4577_112656C.1.pep
TLKSHPDKLLSEGYAYKRDVILPLRASTPESXXFDAPMPAEDRMGAXDEAPENALPXITLPKYAKHTMTGGSAXQGIPATAPCATAMCRLLLNEGTGKVFIIFQQXNEHHDGNHMFHVFCKGPLMALPVKNNYD

SEQ ID NO: 198552 - protein, 153 aa, Zea mays
  Clone ID: MRT4577_112657C.1.pep
MDSSSSSSSLSQQPEFDYLFKLLLIGDSGVGKSSLLLRFTADSFEDLSPTIGVDFKVKMVTIGGKKLKLAIWDTGEMAGGTSSMATWRPAWLVRGAITRETSVGSILSWLAQLPGIWGGALGLQWRVVRAVAVRCGTARSLVVQHEWMLHFLF

SEQ ID NO: 198553 - protein, 79 aa, Zea mays
  Clone ID: MRT4577_112658C.1.pep
SSIFTIAPPPSYDAWYNVIIHEQYNCFYTAPRGMNISLNHANSTPSVLSSEATMYFSFLPTWDNLTCWVCYPQGLDVAR

SEQ ID NO: 198554 - protein, 55 aa, Zea mays
  Clone ID: MRT4577_112659C.1.pep
ATQNLFETCLNNFMHDPRYIIEYTYSLFRLNHHLNIPALLDRVLELLAPKKFTEV

SEQ ID NO: 198555 - protein, 632 aa, Zea mays
  Clone ID: MRT4577_11265C.1.pep
MRQQTGKRPSQHREYEREERKDQHKRPFPRAQESSNNDGLVLYRILCPDSLIGSVIGKHGNVINAIRHQTSAKVKVVDPYPGADKRVILVYCYVKHRDLDAEGDDNEPVCAAQDALLRVHNAIVDALQTLHKNHKDSDKKSTEEANILVPASQASNVIGKSGAVIKHLRSTSRAFIKVSPKDPSDPTHSCAMSFDNFVQITGGAEAVKKALFGVSTIIYKHPSKENIPLETSIPDPTPSIIIPSELPVYPASNFYSAPDAAIPSVHPSMSVLGSTRHVPELAVPADDHGRLPIYQSILPVIPTYSAPKCSGELEFRVLCPGGKIGLVIGRGGATIKNIRQESGARIDVDDAKNDKEESIITIISTESTDDVKSAAVEAVLLLQAKINDSEDDRMNLRLLVPNKVIGCLIGRGGSIVNDMRKKTKANILISKGDKPRRASSSDELVEVSGEADKLRDALVQIILRLREAVLKESVESQNSDRDGKLTVAASDSLYGSSLPLPALLPHNQQIAPLGYDRRGESERALEVFPRTSSYGYSSMQVTDDGYGGLPSYASKAYEEHVPRLEMTVPASGISKVMGKHGTNLDNIRKISGAHIEIIEPKSSRHEHIAYISGTSEQRHSAENLIKAFIMST

SEQ ID NO: 198556 - protein, 125 aa, Zea mays
  unsure (1)..(125): unsure at all Xaa locations
  Clone ID: MRT4577_112660C.1.pep
KKKERGARTYTTTKNQSTKHFYTKKNTKTQDKKILLVVLPXPXTQNIHIDLPKTPTQSDQIIAPLTFLTASKFELMQDTLNKMEHTIYPKTFFHALNKTLKANPYSQTILGSHATEINTYNNLYE

SEQ ID NO: 198557 - protein, 47 aa, Zea mays
  Clone ID: MRT4577_112661C.1.pep
SKTPGRGEHLNLYVRLVFITDNWSELNQNRNEHFTGPCCVRRALMYD

SEQ ID NO: 198558 - protein, 556 aa, Zea mays
  Clone ID: MRT4577_112662C.1.pep
MSLISQNAVQKRCLRKSEADNCNDEDIGSPTSIDAEVGKEAKLKNHNKERKKKKTKLLESQQNKEEEEMRQLESSLFGSLYAPLEFGTEVGAAVAPDRDAPLFFTDRSAGGGMDYFPTYEEDMAHEDEEDMVGIKRRKPVWVDEEEEMTEVDIVKVPRLRKLRKEEDEHLISGKEYEARLRGQHAKLNPFTGWADMDQKTSLPAASDGESDDEGCVDDILRNNDELVAKDTVKLLPGMLEFSRLVDANIQDPSSGPINSVQFHRNGQLMLAAGLDKHLRFFQIDGKRNPKIQSIFIGDCPVHKASFLPDGSEVILSGRRKFFYSFDLVNAAVSKIGPLTGREEKSLETFEISPDSRTIAFVGNEGYILLISAKTKQLITTLKMNGSVRSLAFADGGNQLLSSGGDGHVYHWDLGTRKCIHKATDDGSLAGLSLCTSRDSSLFATGSSSGIVNVYKRDDFLGGKRKPLKTIENLTTDIGEMKFNHDAQILAISSRKERNGMRLVHVPSFSVFQNWPGPRFSLHYPRCLDFSPGSGFLSVGHAGGKVLLYKLHHYENA

SEQ ID NO: 198559 - protein, 34 aa, Zea mays
  Clone ID: MRT4577_112663C.1.pep
VVASRFSSQRTEHHARIGHLIKHVVIWGFSITET

SEQ ID NO: 198560 - protein, 66 aa, Zea mays
  Clone ID: MRT4577_112664C.1.pep
VARRRGLRHQVARRAREDVSSVVSAVYVKFYSGPRPAMRGCGGCGRTGPQKTEGPSRHWTLVFFPR

SEQ ID NO: 198561 - protein, 139 aa, Zea mays
  unsure (1)..(139): unsure at all Xaa locations
  Clone ID: MRT4577_112666C.1.pep
ARAVVGISAATAVLCEAMSWLLIYRTATYNSLRASYAQPASSRAKKMDRVETSLKDAARELSLDKLKSGPVVACMLSDVFSLLNSLLEGPTVAKLHLAPIPLGQRMSHXRDLPGNDPTHGSWVSLYXLCXLNLPTNLQN

SEQ ID NO: 198562 - protein, 102 aa, Zea mays
  Clone ID: MRT4577_112667C.1.pep
AVVTTQSTRALSDVHNVFHVSQLKKCLRVPEEQLPMEELSVQGDLTYTEYRIKILDTLTRVTRNRVIKMCKVQWSHHGEHEATWEREEELRIDFPHLFPRSS

SEQ ID NO: 198563 - protein, 73 aa, Zea mays
  Clone ID: MRT4577_112668C.1.pep
KKKNGGGPRLTVFSEASVVQWFSRCVGRFSCPFVELPSFVNYYYCPPLFCLGLGLEKNFNPRLVQAPKLNCFN

SEQ ID NO: 198564 - protein, 74 aa, Zea mays
  Clone ID: MRT4577_112669C.1.pep
HAFGSESYHRRASGSRNCRRRHAWCRRRTHPGVHRHRALSHPDLRGKPRFKINTYNDSVYRDKCHQLYYITKMS

SEQ ID NO: 198565 - protein, 81 aa, Zea mays
  Clone ID: MRT4577_11266C.1.pep
QENQDGRYSLTYIYTGLSKHVEDVPAFQALGSLNDLQFFRYNSKDRKSQPMGLWRQVEGMEDWKQDSQLQKAREDFFMETL

SEQ ID NO: 198566 - protein, 313 aa, Zea mays
  Clone ID: MRT4577_112670C.1.pep
MDTPPPSLPPSALLWPDLLAGAASSTCRLVAAHSRHFLALSSLLLLPLALLLLALPCPLFSASASSAASPPVHLRVPQDPSRYPLPIPLPLLALAAALLYLAAFAAAAASAHAGFFGRPVRLLASLRSVPASLLRLILTAILASPLALLPLLPLPAALGAALLVLGFILLSPFWSLAGAAAVVESATGFTPLRRSCQLLSTARLAALSSFLVFAAGIGVTLWGFGGVAAERYDAGAGWAGTAPVVVKAVAGTALLAVMMLYGMVANVVLYMHCRAMHGELAGEIYNEFANMYVFLPYDDGKDRHVVSVVTVWP

SEQ ID NO: 198567 - protein, 162 aa, Zea mays
  Clone ID: MRT4577_112671C.1.pep
FPLAITPTGVNTSTTSTAMQDIGFDPTGWELALVTTSSSNTNSLAVDSTLGGGFDKLTLDSLYDDGTYRQMQQQLPYGAVPHNPFMASDPFAVSNQVASPPSVQMAAMAQQPQQMQPNPFGPPSHPRPVPNPFLDAGFGPFPAANGNGMHAQANPFGTAQLL

SEQ ID NO: 198568 - protein, 134 aa, Zea mays
  Clone ID: MRT4577_112672C.1.pep
LWAGFFPLPSFVLVVFFSPSAVLPGHAAWVVGFLSVLCFVAPPPLPFKFLACWAGGSVPYSFFFLPKASGLAFPLPVFFFSGLAFGLGLFSRARAGVSLPLYGRVGLVIPSLCSLPCTPVVFLCHGYIVLVTPN

SEQ ID NO: 198569 - protein, 60 aa, Zea mays
  Clone ID: MRT4577_112673C.1.pep
QALLLAFLMASHSSTRCSGQYMQACKWVGVLGLLASYWMLISNHTHKKRKKEITYISVYH

SEQ ID NO: 198570 - protein, 28 aa, Zea mays
  Clone ID: MRT4577_112674C.1.pep
REIDILLLIYPNCYSYHPNKILSGEIMS

SEQ ID NO: 198571 - protein, 220 aa, Zea mays
  unsure (1)..(220): unsure at all Xaa locations
  Clone ID: MRT4577_112675C.1.pep
MLPNGEAPSGSMPPVPAADANTSNSDDTRFDASQYAFFGNNVLEEIELGGFEDDNSSNAAFAGLDDLERPLSSQGIALEAEDSSFSDLDDLANTFSKLRRDVNLPKHIGVNNLGTSFSRESSAAADWAPEFESPLWSDQHVLXLTKDRMAMAWWSPQHHSSLLADSRLHRTSSSPQQQEQHNHDAPILGPRPSPLHRTSSYPQKEPQYNPDEVIPNAPYM

SEQ ID NO: 198572 - protein, 98 aa, Zea mays
  Clone ID: MRT4577_112676C.1.pep
CLHPTNFWCSTNCGLREPFYHREVYLSLSYEIRCYWTKIGTTSPFKVHLKVRPFCELVKNMLVGYLFPQLVQLVELSLEAKPLIWKKKKQPGIWCLIS

SEQ ID NO: 198573 - protein, 89 aa, Zea mays
  unsure (1)..(89): unsure at all Xaa locations
  Clone ID: MRT4577_112677C.1.pep
MIVGRKNAGKASPFLLILISVGCFFATYNFLTMVGHSRSGDGPRKLLGSGXQGGAVAFGSGSDPSKRFHVALTATDALYSQWQSRIMYY

SEQ ID NO: 198574 - protein, 275 aa, Zea mays
  unsure (1)..(275): unsure at all Xaa locations
  Clone ID: MRT4577_112679C.1.pep
PAYTAGCRNDGFENLRALTIDLCPLVGKIPIWLSKLTKLEILDLSYNHLTGTIPSWINRLELLFFLDISSNRLTGDIPPELMEMPMLQSEKNSAKLDPKFLELPVFWTQSRQYRLLNAFPNVLNLCNNSLTGIIPQGIGQLKVLNVLNFSTNSLSGEIPQQICNLTNLQTLDVSNNQLTGGLPSALSNLHFLSWFNVSNNDLEGPVPSGGQFNTFTNSSYIGNSKLCGPMLSVHCGSVEEPRAVMKIRHNKTILALALSVFFGGLAILFLXGRLI

SEQ ID NO: 198575 - protein, 220 aa, Zea mays
  Clone ID: MRT4577_11267C.1.pep
MASALRVLALLLVGAAVADAASIVVTNKCAYTVWPAALPGGGTVLNTGESWPIDVPAGTRSGRVWGRTGCGFVTNGTLGQCQTGDCGGTLACSKVGFEPITLAEYSLGGTGADRFDISLVHGFNAPMSFLPAGGGGGGARCGRGGPSCPVQEITFDCPSEQRRVAGCGNPCDGKSSSCGPNNGTEYFKKACPQTITYPRDTTNTVFTCPAGTSYEITFCP

SEQ ID NO: 198576 - protein, 484 aa, Zea mays
  Clone ID: MRT4577_112680C.1.pep
PQRRARACGMDEPLLGNGLKTSGKRESLVVAEVRKQMYLAGPLIAAWILQNIVQMISIMFVGHLGELALSSASIATSFAGVTGFSLLSGMASSLDTLCGQSFGAKQYYLLGIYKQRAILVLTLVSLVVAIIWSYTGQILLLFGQDPEIAAGAGSYIRWMIPALFVYGPLQCHVRFLQTQNIVLPVMLSSGATALNHLLVCWLLVYKIGMGNKGAALANAISYFTNVSILAIYVRLAPACRNTWRGFSKEAFHDITSFLRLGIPSALMVCLEWWSFELLVLLSGLLPNPKLETSVLSISLNTGSLAFMIPFGLSAAISTRVSNELGAGRPHAAHLATRVVMVLAIVVGVLIGLAMILVRNIWGYAYSNEKEVVKYISKMMPILAVSFLFDCVQCVLSGVARGCGWQKIGACVNLGAYYLIGIPAAFCFAFMYHLGGMGLWLGIICALVIQMLLLLTITLCSNWEKEALKAKDRVFSTSVPADMMT

SEQ ID NO: 198577 - protein, 592 aa, Zea mays
  unsure (1)..(592): unsure at all Xaa locations
  Clone ID: MRT4577_112681C.1.pep
MMPGMDEPLLGNGLKTSGKRESLVVAEVRKQMYLAGPLIAAWILQNIVQMISIMFVGHLGELALSSASIATSFAGVTGFSLLSGMASSLDTLCGQSFGAKQYYLLGIYKQRAILVLTLVSLVVAIIWSYTGQILLLFGQDPEIAAGAGSYIRWMIPALFVYGPLQCHVRFLQTQNIVLPVMLSSGATALNHLLVCWLLVYKIGMGNKGAALANAISYFTNVSILAIYVRLAPACRNTWRGFSKEAFHDITSFLRLGIPSALMVCLEWWSFELLVLLSGLLPNPKLETSVLSIXELTLHVTLPIXFPFLGCNSLVSCSLNTGSLAFMIPFGLSAAIXRLSRSGSQTLTCHADQQIIVALICFFCSYSTRVSNELGAGRPHAAHLATRVVMVLAIVVGVLIGLAMILVRNIWGYAYSNEKEVVKYISKMMPILAVSFLFDCVQCVLSGKCINDTSSIPNFAKTVNPFPNLLGXYFYLFVYYELYLFLWNNITYIMAHTIADSXIVPGVARGCGWQKIGACVNLGAYYLIGIPAAFCFAFMYHLGGMGLWLGIICALVIQMLLLLTITLCSNWEKEALKAKDRVFSTSVPADMMT

SEQ ID NO: 198578 - protein, 643 aa, Zea mays
  Clone ID: MRT4577_112682C.1.pep
MAALQPSFSPAMTLKSSCSALKFPKTALLSGFGGIPRLQDAQDRNTSVAYLIPKAASVTDQSIAEPPKTKQNRHTVDPTAPEFLPLPSFEECFPRSTKESSEIIHEESGHVLKVPFRRVHLTGDQKHFDTYDTSGPQNISPRIGLPKIRKEWIDRREKLGSPRYTQMYYAKQGIVTEEMLYCASRENLSPEFVRTEVARGRAIIPSNKRHLELEPMIVGRNFLVKVNANIGNSAVVSSIEEEVHKLQWATMWGADTVMDLSTGRHIHETREWIIRNSPVPIGTVPIYQALEKVNGIAENLSWEIFRDTLIEQAEQGVDYFTIHAGVLLRYIPLTAKRMTGIVSRGGSIHAKWCLTYHKENFAYEHWDDILDICNQYDVALSIGDGLRPGSIYDANDSAQFAELLTQGELTRRAWAKDVQVMNEGPGHIPMHKIPENMEKQLEWCNEAPFYTLGPLTTDIAPGYDHITSAIGAANIGALGTALLCYVTPKEHLGLPNRDDVKTGVISYKISAHAADLAKGHPYAQAWDDALSKARFEFRWLDQFALSLDPVTAMAFHDETLPSEGAKVAHFCSMCGPKFCSMKITEDIRKYADENGYGTVEEAVIQGMNAMSAEFLAARKTISGEQHGEAGGEIYVPESYAAQK

SEQ ID NO: 198579 - protein, 123 aa, Zea mays
  Clone ID: MRT4577_112683C.1.pep
MVAAIAVASAGLGMLAGVAMANRSLSSDGAAQWRPGGPALRWGGGGAPRCEACGGSGKEECRLCARWSDAGARGKKQSRSGCGACAGTRRTPCRCCGGSGTGRRAPVRIATSARAALTARTAR

SEQ ID NO: 198580 - protein, 109 aa, Zea mays
  Clone ID: MRT4577_112684C.1.pep
AKASSLDLVCILTSIFLKFHAWYASLQSTPHQTARCGRSRQQPSCLEGAIRDFEVTGCLLLWPQVEPRVREEGIEEDDQRHEEAQQHQPDLPHCVAQHRLVRVLVSRWS

SEQ ID NO: 198581 - protein, 258 aa, Zea mays
  Clone ID: MRT4577_112685C.1.pep
VLDRSRSRTRAAARDLELLTQGELTRRAWAKDVQVMNEGPGHIPMHKIPENMEKQLEWCNEAPFYTLGPLTTDIAPGYDHITSAIGAANIGALGTALLCYVTPKEHLGLPNRDDVKTGVISYKISAHAADLAKGHPYAQAWDDALSKARFEFRWLDQFALSLDPVTAMAFHDETLPSEGAKVAHFCSMCGPKFCSMKITEDIRKYADENGYGTVEEAVIQGMNAMSAEFLAARKTISGEQHGEAGGEIYVPESYAAQK

SEQ ID NO: 198582 - protein, 643 aa, Zea mays
  unsure (1)..(643): unsure at all Xaa locations
  Clone ID: MRT4577_112686C.1.pep
MAALQPSFSPAMTLKSSCSALKFPKTALLSGFGGIPRLQDAQDRNTSVAYLIPKAASVTDQSIAEPPKTKQNRHTVDPTAPEFLPLPSFEECFPRSTKESSEIIHEESGHVLKVPFRRVHLTGDQKHFDTYDTSGPQNISPRIGLPKIRKEWIDRREKLGSPRYTQMYYAKQGIVTEEMLYCASRENLSPEFVRTEVARGRAIIPSNKRHLELEPMIVGRNFLVKVNANIGNSAVVSSIEEEVHKLQWATMWGADTVMDLSTGRHIHETREWIIRNSPVPIGTVPIYQALEKVNGIAENLSWEXXRDTLIEQAEQGVDYFTIHAGVLLRYIPLTAKRMTGIVSRGGSIHAKWCLTYHKENFAYEHWDDILDICNQYDVALSIGDGLRPGSIYDANDSAQFAELLTQGELTRRAWAKDVQVMNEGPGHIPMHKIPENMEKQLEWCNEAPFYTXXPXPAGLTXGYDQAGSAIGAANIGALGTALLCYVTPKEHLGLPNRDDVKTGVISYKISAHAADLAKGHPYAQAWDDALSKARFEFRWLDQFALSLDPVTAMAFHDETLPSEGAKVAHFCSMCGPKFCSMKITEDIRKYADENGYGTVEEAVIQGMNAMSAEFLAARKTISGEQHGEAGGEIYVPESYAAQK

SEQ ID NO: 198583 - protein, 337 aa, Zea mays
  Clone ID: MRT4577_112687C.1.pep
ELQETVAHLRQEISNLSKAAKSEDSFASVQSSEPSTASTDTRDQTNEISNRANMSSRTTDLNESGFISQVLKQASEIESLKQENLRLVEEKDGLEIHSQKLAEESSYAKELASAAAIELKNLAEEVTRLSYENAKLNADLAAARELNASMSRSNIHPDPKRRDHESGILVEELQKELVASCQREAVLEDTLSQKDRRESELLKIIDDAKCREHELKNELASMGALLSKIKKENSQQDVFEFKAKQNGFHSSKTDSGRLVSEMQASDNGCWDGLSTFEEARAAYNFERMRCKELESIVSKLKGEDLRGLDVKVLEELQNFHVEALSRICQEKMASQAL

SEQ ID NO: 198584 - protein, 220 aa, Zea mays
  Clone ID: MRT4577_112688C.1.pep
MAWWKNGALVAAATLAVAAVVCAGVAAAASKFDDVVQPSWANDHVLYEDDLLKLRLDSSSGGGFASKNRFLYGKATADLKLVPGDSAGVVTAFYLSSAGDKHNEFDFEFLGNVTGEPYLVQTNLYIDGVGNREQRIDLWFDPTADLHTYAVLWNPSQVVFLVDDTPIRVYDNKNASATKLKGHHRHPNNATNTTATQAHVPRSRRRSPMAVYSSIWNADD

SEQ ID NO: 198585 - protein, 195 aa, Zea mays
  Clone ID: MRT4577_112689C.1.pep
ILVERLVLVAAGVCLEEADLASGLFAVDDISEAASLLLPQRPEDLRRLVELTFCKPPKFMPSCFIRDYIRVMCTENVKEKTELLYALISGRKLSDLPKINQQTLIIWGEQDRVFPLELGLRLKGHLGDTSELTIVKDAGHAINREKPAELCRLIKNYIIDPSVKYRDDRKGCWKFALRRFAGSSLRKVDSSRPLI

SEQ ID NO: 198586 - protein, 94 aa, Zea mays
  Clone ID: MRT4577_11268C.1.pep
TGTLRLTTTRGLVLTGYGISVSPVDRTHIQCRPQVVPGGVIRREYLGLLILRDLSAHSNLCIDAALVMSRHILHILLGNHNFHQPLIQARHMAP

SEQ ID NO: 198587 - protein, 47 aa, Zea mays
  Clone ID: MRT4577_112690C.1.pep
RQRSVSHCDMLGHVALRIRCKACSMGASMYSCSFVRYDAGLLVEIRR

SEQ ID NO: 198588 - protein, 63 aa, Zea mays
  Clone ID: MRT4577_112691C.1.pep
AGVAHQDSLSLGSKLGPHHGELRRTSPGPEKGSDPLGQQGEAPHHRWGATTDAVAHIAPNPNP

SEQ ID NO: 198589 - protein, 87 aa, Zea mays
  Clone ID: MRT4577_112692C.1.pep
MNVSVVPRSDREVVKGSAKVTDLQEAIHAKPKKYYPARQRLTLPAQPGKSGKPIVLNQKASLSEYCEKGSGSCLVPLDNHINAVNVL

SEQ ID NO: 198590 - protein, 74 aa, Zea mays
  unsure (1)..(74): unsure at all Xaa locations
  Clone ID: MRT4577_112693C.1.pep
MCEQNMRAQQLRPLGLANLAXAYCEXKKFLAFNQLGSLNSASYLHQQQLPCRQLPAGYLEQFVACKQLAAWYSA

SEQ ID NO: 198591 - protein, 72 aa, Zea mays
  Clone ID: MRT4577_112694C.1.pep
GYIREVGAYFPQRSLYRNICRAGIDRQYHMFTGIIPYWQGSHINTQRPRCRRYSTRLSLIVLGLLANLAHLN

SEQ ID NO: 198592 - protein, 87 aa, Zea mays
  Clone ID: MRT4577_112695C.1.pep
AHEAAQKDRRPLPFGHGCRRQPRFYPIGMVPKVSTRAPPQYFVIPRMTHGIPLFMTGCNFGVLSTHNSVGQIKKPGHKALVPLVCCP

SEQ ID NO: 198593 - protein, 408 aa, Zea mays
  unsure (1)..(408): unsure at all Xaa locations
  Clone ID: MRT4577_112696C.1.pep
MASELSHGTRRDVCIESMARPIAVDHRISIHYYFRIADNLLRQANVYREEKNVLDLYILLLRYSSLLLETIPKHRDYNAFKAREKEFLKKGPHNSEKILGIVNELESLKPVVQQQIATGNSRGADEPNGVYGTYAASSELEHHTPGPYVSKSLSGSPTRLLQKPLPGSKHQAAMSQNVQPYRHAMKPSTNMLYPKEETLSRHSILGPNGLQWYRDGFSSHXRHDHVXRLKNLXTPVALMECFLRLAEXNTXKNLEXCGILAGTLKKRPFYVTTLIIPKQKSTSDSCQATNEEEIFEVQDKGSLLSLGWIHTHPTQTCFLSSIDLHNHYAYQIMLPEAIAIVMAPTDTTRKHGIFHLTEPCGMGVIHDCDATGFHPHEEPLDGTPIYEHCSHVYMNPNVRFEMTDLREA

SEQ ID NO: 198594 - protein, 40 aa, Zea mays
  Clone ID: MRT4577_112697C.1.pep
HIFKHVPITKFLKYYLKISKCPNPYFKKRVPFPGQMEFLP

SEQ ID NO: 198595 - protein, 49 aa, Zea mays
  Clone ID: MRT4577_112698C.1.pep
QSRHIHELARSIQISTFEKFINFQMLHGPKTMALPLDRAHISPWKTRKV

SEQ ID NO: 198596 - protein, 181 aa, Zea mays
  Clone ID: MRT4577_112699C.1.pep
RWRSPREIVYTRNATEAINLVAYSWGMNNLKAGDEIITTVMEHHSNLVPWQMVAAKTGAVLKFVQLDEQESFDLEHFKTLLSEKTKLVTVVHISNTLGCVNPAEEIAQLAHQAGAKVLVDACQSAPHYPLDVQLIDCDWLVASGHKMCAPTGIGFLYGKEEILEAMPPFFGGGEMIAEVFF

SEQ ID NO: 198597 - protein, 589 aa, Zea mays
  unsure (1)..(589): unsure at all Xaa locations
  Clone ID: MRT4577_11269C.1.pep
MALGAAYHHYLQLAGDHGTATHALLLGVLIFLVIRLVSARRTGTTSANKRKQQQRLPLPPSPPGKLPIIGHLHLIGAETHISIRDLDAKHGRNGLLLLRIGAVPTLFVSSPSAADAVLRTQDHIFASRPPSMAAEIIRYGPSDVAFVPYGEYWRQGRKLLTTHMLSTKKVQSFRHGRQEEXGRRRTRRSNSLSLSLTHTRTCTYIFPPFIYAIEQNILTFTARRRPLELRTIXVRLVMDKIRAAATAAPPAAVDLSDLLSGYTNDVVSRAVLGASHRNQGRNRLFSELTEINVSLLAGFNLEDYFPPNMAMADVLLRLVSVKARRLNQRWNDVFDELIQEHVQSRPSGESEESEADFIHVLLSIQQEYGLTTDNLKAILVDMFEAGIETSYLTLEYGMAELINNRHVMEKLQTEVRTTMGSPDGKKLDMLAEEDLGSMPYLKATIKETLRLHPPAPFLLPHYSTADSEIDGYFVPAGTRVLVHAWALGRDRTTWEKPEEFMPERFVQEPGAVDVHMKGKDLRFIPFGSGRRICPGMNFGFATMEVMLANLMYHFDWEVPGSGAGVSMDESFGLTLRRKEKLLLVPRIAS

SEQ ID NO: 198598 - protein, 76 aa, Zea mays
  Clone ID: MRT4577_1126C.1.pep
NTYKTRQGKTRAGTILNFSLLPHPSMHHHPFLYLIWLISSATQLNPLSLHAPFDYCLHSDYSLSPFRSSQYQLLLS

SEQ ID NO: 198599 - protein, 86 aa, Zea mays
  unsure (1)..(86): unsure at all Xaa locations
  Clone ID: MRT4577_112700C.1.pep
SARAILHSFGVGAQAIAYRGTDDNRDIHQLLHHAVXDGTGDVRRTAAMAIGXGLCSEPEQTXRIGSLLSQSYRLHGCYGATLAVGI

SEQ ID NO: 198600 - protein, 49 aa, Zea mays
  Clone ID: MRT4577_112701C.1.pep
TINDVHDHHSYLIFSYVQTAKYMHQSIFQRAWLTLLPWSHLKDGKLMVH

SEQ ID NO: 198601 - protein, 65 aa, Zea mays
  Clone ID: MRT4577_112702C.1.pep
LIILIVLILCYLHLHFINLNHCSMYHSLRLNVVASHLLLLPPMFYPYLIQLSGHQPLSVAIFVSC

SEQ ID NO: 198602 - protein, 125 aa, Zea mays
  Clone ID: MRT4577_112703C.1.pep
RTRGEAVVVVGCHASGVDIALELRAVARDVHVSVKSVDDGVAVSPGMRKAASRHHNLHLHPQIERLCEDGQVTFADGSRVVADSIVYCTGYGYSFPFLDTGGLVTVDEGSRVGPLYEHTFPPALA

SEQ ID NO: 198603 - protein, 181 aa, Zea mays
  unsure (1)..(181): unsure at all Xaa locations
  Clone ID: MRT4577_112704C.1.pep
ISPSSGEATTASDTLSLCGAPPSLAGEQKACTTSLEDTVESATHMLVVGSSVRHGVVYLWAASSAAAVPXGGTPXQQQYVVQAVTSLDGDRHVGCHAMPFPYAVYYCHMTGRPSKAYAVLLRSVTGGSSAPVTKAAICHLDTSNWDPAHPAFEMLHTRPGGEPVCHFMSYASLLFGEKAAN

SEQ ID NO: 198604 - protein, 54 aa, Zea mays
  Clone ID: MRT4577_112705C.1.pep
YYNIGGGSMGSPCWHDSILGAMATCSQWGPNPHRFVLYLWTRCCFNGACFLEPN

SEQ ID NO: 198605 - protein, 56 aa, Zea mays
  Clone ID: MRT4577_112706C.1.pep
GMNHTRGGRRSKKLSMAKGKTDTGGTWLVHSPEPTPYKGGQVSLAQKQAGGSGGPP

SEQ ID NO: 198606 - protein, 92 aa, Zea mays
  Clone ID: MRT4577_112708C.1.pep
KKKKKKKKKKKKKKTIKKKEGVHFTSSQPYNCSILTPSTLLSCATYFQPTPLLIYNSLASKPLSCTNFFVLQLIHLSAHVLLSFCPATDDLS

SEQ ID NO: 198607 - protein, 134 aa, Zea mays
  unsure (1)..(134): unsure at all Xaa locations
  Clone ID: MRT4577_112709C.1.pep
PRKPPGGPGNPGGMPPPRXLFCKFPPGFFGKVGLGFFPGVPPQFPFPSVNVGGLWFLVPPGQPPEGAGPDPAPLFYVTPFGFFQVLGQGVFPSRPLFVKARFFSRVPQKKFQVSGGPVLLPPLVLLPLVSPLCA

SEQ ID NO: 198608 - protein, 371 aa, Zea mays
  unsure (1)..(371): unsure at all Xaa locations
  Clone ID: MRT4577_11270C.1.pep
HMLSTKKVQSFRHGRQEEVRLVMDKIRAAATAAPPAYGDLSDIMSGYTNDVESRALLGASDRNQGRNMLFSELTEINVSLLGGFNLADXYLSTNMAIADLLLRLWCVXARRLNQRWNDVFYELIQEHVQSRPSGDCAALEAALIHIGLSRTAGVDHLICVIXDMFEAGIETSYLTLEYGMAELINNRHVMEKLQTEVRTTMRSPDGKKLDMLAEEDLGSMPYLKATIKETLRLHPPAPFLLPHYSTADSEIDGYFVPAGTRVLVNAWALGRDRTTWEKPEEFMPERFVQEPGAVDVHMKGKDLRFIPFGSGRRIRPGMNFGFATMEIMLANLMYHFDWEVPGSAAGVSMDESFGLTLRRKEKLLLVPRIAS

SEQ ID NO: 198609 - protein, 91 aa, Zea mays
  Clone ID: MRT4577_112710C.1.pep
WTITRPPFLYSMEDLVQLRRCSSVNNSFYAPNTGLLFQPSLAALCIPFITQQSKTIGTCTLRGTTAIYSSLMATGTNHHIHSRPQISKSLF

SEQ ID NO: 198610 - protein, 42 aa, Zea mays
  Clone ID: MRT4577_112711C.1.pep
AVPPSIKNHDWHIQASCAITGEGLYDGLGWIAQKVAGKATVS

SEQ ID NO: 198611 - protein, 101 aa, Zea mays
  unsure (1)..(101): unsure at all Xaa locations
  Clone ID: MRT4577_112712C.1.pep
GSSGRPREDXASNRXGDGALVXCIXXGXXETQENAXXKAPSXCXXEYHVANQAVARCTQGIXLRMRXGLQTKKPLSXXLRMNXXLGKGFLVLETPPDGPVF

SEQ ID NO: 198612 - protein, 127 aa, Zea mays
  unsure (1)..(127): unsure at all Xaa locations
  Clone ID: MRT4577_112713C.1.pep
YNHVLQVDYACTPEEVQQHFQACGTVNRVTILTDKFGQPKGFAYVEFLEQEGVQEALNLNESELHGRQIKVAPKRTNVPGMKQRPPRGYNPYHGYPYRSYGAPYFPPYGYGXRAPRFRRPMRYRPYF

SEQ ID NO: 198613 - protein, 115 aa, Zea mays
  Clone ID: MRT4577_112714C.1.pep
LPWGVFIYCRGAFFPPQKTPQMPPPPGEKTKQGLPHPARWQRGGTPFIPGGSPPGGENKKGPPHFTSLSLLGGDRAGHYPPIWAGSASTKWGGVHPPRKKGAQIPPVMPPDKNPP

SEQ ID NO: 198614 - protein, 133 aa, Zea mays
  Clone ID: MRT4577_112715C.1.pep
MAEPGSYLVSLALTGVAGHIQLLVFALPGEYLRLSTTQTFTNQLTGMKPATVALLILNMMCIVAYFDHGSFLVTMAEETTSLANSYARNEGGTSSFTKDIHPGRKLMDVGTESHRTSRIIDIRNLKSPRAPHR

SEQ ID NO: 198615 - protein, 119 aa, Zea mays
  Clone ID: MRT4577_112716C.1.pep
PFNQRPTLNRAVYWQHHLLPLSRLVTAYFKNHQLFPFNQLAELNPVVYWRQQFLLPFSRLAAEGRASFWPQNQWLPFYQQLGVNPETLLQLQQLWPLVQLAWPNPEASYQHHIIGGALF

SEQ ID NO: 198616 - protein, 114 aa, Zea mays
  Clone ID: MRT4577_112717C.1.pep
HSLPGARLIHVLRLLDLSPALVDRAAIPLSTLHSTLSTLHSLISPFAALFPCLVLPYNAALCASKDAHQASYADRSCPALDLGDHIHARYLCLSLHVQGPPDPDHHVPALGLHT

SEQ ID NO: 198617 - protein, 126 aa, Zea mays
  Clone ID: MRT4577_112718C.1.pep
ALVDGVPVPLAFDQDGEEGSRKDKDNLGDPKGKADRNKNGPENSSEEKNENGSKADGGQVQKEDVNGGADGGNHNLVVSHETHTASELQAFAPTELMDEHQGMAVDAVLEPMVDNFMVSGTPEMET

SEQ ID NO: 198618 - protein, 70 aa, Zea mays
  Clone ID: MRT4577_112719C.1.pep
VPKLALNRHHKQNKHRLNGTLCSIKMACKRTNEHYQKTSASGNFSTWKMLRWACANLEKHLPDGVFFVGE

SEQ ID NO: 198619 - protein, 536 aa, Zea mays
  Clone ID: MRT4577_11271C.1.pep
MALGAAYHHYLQLAGDHGTATHALLLGVLIFLVIRLVSARRTGTTSANKRKQQQRLPLPPSPPGKLPIIGHLHLIGAETHISIRDLDAKHGRNGLLLLRIGAVPTLFVSSPSAADAVLRTQDHIFASRPPSMAAEIIRYGPSDVAFVPYGEYWRQGRKLLTTHMLSTKKVQSFRHGRQEEVRLVMDKIRAAATAAPPAAVDLSDLLSGYTNDVVCRAVLGASHRNQGRNRLFSELTEINVSLLGGFNLEDYFPPNMAMADVLLRLVSVKARRLNQRWNDVFDELIQEHVQSRPSGESEESEADFIHVLLSIQQEYGLTTDNLKAILVDMFEAGIETSYLTLEYGMAELINNRHVMEKLQTEVRTTMRSPDGKKLDMLAEEDLGSMPYLKATIKETLRLHPPAPFLLPHYSTADSEIDGYFVPAGTRVLVNAWALGRDRTTWEKPEEFMPERFVQEPGAVDVHMKGKDLRFIPFGSGRRICPGMNFGFATMEIMLANLMYHFDWEVPGSAAGVSMDESFGLTLRRKEKLLLVPRIAS

SEQ ID NO: 198620 - protein, 215 aa, Zea mays
  unsure (1)..(215): unsure at all Xaa locations
  Clone ID: MRT4577_112720C.1.pep
MRDCAESVVPPTKGISHMQRAIPNRRYDYEEVDGWRWTSTTLPRTMSKGTLLCAPILDKPXIFNIRMRPHSFSYTSGTXDLHMDSLSLRVXGRXDSQHLPDSFSSLGLNDDEKVLPSICNEGFKDVPSQXNADQXLVTKLYDVSAIVREWITKGAREFNIRLDDVAXITRLDYCEDNRRGRQEEIVVAKEVERLQLLLARYEXERSAAIMRNEGE

SEQ ID NO: 198621 - protein, 57 aa, Zea mays
  Clone ID: MRT4577_112721C.1.pep
LRTRVDPSDERLRSFEHYRRLKSSSLWLSRRTFEAKRLIAHFILTWYHESEETDCCA

SEQ ID NO: 198622 - protein, 316 aa, Zea mays
  unsure (1)..(316): unsure at all Xaa locations
  Clone ID: MRT4577_112722C.1.pep
NNGPSATADPLLGGLLSPDFDDRSCLSRYRASLYRQPSLHNLSSHLVSRLRRYESLHQLCGPGTPAYSRAVARLREAMDGHASSNSTSSSDTECSYIIWTPVEGLGNRILSTASAFLYALLTDRVLLVHHPADDLNDMFCEPFPGSNTTWVLPEEGFAIQGIKGLNVRTRESLGNAVGRGRDPPAPWLYVHLQTDYKPDDRRFFCDDGQETLRGVRWLVLRSDNYFVPGLFFLPRYEEELVRLFPRRDTVFHHLGRYLFHPSNTVWGMATRYYSSYLAPAEERVGVQVREFKYARISADDATXQIISCESRESLLP

SEQ ID NO: 198623 - protein, 66 aa, Zea mays
  Clone ID: MRT4577_112723C.1.pep
CTVLAEKSFLKSHRLFLALSCNNATDFDFLQSCVSVHHLCIGPVFTTLAHSSPPCSPGLLEFVTLI

SEQ ID NO: 198624 - protein, 442 aa, Zea mays
  Clone ID: MRT4577_112724C.1.pep
MAGPGPARTARSVALLCFLVSCAALVDSRGGASRPSRQDLDVGLGGGGVGIGIGIGGGSPSSPSPTPPSSQPQPCDFENERLYRAYLVIQQFRSTVTCDPMGVTQSWSGTDVCSYKGFFCERPPNVTDRAIASVDFNGYMLQAGSLRGFVDSLPDLALFHANSNDFGGAVPALGGLQYFYELDLSNNKLAPAAFPADVLGLTNATFVDIRFNSFYGELPAGVFCKLPRVQAIFVNNNRFSGALPDNIGQSPVNYLSLANNRFTGEIPRSIARNAGTLLEVLFLNNSLSGCLPHELGLLEKATVIDAGANRLTGTIPASFACLRKVEQLNLAGNLLYGEVPDALCRLAFSNLKNLTLSDNYFTSLGSCCWDLIKEGRLNVDRNCIQWAPNQRSHEDCAKFLRQPKSCPVNNYVPCRSKYQSSSEPADDAAAEYRYRTYSALHP

SEQ ID NO: 198625 - protein, 137 aa, Zea mays
  Clone ID: MRT4577_112725C.1.pep
AQAPVVLGVAPEKKPAPQFFKAPGEFRRGPPRLQFGWQLQVRPLQLLIPSIAAHGNDYYLSSLGGGLTKKKRGPAGSQTKVFFGVCEKKKTKVFPFAIPPRMFGASPLGSCTDVCPPPCWLTPLHLLDPKINWAPMK

SEQ ID NO: 198626 - protein, 93 aa, Zea mays
  Clone ID: MRT4577_112726C.1.pep
DILSFSARQRQSAPCLLLVVILEPSLLLEWDRRRAHDAPPQCFCRLRFRRCSPSRTSLRSRRQVVFICEPMSATCNECRILSLGLSRVAHLAR

SEQ ID NO: 198627 - protein, 57 aa, Zea mays
  unsure (1)..(57): unsure at all Xaa locations
  Clone ID: MRT4577_112727C.1.pep
AMSDYWVLVHGCTTHEWVCYRGASPCRQSTGLKMTTRGGVRSHVSAHAYAWVDPXIP

SEQ ID NO: 198628 - protein, 42 aa, Zea mays
  unsure (1)..(42): unsure at all Xaa locations
  Clone ID: MRT4577_112728C.1.pep
YLSNXXLFXXIXKLTLXMLSRDETMLFIFWVIYYXXDNXVQX

SEQ ID NO: 198629 - protein, 111 aa, Zea mays
  unsure (1)..(111): unsure at all Xaa locations
  Clone ID: MRT4577_112729C.1.pep
FSCRPTRTSVSTKSVHYRYGFTSCAFSIGLFKLHCRSTLSXITFCLSSCPLETDPHLNNITFLSKFNLSSFNNTRSHLQQVFYFFIPSFFYLLITPSIFNFPNFYLNILLP

SEQ ID NO: 198630 - protein, 73 aa, Zea mays
  Clone ID: MRT4577_11272C.1.pep
MESNGHISRGINRTKDSQGQKTQRGNGAQFNTGKSTNQSHQKILGTGKSDACIPSTIPDHRTPYVSKGGREKN

SEQ ID NO: 198631 - protein, 79 aa, Zea mays
  Clone ID: MRT4577_112730C.1.pep
DFPFEILRSHSAERPHTSLSDGAHEANGKEPKRVLGTGGSRMDTNVGAKVMDPVHRGMRRSTNRSSTLHMLAMRDAHVP

SEQ ID NO: 198632 - protein, 61 aa, Zea mays
  Clone ID: MRT4577_112731C.1.pep
QEHSVRNKTQLRYPFHNIYIAVRSPRPGDNHVKVSAHTWHETAVWHSLQTDVGSARNSIEA

SEQ ID NO: 198633 - protein, 90 aa, Zea mays
  Clone ID: MRT4577_112732C.1.pep
KGGPFQTSAVGRKGGEQERALIGLSQAIKRGSQAKRRKTGGPRLNLGTPKKDARRCHVFLFFLHSPLFFPLFFFFFFFFFFLMYNLRILL

SEQ ID NO: 198634 - protein, 34 aa, Zea mays
  Clone ID: MRT4577_112733C.1.pep
YTLVMHGSSRGVILCIHIRYRQGKAAWHTGYGMA

SEQ ID NO: 198635 - protein, 91 aa, Zea mays
  Clone ID: MRT4577_112734C.1.pep
LFQSTTQSDLFLSITTSTGGVSIITLGTFNTLNHTNAYITINYHHHQNILPTLNPFLFLQHHSLASNLLPVANLVSIYQQQQLSLILPAAI

SEQ ID NO: 198636 - protein, 75 aa, Zea mays
  unsure (1)..(75): unsure at all Xaa locations
  Clone ID: MRT4577_112735C.1.pep
PPPHVVIALSLSSSCAGAMSSAQSFKQDHIPELCLEVDSFSSQGSPKDLNLEPQVPPGXFGGDTGCVCVRXXNNT

SEQ ID NO: 198637 - protein, 239 aa, Zea mays
  Clone ID: MRT4577_112736C.1.pep
MAEPSRVIHIRNVGHEISETDLLQVVQPFGAVAKLVMLRTKNQALVQMEDLSASISAIQYYTTIQPSVRGRNVYLQYSSHQELTTDQSSHGRNPDQDEPNRILLVTVHHMLYPMTVEVLHQVFSPYGFVEKIVTFQKTAGFQALIQFQSRQSAIQAAGALHGRNIYDGCCQLDIQYSNLSELQVHYNNDRSRDFTNPSLPTEQRPRSSQLGYNDPSLFGFQQPGAAYGQAAVIAAAFGG

SEQ ID NO: 198638 - protein, 43 aa, Zea mays
  Clone ID: MRT4577_112737C.1.pep
ERKMLFFMWGNKIQPLGGYCGNLQTREVVLADMYVIDHFNIRA

SEQ ID NO: 198639 - protein, 133 aa, Zea mays
  Clone ID: MRT4577_112738C.1.pep
KPICSDAQARLVAREIILKLAIVNAPAAFAVSRPVSALNVRVGLRQLRVGVGSRSPQTSRTTIRPANMRETAKRRRAGTLCPPRISRRTTSGGCTGAHVRCRRGRGRWPLTVAAAVAVDCARTGCSRIMVSRP

SEQ ID NO: 198640 - protein, 146 aa, Zea mays
  unsure (1)..(146): unsure at all Xaa locations
  Clone ID: MRT4577_112739C.1.pep
KFVFGKKIGQVSIGGPGGVPFFCLRMFSLGAPSMAPADFLFPTVRELVDRAYSRSRQIIPGVPVFLPKGGAAFVPPXTVVGEEFFFLFINGQTNLFVSLGVSRLSGGLLFGVLGGSQQSFFYGEPRLLGPPQCLVVDTHEIKNLNK

SEQ ID NO: 198641 - protein, 40 aa, Zea mays
  Clone ID: MRT4577_11273C.1.pep
DPSSCHLFSSFERLDLCARGFLSLTALLERRLSFIAADNF

SEQ ID NO: 198642 - protein, 116 aa, Zea mays
  Clone ID: MRT4577_112740C.1.pep
MSLLLPDKFQHILRLANTNIEGKRKIMFALTSIKGVGRRFSNLICKKADIDLEKRAGELSEEEIERVMTILNNPRQYKIPDWFLNRQKDPKDGKYSQVYSNLLDNKFREDMERLKK

SEQ ID NO: 198643 - protein, 77 aa, Zea mays
  Clone ID: MRT4577_112741C.1.pep
SWLIFLEHHKKSPYQFYESAQSTSYKSSAFANQRQTSIPHPTLSVSRLLSSVSYSRVYTPRSYSSFLHRTGQERGLP

SEQ ID NO: 198644 - protein, 144 aa, Zea mays
  Clone ID: MRT4577_112742C.1.pep
PLPLRLDAPGRRREGARHERGVRDHREEEVQARAARHAACSILVLMLTHPFAFLYYYYYILWIRHSNNGDEMRWSRVRTGIATLLTRHDAVVAERSAANPISIHLFGRIRTAAAPGRHVWRSPADQDSGSTPAPDTSARSCPES

SEQ ID NO: 198645 - protein, 328 aa, Zea mays
  Clone ID: MRT4577_112743C.1.pep
MAMALLPLLLSVLIVSCVAQSPASSPSASNAPPVSASAPRGSVAPPTTAVSAPQGSVAAPTTAAASAPKASVAAPTTAASAPQASAAPPTTTAASAPTVSVAAPQASTKAALPPQAFAAAPTTSAAAPQASATAPPTGAAAPPTAAASPQLAATLPPVSSPPLAATPPVSATPPATLPPVASPTVAVAAPAPATPAPVASPPVAMPPAALAPATLPPVMAPTPLLAAPVMPPIAPPVTAPAPAPVSPAPSPSVAPTPSPTEAPTPSPTEAPTPSPTQAPTLAPLSSVSVSPSLAPGPALAQEDESAAPSSRTGVVAALVAAGLVVGLF

SEQ ID NO: 198646 - protein, 86 aa, Zea mays
  Clone ID: MRT4577_112744C.1.pep
GEAKKKRPFFFHTKKHGGFHFTQGAGGHFLIPFGVQKPHAVLKEFFFFLCEKKRRGKKTQFSDTIPFFFQTSRKGKETHPPPLVFF

SEQ ID NO: 198647 - protein, 309 aa, Zea mays
  Clone ID: MRT4577_112745C.1.pep
KYEGQPWVRGPAKEPVATTAASAPTVSVAAPQASAQPPAPVFASAPQASAAAPTKAASAPQVSAAAPATAALPPTTSASAPQASAAAPTKAALPPQAFAAAPTTSAAAPQASAAAPPTGAAAPPTAAASPQLAATLPPVSSPPLAATPPVSATPPATLPPVASPTVAVAAPAPATPAPVASPPVAMPPAALAPATLPPAMAPTPLLAAPVMPPIAPPVTAPAPAPVSPAPSPSVAPTPSPTEAPTPSPTEAPTPSPTQAPTLAPLSSVSVSPSLAPGPALAQEDESAAPSSRTGVVAALVAAGLVVGLF

SEQ ID NO: 198648 - protein, 75 aa, Zea mays
  Clone ID: MRT4577_112746C.1.pep
MGLCSCCCRCLELLCSVLLPPLGVCLRHGCCSMEFWISVLLTILGYLPGVLYAVYVICSVDPHRHRDNDDYVYVA

SEQ ID NO: 198649 - protein, 303 aa, Zea mays
  unsure (1)..(303): unsure at all Xaa locations
  Clone ID: MRT4577_112747C.1.pep
SGASSLELSHCTLLLRSESFCAEREREDKRKPKGEPSSGGSGWQWLCFRYCSRPSSSPASXSPASSPSASNAPPVTASAPRSSVAPXTTAVXAPQGSVAAPTTTAAXAPQASVAPPMTTAAXAPKASVAAPTTATSAPQASAAPPTTTAASAPTVSVAAPQASAQPPAPVFASAPQASAAAPTKAASAPQVSAAAPATAALPPTTSASAPQASAAAPTKAALPPQAFAAAPTTSAAAPQASAAAPPTGAVAPPTTVGCPELGATLAPDISTTLAVTPPVSGIPLVSLLMRGSLSGALLDARPY

SEQ ID NO: 198650 - protein, 122 aa, Zea mays
  Clone ID: MRT4577_112748C.1.pep
DPGHSLKNTVIYSCSACLRAPSPPARMGRRRTSPTRRCPSPCMRAACEDHAATRGPTPQRHLGSSAPRTQPPCPSAWHRLKTMSVVPGCSGKKYLDRTWITFSISLVSFCSLACCKCDGGSS

SEQ ID NO: 198651 - protein, 75 aa, Zea mays
  Clone ID: MRT4577_112749C.1.pep
MGLCSCCCRCLELLCSVLLPPLGVCLRHGCCSMEFWISVLLTILGYLPGVLYAVYVICSVDPHRHRDDDDYVYVA

SEQ ID NO: 198652 - protein, 122 aa, Zea mays
  Clone ID: MRT4577_11274C.1.pep
GWEGPCGHEEFLPLAFLLPATSTFEGCVCLIKGWRPLHRRLSDTRIIKGFGPPPRYWSPHPPGIVIGHNLVWHQPALLWAGSLFFTRVGGRKLYFFFPPVPVCTETSEKFASIVGSFSYSPV

SEQ ID NO: 198653 - protein, 174 aa, Zea mays
  unsure (1)..(174): unsure at all Xaa locations
  Clone ID: MRT4577_112750C.1.pep
TLGPAGSGYCTRVYCTLLFRSESFCAEREREDKRKPKGEPSLGGSGWQWLCFRYCSRSSSSPASRSXASSPSASNAPAVSASVSAXSVAPPTTAVSAPQGSVAAPTTAAASAPKASVAAPTTAASAPQASAAPPTTTAASAPTVSVAAPXASAQPPAPVFASAPQASGAAPTKA

SEQ ID NO: 198654 - protein, 62 aa, Zea mays
  Clone ID: MRT4577_112751C.1.pep
ARSKYCDPIASTIGGAMNLTSNTPVGTVEIWPGIAGVLSPLVFSCNHGKSFPPFPRGQICRV

SEQ ID NO: 198655 - protein, 46 aa, Zea mays
  Clone ID: MRT4577_112752C.1.pep
LPIGLTFCTINPGIFWPTLLYTPFTVVVATNGNDLGYDQRPVYTPL

SEQ ID NO: 198656 - protein, 71 aa, Zea mays
  Clone ID: MRT4577_112753C.1.pep
WLGLDHDLSYCISLVAHPEKIGTNHVGGGVRIRLQLRWRRRRRINSGFGGENGAMGTFCLKLVPDRLEVPS

SEQ ID NO: 198657 - protein, 421 aa, Zea mays
  unsure (1)..(421): unsure at all Xaa locations
  Clone ID: MRT4577_112754C.1.pep
TPSTQGLLLQXFVHPSFNKHSVRCYQXMEFLGDAVLEYLMTSYLSHASADLKPGQLTDLKSLAVNNNSFAYVAVKKSIHRYLIKDSNYLTTAVNKFANYVNLSSSEKDLLEEPTCPKVLGDIVESCVGAVLLDSGFNLNHVWKLMLMLLKPILSFCGMHIDPMRELRETCQYNGFDLGLPEPTKYNGEFHVKVEVNINGKMISCTAANRNSKDARKVAAQETLSKLKNYGYKHKRKSLEEILRSTTKKESELIGYDEEPINVEDDIDMQMNNLLINGERTSIQSTAGDNKVDKNDANSGRNNKSNVVMQNGCLPRGATDKINQKEYHGDMVRKTARSFLYELCAANYWKPPEFELCNDEGPSHLRKFTCKVLIEITGTSVSLLECYSDPKLQKRAAQEHAAEGALWYLKHLGYLPRDENRF

SEQ ID NO: 198658 - protein, 159 aa, Zea mays
  Clone ID: MRT4577_112755C.1.pep
QGTTVGDMPQRLRVALSLIASGTTVSFVRRTVRNDPLPGSLARQIPRTRFFVTHGGCRWSRPRRAHGARCPRVWGFRPGLHGGTLIRVRVHSRRGRGPSYRLRRPWAPPSGLARRARGLCGCSKWTSRCCSNAPKNTDNEWGSQKNNKTSNNKRKDARI

SEQ ID NO: 198659 - protein, 60 aa, Zea mays
  Clone ID: MRT4577_112756C.1.pep
GQVSHVEKVPLGAPPACQFALSRGASGFTLYASGFFFVWTFWRVTFPLIERALFMITGGP

SEQ ID NO: 198660 - protein, 55 aa, Zea mays
  Clone ID: MRT4577_112757C.1.pep
LPELEGIRTLSFQRICRHFIYEITDCPPLSQDERWPLTRDQDEYTCADRFKRQRC

SEQ ID NO: 198661 - protein, 60 aa, Zea mays
  Clone ID: MRT4577_112758C.1.pep
WTPIEWCRVITLAHSSPRPKRAPARPVHRAACPLHTTPPHAALPLHRLYSADHRALLDRA

SEQ ID NO: 198662 - protein, 505 aa, Zea mays
  Clone ID: MRT4577_112759C.1.pep
MYRVASGLGALKRHGANAQMMNAAIRCASTSVAQRSSGGFWTWLTGARSNEIPPPDFTLPGVTIPPPLPDHVEAGKTRVTTLPNGVKIASETSAGSSCSVGVYVDCGSVYEAPETTGASQLLKTMAFTTTANRSELRVVREIEAIGGSAKASASREMMSYTYGALKTYMPEMVEVLIDCVRNPAFLDWEVKEQILRLQAELAKSSSYPENFLLEALHSTGYSGALANPLIVPEYSVSRLNADVLEQFITENYTASRIVLAASGVDHDELVSIAEPLLSDIPSVSGTTRPKSTYIGGEYRRSADSSNTDVALAFEVPSGWLKEKDCVTVSVLQALLGGGGKFSWGRQGKGLHSRLKRLVNEFDQIKSISAFKDVHSNTGIFGIHTSTDASFVPKAIDLAARELTSLATPGQVDQSQLDRAKASAKSAILANLESQASLTEDMGRQVLAFGERKPAEHLLKAIDGVTMKDITSVAEKIISSPLTMASHGNVLNMPTYESVSGKFRSK

SEQ ID NO: 198663 - protein, 57 aa, Zea mays
  Clone ID: MRT4577_11275C.1.pep
LLQVTGSGNCPGSTARRPSSRSAERASSREIPELIVQRSIAISHMLSSIGVILIFIF

SEQ ID NO: 198664 - protein, 68 aa, Zea mays
  Clone ID: MRT4577_112760C.1.pep
YLFYFNYFLPNHNNKHFYYISNSHNYPFPLIKTPITHLTKRTLSFYTIFLTTQFPFQIPTSFFKNSPN

SEQ ID NO: 198665 - protein, 79 aa, Zea mays
  Clone ID: MRT4577_112761C.1.pep
IKMTPPTGGRPSAGDHAHHKQPLFGHYKYPQERKRQQRKEEPELPCVGYHHKLLWFAPQSVNKMGSALRAFQTIYLRGL

SEQ ID NO: 198666 - protein, 190 aa, Zea mays
  Clone ID: MRT4577_112762C.1.pep
PAQFSRSRRHRTSTNPHLRCPRGSSSDVPHPRLLAATDLALPTVFVQRRVPFRSLLPHRLVAAGSSSRDAATPDASTSTVELTTPVHADTVHDGGAVARRLQPPTSSAPPTDRQCSSTGHGRWLHTLVRIPPGFVLCALARGLRDELVISVIRHDEIKANKGPPVLLLCERSCVHGLFFRFNIFYLLLSF

SEQ ID NO: 198667 - protein, 63 aa, Zea mays
  Clone ID: MRT4577_112763C.1.pep
ACLAGCRGRHTSISTFLSRSSASYRPGLIYSDITKPILKTLRYISTIMDSKEAEMRIAFTTDV

SEQ ID NO: 198668 - protein, 96 aa, Zea mays
  unsure (1)..(96): unsure at all Xaa locations
  Clone ID: MRT4577_112764C.1.pep
ARAGLASCAPLPVGPVACAPGFGAVSPVAGGLALPAVAWAVPPPVVLCRCLCAPLFSRALFVFXPRRPGPWFVVVALCSCVGLCAXSVLXPPPPPP

SEQ ID NO: 198669 - protein, 67 aa, Zea mays
  Clone ID: MRT4577_112765C.1.pep
PPPKRFRPRGPSFGGGAKNGGDLFKTPFFSPCIAPDLELGPLLLENFVICGAGAPLYEPVRVTPCLC

SEQ ID NO: 198670 - protein, 84 aa, Zea mays
  Clone ID: MRT4577_112766C.1.pep
CDSFHSDWLNKNHFLQNSTATVTYQTHYTIDLAVGVGAGILFDTLSGWYFHAKNAPEEALPQLPVPQGSPFTLAHRCGVFGKLL

SEQ ID NO: 198671 - protein, 140 aa, Zea mays
  unsure (1)..(140): unsure at all Xaa locations
  Clone ID: MRT4577_112767C.1.pep
FKVLLRRGPTLGDFLPQKKLXKFMARCNYSPPQRLPKKPLXKGKIQAGNIGPQLLFKIGWKESQGFWNQKKGPANPLMAGNVKKDPFGVGAVPPGEVXPFKMAFFSHXKRVMLGFPYRPNPFNHPRKSFFLFGGVCFRGD

SEQ ID NO: 198672 - protein, 211 aa, Zea mays
  unsure (1)..(211): unsure at all Xaa locations
  Clone ID: MRT4577_112768C.1.pep
RARPRNGCTCCITRRNPRHRRXMWTPRAGPGPSAAQDSMPSREERHAAEHRGTGTGXPGNRSNTRLPVPRAIQSGRPRCSWKRHRGRTRRSRAPPRTGSSSSRSRTSRSAAGSSRRXEGGQRDADXSPRSSASTRPSPRPRPXRSRRRPWSASSRARAAXSGWKKDCRRELPGAXRPRRSATRSLRSARRCSRWSPGSRRRWRSLTDGGTW

SEQ ID NO: 198673 - protein, 72 aa, Zea mays
  Clone ID: MRT4577_112769C.1.pep
VGQPRSLGSVDRLPPPCYILHQLQTPVVFVSSRCVSGWVSCPLLYPSLNEMTHSSHVPFKLKDKKISEIFLN

SEQ ID NO: 198674 - protein, 75 aa, Zea mays
  Clone ID: MRT4577_11276C.1.pep
LQAGEMDRLQQRNITKGETEMEEARKDEERKKEAWDSITQEPQQGQGLSLSFANGIDTARLQCCRCGTLQLIPHS

SEQ ID NO: 198675 - protein, 63 aa, Zea mays
  Clone ID: MRT4577_112770C.1.pep
YIHLWSSKFSDCFVHHFTPCCIVFIQIIFLHLHFSVCIAIALQHFLVMLEQILLEFKMSKEAK

SEQ ID NO: 198676 - protein, 88 aa, Zea mays
  unsure (1)..(88): unsure at all Xaa locations
  Clone ID: MRT4577_112771C.1.pep
EWIQDEEDLIIHLHPMMGNKWAHIARHVPGRTDNEVKXNFWNCATKRTSVMIGSGLSPNTLLRVDYNGIQRRPGMFNHCELIHVVLSS

SEQ ID NO: 198677 - protein, 74 aa, Zea mays
  Clone ID: MRT4577_112772C.1.pep
LGNPLFWAGFQIMQGTGGGHNAGPPTKRAKHTRGPLRVTTNRGIPPGLCPMHMAWTYGFIGKQPTGWSQGINSP

SEQ ID NO: 198678 - protein, 319 aa, Zea mays
  Clone ID: MRT4577_112773C.1.pep
MPAFKAPAPGFAVRFSPFHENRLLAATSQHFGLVGNGHLIVLDLAGGGPGAAPAPVFSFPTSDALFDCAWSESHDSLCAAASGDGSVRLFDAALPPAQNPVRLLREHAREVHGLDWNPVRRDAFISASWDDTLKLWSPDRPASVRTFRGHEYCVYAAAWSARHPDVFASASGDRTARVWDVRDPAPTLILPAHDHEVLSLDWDKYDPSILATASVDKSIRVWDVRAPRAPIAQLAGHGYAVKRVRFSPHRQGMLMSCSYDMTVCMWDYRAEDALLARYNHHTEFVAGIDMSVLVDGLLASTGWDEMVYIWPFGTDPRAM

SEQ ID NO: 198679 - protein, 54 aa, Zea mays
  Clone ID: MRT4577_112774C.1.pep
SDRQQSRPSPLCRPRVSIATHLSKCSEGYHSAKAPTVATAFRPSAAKCTIARRL

SEQ ID NO: 198680 - protein, 120 aa, Zea mays
  Clone ID: MRT4577_112775C.1.pep
RLGPSDYFGEIALLLNRPRAATVVARGPLKCVKLDRPRFERVLGPCSEILKRNIQRYNSLISLAAGAQLPPCSPSSPVWWPCPARLCRGPGSRCVRCGPGGAGSRQREDCPFPGLTFWNK

SEQ ID NO: 198681 - protein, 124 aa, Zea mays
  Clone ID: MRT4577_112776C.1.pep
MISVFQAPSGTNKDQSVQGSVEPDPFDSSTKGAEKPQSSSSSLIFLGTGCSGSLPDTRCLLKPSTPPCGVCSMGVSLPTERNPNYRLNTCLLIDYCHDETHTCILIDIGKTFREQVLRWVVHDK

SEQ ID NO: 198682 - protein, 61 aa, Zea mays
  Clone ID: MRT4577_112777C.1.pep
GVACLASQTFFLSGRIPLAFYTFLVALIHKQDKWVSCRGWCFSIFGITIFTVVQSFFLLGV

SEQ ID NO: 198683 - protein, 37 aa, Zea mays
  Clone ID: MRT4577_112778C.1.pep
YVLVGKKKKKKKKKKKKKKKKKKKKKKKKKKKKKKKN

SEQ ID NO: 198684 - protein, 57 aa, Zea mays
  Clone ID: MRT4577_112779C.1.pep
TPFLWANPYELGSMHRFTGTNSPFRDLIVPGEKKIPLKQLVPRVPHTPGGTRAMQSE

SEQ ID NO: 198685 - protein, 83 aa, Zea mays
  unsure (1)..(83): unsure at all Xaa locations
  Clone ID: MRT4577_11277C.1.pep
HDVDDEXKNXLLSEHSEKLALAYGLLTTSPGCPIRITKNLRVCGDCHSAFTYISKIVDHEIIVRDSSRFHHFKNGSCSCGGYW

SEQ ID NO: 198686 - protein, 81 aa, Zea mays
  Clone ID: MRT4577_112780C.1.pep
PAGPSSLPYKPHFPFPPLQRHWHQTRLFQESLAPGWRRAEEGAAIVYLKALPAELHPEHFVPFHLRIRGRREWLSGDLGIV

SEQ ID NO: 198687 - protein, 66 aa, Zea mays
  Clone ID: MRT4577_112781C.1.pep
KTKQTPPYLHALTLALHLDWEAKILEHPDLASPSRGDNHQAPRRPGLDIHSSNAKIGGTVTRAALG

SEQ ID NO: 198688 - protein, 201 aa, Zea mays
  unsure (1)..(201): unsure at all Xaa locations
  Clone ID: MRT4577_112782C.1.pep
MARKKIREYDSKRLLKEHLKRPAGIDLHILSAQVTQSTDFAELVNQHPWLSTTKLVVKPDMLFGKRGKSGLVALNLDVAQVKEFVKERLGVEVEMGGCKAPITTFIVEPFVPHDQEYYLSVVSERLGSTISFSECGGIEIEENWDKVKTVSLPTEKPMTPDACAPLIATLPLEARGKIGDFIXGVFAVFQDLDFSFIEMNP

SEQ ID NO: 198689 - protein, 459 aa, Zea mays
  unsure (1)..(459): unsure at all Xaa locations
  Clone ID: MRT4577_112783C.1.pep
LATPREVAPPTSGGGGRPRRRSXTWQRVRRAGQGVAAHALLLCFTALLALKLDGVLSLSWWALFIPVWLFHAVAARCLFSLPAPSPESCQRVPFHSIVATPLLVAFELLLCVYLEGLNHNGHVEPFIIDLKLVFLPLLALEIITLVDNFRMCGALMPGHGETITEEAIWERLPYFWVAISMVFLLAATSLMLLKLCGDAVTLGWWDLFINFGISQCFAFLVCIRWSNPMVIGGPVLIIPIVVFQVLLCMRLEGTPSNARFIPIRAIFLPIILLQVAAVSFAVWRLFSRLLTKLKDGTISQAHISVSSKVDELFMMIQCGSRLLHWWSIDEDSKEEQAHLCYANNIGYSTFCSYPPEVVKEMPMQVLAKEVQRLQLALEEQTEMANHSQQQCDRLRNERILCRICFERDICIVMLPCRHHVLCEPCSNKCQSCPICRLTVEGRLFVYDAVMSSNPSCYAV

SEQ ID NO: 198690 - protein, 524 aa, Zea mays
  unsure (1)..(524): unsure at all Xaa locations
  Clone ID: MRT4577_112784C.1.pep
RDLELVEKEREARRLSSATDDSLDGSGSRNVGRVRVRQYGKTCKELTGLFMTQELAAHSGSVWCINFSLDGRYLATAGEDRVIHVWEVSEGDRKGELLGECSLAKVEXGGCSPFLTVLGNDSPEIAALSFTCADMDKKRRLRKQSNRKSVGSDHLVVPECVFGFRDKPVCSLLGHAADVLDLSWSKSQYLISSSMDKTVKLWDITTSTCLKTFSHTDYVTCIQFNPVDDNFFISGSLDEKVRIWNVRDRKIEDWNDLHEMVTAACYSPDGQVAMVGSHKGSCHIFDTSEKLQYKSQIDLRIRKKKSGQKKITGFQFAPGSSSEVLITSADSRIRVVNGDEFVHKFKGFRNTSSQISASVAQNGKYVICASEDSHVYVWRHDNSSHPSRNRITVDVTNSYEHFHCHGVTVAVTWPGAEARGSFGSRSSRHSDSDGAVNSGRDIPAENSQHNSDAGTSRHPGDRASTSWPDEKLPSAKSSPGHCSSDLCIGAMDVQRRSAWGLVIVTAGRGGEIRVFQNFGFPVQV

SEQ ID NO: 198691 - protein, 127 aa, Zea mays
  Clone ID: MRT4577_112785C.1.pep
GPPSPRGGVYQPNKDPQPCPFSLEKGAAPSRGRPQSQKKGDSTRDNPCQLNRPGFGWKGSRVWKTQGAPCHRDRGDISADPRRAFGPCRGRANGNPYRNRYQRGTPRSCLPPPGAPGPPLAPKIDQG

SEQ ID NO: 198692 - protein, 94 aa, Zea mays
  Clone ID: MRT4577_112786C.1.pep
YHYLPKLLHTKSHNNLPMPYILPENHTYLTSPYKLRNQPIMAPSVYILLQRDTESNTTVTSVFLDLQDANAALLHTAQEAGVDPASAKPADGDV

SEQ ID NO: 198693 - protein, 189 aa, Zea mays
  unsure (1)..(189): unsure at all Xaa locations
  Clone ID: MRT4577_112787C.1.pep
MPPKLLPSQVVEVFVRVTGGEVGAASSLAPKIGPLGLSPKKIGEDIAKETAKDWKGLRVTVKLTVQNRQAKVSVVPSAAALVIKALKEPERDRKKVKXIKHSGNIGLDDVVEIARTLRNRSMAKELAGTVKEILGTCVSVGCTVDGKDPKDLQQEIDDGEVEIPSACSFCSVSIIATKYAMDRCATTVL

SEQ ID NO: 198694 - protein, 166 aa, Zea mays
  Clone ID: MRT4577_112788C.1.pep
MPPKLDPSQVVEVFVRVTGGEVGAASSLAPKIGPLGLSPKKIGEDIAKETAKDWKGLRVTVKLTVQNRQAKVSVVPSAAALVIKALKEPERDRKKVKNIKHSGNIGLDDVVEIARTMRNRSMAKELAGTVKEILGTCVSVGCTVDGKDPKDLQQEIDDGEVEIPSA

SEQ ID NO: 198695 - protein, 166 aa, Zea mays
  Clone ID: MRT4577_112789C.1.pep
MPPKLDPSQVVEVFVRVTGGEVGAASSLAPKIGPLGLSPKKIGEDIAKETAKDWKGLRVTVKLTVQNRQAKVSVVPSAAALVIKALKEPERDRKKVKNIKHSGNISLDDVVEIARTMRNRSMAKELAGTVKEILGTCVSVGCTVDGKDPKDLQQEIDDGEVEIPSA

SEQ ID NO: 198696 - protein, 81 aa, Zea mays
  Clone ID: MRT4577_11278C.1.pep
SRRSVSASCSPSPSQCSSQSAASTCPPAFSVGYNHIRAGPFCSIMLCLRSAIYLYRWHGLTHMQYAHACLCICLCYIWMYI

SEQ ID NO: 198697 - protein, 166 aa, Zea mays; identical to SEQ ID NO: 198694
  Clone ID: MRT4577_112790C.1.pep

SEQ ID NO: 198698 - protein, 54 aa, Zea mays
  Clone ID: MRT4577_112791C.1.pep
TLNACNHSLLDLLALFLAPIRSSASHKYTKFLTLILIINNTLQNATELLYKKYL

SEQ ID NO: 198699 - protein, 166 aa, Zea mays; identical to SEQ ID NO: 198694
  Clone ID: MRT4577_112792C.1.pep

SEQ ID NO: 198700 - protein, 166 aa, Zea mays; identical to SEQ ID NO: 198694
  Clone ID: MRT4577_112793C.1.pep

SEQ ID NO: 198701 - protein, 166 aa, Zea mays; identical to SEQ ID NO: 198695
  Clone ID: MRT4577_112794C.1.pep

SEQ ID NO: 198702 - protein, 141 aa, Zea mays
  unsure (1)..(141): unsure at all Xaa locations
  Clone ID: MRT4577_112795C.1.pep
APCPFFFFSSPGCICSMCLLRLVIFGSVFLSAFSPFFCRPTLVISRARFLSAVHPVCRCVPHSFPLPYLCAPGVIRQPVTGRIACAVKQIFVCVLSLVASAPHXVFLSSPRVSPGCVSSFASVFFLCFSWRLVXSLKKNKN

SEQ ID NO: 198703 - protein, 254 aa, Zea mays
  unsure (1)..(254): unsure at all Xaa locations
  Clone ID: MRT4577_112796C.1.pep
ITIGGRSSVGKNCCAXEAALCARCDVEGDAANKLASKHQRLPLEALSAKLPRCDVCQEKAAFIFCVEDRALFCRDCDEPIHVPGTLSGNHQRYLATGIRVGLASASACSDACDAHDSDHHAPPKATIEPPHAAVSAAVQQVPSPPQFLPQGWAVDELLQFSDYESSDKLHKEPTLGFKELEWFADIDLFHEQAPKASRTLAEVPELFGYQAANDAAYYRPAKAAGGGGAGVRQSKKARIEVTDDEDYLIVPDLG

SEQ ID NO: 198704 - protein, 162 aa, Zea mays
  Clone ID: MRT4577_112797C.1.pep
RKMYDLGARRVLVTGTGPMGCVPAELAQRSRNGECATELQRAASLFNPQLIQMITDLNNEVGSSAFIAANTQQMHMDFISDPQAYGFVTSKVACCGQGPYNGIGLCTPLSNLCPNRDLFAFWDPFHPSEKASRIIAQQILNGSPEYMHPMNLSTILTVDSMT

SEQ ID NO: 198705 - protein, 40 aa, Zea mays
  Clone ID: MRT4577_112798C.1.pep
HASALPPFFFFFVFFFFTNKLDREEHLYTAFQYFDKDNSG

SEQ ID NO: 198706 - protein, 198 aa, Zea mays
  unsure (1)..(198): unsure at all Xaa locations
  Clone ID: MRT4577_112799C.1.pep
ERAFHLLCCNPRVKKIPDEEWYCLACKRKKPKRQRGKXQIPKLNHPRAFKDPAEVLVLFEIXLDSESYESGVRIGTKFQAEVPKWSGPISSREDEFAEPTELDRSKTTMLSFEDKKTSIGNWIQCREVLDTGVVCGKWRRAPLFVVQSSDWDCSCSVVWDPIHADCAVPQELETVKVHEQLKYINKLKNRLGDSNQKR

SEQ ID NO: 198707 - protein, 172 aa, Zea mays
  unsure (1)..(172): unsure at all Xaa locations
  Clone ID: MRT4577_11279C.1.pep
MEQSGGVGGHRLYNPRTDASDPLGAAGVHSSVYASLRLTSPRDIMGFSDFPFFPRSNDDGDSRRYPGHAEFLRYIRDYCDTFGLMDAVRLNTKVLHVGRPLLDDDGVVTRWTVRYCSSGHGVSEHEAVAEEEFDAVVVXSGHYSQPRLPAINGMDKWTRRQLHSHSYXXPRL

SEQ ID NO: 198708 - protein, 40 aa, Zea mays
  Clone ID: MRT4577_1127C.1.pep
RFGERVRVALPFSGRANVPRPALIPVPVLGCVSASHFQVV

SEQ ID NO: 198709 - protein, 64 aa, Zea mays
  Clone ID: MRT4577_112800C.1.pep
NRDVLGVTISWSQLPQEGSGLLAYNSRVHFYMYQALSALDHVSSTSVALEPDFISGSARQVRLS

SEQ ID NO: 198710 - protein, 139 aa, Zea mays
  unsure (1)..(139): unsure at all Xaa locations
  Clone ID: MRT4577_112801C.1.pep
MMMPGRKPPMTKMPEGERQKHMRRKGRLKXPITIASMRPPRKMPNMVEPMKTPRMKPETTTQRMMPPIKRPSKIPPEMRPSMEASTIMPNMMTEPQCDSDSTXHIIQQQQGQFMNNPTDMAXISPTCSQQTFVSAAVQI

SEQ ID NO: 198711 - protein, 192 aa, Zea mays
  Clone ID: MRT4577_112802C.1.pep
MSKYGTIPTTSSTPAPEGSSQLDFISRAKARGASALATRRPWRELADPRALSVPRGFSDAYRRARANLAHFAANYALVVLLVVFVSLLWRPVSMLVFLACFAAWLVLYFLRDRDVDGTLVICGRGVGDGVVVAVLSAVTLALLLLTGATGFILTSLLVGLLLVLLHALLHRPADSIDDEAGRWYTPVPPSNY

SEQ ID NO: 198712 - protein, 145 aa, Zea mays
  unsure (1)..(145): unsure at all Xaa locations
  Clone ID: MRT4577_112803C.1.pep
GAQKKRAQQKQXQIGEKTLGENFQQHRFFPFNQLGAIKTAAYWQHQXPISQVVAAHPQQFFPFNQLGALDSAAYLQQQQLLPFSQLGDVSPAAFLTQQQLLPFHPHAKPNAGTLLQLQQLVPFNQLALTNPTVFYQQPIIGGAPF

SEQ ID NO: 198713 - protein, 123 aa, Zea mays
  Clone ID: MRT4577_112804C.1.pep
AGFGRGALSLPSQLKVDNFSYCFTDITRPEPSSILLGLPANLYGDAGGVVQSTPLVQNFSSLELYYLSLKGITVGSTRLPIPESTFALKQDGTGGTIIDSGTGMTMLPQDVYKLVHDAFTAQV

SEQ ID NO: 198714 - protein, 54 aa, Zea mays
  Clone ID: MRT4577_112805C.1.pep
VFVSLLNISVRPNCFGPIGGYIRMYLRAVPKKKKDGRPPVVSFVPPIIQSRGAL

SEQ ID NO: 198715 - protein, 172 aa, Zea mays
  unsure (1)..(172): unsure at all Xaa locations
  Clone ID: MRT4577_112806C.1.pep
PALTDNMSLQKAQVYEQSLIQSNGTKAGESAHFMQIYRSREVGQSYVTSIATTLLATLHAMWLVIRIRPXWCVPSSGMVAICSLSSDTDVXILQIFCNGPGTCFPLCISAFVLKVLGLGWSSIFYIESIARVKKLSLSGLLLYKLRIADQFFVQWPQLQHEYPRACYAGRLM

SEQ ID NO: 198716 - protein, 89 aa, Zea mays
  Clone ID: MRT4577_112807C.1.pep
LASLGLVACALLVCALLAEPNGRIAEEQGRRRLGVASPSWSAGPRARPRETCVGERRMWRRRQRRRDREGLRPCVGDSWSWIGIAARPA

SEQ ID NO: 198717 - protein, 79 aa, Zea mays
  Clone ID: MRT4577_112808C.1.pep
GHPVQLGPYNPSFQDKSVLWPENRALGPGFPWVGMVKKISLNFDPFPGAKAPGGGAGGPNFVFWNGCEGTTQPWKIVPW

SEQ ID NO: 198718 - protein, 52 aa, Zea mays
  Clone ID: MRT4577_112809C.1.pep
PQTDHCSQRTMKLTKLLNHTYLSKCLTTFYTSFYELGHFVKMKKNRAGGTFN

SEQ ID NO: 198719 - protein, 224 aa, Zea mays
  unsure (1)..(224): unsure at all Xaa locations
  Clone ID: MRT4577_11280C.1.pep
PANRRRSPQAMKRFFQPVPKDGSPSKKRLAGAAEPGDGPTSAGAATGAGGDVEGRPTEEPFKFLTWNANSLLLRMKSDWPAFSQLVAXIDPDVICVQEVRMPAAGSKGAPKNPSELKDDTSSSRDEKQVVLRALSASPFKDYRVWWSLSDSKYAGTAMFIKKKFEPKKVSFNLDRTSSKHEXDGRVIIAEFESFLLLNTYSPNNGWYYYDPSRLTVPVVRAGIA

SEQ ID NO: 198720 - protein, 131 aa, Zea mays
  unsure (1)..(131): unsure at all Xaa locations
  Clone ID: MRT4577_112810C.1.pep
YGCALETEAASISKLSIASSRERSCDHALTTTFTKNKQNRVHVRALHARVCKDLLHPPGHFNAFVLHQHRMLFNKYHLGLFGXVGMHYFHILRNRFYWPMLSIDELWSILPHXVKDKDTGCKVPLLDVTQV

SEQ ID NO: 198721 - protein, 54 aa, Zea mays
  unsure (1)..(54): unsure at all Xaa locations
  Clone ID: MRT4577_112811C.1.pep
ISRGATPRRSAIKKKKKTKKTKKKKKKKKKKKKKKKKKKTRPSKKEXKNNRHKH

SEQ ID NO: 198722 - protein, 155 aa, Zea mays
  Clone ID: MRT4577_112812C.1.pep
FQNRRCREKQRKESSRLQAVNRKLTAMNKLLMEENDRLQKQVSQLVYENGYYRQQTQSAGLATTDTSCESVVTSGPQNVAAVLPQAQPRDAGPAGLMSIAEETLTEFLSKATGTAVEWVQMPGMKPGPDSIGIIAISHGCPGVAARACGLVGMEP

SEQ ID NO: 198723 - protein, 83 aa, Zea mays
  Clone ID: MRT4577_112813C.1.pep
FSLPAVRPVALVVWLPVCSWFGPVLSLWRSSGSPLFRWLCFLLCLLGSVRVDVRNGPPVAAGVGGWIKTWVGPAVPAGPVPAG

SEQ ID NO: 198724 - protein, 67 aa, Zea mays
  Clone ID: MRT4577_112814C.1.pep
VVMIISSKFDCLPNSSDNSGKKFLTVHSFSETTQNIVVTGSAKASSPHFRFVGRSPVHHQKPRYLSA

SEQ ID NO: 198725 - protein, 94 aa, Zea mays
  Clone ID: MRT4577_112815C.1.pep
GNRSHLKELLEWNCPGAKNPKVCFSLFLTKEMWKRWAQSLFWPWEFKQKGKRGPPQENKGDCNKLYVVQRGGGIKIPHLVFGEGNLVFLTKVGL

SEQ ID NO: 198726 - protein, 76 aa, Zea mays
  Clone ID: MRT4577_112816C.1.pep
ISSSLRHTVPLFNPKAVSDLREKIHVSIHAQTRATIMATGPQLQCHGLIIGTVCMKCLNTVYFYSIPFGCRYWAQN

SEQ ID NO: 198727 - protein, 122 aa, Zea mays
  Clone ID: MRT4577_112817C.1.pep
GGACGDPDQLQCPPERLPAMTPRQDLPPDAPRTADKDCPSSHSMDRERHNGCYCTSPNFTESISLTDTRTTSLYDQRLYNGLHHSMRAIHLLCRRSLQKSIKAIWLDNNATICCSPNKCDKT

SEQ ID NO: 198728 - protein, 85 aa, Zea mays
  Clone ID: MRT4577_112818C.1.pep
LNLAPPPLFCLVTMLCSCQIMAGRFTSGFGRLDFLALWSVLPCLAGSSFPLVRGVVRHPPFVGFNVWGWGLRFWLNPPPPSYCLF

SEQ ID NO: 198729 - protein, 221 aa, Zea mays
  Clone ID: MRT4577_112819C.1.pep
MALLPQILHSPHPALAAAASPSRAFCRAPRHLHVSASRGRGRGRLATAAGASGPGPSSPEPSPPESDDGLVELPLFPLPLVLFPDATHALHIFEYRYRIMMHTVLQTDLRFGIVFAGNSGSAAEVGCVGEVVKHERLADDRFFLICKGQQRFRVARIVRTKPYLVAAVQWLQDRPPAEPPAPGEDAEALAADVEALMRDVIRIANRLNGKPEKEVGDLPRG

SEQ ID NO: 198730 - protein, 97 aa, Zea mays
  unsure (1)..(97): unsure at all Xaa locations
  Clone ID: MRT4577_11281C.1.pep
RPXRLVTADNINSAYAIARQXRVLDKDRVXIEGPNFXREKPSVNSIELLPKLQGMAPSXALDEHALSKHLRTTFNDVAADTGDGTNDASALYKTYIE

SEQ ID NO: 198731 - protein, 195 aa, Zea mays
  unsure (1)..(195): unsure at all Xaa locations
  Clone ID: MRT4577_112820C.1.pep
AQRFCSQISRLELPLDGGGERLLVSSIQSKKLQVNAEESSDDLANPPKVEEKLGAVPHGLSTDSEVAQREAESISRKTLRSSAEKFEFQAEVSRLMDIIINSLYSNKDIFLRELISNASDXLDKIRFLSLTDKEVLGEGDTAKLEIQIKLDKEKKILSIRDRGIGMTKEDLIKNLGTIAKSGTSGTGAARVSCRS

SEQ ID NO: 198732 - protein, 101 aa, Zea mays
  Clone ID: MRT4577_112821C.1.pep
NIKASPCMKIMVLLHAAHGMEIWLKLLDQSCRRQKYMCLCFPVLSMRTNHVEELWCCQLFMQLTAFHIYIYIYYIYTYIILQVSLLRTLRSLKHRLAAGEC

SEQ ID NO: 198733 - protein, 78 aa, Zea mays
  Clone ID: MRT4577_112822C.1.pep
TSWCGIARNSRTCCGASTYPTTSSSTQHHNKQVTCQGAASIDRICPTSDPIKLTPPRECCTTRKATRCIFCRRNLCSA

SEQ ID NO: 198734 - protein, 177 aa, Zea mays
  unsure (1)..(177): unsure at all Xaa locations
  Clone ID: MRT4577_112823C.1.pep
MLLSSAVLQPTKKLQVNAEESSDDLANPPKVEEKLGAVPHGLSTDSEVAQREAESISRKTLRSSAEKFEFQAEVSRLMDIIINSLYSNKDIFLRELISNASDXLDKIRFLSLTDKEVLGEGDTAKLEIQIKLDKEKKILSIRDRGIGMTKEDLIKNLGTIAKSGTSGTGAARVSCRS

SEQ ID NO: 198735 - protein, 53 aa, Zea mays
  Clone ID: MRT4577_112824C.1.pep
VVVASLSRCALSFFPSLVGSLAVCLFFRACSLSPRPLIQALGWATSRVGQPRG

SEQ ID NO: 198736 - protein, 80 aa, Zea mays
  Clone ID: MRT4577_112825C.1.pep
YLLGFNLNVPVKLTFFLKYCGKSVPQGLPVLLIYILVVISSYTSVAIHIFDFSSFFLIHPLFMTLLQMFSLVFPFLLLFS

SEQ ID NO: 198737 - protein, 89 aa, Zea mays
  unsure (1)..(89): unsure at all Xaa locations
  Clone ID: MRT4577_112826C.1.pep
PASDSIPSCHDGGSHKPHNXSNFPRVQKIKGMVHHDALTINAWLCLEWNSIGSYHGQTPLTPPPPTRFIAMAAPESLSLSTTIATWCKH

SEQ ID NO: 198738 - protein, 50 aa, Zea mays
  Clone ID: MRT4577_112827C.1.pep
GNTQHSPERKETTSPTKKTQPSHDDGPGNATGLSLDQPAGDADTTGTLLT

SEQ ID NO: 198739 - protein, 42 aa, Zea mays
  Clone ID: MRT4577_112828C.1.pep
LWIPCLLCNLGPTGSPGGGAMKIRPLQILPTRVHVGSYCRTC

SEQ ID NO: 198740 - protein, 187 aa, Zea mays
  unsure (1)..(187): unsure at all Xaa locations
  Clone ID: MRT4577_112829C.1.pep
PGXTXKPXAGPLAPXSLXPRPPPPXGXXPGPRAGRXXXPPPAPPPPPXXPPPPPPXPPPPPPPXPPPPAPPPPXPPXPPPPPPPPPPPPPPPPPPPPPPPPPXPPPPPXPPPPXPPPPPPXPPSPPPPPPPPPXPPXXPPPPPPPPPPPPPPPPPPPPXPPXAXPPPPRPRPPXPPAPPPSPPRPPA

SEQ ID NO: 198741 - protein, 55 aa, Zea mays
  Clone ID: MRT4577_11282C.1.pep
LNVSHEEIDVSHPDFFSSAKLNGYTPPNKEDCGQPGFTPAERRRFGNILFQILWK

SEQ ID NO: 198742 - protein, 163 aa, Zea mays
  Clone ID: MRT4577_112830C.1.pep
MSGVGSGRPPAAQKILQSLRPPLSFSTPSRPPFAAPDDYHRFPTPAAATSPAATSGGVGAGAAPPDTVEEGLVIRTPLKRKATSEENAAADSSSCIITSPMLTPVSAKTVKASKAKAKNSKTGPQTPTSNVGSPLNPPTPVGTCRYDNSLGLLTKKFINLLKQ

SEQ ID NO: 198743 - protein, 142 aa, Zea mays
  unsure (1)..(142): unsure at all Xaa locations
  Clone ID: MRT4577_112831C.1.pep
RRGVGXRHIVSAAHIETTALGGTSGSTILTPSXVXLSVXSRDQEXSRDDPMDASQRAGMNEDVASTYGVCLLKPHTRLLLQSRSAYPAWWKGTSRPSGWEARQPPPPVFRDQLLLGKRQASTRAVLRRPVAALPSPTNXLDT

SEQ ID NO: 198744 - protein, 136 aa, Zea mays
  unsure (1)..(136): unsure at all Xaa locations
  Clone ID: MRT4577_112832C.1.pep
MDTSKSKQGPEHLLVLVHGIMASPKDWTYGEAVLKRRLGDDFLIFVPAHGGGGGFVACSRPLGALVGLRILTPLLNFQNEYCVGGSPKTLAVVXGGPLISYAGRAQLLEIVPVPAVRVGELSSVAKLLMFSTNVSW

SEQ ID NO: 198745 - protein, 96 aa, Zea mays
  Clone ID: MRT4577_112833C.1.pep
LHSIPRKPCSWLDPTQDQKPCIVGSSRCSTKTRAATRDLLLADITSIVRLVALEDGGGLLRGLLLSFNFHSPLSSGGWRGDALLHRPIQYPRPFDA

SEQ ID NO: 198746 - protein, 83 aa, Zea mays
  Clone ID: MRT4577_112834C.1.pep
SCTITIMCLIQTPYQQAVQISLIQEDKNTFHRGFMTPLCLYTRNLVLQLPVKRLLSEMTIFELIFKGMGFNLIKPTKLTYTKP

SEQ ID NO: 198747 - protein, 89 aa, Zea mays
  Clone ID: MRT4577_112835C.1.pep
STAAAPLQGLNVTASLPIARRSSRSLGNFRIGGRILCMHEWPALRNKKLETLFYLPPLSIDGLVHQVDYPAVNGWILYLQLSMVRFVLR

SEQ ID NO: 198748 - protein, 51 aa, Zea mays
  Clone ID: MRT4577_112836C.1.pep
SYYKPFYYLSIFIYTPDTYHPYTYILHFDLQTTLHTSHLDNILYDPLNTFY

SEQ ID NO: 198749 - protein, 79 aa, Zea mays
  Clone ID: MRT4577_112837C.1.pep
GFATTGKLVPFTEKKINIVCLQAKLRSFSWGTRYFVQTGLTKNQGPLKKFEEATSKNKYKPGCQIFHLSSPRGCPSIAS

SEQ ID NO: 198750 - protein, 905 aa, Zea mays
  Clone ID: MRT4577_112838C.1.pep
MAVLQGIPALELPINCSGNAQLQPSSLRPPHPQQHGGGQHQRPPAAATYQEFLSTQPPLFTKAEDPLDADVWLRIVESKFPLLTGDCPDDAKARFAAQQLRGPARTWWDHFCVMLPADREVSWEEFKTAFRGHHIPARILDLKLNEFLALNQGTRTVLQYAQAFNDLCQYAGYHADSNEKKRDRFHRGLNTKLRERLNTVRVDSFNELVNVAISQEDCIKQMPAPNQDKGRKQKVQVRQGKLNFTTLEELPEGAPIMTGTFSVFNQPALILFDSGASHSFISQKFSAKCQLPFCHAKGSYMITTPGGKTVTNQLIRSVPIQLGSHIIKTTLLVLGLESVDIILGTNWMTLHQVVLDVASRIVEVNSLICRSFTLFLPSQGSTQSCAFSMMELPLKKITVVCEYADVFPDELSGMPPDRDIEFAELQPGTTPISKRPYRMPPAELAELKKQLQELMYKGFIRPSTSPWGCPALFVKKKNESLRLCIDYRPLNAVTIKNKYPLPRIDVLFDQLVGAKVFSKIDLRSSYHQIKIRASDIPKTTFSTRYGLYEFLVMSFGLTNAPTYFMYLMNYVFMPELDKFVVVFIDDILVYSKNEEEHAGHLHVVLQCLREHHLYAKLSKCDFWLKEIKFLGHTISQAGIAVDPDKVQEEMNWKPPTTVRQIRSFLGLAGYYRRFIPDFSQIAKPITELLRKEDKFVWGQKCEDAFHALRQHLTTTPVLVQPNSSKPFDVYCDASGTGLGCGLMQDNRVIAYASRALWPYEQNYPTHDLELAAVVHALKMWRHYLMGTHYNIFTDHKSLKYIFTQADLNMRQRRWLELIKDYDLEVHYHPGKANVVADALSQKLQCNCVLMDSRVDTLCDELSKMKIEVIPSGALSHISVEPALQDQILMAQLSDKGVQIIKENLH

SEQ ID NO: 198751 - protein, 117 aa, Zea mays
  Clone ID: MRT4577_112839C.1.pep
PPYKPWGEGPAFFSNKIDTKDCLKSISRYYRAQFKPIWAKRTTGREWNAARLHKVVHQSTYHKCPLHHIQHSHPLLLSGNTRDGQITSIDLQDHIYHLGWQVKYLSVLNNQGLTRRT

SEQ ID NO: 198752 - protein, 71 aa, Zea mays
  unsure (1)..(71): unsure at all Xaa locations
  Clone ID: MRT4577_11283C.1.pep
GXXXXEEGDXXXXGGDXXXLRRIGVKXCVXFXXXXIXXXDFXXIYLRWGWXWXWXYXSYXXGVLXRXXXMX

SEQ ID NO: 198753 - protein, 86 aa, Zea mays
  Clone ID: MRT4577_112840C.1.pep
RVSPFCQRAILNPGTLLQLEQLLTFNTTGFDKPSSISTNIRSLLVPSFRFLISYSSIIKFLVLCLWLLRNKKLHFSKKKNKRSVLL

SEQ ID NO: 198754 - protein, 162 aa, Zea mays
  Clone ID: MRT4577_112841C.1.pep
DKFVVVFIDDIFVYPINEEEHAGHLHVVLQRLREHHLYAKLSKCDFWLKEIKFLGHTISQAGIAVDPDKVQEMMSWKPPTNVHQIRSFLGLAGYYRRFIPDFSQIVKPITKLLKKEDKFVWGQKCEDAFHALRQHLTTAPVLAQLDSSKPFDVYCDASGTGL

SEQ ID NO: 198755 - protein, 141 aa, Zea mays
  Clone ID: MRT4577_112842C.1.pep
RVDGRVREKAVLSIQKNFRCWKKRKEFLKMRNNVVRIQARVRAHQERNKYKELISSVGILEKVMIRWYHKGVGLRGFNSGAMTIDEEVDEDVAKVFRKLRVETAIDEAVSRVSCIIGSPKAMHQYRRMLNRYQQTKDDQEK

SEQ ID NO: 198756 - protein, 55 aa, Zea mays
  Clone ID: MRT4577_112843C.1.pep
GNWVSQRRGTQHLLLNHLHQPKHSITRIQKIMKRRRMASSSSLLLVRGRLMAGRP

SEQ ID NO: 198757 - protein, 265 aa, Zea mays
  Clone ID: MRT4577_112844C.1.pep
MAIGHKNTTKVALLVLLLSLMLSLTASVARNLQWRLSVATAVEVCVKAAVGAPDKLGDCPFSQRVLLTLEEKKVPYRMRLIDLSNKPGWFLKISPEGKVPVYNSGDGKWIANSDVITQVIEEKYPAPSLATPPEYASVGSKIFPSFVKFLMSKDASDDGSEEALVRELQALEEHLKAHGRPYISGERVTAADLSLAPKLFHLVVALEHFKGWKVPESMSSVHAYTQAMFSRESFIKTKPTKEHLIAGWAAKVPKPPNLVVPCWLI

SEQ ID NO: 198758 - protein, 34 aa, Zea mays
  Clone ID: MRT4577_112845C.1.pep
HHHCGGKGERTTCPDLGEATLRKEDHHAGQIRFT

SEQ ID NO: 198759 - protein, 122 aa, Zea mays
  Clone ID: MRT4577_112846C.1.pep
GAPAGEHAQEQGTRAGLLSREMCAPWEIHSWARSGRTGSSASRGTRSHGSRARARPAERERRAEGGASREGALGERERSVEKECAAGGISAGRGGGNSGGAPGRNAGRRSWRRKPRSERRRA

SEQ ID NO: 198760 - protein, 99 aa, Zea mays
  Clone ID: MRT4577_112847C.1.pep
GHHLLVGSQACAECQGGCALRITLPTNDGLNKHISIYHAAPVVSACIGSLAIESCTVGAVEFLGGSARMGLEWLWSSWQPRTSYGIRPTRPRTRGRTRG

SEQ ID NO: 198761 - protein, 39 aa, Zea mays
  Clone ID: MRT4577_112848C.1.pep
PQVPGPVTDRLALASWDRMTPPARHPPSRPCAPPSGAGA

SEQ ID NO: 198762 - protein, 134 aa, Zea mays
  Clone ID: MRT4577_112849C.1.pep
GGPERENKIPGGQMGNFFGKEAQPPPLTGNTPPFCYKMGAQKGHPKKNFLSHKGVSPPGTQKKIHLWPREGPPAPNKNPKNPGQGPLSFKKGPKFGVLRVPGGNIPVPEPIAPKNIPRTGKAPRDPPPRGRGGG

SEQ ID NO: 198763 - protein, 122 aa, Zea mays
  Clone ID: MRT4577_11284C.1.pep
SHEEIDVSHPDFFSSAKLNGYTPPNKEDCGQPGFTPAERRRFGNILFQGKLVDAYRHLHKEKDIDGGFSWSGHPIGKYRGKRMRIDYFLVSEQLKDRIVSCEMHGRGITTMVVIVETFPVLH

SEQ ID NO: 198764 - protein, 95 aa, Zea mays
  Clone ID: MRT4577_112850C.1.pep
NWKGGAIMGYLNQNQGSVPKFHLSPRTLRTRLGPNFPPGGAYRGGDKVSPGGTINRGKKRLTSLVRHLSQPGGHPIGVRGLNQKKRPCIPKRRLW

SEQ ID NO: 198765 - protein, 162 aa, Zea mays
  Clone ID: MRT4577_112851C.1.pep
ESDDKDKEKGKDGEKEKSKEKDLDKKNDREKEKGRAMDGASLDNILQRLPGCVSRDLIDQLTVEFCYLNSKANRKKLARALFNVNRTSLELLPYYSRLVATLSTCMKDVPSMLLSMLEEEFNFLINKKDQINIETKIKNIRFIGELCKFKMAPPALVFSCLK

SEQ ID NO: 198766 - protein, 197 aa, Zea mays
  Clone ID: MRT4577_112852C.1.pep
LPAFPWFGFSRAEMRLSVRVIEARNLRAMDSNGFSDPYVKLQLGKQRFKTKVIKMNLNPTWDQEFSFLVGDIKDVLKLDVYDEDILQMDDFLGHLRVPLEDVLSADDLSLGTRWYQLLPKGKTNKTVDCGEICVSISLESSGASRSWSEDLGDEITDIQRDYSLSSQNTAPSISFAYRETEICEEDDEYSVTSEIHA

SEQ ID NO: 198767 - protein, 97 aa, Zea mays
  Clone ID: MRT4577_112853C.1.pep
GPPWGGTNLSCLITQRAIVGHKKNKTSCNAVLDSTFMLAPFLGPKKPTLGPSPDVPDPGFGFSRGGSGLGIGPFTSWETTRHYGQKSPLQNLDFPPG

SEQ ID NO: 198768 - protein, 557 aa, Zea mays
  unsure (1)..(557): unsure at all Xaa locations
  Clone ID: MRT4577_112854C.1.pep
MGTPMSPWKGRLRSHHATVQSLSKRRLPSRTKNPEEKEKLRTSTKKAAPKKTARGRPAGAAQQQPMARLGLSSRHAGRDSEHPVVIDDDVNGECNGRADQSATTPLRRSPRLHVEDKSLGKSPLPPNRRETSANRKTKNAHRKDKNQESLKGNRGSAGFPPRKDISDVSNKKSDKQELKPIHCKVQTGKRKRGTERRLLSKKQSCQDPEPLPAYRQEIAPCNEPRKSTHRRIEKDPSIEEFEVKLKVANERLTNIDENINKLSGTEREEMGNFCGSDWTKEQDMALRKAYFSARPSPHFWKRVSKMVXGDLLKTASTEFIMTSQHRLQXPRPRTSKTTFSPIGNFTLSDPKLPNILEPTVGRQKTANQKSLVAQKTVRHLLQKHCRIDQAQEADHFSIFESSPSALQLNLSFEDSPGTPDSYMNSDSLGKHSGSSSARKKPFSRLRTKPSEPSPAVLKPIKNAILHEKYIDQLARREGTKRPRRRTPAGSKTADSGKSLSEQQAGSLKAAKNALISEATDFISSFKALQANSLAHVVENSEDEIECDASDCSYADKE

SEQ ID NO: 198769 - protein, 420 aa, Zea mays
  unsure (1)..(420): unsure at all Xaa locations
  Clone ID: MRT4577_112855C.1.pep
KTKNAHRKDKNQESLKGNRGSAGFPPRKDISDVSNKKSDKQELKPIHCKVQTGKRKRGTERRLLSKKQSCQDPGPLPAYRQEIASCNESRKSTHRRIENDPSTEVKLKVGDVRLANIDENINKPSGTQREGIEIFCGPDDWTKEQDMALRKAYFSARPSPHFWKRVSKMVXGDLLKIASTEFILTSQHRLQXPRPRASKTTFSPIGNFTLSDPKPPNILEPTVGMRKSAKQKSLVAQKTVRHLLQKHCRIDQAQEADHFSVFESSPSALQLNLSFDNSPGTPDSYMNSDSLGKHSGRSSARKKPFSRLRTKPSEPSPGVLKPIKNVILHERYIDKLARREGAKRPRRRAPAGSKAADSGKSLSEQQAGSLKAAKNALISEATDFISSFKTLQANSLAHAVENSEDEIECDASDCSHDDKE

SEQ ID NO: 198770 - protein, 88 aa, Zea mays
  Clone ID: MRT4577_112856C.1.pep
GFRQVDQFGALAKRQHPETYHGSTLVHLPEELLRLPKLRSLALIAMPLGCYQKGEVPQGVKISESDDEKVFQHLPIWRWLHLSAPPHL

SEQ ID NO: 198771 - protein, 86 aa, Zea mays
  Clone ID: MRT4577_112857C.1.pep
EEGTLVKTRCWKGKNRDTGPLKGKGCPPPRIPARGEEKKKPQRARKEKSWPSKNNELSGQGGQLIKVGNEALSSGGDTGIKKEADP

SEQ ID NO: 198772 - protein, 85 aa, Zea mays
  Clone ID: MRT4577_112858C.1.pep
IIFFFFFFFFFFFEGHLIYRRSTREQALKRLFPSDRDVKTYLCDHLPNHNTLFSHQLPAIKGRGKGLHVGLVQHQVQWILSLGLF

SEQ ID NO: 198773 - protein, 81 aa, Zea mays
  unsure (1)..(81): unsure at all Xaa locations
  Clone ID: MRT4577_112859C.1.pep
EKGEAAAPNFWGRGPSLGAPGFEQKVPAVESCGERKPQNSFPQGTPKARAKKRLGXGLGPPGGGAFFLKFGVRVGGAQVFF

SEQ ID NO: 198774 - protein, 373 aa, Zea mays
  Clone ID: MRT4577_11285C.1.pep
MKRFFQPVPKDGSPSKKRLAGAAEPGDGPTSAGAATGAGGDVEGRPTEEPFKFLTWNANSLLLRMKSDWPAFSQLVARLDPDVICVQEVRMPAAGSKGAPKNPSELKDDTSLSRDEKQVVLRALSASPFKDYRVWWSLSDSKYAGTAMFIKKKFEPKKVSFNLDRTSSRREAGGRVIIAEFESFLLLNTYSPNNGWKEEENAFQRRRKWDKRMLEFVQHVDKPLIWCGDLNVSHEEIDVSHPDFFSSAKLNGYTPPNKEDCGQPGFTPAERRRFGNILFQGKLVDAYRHLHKEKDIDGGFSWSGHPIGKYRGKRMRIDYFLVSEQLKDRIVSCEMHGRGIELDGFYGSDHCPVSLELSEAVAEEAPGQPKPSI

SEQ ID NO: 198775 - protein, 56 aa, Zea mays
  Clone ID: MRT4577_112860C.1.pep
SSVIGKQSVSYMLSKQCRSVIRIARYHWSHARQYVQCHVLRESVYSLQHVETRGTT

SEQ ID NO: 198776 - protein, 78 aa, Zea mays
  Clone ID: MRT4577_112861C.1.pep
QDQSGHSFRWLSKRRGATLSSDDQLITIPSRCRPLCRSLSCTTLIEISSTLSCVLCHFLHLRGQDHIPILPSIWFVGY

SEQ ID NO: 198777 - protein, 54 aa, Zea mays
  Clone ID: MRT4577_112862C.1.pep
TTVMHIRGCALTLYTSTPSNNWPLLIITSESIFLFELRGRNYYCSSNLCMCFFP

SEQ ID NO: 198778 - protein, 131 aa, Zea mays
  Clone ID: MRT4577_112863C.1.pep
VWGTTRGGCVDCTTSTCGCGSFNSMVLDTVAVDVCDLCDDRLPTTATAWEDAPPPRRSRATAVAAAGGQGYTSVNRGRGSGVRSGCRSRQRRRRRGRRHGRAAVWSQSQWSECDWLEIERDAGLPFGLGGP

SEQ ID NO: 198779 - protein, 84 aa, Zea mays
  Clone ID: MRT4577_112864C.1.pep
PRRPARAQKKKICIIFPSAAPPPCRLHPPPTLCAWTLLSHAVRKFVRDATKTAHPRQAGGSLPHPLHAHPVRKHDQARPLLPPH

SEQ ID NO: 198780 - protein, 257 aa, Zea mays
  Clone ID: MRT4577_112865C.1.pep
AGRAGTPQIRLDLNIRNFGLAVRFSTCISGFLSVCVLHKSRPGSARSCAYVSFQRWEQGYSGENVPKIRLLCFAGLLLASETAFAANVRLKLEGLTGELQKNVRAQLSTIQSDEVTPDRRFQARVDDAIREGLKALGYYEPTIDFELLPPPAKGRQVLIARVSAGEPVLIGGTNVILRGGARDDSDYLALLKKRPAIGTVLHHNDYDNFKKSLTNVALRKGYFDSQFIKSQLGVALDRHQAFWEKKKNEKKKKKRPL

SEQ ID NO: 198781 - protein, 98 aa, Zea mays
  Clone ID: MRT4577_112866C.1.pep
PVYQGPGDVDVWSPFFLGPGVPFAPYFADAFPQDFQGGYLFLQVKVNAPFRWKVANWISGPYPLFVPCPGFFVPPGGNGAPGVSGFRFQTPPFCPVGV

SEQ ID NO: 198782 - protein, 69 aa, Zea mays
  Clone ID: MRT4577_112867C.1.pep
SSGVGLGSITRILLLYKSQHSAVLSRDTCETLVSRRFSALAKVIVPLRHVLVVVLFLVQAGVCSISFRA

SEQ ID NO: 198783 - protein, 156 aa, Zea mays
  Clone ID: MRT4577_112868C.1.pep
MGKNKKGGSSSHHSDDKRKREPSPPSEDFGDSEYSEEEFSSESEGSPVYASPPVSSDDSDDSLGIAVEVWTYIRAVERSGLEGSDDSKISSDEENSSDSSEEERGGDGDDEGDSGDGGDGGDDGDGDGKGDDGRGDGGSSKGDGASSKASGKAPLV

SEQ ID NO: 198784 - protein, 72 aa, Zea mays
  Clone ID: MRT4577_112869C.1.pep
KFDVGNVVMVTGGRNTGRVGVIKNREKHKGNVFTIGKGNKPWVSLPKGKGIKLSIIEEQRKRDAAAQAAANA

SEQ ID NO: 198785 - protein, 61 aa, Zea mays
  Clone ID: MRT4577_11286C.1.pep
FYSAARTGPGRGSIRTTGSASCLSGSTTTTAPANDTTHTNCMTTRAKLCTAAKSHSRHWLG

SEQ ID NO: 198786 - protein, 50 aa, Zea mays
  Clone ID: MRT4577_112870C.1.pep
IKFDVGNVVMVTGGRNTGRVGVIKNREKHKDIEQCSKTTMFLSLPDAYNS

SEQ ID NO: 198787 - protein, 101 aa, Zea mays
  Clone ID: MRT4577_112871C.1.pep
APPALPFLLPALIFWGILRGNQFSPGNSFAHNFPKFGTEPGSPKNAPQWVGIPPHGGRAPGKKKKKKKKKKKKKKKKKKKKKKKKKKKKKKKACKKKKKAC

SEQ ID NO: 198788 - protein, 51 aa, Zea mays
  Clone ID: MRT4577_112872C.1.pep
ATPRRPGGGLTPRRLARLPRLGVQAVVQRLGPPYRFKNHDNGKRKFCAMSL

SEQ ID NO: 198789 - protein, 265 aa, Zea mays
  Clone ID: MRT4577_112873C.1.pep
MARGLKKHLKRLNAPKHWMLDKLGGAFAPKPSSGPHKSRECLPLILIIRNRLKYALTYREVISILMQRHVLVDGKVRTDKTYPAGFMDVISIPKTNENYRLLYDTKGRFRLHPIRDEDAKFKLCKVRSVQFGQKGIPYLNTYDGRTIRYPDPLIKANDTIKIDLETNKIVDFIKFDVGNVVMVTGGRNTGRVGVIKNREKHKGSFETIHVEDSLGHQFATRMGNVFTIGKGNKPWVSLPKGKGIKLSIIEEQRKRDAAAQAAANA

SEQ ID NO: 198790 - protein, 266 aa, Zea mays
  unsure (1)..(266): unsure at all Xaa locations
  Clone ID: MRT4577_112874C.1.pep
MARGLKKHLKRLNAPKHWMLDKLGGAFAPKPSSGPHKSRECLPLILIIRNRLKYALTYREVISILMQRHVLVDGKVRTDKTYPAGFMDVISIPKTNENYRLLYDTKGRFRLHPIRDEDAKFKLCKVRSVQFGQKGIPYLNTYDGRTIRYPDPLIKANDTIKIDLDTNKIVDFIKFDVGNVVMVTGGRNTGRVGVIKNREKHKGSFETIHVEDSLGHQFATRMGNVFTIGKGNKPWVSLPKGXKGIKLSIIEEQRKRDAAAQAAANA

SEQ ID NO: 198791 - protein, 265 aa, Zea mays; identical to SEQ ID NO: 198789
  Clone ID: MRT4577_112875C.1.pep

SEQ ID NO: 198792 - protein, 265 aa, Zea mays; identical to SEQ ID NO: 198789
  Clone ID: MRT4577_112876C.1.pep

SEQ ID NO: 198793 - protein, 50 aa, Zea mays
  Clone ID: MRT4577_112877C.1.pep
CLINNLTINHPVLGVGPGVFDAAVTYGTLLMATLLYHTAAIKSPSLNRRS

SEQ ID NO: 198794 - protein, 91 aa, Zea mays
  unsure (1)..(91): unsure at all Xaa locations
  Clone ID: MRT4577_112878C.1.pep
PPHXXPYFTSSPTFSSTLPIHLPSHPKHHLLPTHLPRHPTHQLLQVLPKHLTMLPRKLPPILHLKTDLTPPLPLPLPIPHLRNLVQILVQP

SEQ ID NO: 198795 - protein, 265 aa, Zea mays; identical to SEQ ID NO: 198789
  Clone ID: MRT4577_112879C.1.pep

SEQ ID NO: 198796 - protein, 50 aa, Zea mays
  Clone ID: MRT4577_11287C.1.pep
QKARASRSVTFCMCFSSAYGELRRLRMSAMSARITNGFAHYLSSLRSVLS

SEQ ID NO: 198797 - protein, 81 aa, Zea mays
  unsure (1)..(81): unsure at all Xaa locations
  Clone ID: MRT4577_112880C.1.pep
PPPPPPPLSPPPXPPPPPRPPPTPTPLPGGGTGGGGGRPCAALVNGGGGLARGEAGDSKEMWGGPTPRFGRVYFPRIRGVF

SEQ ID NO: 198798 - protein, 79 aa, Zea mays
  Clone ID: MRT4577_112881C.1.pep
DALLWHELFARTCEGQGCSVSACITRWKRERATIYRFKFTLPVTWCVSLLAQLVISHGGPVCDMQDVFHQPCCRSVLLA

SEQ ID NO: 198799 - protein, 152 aa, Zea mays
  unsure (1)..(152): unsure at all Xaa locations
  Clone ID: MRT4577_112882C.1.pep
MKHPSFKATGAKRKKVGGAKRGLTPFFAFLAEFRPQYLEKHPELKGVKEVSXSSHPRHVAGFRLGGWYMPLLVGDFAYRXKAAGEKWRSMSDEEKAKYGGSKKQDGKASKKENTSSKKAKADVREGDEAEGSNKSKSEVEDDEQDGNEDEDE

SEQ ID NO: 198800 - protein, 85 aa, Zea mays
  Clone ID: MRT4577_112883C.1.pep
SGSFRRFSALFCFVRPFLVCLASRVLCATWFFGAYRGPVRLLWRFRRPPRLGPVFSSFPAQPSLSFFVCSLRGPRVVLFFRCSLD

SEQ ID NO: 198801 - protein, 179 aa, Zea mays
  Clone ID: MRT4577_112884C.1.pep
MQVSARVPDPANSSSASVSFVPIIKESALSNMTHRKHREHKLDWCYLNDDSYTDIFHNEVKQLVDKIFSSDGHNHACVVTCGSTSKTHLVIGSDHQPGLLTMAMERIFDYAKPIRATVSVSSYHVLQDSHVFDLLDPKNNEVLVREDADGRTHLKGLSMVEINSIQEFQNLCMIVTTPN

SEQ ID NO: 198802 - protein, 134 aa, Zea mays
  unsure (1)..(134): unsure at all Xaa locations
  Clone ID: MRT4577_112885C.1.pep
MALRMSLQGSPRRSALTIVKCQELSKQLFYTCLARTRSFIPSSLLARQEVPVERLKPRVEXRREGTRLSSXKYPIGLNPQEKVKLEKEHMWLFMDDSIKDLANISMEXINATELTKNDVDIRFKCTSTLRLLQC

SEQ ID NO: 198803 - protein, 63 aa, Zea mays
  Clone ID: MRT4577_112886C.1.pep
GLGLRPLLLCPLPCLITVTLAPSTINFGLPVPILSVVLNYLTPPPCLIPPPSLPLPNHVFNLK

SEQ ID NO: 198804 - protein, 78 aa, Zea mays
  Clone ID: MRT4577_112887C.1.pep
SSELCNSSPDLIQNATRPQRRLGENKHGQNNKIQINRGLRRKAVMGFVIRRETSYRNSIHIFHLWPQRNGNLKTHKSL

SEQ ID NO: 198805 - protein, 45 aa, Zea mays
  Clone ID: MRT4577_112888C.1.pep
GVNSVLLCKLLKLLIFCLAMLVSVHFLHLSQEFLSKCRNLLMKSI

SEQ ID NO: 198806 - protein, 81 aa, Zea mays
  unsure (1)..(81): unsure at all Xaa locations
  Clone ID: MRT4577_112889C.1.pep
PXXKYXSKXXSPPAXSTXFVLXRAXTTNGXLXHXXFSGDXAGVRXDVSXLPRRXXAHRXGAXAGHNHEVXEGXAPXGXIXV

SEQ ID NO: 198807 - protein, 417 aa, Zea mays
  Clone ID: MRT4577_11288C.1.pep
MAMSSSRALLRRIGGALRRRSFSDAAAGPDSAAVGYHVAGGPSYMRGAVFWEPGRPLTLEEFHMPRPKAGELLIKTKACGVCHSDLHVLKGELPFSSPCVVGHEITGEVVDHGTHTPAEIISRFPVGSHVVGAFIMPCGNCFYCVKGQEDLCESFFAYNRAKGTLYDGETRLFLRGNGKPVYMYSMGGLAEYCVVPANALAVLPASLPYTESAILGCAVFTAYGALRHAAEMRAGDSVAVIGVGGVGSSCLQIAKAFGASEVIAVDVLDEKLRNATTLGATHTVNAAKEDAVERIKEITGGRGVDVAVEALGKALTFSQCARRVGGRVGAVMIGLAATNVVGEVDITRLVRRQVKIIGSYGARARQDLPQIVKLAESGAFSLRNTVSRKCRFEEANGAYEDLDQGKIVGRAVVEIME

SEQ ID NO: 198808 - protein, 135 aa, Zea mays
  Clone ID: MRT4577_112890C.1.pep
SACLLSYKQARPGGQDTINQTPHRPPKTDPRNTGRTRDYTMRHNNRTTQNTDGPQPQIHGRRKPARSKLNNTGANKPPGPRGPNTGDPSKGAKEPGNPNQAANDVSGATTTGSRNNHATDSTTNEHTDRKTAPHL

SEQ ID NO: 198809 - protein, 131 aa, Zea mays
  Clone ID: MRT4577_112891C.1.pep
YLCYLRHAMLRGMDPVSLALSVFRSSWLSPPGMRSWCVSTTCAPHVLTSPRPPCPSTCSSNVWCRYIGKPTTTSASAPARFEVAHYNMLFSSDDEHVTSTSLIVGLPRLKDITCSLLGLDDCKVVEKQTNT

SEQ ID NO: 198810 - protein, 84 aa, Zea mays
  Clone ID: MRT4577_112892C.1.pep
RRSPVLFSGWELVWHPDKEGLVLEIFWYQVLVYTAKVDGFSYQMVWKQSVSSYYKEGKKVSGFSSGRPTPVKKSGVRNKKKKKQ

SEQ ID NO: 198811 - protein, 150 aa, Zea mays
  unsure (1)..(150): unsure at all Xaa locations
  Clone ID: MRT4577_112893C.1.pep
MEPPNLCFAPQTTEGAKPFQEIGYPKTMPPGPPLKKKGGGGAVFPEPPKPKTPLNKKRAWKTPPPIGPNPGGCCCCPPPTLFFAPILPGGEKTPPPKKILGPPKKKVXKPEPFLKPXNPWPQGNSPPPPKKHGFSKGALKPPPISRPKTP

SEQ ID NO: 198812 - protein, 292 aa, Zea mays
  Clone ID: MRT4577_112894C.1.pep
MAQEDVHLDDAGLALGLSLGSGSGGASGAARHGGISRRLSREVRLPSPHPLEPSLTLSLPDEATATGSGGGGAAHSVSSLSVAGVKRERVDDAEGERASSTAALPRACAGAEDDDDDGSTRKKLRLTKEQSALLEDRFKEHSTLNPKQKVALAKQLKLRPRQVEVWFQNRRARTKLKQTEVDCELLKRCCESLTEENRRLQRELQELRALKFAPHPQAPPSSATQAGAAAGVVPAPPPPLYMQMQMPAAATLSLCPSCDRLAGPGAAAKAEPRPKAAATHHFFNPFTHSAAC

SEQ ID NO: 198813 - protein, 498 aa, Zea mays
  Clone ID: MRT4577_112895C.1.pep
MASSGNEGRVVVDLGSAAESVAADEEAHATPLHEIESLCMRCGENGITRLLLTLIPHFREVVLMAFECPHCGERNNEIQFAGQLQPKGCCYSLEVPLGQSEMLNRQVVKSDSATIKIPELDFEIPPEAQRGTLSTVEGIIMRAVDELQALQDERKKVDPQKAEAIDQFLLKLRSLGSGEAAFTFILDDPAGNSFIENPHAPLLDPLLSVRFYERTREQQAALGFLAEPPKEQPGEAVLPASAVESNSDGLQSVPHGSVGAVAGRRAIAQGNPDEVAAALCRYSAPEEVDTLPSTCGACGTECVTRFFATKIPYFREVIVMATTCDMCGYRNSELKPGGEIPAKGKKITLRVQNAQDLTRDVIKSDSASVKVPELELELSCGTLGGMVTTVEGLIVKICEALERIHGFQLGDSTLEWKKKKWDDFKERLSKLLSLQEAWTLIIDDGLAASFVAPATDSLEDDSQLTIEEYQRSWEQNEELGLNDMDTSSADAAYNTTNT

SEQ ID NO: 198814 - protein, 405 aa, Zea mays
  Clone ID: MRT4577_112896C.1.pep
GRQSRVVLDVGCGVASFGGYLFDRDTLTMSLAPKDEHEAQVQFALERGIPAISAVMGTQRLPFPANVFDVVHCARCRVPWHIDGGMLLLELNRLLRPGGFFVWSATPVYQKLPEDVEIWDEMVKLTKAMCWELVAKTRDTVDLVGLVIFQKPIDNVCYDRRPEKEPALCEPSDDPNAAWNIKFRACMHRVPEDQSVRGARWPVLWPARLRKAPYWLDRSQVGVYGKPAPDDFAADLQHWKKVVRSSYLAGMGIDWKTIRNVMDMRAVYGGFAAALRDMKVWVMNVVTIDSPDTLPVIYERGLFGIYHDWCESFSTYPRSYDLLHADHLFSKLKPRCKVLPVIVEVDRILRPNGKLIVRDDKETVDEIQGVVRSLQWEVRMTVSKNKQAMLCARKTTWRPTEIETR

SEQ ID NO: 198815 - protein, 62 aa, Zea mays
  Clone ID: MRT4577_112897C.1.pep
LKKKINFQWPQNKKVKLLKIIEMKKTLKGPKNAPGHWLNKGDKLGVKKNKILVRAKNPLLNY

SEQ ID NO: 198816 - protein, 69 aa, Zea mays
  Clone ID: MRT4577_112898C.1.pep
KGGEISRFKAPTKNSRVKPGPWQTQVCSLKNGIWNKAQKTQRDGEQRSKILKAQKDPEQIIHHSPGGVF

SEQ ID NO: 198817 - protein, 249 aa, Zea mays
  Clone ID: MRT4577_112899C.1.pep
MGGHGGLNILPQKRWNVYNFDNREKVQKDEAAAAREEQLQREAERRRESDLRLAALRRNRGLVQAETPPAPPSHPAGPADPADALPSPADALPSPATDGDHINLFSGGSGVATDFDALASASGGRGAAREREPDADPNPKKRKKKEEEVRVVGPDEEKYRLGYGLAGKGVAVPWYMSSPAAAAAKEGRGRDAREGNGVKKSGGKKSIEELREERKKREAKEKERERAILVAAGRKERQVDRGRQSRWAR

SEQ ID NO: 198818 - protein, 155 aa, Zea mays
  Clone ID: MRT4577_11289C.1.pep
ERPPGQVQAFFFFFFFFYFFFFFFFLFFFLIFFLLFSGYLGQKHSKNQHPLCSRKTREKSDPNPNYGLETILGGGQWKPRATTAQRAIGRPPGGTPGGTPLRANPGPLGGITGGSGKGTNPGETTDKTSPWVKRKSGGAPRKIQPGIIKWKARGA

SEQ ID NO: 198819 - protein, 76 aa, Zea mays
  Clone ID: MRT4577_1128C.1.pep
VVMLNKFLLVYEKGQPGRAKRVEREKRESGGGGTNFFFKRKNFLNGNGISRIYTQHDGKSGSVATRANLEAAGAES

SEQ ID NO: 198820 - protein, 86 aa, Zea mays
  Clone ID: MRT4577_112900C.1.pep
GNGNRGPQKKIPILGPKNQGPLFKAKQGSNGSKKFGHSRGYKKFPGFNFYCLTLKKNLGTKCFPAIQVCFKKIPQSGFETPRFLGA

SEQ ID NO: 198821 - protein, 71 aa, Zea mays
  Clone ID: MRT4577_112901C.1.pep
SKLPTNLNDQEKRWRLAVLKRLEYQESNREMILFSASHLRRIWFKLVNRARGINRASSRKPTDSSCYSMTG

SEQ ID NO: 198822 - protein, 59 aa, Zea mays
  Clone ID: MRT4577_112902C.1.pep
QTDGDFYLYFYQGNKGKFMDHTQVSTFDKGRFGYLDYKYFYKKDITKNYDVYLFAVALF

SEQ ID NO: 198823 - protein, 83 aa, Zea mays
  unsure (1)..(83): unsure at all Xaa locations
  Clone ID: MRT4577_112903C.1.pep
KDSMDTMAPIAKGFIVVANILVDGAFSGESMNTAVSFGSTLVSWEXVYQWVFWVGPLIGDDLDGVIYELLFISHNLEQLPSSD

SEQ ID NO: 198824 - protein, 141 aa, Zea mays
  unsure (1)..(141): unsure at all Xaa locations
  Clone ID: MRT4577_112904C.1.pep
MSDTETIPGXTTPSTPLLKDELDIVIPTSRNLDFVQMWCPFFKTYHLIFAHXGDPTXTIKGTEGFNYELYNRNDINRILRGHXSWICFKDSACRCFGYMVSKKKXMYTIDDYCXFVGKDPSVKDISALEQHIMNLLSPSTP

SEQ ID NO: 198825 - protein, 75 aa, Zea mays
  Clone ID: MRT4577_112905C.1.pep
RNPSILLQTRVVVIPCQCCNLVFFDSKAKCTISNRYFCFFRPNMDSASLFESKSSRYNICLCTNFSPDFLISDAW

SEQ ID NO: 198826 - protein, 123 aa, Zea mays
  Clone ID: MRT4577_112906C.1.pep
PNPGAPPGSQRWLPRKERARFRPKRKDKRAPGQGAQGTVFWETPAPHVGGSPKGSPPPLSSKTPGGNFCPPKTCPQSRKKKSRPLMRIFCSLPGPKKFFVFFLGGLPFWGGWPSIADLLCFFP

SEQ ID NO: 198827 - protein, 54 aa, Zea mays
  Clone ID: MRT4577_112907C.1.pep
IEPLNNSTTGQPAAKRRKNGSSFKSSVRVLCSTSERKNEASSRHIFNIFHHCRS

SEQ ID NO: 198828 - protein, 102 aa, Zea mays
  Clone ID: MRT4577_112908C.1.pep
MGRKGSEVSPSKRYPLRSAHSSGRVLRSALANNNKDSEPLNAAAATQAAVKKRSGNQLDSPNSTVRLLRSTSKNKDEAHSGPLNDRIIDKPAAKKKKKKKAA

SEQ ID NO: 198829 - protein, 146 aa, Zea mays
  unsure (1)..(146): unsure at all Xaa locations
  Clone ID: MRT4577_112909C.1.pep
GGGGQPAPKKDRTPQSKSRPKKNRKESNKNHKKEGGQQAKKDHKRAKHPQREGSNPQESKRRQSNKXKERRRETXTRQNHDXEATNEGXEHQRNDQNRPDESEPGTHKKTAKPAGRPKGTGPPGDRPRGPGRXDGDRPRXEDREGT

SEQ ID NO: 198830 - protein, 36 aa, Zea mays
  Clone ID: MRT4577_11290C.1.pep
ASAKSLTIPNMLSQLHAHPLVTSFYQERARSSSAVE

SEQ ID NO: 198831 - protein, 94 aa, Zea mays
  unsure (1)..(94): unsure at all Xaa locations
  Clone ID: MRT4577_112910C.1.pep
NYPTTTIXXLTNLLKSLLKFSTSPLPXPLTPNHTNTSYPLXFHFLHTTIYLITSPNXXNHITSLTIKPYPYLSNYHLPTFNHSXFLNLPHHLFL

SEQ ID NO: 198832 - protein, 101 aa, Zea mays
  Clone ID: MRT4577_112911C.1.pep
MSVTKFIKCVTVGDGAVGKTCMLICYTSNRFPSDYIPTVFDNFSANVSVDGNIVNLGLWDTAGQEDYSRLRPLSYRGADVFVLAFSLISSASYENVLKKWM

SEQ ID NO: 198833 - protein, 50 aa, Zea mays
  Clone ID: MRT4577_112912C.1.pep
TTNNDSLYNAFLSYPKKLELQCHFQPVDAELQRIPISVLLNHVHHANQFH

SEQ ID NO: 198834 - protein, 276 aa, Zea mays
  Clone ID: MRT4577_112913C.1.pep
MSPRVVLLFLAALRPCAALVRLHSTTFSFTFLDAPARFGPRVSGDGICGSLRAADPAEACETIKDRGGRRGAGRKAFVLIARGNCSFEEKVRAAQQAGFDASIVYDDEEKASLYSMVGESDGIHIPAIFVSKMAGETLKKFARGEDEECCINSSMDETAGTVLVMSFVSLVVIMSVLASFLFARNCRLLRHGVDNHPPYVKKQVVEKFPCSAYSAPCSSEDNFQEACAICLEDYNNGDMLRHLPCKHEFHKICIDSWLTKWGIFCPICKLEVTLGG

SEQ ID NO: 198835 - protein, 68 aa, Zea mays
  unsure (1)..(68): unsure at all Xaa locations
  Clone ID: MRT4577_112914C.1.pep
TCGAPTNYNANQEFKSKKVVLISDPEAKTNTRNAYHDPSYPENFXKPRXKGDDQIIDDAANDTFVIAE

SEQ ID NO: 198836 - protein, 130 aa, Zea mays
  Clone ID: MRT4577_112915C.1.pep
MASPGMGHNTALTRQKDSSATTRGEWDTLDQVIRKARERLPYPKGSSGECVAAEYTEVLGSNCLYSFLDEGFICFLLSNTVAGFLELVELWKCLVVLPYIASSIEVYGIHDPVEGGYHGLWVNMCNLYRV

SEQ ID NO: 198837 - protein, 43 aa, Zea mays
  unsure (1)..(43): unsure at all Xaa locations
  Clone ID: MRT4577_112916C.1.pep
GWSXFXCLDFLLAAXLVFPYPRAQVLVGGXXAXXWATTVLCGC

SEQ ID NO: 198838 - protein, 64 aa, Zea mays
  Clone ID: MRT4577_112917C.1.pep
EKKKKKKKKKKKKKKKKKKKKKKKKKKKKKKKKKKKKKGRPVLRVPSFLPRACNVLLFFWGPLI

SEQ ID NO: 198839 - protein, 172 aa, Zea mays
  Clone ID: MRT4577_112918C.1.pep
VKTMAQGLKTRATPGQKRATSPGGKKNRHEQKKGANPTRPEAPQGGGDWKKEKPKVDRKKKRPKGAQRTKKGSKKKKGKKGGAQPTPPRKGGPPRGGNAGGLKRGDHPPGPEKGGPPDKAVGGGFFKKTNGGGPTQRARPGPPGGGAPVYRAPAGRNKGVNNTGPKKKDGGG

SEQ ID NO: 198840 - protein, 56 aa, Zea mays
  Clone ID: MRT4577_112919C.1.pep
ISHSFQLPRSVISAWNVARVDLFHLLPNIILRKKGKRRTRLAVACALWPPEHGLRF

SEQ ID NO: 198841 - protein, 118 aa, Zea mays
  Clone ID: MRT4577_11291C.1.pep
ARGGGQTWEPKKAKIPSGPRGAPVAGARFLGEKGVLRGLKCRWAGRGKTTGYTKNGQVWATHFGWAKTKGAGFLERELGGRVTSTGLTTRGPKSSFGGMKLLWGGTRGSPRKFGAVPG

SEQ ID NO: 198842 - protein, 66 aa, Zea mays
  Clone ID: MRT4577_112920C.1.pep
LSPKAGWDPHSPVTWGPVFGGFPPKFVEACQDPIKFLKTKHGAPPGVMRIFKNKKTWGAPAGEIKN

SEQ ID NO: 198843 - protein, 73 aa, Zea mays
  Clone ID: MRT4577_112921C.1.pep
LCARCRWRNVLISTPGSTNSAILVSLRLGNQVCYLRATWGGLCVMIMRLLRCWVTRSMGSSCPAWDRGLDTAG

SEQ ID NO: 198844 - protein, 125 aa, Zea mays
  unsure (1)..(125): unsure at all Xaa locations
  Clone ID: MRT4577_112922C.1.pep
TILKPHDGQAVYSVAFLTAPERSNHINQSTSGLLNREVKIWASTNEDGWLLPSDSETWKCTQTLELVSSLEPRVEQAFFNHVAVLPQASLILLAIAKTNAIYAVHVEXGPNRASTRLDYIADFTF

SEQ ID NO: 198845 - protein, 43 aa, Zea mays
  unsure (1)..(43): unsure at all Xaa locations
  Clone ID: MRT4577_112923C.1.pep
GWNPLCNASLGVSLPWLFILLQEFGFYFFYWIFWFFFFXXIYR

SEQ ID NO: 198846 - protein, 152 aa, Zea mays
  unsure (1)..(152): unsure at all Xaa locations
  Clone ID: MRT4577_112924C.1.pep
ATLEWCTTPSSRLPHKRGRPFPTSQGGQEIGDWSRFGDDLRRILSGLFCAGVGTAEDNDLPDYVIQGRVYCDTCRAGFVTNVTEYIGGAKARMECKHFGTGXLERSIGGVTDGNETXTIELKDSHEEDICGAAPCRRGPRKYWDQDAGGTGD

SEQ ID NO: 198847 - protein, 37 aa, Zea mays
  Clone ID: MRT4577_112925C.1.pep
HEVHCNLVSCSRCDHQMVGPQLFHELSLVRISKEAYI

SEQ ID NO: 198848 - protein, 102 aa, Zea mays
  unsure (1)..(102): unsure at all Xaa locations
  Clone ID: MRT4577_112926C.1.pep
DGRTCHGLHCVDCSDARVTAETAYLNLALRLNVFYSGLSTLSFVVFDDRFRYTYYVMDPSXIFGCKFRIHLGRGMSTGFGLIYDNVDSAKKFEPKYRLMADG

SEQ ID NO: 198849 - protein, 220 aa, Zea mays
  unsure (1)..(220): unsure at all Xaa locations
  Clone ID: MRT4577_112927C.1.pep
MACYTHEKRTQFHGSFTNATRTQQQELHSAMELDSGDLGERSREPGRDRDRASSGRHGRDGQGATRRGEATDAQNREQRSRRRAGANXRCTGARRAVETERHGEQAAGAAVREIRAGEILGATRESRAPAGRAQKRGXGAGAGRGPSREGDERRAEGGSRGARSSELGLGSKGAARRVPKTRQGAPAMGSQGQRERETGDRLGVLARPWRARSTARGMGA

SEQ ID NO: 198850 - protein, 56 aa, Zea mays
  Clone ID: MRT4577_112928C.1.pep
GVGQRAGPQGAGRQFAGVRLWGGRGRGTGPLRTQGWLASPRHCGRFSFSRFLLKRF

SEQ ID NO: 198851 - protein, 129 aa, Zea mays
  Clone ID: MRT4577_112929C.1.pep
MATHFVLNTGAKIPSVGLGTWQSDPGIVGEAVYAAVKAGYRHIDCARAYNNEKEVGLALKKLFEESVVKREDLFITSKLWCGHHAPEDVPEALGDSLDDLQLDYLDLYLIHWPFRVRKGTSIGNPENSY

SEQ ID NO: 198852 - protein, 68 aa, Zea mays
  Clone ID: MRT4577_11292C.1.pep
AKIFSFITGEAFFYIFEKKGPPFKKKKTGLQYVTSNPQNRQAFFIGFIQKIFSPLQELGEPAFSFHFS

SEQ ID NO: 198853 - protein, 201 aa, Zea mays
  unsure (1)..(201): unsure at all Xaa locations
  Clone ID: MRT4577_112930C.1.pep
MVVCSPGARKGRSPSPPPKKGSPSKKVRSPSPPLKKASPPRKVSPPAESAVLCIDHLSRNVNEAHLKEIFGNFGEMVNVELSMDRMGYLPRGYGYIEFKKRADAEKALLHMDGGQIDGNVVKLRFTLQPRQRAASPMKAPPPPPKRDALQIEKGVSSAEKDAQQRPKESSPRRKPASPLRKRSPXRXAESPXRXPDPSPKR

SEQ ID NO: 198854 - protein, 96 aa, Zea mays
  Clone ID: MRT4577_112931C.1.pep
AGGRPLALLLPMRGGVWTQLLCLSSLWVFSLDRLEAGSRCSWLLPPPRPPLVLTLGRGAVLPSVLSRWPRTRSPGDYLRFLVPLSPCSLRLCVLDR

SEQ ID NO: 198855 - protein, 74 aa, Zea mays
  Clone ID: MRT4577_112932C.1.pep
AHGGLLLRSVTVGASTCSRSAVYGCGSLMPSSAPFAMVEWVVANGMGMAALASMEALVPILSKLNSRGSIPRAE

SEQ ID NO: 198856 - protein, 89 aa, Zea mays
  Clone ID: MRT4577_112933C.1.pep
SWSTEPHSRATGVDRIHRGERAVGIRHASDIDVTDKGPESAIQLTEEEEKDVGDLGWMPYKEYINVCKGALQFSRMQIDDVLLTCIQIA

SEQ ID NO: 198857 - protein, 41 aa, Zea mays
  Clone ID: MRT4577_112934C.1.pep
RSRACGDRAPYSSSATLGALVQPNAATPRFSSSSSSRFGSS

SEQ ID NO: 198858 - protein, 182 aa, Zea mays
  unsure (1)..(182): unsure at all Xaa locations
  Clone ID: MRT4577_112935C.1.pep
MALAYAAARLVHPCIGMGIVSKQHPRTPPPSSCCLHLHHILYLRPVASSHHLARHFVDVTKDDKPLEPPPAAAAETESTQQEEDEDGGPKLDPRRFEEKFAVLNTXGVHECRSCGXPDDWRCPTCGAAQSFFESKSVEIAGFAQNQQFGQGGNPLTSGQKGLLIYDSLLISFLFFISGYFPQ

SEQ ID NO: 198859 - protein, 98 aa, Zea mays
  Clone ID: MRT4577_112936C.1.pep
FGTRAIHLIELCSSYFCFELIPKEIRYTYLCLISYLLIFLDRIGWLHAWFTRNYVRTIAAADRDDLTDCGNVRCGPLVGRRPRRRRGSGWSRRSGRGR

SEQ ID NO: 198860 - protein, 291 aa, Zea mays
  Clone ID: MRT4577_112937C.1.pep
MSMATQASAATRHLLAAAWAPAAKPWQLSSQLALPSSSSRGPATLRASTEEVRELLLSPNCWFYANPAISTLLLSKKDCAAPQVGHRQSLGSCAKGRPGGIGIGMSMVSKQHPRTPSPSSCCLHLHHILYLRPVASSHHLVRHSVDVTKDDKPLEPPPPAAAETESTQQQEDEDGGPKLDPRRFEEKFAVLNTGVHECRSCGYRYDQAAGDPSYPVPPGLPFAQLPDGWRCPTCGAAQSFFESKSVEIAGFAQNQQFGLGGNSLTSGQKGLLIYGSLLIGFLFFISGYFLQ

SEQ ID NO: 198861 - protein, 150 aa, Zea mays
  unsure (1)..(150): unsure at all Xaa locations
  Clone ID: MRT4577_112938C.1.pep
MAMAMGHRQSGSCAKVRPGGIGIGIGMGMVSKQHQRTPPPSSYCLHLHHILYLRPVASSHHLTRHSVDVTKDDKPLEPLPPAAAETESTQQQEDEDGGPKLDPRRFEEKFAVLNTGVHECQSCGYRYDQAAGDPSYPVPPGLPFXALPDD

SEQ ID NO: 198862 - protein, 252 aa, Zea mays
  Clone ID: MRT4577_112939C.1.pep
SLLPECGAMCNLFPPNGRTLGQTIVYKLVAAKNAAHLPSLISLSSEDCDKLFGLFVSEFILTNNHLYQREELDVLRTLPMYKTVTGTYTSLLGSDHCILSPTAFFHPSDARCLSCSSNAHLFLQALGVEQLNDHEILVKFALPGFGNKTAQEQEDILTYLYANWKDLQLNSAVVETLKETNFVANANEFCKEFFKPEELLDPSDALLTSVFSGEINKFPAERFMSDGWLVILRKAGLRTFTEADMIIQCARK

SEQ ID NO: 198863 - protein, 511 aa, Zea mays
  unsure (1)..(511): unsure at all Xaa locations
  Clone ID: MRT4577_11293C.1.pep
RAVSSSPVHLPVLPPFLSPPASKPRFHNVTAXVMPTVSVKWQKELFPGIEIDTSQPPIVFKTQLYTLTGVPPERQKIMVKGGILKDDADWSTLGVKDGQKLMMIGTADEIVKAPEKGPVFVEDLPEEEQVIALGHSAGLYNLGNTCYMNSTLQCLHSVPELKSALLSYSDTVRGNGIDQASHNLTVATRNTFGDLDQSVRPVAPLQFLQTLRKKYPQFAQQHNNVYMQQDAEECWTQLVYTLSQTLTSDSSESAALPMKQLFGIDLVSRVHCAESGEESMETESVYSLKCHISQDVNHLHEGIKHGLKTELEKASPTLGRTAVYTRESRINELPRYLTVQFVRFFWKRESNQKAKILRKVDYPLELDVYEFCSDELKQKLQAPRQMLRDAENAKFGLKAQGKASGFKENEGSSSSAGESSSMDIDKAESSLPKKQLTGVYDLVAVLTHKGRSADSGHYVGWVKQDDGKWIEFDDDNPNIRKEEDILKLSGGGDWHMAYICLYKARMAELKS

SEQ ID NO: 198864 - protein, 118 aa, Zea mays
  Clone ID: MRT4577_112940C.1.pep
NPFGSSFRRTLQKKCSVESCFCLGGMQAWNPWCYSFIDARLHACRNFPEFLGAVRLSGMNGPEFDLTHQKTEQGSVFWFLYGLGAAFRGTTTAFVAEAISIGFSQLTGFLQSVTLYST

SEQ ID NO: 198865 - protein, 83 aa, Zea mays
  Clone ID: MRT4577_112941C.1.pep
KKKFSQGRTLGFYWGKEQEFPPPQFFLQKKNWQKKNPKSPPPRCSIKQGPIFFKKGKKKKGGIGIASPKRLPLKNHRLRGGNP

SEQ ID NO: 198866 - protein, 435 aa, Zea mays
  unsure (1)..(435): unsure at all Xaa locations
  Clone ID: MRT4577_112942C.1.pep
SDARALRVVLSLTGVKEGLRGHVVVEMSDLDNEPLVKLVGGELIETVVAHDVIGRLMIQCALQPGLAQIWEDILGFENAEFYIKQWPELDGMRFGDVLISFPDAVPCGVKVASKSGKILMNPDDGYVLREGDEVLVIAEDDDTYAPAPLPEVNKGFLPNIPTPPKYPEKILFCGWRRDIHDMIMVLEAFLAPGSELWMFNEVPEKEREIKLTDGGLDIGGLINIKLVHKEGNAVIRRHLESLPLETFDSXESVEDSIVHSDSRSLATLLLIRDIQSKRLPSKELKSPHRYNGFSHSAWIREMQHASDKSIIISEILDSRTRNLVSVSKISDYVLSNELVSMALAMVAEDKQINRVLEELFAEEGNEMCIRSAEFYLYEQEELSFFDIMVRARERDEIVIGYRLANTDQAIINPEYKSQIRKWSLDDVFVVISKGD

SEQ ID NO: 198867 - protein, 61 aa, Zea mays
  Clone ID: MRT4577_112943C.1.pep
DSLGIATFVSMALNNMFTKSRMPVPRGLCSPLWINQSGSYSPPCWTCLTCAKRRRTRSRAE

SEQ ID NO: 198868 - protein, 109 aa, Zea mays
  unsure (1)..(109): unsure at all Xaa locations
  Clone ID: MRT4577_112944C.1.pep
FSMLLGLAARAPTATIIPQWSQAPIAFLLTPYXMTSGVLXMTENPIVXPYRIQHAIATGILPLXALFLQQPSALLQQLPLVHLVAQNIMLQQLQQLVLANLAEYCQHHQ

SEQ ID NO: 198869 - protein, 123 aa, Zea mays
  Clone ID: MRT4577_112945C.1.pep
ASPPPTYSDGDVAERGAPCEGTNVLIRPRPSTCQGEVRDNTLPPDGDSTPPGGATPASGARQSLHEPSEYRLSAHPTYAGDLSGLMDWEIRMTHHMGHSLLHLQELVDAQISDKAGTLKFRCT

SEQ ID NO: 198870 - protein, 147 aa, Zea mays
  unsure (1)..(147): unsure at all Xaa locations
  Clone ID: MRT4577_112946C.1.pep
MPPSSSQGAGPSPMVSPLLPALDAPAAGRSFFLGALKLSPMAASSSFSHGDFPCSSLLGQQPGHPKPLCSASFFHLRPTSTFLLHGRPTAAPLPLLHXSSSSTLLSSLAQTSPMARCSRRPGASPPWLATRLFPCMRAAAQCAVDAR

SEQ ID NO: 198871 - protein, 134 aa, Zea mays
  Clone ID: MRT4577_112947C.1.pep
LPPWGPWAVPERPPPARWPSPSSLPGGGGEPGASRGTAGPRVKKFPAAFCSNLQAHKAKTARPGGPNGVPAHTQSLCPPGPLPSGKTRRPPGFKKSATPPQKVFFALGPGAVLFFPGGPAFSVLPLTPPPWGSW

SEQ ID NO: 198872 - protein, 151 aa, Zea mays
  Clone ID: MRT4577_112948C.1.pep
MASLHYLPPVKPSAIALGTAFNHAVSLAVLGPIFGDAYRRAQQANSKEEYFHSKEAATAAASWGSSILGSGIQAYGVGALINATGTLTYKGAAYLGSLIFFASAAPSIVSQVVTEKRPMDTIAIGAVARVLETVGLSMFLTYWGTRTNPFD

SEQ ID NO: 198873 - protein, 66 aa, Zea mays
  unsure (1)..(66): unsure at all Xaa locations
  Clone ID: MRT4577_112949C.1.pep
DSAQRDDETAGEDAGEVCWRGRHGGDXSRSASAKAIAILSIFFSWLASHTAGXLARDYLAVRCSIE

SEQ ID NO: 198874 - protein, 110 aa, Zea mays
  unsure (1)..(110): unsure at all Xaa locations
  Clone ID: MRT4577_11294C.1.pep
MEEVYANTMGAGALLDLWTSAVRPPRPTYPNRTRRPDTDHLSLQRWTFPPFYRLGVGSSSECGGLRGVMIRGSSIPGLGMPGSGSSLPGFRLTGSGRMPLVXGGLERYAE

SEQ ID NO: 198875 - protein, 404 aa, Zea mays
  unsure (1)..(404): unsure at all Xaa locations
  Clone ID: MRT4577_112950C.1.pep
AAVAVLLMATGLRAQLRVGFYDSSCPAAEIIVQQEVSRAVAANPGLAAGLLRLHFHDCFVGGCDASVLIDSTKGNTAEKDAGPNLSLRGFEVVDRIKARVEQACFGVVSCADILAFAARDSVALVSHCFLVSVDACLLILTXMISLHGFGIQCWTRLKSICVCSTFFXAHDAACSCLKELDALPGPGMGPTPNFIFLQYLLTLQSIHPSIHPSVRIXGGNAYQVPAGRRDGSVSRASDTNGNLPPPTANVAQLTQIFGTKGLTQKEMVILSGAHTIGSSHCSSFSGRLSGSATTAGGQDPTMDPAYVAQLARQCPQGGDPLVPMDYVSPNAFDEGFYKGVMSNRGLLSSDQALLSDKNTAVQVVTYANDPATFQADFAAAMVKMGSVGVLTGTSGKVRANCRVA

SEQ ID NO: 198876 - protein, 112 aa, Zea mays
  Clone ID: MRT4577_112951C.1.pep
VVPRVRFGPGWAVVLASCRGGLETFGCFELVCSAVPCSLGVRSIWVSISCQGEMGVADAFSGLAPFVLCSSVCGTCSVFVSWPCFVVHVQCFSAPPLFPVVLLWGGALGPCF

SEQ ID NO: 198877 - protein, 46 aa, Zea mays
  Clone ID: MRT4577_112952C.1.pep
PSFLSLSHDLHSHVPRKWRGQHEPWLTSRAPSAVTSSHPKVHEQTP

SEQ ID NO: 198878 - protein, 48 aa, Zea mays
  Clone ID: MRT4577_112953C.1.pep
TVHPLDGVPHRFLGQIGQIVKKVVPLHILTNDNIGQHYPTVNLHFSIK

SEQ ID NO: 198879 - protein, 126 aa, Zea mays
  unsure (1)..(126): unsure at all Xaa locations
  Clone ID: MRT4577_112954C.1.pep
SRVRLPPSPRAPASRPHSGEVLLLGCPFWNSCVRVRFRSVVCSLELILAHAKSMRPVWNNGPLYICMLISLIAVKFRVSWSSRWKIEQPLFLFRHLFRNDGYVAATPIVYANPHPAXXXXIKGRNT

SEQ ID NO: 198880 - protein, 577 aa, Zea mays
  Clone ID: MRT4577_112955C.1.pep
MALTDHRRRNRAAPRLDHTSPRRARTAHGTRRTVRIRTPFATATETALIDLSLSLMILMFQMSDSGLSEDSTQKHYKMIKLGLRNLKQSLPEETLSKLLSSPYSLSYPYSTRSFVMDSLDLLPFFLVKISTNESETTKQKNQILFSGIKRQMSPQEQLITDSLIPNALSVDELQSIPKRKHHKDAQPQEETHECYIDGWTITCTQFQPHGRIRSKKQKGKRAKSQEITSRKACYQCGREGHYFRNCLEKCSLQITSEMKLPQSPDMEYEQKCRETSANNVKTTPPCNLSSRACFGCGDTGHLVNGCPKKDVEINKVQKKRQHPQTHASTKNKQRKETTGRISYAVTGTIPYDKAAIFGTLVIHTTIATVLYDPRTTHSLISAQFATKYGIFKCPLRSRKTISAPEGKMLVNYICPKMMNPNGNEVNGANDNIPTLTTTSEKNESQRYSMNGMKNNKRNRKMFGYMIRPPQPQAKVTKHTDSQTEESSQAQLYEIQTPNQPSSPVGQAKLTRKELKARGACYYCKNEGHLIRECPKKRLDRIKKKAAKHDLSNNSEDPPFYKYDDEGRLISIHFGAKK

SEQ ID NO: 198881 - protein, 96 aa, Zea mays
  unsure (1)..(96): unsure at all Xaa locations
  Clone ID: MRT4577_112956C.1.pep
MGVALFALCLLSIDSSANYSHTIGRCCCXPPSSDHIPTTVHLPPPNYLPHTAHMTPPVXHLPSSXHLTPSFHVQSPVHLQPSPFHYPTQQHMPEPH

SEQ ID NO: 198882 - protein, 327 aa, Zea mays
  Clone ID: MRT4577_112957C.1.pep
METWKSQEITARNACYLCGREDHYLRNCPKKSSLPNIPEIKLSQSSDIEYEQKCTETSINVMKATQPSNLSSRACFGCGDTGHLINGCPKKDVEINKVQKKRQHPQTHASTKNKQRKETNGKISYVVTGTIQSDNAVIFGTLCPLRSRKTISAPEGKMLVNYICPKMMNPNGNEVNGANDNIPTLTTMNEKNESQRYSMNGMKNNKRNRKMFGYMISPPQPQAKATKHMDTQTEESSQAQLYEIQTPSQPSPPVGQTKLTRKELKARGACYYCKNEGHLIRECPKKRLDRIKKKAAKHDLSNNSEDPPFYKYDDEGRLISIHYGAKK

SEQ ID NO: 198883 - protein, 90 aa, Zea mays
  Clone ID: MRT4577_112958C.1.pep
REESSRGCAPKPSRGLLLWRGACWRWRARPDPTTGEDRSDGAEPVSHGLPDRAQRRVGPTVTGAPVPGCGGRCRADAAVGVTRARGLYWP

SEQ ID NO: 198884 - protein, 201 aa, Zea mays
  Clone ID: MRT4577_112959C.1.pep
ASQNNTLNKIVDEQTFKTQKDAQPNQQTSDLGTCCCCEYYGIPCRQISINESETNALSVDESQGIPKRKHHKDAQPQEETQECYIDGWTITCTQFQPRVRIRSKKQKRKHGKSQEITSRKACYQCGREGHYFRNCPEKSSLQITSEMKLSQSSDMEYEQKCRETSTNNVKTTPPCNLSSRACFGCGDINHLVNSCLREPCV

SEQ ID NO: 198885 - protein, 226 aa, Zea mays
  unsure (1)..(226): unsure at all Xaa locations
  Clone ID: MRT4577_11295C.1.pep
MALDGSMDAVTPFPQRHRTAVMPTVSVKWQKELFPGIEIDTSQPPIVFKTQLYTLTGVPPERQKIMVKGGILKDDADWSTLGVKDGQKLMMIGTADEIVKAPEKGPVFVEDLPEEEQVIALGHSAGLYNLGNTCYMNSTLQCLHSVPELKSALLSYSDTVRGNGIDQASHNLTVATRNTFGDLDXDAEECWTQLVYTLSXTLTSDSSESAALPMKQLGIDLVSRVH

SEQ ID NO: 198886 - protein, 610 aa, Zea mays
  unsure (1)..(610): unsure at all Xaa locations
  Clone ID: MRT4577_112960C.1.pep
WVKGRRSLWFWKWGSWXAWVDSSFTGTGRRRQVKKVLGNICRMKWPGLVIEDGKEVPVTRWDQYALAINAQHGNAQAAVWHDFWKHYKLPEGDTHTEHAHSVFHRNAASVVGDMMYYARIQHSIPWIAVNDAAWHALCRYWASVEFKAKSVRHSSNRGTESYHRYGGDDHFRLAKRMEASTGAVPSDVQIYLRGHRGPDPANPDVLYSQKATDRVAAYGEAMTSQHGPDYDWRTSPIDPQAVYASGGKAHGRYTMFANVIDSSQTPPATLPTHEQEDRLDFVDTLLNSGGIDGDRRPHLVNSCHKKVVEINKVQKKRKHPQTHASTKNKQRKETTGKISYAVTGTIPYDDAVIFGTLVIHTTIAIVLYDPRTTHSFISSQFATKYGIFKCPLRSRKTISTPEGKTLVNYICPKVSVKINGIDFPADLLVIETMGKDVILGKNWLQRTKAMMNPNGNEVNDADDNIPTLTTRNEKNESQRYLMNGMKNNKRNRKMFGYMISSSQPQAKAPKHMDTQTEESSQTQLHEIQTPNQPSPPVGQAKLTRKELKARGGCYYCKNEGHLIRECPKKRLDRIKKKAAKHDLSNNSEDPPFYKYDDEGRLVSIHFGAEK

SEQ ID NO: 198887 - protein, 106 aa, Zea mays
  unsure (1)..(106): unsure at all Xaa locations
  Clone ID: MRT4577_112961C.1.pep
TAIFFRSEVPKKGFXVFGKKNSPVKPIKLYNPGKNPAFSKEGLRQTVAVVTVAFPAPPLLLGKGRICISASPSREDFIKRLGVFNKVGGLVGIKNFPVEQKKTPAV

SEQ ID NO: 198888 - protein, 72 aa, Zea mays
  Clone ID: MRT4577_112962C.1.pep
PPRKPPGPTLSACLRTPTFGPSPPRGSPSCPKKSRLPPASPASAGRRFLGPAPMAGEGLRRAIWTPMRFGRF

SEQ ID NO: 198889 - protein, 107 aa, Zea mays
  Clone ID: MRT4577_112963C.1.pep
KNQMMAIINKLMWLACELISVAFRALSFVVVGKHQKWLAIGVTIIGTSIMASTLGPMSSRVIRHRIEASNLRSIRKSSMESRSRSFSESVMSDFEQLNNERKILYAI

SEQ ID NO: 198890 - protein, 296 aa, Zea mays
  Clone ID: MRT4577_112964C.1.pep
MKLSQSSDMEYEQKCTETSTNNVKTTPPYKPSGRACFGCGDTGHLVNGCPKKDVEINKVQKKRQHPQTHASTKNKQQKETTRKISYAVTRTIPYDDAVIFGTLVIHTTIATVLYDPRTTHSFISAQFATKYGIFKCPLRSRKTINAPEGKMLVNYIRPTMMNPNGNEVNDANKNIPTLMTMNEKNESPRYSMNGTKNNKRNRKMFGYMISSSQPQAKAPKHLDTQTEESSQTQLYEIQTPSQPSPPVGQAKLTRKELKARGACYYCKNEGHLIRECPKKRLDRIEKKSAKHDLSNN

SEQ ID NO: 198891 - protein, 44 aa, Zea mays
  Clone ID: MRT4577_112965C.1.pep
DSTPLGGPSFTGHPQPPHLRSPRSRRWQSRSMITGLALLGGHFL

SEQ ID NO: 198892 - protein, 574 aa, Zea mays
  Clone ID: MRT4577_112966C.1.pep
MESPSDFGLSKDSTQKHYKMIKLGLRNLKRSLPEETLSKLSTMPYSLSYPHSARSFVMDPLDLLPDFLMLDLGMSTTSDVTKCKECGVLTSQNNTINETADEQTFKTQKDAQPNQQTSDLGTCCCCEYYGIPCRQISTNESKTTKQKNQILFYGINRQMSPQEQLIADSLIPNALSVDELQSIPKRKHHKDAQPQEETQECYIDGWTITCTQFQPHRRIRSKKQKGKHGKSQEITSRKACYQCGREGHYFRNCPEKSSLSDTPEMKQPQSPDMEYEQKCTETSTNNVKTTPPCNLSSRTCFGCGDIGHLVNGCPKKDVEINKVQKKRQRPQTHASTKNKQRKESTGRISYAVTGTIPYDDAVIFGTLVIHTTIATVLYDPRTTHSLISAQFATKYGIFKCPLRSRKTISTPERKVLANYICPKMMNPNGNEVNGDNDNIPTLTTMNEKNESPRYPMNGMKNNKRNRKMFRYMISSPQPQAKATKHMDTQTEGSSQAQLHEIQTPNQPSPPIGQAKLTRKELKARGACYYCKNEGHLIRKCPKKRLDRLEKKAAKQDPNNNPEDQPVISTTMKIA

SEQ ID NO: 198893 - protein, 312 aa, Zea mays
  Clone ID: MRT4577_112967C.1.pep
MGILVITVDLDCCRCRAKITKVLDCLKEEFCIEKVEFDDKKEKKVVVVRGKFDAEKLCKKVWSKAGKIVKGIVIAEVWPIPAPPKECKPEAPKCCDCEKCKPKPKPEPPKCCDCEKCKPKPKPEPPKCCHCEKCKPKPEPPKPEKCCSACCHCKPKPDPKPLICCVCCHCKPEKKEEKKEEKKDEKKPAPAKTEYKFVPYPYPLPNPAMCPSWPWQCPPQQQCQCCQKPPPPPPKSPPKPPPCTCSSHAACVCGKTPPAVWPPMPPRRRRREPGLRHVTLRACFFMYSSLLAGCCAAIGSGLRCYLGRCRSV

SEQ ID NO: 198894 - protein, 205 aa, Zea mays
  unsure (1)..(205): unsure at all Xaa locations
  Clone ID: MRT4577_112968C.1.pep
MGILVITVDLDCCRCRAKITKVLDCLKEEFCIEKVEFDDKKEKKVVVVRGKFDAEKLCKKVWSKAGKIVKGIVIAEVWPIPAPPKECKPEAPKCCDCEKCKPKPKPEPPKCCHCEKCKPKPEPPKPEKCCSACCHCKPKPDPKPLICCVXLPLQAGEEGREEGRKEDEKKPRRPKRVQVXPYPYPLPTPXCPSWPVQCPQQQCQC

SEQ ID NO: 198895 - protein, 94 aa, Zea mays
  Clone ID: MRT4577_112969C.1.pep
KLIFRLREYCLGKKTIWSSNSRERDNKVGSAQQVIIVLPFALAFATLPLFATSLRIRGALPWTWCTQAFYKLEQNCYIKRQQHTTESMPCSAKL

SEQ ID NO: 198896 - protein, 217 aa, Zea mays
  unsure (1)..(217): unsure at all Xaa locations
  Clone ID: MRT4577_11296C.1.pep
VQFVRFFWXRESNQKAKILRKVDYPLELDVYEFCSDELKQKLQAPRQMLRDAENAKFGLKAQGKASGFKENEXGCVVLRVSXIISNSCEEINGSTVTLSFLFGSSIHCHAIRAFHFRDHPVALGNHPVWTLTKLXSLPKKQLTGVYDLVAVLTHKGRSADSGHYVGWVKXDDGKWIEFDDDNPXIRKEEDIXKLSGGGDWHMAYICLYKARMAELKS

SEQ ID NO: 198897 - protein, 287 aa, Zea mays
  unsure (1)..(287): unsure at all Xaa locations
  Clone ID: MRT4577_112970C.1.pep
MGILVITVDLDCCRCRAKITKVLDCLKEEFCIEKVEFDDKKEKKVVVVRGKFDAEKLCKKVWSKAGKIVKGIVIAEVWPIPAPPKECKPEAPKCCDCGKCKPKPKPEPPKCCDCDKCKPKPKPEPPKXATGEKCKPKPEPXNQRNAAVPVVTXPKPDPKPLICCVCCHCKPEKKEEKKEEKKDEKKPAPAKTEYKFVPYPYPLPNPAMCPSWPWQCPPQQQCQCCQKPPPPPPKSPPKPPPCTCSSHAACVCGKTPPAVWPPMPPPVWPPPWGTCNVVTEESPCSVM

SEQ ID NO: 198898 - protein, 67 aa, Zea mays
  Clone ID: MRT4577_112971C.1.pep
MATAVTPAFPVRDYLHRRRVRLYAKADPHSQGRLLRTGRVRYAPDGGGAEGLGPPAFAGGEEQTPQE

SEQ ID NO: 198899 - protein, 42 aa, Zea mays
  Clone ID: MRT4577_112972C.1.pep
FAVNTQVHLLGLAARAFYRMTVTFSSSTLQTTNTCARTHFPL

SEQ ID NO: 198900 - protein, 82 aa, Zea mays
  Clone ID: MRT4577_112973C.1.pep
FKNLDLEKQLWNGCWTKFLHNNFLFQTWWVHFYFISFLSTRRLNQLYWYLCLNNLKELMGRKQPCSWCPRDQVKNLVGAALG

SEQ ID NO: 198901 - protein, 82 aa, Zea mays
  Clone ID: MRT4577_112974C.1.pep
PEWTKHWSWHCYLGFPKILLNMDMSHNTKHQRHNKHLVVLVAGDGGEAGRQRRTAQSPVDGEPPLTASPGDVVCLDGPSQVT

SEQ ID NO: 198902 - protein, 278 aa, Zea mays
  Clone ID: MRT4577_112975C.1.pep
MVDDSLDRQLGEYRGKISALVSSKPEPSSLASVAGQNESVGGFHGQHEPITGSEEHGSSIVDAPTKGRLFAEAVVGHKDFTESAAGKASSENEEGQAVSLEDDVGISTDADEELPVSEDDPEVLLRRLQELADENYSTGNNCFVFPEVVKADSMIDLYLNRSMSALASESDVFVKGAFNGWRWNRFTETMHRSELRGDWWCCELYIPKQAYRLDFVFFNGDTVYENNNHNDFFLEIESGIDEHSFEDFLVEEKRKELERLAAEEAERKIQAEEERKRE

SEQ ID NO: 198903 - protein, 403 aa, Zea mays
  unsure (1)..(403): unsure at all Xaa locations
  Clone ID: MRT4577_112976C.1.pep
HASAHRSNQTSAPEYRLLFTNLGGEKRFASIVAKRLEXLGALTQGDRGAGPSLSAFNYDSNYGKKALTMMYRGIMEQDAFPVVPFECSENQATLEEFITKAKAALVSVGIIRDPIMCNGKNGGKLTGRIIDSDMHDVARFLNRILGLFPDIQNRLFDLFTSILDIVIQNARIEGQLDSGIVDIKAKSVEMKESPKTVHVDTVSGASTILYTFTVDRGVSWELANSILEERLKDKAGSSSDGFYESRKEWAGRRHFLLAFEGSAEGLYIVIRPAVGEASREMSLVELKSKYRKVSSVDKISKGWQEEYDSSSKQCMHGPKCKLGSNCTVGRRLQEINILGGLILPVWGAVAKALAKQARQIHRRIRVVRLETTTENKRFVGLIIPNSAVESVLEGLQWVQDIDE

SEQ ID NO: 198904 - protein, 49 aa, Zea mays
  Clone ID: MRT4577_112977C.1.pep
KQARQIHRRIRVVRLETTTENKRFVGLIIPNSAVESVLEGLQWVQDIDE

SEQ ID NO: 198905 - protein, 549 aa, Zea mays
  Clone ID: MRT4577_112979C.1.pep
MPSRSPPIARLLHLRRLSKSARHYLLRFAAIAKEHSDQPPPPPLPSRPRSPHPYDYNRLMSALAASVDGDGHHPGAGAERALHLLDEMRSLMGRRPDAACFTTAAAAFSSASQPGAALAVLNAMATDGVMPDAAACTVLVGVYACRLHWFDAAYEVVRWMTANGVALDVVTYSTLISGLCSAGRVAEALGVLDLMLEEGCQPNAHTYTPILHAYCTSGMIHEAKELLETMIAAGFAPSTATYNVLVEALCKACAFNEVDALLEESSAKGWTPDTITYSTYMDGLCKDGRVHKSFALVDKMLSVGLRPNEITLNILLDGVCRRSTAWAAKCLLECSAEIGWHVNVVNYNTVMRRLCDERRWLSVVKLFVDIVKKGIAPNSWTLSIVIHSLCKLGRLHEALCLIGSEEFVADVVTYNTLIRYLNFLGKAYEAYLLLHHMIEKGIAPNDTTYSLLIDCLCKEGKFLVALGCLNRCMEGGLSKAVVSSILRGLIAGGKLRELQALIGWILGQGFVLDVYIYQELIISFCKKGYCRGLEMYIVCHILERMIRLR

SEQ ID NO: 198906 - protein, 274 aa, Zea mays
  unsure (1)..(274): unsure at all Xaa locations
  Clone ID: MRT4577_11297C.1.pep
SPVNVKWQKEVFPGIEIDTSQPPIVLKSQLYTLTGVPPERQKIMVKGGLLKDDADWSTLGVXDGQKXMMIRPAAMMLPFFILLVLVFIIFTEMSCPNIYGHSAGLYNLGNTCYMNSTLQWVRSVPKLKAALLSYSDTVRGDGIDQASHNLTVATRNTFGDLDQSVRPVAPLQFLRTLRKKYPRFAQQHNNVYMRQDAEECGTQVGCTLSQTLTSDSSESAALPMKQLFGIDLVSRFCPPLPCIICPIYVYVTFCSTIVVWCDRLFFTQTGRRGA

SEQ ID NO: 198907 - protein, 36 aa, Zea mays
  Clone ID: MRT4577_112980C.1.pep
HFPVLIFCVLLVLQKVSTAKCENCNRYYLPAQPTRP

SEQ ID NO: 198908 - protein, 68 aa, Zea mays
  Clone ID: MRT4577_112981C.1.pep
APPGNLGRLNKKSWLSVGTGTGFVIITETPSCGLVVGVDQSHPSGMWPFGRLSEFLVRTTHLWIFVSP

SEQ ID NO: 198909 - protein, 131 aa, Zea mays
  Clone ID: MRT4577_112982C.1.pep
MASRCFFPRDAAAADHPQSKAAAAQALERLHHGGRLLSREDVGGAVRVKIVVSKRELKQMVAALGDGGLVAAASSERHRQRAAAAAGPGAEQRLQSLRRRSVRRAAEAAARRMQAGGEWEPGLQSIPEEVC

SEQ ID NO: 198910 - protein, 112 aa, Zea mays
  unsure (1)..(112): unsure at all Xaa locations
  Clone ID: MRT4577_112983C.1.pep
MRVLVVALALLALAASATYTHTSGGCGCQPPTPVHLPTPVHLPPTVHLPPTVHVSPTVHLPAPVHLPPPVHVPAAGHLSAAPCQYPTXRPGLNXYSQPHPCPCQQTDSNPCQ

SEQ ID NO: 198911 - protein, 64 aa, Zea mays
  Clone ID: MRT4577_112984C.1.pep
PRWRAASFLPDLNVYLVTHSQMVEDIPMKQHMLVPSFVGGGRKRIHPLPYADSSLPSWIAYSTR

SEQ ID NO: 198912 - protein, 106 aa, Zea mays
  unsure (1)..(106): unsure at all Xaa locations
  Clone ID: MRT4577_112985C.1.pep
LGQCVQFLRHQCSPPVMPYCXPQCQSMRQQCCQQLRQVDPQLRYQAIFGLVLQSILXQQQGXSGQVTCLLVVQIPQQLXGMCGMEQPTPCPSAAAGGVPRWRNYVL

SEQ ID NO: 198913 - protein, 119 aa, Zea mays
  unsure (1)..(119): unsure at all Xaa locations
  Clone ID: MRT4577_112986C.1.pep
MRGVCSLHLALLAXLAAXSSTSTHTXSCGCGXCSPPXPVHXPSSVHLPPXXVHLPPPVHLPPPVHLPPPVHLPPPVHVPSSVHLPPPPCHYPTQPSRPQPHPQPHPCPCQQPHPSPCQL

SEQ ID NO: 198914 - protein, 126 aa, Zea mays
  Clone ID: MRT4577_112987C.1.pep
TDSQRLLSTASGRAGPQVGRMSLARPLVASPVCYRDPPGWSPVARVAQPATFVDGESVAWPARAGRPRFPLCPSVSRSAPTRFGPPLAYAPGVFPVSPPGRRRSDYALVFWWVGVKPSTEVTTTYS

SEQ ID NO: 198915 - protein, 395 aa, Zea mays
  unsure (1)..(395): unsure at all Xaa locations
  Clone ID: MRT4577_112988C.1.pep
IGTKVAQCLAKRVXCSSSLQKAGIFDWVDASSDDECTAIMTSMEKTKDXANTQAKNLTSQRYGGRGSIATVGSISDCTGGKSGLNSSKKPEPVGSTDDLYDIGPYTQMAAEAMEALSNASTVNYVVRENAHPESSVLRTNMGKESKANKICFELSLQKRIGGSSSSVKKHPSKLKDKKSRKQMTRKAKGSIDSTTIEGDTNHEVSEGVKGSGASDSNVVGSNAVMCPKRKRTYMFISRSSKVQFNKAGSSTTPRSKSKEVVDVSTTKPVSVSGPDLNQLARVEKQFTSAQEDHNSSLTNRGPLGELNSKCSHFRTQVSKKPLKRGLVKSPGSRELVSLLRNEASLVLQTSRQRRNMSKVHVLLSHSMDKETIKMQTKVVAQYVSYRYQKQYLMVC

SEQ ID NO: 198916 - protein, 126 aa, Zea mays
  unsure (1)..(126): unsure at all Xaa locations
  Clone ID: MRT4577_112989C.1.pep
MRVLLVALALLALAASATSTHTSGGCGCQPPPPVHLPPAVHLPPAGHLPPPEHLPPPVHLPPPVHLPPPVHVPAAXHLPPPPCHYPTQPPRSKAYPQRHPCTCQQLHPSPCQLQASCGVGCSTDPG

SEQ ID NO: 198917 - protein, 144 aa, Zea mays
  Clone ID: MRT4577_11298C.1.pep
VMLPLAPSSAAANAMVSAATFWPPEVALFDAAPVVASSSVLSTLPPLAVSSELFSATFPSSFMGCESFVLPFMSSKLVWLWAVPSSPPTVSFDSVGVSLVLLLAWPPVLLSSVVDASCTVVLSAWPPVLLSSVDASSDAWADAW

SEQ ID NO: 198918 - protein, 551 aa, Zea mays
  unsure (1)..(551): unsure at all Xaa locations
  Clone ID: MRT4577_112990C.1.pep
SRPAGPGSYILLVNAYESSAEAQFLEDFVADTSGQDNAKSTATVPPPSVIDRVMKDLFSDETGNYMEAENKYSRAMRGAPXRSLFGQFCLHALWFGNCNICAIAALWIDFVREIRWCWEESERLPRMKSTSSIDLSSCLIHQKLQMLTICIERKRSLNREKGAGYKDETXNSMAVNKSRKGXXAGVVPKMMLLNTFQEMHAPYTQDAPLMTEDMHEERLHAAEAFGNAIGLSGQLERDILCSDMSAFKAANPDAVFEDFIRWHSPGEWLSEDKTDGNAGWPPKGKLSHRMSQHGNVWRKIWNDALPLPVSEQKSLLDPVREGEKVLHYLETLRPQQLLEQMVCTAFKSSADILNKTMYGGFKEMKTKMDRLYVTMASTLKSFLGNSDVNDLVGGLKRLCQVPEHRPRVRILAASINRKLIDAPRLAQAIFYDYYNFYLPKMGTSLESICYEKEFTTKEKVGMYERDAVSNLFPPPTANQSWRKVLSMGNLLNGHEPMQREIIFSVQERISNGHYSSPTPLCTNNEKIQTHRMYISGTSNDLWVALSVTSWD

SEQ ID NO: 198919 - protein, 79 aa, Zea mays
  unsure (1)..(79): unsure at all Xaa locations
  Clone ID: MRT4577_112991C.1.pep
FTTQCCHQLRQVXPQQRYQAIFGLVLQSIMQQQPQNGQVXGLLTAHIAQQLTAMFGLHHLTSCPYAAAGGVPCETINVV

SEQ ID NO: 198920 - protein, 64 aa, Zea mays
  Clone ID: MRT4577_112992C.1.pep
RIGTKGRYKIWNGGWQWLGRPGQTGVIGPFLKIWRKEFLGLESLRKLRWTFWRTRTITLQGRNR

SEQ ID NO: 198921 - protein, 75 aa, Zea mays
  Clone ID: MRT4577_112993C.1.pep
STHARTNAATLNASTDDCNGECSSVNSPSNCRSNHDTHDDMLELLGPLLGTSSIARRKEILAVILTVSRLDFTLD

SEQ ID NO: 198922 - protein, 97 aa, Zea mays
  unsure (1)..(97): unsure at all Xaa locations
  Clone ID: MRT4577_112994C.1.pep
CVEFLGHQCSPTGTPYCSPQCQSFRQQCCQQLRQVEPQHRYQAIFGLVLQSILQQQPQNGQVSGLLAAQIAQQLTAXMCGLQQPTPCPYAAAGGVPP

SEQ ID NO: 198923 - protein, 82 aa, Zea mays
  Clone ID: MRT4577_112995C.1.pep
APTGQYKSVIRYHACHPPLHELHTRELKALITVTPIVQNKCSTNQPTLLLCRAISMHWTILQFSLKYFQMVIGFDGASRIEP

SEQ ID NO: 198924 - protein, 191 aa, Zea mays
  Clone ID: MRT4577_112996C.1.pep
MRQRIWLELIKDYELEIYYHRDQVNVVADALSRKSQVNMMVAHLMPYELAKEFDRLSLGFLNSTQGVTVELEPTLERDIKDGQKNDEKINEIRYLILDGKGKDFWEDAEGVLKKCLGMPEEQLPIEDLEVQEDLTYIENPIQILGIADRVTRRSTIRMCKVKWGHHSEEEATWEREDDLKAKYLEFFASQP

SEQ ID NO: 198925 - protein, 172 aa, Zea mays
  unsure (1)..(172): unsure at all Xaa locations
  Clone ID: MRT4577_112997C.1.pep
MRVLLVALALLALAASATSTHTSGGCGCQPPPPVHLPPPVHLPPSVHLPPPVHMPPPVHLPPPVHLPPPVHVPSADHLAPPPCHYPTQPSRPQTNAHXHPCPCQQPHPNPCQLHGTCRVGSTPILXQCVEFLRHQCSPTETPYCXPYCQSLRQQRCQQLMQVEPQHRNQAIF

SEQ ID NO: 198926 - protein, 64 aa, Zea mays
  Clone ID: MRT4577_112998C.1.pep
MASKRATSKAATFIDDAAMAALLAKKKGKAPLVDDIPQEAGSQQQKSTSRQSAYPTGHCAHMQL

SEQ ID NO: 198927 - protein, 108 aa, Zea mays
  Clone ID: MRT4577_112999C.1.pep
PRGRGSTPILGQWVEFLRHQCSPRGTPYCSLQCQWLGQQWCHQLRQVEPQPRYQGILGLVLRSILQQQPQKGQVSGLLAAQIAQQLTAMWGLQQPTPCPYAAAGGVPP

SEQ ID NO: 198928 - protein, 62 aa, Zea mays
  Clone ID: MRT4577_11299C.1.pep
VTVYITFNAVDLLTVTDLKENLKYYLSNFIIMRMPTDFFKDFLWAQEGQVVKVYSLPLKILS

SEQ ID NO: 198929 - protein, 70 aa, Zea mays
  unsure (1)..(70): unsure at all Xaa locations
  Clone ID: MRT4577_1129C.1.pep
DCFKACGIKCFHNQPYPGPNPGPTLLRPMPPPPSPPKPMXPRPSPMPPKPSPXRPLPKPMATSCIRVEQH

SEQ ID NO: 198930 - protein, 37 aa, Zea mays
  Clone ID: MRT4577_112C.1.pep
PSPFSLAREQNELFSFTRPLEIAVSVAQTATALLFLT

SEQ ID NO: 198931 - protein, 111 aa, Zea mays
  Clone ID: MRT4577_113000C.1.pep
LPGTCGAGTTQILGPRVAFLRHRADQTATPYCSPERQSLREKCCQQLRQVEPQHRYQAIFGSVLQSILQHQTQSGQVAGLLAAQIAQQLTAMCGLQQATPCPYAAAGGVPH

SEQ ID NO: 198932 - protein, 112 aa, Zea mays
  unsure (1)..(112): unsure at all Xaa locations
  Clone ID: MRT4577_113001C.1.pep
MRVWLVALALLALAASATSTHTNGGCGCXQPPPPVHLPPTEHLPPPVHLPPPEHIPPTVHLPTPVHLPPPRHVPPPVHLPTPPCHYPTQPPRAQTHTQPHTCACQQPHASPC

SEQ ID NO: 198933 - protein, 124 aa, Zea mays
  Clone ID: MRT4577_113002C.1.pep
YSDSIDNHFSFQYITLNQSASSSCDILLKETEAWVAVADQWPMGAGYAAAVAGGLPASSHCLLRHASSDEEHGTISPATLRLSRGRGRLQWVRIERAAARSSETRLRPGERAGLVQIPARPASR

SEQ ID NO: 198934 - protein, 158 aa, Zea mays
  Clone ID: MRT4577_113003C.1.pep
MAWVSPLARIGASTLLKARSQSLPAALYHEKVIDHYENPRNVGTLDKKKSSVGTGLVGAPACGDVMKLQVEVDENGKIVDAKFKTFGCGSAIASSSLATEWVKGKTVDEALKLKNTDIAKELCLPPVKLHCSMLAEDAIKAALADYRIKQESLKNQSA

SEQ ID NO: 198935 - protein, 196 aa, Zea mays
  unsure (1)..(196): unsure at all Xaa locations
  Clone ID: MRT4577_113004C.1.pep
SWEELCAWFTANFASAYQQHGVEAHLHSVRQEPRENLRAFISHFTKVRGTIPCISDGSIITAFRXGVQDKKMLEKLTTHDLETVATLFTLADKCARAAEGRAWHSTLQTGVTRTGGLGATTQGGGKKKKKNHDHDRPXSGAPVAATATGGWEERGKRPRQQGSDSGSCPVHPXARHSASECWEIQKLVKHISERRA

SEQ ID NO: 198936 - protein, 63 aa, Zea mays
  Clone ID: MRT4577_113005C.1.pep
GVLKSVSSTLIGVSPEFEVALYTLCFFVGGEDNRVDIGPYSVNVKCYRLGNNKIGSAFPIAEN

SEQ ID NO: 198937 - protein, 59 aa, Zea mays
  Clone ID: MRT4577_113006C.1.pep
TIKSLGFFYLLGPGSVFRPATWIPCVWAWCHGLKWPRILLKKKKKKKGGPLKRIQPRSR

SEQ ID NO: 198938 - protein, 474 aa, Zea mays
  Clone ID: MRT4577_113007C.1.pep
MEGLIKGLVHVAIDAVEDAVRERDHGRADDDEVPRRRAAQSSDPDDDGEEERDERSRSTWAEVVSEQKGSDPDERRDHRSSGRDNRHERRDDEGWKRADGRNQQQHHAGRQNQCEGEERWDGSGSRRRQQQQQAQGYGNQHQEEERINDGGWQTVGEKKRHGRPQQSEAWNGYRKPPSEQKYSEDVGHIHQGLNFEPTREELNSLSKACSRLWELDMNRIVPGKDYIIDCGKGKKVYQKGDMASESLFSWLGDDVLRKPTYSRFCALLDNYNPHQGYKEVVTQQDKHEEIAFVEEIARTAPIKYLHRYLVQKGAVPQDYEDFKRMLTSLWFDLYGRGGNSSCSSAFEHVFVGEIKGRGQGESEVSGFHNWIQFYLEEAKGNVDYQGYIFPRRRGESPDSEIQLLTVQFEWHGVLKSVSSTLIGVSPEFEVALYTLCFFVGGEDNRVDIGPYSVNVKCYRLGNNKIGSAFPIVEN

SEQ ID NO: 198939 - protein, 85 aa, Zea mays
  Clone ID: MRT4577_113008C.1.pep
IDSFIDSFHQNTIPMCKNRTHPPHTKTPNCGSGEGDIHCKNTIYRQAEQTRHWGSGQDYIYIHCKNKMDMREKPGATSKGDKVTR

SEQ ID NO: 198940 - protein, 128 aa, Zea mays
  Clone ID: MRT4577_113009C.1.pep
IGYLEAGRDTLAFWSLAYAACLAVPKTSSASGLLGSPKLSPKKTYPNLPLAYCIRMPADDTISNSTPSLGSVFLTKFPFRRLGLPGCCQGRLSHNTYLPYVLSVGEPFMSATSAAMTLSITILTSELF

SEQ ID NO: 198941 - protein, 56 aa, Zea mays
  Clone ID: MRT4577_11300C.1.pep
TGYCTSGLTPRTPLRNLPRPLQICRARNPQGPKCPTRDKPKGLLINKWGDPVLGTP

SEQ ID NO: 198942 - protein, 347 aa, Zea mays
  Clone ID: MRT4577_113010C.1.pep
MLIEELPGDPGGGRGEGGEDELLLPRREDGDAAEGESGVVMRVAVDAKRAAVGVSARMLFYPTLVYNVVRNRFEKHFHWWDQIDEHVLLGAVPFPSDVLRLKTLGVCGVVTLNESYERLVPTSLYEAHGIENLVLPTRDYLYAPSFVNLCEAADFIHRNASCGKLTYVHCKAGRGRSTTVVICYLVQYKNMTPAEAYEHVRLRRPRVLLASAQWQAVQEFYQLTVKKTGRSTWLDNPLIKPPLFLATRKLVAFDDSAFVMVSESDLEGYNADALALNMGSRLWEISLIYRVQFASKTAFAGFSYLWLRCRACKEALPENLGRDSCSLEVDQLTTGHPCLLQGVVVNP

SEQ ID NO: 198943 - protein, 76 aa, Zea mays
  unsure (1)..(76): unsure at all Xaa locations
  Clone ID: MRT4577_113011C.1.pep
GIQHAIAARNIPLHPRXKEWSALSLVQPLVQAIRAQEPEKLGPTVSNQGALGDLHPYSEEQQLVALRQLPTLDRAA

SEQ ID NO: 198944 - protein, 49 aa, Zea mays
  Clone ID: MRT4577_113012C.1.pep
PLQSRPTVKGCILQPCKFSPGPSPIESGSCRQIVVQLMIRAIASAAIIF

SEQ ID NO: 198945 - protein, 51 aa, Zea mays
  Clone ID: MRT4577_113013C.1.pep
DRSDDPPEAQSLTDLRVTGHILVGWKKTVRCDTNLIECHKLSNWMTHAALQ

SEQ ID NO: 198946 - protein, 138 aa, Zea mays
  unsure (1)..(138): unsure at all Xaa locations
  Clone ID: MRT4577_113014C.1.pep
PPLAPFALPASRRALAVSLLLLVGPLSRLLSGLFSLFRSCGLALSFGPPVFPPYASGPVFPPPSHPLPXPPVLPLPFLAPGSPPPPPPPPXPPPPPPVPPFPGPPPRPLLLLLFPFAPLFFPFSVASFFQTLLWRSLL

SEQ ID NO: 198947 - protein, 80 aa, Zea mays
  Clone ID: MRT4577_113015C.1.pep
KGGWRAKTLAIARSAREVYALLLENHVHWSRRRGVPSSIVRHGHMLLLRRRPWSCEQVHAKKPHRLHRGGGRRCSRGGHR

SEQ ID NO: 198948 - protein, 163 aa, Zea mays
  unsure (1)..(163): unsure at all Xaa locations
  Clone ID: MRT4577_113016C.1.pep
MQIFXNTPTKNTCTLEVEASDTIDNXVKDNTQHNEGLPPEQQHLSSYGKLLEDXAPLDDYNIQKESTLHLVLLLRGGAKKGXKMTLTXKPKNTKNKHKNEKLSALQSYKAHFATGYGTRLXKSAPSDRAXAGILMVNHFDRHYCEXCGLTYTYKMNAQLIDKM

SEQ ID NO: 198949 - protein, 56 aa, Zea mays
  Clone ID: MRT4577_113017C.1.pep
SVVAPNDRLYLHTSLSRIAASFLLVFRVLVASNRMHRGTYTSFLPNTLIRWRMCKQ

SEQ ID NO: 198950 - protein, 61 aa, Zea mays
  Clone ID: MRT4577_113018C.1.pep
NQHACKPPYLTKKTAPKLAGGDSKLKNFVFFFLTHTPKNTYFGHPARPRFFWFTPPHRLDR

SEQ ID NO: 198951 - protein, 45 aa, Zea mays
  Clone ID: MRT4577_113019C.1.pep
SHMQHNLERDTTDIESILESISQSLMPNMSDYLVYRLLLCLVVMH

SEQ ID NO: 198952 - protein, 114 aa, Zea mays
  Clone ID: MRT4577_11301C.1.pep
ADWSSGRTSRPRRRLFLQLVSTRLQRPTKKELPETRLLIFLLLPTMRPPWSSLSTMQRLLLPMSSPRTSQQLLIFLQLVTKNLSTTQRLILIWSGIRPATEADPTHKLLALPKP

SEQ ID NO: 198953 - protein, 137 aa, Zea mays
  unsure (1)..(137): unsure at all Xaa locations
  Clone ID: MRT4577_113020C.1.pep
IRLELVLDRECPPFFFFFFGGDLYLKTQVLDKTLTVKTIXTLEEEPCDTMTTGKVKIQDKEGIPSDQERLSFADKQVEDGRTLGDYNIQKESTLQLALRIRGGMQIFEKTLTGKTITRGGEASDTMDNAKAHIQDKE

SEQ ID NO: 198954 - protein, 208 aa, Zea mays
  unsure (1)..(208): unsure at all Xaa locations
  Clone ID: MRT4577_113021C.1.pep
MRVLLAALDLLALAASATSTHTSGGCGCQPPPPVHLPPPVHLPPPVHLPPPGHLPPPGHLPPPDHLPPPDHVPPPGHLPPPPCHYPTQPPRPQPHPQPHPCPXQQPHASPSQLQGTCGDGSTPILGHSVQVLRHHGSPTATPYCSPQCQTMREQRCQQLTXEEPQHRYQAIFGLVLQSILQQQTQIGQVAVLMEGHIAHQLTAMCGLQ

SEQ ID NO: 198955 - protein, 225 aa, Zea mays
  unsure (1)..(225): unsure at all Xaa locations
  Clone ID: MRT4577_113022C.1.pep
MRVLLVALALLALAASATSTHTXGGCGCQSPPPVHLPPTVHLXPPAHLXPPMHLPPTVHLPPPVHLPPSIHVPTPVHXPPTXPCHYPTQPPRXQPTIPQAHPCPCQQPHPSPCQLQGTCVAGSTPILGQCVKFLRHQSSLTATPYCSPQCQSMRQHRCQQLMQVEPQHRDQAIFGLVLQSILQQQPQSGQVALLMAAQXSAQLTEMCGLQQSTPXLYAXERDVPH

SEQ ID NO: 198956 - protein, 113 aa, Zea mays
  Clone ID: MRT4577_113023C.1.pep
MGVLLVALALLDLAVSATYTHTSGGCGCQPPPPVHLPPSVHLPPPDHLPPSVHLPPSVHLPTAVHLPPTIHVPPSVHLSPPPCHYPTQPPRPQAHSQPHPCPCQQSYTSPCQL

SEQ ID NO: 198957 - protein, 83 aa, Zea mays
  Clone ID: MRT4577_113024C.1.pep
TPNCSHKGQWLGQKCCQQPRQVKPQHRNQAIFGLVLQSILQQQPQSGKVAGLLAAQKAQQLTAMCGLQQPTPGPNAAAGGVPH

SEQ ID NO: 198958 - protein, 98 aa, Zea mays
  Clone ID: MRT4577_113025C.1.pep
MAYMAQQLVGRITMEVAPSKLPSTMARCARLPRNLDTIAEDDDDKEAAAMESTRELPLRNASRGVQVVVVDAPVHCADKLACYLAPMAKTTECLKIKA

SEQ ID NO: 198959 - protein, 47 aa, Zea mays
  Clone ID: MRT4577_113026C.1.pep
LQHMIQQLSFHHKRMAFMHRQVWNGTAKLLAEFLEPLRENQSGYPSH

SEQ ID NO: 198960 - protein, 137 aa, Zea mays
  Clone ID: MRT4577_113027C.1.pep
LGLQTIIFIYFRAQKNPIDTVRVVLVALALLALSASATFTHTSGGCGCQPPPPVHLPPAVHLPPAVHLPPPVHLPPPVHLPPPVHLPPPVHVPPPVHLPPPPCHYLTKPPRPKPHPKPHPCPGQQPIPTPGKLKETC

SEQ ID NO: 198961 - protein, 86 aa, Zea mays
  unsure (1)..(86): unsure at all Xaa locations
  Clone ID: MRT4577_113028C.1.pep
MRVLLVALALLALAASAPSTHTSGGCCCQPPPPXHLPAAVHLPPSGHLPPXPGHSPPPGHXLRPPVHLPPTVHVPASGHLXPPPCH

SEQ ID NO: 198962 - protein, 224 aa, Zea mays
  unsure (1)..(224): unsure at all Xaa locations
  Clone ID: MRT4577_113029C.1.pep
MRVLLVALALLALAASATSTHTRGECGCQSPPPVHLPPPVHLPPPVHLPPPVHLPPPVHLPPPVHLPPSVHVPTPVHLPPPPCHYPTQPPRTQPHPQARPCPCQQTHPSPCQLQGTCGAGSTPILGQRVKFLRHQCSPTATPYCSPQCQSXMRQQRCQQLMQVEPQHRDQAIFGLVLQSILQQQTQSGQVAVLLAAQIAQQLTEMCGLQQSTPXSTLXDGDVPH

SEQ ID NO: 198963 - protein, 164 aa, Zea mays
  unsure (1)..(164): unsure at all Xaa locations
  Clone ID: MRT4577_11302C.1.pep
MQQQMPMPPASAAAAPAAPPAXDITTERIQKCWDDNKXLILPILENRKLSQXMTCAQPSVHLQENLLHLAAIADDQPQPPQIPCTTPSDDAACYTACCGALHGTTTMSPPRTPLTPQHMQERQQQQQLLEPQQHVRARTFPGQMVMRPCALNRMQNQESMQGEE

SEQ ID NO: 198964 - protein, 72 aa, Zea mays
  Clone ID: MRT4577_113030C.1.pep
IHQIMLLGVIMFFFIFFRTRTPQENTPSFHANRKNKKWPISGMINTKTPFTLGINNKKKLILIKREPESDHA

SEQ ID NO: 198965 - protein, 226 aa, Zea mays
  unsure (1)..(226): unsure at all Xaa locations
  Clone ID: MRT4577_113031C.1.pep
MRVLLAALALLALAASATSTHTSGGCGCQPPPPVHLPPPVHLPPPVHLPPPVHLPPPVHLPPPVHLPPSVHVPPPVHLPPPPCHYPTQPARTQTHTQTHPCPCQQTHPSPCQLQGTCGVGSTPILGQCVEFLMHQCRPTATPYCSTESQSLRQQCCQQLRQVEPQHRYQAIFGLVLQSILQQQPESGQVAXGCWRAQIAHQLTXRCGCLQQPTACTYAAGGGVSPH

SEQ ID NO: 198966 - protein, 246 aa, Zea mays
  unsure (1)..(246): unsure at all Xaa locations
  Clone ID: MRT4577_113032C.1.pep
PRVRQLSCIYFQTHQIPYDTVWVVLVALALLALNESAPSTHTSGWXGCQPHDDXNVQSTMHKQTPDHLAPQVHVPPSVHLPAGIHLSPTVHVHQNVHLPSPXCQYPTQPCLSXPYPQPHPCPCQQPHPSPCQLQGTCGVGSTPILGQCVEFLRHQCSPTATPYCSPQCQSLRQQCCQQLRQVEPXQHRXQAIFGLVLQVILQXQQPQNGXQVPGLLAAQIAQQLRAMCGLQHPTPCPYAAAGGVPH

SEQ ID NO: 198967 - protein, 53 aa, Zea mays
  Clone ID: MRT4577_113033C.1.pep
QTFDNDVEVGVMGGGIIRQPGIRSRTRGTSPEAAPFGAWGRRAAKSGRIECAR

SEQ ID NO: 198968 - protein, 231 aa, Zea mays
  unsure (1)..(231): unsure at all Xaa locations
  Clone ID: MRT4577_113034C.1.pep
MRVLGVALDLLALAASATYTHTSGSCGXQPPTPVHLPLPYHISHTVHLTHQVHLXPIFQIPRSVHLPPSVHVPTPVHLPPTPCHYPTQPPRPQPDPQPHPCSCQQPYSSSCQLQGTCGVGSTPILGQCVXFLRHQXAPRQTPYCSPQCQXLRQQCCQQLRQVDPQHRYQAIFGLVLQSILHQQPQSGQVAGLLAAHYSASTDGDVRPAAADSMPLRCCRRCPPLKKLCAVV

SEQ ID NO: 198969 - protein, 56 aa, Zea mays
  Clone ID: MRT4577_113035C.1.pep
RAWIKITVTWTNWRAECLRGSGAVSCVCDEEGDMGVVGPIGTTRLGERSNLGSRDC

SEQ ID NO: 198970 - protein, 94 aa, Zea mays
  unsure (1)..(94): unsure at all Xaa locations
  Clone ID: MRT4577_113036C.1.pep
MCDAFVGTWKLVSSENFDDYMKDVGVGFATRKVAGMAKPNMIISVNGDVITIKSESTFKNTEISFILGQEFDEXTADDRKVKSTITLDGGVLVH

SEQ ID NO: 198971 - protein, 79 aa, Zea mays
  Clone ID: MRT4577_113037C.1.pep
MAVGGLLGGAFWATRALEVVKRNDSPGLLWKRIKLTTTRKNNAKKRLKRLWQNEAVIRACGESESRSASNVASTTEKQQ

SEQ ID NO: 198972 - protein, 89 aa, Zea mays
  unsure (1)..(89): unsure at all Xaa locations
  Clone ID: MRT4577_113038C.1.pep
PAGDALAGWRPDSLCWGWWPAACNEQGRVTKLFLERLNITSTLPPAIGELDQLETLSIIEMPGLGGRIPDSFCNLRHLSLFNLXWSXLR

SEQ ID NO: 198973 - protein, 132 aa, Zea mays
  unsure (1)..(132): unsure at all Xaa locations
  Clone ID: MRT4577_113039C.1.pep
VVGLCXLFVPCSPCSVLVVPAPXLLXGLRVRLRVRLRAXVXLXAXVXPSVGPAVPVLGXPARPLLSSSALLLFGGPXPPSSLVGGGAGALGVLGLXLVGFSCFRXSRPVLSVASSLFCASCALCLGLGVPPL

SEQ ID NO: 198974 - protein, 64 aa, Zea mays
  Clone ID: MRT4577_11303C.1.pep
LCISGFHVIFFVRVRSSCIQISSAYIEIHSRSVYIWPSSYIICCTVSLMVRSSFNPLYDLISVQ

SEQ ID NO: 198975 - protein, 65 aa, Zea mays
  Clone ID: MRT4577_113040C.1.pep
VHQSGVGLKNGNKGSGGLGTSSDHACGYGRKCPACFRLVPGWGWIKTVVLFRYSIIIHRARTTSS

SEQ ID NO: 198976 - protein, 116 aa, Zea mays
  Clone ID: MRT4577_113041C.1.pep
FGAPRHNALVGGPPLQGKTLAPFCPPGILPSPGFRWLSPLPAGFAPHPCPHGALHPFKGGAPQLRSSVGAPPFFGGQSRSGVVISKGRKGWVYSRSSKIVVVDFVFKKKKKKNPPP

SEQ ID NO: 198977 - protein, 63 aa, Zea mays
  Clone ID: MRT4577_113042C.1.pep
LWGACIFPNNGHVAPAFTPGTGKMNSFFPAELTKKGKKTMGVSGLNKALPTFYWGKKKRKKGF

SEQ ID NO: 198978 - protein, 338 aa, Zea mays
  Clone ID: MRT4577_113043C.1.pep
MNCLKNSRSVLSRLLRHRPHVAAPPPPTPATAPQSPASRYYYYASRVKPAVSRPPPPPQLPRSRHYYTSPRRQQVVHFNRRRGGSRWYHDQRKLTAVVLISGGGAVAFYFGHLETVPYTNRSHLVVLSPKFERQLGESQFAQLKKEFGPKILPPLHPDSIRVRLIASEIVRAVHRGISVQQRHDAFYGEDASYGYGGIADDLSIKNRDADAAAALLGASPGKNASAAVAAQRDDELLDDRWVTESRSRGKARGAQPQTGHLDGVNWEVIVVKDDLVNAFCLPGGKIVVFTGLLSNFRADAEVATVVGHEVGHAIARHSAEQITKNLWVAILQIVILQF

SEQ ID NO: 198979 - protein, 42 aa, Zea mays
  unsure (1)..(42): unsure at all Xaa locations
  Clone ID: MRT4577_113044C.1.pep
VIASKQNLRTAQAAMERHVNCTLERLLTFTRSILXTVCRTLG

SEQ ID NO: 198980 - protein, 105 aa, Zea mays
  Clone ID: MRT4577_113045C.1.pep
RGPRFAGGAFFMGQQKRVHSPVGGGIKLPISQVGDGKTRDHPHALRAPPPPIALKKGGLLGGPLDFLGSPRDFGAPLEPPLGRGSLLPGHFFLEGGHKRHRRPPA

SEQ ID NO: 198981 - protein, 99 aa, Zea mays
  Clone ID: MRT4577_113046C.1.pep
SEFGSSTNFLDIPVYQPRKRQPNSQVLHPRPELTGHTPANFFHDHPDQSGPNIRNHAVMTIHLLTPTWATTLQKMEPNQLLQLTYSHNPKDRRIRIHRQ

SEQ ID NO: 198982 - protein, 45 aa, Zea mays
  Clone ID: MRT4577_113048C.1.pep
PDTFANTHHVAWGHHTSERGTLINIHLPPSHPLKSPKMFYYSTFT

SEQ ID NO: 198983 - protein, 79 aa, Zea mays
  Clone ID: MRT4577_113049C.1.pep
MYTSTFGRHGPWPWAAMALACDAAATANQQQHHGEWPALTRLLLMRLRGGFRLPIPGAWTGGRVALELTAHRLALYIVC

SEQ ID NO: 198984 - protein, 112 aa, Zea mays
  Clone ID: MRT4577_11304C.1.pep
MGFEKQILRSGTGPKPIKGQKVTVHCTGYGKDRDLSKKFWSTKDPGQQPFSFSIGQGSVIKGWDEGVMTMQVGEVARIQCTPDYAYGAGGFPAWGIQPNSVLVFEIEVLSAQ

SEQ ID NO: 198985 - protein, 71 aa, Zea mays
  Clone ID: MRT4577_113050C.1.pep
TEREAWNQEPTYQRTAPWINKNGQELYMPLPNYESPTLIAKGNPHSLWQHQLNTEPNLKAKFPTRTLLGSS

SEQ ID NO: 198986 - protein, 52 aa, Zea mays
  Clone ID: MRT4577_113051C.1.pep
KPDGPYETLFKVTIIPKLSKCFAPALLQLINSSRNNLFVKLMEGLTPSKRLE

SEQ ID NO: 198987 - protein, 178 aa, Zea mays
  unsure (1)..(178): unsure at all Xaa locations
  Clone ID: MRT4577_113052C.1.pep
GAEKGRSQPDEHQPRLISPKISGSLFSPPPPLSLSSFSPSLTTCVCGSISQLPPGRTIPRSLRQLAGLLAGLLGQSEAVQLAAKIFFLIHFLYFHQTKHHAGAQVRQWSTXAPRHTVAAAAPRRTGAAAPRRRHIGAVAQWRKEQRACVSCAQKGGDLXPIPPAXAEERRTDTCERYG

SEQ ID NO: 198988 - protein, 149 aa, Zea mays
  Clone ID: MRT4577_113053C.1.pep
MPGPIESIECVIGIESRREEPRFPVSGTLAYTEEGESPHICKGDEQELLPEADPSWAQDSVASYTEEADRQLGAAAARVAAEPALVRSALRAPAFLVLGQSASDPFSVCESGRNNDMAREREDYGLSSYSYDYERTRPFFGRSCRWNPN

SEQ ID NO: 198989 - protein, 76 aa, Zea mays
  Clone ID: MRT4577_113054C.1.pep
VQIGRLGCKPPMDRRNRSICTRVWVNLPPIKKGGEGGPKKNVLFCFFPPMHWFICWTDIVDYENGNSTKQRRTPYK

SEQ ID NO: 198990 - protein, 289 aa, Zea mays
  unsure (1)..(289): unsure at all Xaa locations
  Clone ID: MRT4577_113055C.1.pep
QAKKKNHRRHKERKDTAGEEKNETRGGGGGGAQKGGGGEKKTPRPGGEGEEENLLLCFKFLQKKKKPHKTSKRTLWPGKHPAGRGARVNQTGLGDKKLITQRRAQEPIFFFFXXANERSLTYIKSKPFACATTGPAGGARVRSWAGRLKTHYSLACAVTNFFFFFCKRKKPHIHQIETFCLCYYRPGRRRACTQLGWATKNSLLISMRSNQFFFFFFANERSLTYIKSKPFACATTGPAGGARVRSWAGRLKTHYSLACAVTNFFFFFFLQTKEASHTSNRNLLPVLLP

SEQ ID NO: 198991 - protein, 223 aa, Zea mays
  Clone ID: MRT4577_113056C.1.pep
MRGLLVALVLLVFVGSATSTHTSGGCGCHPPPPVNLPPPGHLPPPVHLPPPGHFPPPVHLPPPVHLPPPVHVPPPVNLPPPPCHYLTKPPRPKPNPQPHPCPCQQPHPSPCQLQGTCGVGSTPILGQCVEFLRHQCSPTATPYCLPQCQLLRQQCCQQLRQVEPQHRYQAIFGLVLQSILQQQPQNGQVAGLLAAQIAQQLTAMFGLQQPTPCPYAAAGGVPP

SEQ ID NO: 198992 - protein, 126 aa, Zea mays
  Clone ID: MRT4577_113057C.1.pep
TDSPRSSARLVWADAHPVGSSPSQLLKGMARVPESAPLGFSFSSLLFQSQVDRSVRSLCGALSVLIIVHRGLVPGLPAARCSSSRAGAVDVSLGSGSGSSISVNLPPCRPGRGRRNWFSGTEPCVH

SEQ ID NO: 198993 - protein, 224 aa, Zea mays
  unsure (1)..(224): unsure at all Xaa locations
  Clone ID: MRT4577_113058C.1.pep
MRVLIAALDLLTLXASDTSTHTSGGCGCQPPPTDHLPPTVHQPPAGEVPTPVHLPPSVHLTPPDHLPPPVHVPPTVHLTPPPCHYPTQPARAQPHPETHPCPCQQPHPSPCQLQGTCXGVGSTPILGQCVEFLRHQCSPTGTPYCSPQCQSLRQQCCQQLRQVEPQHRYQAIFGLVLQSILQQQPQNGQVAGLLAAQIAQQLTAMCGLQQPTPCPYAAAGGVPP

SEQ ID NO: 198994 - protein, 70 aa, Zea mays
  unsure (1)..(70): unsure at all Xaa locations
  Clone ID: MRT4577_113059C.1.pep
PPPPTKKXGKKKKTGWSPWRLCGTGNINNHEATMSERRGVPQPAKTWVSGTYNRYTRLPRRRLRRVGGAR

SEQ ID NO: 198995 - protein, 200 aa, Zea mays
  Clone ID: MRT4577_11305C.1.pep
MADSSDQVPPAARKLDGKVALITGGASGIGECTARLFVKHGARVVVADIQDEPGSRLCAELGADAASYVHCDVTVEDDVAAAVDHAVARFGALDIMFNNAGIGGAACHNIRESTKEDFERVLSVNLVGPFLGTKHAARVMVPAGRGGCIIGTSSLASAVAGAASHAYTCAKRALVALTENAAAELGRHGIRVNCVSPAAE

SEQ ID NO: 198996 - protein, 81 aa, Zea mays
  Clone ID: MRT4577_113060C.1.pep
AYSLITHRPLLSKGNSHPFVCCHKKYQHKIMTLYNQKSDDYYIQFSACLLYFAKKKLHLVYRNVHRNLFMICNTCNAHYSS

SEQ ID NO: 198997 - protein, 91 aa, Zea mays
  unsure (1)..(91): unsure at all Xaa locations
  Clone ID: MRT4577_113061C.1.pep
FHQCSPTATPYCSPQCQSLRQQCCQQLTQVXPHHRYQAIFGLVLQSILQQQPQSGQVAELLAAQIAQQLTAMCGLHQPTPCPYAAAGGVPH

SEQ ID NO: 198998 - protein, 118 aa, Zea mays
  Clone ID: MRT4577_113062C.1.pep
YHILLVPMTHHPRMVSYTNTVASLLSELVPSMSGAPRPSTTTVECLQTARLWPIAAFRVRRLLSASVGRRRITTLFIPRGMPRGRGHVSHTSTCAGAGRLSPTCLRLAGVAAWKKTVT

SEQ ID NO: 198999 - protein, 121 aa, Zea mays
  unsure (1)..(121): unsure at all Xaa locations
  Clone ID: MRT4577_113063C.1.pep
MRVLLVALALLALAASATSTHTSGGCGCQPPPPVHLPPPVHLPPPVHLPPPVHLPPPVHLPPPVHLPPSVHVPTPVHLAPPPCHYRTQAPRPQSXAHLHPCPCHRAGSMDRAGLPVHTSSG

SEQ ID NO: 199000 - protein, 223 aa, Zea mays
  unsure (1)..(223): unsure at all Xaa locations
  Clone ID: MRT4577_113064C.1.pep
GCWLVAPRSPGLSLASATSTHTSGGCGCQPPPPVHLPPPVHLPPPVHLPPPVHLPPPVHLPTPVHLPPPVHVPPPVHLPPPPCHYPTQPPRPQPHPQPHPCPCQQPHPSPCQLQGTCGVGSTPILGQCXVEFLRHQCSPTATXPYCSPQCQALRQQCCQQLRQVEPXQHRYQAIFGXLVLQSILQQQPQSGQXRGLLAXQIAQQLTEMCGLQQPNSCPYIAAG

SEQ ID NO: 199001 - protein, 239 aa, Zea mays
  Clone ID: MRT4577_113065C.1.pep
MLLSREVLPDFAKPPLGLQTISFIYSRAQKNPIDTMRVLLVALALLALAASATSTHTSGGCGCQPPPPVHLPPPVHLPPPVHLPPPVHLPPPVHLPPPVHLPPPVHVPPPVHLPPPPCHYPTQPPRPQPHPQPHPCPCQQPHPSPCQLQGTCGVGSTPILGQCVEFLRHQCSPTATPYCSPQCQSLRQQCCQQLRQVEPQHRYQAIFGLVLQSILQQPTPCPYAAAGGCPPLKKLCAVV

SEQ ID NO: 199002 - protein, 53 aa, Zea mays
  Clone ID: MRT4577_113067C.1.pep
GATKFSLNKVKAPPFFVGEPIKDNGSVEFPSYKKGAPNPPFPFFSQGFKEIKC

SEQ ID NO: 199003 - protein, 57 aa, Zea mays
  Clone ID: MRT4577_113068C.1.pep
DLHFRLQCAHMKPQSVQSLNILITHVSAPCLKCNRRLVNRAVRLRNGWVLGHRKSGR

SEQ ID NO: 199004 - protein, 131 aa, Zea mays
  unsure (1)..(131): unsure at all Xaa locations
  Clone ID: MRT4577_113069C.1.pep
WVKPVPITSRGKDLLLPPSVLVVFWRPPLHWNLPVKCKEKKGTDIKISVPSRGAFYKSTEKVGSFGRKSLVIIMVIGLFPGGDIYNICMYMRFDPQKKKKKKKKKKKKXKGGRRLVSSSTRELIPDRYLQA

SEQ ID NO: 199005 - protein, 49 aa, Zea mays
  Clone ID: MRT4577_11306C.1.pep
RCTNVLTIARIKPNLLLSYQEHYHLPLFMMIIMLTPLFFFKTKKSFYCS

SEQ ID NO: 199006 - protein, 77 aa, Zea mays
  unsure (1)..(77): unsure at all Xaa locations
  Clone ID: MRT4577_113070C.1.pep
RHMACTSCCVRLTNKCSXCXLPNVDHRRTPIENDFQCLRTACSKAQHGCKETLRYSQIYDXHEKECIYLPCSCPCTG

SEQ ID NO: 199007 - protein, 211 aa, Zea mays
  unsure (1)..(211): unsure at all Xaa locations
  Clone ID: MRT4577_113071C.1.pep
MHQMKTKHRSFLSFLCFIIVSLVFALSDCAVSSGDHFVYHGFAGVNLTLDGNALVTPDGLLELTNDTVNLGHAFYPTPLSFNTQQRPNGTVRSFSVSFVFAILSVHADISADGMAFFVAPTKNLSNTWAQYIGLLNSGNDGNTSNHMFAVELDTTQNDEFKDIDNNHVGINIDSLTSLRAHHTGYYGGDDSGSFSNLTLISXKAMQVWADY

SEQ ID NO: 199008 - protein, 72 aa, Zea mays
  Clone ID: MRT4577_113072C.1.pep
IRLEAEDHLFDGRVAYVPRGQGCRRGDHPSRGAFRVPPSTPSPWSAPLKEMERGGKDGCRALKVYGQMRHIW

SEQ ID NO: 199009 - protein, 118 aa, Zea mays
  Clone ID: MRT4577_113073C.1.pep
AVMALRCAAGGGGGAYLTPRRSRCCGVGSARPSATTRGTRGLSLLLRIPSSQYSKAPWALRCSPDSPPLEGDQHSDRTGASGALKAMVCDMFRPLVRNISDIRSLRTVFDLEDYQVGM

SEQ ID NO: 199010 - protein, 80 aa, Zea mays
  unsure (1)..(80): unsure at all Xaa locations
  Clone ID: MRT4577_113074C.1.pep
YPQQFLPFDQVAAXNXRAKXQQQQLXPLSQQEGVSPATFLIQPQLLPLSQHDAPNAGTFFFLGGFVXFDSLNPKLYYDHA

SEQ ID NO: 199011 - protein, 146 aa, Zea mays
  unsure (1)..(146): unsure at all Xaa locations
  Clone ID: MRT4577_113075C.1.pep
KAHEGAASSTARAAKEKDKRRRRSSDNQEGGVKESLARQSMTLKKMDEDGCSDKGIPLPNVTFHILAKGIESCNKHAEPTGPGDAAGTTNRSTEDELNIFDADFDTGEHSTLWDLILAANYPDIRXLPNLARQTMTDLNKGKMPEE

SEQ ID NO: 199012 - protein, 110 aa, Zea mays
  Clone ID: MRT4577_113076C.1.pep
WFFFFLFFLFFLGYYSRYPRRGQIPRSPAAESKRTGGRKQQQSRGKGPTKDNDQRGKTPGRPGENPGEPHPTGEGGQPPQGTAPKGQDAGCAVGTEQGGTLKDKPYARGE

SEQ ID NO: 199013 - protein, 129 aa, Zea mays
  unsure (1)..(129): unsure at all Xaa locations
  Clone ID: MRT4577_113077C.1.pep
RDPRGQGGQGARGRPRQRGQGRGXGTREGDRSSPPAGREHGRTRDSAKDRKXRRLRRGEPAGTAVNRPQEDHPARQEYATPPPRAREWLXQHTEEFSPSPVDKKRGPRGVSGPRQRIIRGHDATVFKPP

SEQ ID NO: 199014 - protein, 311 aa, Zea mays
  unsure (1)..(311): unsure at all Xaa locations
  Clone ID: MRT4577_113078C.1.pep
MALRDVLLSIAQTPHRLRRRALVTWTPTQELNEVRDRSGARMKRRLEWYDLVGLGVGGMLGAGVFVTTGRVARDTAGPAVFASYVVAGVSALLSSLCYAEFSVRVPVAGGAFSYLRVTFGRLIITTLSFPLAPWFHAATVRLKGRRNHLNQLMKRNGQIYVYRKLKKMCSCPNXIKDRYLIKVDNAKQNPSMILPSXYILSGEFVGFFGGANILMEYVLSNAAVARSFTDYLASTFGVTERNAWRIVVDGIADGYNELDVPAVALILLITVCLCYSTKESSMLNMVLTVFHLLFFAFIVAAGLWNGSARNL

SEQ ID NO: 199015 - protein, 179 aa, Zea mays
  Clone ID: MRT4577_113079C.1.pep
PTRPIKRSPLQFEAFQKCAKECDLDTKKVLSLDVATRWNSTYIMVRDAIYYKDAFDRLAKKDKDRFGHIAPSSDDWLNAININKCLKKFYDVTLLFSGTSYPTANHFFRKFSEIKMAIARWCESSDVIICTMAFSMKQKFDKYWDMNNMALAVGAFLDPRYKHKMVELYMNNMALALLH

SEQ ID NO: 199016 - protein, 90 aa, Zea mays
  unsure (1)..(90): unsure at all Xaa locations
  Clone ID: MRT4577_11307C.1.pep
APLMPLPYRPVGGIKDKPAIRXSLCYSXPLVRSRSCVVFVHVLFVSRFWHSLXHPXLRQELRSFCIPLLSXXDASLRMWIPSRLRVSVRM

SEQ ID NO: 199017 - protein, 158 aa, Zea mays
  Clone ID: MRT4577_113080C.1.pep
MSLIRRSNVFDPFSLDLWDPFEGFPFGSGGSNSLFPSFPRTSSETAAFAGARIDWKETPEAHVFKADVPGLKKEEVKVEVEDGNILQISGERNKEQEEKTDTWHRVERSSGRFLRRFRLPENAKTEQIRAAMENGVLTVTVPKEDVKKPEVKSIQISG

SEQ ID NO: 199018 - protein, 219 aa, Zea mays
  Clone ID: MRT4577_113081C.1.pep
PSESEAYVPCPLPYRCSSPGLKPPHSLHLPAQPLSLASLTRRRALAVLLRCHSLDLAPAAPSIAHHTLSSLAPELQPWSLSPLCSSVTYVFSSQAAAKLISIADAPALLLAMAGHRTTHSNLAVSEPDPAMELTAPTAAQPWVPSLSSPCSLVLPARRLWRAGCPARHGGARSISHGARPPLFAHLRRRAGVIFLGATTGRCSPSPVSLVKRACPHRRL

SEQ ID NO: 199019 - protein, 50 aa, Zea mays
  Clone ID: MRT4577_113082C.1.pep
LKFMAGNAATEILVWQNQGWAIKPSPSGKLTNGGDVIRGHTYWIPGLPDF

SEQ ID NO: 199020 - protein, 216 aa, Zea mays
  unsure (1)..(216): unsure at all Xaa locations
  Clone ID: MRT4577_113083C.1.pep
MSFFGRGSRNQRTFRPKKSAPSGNKGMQLKRHIDATLGSGNLREAVRLPIGEDLNEWLAVNTVDFFNQVNILYGTLXEFCTPATCPTMSAGPSYEYRWADGAKIKRPIEVSAPKYVEYLMDWVEAQLDEETIFPQKLGAPFPPNFRDVVKTIFKRLFRVYAHIYHSHFQVIVRLKEEAHLNTCFKHFTLFTLEFRLIDRAELAPLNELIEPIILGY

SEQ ID NO: 199021 - protein, 198 aa, Zea mays
  Clone ID: MRT4577_113084C.1.pep
AAYVPGPLRPVRPGLPSSHTGAHLPGLKPPHSLHLPAQPLSLASLTWHRALAVLLRCQSLDLAPAATSAAPHTLSSLAPELQPWSLCPLCSPATCVFSSQAIAKLLSIADALALLLAMAGHRMPHSNLAVSEPDPAMELTAPPAAQPWAPSLSSPCSLVLPARRLWRAGCPTRQGGACSISHGARSPLSACLRRRASL

SEQ ID NO: 199022 - protein, 80 aa, Zea mays
  Clone ID: MRT4577_113085C.1.pep
GIGISAAGTVLKTLLGRDFGNSLPRVSLIGSKGYRSNNVARTWPQNLNSDKYFNDLYDYGFVVLPPEDIHAPPQEPPPVR

SEQ ID NO: 199023 - protein, 69 aa, Zea mays
  Clone ID: MRT4577_113086C.1.pep
SFHLQKSTCSSCGYPAARIRKYNWSIKAIRRKTTGTGRMRYMRHVPRRFKSNFREGTEAAPKKSAAAAN

SEQ ID NO: 199024 - protein, 67 aa, Zea mays
  Clone ID: MRT4577_113087C.1.pep
IIFMAKTLRKGIHIFFGGKKQEGHFPMKPQKTQHPFNTQKQQAYRGTYLHYLWACQTTKHHVGHRSN

SEQ ID NO: 199025 - protein, 94 aa, Zea mays
  unsure (1)..(94): unsure at all Xaa locations
  Clone ID: MRT4577_113088C.1.pep
MGKGTGSFGKRRNKTHXLCIRCGRRSFHLQKSTCSSCGYPAARIRKYNWSVKAIRRKTTGTGRMRYMRHVPRRFKSNFREGTEAAPKKSAAAAN

SEQ ID NO: 199026 - protein, 99 aa, Zea mays
  Clone ID: MRT4577_113089C.1.pep
KAAGTPPKNKSPKGWRGPPIFSKKGGGNMGTYKRLLGPYGPKKNPRKPFKGLKNKKKGVSRGTRLNLPPLQGKNPPLVPMARANSKGTPPRGKNKNFTG

SEQ ID NO: 199027 - protein, 158 aa, Zea mays
  unsure (1)..(158): unsure at all Xaa locations
  Clone ID: MRT4577_11308C.1.pep
WSYISLGYWSHXTPGEKHISLSMPYRIHTPWHCEDVQAXMGKRTGYMAXLSMKLPIFRMGRDLPYSTVLTNLXGWGLRHTILAYNSXMRRSMLVQRNEXTLXEDRGQTREALAEPIQTAMQKYGIPEPXRKLKELTRGQAGTKNTVQSFIXTLNLPDE

SEQ ID NO: 199028 - protein, 94 aa, Zea mays
  Clone ID: MRT4577_113090C.1.pep
MGKGTGSFGKRRNKTHTLCIRCGRRSFHLQKSTCSSCGYPAARIRKYNWSVKAIRRKTTGTGRMRYMRHVPRRFKSNFREGTEAAPKKSAAAAN

SEQ ID NO: 199029 - protein, 94 aa, Zea mays; identical to SEQ ID NO: 199028
  Clone ID: MRT4577_113091C.1.pep

SEQ ID NO: 199030 - protein, 50 aa, Zea mays
  Clone ID: MRT4577_113092C.1.pep
HTQAFKLGPARSKTSLSGVAQQTGKKGAEHGPPQFLPQGFFSGGFSSDHK

SEQ ID NO: 199031 - protein, 138 aa, Zea mays
  unsure (1)..(138): unsure at all Xaa locations
  Clone ID: MRT4577_113093C.1.pep
KPSGCLPIPLKERQCHRTHGGGPPXPGPXRDAPPGLGGPPGKPVMLPGTPPPDPAPPRQPEPVCRPLGGLPLGAPPPPPDDPQPSXRWPACPGXRPPHGGPGGGQXPPKRISPGXRPASGSLLAPKRRKPPRAPGART

SEQ ID NO: 199032 - protein, 53 aa, Zea mays
  Clone ID: MRT4577_113094C.1.pep
SILNCIHVFFVLTLIFFFLNTIGYTFVHPCTNFTRTAYEPAMLPCQGRYINMR

SEQ ID NO: 199033 - protein, 127 aa, Zea mays
  unsure (1)..(127): unsure at all Xaa locations
  Clone ID: MRT4577_113095C.1.pep
MGKHTSSDARIPRRLHLAVLRALTPLRDDQLPNYRMKYWGISEDRANSLLWHFLRTLPKANKCNYQPLATTIIXERNPTTINNYGIWLRYXSTTGYHHMYTEYRDSTLSGAVAHMSNQMPSXRHRVW

SEQ ID NO: 199034 - protein, 276 aa, Zea mays
  unsure (1)..(276): unsure at all Xaa locations
  Clone ID: MRT4577_113096C.1.pep
MAWIWMVLAAGAVLLWAISLGRVLSSAAPSCVPPSPQFMPPLSGDRRSRNVLLVVAHPDDESMFFAPTILFLKSKGHSIHILCMSRGNADGLGDTRKEELYHACVSLKIPHEQVKVLDHPKLQDGFHEKWEHGLVAELTMELVQLWAIDTIVTFDSYGVSGHPNHKDVHHGICKFLHTNKQGNVEAWELASLSILRKYSGPIDIWLSSLTSFARSKQPIYTLVNSSPSKSYEAMAAHRSQWVWXYYKSSYLHFXRKLRRLFVMFSSYTYINMLRRI

SEQ ID NO: 199035 - protein, 37 aa, Zea mays
  Clone ID: MRT4577_113097C.1.pep
PSKSYEAMAAHRSQWVWFRKLFVMFSSYTYINMLRRI

SEQ ID NO: 199036 - protein, 80 aa, Zea mays
  unsure (1)..(80): unsure at all Xaa locations
  Clone ID: MRT4577_113098C.1.pep
LTSFRGTNITKRTKNARIFSKYRTIYCASLLIQINNMEVSHHSKYFCXFCVKFAVNTKAFLICDCKDCCNVNADTSYTIN

SEQ ID NO: 199037 - protein, 192 aa, Zea mays
  unsure (1)..(192): unsure at all Xaa locations
  Clone ID: MRT4577_113099C.1.pep
MAWIWMVLAAGAVLLWAISLGRVLSCAVPSCVPPSPQFMPPLSGDRRSRNVLLVVAHPDDESMFFAPTILFLKSKGHSIHILCMSRGNADGLGDTRKEELYHACVSLKVLRSLISSFYLKKNLYTVXQIMSLQIPHEQVKVLDHPKLQDGFHEKWDHGLVAELTMEHVQLWAIDTVVATSQRPYELQNTLQI

SEQ ID NO: 199038 - protein, 108 aa, Zea mays
  Clone ID: MRT4577_11309C.1.pep
LSMVNPTAYLQHQLLLSSSPLSMSNSPTYLQQELLQQIVPSLTHLAITNPVSYLQHLLSFYQLTISNSRAYLLQRQHLLNPLAISNPLFTTFLHHHQLLPYNRFSLMN

SEQ ID NO: 199039 - protein, 74 aa, Zea mays
  Clone ID: MRT4577_1130C.1.pep
LKPGWKLALRAPLEHFKINKVVNLWPMAHGAVCGRLRQPSRTERLSGTPAAPTFGTSHMGWVAVGTGNGGEEEK

SEQ ID NO: 199040 - protein, 111 aa, Zea mays
  unsure (1)..(111): unsure at all Xaa locations
  Clone ID: MRT4577_113100C.1.pep
EVFKPXFFKGINAEGMPLSQRPFLKGKLYTPFSVGFPASLSPEQCKALEVVFPPKPGFQYPHMELDECEETMPYXVNIKTEMGGGHQQPQGAFAGDGDIPGGAQRVQGAPQ

SEQ ID NO: 199041 - protein, 66 aa, Zea mays
  Clone ID: MRT4577_113101C.1.pep
GIRKPSRLVGALTGYRHTWIRFQPHRLSSSRYTHTLTDVIRPRLGHTSRGGSIELSLRTISRPIRN

SEQ ID NO: 199042 - protein, 94 aa, Zea mays
  Clone ID: MRT4577_113102C.1.pep
GPISVSNYAFARRPRWDGTTRTHAVDATLRREACCTRCATVASALRRCSSLPLRPYEFWNFERFNSQVSCYLQILQTAGRPNPYEELIVCHFGS

SEQ ID NO: 199043 - protein, 139 aa, Zea mays
  Clone ID: MRT4577_113103C.1.pep
MSNSASGMAVCDECKLKFLELKAKRSFRFIVFKINENVQQVVVDRLGGPGESYDAFRACFPANECRYAVFDFDFVTDENCQKSKIFFISWAPDASRVRSKMLYASSKDRFKRELDGIQVELQATEPSEMSMDIIKSRAL

SEQ ID NO: 199044 - protein, 65 aa, Zea mays
  Clone ID: MRT4577_113104C.1.pep
PPPHTMDTTVITAIRCPRPQSKRTSTPAPLRSTITQRASSPRLTEPPGWRHSLPDLLACVPYVCL

SEQ ID NO: 199045 - protein, 90 aa, Zea mays
  Clone ID: MRT4577_113105C.1.pep
IRVIVVRRRVLVSVDALCLLSCVSPISAALPTLCVRVFLPLQIESSGSSFFWFVLACLPHLLCKISLTKGGPRLVYSATRPLIPARRPAG

SEQ ID NO: 199046 - protein, 78 aa, Zea mays
  Clone ID: MRT4577_113106C.1.pep
IYRMAKLARPLRLTTDYTWPLGEGGSQSLASSRRLWGCSASSCSSRKRVLVDAHGADAGPRLVLTRQAPIRDCPLRLP

SEQ ID NO: 199047 - protein, 83 aa, Zea mays
  unsure (1)..(83): unsure at all Xaa locations
  Clone ID: MRT4577_113107C.1.pep
SRVLIAVEDIWELDAIQRDDINDTGDKRXALVVMRYHRALGHDSCFASLRSAYQRVSKRVLREAPCSVCILVERSLCRHRRCR

SEQ ID NO: 199048 - protein, 83 aa, Zea mays
  Clone ID: MRT4577_113108C.1.pep
MRLSTKYIYFSYCSYNSELKPLSTEEWLNFVTSGKYGRGSHMKWKVGNNLHISFVQDMEHDPEAVYFWASVEFIYNHRLYVLR

SEQ ID NO: 199049 - protein, 66 aa, Zea mays
  unsure (1)..(66): unsure at all Xaa locations
  Clone ID: MRT4577_113109C.1.pep
XPKXHTFPXSSIIQXXXXTLIPPXPLKIPLXLLNYIHLSIITIITLXPIFFIINLIININTSSTSF

SEQ ID NO: 199050 - protein, 80 aa, Zea mays
  unsure (1)..(80): unsure at all Xaa locations
  Clone ID: MRT4577_11310C.1.pep
MDNLHSPSCKTAMCSDPPAPMAGRLAADASPVSAAXFEGYEKRLESTYSEAPVFVDPHGRGLRALFRAQIDSVLHLGRGT

SEQ ID NO: 199051 - protein, 60 aa, Zea mays
  Clone ID: MRT4577_113110C.1.pep
EFHARQFLIVLEDKIFTEVRREHTGLFRRRGSKWPCYFWHHGLICIFRKVDQSKVRNLGF

SEQ ID NO: 199052 - protein, 87 aa, Zea mays
  unsure (1)..(87): unsure at all Xaa locations
  Clone ID: MRT4577_113111C.1.pep
SPPPPFFHLPKSPLATFSQFDNLFLWPQAKYLYHFKVKLLLSFPSPFLKVFFSXPSPIFFIPPGKNTITLWKEGSHGPWEKPIKVYP

SEQ ID NO: 199053 - protein, 47 aa, Zea mays
  Clone ID: MRT4577_113112C.1.pep
PKYCSIEIGKYGTQIVGQAQLFFVQTVANFIVKGDDSPIHHSNVQEL

SEQ ID NO: 199054 - protein, 50 aa, Zea mays
  unsure (1)..(50): unsure at all Xaa locations
  Clone ID: MRT4577_113113C.1.pep
RAGRFGRXGLAITFVSCASDCDVLTQVPLRFQVDIKGLPEQIDPSTYMPS

SEQ ID NO: 199055 - protein, 58 aa, Zea mays
  Clone ID: MRT4577_113114C.1.pep
ATASIESICLSGGGSFLYIAVFRHCFISGERREVTVIVVGKPASSLKIPPLVLPVRVS

SEQ ID NO: 199056 - protein, 129 aa, Zea mays
  Clone ID: MRT4577_113115C.1.pep
TDSESRPTRTHTLDTKRTIDDLTPRLTKIVGVLALAALVTIATNAFIIPQCSLAPSAIIPQVLPPGTSLGFEHSTMQAYMLHLALAVSALQLPLAQLLQQYLPHLTLLTIATQQQQLQQLLPSLIHRIL

SEQ ID NO: 199057 - protein, 169 aa, Zea mays
  Clone ID: MRT4577_113116C.1.pep
MAARLSIALAARRISSVAAKRPSLIVCQKWQQVAPKQRLFSVSAALKEKRYTEDHEWIELSADGKTCTLGISEYAAKALGDVVYIELPQVDMEVAEGDVIGAVESVKSASDILTPIAGVVSEVNEALESAPGSVNKDPEGDAWVAKIAVSAEPKGKTMSKEEYAAFTEE

SEQ ID NO: 199058 - protein, 45 aa, Zea mays
  Clone ID: MRT4577_113117C.1.pep
QFAGKLMAFSNIVQPTKDLDTIVTLKPIMDHAHKDPSYWLHRGEG

SEQ ID NO: 199059 - protein, 39 aa, Zea mays
  Clone ID: MRT4577_113118C.1.pep
SGSYSLFRGLEQDVNGYKARAETLLFMSPQQKQSITQIP

SEQ ID NO: 199060 - protein, 250 aa, Zea mays
  Clone ID: MRT4577_113119C.1.pep
MSFLAGRLAAKEGAYFLQESKTAVGRLAEKLPPSASAPGGASAQPSPDVLPEILRHSVPIKGTPPPAEASLSASSRWALPPGGGEAAGLHPDALNPLRSYVSLPQATFGPKRWQLPNEQPNYLASTANERRRDRAPPPLDPENLKAVIAGYSQIGKAFITATFMVFGGATAVLLYTADKLQLHSVDDVKTKGKDALQPRADMIKEQIAPLRSWAEEMSRKWHFEGGKEAKEKSGIVRELSRILGSRTPPG

SEQ ID NO: 199061 - protein, 52 aa, Zea mays
  Clone ID: MRT4577_11311C.1.pep
SASKVWPGFFFLEGEPLSKGGLVKKKKKKKKKKKKKKKKKKKKKKKKKKKKT

SEQ ID NO: 199062 - protein, 88 aa, Zea mays
  Clone ID: MRT4577_113120C.1.pep
LKKAYIYIYIYIYIYIYIYIYIYIYIYIYIYIYIYIYIYIYLYIYIYIYTYIYIDRYIYIYIYIDTYIYIHRETDTSRTKYTYIFSHI

SEQ ID NO: 199063 - protein, 127 aa, Zea mays
  unsure (1)..(127): unsure at all Xaa locations
  Clone ID: MRT4577_113121C.1.pep
ALLLVLTSFTENYLLAKAVVFIPTHWCVLCLAVTXLGSLSXLCLWDSVCEITRMFKAAMASIXIFVPIVVFXLFPIVPTXIRCFLFNQVFSLGVVFSLSLVWNKASQLIFKAPPRPWYLSDVVFGNF

SEQ ID NO: 199064 - protein, 76 aa, Zea mays
  unsure (1)..(76): unsure at all Xaa locations
  Clone ID: MRT4577_113122C.1.pep
MATSAALSTAANPTQLCRSRAALGKPVKGLGLGDGXERATSXDITCQAASXIPADRVADMEKRNXDDLLLLGAISL

SEQ ID NO: 199065 - protein, 33 aa, Zea mays
  Clone ID: MRT4577_113123C.1.pep
PSKYKLYISFIGSEVREGGSQRYQITWQLHMCH

SEQ ID NO: 199066 - protein, 73 aa, Zea mays
  Clone ID: MRT4577_113124C.1.pep
MATNENLPPNVIRQLAKELKNLNESPAEGINVTVNDDDFTTIFADIEGPAGTPYENGVFQNEALIVSCFPHSL

SEQ ID NO: 199067 - protein, 51 aa, Zea mays
  unsure (1)..(51): unsure at all Xaa locations
  Clone ID: MRT4577_113125C.1.pep
CIFHIHVRHGRCQATHVCLYRKQCKSLQHNSQHIPRREYFSLILXIDFETV

SEQ ID NO: 199068 - protein, 115 aa, Zea mays
  unsure (1)..(115): unsure at all Xaa locations
  Clone ID: MRT4577_113126C.1.pep
MSMTLKATNENLPPNVIRQLAKELKNLNESPAEGINVTVNDDDFTTIFADIEGPAGTPXYENGVFRMKLLLSHDFPQSPPKGFFLTKIFHPXNIATSXXEICVSTLKKGWNPXPG

SEQ ID NO: 199069 - protein, 66 aa, Zea mays
  Clone ID: MRT4577_113127C.1.pep
RAGRELTCSHDSQASTHQNYEQSHAKCQEDKTVRHGHRTAIMAATASAAGRPPAACLHAQTVDDDP

SEQ ID NO: 199070 - protein, 111 aa, Zea mays
  unsure (1)..(111): unsure at all Xaa locations
  Clone ID: MRT4577_113128C.1.pep
SXIHLSFINPFTYFQHHLLEDFFKTVANPTSYYQQQQLQQFIPFLTQLTILNHSFYLQLLSSIPLTKINSPTYLQQQFLQQITPSITHLSLSNPTTYLQHFLTFNQLSLSN

SEQ ID NO: 199071 - protein, 93 aa, Zea mays
  Clone ID: MRT4577_113129C.1.pep
SNLYSVDQTSSSSWEAEKTLHLLLQPDIAAPGVNILAAWTPAAAISSAIGSVKFKIDSGTSMSCPHISGVVALLKSMHPLEPNSELTPAAWRK

SEQ ID NO: 199072 - protein, 115 aa, Zea mays
  Clone ID: MRT4577_11312C.1.pep
MSTVSRASLDQKLALAKRCSREATLAGAKAAAVATIASAIPTLASVRMLPWAKANINPTGQALIVSTVAGMAYFIAADKKILSLARRHSFEQAPDHLKNTSFQGTGRPHPAFFRP

SEQ ID NO: 199073 - protein, 176 aa, Zea mays
  unsure (1)..(176): unsure at all Xaa locations
  Clone ID: MRT4577_113130C.1.pep
MGTKRCCVVGVRARGPDASSSDDMREPRSATMLDDGDDDFTFAAAHPPPRLLPAGAGGGFVGPPLLYPVFGRPRSPPRVADPAEPEPEPDTATARVPLGRHLAVDRRRDPAPAPAPGAAAADDDDDSVPAETFCPWSPGWSAGAASPARCKKSGFTGYGLRMGSRXAVGRSQSDGK

SEQ ID NO: 199074 - protein, 169 aa, Zea mays
  unsure (1)..(169): unsure at all Xaa locations
  Clone ID: MRT4577_113131C.1.pep
MTPVGSVECCSLAGATALVTDVSKGIGQAXEKELARIGAREHTCARRAEDLQECXSDXNENGLRDNVSVCDVAERCYRXGSSCTRVSRTFDRKLDILHNNAALLLLKTTXEVCSXDYARIMMTNLXSRLHISQLWKPLLLNASVSGGEASKCLLHRQRAWLPSVTHVQP

SEQ ID NO: 199075 - protein, 181 aa, Zea mays
  unsure (1)..(181): unsure at all Xaa locations
  Clone ID: MRT4577_113132C.1.pep
RSPPRVADPAEPEPEPDTATARVPLGRHLAXQEEGSGTGTAASSRGRXDDDSVPAETFCPWSPGWSAAAASPARCKKSGSTGSVLRWRPRLAVGRSQSDGKEKFVFLSAGGGSSGRRSQNGRGVAAPGGGATAGAPHAWSCYVNDNKSGGGARRRSFLPYKRDLVGLFANAAVFRRSYLPF

SEQ ID NO: 199076 - protein, 70 aa, Zea mays
  Clone ID: MRT4577_113133C.1.pep
CPFWASLSLKPRSNRSERGRSLGDLPLGGFTSIDRKPRLARSLILLSTPRVGTMDAPMPAHSVCHPYLLF

SEQ ID NO: 199077 - protein, 118 aa, Zea mays
  Clone ID: MRT4577_113134C.1.pep
GFAESGDAKTNRRRIRDRRRIRDRRRYLYSKSLEASHWVLLEKERRIRAALEEGKPIPTELRNEEHDLRKQIDLGAWRCVLFPYPRSRPWLHFARASGMQCSRSFVLFAGDFQNFVSG

SEQ ID NO: 199078 - protein, 378 aa, Zea mays
  Clone ID: MRT4577_113135C.1.pep
CAVAAPCACCRQSLGLVKPLEEMLMAASAGAANPSQGSNPNPPPLAAPLTDAGSTERRARPQKEKALNCPRCNSTNTKFCYYNNYSLQQPRYFCKTCRRYWTEGGSLRSVPVGGGSRKNKRSSSSSSSSSSSAAAASASTSSSATSSSMASTPGAASKSPELAHEGAHDDLNLAFPHHGGLHAAEFAAFPSLESSNDMCDQGGGMTSNGRGGGAGPAVGALSATELLRSSGCYMPLQMPGGDYTAAGFALGEFRTPLLPPPSSQSPLGFSLDAHGPGSSGAAAAAGYGSSAGLPQGVPGNAGRLLFPFEDLKPPVSPGGGGVGGGGASATGGAGDGNSSHDQFDHNKERGGGGGRGAGAGHDTPGFWSSMIGGSGASW

SEQ ID NO: 199079 - protein, 104 aa, Zea mays
  Clone ID: MRT4577_113136C.1.pep
KICTLILSPPTLNEISHENWEAIFILNHCTPFSHNKYPMSSIYPLLIFTSQILSVSAILSKITPHFYTPQPQIQLKMYTYQISYSQLYINTHSTIYIHSFQFHP

SEQ ID NO: 199080 - protein, 137 aa, Zea mays
  Clone ID: MRT4577_113137C.1.pep
LMDRRPVSGSCECASCPWHHRIDAGTIASLEFARLNQRQVHLLHCFVDGVHQYARRVSGVDDAVGVVVPSGRLEQRRRQWIHADWLSGSCFPFPPVAFLTSSSVSCMFTVTKAAATLSGDPIGRRSLHLVARHHDSM

SEQ ID NO: 199081 - protein, 111 aa, Zea mays
  Clone ID: MRT4577_113138C.1.pep
MNWGLSAQKDEFRSKLDKYADYEDIKRELGVIKSIEFFTGDDDDTGTLQDEATSTNSSEKSKENSVEQLLMALNKKLKNVLTVLTVSHRDLQSQIETLQEVSYASNAELDK

SEQ ID NO: 199082 - protein, 162 aa, Zea mays
  unsure (1)..(162): unsure at all Xaa locations
  Clone ID: MRT4577_113139C.1.pep
MAPKKNARDTTSATAATSQASTSTTAPIPLTPEQTKPAVPKKSDARADVQWDRIPQTIYNHYINETPQRIMLLDVFLVYLVVVGAIQFVNCAIAGTFVRIKEHLRRLADTDTLXPFNAFLSGFCVTVAQFVFTXGLRLQTNEAVPTDCVDIXPERSFAEYVT

SEQ ID NO: 199083 - protein, 104 aa, Zea mays
  Clone ID: MRT4577_11313C.1.pep
ISGEGGRNVTVHAAEFLIDGDESTIRSGIKQLSRALQIFRFVWEAANTDCHAANHNGKDVVGKKKNEDAKGVLELQGHLWSFGVEEKTLTYRGDVFHMHQIQLP

SEQ ID NO: 199084 - protein, 151 aa, Zea mays
  unsure (1)..(151): unsure at all Xaa locations
  Clone ID: MRT4577_113140C.1.pep
VRPSGGARARRAEERFPKPYLPIWRPNPGVFLDXMTALRAPPGPTVMELXTNQGRGGGENFFSLRTGDKGVGRSRKPVPYTGSTLHRVVPDSMCQGGDFPRVAGAGGEFIFGEKFPAEKFVREHTAPGRLVLAVAGAHSLRCARSIWTGPT

SEQ ID NO: 199085 - protein, 260 aa, Zea mays
  Clone ID: MRT4577_113141C.1.pep
PYRLTAAAGCQGVRALGQSIATAAAQQAVQLSTSPDAGSPIRPSPAGRLSLVPSAASSSPEPAQQVVRLINKVWVWEHFTRYEVEVQEADGSIVKQKWAKCLRCSHKAKAYSYNGTKAFSNHLRMKHQVLKGQQMLSQSGDAIATYKYDENASVRLLYYAIIMHEYPFSIAQHRYFVKFIKSLRPSFPSKSRVTVCKEIMELYKEEKNLLYAQFNKLSCRVSFTMDTWTSIQNKSYLCVTAHWIDDHWKMQKRIINFMHV

SEQ ID NO: 199086 - protein, 79 aa, Zea mays
  Clone ID: MRT4577_113142C.1.pep
MQGFDDWFGRGRPNPNVLAGAIVGGPNSRDEFRDERENYMQTEACTYNTAPMVAVFAKLHRLARDGGAAGGVPERDDAR

SEQ ID NO: 199087 - protein, 201 aa, Zea mays
  Clone ID: MRT4577_113143C.1.pep
SPLFLLASGLCSSSAMADAVAIFPLGAHRSSPSPSAVKLPAPPSSSPVASSFSLLHGAPKLPLLSYPLSSARRLPLGFFVCRLNLPAERSASSSSAVAQVFFFYAHRVLLCASSDSPSAVASLSSSLETHRPLLVRCPSLQLPWRLGAPARPTAGRTRWVSLCSVVSLLPLQLPCVPWISRPCPSPAACALLLPFPLSAAS

SEQ ID NO: 199088 - protein, 78 aa, Zea mays
  unsure (1)..(78): unsure at all Xaa locations
  Clone ID: MRT4577_113144C.1.pep
LSRIRLLSTVIMVVGVVLVALVHGGSCGAPRVSPGPNSSTSYNXKWFIGTATCYGQPNGAGAPDTGGACCLKNVNLSP

SEQ ID NO: 199089 - protein, 69 aa, Zea mays
  unsure (1)..(69): unsure at all Xaa locations
  Clone ID: MRT4577_113145C.1.pep
QAKHDGARPNLSIQLEHTFFSSKSHPLGLCTRISDPTNTXPNLPTHPKHERAPPSIRSRECVPLLFSSS

SEQ ID NO: 199090 - protein, 83 aa, Zea mays
  Clone ID: MRT4577_113146C.1.pep
VGNSAFQLRDGFWVSPLEVMRIFFPPFMMSRAWFHFRSFGFIFALPLYPGNGLVFRWCVGLLTCFVFLNKPPPSLKNPTQKTS

SEQ ID NO: 199091 - protein, 82 aa, Zea mays
  Clone ID: MRT4577_113147C.1.pep
RVRPHFLPRARPRFLFLLSPSHTNKGQGLTTLPFLLYIPNRLQSHYNSPNFLAQHNKNISLLITLIQTTTRVKKKYYDPSKI

SEQ ID NO: 199092 - protein, 89 aa, Zea mays
  Clone ID: MRT4577_113148C.1.pep
AVFCMPPVMCSLLYAGEQSGVPAFMQASLRHFFFMQFIMRKRLFGSSRLPCSLFGLYDVLLDLVLFLLEVCLLGSCLSRTLKKKKKKNQ

SEQ ID NO: 199093 - protein, 225 aa, Zea mays
  unsure (1)..(225): unsure at all Xaa locations
  Clone ID: MRT4577_113149C.1.pep
RPGRIFLASSLPSSLFRFRFPRSPSGHPHPPMPXTSSPAHSPPSTRRXEIQRRPLPAGARRNVPPPAGANAGHPLGRLRRRGAPLLHRQAGHAAPGEALARLPAPALLQARAPPPDPELLLGLLRLRLPGPARARLRPRLAPEPLRRDPAPFRRAPAPXRTGSGPLIFTSGACSSSATSPLTNALPAGNICPSXRLAKTLPLPLPGGTPRPGPPARSGPFPERPT

SEQ ID NO: 199094 - protein, 116 aa, Zea mays
  Clone ID: MRT4577_11314C.1.pep
MSTTVSRASLDQKLALAKRCSREATLAGAKAAAVATIASAIPTLASVRMLPWAKANINPTGQALIVSTVAGMAYFIAADKKILSLARRHSFEQAPEHLKNTSFQGTGRPHPAFFRP

SEQ ID NO: 199095 - protein, 64 aa, Zea mays
  Clone ID: MRT4577_113150C.1.pep
SQVRSPSFFKKGGANLQVRVLFSNYAPPLFVFGGSMWDPLPVKNTWLVKCFVKPPGLNGWSWPL

SEQ ID NO: 199096 - protein, 69 aa, Zea mays
  Clone ID: MRT4577_113151C.1.pep
HKKKSLGRGTFYLWADSMPTHKNADTRPQQSKWAVILHKKPGTSVETECTAHHATFETTYISHHNIDRT

SEQ ID NO: 199097 - protein, 179 aa, Zea mays
  unsure (1)..(179): unsure at all Xaa locations
  Clone ID: MRT4577_113152C.1.pep
MGICVSCDAADEGAATAARVVLPSGELREYAPPATAAEALQAAGEGSSWLLCDADGMAFEGPVAVAAVAPGSELQAGQIYFVLPAEMQRRRLARAEVAALAVRASSALARAAALAQXRRPAAAAAGAARRRSSCSRSPRRSSRRRTRSRRSPRLRWWRIGNGGWRTAAGAGGRPGSPPT

SEQ ID NO: 199098 - protein, 96 aa, Zea mays
  Clone ID: MRT4577_113153C.1.pep
QNPANHRVFERKLRPKPSGGGHVCLGVTPKDTSNTPPRGEGRGVWPPAPHGEVGRIRGCRRTVPSAKRGAQHQFDRFRTLNRDWDAHSIVTSHSAT

SEQ ID NO: 199099 - protein, 38 aa, Zea mays
  unsure (1)..(38): unsure at all Xaa locations
  Clone ID: MRT4577_113154C.1.pep
SXVLHRSIYIACSLVLPRDLVASCAQWRPTSCSARQEQ

SEQ ID NO: 199100 - protein, 152 aa, Zea mays
  unsure (1)..(152): unsure at all Xaa locations
  Clone ID: MRT4577_113155C.1.pep
HWVPRGRPGSSSPSPSPSXTPLSSLSSAPMADADAKSQPPDAAASPDASISXLLPRXAAATRPTRTRSRSSSPAWASPSPVGPPSRRDGTMAPCQSPSRPMSLSAVMRVPARSRGRRRRRRLGRRMRRCGSRAGPGSRTAATTSSSAPAASG

SEQ ID NO: 199101 - protein, 248 aa, Zea mays
  Clone ID: MRT4577_113156C.1.pep
MADADAKSQPPDAAASPDASISSPSSLGGGGGDAADADAIEKQLAGLGIAVAGGFPEPSGWDDGPVPVPIPADVLVGGDEGAGEKPRAPAPAPTGAVDVKVRFPRRPGEPDCSYYLKFGTCRFGMKCKFNHPARKKKTSRVRGVGSNGSGSNSSSNKASSPDDDQAPKEEYEGLVPDISDSMGFDDKGSLSSSENHRNMSYEVIDMKRGKLEPKEKVCEEPEKAIHFTKLDLVETLFTSGGIDHHSSL

SEQ ID NO: 199102 - protein, 47 aa, Zea mays
  Clone ID: MRT4577_113157C.1.pep
FFFFFKPKQPQGAGVHLQLHKQHLQSQKHTINPPSPNHGNQGHDQSL

SEQ ID NO: 199103 - protein, 50 aa, Zea mays
  Clone ID: MRT4577_113158C.1.pep
PLVRVRVGGRVGPPAFQGEVLFVCSTFTSERNTLESHQSFFHAPKFNTRT

SEQ ID NO: 199104 - protein, 126 aa, Zea mays
  unsure (1)..(126): unsure at all Xaa locations
  Clone ID: MRT4577_113159C.1.pep
MPPPPRKTLGGFAAITPRGATMVATKKKKKSTDSINNKLQLDMKSGPAXTLDYKTVLRXLRNSKSKLGIIDNNCPTLRKHEIEHYALLPNVTVHHFHGNIGHHGTACDKYFRLCSLSIIDPADPHI

SEQ ID NO: 199105 - protein, 110 aa, Zea mays
  Clone ID: MRT4577_11315C.1.pep
LSPVDLIRRCRTYVRVDRRETARRRPAVSNNWSSLLQLASVRMLPWAKANINPTGQALIVSTVAGMAYFIAADKKILSLARRHSFEQAPEHLKNTSFQGTGPPHPAFFRP

SEQ ID NO: 199106 - protein, 114 aa, Zea mays
  Clone ID: MRT4577_113160C.1.pep
EVQRPARDIPAGVSGSVVVVTVLYCLMAASMSMLLPYDADGTPLCSALLCSLKLDFEEMPRSCRIGLLYLELIFGCVGCHRKLAASDSGTRFCLSASASSSFLGLYGMLIWVGG

SEQ ID NO: 199107 - protein, 70 aa, Zea mays
  Clone ID: MRT4577_113161C.1.pep
KKHGRAPIFYKTGLVSTNNPFTLCWFLNRACGNPKKFTNYQQWGGDPGFKTLFNFLPPKCFKTPLRFPFA

SEQ ID NO: 199108 - protein, 188 aa, Zea mays
  Clone ID: MRT4577_113162C.1.pep
MGNGLSPCLCPGYARGAAARLVFWGGSSRMADERPSITAGDVMAELPDQHLVCAADSFFIGLPVPALSPCERLVAGRTYFVLPAARFSCSQALTAATLSKLSPSSAANVPLAGAAASPFEYVTGSDGAPLIRILPEFIEKVITSCGGGKCGAVAAEQLCSTPELRKHYMQLVRARAERPWSPGLETIS

SEQ ID NO: 199109 - protein, 81 aa, Zea mays
  Clone ID: MRT4577_113163C.1.pep
TTTLATTGTPHSKNLVLSRLMLYTAPVLADYNSDKKRGTTPHHCTLLLHQRSANTIIQPLALVTLIESQANMTRIAPTCAR

SEQ ID NO: 199110 - protein, 171 aa, Zea mays
  Clone ID: MRT4577_113164C.1.pep
PRLLELQLNGNKFHWKIPDLKQDELTAVNLANNELEGEIPPSLKFTPPDMFAGNTKLCGPPLGVKCEAPPPPSASPSPSPPPSPKTPPPASVKEGTTPSQPAADTVASTGASSADDAKQDEGHKPVEGSTSTSFGVLAAFIGTLGIAGVAFVALRRRRRYKTKNFGPTASS

SEQ ID NO: 199111 - protein, 157 aa, Zea mays
  unsure (1)..(157): unsure at all Xaa locations
  Clone ID: MRT4577_113165C.1.pep
RNRETPPPARWTGTPTTRTPTSTRTCGRTSTRCAAPASSPGPTRTLPXXSPPASRAPPPQPSPRRRGRRPTIIIMPPLRTTRRTRTSPSSAAYAPTSTTSIXKAXDRPPGRRPRAPGTTTTRPRARSARGXPSDTDEEEDDLETLRAIQRRFSHYQS

SEQ ID NO: 199112 - protein, 83 aa, Zea mays
  Clone ID: MRT4577_113166C.1.pep
HAFAHPSANPSGIPEKLAKGRNTHGHNQFYKAHKTGIKKPKRHRQTFTKGMDPKFLRNLMYSRKGNKKSCGSEELKRKHGCFF

SEQ ID NO: 199113 - protein, 70 aa, Zea mays
  unsure (1)..(70): unsure at all Xaa locations
  Clone ID: MRT4577_113167C.1.pep
HLXRFLKXRFSVQLLFFYFWPITKPHPCFPQSLTSLTSNFAHKPFLKKIQNPVLIFATPSIPSPKNPKQS

SEQ ID NO: 199114 - protein, 135 aa, Zea mays
  unsure (1)..(135): unsure at all Xaa locations
  Clone ID: MRT4577_113168C.1.pep
SLFYSLPPEDYVAATLVLAGDGRYLNKEAAHDIIKIGARKGMXKIIVGRNGLLXTPAEAAXIRKRKANGGFIMSASHNSGGPDNDWRIXFNYRSGQPAPETITDQIXGNTLXIAEVQTADIPDTDLSFEGVVSYG

SEQ ID NO: 199115 - protein, 97 aa, Zea mays
  Clone ID: MRT4577_113169C.1.pep
TSRLPWPGGLPAVTVPKSSIIEPTLGQIGTGYAPALDCHTSHIAVKFAELITKIDRRSGKELEKEPKFLKNGDAGMAKMIPTKPMVVETFSQYPPLG

SEQ ID NO: 199116 - protein, 123 aa, Zea mays
  unsure (1)..(123): unsure at all Xaa locations
  Clone ID: MRT4577_11316C.1.pep
MALVGAKAAGASTSTGAVAPKGGHLXFLVVLDGVETPIHEGTLYGSAGGTVTVTGPGQLSADGLESVLVRGGGTGTGAVRFTLCADAAAEGVGAACFERCGAARVEGAREVSVSSCRAVEVER

SEQ ID NO: 199117 - protein, 62 aa, Zea mays
  unsure (1)..(62): unsure at all Xaa locations
  Clone ID: MRT4577_113170C.1.pep
RTITKDDGIXXLSHNYYLYTMDYTDPPSSPLINSNDLFPIINTPNSGYTHLFLTYIPHNIQH

SEQ ID NO: 199118 - protein, 42 aa, Zea mays
  unsure (1)..(42): unsure at all Xaa locations
  Clone ID: MRT4577_113171C.1.pep
ICDPRHTTXLRQDDPMKGVDLPASPSYRLSLTPGANTAHLRH

SEQ ID NO: 199119 - protein, 96 aa, Zea mays
  Clone ID: MRT4577_113172C.1.pep
PPPRVNSGESPLATKARSRAFFGLGGKKTPGFFFFWTRPFLIPLKGARSPNFGSNWPFFFPQNLGLFFGPFCFFPGGGNQVFFYPFAPFTLWDSQP

SEQ ID NO: 199120 - protein, 126 aa, Zea mays
  unsure (1)..(126): unsure at all Xaa locations
  Clone ID: MRT4577_113173C.1.pep
SYCAGCAFFNKYNSQTGVAPLRDTSFALRGALGSSSSYLDQDNSYTSSTVAALXPKMYATTRNRLLHSSCPLSYSVSYRPLSTYLRTXKPHISATFLMLYCIFFVAXGSAILYFSLVTKVSLRFGA

SEQ ID NO: 199121 - protein, 72 aa, Zea mays
  Clone ID: MRT4577_113174C.1.pep
ADSVEAEGVVQGDPRSGEPGDFFDSCGGLQGFLYRFQGRWRWRNRPVRNQVQVALPDPDESFVVTFQPTVIV

SEQ ID NO: 199122 - protein, 408 aa, Zea mays
  Clone ID: MRT4577_113175C.1.pep
HASAHASASDKEKGTVHADMWSLDPRTWEWNKVKKAGMPPGPRAGFSMCVHKKRAVLFGGVVDMEVEGDVIMSMFMNELYGFQLDNHRWYPLELRKDKPAKIKARNIKRKESTNDVEANIIDDEGDEVMVDVEEAIEGQPEVNGVSNQLIKTLNITKDGSSRSIDVLSDSTAQESFLEAVKPSGRINACLAVGKDMLYLYGGMMEVKDREITRPDLYSLNLSKLDEWKCIISASESEWLEISEEEDDDDDDDETDDDENEEGDASQTDEDEEESDEDAAKNVSSAVSLLKGESKTMRRKEKRARIEQIRVILGLSDSQRTPVPGESLRDFYKRTNMYWQMAAYEHTQHTGKELRKDGFDLAETRFKELKPILDELAVLEAEQKAEEEASASTSSKRDTKKPKQKSARR

SEQ ID NO: 199123 - protein, 56 aa, Zea mays
  Clone ID: MRT4577_113176C.1.pep
DDGHRQAQPAGKRAEVVHDQLINRRIEPDARGQVELSLRVQALLQLLLMNGHHHNH

SEQ ID NO: 199124 - protein, 165 aa, Zea mays
  Clone ID: MRT4577_113177C.1.pep
MRTVALSWSSLGSLVATAVVVRTAVRDVLPPEAQGALRALLACAAAAFAQPSDTIVVHETDANGVPNELYDAAQLYLGARCLASAPALHLHKAHGAGDVVASLPDDHTARDTFRGVRVLWASRRAESSGGYSPSGFGGGGGGRGGWSRGFSYPVGGGHQQQRCLV

SEQ ID NO: 199125 - protein, 53 aa, Zea mays
  unsure (1)..(53): unsure at all Xaa locations
  Clone ID: MRT4577_113178C.1.pep
STVVGANPHRQCQFCCNPRPPWISHRKMLMLVLNKNNNVLFNSIFXSFFLTPA

SEQ ID NO: 199126 - protein, 241 aa, Zea mays
  Clone ID: MRT4577_113179C.1.pep
LLFTWPASQPSRVSWLGLVAAAVVGAGAAWLAAFHVHLRGREAWNPNNGAGIRGSIGEARRGMGSGTSKAASPAPAPAGGEAKARNGKPRGKSLMRLPSYSCFRGFTPDCDPSSSLPAPPPPPLGVESSKGGATPKLTHIGISDEDASSAPKSNPSEVRTMPLSDTDRDQDDDVLQNVTATRTAVDDDQSPNPSDRPRPCFGVNFGLSRAVSLGSSVACSIMSNGLSSSANPSIGMWTILP

SEQ ID NO: 199127 - protein, 65 aa, Zea mays
  Clone ID: MRT4577_11317C.1.pep
VCTYELESTRPSMLYLSHLYRMDIMRSPWRETTPRFYPWMVAANMGKLPQMNHSVSQIEIQEPCI

SEQ ID NO: 199128 - protein, 137 aa, Zea mays
  Clone ID: MRT4577_113180C.1.pep
RRRRALCTRMPPLLRRPCSYRGARQQRSALSCLLPWCALLASVRCPWRAHAAPRQVLDSPPSQSALGRESIGYGGGYGVLVLRPLRDHVLPPRLCCSAVLFALLVGFTVRRLFLCLGSRAEGFEELCGPGRALVYLS

SEQ ID NO: 199129 - protein, 57 aa, Zea mays
  Clone ID: MRT4577_113181C.1.pep
AEQLPVEAGLEPLLSPCYPVAAAHRASAGSRCGSRAFGAATRILAPRSRKNPNQTQP

SEQ ID NO: 199130 - protein, 83 aa, Zea mays
  Clone ID: MRT4577_113182C.1.pep
MKKKKKKKKKKKKKKKKKKKKKKKKKKKKKKKKKKKKKKKKKKNTKINKKKQLKKKNGGWILKNRSFIKSPWEKHFFFLVEQN

SEQ ID NO: 199131 - protein, 40 aa, Zea mays
  Clone ID: MRT4577_113183C.1.pep
NLISITYVGPTLSSQFNVGLHWNHIGRRALHQHMFLILIT

SEQ ID NO: 199132 - protein, 75 aa, Zea mays
  Clone ID: MRT4577_113184C.1.pep
VRAGFKVELHYWMPFLTFESRAKCLFFLPWLNQRAFFTYLLNRFRLKGLIPFPFRVKVCRSLCSPRSYVFFWAQI

SEQ ID NO: 199133 - protein, 138 aa, Zea mays
  unsure (1)..(138): unsure at all Xaa locations
  Clone ID: MRT4577_113185C.1.pep
MSEPSKVIHIRNVGHEIAESDLLQLLQPFGVVSKIVMLRAKNQTLLQMEDIHASVSALQYYTSVQPSIRGRNVYMQFSSHQELTTDQSSHGRNSDXGFQALIQFHSRQEAVEAFGSLHGRNIYDGCCQLDIQYSKYEL

SEQ ID NO: 199134 - protein, 16 aa, Zea mays
  Clone ID: MRT4577_113186C.1.pep
MANSSTGMAGTPIMAR

SEQ ID NO: 199135 - protein, 89 aa, Zea mays
  Clone ID: MRT4577_113187C.1.pep
GMTDATHAIAPTLHGRHAATAASAPREPKRNHSADHHELCQLAGYSAALPRVHDHRVRGSRLMTGQEQRLARRCTPAPRIPSRSEGRSQ

SEQ ID NO: 199136 - protein, 239 aa, Zea mays
  Clone ID: MRT4577_113188C.1.pep
MSEPSKVIHIRNVGHEIAESDLLQLLQPFGVVSKIVMLRAKNQALLQMEDIHASVSALQYYTSVQPSIRGRNVYMQFSSHQELTTDQSSHGRNSDQESEPNRILLVTIHHMIYPITVEVLHQVFKAYGFVEKIVTFQKSAGFQALIQFHSRQEAVEAFGSLHGRNIYDGCCQLDIQYSNLSELQVHYNNDRSRDFTDPSLPTEQRPRASQQAYPDPANLYAFHKLEFICTDGEGCNDCC

SEQ ID NO: 199137 - protein, 444 aa, Zea mays
  Clone ID: MRT4577_113189C.1.pep
MSEPSKVIHIRNVGHEIAESDLLQLLQPFGVVSKIVMLRAKNQTLLQMEDIHASVSALQYYTSVQPSIRGRNVYMQFSSHQELTTDQSSHGRNSDQESEPNRILLVTIHHMIYPITVEVLHQVFKAYGFVEKIVTFQKSAGFQALIQFHSRQEAVEAFGSLHGRNIYDGCCQLDIQYSNLSELQVHYNNDRSRDFTNPSLPTEQRPRASQQAYPDPANLYAFQQAGASYAQMGRAAMIAAAFGGTLPHGVTGTNERCTLIVSNLNNDKIDEDKLFNLFSLYGNIVRIKVLRNKPDHALVEMADGLQAELAVHYLKGAILFGKKLEVNYSKYPNITPAPDAHDYLNSSLNRFNSNMVKNYRHCCSPTKMIHISALPQEISEEAILNHLSEHGTVVNTKLFEVNGKRQALVLFETEEAATEALVSKHASTLEGNTIRISFSQMQSI

SEQ ID NO: 199138 - protein, 90 aa, Zea mays
  unsure (1)..(90): unsure at all Xaa locations
  Clone ID: MRT4577_11318C.1.pep
CSSRRSPLSPRXVAAIKTAYVLGCELRILSDANAFFVDTILAHHGLADYFSGTDTNPAHVDAAGCLRIRPYHEFGAAAHGHGCVLPTCPL

SEQ ID NO: 199139 - protein, 444 aa, Zea mays
  Clone ID: MRT4577_113190C.1.pep
MSEPSKVIHIRNVGHEIAESDLLQLLQPFGMVSKIVMLRAKNQALLQMEDLHASVSALQYYTSVQPSIRGRNVYMQFSSHQELTTDQSSHGRNSDQGSEPNRILLVTIHHMIYPITVEILHQVFKAYGFVEKIVTFQKSAGFQALIQYHSRQEAVEAFGSLHGRNIYDGCCQLDIQYSNLSELQVHYNNDRSRDFTNPSLPTEQRPRASQQGYLDPANLYAFQQAGASYAQMGRVAMIAAAFGGTLPHGVTGTNERCTLIVSNLNTDKIDEDKLFNLFSLYGNIVRIKILRNKPDHALVEMADGLQAELAVHYLKGSILFGKKLEVNYSKYPNITPAPDAHDYLNSSINRFNSNVVKNYRHCCSPTKMIHISALPQDISEEAILNHVSEHGTVLNTKLFEVNGKRQALILFKSEEEATEALVSKHASTLEGNTIRISFSQMQSI

SEQ ID NO: 199140 - protein, 92 aa, Zea mays
  Clone ID: MRT4577_113191C.1.pep
LTPYMKCYGSTNLKLRGRDAESTYANGHIRALTSTSSRPYVFSVQRPVNLTNHQPWPSRHTPSFRTATGSNTRCSSCCTPADGSCGCLAGSS

SEQ ID NO: 199141 - protein, 80 aa, Zea mays
  Clone ID: MRT4577_113192C.1.pep
MGFYKKLGLIKRGIIVISPGWVWKSHHVCYLLAKNKPLFLPKKKKKKKKKKKPKKKKKKKKKKKKKKKKKKRKKKKKKSG

SEQ ID NO: 199142 - protein, 64 aa, Zea mays
  Clone ID: MRT4577_113193C.1.pep
SAEMALKAPSDGNAKKRKASGKGKGKDGPGSTAATKEESSGKRCKSAEESSGAEENSGRGRAAA

SEQ ID NO: 199143 - protein, 41 aa, Zea mays
  Clone ID: MRT4577_113194C.1.pep
LFDTTLATDDFYMKPIDLEDICNFLVLSFLFKKVKMFKTTI

SEQ ID NO: 199144 - protein, 266 aa, Zea mays
  Clone ID: MRT4577_113195C.1.pep
GRVDHPERRHPSAFDVWRSVRKQLGPGQKITALTSGPLTNLASIISLSDMDAGSVIERVYVVGGVVRDGGDDRGNVFTVPSNRYAEFNMFLDPLAAKTVLESGLNITLIPLNVQRKVASFEGVLGALKQHTQHTPESKLVRRLLLLLQQLQREQRKFYHHMDIFLGEVLGAVYMVQGSNLEPSVEVKSICIVANTTESINGLILVKKSAKPVDVLYSLNTGAYYDHLANSLVNHKQSAPIGSFGEQKAIWSRPQKHLGTDIAKDRK

SEQ ID NO: 199145 - protein, 133 aa, Zea mays
  unsure (1)..(133): unsure at all Xaa locations
  Clone ID: MRT4577_113196C.1.pep
GGPRVPGPGPLPGPGPPXPRPPAGXSPPKGEPAPQGGAPGRRRPPGKGPGPLPATAGRAGERQTPPALRVGPPPXPGAPAPPRPPPPRLPLTPLPGGHFFSPPACLETPGPCVPFGFSSPPLFVFRPNTTKRL

SEQ ID NO: 199146 - protein, 197 aa, Zea mays
  Clone ID: MRT4577_113197C.1.pep
MGFLSLLVVASMPIVQVLLIGVIGAFLASGYSKVLTASARRDMNKVVFTVFTPSLIFANLAKTVTLSDVISWWFMPVNIAITFLVGSALGWLACKILKPPPHFRGLIMAFCSAGNLGNLLLIVVPAVCDEDGNPFGNDRSQCRSRGLSYSSLSMALGGLFIWTYTYSFDAEVRQTVPQDAVQERPVPRRQRRGASPG

SEQ ID NO: 199147 - protein, 50 aa, Zea mays
  Clone ID: MRT4577_113198C.1.pep
DEDVLFIHIDLRFFFYFSFLHFKLVMLFLYMFFLVVIVLSCILYHTQVSW

SEQ ID NO: 199148 - protein, 301 aa, Zea mays
  Clone ID: MRT4577_113199C.1.pep
MNIFILCLSFPNRECLLEFREAVSTLIFAAIWYPDLPKLCDLRHIFAERYGNFVEHFVGQEVFAKKTVKFSVLDAMGLSSKPLHRGVKHDISCLSQDSYGPYIAASCMDNILRHDFKFLKVENLGNQLVQQKGKPKIEVYEKDRKKGAGALTTHARAVGLGYKSVAHFLIAKHNNKQVPTDIVREPEQHAFAQIVSFLVDLWEDGGSDDGYVLVKQEDVVDEMTSFMAACLVSIKKTKDLPPDQLQKALRKTFSAEKKKSKIRKALDGTKVIYNVASWGATAVGCVLLETICLVYADEFDC

SEQ ID NO: 199149 - protein, 110 aa, Zea mays
  Clone ID: MRT4577_11319C.1.pep
QAGGGVFSASIASNGEGFNNTRLVLRPGGQARRGGALYLLWRGAISVEVRREPRLRDGDARNLSARGKAISCFMLTSLGALPARRRLANPRHQLGPPAATQVYREAVRRA

SEQ ID NO: 199150 - protein, 120 aa, Zea mays
  Clone ID: MRT4577_1131C.1.pep
SNHRALRQVTCIEFFESFPTKKEHCNRSFERKVMAVLVQDIRIRCSFQKKTIEIRQPLCIQSPFFSCSLALSFPFLFSFYFPFFFFLSAFFCFFVTKEEKQGHGVDSVGDMIKRKIVTTR

SEQ ID NO: 199151 - protein, 59 aa, Zea mays
  Clone ID: MRT4577_113200C.1.pep
AVACLTASPMSRTTTKKPRIRVLLIDREPAPTPLALCQIELQCCACASCRLPAARGVPL

SEQ ID NO: 199152 - protein, 50 aa, Zea mays
  Clone ID: MRT4577_113201C.1.pep
NGTTHLPLVLDNVCGPPTLYFWAVGILGLEPCESIICPPSFIQYIFGLWV

SEQ ID NO: 199153 - protein, 139 aa, Zea mays
  Clone ID: MRT4577_113202C.1.pep
EPAGKFGKWFISLRFSDQLAGSYKKVLAFKFVLPDASNMSEMTRLVALVPYYIDLVGRYKLSSHARSKTDGARTKAAQEAFRELQSARQEALQRKKAEKKKLIEEADAKLSAESLRKKEEKERARQMKKSGPKVKMLRS

SEQ ID NO: 199154 - protein, 105 aa, Zea mays
  unsure (1)..(105): unsure at all Xaa locations
  Clone ID: MRT4577_113203C.1.pep
LLKTXXXLAGGLAVGGASAYAMQMPCPSAGLQGLYGAGAGLTTMMGAGGLDPYAEYLRQPESNPLADEPYYAGXGKPNAMFQPILEQCCQQQMRMMDVQSDYTTA

SEQ ID NO: 199155 - protein, 485 aa, Zea mays
  Clone ID: MRT4577_113204C.1.pep
MAAPSWIRLRQSRATLLILLLIALNISLSSAANFEGFDSDDLPSAAGGLDADDDEEGLDGVDLPPPPPISLSTSAPSPPVTTTSAPNPNPATRTPRDPTPALDLWDEDEFEGIPVPEAIPSDDSAAPAEADQSDPSAEAPAETIPAAKRSPAELLRAFSVEIACVSFLICFVLNYFTGKRQNENIALAWATKFATRDSIFDKNFSLLGTGDGKDTPLLLKEGQDVFKFYASGRRFCQGMLATMEMRARHDLLSRFVELVFPGKDTITFEVVMNEEAMDHVVLAVARKKAAKTLQKEERDLQRFANVLTSAPAGRKWVSDELAVVAESKEVAGDMITEAVLDQVLGEKAFEKFGKWFISLRFSDQLAGSYKKVLAFKFVLPDASNMSEMTRLVALVPYYIDLVGRYKLSSHARSKTDGARTKAAQEAFRELQSARQEALQRKKAEKKKLMEEADAKLSAEALRRKDEKERARQLKKSGPKVKMLRS

SEQ ID NO: 199156 - protein, 78 aa, Zea mays
  unsure (1)..(78): unsure at all Xaa locations
  Clone ID: MRT4577_113205C.1.pep
MAALYDTQSETYTKKRSQYPKEWLSMLASLTXGPGRVXDAGCGTRQARHKMAEHYXSVVGKDESEGQLLHAPDHPKVQ

SEQ ID NO: 199157 - protein, 263 aa, Zea mays
  Clone ID: MRT4577_113207C.1.pep
MRTTVKSKAPTSQPARVSNGYGSKNKMSTQRHAEGRVDTMRKEAFLNRERVVSRDNERMHERVVSRGNERMHGSAINGSNQASTSKTTIQKLTSRGSIANKQASTDLNDAALRKSSVAPKHHFSEVDRSKSLQSQKMQSAGQRLQHSSHGQRPHQSMQHRPQQSLQSRRPQQMTQDQKPQQSLQSQSTQQSLQNKRQQQSSHIQKLQSSHTQKSQSSQAHRPQSLSNRSQELRGQRPLSSQGTYLEQKRVQANDRVKQLKAHS

SEQ ID NO: 199158 - protein, 43 aa, Zea mays
  Clone ID: MRT4577_113208C.1.pep
GQKQILKKNCFFSKKKKKKKKKKKKKKKKKKKKKKKKKKKKKR

SEQ ID NO: 199159 - protein, 46 aa, Zea mays
  unsure (1)..(46): unsure at all Xaa locations
  Clone ID: MRT4577_113209C.1.pep
LDYLMKLMVIGDSGVGKXCKVVRYRDDSYLNRYIITILGELKTRTG

SEQ ID NO: 199160 - protein, 83 aa, Zea mays
  unsure (1)..(83): unsure at all Xaa locations
  Clone ID: MRT4577_11320C.1.pep
MNTVSLHAPRPSTGNFLMPTRDNLLPIRVDLEVDGQRYRDAYTWNPRDTDXEIISYSKRTAKDLKLAAQLRTPDAPMHALGNL

SEQ ID NO: 199161 - protein, 76 aa, Zea mays
  Clone ID: MRT4577_113210C.1.pep
TDDTISEGRIVQVTVRNIQDNKIICTFDSGLKAIVMADNYSDEGFDPESSQLREGDVLTGNIRNVNTNRFMVYLTC

SEQ ID NO: 199162 - protein, 113 aa, Zea mays
  unsure (1)..(113): unsure at all Xaa locations
  Clone ID: MRT4577_113211C.1.pep
PIFPPPDPKKRQGALRGPVGPKRQELXSPPRGPPRPTPPFYKKKVVGGPAQPPKSVLVFGDGPFPPPPPPPKEVPPPPPKIGVFVPWGCPCVPSLGGGTVFLFKKKRTPPGPV

SEQ ID NO: 199163 - protein, 83 aa, Zea mays
  Clone ID: MRT4577_113212C.1.pep
CQCAAEDMAQALRVVDPALRGEMKGRKKTVASCLRLSAACCAMAPSKRPSIKDALQAMERIPAAAEASASKSSISTAAQSHDS

SEQ ID NO: 199164 - protein, 183 aa, Zea mays
  unsure (1)..(183): unsure at all Xaa locations
  Clone ID: MRT4577_113213C.1.pep
MASHALRRRAPVPRAPGLRRAQDRGGGAAVREGGQEQPTSHVIRCDYIGSATNLIMVTTTTLMLIAXTVXLAPSANRKATAELKLERRDSGLQTGDPAGFTLXDTLGCGAVGHILRVGIELRIKNTVRPRPDHLVDAYVDAVMIRLSDLDRACVADVTAGAEFLICVTSYMYIASILDTMEIY

SEQ ID NO: 199165 - protein, 216 aa, Zea mays
  unsure (1)..(216): unsure at all Xaa locations
  Clone ID: MRT4577_113214C.1.pep
SQYLIFAKLRTVTMAPVETDAATRSNSLPIALFGGQVLLVTVLTARVLLTTRRAARSQPPSTHTRSQDPARRRHAFVFSTIALISLLSVGSFAFLWRAISYVRWAEHNKQEIPGSLWSGWYGTGEQGQWHLGDWIADIDLVREFDAVGIMKPEGFLYTSQYFVGLIASSIFIGAEGRRRNLSNTTHASFVLLSSIGKLXISLSLXLITILYTPLTL

SEQ ID NO: 199166 - protein, 67 aa, Zea mays
  Clone ID: MRT4577_113215C.1.pep
TKPKIYGPPVLKIPCFFPPESPFKTFFFWPQILFPWPPFPNAFPEKPPAFPTYMTFHKFPLYPLGFL

SEQ ID NO: 199167 - protein, 68 aa, Zea mays
  Clone ID: MRT4577_113216C.1.pep
HNIGCTYSFLCFEGIFSEYRKPHAIHALIWKVTFDVATQEMLEWSLQYETLRRLSTEFPLAITLIRAP

SEQ ID NO: 199168 - protein, 65 aa, Zea mays
  Clone ID: MRT4577_113217C.1.pep
YTPLSLASQHQPSTPLYNSPTKGWRTGHHNPRADKAKRGDFFNQSRKFAPEGNRTQILEVLLESL

SEQ ID NO: 199169 - protein, 95 aa, Zea mays
  Clone ID: MRT4577_113218C.1.pep
ALLVISRESYHTDDDPDNFATIDFKPFSFLYLSPFLVMSAIIYPLSTNIWKLIHVQEECAIPPFSWRLHANLHVLLWIALENIICSLAVITRYYM

SEQ ID NO: 199170 - protein, 70 aa, Zea mays
  Clone ID: MRT4577_113219C.1.pep
ATPCSDQTGWCTKASKLNGLWCMKRHIKSKSVARKNGRICNNRPCFYVCTYSFCLFFFFYKFFFFVFFFF

SEQ ID NO: 199171 - protein, 162 aa, Zea mays
  unsure (1)..(162): unsure at all Xaa locations
  Clone ID: MRT4577_11321C.1.pep
MFGKISFCRECALVNLLILSVIASRCLSAPTERLGSIFQNQSISDGQTLVSMSRIFVLGFFSPGASSKRYVGIWHNDVSERRAVVWVANRNDPLQDTSGILKFDNSSNLIILDGRGNSFTVAYGXGVQDVEAAMLENGNFVLRSITNQAKIIWQSFDSPTDT

SEQ ID NO: 199172 - protein, 91 aa, Zea mays
  Clone ID: MRT4577_113220C.1.pep
VVAADMPPALQRRAFRCARDELAAMPHFPRRLEPKRLALALKKEFDAAYGPAWHCIVGTSFGSYVTHARGGFLYFSVDKVYILLFRTSVEP

SEQ ID NO: 199173 - protein, 42 aa, Zea mays
  Clone ID: MRT4577_113221C.1.pep
TTTALSKHAIMKTILTTDANNMCYQKTIRSKEIGKTSYKKPR

SEQ ID NO: 199174 - protein, 244 aa, Zea mays
  unsure (1)..(244): unsure at all Xaa locations
  Clone ID: MRT4577_113222C.1.pep
MVLSFSVPARSQDQPSTVLKMKVGADPSTQDVMEEAALKAKHVAERKFHARNTKGARRSALKAHSLCPSLEGISQMISTLDVHLAXESKIDGESDWYRILSLNAMADEEEVKKQYRKLTLQLHPDKNKSVGAEVAFRLISEAWSVLSDKSRKMLYDQKRRDHCVASVSNGLYAYDYDTKLSKRARKNAVASASAAVEATTRLAGADTFWTSCNSCRMQYEYLRVYLNHNLLCPNCHHAFMAGET

SEQ ID NO: 199175 - protein, 100 aa, Zea mays
  Clone ID: MRT4577_113223C.1.pep
NWPGPTPPKSLKSFGAPRFFRWGCPLWPTGPFGVKLPPRGPLKRPKKFLRVFASFTLGVRTNLVGPPTQGKSSLVFCFKNKLGGSLPFWKKTPWLGFFKT

SEQ ID NO: 199176 - protein, 115 aa, Zea mays
  Clone ID: MRT4577_113224C.1.pep
MKYLVKKKKKKKKKKKKKKKKKKKKKKKKKKKKKKKKKKKKKKKGRACGIRNWPGPGFTPGKFRARVPGGRSTFFLYEEGVYKAWAEIQGPIGGSLGEKMVIPQNFHTKKRTRKA

SEQ ID NO: 199177 - protein, 161 aa, Zea mays
  unsure (1)..(161): unsure at all Xaa locations
  Clone ID: MRT4577_113225C.1.pep
MVLSFSVPARSQDQPSTVLKMKVGADPSPQDVMEEAALKAKHVAERKFHARNTKGARRSALKAHSLCPSLEGISQMISTLDVHLAXESKIDGESDWYRILSLNAMADEEEVKKQYRKLTLQLHPDKNKSVGAEVAFRLISEAWSVLSDKSRKMLYDQERRD

SEQ ID NO: 199178 - protein, 115 aa, Zea mays
  unsure (1)..(115): unsure at all Xaa locations
  Clone ID: MRT4577_113226C.1.pep
SPLXSWCNLENFGGRRRGAFSFLQTQYDPVDWGWFGLLFCQVANWEGEPGKTTVEGTSSRRLVQRKWQARGWASKGHPMGGNHAIASVCAGETRGQDLANKDRGKGTRDLHARRT

SEQ ID NO: 199179 - protein, 34 aa, Zea mays
  Clone ID: MRT4577_113227C.1.pep
LFGFLGWRWPVVVHGDVDPRAKRVAFLCINLPQP

SEQ ID NO: 199180 - protein, 85 aa, Zea mays
  Clone ID: MRT4577_113228C.1.pep
RSRVHFPWVHSDMNALLGADTIGVTHCDKFLRGIYTFKQRVAWNPPMNLDFLSSLRRVCPLSYSHTAFDMLDCTTPMVFDNAYFN

SEQ ID NO: 199181 - protein, 124 aa, Zea mays
  Clone ID: MRT4577_113229C.1.pep
MLLNPASMLDTIRQHLLEEPPAAADESFGILVADQWSDSLPFRTDDADDMVVFGALQDAFAYGWLPDGSFAHVKPEPVRSPDSYYSSSYDGSCFGGLPYPEQPLTPGNRGTNSPAICRGMSWRT

SEQ ID NO: 199182 - protein, 50 aa, Zea mays
  unsure (1)..(50): unsure at all Xaa locations
  Clone ID: MRT4577_11322C.1.pep
XXXFFHWVPLGRAGPSSYPALELPSIQRVRTLRVPPMRGHTKARGIRRGS

SEQ ID NO: 199183 - protein, 52 aa, Zea mays
  Clone ID: MRT4577_113230C.1.pep
ADTDKIFFLEPIQTYKTLVFKRGLDSTTLTLFSKMKGGLIKKLMEEGSLAAQ

SEQ ID NO: 199184 - protein, 157 aa, Zea mays
  unsure (1)..(157): unsure at all Xaa locations
  Clone ID: MRT4577_113231C.1.pep
YQCLTIDGGVELFPFKCRPYQMNKLSLDPTSFTVKAEGIAKNAPPEFQKTKLMTRLTYTLXEIEGPLEVGSDGTLKFEEKDGIYYAAVTVQLPGGERVPVLFTVKXLVPTGXPRSFCGPFLVPSYXXGSSFLDPXGXRGGSTCYDNARRSFPAGGSR

SEQ ID NO: 199185 - protein, 192 aa, Zea mays
  unsure (1)..(192): unsure at all Xaa locations
  Clone ID: MRT4577_113232C.1.pep
MSRFGRCGPPPPIRDTYSLLDHKITFRTTADDLFTIFNDDGEICXLYIPRYRMTGDSRLLAVERYXLXDDEQKAMDRLDATLVDTRDIXLQFAXKYRPNAERINKGRIMEPAPRSTGPXRSRNPRRRTPTMXYREDYQYRDYRRRSRTQSTDRYARDRYRDRXDYRHRRLSRNMSPALRRPSHRRSRRYTPD

SEQ ID NO: 199186 - protein, 103 aa, Zea mays
  Clone ID: MRT4577_113233C.1.pep
TWPNPCVNLRTRPGIDPQIHSSGTHPIPYLVASVMTQVARPDQAMVTARFTTDSQGFFRRRLPPSSPASFSIDKEVVLVVLVQRRHKSSSSKCRRGSCFKLAI

SEQ ID NO: 199187 - protein, 98 aa, Zea mays
  unsure (1)..(98): unsure at all Xaa locations
  Clone ID: MRT4577_113234C.1.pep
RPTRANAFVVGIGTPAFFGALLAHAAGSCEANGFYTRDAFLDDGGYYPAFGRTGTVDDCKREIADLFXAYANHETIKICFINAIDGPRTNYCDRNNTQ

SEQ ID NO: 199188 - protein, 198 aa, Zea mays
  unsure (1)..(198): unsure at all Xaa locations
  Clone ID: MRT4577_113235C.1.pep
FRVLFKKKPCRPAILLCTTSXQKTLMSLVRDVGCKFEFISPPPIXKKLESSAEHVIATLRGGHPQTTHYFLGAPEKLTQKLXPHALAFALXHMRGFSQTPSSRSLIRYEHGWGTLQLTIEPRYGRGFFSPISVTGFLSDVCSPAADEIGKIYISPDENVQRAHFYLPEEIAKDLLTMVGPPXGNTLSTISKLPALQDD

SEQ ID NO: 199189 - protein, 113 aa, Zea mays
  Clone ID: MRT4577_113236C.1.pep
TWPNPCVNLRTRPGIDPQIHSSGTHPIPYLVASVMTQVARPDQAMVTARLTTDSQGFFRRRLPPSSPASFSIMQTRALHPAIKSALVLHNGTYCVCRISFIGHIRICRTRKWC

SEQ ID NO: 199190 - protein, 65 aa, Zea mays
  Clone ID: MRT4577_113237C.1.pep
PTLPRTTTLPSCAFVPAFLGRHLYFLRKPSCQSPPVAMGNTVALALIRRCKYLASSLMTPLLPRS

SEQ ID NO: 199191 - protein, 54 aa, Zea mays
  Clone ID: MRT4577_113238C.1.pep
IHDDTLDNKIRLRPCRKHVWSLLTSITPPASAYLCLSSFSIMTARLKLVSVRLH

SEQ ID NO: 199192 - protein, 97 aa, Zea mays
  Clone ID: MRT4577_113239C.1.pep
KHEFFQTWWAGLGSFFYGAPNNKFANNEANKNPPPRKKKTLLTIWPQKRNIWGLGFTGEFLPQIGNLKKLVKKTPFRVPGEILFWGKKQGLDKTGAP

SEQ ID NO: 199193 - protein, 154 aa, Zea mays
  unsure (1)..(154): unsure at all Xaa locations
  Clone ID: MRT4577_11323C.1.pep
MGEEAAAATATATVAAGNAPPHLLLVCFPGQGHVNPMVRLAKRIAAKGPLVTFSSLSSIGAKLTASAGVSAGGDGVPVGRGRXGSSSWTXEDPGPDLDDLMRHIAKDGPPALAELLGRQARAGRPVACVVVNPFMPWAXDVGADAGIPXAVLWV

SEQ ID NO: 199194 - protein, 81 aa, Zea mays
  unsure (1)..(81): unsure at all Xaa locations
  Clone ID: MRT4577_113240C.1.pep
GPPPPLEPVPVLGEGTLFFLQGFTPFGPFGIPGSALFGGGPPGGFWGLIKGVGFSQKKKKXPQKKTHVVPRVGWDKYWVEN

SEQ ID NO: 199195 - protein, 209 aa, Zea mays
  unsure (1)..(209): unsure at all Xaa locations
  Clone ID: MRT4577_113241C.1.pep
TPAVPGSYTRVAQLSCHFLILSTILSNSGIPNISLIMLPALSAXAATHSFFPQCSXQAPMAYLLPPYLGPTMSPICQNPLLLPYMIQQGIAAHILPXSPLFLQQSSALXQKLPSVHLLTQNIRAQQLQHLLLTNLAGYSXQQQLPLVHLVAXNIRAHQLQQLVLANLARYSQQQQPLPFNQLTALNSAAYLQQQQLLPFSQLAAAYPPQ

SEQ ID NO: 199196 - protein, 78 aa, Zea mays
  Clone ID: MRT4577_113242C.1.pep
MGDDNNNKINMGYEDDPPKPEIEEGPKKKLENNKNAPDDAIGEKGENKEQEKTKGERKKTKYMTKNDRARILGTQALK

SEQ ID NO: 199197 - protein, 377 aa, Zea mays
  Clone ID: MRT4577_113243C.1.pep
MAASPAEAGAQALPEATEAKEKGKRGGVLRRVWRALFGGREDFEKRLQYLSKEEAAVHARMRRRTQFSRRTVRNLIVLSVLAEVLAVVYAIMMTRNEDLTWQMRAIRVLPMFVLPAVSSVIYSTVVNFTRMFEQKDQKTLEKLRAERKAKIDELKERTNYYLTQQLIQKYDLDPAAKAAAASVLASKLGEDTGLKVHVGEEPKLDAAVARSNDVEIVPSDGLRNRKQPNARGSRTGSPTSDTPARGTESSLTAGADLETAPAPLVVEHHQGLGASDGGGWIAKIAALLVAEDPSQSYALICGNCHMHNGLARKEDYPHVTYYCPHCHALNTSKQSMWQYSGSNSGRSSPVVLDDGLSTSSSVQETELSNLTHTAGAT

SEQ ID NO: 199198 - protein, 46 aa, Zea mays
  Clone ID: MRT4577_113244C.1.pep
RVVLSESLHLSVLASQSKRRAVSDEIDRNGCRQHGPEKLGLHLLIS

SEQ ID NO: 199199 - protein, 63 aa, Zea mays
  Clone ID: MRT4577_113245C.1.pep
GHTISWVCKTSAISVYMVTEPVSNENNFQRPEIVENKAYSVENNGIDFIFGGLCPSKKFSRKW

SEQ ID NO: 199200 - protein, 429 aa, Zea mays
  Clone ID: MRT4577_113246C.1.pep
MRHGPTRGWPAIPREPLPLSSPSDPAPRGSARQSMASTQAEAEAGAPAPPEAAEAKEKGKQGGVLGRVWRALFGGREDFEKRLQYLSKEEAAVHARMRRRTQFSRRAVRNLIVLSVLAEVLAVVYAIMTTRNEDLTWQMRAIRVLPMFILPAVSSVIYSTVVNFTRMFEQKDQKTLEKLRAERKAKIDELKERTNYYLTQQLIQKYDLDPAAKAAAASVLASKLGEETGLKVHVGEEPKLDAAVARSNDVEIVPSDGLRNRKQPNARGSRTGSPTSHTPAQGTETNLPPAPASAGLETAPAPVVVEHHQGSGASDGGGWIAKIAALLVGEDPSQSYALICGSCHMHNGLSRKEDYPHVTYYCPHCHALNTSKQSMGQYSGSNSGRSTPVVLADGLSTSSSVQETELSNLTTLQELPEEGKTDKQQVEAS

SEQ ID NO: 199201 - protein, 116 aa, Zea mays
  Clone ID: MRT4577_113247C.1.pep
KLGRRIDIRSTHPGVLKPADPARNRWSRHTPNCVSWFKGPPGQGPLATCCKKPRGPHKLPFPRKSLKSPTKQVFCSCSLPWVEVPTQTNVMQRLFPVGWSSGLPPFRKNSCIHKIY

SEQ ID NO: 199202 - protein, 159 aa, Zea mays
  Clone ID: MRT4577_113248C.1.pep
TSRLCYTHVESGIPQSDEFCTSKSCYALWLNPITSCHQKSDMYYLLPVAYDMGSDARARYLRSTVPYNSGGYHWCRRSGRTVAPLSLGMHGKEERRVLVDGGVLHLHIHIDCVVAPHRRPEQSRAGRSKAGEQEQANKARGRVGGSRTRCFAAIAGGRV

SEQ ID NO: 199203 - protein, 63 aa, Zea mays
  Clone ID: MRT4577_113249C.1.pep
NQLFNLLFKVEWLNGWMLVTNLVITGGINEGAIYCGIYGGTMVTGVIPRMILRRSIDGNSDEL

SEQ ID NO: 199204 - protein, 100 aa, Zea mays
  Clone ID: MRT4577_11324C.1.pep
LVCFLLLTLWIFLQPIFPRRKAAHAPEEEETQAIAAGGLVNPPKTQNAPVLGRAIVDPIPSQSLGLQGGPPPIPGPRGTPLIPAAPKTTGPPTSLTCINP

SEQ ID NO: 199205 - protein, 130 aa, Zea mays
  unsure (1)..(130): unsure at all Xaa locations
  Clone ID: MRT4577_113250C.1.pep
PGTATPADRPPKLNPPHGGEVLQPATGPDESXTRLLAPKIXGPISLYTKKIRQDNAKETGTDWKGLRITGKLTDQNPQAKVSVDPSAAALVIKALKEPERDRKKVKNIKHSGNISLDNVIEIARTMRHRS

SEQ ID NO: 199206 - protein, 214 aa, Zea mays
  Clone ID: MRT4577_113251C.1.pep
MASSFKPHAAPKRRALATFNIGALPLDLLVYEILLRLPAKLLCRLRTVCRLWRSILSDPHFAAAHAMRHPGPLIIAAIDERPDVHVNIMDLSGQILKQVRGVPGQRVVSTALDLVFVKKTDSSSSSYRFCNPFSGDVHYLPDQLLNPATGAVYQIPNSFAEEHIDFTSSFISQSRYLFGQVSSTGEYKVFRKLYHLSVQFGGRQLLEICTVNGS

SEQ ID NO: 199207 - protein, 226 aa, Zea mays
  Clone ID: MRT4577_113252C.1.pep
MASSFKPHAAPKRRALATFNIGALPLDLLVYEILLRLPAKLLCRLRTVCRLWRSILSDPHFAAAHAMRHPGPLIIAAIDERPDVHVNIMDLSGQILKQVRGAPGQRVVSTALDLVFVKKTDSSSSSYRFCNPFSGDVHYLPDQLLNPATGAVYQIPNSFAEEHIDFTSSFISQSRYLFGQVSSTGEYKVFRKLYHLSVQFGGRQLLEICTVNGSNTQWRAVTPPRK

SEQ ID NO: 199208 - protein, 71 aa, Zea mays
  Clone ID: MRT4577_113253C.1.pep
GPGRPLTVHSSRLTEFSLCLSCSIEDPRNLNAPQLYHSGTRSFSLRCLSVSAFSSWSSFCGAQYGIYIPLS

SEQ ID NO: 199209 - protein, 108 aa, Zea mays
  unsure (1)..(108): unsure at all Xaa locations
  Clone ID: MRT4577_113254C.1.pep
LVRKLPPRRCDLHPTLQNLAHYKKTELLLALPDAAHRLQLFXADMYDPYTSQPAINRCHFVLLVDTPLTHDPPSTNYKNTTEPPLDSAHIILLQNSLSLTLKHLLHTD

SEQ ID NO: 199210 - protein, 106 aa, Zea mays
  Clone ID: MRT4577_113255C.1.pep
LEKTDAALLLIENHLGSIITSFDCGRMCNRANWGAMASHSDWHTTVCTPLFVVLFYTCGCTTNRMIRTSIPSSGLFAWPLFRQLLMIFEELGDDRGLRGGRSRGPE

SEQ ID NO: 199211 - protein, 197 aa, Zea mays
  Clone ID: MRT4577_113256C.1.pep
MPGLMTMMALVPSPPMSVKQCFWSSSKKTSGCTVLLVKKRSSSQAHLLGRSWAPAATAATAAATAFRCDEQELMMMHRLADDGWVDEHMLPLLTPVEEAWQPADLLPSFSVSADEQRSQVADLQARAAAVPDDLLVCLVGNMVTEEGLPTYMTMGNRVTGASDATGCDDHGWARWLRGWTAEENRHGDLLNRYLYLC

SEQ ID NO: 199212 - protein, 95 aa, Zea mays
  unsure (1)..(95): unsure at all Xaa locations
  Clone ID: MRT4577_113257C.1.pep
LTLSATPATATIFPQCWQAPIASYLPPYLXPSVSXYCKNPILQPYNIQQAIAASILPLSPSFLQQPSALLHXLPLVHLFAQIIKVQQLQQLELGN

SEQ ID NO: 199213 - protein, 69 aa, Zea mays
  Clone ID: MRT4577_113258C.1.pep
PTRPLLDAPSFPSSSSSNLGGRSPYKTLATPLPISPPPPRCNPPAWFSDVWLRSQLEFGGRNDEGNNPR

SEQ ID NO: 199214 - protein, 69 aa, Zea mays
  unsure (1)..(69): unsure at all Xaa locations
  Clone ID: MRT4577_113259C.1.pep
PLLIWNPGFYFDDKILCFIKGVKRTFNLAXIDHKSTTEHSARTCPLETHDEGICXGIVYCVQGGTHKEL

SEQ ID NO: 199215 - protein, 122 aa, Zea mays
  unsure (1)..(122): unsure at all Xaa locations
  Clone ID: MRT4577_11325C.1.pep
TRRNLGSFKVVPLVFYFPPRASQIGRGCVLTSAVYFAAKGRGKFKAKPTSLRNFLTHNEIAAGTXGRPHNFKKNCDNEDEEKDKEKSLTKNXEEHSHVKTKHKRTDGMIYIENTNXVNATNI

SEQ ID NO: 199216 - protein, 68 aa, Zea mays
  Clone ID: MRT4577_113260C.1.pep
VIGVLGRGRVSSMVPGDTQVHVFVLCAISRKPRMAASTRLSMEGTNDGADGTSSGDENLLTWNCHERI

SEQ ID NO: 199217 - protein, 504 aa, Zea mays
  Clone ID: MRT4577_113261C.1.pep
WDLEAAGPGGRPGTAGTWLHFTLSILSFLFSPNSKIQSKQLLPMLLPLLLAAFLHGLAEAQGGLPSLPIGVNYGANADNLPSPAAVAAFLAKSTTIDRVKLFDANPAFLDAFAANAPSIALAVSIPNSALPSFADRSTGLDAARGWVRDNLSPHVSAGANITLLMAGNEVLGPTVVPDLVVALLPAMRRLYQALQLEGLPKVRVTTPHYLGILAPSDGIPSNASFRPGLDAKVLAPMLRFHNDTGSPFMVNAYPYFSYNAATLDYAVFRPNAGVYDPATRLNYTSMFDAQMDAIHTAMKKLGYGGVQIAVGEAGWPTKAEAGQVGVGPEEARDFNAGMIRVCSGGKGTPLMPGRTFETYVFSLFDENQKPGPVAERNFGIFNTDLTPKYDLGLLRQGPQSGSPTPSPEPSPSVGGGKWCVAKSGASATDLQNNINYACAYVDCRPIQSGGACLDPNNIHSHASYVMNAYYQANGMHDYDCDFKGTGVVTSSDPSYGSCKYNASS

SEQ ID NO: 199218 - protein, 72 aa, Zea mays
  Clone ID: MRT4577_113262C.1.pep
AMLALLTAGASAAAAIVYLAHKGNVRANWFAICQQFDSFCERISGSLIGSFAAMVLLIALIFLSALALARRH

SEQ ID NO: 199219 - protein, 104 aa, Zea mays
  Clone ID: MRT4577_113263C.1.pep
MLNLQQSGSPTPSPEPSPSVGGGKWCVAKSGASATDLQNNINYACAYVDCRPIQSGGACLDPNNIHSHASYVMNAYYQANGMHDYDCDFKGTGVVTSSDPSKQL

SEQ ID NO: 199220 - protein, 79 aa, Zea mays
  Clone ID: MRT4577_113264C.1.pep
KKQQMGTRTSASTICMCNNYRHDLVQNGAYHHSISIYLPRTNFRGRAGNIEDATGLHTTRRSISPILCDTQTIPQIRSR

SEQ ID NO: 199221 - protein, 51 aa, Zea mays
  Clone ID: MRT4577_113265C.1.pep
RTRARRRRRQRDPHFHLPRLARLAGEGVTLQGQGPLPHERKDPCALSLSLC

SEQ ID NO: 199222 - protein, 260 aa, Zea mays
  unsure (1)..(260): unsure at all Xaa locations
  Clone ID: MRT4577_113266C.1.pep
MALSISAPTSSPFLPAPRQVGRWSSSPSSAKPAVFSLRRPVVVARAAAGNAPSSPAGAVVTEFDVVSSFSEIVPDTVVFDDFEKFAPTAATVSSSLLLGIAGLPDTKFKSAIDTALVDGECNTMEKPGDRMSCYLTKALGNVGAELAHQVPGRVSTEIDARLAYNTQGIVQRVHELLQIYNEHDIPSERLLFKIPATWQGIEASRLLESEGTQTHLTFVYSFAQAAAAAQAGASVVQIFXVGRIRXDXAKNHSGEPEIDE

SEQ ID NO: 199223 - protein, 71 aa, Zea mays
  Clone ID: MRT4577_113267C.1.pep
FVGRCIGPGRIFIAISLNPKKGEKLSLVTGNKIMWVGLFFQGGTPRSSFFQGHNRMTPFLKVGRGSLLPNT

SEQ ID NO: 199224 - protein, 66 aa, Zea mays
  Clone ID: MRT4577_113268C.1.pep
ARARHLQSGDQTRGAARVQALLPGADVTTRTFHADVLTPKASYNLCVEVWNQLKLMDVVITLMLQL

SEQ ID NO: 199225 - protein, 52 aa, Zea mays
  Clone ID: MRT4577_113269C.1.pep
RACRGLCGSPVVHLVSAWPSGCLPIPLRAGWARGVVLITAAVALCVGARANK

SEQ ID NO: 199226 - protein, 118 aa, Zea mays
  Clone ID: MRT4577_11326C.1.pep
RPPSSSVWPRTTSPPPISPSPRRTPASPPPPPLPVPPPSAPPPPADPIDRRPCISFLSPLPCGGGSPTISQPHLAPIHRYFLVCQTQRPPEFFSLLSPPLHAPPQSLCSCTCVPMHVG

SEQ ID NO: 199227 - protein, 459 aa, Zea mays
  unsure (1)..(459): unsure at all Xaa locations
  Clone ID: MRT4577_113270C.1.pep
GRSARARPQPPPPAGRPPPYAAAAHGLAPRGARRAPPAAPAQSLVESFCGVTSATPQEAAFYLESHNWALESAVRSYYDSVDGEADAVAADPVPPPPAAPAGGGEDTEDEDCVXSAVAVAATTTRMMRTTSMATAAMMRTLRSRXGRGGRGEEEAFQEAEENPXRGVXSGSSAKARGNVRTLADLDSGKGTAGSDENSEDDDEWTPPPEYETRDRSRRKNNTDEIFKQAKKKGAKQGPFEARPRSSSRNFTGTGRLLTGETVERNASQPPEEITHNIHFWRNGFTVNDGPLRSFDDPANAPFLKSIKDSDCPTELVPADEKSIVNVNLVRTEEEFTEPVKRAAPFEGERRNLMEPSDNNTSNAAAAAAASSSATASRTITVDDSLPSTSLQIRFADGSRLVARFNTSHRISDVRAFIDATRPGASDYTLQAGFPPKPLEDTAKTIEEAGVANSVIIQSV

SEQ ID NO: 199228 - protein, 83 aa, Zea mays
  Clone ID: MRT4577_113271C.1.pep
MEFLENFPRYRIKIHPMGSYPRVTDIQNNTYELFGPVNLFWSTRFDKAMTWFLTCLQEFAEFAISLDKQNNVPPEKSLKLPYK

SEQ ID NO: 199229 - protein, 60 aa, Zea mays
  Clone ID: MRT4577_113272C.1.pep
YGTILIVYSAYEVPDDNLSLAYAMIEVEHRLLSTGDTIVSNILYTHVLLLIHKMPFSAVA

SEQ ID NO: 199230 - protein, 94 aa, Zea mays
  Clone ID: MRT4577_113273C.1.pep
SHVHKRRRFGGKPPTKTVRVAKPIFTTPRDRPGILPFPLKFTYAAAGKLTEANKTFYFITDEITVIARTPPVGKAEEIFRFSKDATISLHETTL

SEQ ID NO: 199231 - protein, 80 aa, Zea mays
  Clone ID: MRT4577_113274C.1.pep
SFLTHDLQLKFLISKKRPRDIVDPNCEGMQMESLDALLSIATQCVSPSPEERPTMHRVVQLLESEVMTPCPSEFYDSSSD

SEQ ID NO: 199232 - protein, 169 aa, Zea mays
  unsure (1)..(169): unsure at all Xaa locations
  Clone ID: MRT4577_113276C.1.pep
MLVYRDLLSDDQLLSDSFTYNDLENGVLCEVKEKGRTQGPVDVDIDAIPSTEDGEDQSCDDTVVKVVDIVDTFRLQEQPPFDKXHFVSYIKKYIHESHCCVXSQKADDFKKDVXEGATKFLLSKVRDLQFFVGXEPMKDDATVLFAYYNDGDINPRLLYFSHXLMEIEC

SEQ ID NO: 199233 - protein, 117 aa, Zea mays
  Clone ID: MRT4577_113277C.1.pep
MAVISHRGALVAAVSLCLLLGAATSIRTATFSPSQAQENLAEDKSRLGSTPPICRNRCSACNPCMPVQVTTAPAGLGRAARVTDADADADAVAGFSRYSDYKPLGWKCGCDGRLYDP

SEQ ID NO: 199234 - protein, 42 aa, Zea mays
  Clone ID: MRT4577_113278C.1.pep
LNKMSCSFAALEFNNRSCSCDDLLDVVVGGPKFCQISVFRCD

SEQ ID NO: 199235 - protein, 111 aa, Zea mays
  Clone ID: MRT4577_113279C.1.pep
MAVISPRRALVAAVSLCLLLGAATSIRTATFSPSQENLAEDKSRLGSTPPICRNRCSACNPCMPVQVTTAPAGLGRAARVTDADAVAGFSRYSDYKPLGWKCGCDGRLYDP

SEQ ID NO: 199236 - protein, 105 aa, Zea mays
  Clone ID: MRT4577_11327C.1.pep
MGSKIFALLGLFGLFGGATNGFIIPQCVLGPRAIIPKFLRPGTLMGFEHLGGEAYRVQQGVGGGGLQQPINQLAQQSLGHLTIQTIGTQQEPRFLPALGQLGGGN

SEQ ID NO: 199237 - protein, 150 aa, Zea mays
  Clone ID: MRT4577_113280C.1.pep
PTLFEARTGHVHPKVIVSYVPGFVRNTPPPPQRDPRNRRVLNKKIPGNTAMYPPEKIPRHGRTPIPWGLGPGPPPLVPTALFVGLLGLLKNKNLPLGGRFLGTPRSRSRNLRFVRGKLFGSKNLFLGKRFGRGGLLGTSRRSSSSLLLGG

SEQ ID NO: 199238 - protein, 108 aa, Zea mays
  Clone ID: MRT4577_113281C.1.pep
VHAFAPSLFGCALCRALSLTRTYTIRCPQCCRAPDRDLGRSSAASGGGDRARNAPTTGPPSSAPTTGAAPGGAPGGAASGRGPRRAGAASARASFKSEPNSAAQDAGQ

SEQ ID NO: 199239 - protein, 43 aa, Zea mays
  Clone ID: MRT4577_113282C.1.pep
HFENDQLGLLMTTASISRLFQCQQIKHHALIFFSAGLKWQEFM

SEQ ID NO: 199240 - protein, 63 aa, Zea mays
  Clone ID: MRT4577_113283C.1.pep
PPYTNKLFPTECLLSRCRELNNTIHTQLGIHAPFFPSSDRVRRIHHILKNLRSCNTGKPTRMD

SEQ ID NO: 199241 - protein, 32 aa, Zea mays
  Clone ID: MRT4577_113284C.1.pep
PSIAGQTTLEQLFGLLSGAMTAHPVVYSTDSL

SEQ ID NO: 199242 - protein, 104 aa, Zea mays
  unsure (1)..(104): unsure at all Xaa locations
  Clone ID: MRT4577_113285C.1.pep
FQVILMGLVEGFRIKGMXGVDEGIDLYPVGQYFDPLVLTDEAVTLAELKVKEIKVGRLAMFSMFGFVVQAIVTGKGPLENLFVRLEGXVANDAWVYATKFASGF

SEQ ID NO: 199243 - protein, 205 aa, Zea mays
  Clone ID: MRT4577_113286C.1.pep
HSQYSKSPPQILTVTQHKLPDLIVVHKTSVIMDVYYFYSYGTAAWLMTQSVPLITSPTMIVALLSPEVREATTLEVYFSRSLGLTLIALGILTELLTGSVPLSSRLSEGATTQAEDPKAPYALPTLTITAMFHAAYAFYGYAMWTKTGVMSFSLGTLGSGFLATIALWCILFASSNGRISRKTGADKRTSGFPFKNAEADKRKAR

SEQ ID NO: 199244 - protein, 53 aa, Zea mays
  Clone ID: MRT4577_113287C.1.pep
ICVLKTEKIKKPRRTGYPYLRGHDGITDTGAYTQFGLHYEEPRRIKKNLAHIM

SEQ ID NO: 199245 - protein, 114 aa, Zea mays
  unsure (1)..(114): unsure at all Xaa locations
  Clone ID: MRT4577_113288C.1.pep
TRVRSRVLDKLKAERERGMTIDIALWKSDTTKYYXTVIDACGHRDFIKNMITGTFEADCAVLIIDSSTGGMEADILKDGQSREHALTALTXLGVKQMICCCNRMDACTLKYFQA

SEQ ID NO: 199246 - protein, 70 aa, Zea mays
  Clone ID: MRT4577_113289C.1.pep
PSHPRRVPDLRTKISIITSATVFQSPSFLMTMVVPCFTTAITPKERLVQNAIKLQREQPSSRIPRAYAAL

SEQ ID NO: 199247 - protein, 100 aa, Zea mays
  unsure (1)..(100): unsure at all Xaa locations
  Clone ID: MRT4577_11328C.1.pep
PFSQIDMAYFQQQQFFPFKQFAALNPSVYLQQQKLLPFGKIVTTKXASFLTQQQLLPFYHQFVANPATLLQLHRLVPFVQLALTSPAAFSQQHIIGGALF

SEQ ID NO: 199248 - protein, 79 aa, Zea mays
  Clone ID: MRT4577_113290C.1.pep
PRTGRPGITHATDFKPLSHAALAPREGTSPPATSWIHKRNARQGSPPPSLMQHCRPQELNYPLDKGFPPPRAPTDNDTH

SEQ ID NO: 199249 - protein, 127 aa, Zea mays
  Clone ID: MRT4577_113291C.1.pep
SQGLSSFNLSSLIAIALVSCRLPPRDRLLFLAVAELHRSGEQVYVWRNDETDRREEEEEEKQTDARRKKKKSRQTRGGRRRKARSRGGLWSPPSSSSPSRDINGRSAGIYCLIREPGGGEERGKSGR

SEQ ID NO: 199250 - protein, 172 aa, Zea mays
  Clone ID: MRT4577_113292C.1.pep
GLNSLSLHVSKMSERSTGTWNSMIFGLANSGHCQEAIGLFNRMLCDGARPDHLTFTAALTVCSYAGMVELGKGLYRAMQEEHGIEPRLEHCACMVHLLGRAGWLAEAYDFIKAMPLEPDCFVWGALLGACRSHGDIKLAELAASHLLTVEPANAASCLLLSDSLASVGRQDD

SEQ ID NO: 199251 - protein, 102 aa, Zea mays
  Clone ID: MRT4577_113293C.1.pep
MAFMRYYRALPQGETTVEEFRAWLSQFDADGDGRISREELERALRSLNLWFVWWKAREAVRAADANRNGAVDGDEMGRLYAFAHKHLHLKMSQLGLGLGLEE

SEQ ID NO: 199252 - protein, 161 aa, Zea mays
  Clone ID: MRT4577_113294C.1.pep
MQEAKHLTTSKLPPQSQSSSPSPSAPAANPPPYHHDYGTFHRPFQPTLPVVGPAYHDYHASPIGFGSQGFVASPGAVQQQVFVEGIPVREPPLPFCGVGVGWFLFLLGFFLAAIPWYAGAFLLFFVALDHREKPGLIACTVAGIFALVPFILNGIRLNPFW

SEQ ID NO: 199253 - protein, 148 aa, Zea mays
  Clone ID: MRT4577_113295C.1.pep
MTTMPLLSVGAPVPALLPSILALLVSRYDSMLRSVRWRSGFGSQGFVASPGAVQQQVFVEGIPVREPPLPFCGVGVGWFLFLLGVFLAAIPWYAGAFLLFFVALDHREKPGLIACTVAGIFALVPFILNGIRLNPFRRSVLANPDPHD

SEQ ID NO: 199254 - protein, 89 aa, Zea mays
  Clone ID: MRT4577_113296C.1.pep
PSSIRSIEELLIFIRRSCPTTLKPPITIQATRILGNTKLVLLDDDHLTIILVLALGQAGSSISITMRSSPRLGSTWLVFRITWLIHVPY

SEQ ID NO: 199255 - protein, 68 aa, Zea mays
  Clone ID: MRT4577_113297C.1.pep
QYRQQFIYHKKKEGKKKYNNPHFPAKLPLCLRELSPKTLPKPYLKKVVAIVSLTMQKLHNQIQLLTLH

SEQ ID NO: 199256 - protein, 53 aa, Zea mays
  Clone ID: MRT4577_113298C.1.pep
KNVQVGTTSVARFKTSLVHGTKLCATTLGNKQQILARPSHNCLTPATRIKLLL

SEQ ID NO: 199257 - protein, 107 aa, Zea mays
  Clone ID: MRT4577_113299C.1.pep
GATRCHLFGHVEHTGVSQEILRGPETSLKSSLWLQAVKKLQNVYWTLLQLDQSCLIYFSHNFLLKPVTCLLRRQSCLSCWLNPSYYFLVIKNPPKTTARYTYAVLEI

SEQ ID NO: 199258 - protein, 106 aa, Zea mays
  Clone ID: MRT4577_11329C.1.pep
HTPIITTRHYLLLDATPDKGGTGMVKQQIWRLQKKPIIKTAKTAKPPGPQKRGAGNLKIKQKKKKGRGKRNTVTQGGPRMTGGAGQKKNKHYLSPTKGLKTPPGPG

SEQ ID NO: 199259 - protein, 96 aa, Zea mays
  Clone ID: MRT4577_1132C.1.pep
SDGPPDRRNTGPAVISKSNQQTKQRPGGGNSGHDSHRPPTPPAPPPVPTSNHQPHRTAPRSARTRQQVITSRARRKAGTRSWPWPTRVACPVVPAA

SEQ ID NO: 199260 - protein, 117 aa, Zea mays
  unsure (1)..(117): unsure at all Xaa locations
  Clone ID: MRT4577_113300C.1.pep
YIYIFILYPNRYEGXISTFWERXXTLYEPXANASMIKIIGENAPRINKAKKPPEKNLATYPEEPTLIQLHLLTGTEKKILKKPTHGPQQRKKLFSNNXTLETHNPDLRDTAYIYRRL

SEQ ID NO: 199261 - protein, 156 aa, Zea mays
  unsure (1)..(156): unsure at all Xaa locations
  Clone ID: MRT4577_113301C.1.pep
SPVHXPPPVHVXPAPCGYCTQPRWPQPHPQPXPCQCQQAHARSXQLQGTFGVGSSQIVAQXVEFLRHQCSHTGTPYCSPQSQSMRQQCCQQLRQVELQHRSQAILGLVLQSIVQQQPHIGQVPRLLPAQIAQQLTAMCGLQQPNTXPYAADGGVHH

SEQ ID NO: 199262 - protein, 81 aa, Zea mays
  unsure (1)..(81): unsure at all Xaa locations
  Clone ID: MRT4577_113302C.1.pep
PFSRTTGIFNLYGTDSXLKDAFIKQGLQAQAHNFNAHTSELTIQLAFAPNLKDIRXPYEVHIRHNENKQHSMLSIYDHILS

SEQ ID NO: 199263 - protein, 117 aa, Zea mays
  Clone ID: MRT4577_113303C.1.pep
KDALALPLPLAVSALVEDELLVPQAAAQENRGRGDRERRRRRTPAATTLLAEQGVLLRAEPGPRRPAPPGQQPQAPGHAVPAQPAGERRRRPLQPGAGAQATAHPHESASQTRRRRR

SEQ ID NO: 199264 - protein, 175 aa, Zea mays
  Clone ID: MRT4577_113304C.1.pep
TGCVVLKLPNKAVPASYNSPRHARDAKSHDPLQTTRSGFSATVRLRRSVGSPKEQVHQFLRPLNLRLPKPRPLPPLLIALLPGRPRAPLPLGPQRRHRLALLRLRVVPARRRSCRRRLRPWPRPRVALVQGGAERALAPALPPVAHASRSPATGHPLDGWLAAAATSLCGYALVP

SEQ ID NO: 199265 - protein, 240 aa, Zea mays
  Clone ID: MRT4577_113305C.1.pep
MVAVSTATMASSLLLRPRALLPPHPIPSSSRRPLPAPRVQLQGSIQEKPGLPAKSDGERRRPAGTRLYSLAPYPLLLAALLPGAEPVTAVFAPFVELVKTWDLPGWLVHWGHPGNMAVVLFAMGGYGTYLGFRIKLSDDLEEKAKAKDLHPKLLAGMFFFFALGATGGITALLTSDKPIFESPHAVTGVIGLALLTIQSVLPKLFEGNPGLRTTHGLLGSGIMTLFLIHAALGLQLGISF

SEQ ID NO: 199266 - protein, 80 aa, Zea mays
  Clone ID: MRT4577_113306C.1.pep
AAEPVTAVFAPFVELVKTWDLPGWLVHWGHPGNMAVVLFAMGGYGTYLGFRIKLSDDLEEKAKAKDLHPKLLAGMFFFFA

SEQ ID NO: 199267 - protein, 175 aa, Zea mays
  Clone ID: MRT4577_113307C.1.pep
KPKNFGGGVKGPKTKGYLWAKFLKGAKPFSFFKKTHGSQSKKPVGPLGLGPRGGGPPPPRKRGLWNPPKGPPPPKKPGYFFGKGKRGQIRGPHKKKNFFSPHPFFRKKANGGGVFLGGGPGPKKTQGKGVGPPGTGGGEREKSFFLKTLAIWFGGGKTREKPGSWELQGSGPTRG

SEQ ID NO: 199268 - protein, 119 aa, Zea mays
  unsure (1)..(119): unsure at all Xaa locations
  Clone ID: MRT4577_113308C.1.pep
DNDTXTATHGDPQTMMGLXKXCLIEDLNNXIXYAALSLQMLLLDAPHPHAVDPSTHMVYPPAAAATHRHXXMSNNTNSIDDYYDDDNLLPTAADTAVDAAEVVVVLLXSSSADTNGVNK

SEQ ID NO: 199269 - protein, 46 aa, Zea mays
  Clone ID: MRT4577_113309C.1.pep
KKPRRHASAFFNLGTIVYSFWEFLFETIVDVTIELSCTFGVMHNLT

SEQ ID NO: 199270 - protein, 41 aa, Zea mays
  Clone ID: MRT4577_11330C.1.pep
FKGREKEYASADFGVLGWKRGRLFQKAPRQEIDQLKAINKA

SEQ ID NO: 199271 - protein, 110 aa, Zea mays
  Clone ID: MRT4577_113310C.1.pep
FFAGGTSEVEPGRIPWRTTFQLIQGLRHLHSVLASEPCAIIHYVVPSFKGRILTYWIQILPIKSLGKKGEQQNRISHHIEGTFTPVGIWIAVHFLFLKLDNRRSCIYNKI

SEQ ID NO: 199272 - protein, 508 aa, Zea mays
  Clone ID: MRT4577_113311C.1.pep
MGLGVCGSLCQGGSEIDGFCIDYGNGKWYSFRLERMARLRHTARKSVIPFLPSLLAERPLRRPVTGQSSHLERLHHRLHEERERRRQEQEHQSSSFSLQQEIESVRSCSPCFRWRSWKDGLLDPSLATLLAGVTSTMRSTPCYVGHSTGVLSLSSIAVWSSSTVAGSTRTAGRRPAWCAVRRIVSGVRRSAQSTIPSLSGTQLRRPCKMPHVMSENRRRGERRAQQEQAAQQDEVPQQQQLQLPPLPPMSIEQMFLMQTQAVQAIGQTMAAIQQQQQQPPPQPQMPQMPRDKRAEFMRGHPPTFAHSSDPMDTEDWLCTVERELHTTQCDNREKVLYGPRLLRGAAQSWWESYLATHANPDTITWEEFRNNFRQYHVPAGLMTLKEEFLALKQGSLSVSEYRDKFLQLSRYAPEDVNTDAKRQYRFLRGLVDPLQYQLMNHTFPTFQHLMYRAIMTERKRKEMEDRKRKISGPQPGSSNRPHFSGNQPQQFRQNQRPPQQQQFQRQYP

SEQ ID NO: 199273 - protein, 1276 aa, Zea mays
  Clone ID: MRT4577_113312C.1.pep
MTSFNACSADMMSENRRRGGRRAQQERAAQQEEVPQQQHLPPPPPMSIEQMFLMQTQAVQAIGQTLAAIQQQQQQQQQATPQPQMPQMPRDKRAEFMRGHPPTFAHSSDPMDAEDWLRTVERELHTAQCDDREKVLYGPRLLRGAARSWWESYLATHAHPDAITWEEFRGSFRQYHVPAGLMTVKKDEFLALKQGSSSISEYRDRFLQLSRYAPEDVNTDAKRQYRFLRGLVDPLQYQLMNHTFPTFQHLIDRAIMTERKRKEMEDPAQQNSQAAPAQVGNRACFHCGEQGHWVMQCPKKAAQQQSGPNAPAKQNVSQPGAGNRPQPRYNHRRLNHLEAEAVQETPSMIVGMFPVDSHIAEVLFDTGATHSFITASWVEAHNLPITTMSTPIQIDSAGGRIRADSICLNVSVEIRGIAFPANLIVMGTQGIDVILGMNWLDKFQAVISCDKRTIKLVSPLGEEVVTELVPPEPKKGSCYQIAIDSSEADPIESIKVVSEFPDVFPKDLPGMPPERKVEFAIALLPGTSPIFKRAYRISGPELVELKEQIYELSEKGYIRPSTSPWAAPVLFVEKKDGTKRMCIDYRALNEVTIKNKYPLPRIEDLFDQLRGASVFSKIDLRSAFFMNLMNSVFMDYLDKFVVVFINDILIYSQSEKEHASHLRMVLQRLREHQLYAKLSKCEFWINEVLFLGHIINKEGLAVDLKKVADILNWKAPTDARGIKSFIGMAGYYRRFIEGFSKIAKPMTVLLGNKVELKWTQKCQEAFEALKGKLTTAPVLVLPDVHKPFLVYCDACYTGLGCVLMQEGRVVAYSSRQLKVHEKNYPIHDLELAAVVHALKTWRHYLCGQKCDVYTDHKSLKYIFTQSELNMRQRRWLELIKDYELEIHYHPGKANVVADALSRKSQVNLMVARPMPYELAKEFDRLSLGFLNNSRGVTVELEPTLEREIKEAQKNDEKISEIRRLILEGKGKDFREDAKGVIWFKDCLCVPNVQSIRELILKEAHETAYFDSPWHSAYHPQTDGQTGRTNQILEDMLRACALQDQSGWDKRLPYAEFSYNNSYQDSLKMSPFQALYGRSCRTPLQWDQPGEKQVFGPDILLEAEENIRMVRENLKISQSRQRSYADTRRRELSFEVGDFVYLKVSPIRGVRRFGVKGKLAPRYIGPYQILSRRGEVAYQLSLPENLSAVHDVFHVSQLKKCLRVPEEQLPVEGLEVQKDLTYVEKPVQILEVADRVTRRKTIRMCKVKWNHHSEEEATWEREDDLLAKYPELFASQP

SEQ ID NO: 199274 - protein, 75 aa, Zea mays
  Clone ID: MRT4577_113313C.1.pep
GDDPWQEKGSSVSCIKILSGHKVKQMGKHPLELLSSAPARRFGSNCAVSVSRQELRSLSPGVGAVGSVGGGLPAR

SEQ ID NO: 199275 - protein, 1631 aa, Zea mays
  unsure (1)..(1631): unsure at all Xaa locations
  Clone ID: MRT4577_113314C.1.pep
MSPRALGRVPMARLRHTARKSVIPFLPSRLAERPLRRPVVGQSSHLERLHHRQHEEQERRRQEQQGSSFLLQQEIESVRSCSHVLPLEAPSAPPLDAPAPGVATGGDPDDGGGDSNSSHDTDFYADQKPEGWVARPITCDAARECHFHDALDTLLRRALNRRTWSIEYRCVVYQHSRGVYPDRWEATCLVRRPENSLQGAEACSEHYSISERDSAEAAMQDVARRALLHYCSVLGGVADGLNLKYYPRRPSGSTGGVIVSPVGEDNPRLSSTVNLAAVLNTELDHALDELSRARAEIAQLRAERAERRHLDDGSPAPVGTQHPVWVSPAFWFTCYVNGVSYLVGKPFIPLSSLSEKLCWSVLEISEDAHLFSVMENSILFSYAMSENRHRGGRRAQQEQAAQQEEVPQQQQLPPPPPMSIEQMFLMQTQAVQAIGQTLAAIQQQQQQPPPQPQMPRDKRAEFMRGHPPTFAHSSDPMDAEDWLRTVERELHTAQCDDREKVLYGPRLLRGAAQSWWESYLVTHANPDTITWEEFRGSFRQYHVPAGLMIVKKEKFLALKQGSSSVSEYRDRFLQLSRYAPEDVNTDAKRQYHFLRGLVDPLQYQLMNHTFPTFQHLIDRAIMTERKRGGQFQRQNQQAPRLXPSKPAEQSGNTSSGWKQSMFPLWRARPQGDAMSKEGSPAAXSCPNSPAKQNVSQPGAGNCSQPRYNHGRLNHLEAEAVQETPGMIVGMFPVDSHIAEVLFDTRATHSFITASWVEAHNLPITVMSTPIQIDSAGGRIRADSICLNVSVEIRGIAFPANLIVMGTQGIDVILGMNWLDKYQAVISCDKRTIKLVSPLGEEVVTELAPPEPKKGSCYQMAVDSSEADPIERIKVVSEFPDVFPKDLPGMPPERKVEFAIELLPGTAPIFKRAYRVSGPELVELKKPIDELSEKVYIRPSTSPWAALVLFVEKKDGTKRMCIDYRALNEVTIKNKYPLPRIEDMFDQLRGASVFSKIDLRSGYHQLRIRPSDIPKMTIITKYGLYEFTVMSFGLTNAPAFFMNLMNSVFMDHLDKFVVVFIDDILIYSQSEEEYADHLRMVLQRLREHQLYAKLSKCEFWISEVLFLGHIINKEGLTMDPKKVADILNWKSPTDARGIKSFIGMAGYYRRFIEGFSKIAKPMTALLGNKPFSMYCDACYTGLVCVLMQEGRVVAYSSRQLKVHEKNYPIHDLELTAVVHALKTWRHYLYGQKCDVYTDRKSLKYIFTQSELNMRQRRWLELIKDYELEIHYHPGKANVVADALSRKSQVNLMVARPMPYELAKDFDWLSLGFLNNARGVTIELEPTLEREIKEAQKNDEKISEIRRLILDGRGKDFREDAEGVIWFKDRLCVPNVQPIRELILKEAHETAYSIYPGSEKMYQDLKKKFWWYEMKREITEHVAMCDSCRRIKAEHQRPAGLLQPLQIPQWKWDEIDMDFIVGLPHTRAGYDSIWVVVDRLTKSAHFIPVKTNYSSAVLAELYMSQIVCLHGVPKKIALYGRSCRTSLQWDQPGEKQVFGLDILLEAEENIKMVRENLKIAQSRQRSYADTRRRDLSFELKKCLCVLEEQLPVEGLEVQENLTYTEQPAQILETADSHPKEDHQNVQSQMESPL

SEQ ID NO: 199276 - protein, 79 aa, Zea mays
  Clone ID: MRT4577_113315C.1.pep
CDCMTSRGVHALLLAFPPTVASTLFSSPMNHSGRNSSGLENSIKQRLISQRIYGGAWKAASNRDSDPSGSRAGEREKQN

SEQ ID NO: 199277 - protein, 1581 aa, Zea mays
  Clone ID: MRT4577_113316C.1.pep
MACLRHTARKSVIPFLPSCLAERPLRRPVAGQSSHLERLHHRPHEEQERRRQEQQGSSFSLQQEIESVRSCSPVLPLEAPPAPPLSTPVPRVATGGDPDDGGGDDSSSHDTDFSADQEPEGWVARPITRDAARGCHFHDALDTLLRRALDRRTWSIEYHCVVYQHSRGVYPDRWEATCLVRRPENSLQGAEVCSEHYSISERDLAVAAMQDVARRALSHYCSVLDGVADGLNLKYYPRRPSGSTGGVIVSPVGEDNPRLSSTVNLASVLNTELDHALDELSRARAEIAQLRAERAERRHLDNGSPTPVGTQHPVWVSPAFWFTCYVKGVSYLVGKPFIPLSSLSEKLCWFVLEISEDAHLFSVVENSILFSYAARFARSVLMCGCILQMSENRRRGGRRAQQEQAAQQEEVPQQQQLPPPPPMSIEQMFLMQTQAVQAIGQTLAAIQQQQQQPPPQPQMPQMPRDKRAEFMRGHPPTFAHSSDPMDAEEWLRTVERELHTAQCDDREKVLYGLMTVKKEEFLALKQGSSSVSEYRDRFLQLSRYAPEDVNIDAKRQYRFLRGLVDPLQYQLMNHTFPTFQHLIDRAIMTERKRKEMEDRKRKISGPQPGSNNRPRFSGNQPQQFRQNQGPPQQQQFQRQYPQHQYQNSQNNQSGGEVLFDTGATHSFITASWVKAHNLSITTMSTPIQIDSAGGRIQTDGICLNGIDAILGMNWLDKYQAVISCDKRTIKLVSPLGEEVVTELVPPEPKKGSCYQMAVESSEADPIEGIKVVSEFQDVFPKDLPGMSPERKVEFAIELLPGTAPIFKRAYRISGPELVELKKQIDELSEKGYIRPSTSPWAAPVLFVEKKDGTKRMCIDYRALNEVTIKNKYPLPRIEDLFDQLRGASLFSKIDLRSGYHQLRIRPSDIPKTAFITKYGLYEFTVMSFGLTNAPAFFMNLMNSVFMDYLDKFVVVFIDDILIYSQSEEEHANHLRMVLQRLREHQLVLKDSKPMTTLLGNKIEFKWTQKCQEAFEALKEKLTTAPVLVLPDVHKPFSVYCDACYTGLGCVLMQEGRVVAYSSRQLKVHEKNYPIHDLELAAVVHALKTWRHYLYGQKCDVYTDHKSLKYIFTQSELNMRQRRWLELIKDYELEIHYHLGKANVVADALSRKSQGNLMVARPMPYELSKEFDRLSLGFLNNTRGVTIELKWPKGTFPFQLEPTLEQEIKEVQKNDEKISEIRRLILDGKGKDFRENAEELILKEAHETAYSIHPGSEKMYQDLKKKFWWYGMKREIAEYVAMCDNYRQIKAEHQRPTGLLQPLQIPQWNWDEIGMDFIVGLPRTRAGYDSIWVVVDRLTKSAHFIPVKTNYSSAVLAKLYMSRIVCLHGVPIKIVSDRGTQFTSHFWQQLHEALGTHLNFSSAYHPQIDGQTERTNQILEDMLRACALQDQSGWDKRLPYAEFSYNNSYQASLKMYPFQALYGRSCRTPLQWDQLGEKQVFGPDILLEAEENIKMVRENLKIAQSRQRSYADTRRRELSFEVGDFVYLKVSPIRGVRRFGVKGKLAPRYIGPYQILARREEVAYQLSLLENLSAVHDVFHVS

SEQ ID NO: 199278 - protein, 66 aa, Zea mays
  Clone ID: MRT4577_113317C.1.pep
PPPPQPPVQVQMPQVPRDKRAEFMRGHPPVFAHSADPMDAKDWLHTVEREVHTAQCNDHEKVLDGP

SEQ ID NO: 199279 - protein, 56 aa, Zea mays
  Clone ID: MRT4577_113318C.1.pep
PPPHGVGYAKVKKRLESDALDESKGCVPELYLSDHGWDHGSAQGLVPRVRPRARPR

SEQ ID NO: 199280 - protein, 92 aa, Zea mays
  unsure (1)..(92): unsure at all Xaa locations
  Clone ID: MRT4577_113319C.1.pep
PRVRYHIGIDSFFQSMSINSIPCEWRINPVISALQKAQDCLLPIQITFXNLAHLYCVTRQDQHQAHDXSHKKASSTTIFXKFKDYILPRPTK

SEQ ID NO: 199281 - protein, 68 aa, Zea mays
  Clone ID: MRT4577_11331C.1.pep
ELQQACKEHNMPAAFLDDVIKEADQDNDGRIDYGEFVAMMTKGNMGVGRRTMRNSLNISMRDTPAGAL

SEQ ID NO: 199282 - protein, 2350 aa, Zea mays
  Clone ID: MRT4577_113320C.1.pep
MRTSAPLGGRMASPDLRKDAARMLRVIGGCWPRNVPIPRAAGEDLFTSRMVREWRVFPYGRNIAAVVSAVMDKDRQGAAQKRQAVVRLVEARPKRQRGSAKAAAAGGGKPPLAAKLGVPASSKAPEATTGAGGSKPTKAVPPASRVPEAAKAAKLLPAGKRIADFATDISVEDYLGGSDEGQLAIVAPAAATTTAAAAPKAKGGAIGARGEVAALAAVRDEAGAASRQLKEVAESLSQVADFANRTTSGALTAVVSAEVERLRTQHTDAVREKSAADSKCRKLVDKVAALEGEKADLRRQLAGERRETNEALVNAQAAQAEANLARAEGNLARERAEQLQERLIALESRVERAEAATRAEAERTRTQLMDTYRELGARTGDFEVPDREPGLHYLEWVQEELQALPTVVEGFMSYASLVTCEGAMNALSREGCRHFEVFDQADDDFERDIYKVEDPVVKESAGAIYDRMWGPHGREVVRERATTARAQAARGERVDDFGALNNALADPEPTPAVTMRLMVLITIMVLMARLRHTARKSVIPFLPSRLAKRPLRRPVAGQSSHLERLHHRLREEQERRRQEQQSSSFSLHQEIESVRSCSPVLPLEAPPAPPLGAPASGVAAGGDPDDGDGDDSSSHDTDFSANPEPEGWVARPITRDAARGCHFHDALDTLLRRAFDRHTWSVEYRCVVYQHSRGVYPDRWEATCLVRCPEDSLQGAEACSEHYSISERDSAEAAMQDAARRALSHYCSVFGGAADGLDLKYYPRRPSGSTGGVIVSPVGEGNPRLSSTVNLAAVLNTELDHALDELSRARAEIALLRAERGNVVIWMMSENRRRGGRRAQQERAAQQEEVPQQQLPPPPPMSIEQMFLMQTQSVQAIGQTLAAIQQQQQQQQQQAPPQPQMPQMPRDKRAEFMRGHPPTFAHSSDPMDAEDWLRNVERELHTAQCDDREKVLYGPRLLRGAAQSWWESYLATHANPDTITWEEFRGSFRQYHVPAGLMTVKKEEFLALKQGSSSVSEYRDRFLQLSRYAPEDVNTDAKRQYRFLRGLVDPLQYQLMNHTFPTFQHLIDRAIMTERKRKEMEDRKRKISGPQPGSSSRPRFSGNQPQQFRQNQRPPQQRQQHQQFQRQYPQHQYQNRQSNQSGGQFQRQNQQAPRLPAPANQQNSQAAPAQVGNRACFHCGEQGHWVMQCPKKAAQQQSGPNAPAKQNVSQPGAGNRPQQRYNHGRLNHLEAEAVQETPGMIVGMFPVDSHIAEVLFDTGATHSFITASWVEAHNLPTTTMSTPIQIDSAGGRIRADSICLNISVEIRGIAFPANLIVMGTQGIDVILGMNWLDKYQAVISCDKRTIKLVSPLGKEVVTELVPPEPKKGSCYQMAVDSSEADPIESIKVVSEFPDVFPKDLPGMPPERKVEFAIELLPGTAPIFKRAYRISGPELVELKKQIDELSEKGYIRPSTSPWAAPVLFVEKKDGTKRMCIDYRALNEVTIKNKYPLPRIEDLFDQLRGASVFSKIDLRSGYHQLRIRPSDIPKTAFITKYGLYEFTVMSFGLTNAPAFFMNLMNSVFMDYLDKFVVVFIDDILIYSQSEEEHADHLRMVLQRLREHQLYAKLSKCEFWINEVLFLGHIINKEGLAVDPKKVADILNWKAPTDARGIKSFIGMAGYYRRFIEGFSKIAKPMTALLGNKVEFKWTQKCQEAFEALKEKLTTSPVLILPDVHKPFSVYCDACYTGLGCVLMQEGRVVAYTSRQLKVHEKNYPIHDLELAAVVHALKTWRHYLYGQKCDVYTDHKSLKYIFTQSELNMRQRRWLELIKDYELEIHYHPGKANVVADALSRKSQVNLMVARPMPYELAKEFDRLSLGFLNNSRGVTVELEPTLEREIKEAQKNDEKISEIRRLILDGRGKDFREDAEGVIWFKDRLCVPNVQSIRELILKEAHETAYSIHPGSEKMYQDLKKKFWWYGMKREIAEHVAKCDSCRRIKAEHQRPAGLLQPLQIPQWKWDEIGMDFIVGLPRTRAGYDSIWVVVDRLTKSAHFIPVKTSYNSAVLAELYMSRIVCLHGVPKKIVSDRGTQFTSHFWQQLHEALGTHLNFSSAYHPQTDGQTERTNQILEDMLRACALQDQSGWDKRLPYAEFSYNNSYQASLKMSPFQALYGRSCRTPLQWDQPGEKQVFGPDILLEAEENIKMVRENLKIAQSRQRSYADTRRRELSFEVGDFVYLKVSPIRGVRRFGVKGKLAPRYIGPYQILSKRGEVAYQLSLPENLSAVHDVFHVSQLKKCLRVPEEQLPVEGLEVQEDLTYVEKPAQILEIADRVTRRKTIRMCKVRWNHHSEEEATWEREDDLVAKYPELFASQP

SEQ ID NO: 199283 - protein, 1370 aa, Zea mays
  Clone ID: MRT4577_113321C.1.pep
MSIEQMFLMQTQAVQAIGQTLAAIQLQQQQQQQAPPQPQMPQMLRDKRAEFMRGHPPTFAHSSDPMDVEDWLRTVERELHTAQCDDREKVLYGPRLLRGAAQSWWESYLATHAHPDAITWEEFRGSFRQYHVPAGLMIVKKEEFLALKQGPLSVNEYRDRFLQLSRYAPEDVNTDAKRQYRFLRGLVDPLQYQLMNHTFPTFQHLIDRAIMTERKRKEMEDCKRKISGPQPGSSNRPRFSGNQPQQFRQNQRPPQQHQQFQRQYPQHQYQNRQSNQSGGQFQRQNQQAPRLPAPANQQNSQAAPAQVGNRACFHCGEQGHWVMQCPKKAAQQQSGPNAPAKQNVPQPGAGNRSQPRYNHGRLNHLEAEAVQETPDMIVGMFPVDSHIAEVLFDTGATHSFITASWVEAHNLPITTMSTPIQIDSAGGRIRADSICLNISVEIRGIAFAANLIVMGTQGIDVILGMNWLDKYQAVISCDKRTIKLVSPLGEEVVTELVPPEPKKGSCYQLAVDSSEADPIESIRVVSEFPDVFPKDLPGMPPERKVEFAIELLPGTAPIFKRAYRISGPELVELKEQIDELSEKGYIRPSTSPWAAPVLFVEKKDGTKRMCIDYRALNEVTIKNKYPLPRIEDLFDQLRGASVFSKIDLRSGYHQLRIRPSDIPKTAFITKYGLYEFTVMSFGLTNAPAFFMNSMNSVFMDYLDKFVVVFIDDILVYSQSEEEHADHLKMVLQRLREHQLYAKLSKCEFWISEVLFLGHIINKEGLAVDPKKVADILNWKAPTDARGIKSFIGMAGYYRRFIEGFSKIAKPMTALLGNKVEFNWTQKCQEAFEALKEKLTTAPVLVLPDVHKPFSVYCDACYIGLGCVLMQEGRVVAYSSRQLKVHEKNYPIHDLELAAVKCDVYTDHKSLKYIFTQSELNMRQRRWLELIKDYELEIHYHPGKANVVADALSRKSQVNLMVARPMPYELAKEFDRLSLGFLNNSRGVTVELEPTLEREIKEAQKNDEKISEIRRLILDGRGKDFREDAEGVIWFKDRLCVPNVQSIRELILKEAHETSYSIHPGSEKMYQDLKKKFWWYGMKREIAEHVAMCDSCRRIKAEHQRPAGLLQPLQIPQWKWDEIGMDFIVGLPRTRAGYDSIWVVVDRLTKSAHFIPVKTNYSSVVLAELYMSRIVCLHGVPKKIVSDRGTQFTSHFWSAYHLQTDGQTERTNQILEDMLRACALQDQSGWDKRLPYAEFSYNNSYQASLKMSPFQALYGRSCRTPLQWDQPGEKQVFGPDILLEAEENIKMLKKCLRVPEEQLPVEGLEVQEDLTYVEKPVQILEVADRVTRRKTIRMCKVRWNHHSEEEATWEREDDLMAKYPELFASQP

SEQ ID NO: 199284 - protein, 103 aa, Zea mays
  Clone ID: MRT4577_113322C.1.pep
THPLFGDGHAPTTWPGEQFQKINSKTMRGSPRGGAPEKATPEGGQIQGHRGGGGEHEEAGTRLGAQEHPHGFFQAEPPHWGPTLFGPNFSARRSQGARLPPRA

SEQ ID NO: 199285 - protein, 1487 aa, Zea mays
  unsure (1)..(1487): unsure at all Xaa locations
  Clone ID: MRT4577_113323C.1.pep
MQDAARRALLHYCLVLGGVADGLDLKYYPRCPSGSIGGVIVSPVGEDNPRLNSTVNLAAVLNTELDHALDELSRARAEIALLRAERAERRHLDDGSPAPVGTQHPYRSPRCQRTGAEEEGVLSRSEPLSRKRCPSNSICRPPPPMSIEQMFLMQTQAVQAIGQTLAAIQQQQQQQQQAPPQPQMPQMPTDKRAEFMRGHPPTFAHSSDPMDAEDWLRTVERELHTAQCDDREKVLYGPRLLREAAQSWWESYLATHAHLDAITWEEFRGSFRQYHVPAGLMTVKKEEFLALKQGPLSVSEYRDRFLQLSRYAPEDVNTDAKRQYRFLRGLVDPLQAIMTERKRKEMEDRKRKISGPQPGSTNRPRFSGNQPQQFRQNQRPPQQHQQFQRQYPQHQYQNHQSNQSGGQLQRQNQQAPRLPSPANQQNNQAAPAQVGNRACFHCGEQGHWVMQCPKKAAQQQSGPMPSKAECVSAWKVLFDTGATHSFITASWVQAHNLPITTMSTPIQIDSAGGRIRADSICLNISVEIRGIAFPANLIVMGTQGIDVILGMNWLDKYQAVISCDKRTIKLVSPLGEEVVTELVPSEPKKGSCYQIAVDSSEADPIESIEVVSEFPDVFPKDLPGMPPERKVEFAIELLPGTAPIFKRAYRISGPELVELKEQIDELSEKGYIRPSTSPWAAPVLFVEKKDGTKRMCIDYRALNEVTIKNKYPLPRIEDLFNQLRGASVFSKIDLRSGYHQLRIRPSDIPKTAFITKYGLYEFTVMSFGLTNAPAFFMNLMNSVFMDYLDKFVVVFIDDILIYSQSEEEHADHLKMVLQRLREHQLYAKLSKCEFWINEVLFLGHIINKEGLAVDPKKVADILNWKAPTDARGIKSFIGMAGYYRRFIEGXFSKIAKPTTXVEFKWTQKCQEAFEALKEKLTTAPVLVLPDVHKPFSVYCDACYTGLGCVLMQEGRVVAYSSRQLKVHEKNYPIHDLELAVVVHALKTWRHYMYGQKCDVYTDHKSLKYIFTQSELNMRQRRWLELIKDYELEIHYHPGKANVVADALSRKSQVNLMVARPMPYELAKEFDKLSLGFLNNSRGVTVELEPTLEREIKEAQKNDEKISEIRRLILDGRGKDFREDAEGVIWFKDRLCVPNVQSIRELILKEAHETAYSIHPGSEKMYQDLKKKFWWYGLKREIAEHVAMCDSCRRIKAEHQRPAGLLQPLQIPQWKWDEIGMDFIVGLPRTRAGYDSIWVVVDRLTKSAHFIPVKTNYSSAVLAELYMSRIVCLHGVPKKIVSDRGTQFTSHFWQQLHEALGTHLNFSSAYHPQIDGQTERTNQILEDMLRACALQDQSGWDKRLPYAEFSYNNSYQASLKMSPFQALYGRSCRTPLQWDQPGEKQVFGLDILLEAEENIKMVRENLKIVQSRQRSYADTRRRELSFEVGDFVYLKVSPIRGVRRFGVKGKLAPRYIGPYQILSRRGEVAYQLSLPENLSAVHDVFHVS

SEQ ID NO: 199286 - protein, 60 aa, Zea mays
  Clone ID: MRT4577_113324C.1.pep
ITSSHFKTNPRFSFITSFILLSQSQTPKIKPYFGSFLHSTPIIFPNFQIKQNSLSSNKKL

SEQ ID NO: 199287 - protein, 1481 aa, Zea mays
  Clone ID: MRT4577_113325C.1.pep
MSIEQMFLMQTQAVQAIGQTLAAIQQQQQQQQQQAPPQPQMPQMPRDKRAEFMRGHPPTFAHSSDPMDAEDWLRTVERELHTAQCDDREKVLYGPRLLRGAAQSWWESYLATHANPDTITWEEFRGSFRQYHVPAGLMTVKKEEFLALKQGSSSVSEYRDRFLQLSRYAPEDVNTDAKRQYRFLRGLVDPLQYQLMNHTFPTFQHLIDRAIMTERKRKEMEDRKRKISGPQPGSSSRPRFSGNQPQQFRQNQRPPQQHQQRQQYQQFQRQYPQNQYQNRQSNQSGGQFQKQNQQAPRLPAPANQQNSQAAPAQVGNRACFHCGEQGHWVMQCPKKAAQQQLGPNAPGKQNRYNHGRLNHLEAEAVQETPGMIVGMFPVDSHIAEVLFDTGATHSFITASWVEAHNLPTTTMLTPIQIDSAGGRIRADSICLNVSVEIRGIAFPANLIVMGTQGIDVILGMNWLDKYQAVISCDKRTIKLVSPLGEEVVTELVPPEPKKGSCYQMAVDSSEADPIESIKVVSEFPDVFPKDLPGMPPERKVEFAIELLPGTAPISKRAYRISGPELVELKKQIDELSEKGYIRPSTSPWAAPVLFVEKKDGTKRMCIDYRALNEVTIKNKYPLPRIEDLFDQLRGASVFSKIDLRSGYHQLRIRPSDIPKTAFITKYGLYEFTVMSFGLTNAPAFFMNLMNSVFMDYLDKFVVVFIDDILVYSQSEEEHADHLRMVLQRLREHQLYAKLSKCEFWISEVLFLGHIINKEGLAVDPKKVADILNWKAPTDARGIKSFIGMAGYYRRFIEGFSKIAKPMTALLGNKVEFKWTQKCQEAFEALKEKLTTAPVLVLPDVHKPFSVYCDACYTGLGCVLMQEGRVVAYSSRQLKVHEKNYPIHDLELAAVVHALKTWRHYLYGQKCDVYTDHKSLKYIFTQSELNMRQRRWLELIKDYELEIHYHPGKANVVADALSRKSQVNLMVARPMPYELAKEFDRLSLGFLNNSRGVTVELEPTLEREIKEAQKNDEKISEIRRLILDGRGKDFREDAEGVVWFKDRLCVPNVQSIRELILKEAHETAYSIHPGSEKMYQDLKKKFWWYGMKREIAEHVAMCDSCRRIKAEHQRPAGLLQPLQIPQWKWDEIGMDFIVGLPRTRAGYDSIWVVVDRLTKSAHFIPVKTNYNSAVLAELYMSRIVCLHGVPKKIVSDRGTQFTSHFWQQLHEALGTHLNFSSAYHPQTDGQTERTNQILEDMLRACALQDQSGWDKRLPYAEFSYNNSYQASLKMSPFQALYGRSCRTPLQWDQPGEKQVFGPDILLEAEENIKMVRENLKIAQSRQRSYADTRRRELSFEVGDFVYLKVSPIRGVRRFGVKGKLAPRYIGPYQILSKRGEVAYQLSLPENLSAVHDVFHVSQLKKCLRVPEEQLPVEGLEVQEDLTYIEKPAQILEVADRVTRRKTIRMCKVRWNHHSEEEATWEREDDLMAKYPELFASQP

SEQ ID NO: 199288 - protein, 128 aa, Zea mays
  Clone ID: MRT4577_113326C.1.pep
SRSVRLCVAFRCSCASARKAPCSVRLHRVVVRAKLLAVDIKSVTRVLGMVKRCVCWCPNSSWPWRLIPCRAVSLRTSSCSLSRLPSNHRSRSTHQSYLGRSSISYSSWSSRQQSLSELASSLTDRSVP

SEQ ID NO: 199289 - protein, 1456 aa, Zea mays
  Clone ID: MRT4577_113327C.1.pep
MESHDLRAERESRLVGGNEIDGFGYDYGTGKWYSFRLERMARLRHTARKSVIPFLPSRLAERPLRRPVAGQSSRLERLHHCLHEEQERRRQEQQGSSFSLQQEIESVRSCSPVLPLEAPLAPPLDAPASGVAAGGDSDDGGGDDSSSHDTDFSADQEPEGWVARPITRDAARGCHFHDALGTLLRWALKRCTWSIEYRCVVYQHSRGVYPDRWEATCLMSENRRRGGRRAQQEQAAQQEEVPQQQQLPPPPPMSIEQMFLMQTQAVQAIGQTLAAIQQQQQAPPQPQMPQMPRDKRAEFMRGLMTVKKEEFLALKQGSSSVSEYRDRFLQLSRYAPKDVNTDAKRQYRFLRGLVDPLQYQLMNHTFPTFQHLIDRAIMTERKRKEMEDRKRKISGPPPGSSNRPRFSGNQPQQFRQNQHPPQYQQFQRQYPQHQYQNRQNNQSGGGQFQRQNQQTPRLPAPAAQQNSQAAPAQIGNRACFHCGEQGHWVMQCPKKAAQQQSGPNAPAKQNVSQPGAGNRSQPRYNQGRLNHLEAEAVQKTPGMIVGIFPVDSHIAEVLFDTGATHSFITASWVEAHNLPITTMSTPIQIDSAGGTIRADSICLNVSVEIRGIAFSANLIVMGTQGIYVILGMNWLDKYQAVISCDKRTIKLVSPLGEEVVTELVPPEPKKGSCYQMVVDSSEADPIESIKVVSEFPDVFPKDLPGMPPERKVEFAIELLPGTAPIFKRAYRVSGPELVELKKQIDELSEKGYIRPSTSPWAAPVLFVEKKDGTKRMCIDYRALNEVTIKNKYPLPRIEDLFDQLRGASVFSKIDLRSGYHQLRIRPSNIPKTAFVTKYGLYEFTVMSFGLTNAPAFFMNLMNSVFMDYLDKFMVVFIDDILIYSQSEEEHADHLRMVLQRLREHQLYPKLSKCEFWISEVLFLGFSKIAKPMTALLGNKVEFKWTQRCQEAFEALKEKLTTAPVLVLPDVHKPFSVYCDACYTGLGCKANVVADALSRKSQVNLMVARPMPYELAKEFDRLSLGFLNNSRGVTVELEPTLEREFKEAQKNDEKISEIRRLILDGRGKDFWEDAEGVVWFKDRLCVPNVQSIRELILKEAHETAYSIHPGSEKMYQDLKKKFWWYGMKREIAEHVAMCDSCRRIKAEHQRPTGLLQPLQIPQWKWDEIGMDFIVGLPHTRAGYDSIWVVVDRLTKSAHFIPVKTNYSSVVLVELYMSRIVCLHGVPKKIVSDRGTQFTSHFWQQLHEALGTHLNFSSAYHPQTDGQTERTNQILEDMLRACALQDQSGWDKRLPYAEFSYNNSYQASLKMSPFQALYGRSCRTPLQWDQPGEKQVFGPDILLEAKENIKMVRENLKIAQSRQRSYADTRRRELSFEVGDFVYLKVSPIRGVRRFGVKGKLAPRYIGPYQILARRGEVAYQLSLPENLSAVHDVFHVSQLKKCLRVPEEQLPVEGLEV

SEQ ID NO: 199290 - protein, 59 aa, Zea mays
  Clone ID: MRT4577_113328C.1.pep
PAADPQGGVAHAGSSGAIRQGSPDIVVVRRGLRSPRLRIARWRCVQTGCGPRTSSRTSG

SEQ ID NO: 199291 - protein, 80 aa, Zea mays
  Clone ID: MRT4577_113329C.1.pep
KKIHSYNHTFHLLLYYFLPTLSFSLASSKSIFLSVTFQLLPFYYPCLYPTLLIFCFCLFANLSYSLFTPDKPTFLTVLLL

SEQ ID NO: 199292 - protein, 213 aa, Zea mays
  Clone ID: MRT4577_113330C.1.pep
DHIILINSLKSHFLYLQFPTVTAVIMVDFEQISKQAEADLNTKGAKTGDHGINTVDDGGANAAFAERKFDTAEVIQGDELSTNAGYNKRIPPSEGGILDDRGRQTRGQHYEGKGGPLDKVDHTGDNDNDVVPARVPKPHGLGSVNDIATQGEDASESNVGKNPPGPGGQKWKGENYHEPASVPGSISAEGYEAPGSVVEASREAQHPERFGPQ

SEQ ID NO: 199293 - protein, 86 aa, Zea mays
  Clone ID: MRT4577_113331C.1.pep
IVLYIALVSSLYVWLPFWVVAWVCVVSYVRITHAECSATMCSTRKLARPMGTSNFSRPAPSLRLCQSIHIHHTLLLLHYGPQKIPH

SEQ ID NO: 199294 - protein, 61 aa, Zea mays
  Clone ID: MRT4577_113332C.1.pep
LKTNMSYRIRGALGGHFPLCPLSSPLHMALGLRRCILRHNHCVPFDNVVGQDRSRGGSLHI

SEQ ID NO: 199295 - protein, 118 aa, Zea mays
  Clone ID: MRT4577_113333C.1.pep
RVRDPPHEHPRSTPRLLAPRRGREVSHAHTTAHASGPDATASYLLVVTRDPSPDQEHAPHDAAAHGQQRPRHALRGAPPARRRGPTARDNPPQTSGRAGRPGNPDRTCRHSRPRSPAR

SEQ ID NO: 199296 - protein, 184 aa, Zea mays
  unsure (1)..(184): unsure at all Xaa locations
  Clone ID: MRT4577_113334C.1.pep
RDGTEPEGRLQLHCRFVTKLLNDLFGVQARAGCACAGPYAHRLLGISPARAKAIRSAVEQGYHGVRPGWTRVSLAXYTSMQEAEFVLDAVAFVASFGHRFLPLYTFDWKTGDWHYDHSCARGLVPNIVGGNPSGRVKAENCYQSYMAFAHCLAESLATTCTGLSSDPAIRIPKRVDPQLVYFLV

SEQ ID NO: 199297 - protein, 281 aa, Zea mays
  Clone ID: MRT4577_113335C.1.pep
GYLEAGRDHLSTPLNHPEHLGFQGLSLRKLSTHRIQMPCNNLPRLVLLLSGLLAETGLIRCHLPMPQGPVFGKASAEMDRSVLYGRQGTVTTWHETIGAIVQGGGSLIKRSSDGDREIQAARREWTTIDELRDLIMSQNNWHNLESPVQGSLFEYAHNPKYVSVRANDFPYDLPAGVEHYILWTRVSAITREAFAPRDGEAVPDHSFNDPSRVEALIRYVEHYDFYGWYGIHDEDVENSFALSSFAHATNPVWHDPESDHTVTREQGAAVMKWLGRHVAAA

SEQ ID NO: 199298 - protein, 75 aa, Zea mays
  Clone ID: MRT4577_113336C.1.pep
FGSSWFVHPTWCPPPFNSLKGGCFTKKLWVCTPKLHVSAIRPQDNWVNEEQILCNYSKKIRKRVKPEEHNLCERC

SEQ ID NO: 199299 - protein, 95 aa, Zea mays
  Clone ID: MRT4577_113337C.1.pep
REARDRARERERAGSGVRRCFDAPGGRGGHRRKREGKEVATRDDQTRGASVRCDETDRVCVFVLGLGVVWEGGLKAVTCVRRVRPGWRAGNGARA

SEQ ID NO: 199300 - protein, 88 aa, Zea mays
  Clone ID: MRT4577_113338C.1.pep
HKWCLHRGDQSYGARCSQLVVKCACTVCVVRIDSSWQVGLADPISVLHAEPFCGWMLVAGGAICCHLVYQLLCYYMSPLYPRVRGRVG

SEQ ID NO: 199301 - protein, 56 aa, Zea mays
  Clone ID: MRT4577_113339C.1.pep
PSEFFKHKTGYCLVVRYRERMAGLGKGIGACTPKKATFRSFSGALYIPLGKNCRLL

SEQ ID NO: 199302 - protein, 98 aa, Zea mays
  Clone ID: MRT4577_11333C.1.pep
QNTAPRHIKPCEEEAYSMASTTMPLYFTSFPGQEISLPEDYLRLGHSDDTQDGHKGQHRVELQQAVLQPRPRALPGLPALLAPELPEGRVPRRATLAH

SEQ ID NO: 199303 - protein, 114 aa, Zea mays
  unsure (1)..(114): unsure at all Xaa locations
  Clone ID: MRT4577_113340C.1.pep
KGGSRGGPYSTFTTGAKVGKGRNGAWTFGIFRDFANKGDLLTRXLKPPPPQGFLQKSKLLSQRASEMHCRLQKEKTLIFFAMHCVCKFWIFLYRPPFFFFFPPPPLFFFFFFFF

SEQ ID NO: 199304 - protein, 217 aa, Zea mays
  Clone ID: MRT4577_113341C.1.pep
MASAPTPPPLLPVTNPAPGSSPAAAGGSDAPIATPAFRLLLSRLSDTARRSLSDRRPWGELLDRSAFSKPDSLSDATSRLRRNLAYFRVNYAAVVAFALGASLLAHPFSLLILLGLLAAWCFLYLFRASDQPVALFGRTFSDRETLLGLVGASFVLLFFTSVASLIISGLLVGGALVAAHGAFRVPEDLFLDEPNAAPGNSAAQGLLSFLGAPGSGV

SEQ ID NO: 199305 - protein, 536 aa, Zea mays
  Clone ID: MRT4577_113342C.1.pep
MHTAPPMNGRSRRPAAARGAKAAPKSDSRVMEKDPRKAATPAKGPANAGTRVTMNRIQSRERKLALQQDVDKLVPSNPVLNSEVSPATVSQGPPDHPPGARPSPHSGVANGKQTPRNPVATSPSQDDRSGAGKENQSCSNTPSTSSRQSPSQQKTPKSRATPPPDRRRVTPAQTSPAIAPDRKRPADAAAGTGSNSDKVTTSHDDASSSVPNKVSEELLRCLLAIFSQMGGSAAGGGRGLGDEDQQQALSPSVSGSSESSASSEADAYPQDPYGILELGARDIGAYKRFHVVDAASFDGNGDTPLVRRRLKALLRRLSSVDLAGLSHQQKLAFWINVYNSCMMNAFLEHGIPTTPQMLVAMMPKATVSVGGRTHSAMSIEHFILRLPYSAKQVKVSREGAKCDDGDVTAARGAFGLEWPEPLVTFALSCGSWSSPAVRVYTAARVEEELEAAKREYLQAAAGVWAAGRLAVPKLLHWYLLDFAKDVDALMDWVCLQLPPELRQEAVRAVEAGRRAGAGGRVRVLPYEFRFRYLLAS

SEQ ID NO: 199306 - protein, 85 aa, Zea mays
  unsure (1)..(85): unsure at all Xaa locations
  Clone ID: MRT4577_113343C.1.pep
SDRPDELXRIHAATGHLIFWNCARFLRMLAMSRAISDSYLNPLVISXPKALMVDRNDRHGXLLILPTDCIPDVQSIEDACTDDRT

SEQ ID NO: 199307 - protein, 129 aa, Zea mays
  unsure (1)..(129): unsure at all Xaa locations
  Clone ID: MRT4577_113344C.1.pep
AGQSYFQFSDKLLHVGSRASKVDTLFFYSKGSVSIFXLVYVDDIVVASSXXDAIDAMLQDLSSEIASKDLRQLHYFLGIEVXKTGDGNYLSQTKYTLDSLLXVEMMNCRPTLTXASTSEKLRTGEXELL

SEQ ID NO: 199308 - protein, 47 aa, Zea mays
  Clone ID: MRT4577_113345C.1.pep
KIKYKFSCSQNYKQPKVPNCKPKKKVVGTPISNKDSIVQTSKVGKFG

SEQ ID NO: 199309 - protein, 44 aa, Zea mays
  Clone ID: MRT4577_113346C.1.pep
LRLCEDCHSVTKFISKFTDREIVVRDVNRFHHFRNGVCSCRDYW

SEQ ID NO: 199310 - protein, 172 aa, Zea mays
  Clone ID: MRT4577_113347C.1.pep
MLPQRIARASALRSGMAAARRLPTIQRRTFLPDQYTDKKVIDQKYPEAPSMTEAEDPGMNGGYINPPRIKRQFRDPHGNWWDPQERRNFGEPIHEDNDVLGIFSPWEYTWTTAGPGAVMVGTFIAVFMSVTGIVYLNYPDRPAYPRAFEGGLERELGGPGATRARMEGDEDP

SEQ ID NO: 199311 - protein, 118 aa, Zea mays
  Clone ID: MRT4577_113348C.1.pep
KHKKLAIYQHSHIQKHVGQVRSVPSECAPVTPMAKSSRILASALISSSSCTSASTSSSPSLSLLLAPSLLLRLPLTSSPASSSLSDSSSLSSSSLLLLPLLRGSRPSSGFNLRSKSSA

SEQ ID NO: 199312 - protein, 177 aa, Zea mays
  Clone ID: MRT4577_113349C.1.pep
PTRPPTRPPTRPPTRPQVTLESSDGEKFKVDKEVAERSVLIKNMIEDVGESDNPIPLPNVNASVLRKVLEYCEHHRGDPLPAADADPSNDDNRKRATEISDWDQKFIQVDQEMLFEIILAANYMDIKPLLDVGCKTVANMIKGKTPEEIRKLFNIVNDFTPEEEAQIKKENEWAEDR

SEQ ID NO: 199313 - protein, 39 aa, Zea mays
  Clone ID: MRT4577_11334C.1.pep
RVDPRRPRGGGAPAAESKKEEKKEEKEESDDDMGFSLFE

SEQ ID NO: 199314 - protein, 143 aa, Zea mays
  Clone ID: MRT4577_113350C.1.pep
PRVRPLSHDITPRVNRLYYNVIGEHVSVTWLGPTPRVIVNDPKLVREILANKLGHFQKRKHDGIVRRLASGLVNHEGEKWAAHRKLISPAFHLEKLKKMLPAFASCSDELIARWAGYVGSDGAREIDVWAEFQNLTGDVISRT

SEQ ID NO: 199315 - protein, 115 aa, Zea mays
  unsure (1)..(115): unsure at all Xaa locations
  Clone ID: MRT4577_113351C.1.pep
SSSLNLKXCHEFLRQQCMPLVMPLLQSRLVQPSSWQVLEXQCSDDLRQIEPQYIXHKQIYNMAQSIIHEERQQQPCESCGSKQATXKCGGNLDSCTIPTINVRLVPLILLKIIHA

SEQ ID NO: 199316 - protein, 127 aa, Zea mays
  unsure (1)..(127): unsure at all Xaa locations
  Clone ID: MRT4577_113352C.1.pep
PLLYLCFFTAAMYSNYGNPSGMQMPPQNSQPVQFDNPLYGASSGLIRSGIGVYGEKFLGSSSEFMQSNINRYFSNPQYXYHVNDQYVRTKLIIHMEVILRVLVQNSCKATSIDTSPTRSITHVNPRV

SEQ ID NO: 199317 - protein, 119 aa, Zea mays
  Clone ID: MRT4577_113353C.1.pep
APVCAMKLINCPFYHVGCETAFPQGNLENHCSKLLQTHMLYVLQASTRQNAAVNDMNQRLQLLEKAQSLNEISGALDVRSLTLIIKEQEAKIKDLESGIKAQEAKVKKLENELRSKNAR

SEQ ID NO: 199318 - protein, 105 aa, Zea mays
  Clone ID: MRT4577_113354C.1.pep
FKKGERVFYFERSDIFFNSKRAKGQCGCELIYNATLKPCMPTPSFVHSHPHGLRPVTTPRLRCFLFETPNPVNHTKNPSKIFCFFLKRWHTPKKKETQKGNTASS

SEQ ID NO: 199319 - protein, 65 aa, Zea mays
  unsure (1)..(65): unsure at all Xaa locations
  Clone ID: MRT4577_113355C.1.pep
RAANRKHPSSRIGAALRPNHDRDAYVPSDSTEPRSCGLVRPGRVRVPXVPQRVVRRLVVDVPVLH

SEQ ID NO: 199320 - protein, 353 aa, Zea mays
  Clone ID: MRT4577_113356C.1.pep
MRPMTNPPLLSPSPFPLLLRLLHLSRAPRRRNPTTGRAPTCTSRNRLPLLLSAAMSSASNTAPHSVVADPTTLARKVADIRAAGPTKLQVIADFDGTLTRYWYDGARGQSSHGLLRQGNEEYDAKREALYQHYHPIEICPDIPLSEKAKLMEEWWEKTHGLLIEGGLTYEAITKSVSDAAIAFREGVVELFEYLEEREIPVLVFSAGLADIIEEVFRQKLHKTFKNIKVVSNRMVFNEEGRLIAFKGKTIHVLNKNEHALDMAAPVHGNPGDPNGFMDDYSLVKKRTNVLLLGDHIGDLGMSDGLNYDNRIAVGFLNANIEKSLKDYSSAFDIVYLNDAPMHGVVQLVSELCP

SEQ ID NO: 199321 - protein, 83 aa, Zea mays
  Clone ID: MRT4577_113357C.1.pep
PRTRPWSRGRPSLVLSSPVTMWPTASSSSFTGIHSSGHVTSGQARTRWISPPPLVVGSHEADLGCAARERRVGRPVYGRTYRR

SEQ ID NO: 199322 - protein, 126 aa, Zea mays
  unsure (1)..(126): unsure at all Xaa locations
  Clone ID: MRT4577_113358C.1.pep
HAIACDSLLTIKQVSSYYVFRGPPRAGLLVGPQXXXXXXXXXXXXXXXXXXXXXXXXXXXXXXXXXXXXXXXXXXXXXXXXXXXXXXXXXXXXXXXXXXXXXXXXXXXXXXXXXXXXXXXXXXXXX

SEQ ID NO: 199323 - protein, 103 aa, Zea mays
  Clone ID: MRT4577_113359C.1.pep
KQIILYIRSQSGHLKIVITKHYNERRLRMGGWTTGEWSQAPGVGQEELHIDPAHDRPGVGMDLHLNGTQLLVTSTGGEAFRDHTRVDFIEMGDHLSQGKDAPV

SEQ ID NO: 199324 - protein, 132 aa, Zea mays
  unsure (1)..(132): unsure at all Xaa locations
  Clone ID: MRT4577_11335C.1.pep
GRGRALNPTLPPPPPXPPXPPRRGRGAAAAPRGLRAAPPARRXPSTRRRRPXVERRXAPSPPPPTRSPPPPPPPSRRRRAPPRPRCWPPAVGTATRGLRRAQGGLLPTDVPRHPPHLEGLPRRRSSRDRPPP

SEQ ID NO: 199325 - protein, 340 aa, Zea mays
  unsure (1)..(340): unsure at all Xaa locations
  Clone ID: MRT4577_113360C.1.pep
MSLKSPTKKLDTRDGSGGGEKKVQPSRSPPRGRSHSRRRRSSRAGSRVVDRVIEQSSANVSWPMLSRTNYPETVKEAWDAVKILRIGDERARDAXLAAALPRIRHPLFQGRWLGGIYSPQPPNNRLGWAAVXAHRTVWKMLNXFPFSESVTEFGIRITTLDTNLRTLGDNITDTEVVKKLLQVVPERQTQAAVSLERFLDLNKVTIEEVIGRLRVFEERAKPSQITDAMGRLMLCEEDWEAHRKEHRDEEEKEVVAPCLWVLDTGATNHMTRSRRLFAELDTSVTGTVRFSDGSVVDIKGKGTVLFALKSGEHRWQDGVYYIPWLMTNIVSLGQMDDVTP

SEQ ID NO: 199326 - protein, 135 aa, Zea mays
  Clone ID: MRT4577_113361C.1.pep
EKKSILGGLKGQIKRGNQPRALLSPIWVGLFPFPNWPFGAFKRESPFSNLNLSLNFFTPLKKKGLNLFFGTHKLLFKKNLGNGWPPLGGDVLWPLKHQGALWVLFFEGGFLFQNVFFHFPEALFPPRLAKKVGGH

SEQ ID NO: 199327 - protein, 198 aa, Zea mays
  Clone ID: MRT4577_113362C.1.pep
RPLPEEADRAEMFSLSTFHSLSPPGCRPPQDISLEEFDDEDLSEITDDCGLGLSYDSDHCEKDSLSLGRSEQPHPICSFQDDFQEFEMIDDNEEEEEEEEEEEEEEEEEDEEEGVREGKEGGGPGSEAPAPEALIPSPSLEEPHKNRPTTLHLTTLGAQDSLNNNGGFAPAPPASWQETALCSPPQEPLREPPASLQP

SEQ ID NO: 199328 - protein, 115 aa, Zea mays
  Clone ID: MRT4577_113363C.1.pep
KKITDAQSLEASLEEKSLEIEGKLHAADAKLAEANRKKSQADRDLEEAEARQRRLEKEKLYFETERKAREKQLKEQGIQRAGAGGTRGIGAGVRTELAGSTQRMCVGSMAGDVER

SEQ ID NO: 199329 - protein, 107 aa, Zea mays
  unsure (1)..(107): unsure at all Xaa locations
  Clone ID: MRT4577_113364C.1.pep
MDGGSPMQTVLSAPGVKDKKLVSFTRNDDATNDKDAVTGLIRSIVGGATPSSPAQRTAFXRTQHPRRRPLLGPWAPAASRRAPLLRPSSATPEPALLGALRPRWAAG

SEQ ID NO: 199330 - protein, 69 aa, Zea mays
  unsure (1)..(69): unsure at all Xaa locations
  Clone ID: MRT4577_113365C.1.pep
MARRDASSLVSRCLPPRAPAGAPTAVPSAPPRTVPAYAMHXRATPGDLQTLTPAATPHEPITPSVHVNY

SEQ ID NO: 199331 - protein, 36 aa, Zea mays
  Clone ID: MRT4577_113366C.1.pep
GNKINNYCLLFSIACQHCIARFPNKLMPLILLSKQL

SEQ ID NO: 199332 - protein, 156 aa, Zea mays
  unsure (1)..(156): unsure at all Xaa locations
  Clone ID: MRT4577_113367C.1.pep
MHTLRSVRRPCRYLKHSPAAARQVRPSMRHRIHGTLGSGIVNLHAHARRHLHCLQHATEADDDMPGDNTVCGXEEAHDTLFSXTGSRESRPMPTLVXQDPTAIXDARSATYRDVFQQEHLTAHNDEAXNNFARGHXTNXKEIDDLSLDRIRKXADN

SEQ ID NO: 199333 - protein, 125 aa, Zea mays
  unsure (1)..(125): unsure at all Xaa locations
  Clone ID: MRT4577_113368C.1.pep
MGGGKGATGLKKKGXTKRGGKKGRAKGKGTGGGTPTTGGGKGGVKGGAPAXQKGRAKGGKGGRGGPXPIKTAGGKGKFGKAQKGGNGRGFPGTKVGNAGEGXQELGGPKKEQKTGQGRGKKTGNP

SEQ ID NO: 199334 - protein, 121 aa, Zea mays
  Clone ID: MRT4577_113369C.1.pep
YGLDQAGEAMRIQRGGVISTQVVSSTEKLQDFTFDEGTLLHGELHHGGNLRQRRTEETRQDVRDGMQHSVHVTRVAVPSLRRKGEAAQIGSVVRLLLLVLLLVVIFVFVGLWKCSSFRLLH

SEQ ID NO: 199335 - protein, 27 aa, Zea mays
  unsure (1)..(27): unsure at all Xaa locations
  Clone ID: MRT4577_11336C.1.pep
FSKKKKKKKKKKKKKKKKKKXKGRAKK

SEQ ID NO: 199336 - protein, 174 aa, Zea mays
  unsure (1)..(174): unsure at all Xaa locations
  Clone ID: MRT4577_113370C.1.pep
GRETGPFHCLQGGNFTPKEQKTKRGPQNPQKKQPRKKQPKQPXKPKXTRPPSPPRNSPPGEGGTNPPKPKXGGPDXGAKKTPRGGKVLGGAAPXGRERGPGKPSQEKXLNPPGVPSKKTPEKPLNPPLLENLKKPGWGNPWNVAPQNLWGGVGGPPCQNPSPPWGGQKKKPKGS

SEQ ID NO: 199337 - protein, 82 aa, Zea mays
  Clone ID: MRT4577_113371C.1.pep
HAYVHAIVIILYRETHTSGGFFFVTCCTDEAMLNAIEGMNSKELNGRNITVNEAQSHCESLVHCSGYCGQPWRLRLQQRRAP

SEQ ID NO: 199338 - protein, 93 aa, Zea mays
  Clone ID: MRT4577_113372C.1.pep
YQCADASKSRRSKTSQGAPEEGKSGIIFGASTSTSTVGGKESGRKKRARDQRMAGGREDLDGGRSACLLLLNSAAPLPDGGGGGKPHSRCEWP

SEQ ID NO: 199339 - protein, 219 aa, Zea mays
  unsure (1)..(219): unsure at all Xaa locations
  Clone ID: MRT4577_113373C.1.pep
MTYKKTKMPLNIVQKGPQTKRDLRLNRKRDYHSHKEIDKIVQNMPFDKAPVFNGFNGKFLRHIIKIDFYKLCHDFYDGNINLDGINTSFIALIPKVNNPVRVNDFRPISLLSIAIKLITKLLVNRLKPVIQRIVHKNQYDFIKNRTIQDCXLAWCYEYLHQCHLSRKEVVVLKXFDKAFNTVEHSVIIAILNQLGFPVRWIRWVSSTLNSESSTVLLNG

SEQ ID NO: 199340 - protein, 34 aa, Zea mays
  unsure (1)..(34): unsure at all Xaa locations
  Clone ID: MRT4577_113374C.1.pep
SLYSYXSYVVCPSVSPKDKISRSFLRVFAQQNPL

SEQ ID NO: 199341 - protein, 507 aa, Zea mays
  Clone ID: MRT4577_113375C.1.pep
EKNVAELKSVKEAVASVHEQYAALVDERDTAIKRAEEVISAGKDIEKRVEQLTLELIASKGSLELAHAAHHEAEERRIGAALAKEQDCNAWERELRQAQEELERLDSKLAFSNDMQHNIDANLHKLLSLNSELSAYVANKLTEEAEGVSKDHESEDSRHISNAVKEALASKQKELQELKADIEKAKAEANVLRFAAMTLRSELDNENASLVALQQGEAMASVAVSSLEAELNRTKQEIESVRSKEAEAQEKMVELPMVLQQATQEAEDARVAGGAGHEELRKAKEAFEQTKAAAAAAETRLSAVVKETEASVASERLAREALQALQESEQARETKDSQRGVVLPISEYYELSKRAHEAEEQASEKVAEALAQVVSAKESEAMSLESLKEASDEMDEKKEALEIALERAGRANEGKLGAEQELRKWRADHEQRRRAHESAKRAVNPLNGPSRVFVEQKGPYHKEQESKVQVSGSSSYEGLVPNQKMQRKKSLFPLMGSVLSRKTRAQT

SEQ ID NO: 199342 - protein, 212 aa, Zea mays
  unsure (1)..(212): unsure at all Xaa locations
  Clone ID: MRT4577_113376C.1.pep
XXXXXXXXXXXFXXXFLNHFTSLVGCINHKAIEWCEVITPMLESMLEDSNNSSIYDEVRKMGPTXANSTHPKFSTXXGTLFEFLHTISMLRRXTTWTXLGAPFGAPRWGAARRXXPRRXPPCEMGKATXPIFSLPXDSXAPXRRGXRSXVAXXHDLXDMEGATPDXDIXXWPRXTPXHXXEARXXAXXATXXGAGPTTXXTGXPXRAGRRGS

SEQ ID NO: 199343 - protein, 38 aa, Zea mays
  Clone ID: MRT4577_113377C.1.pep
MEADSGKLFVGGISWETDEDRLREYFGRFGDVPAVVIL

SEQ ID NO: 199344 - protein, 36 aa, Zea mays
  Clone ID: MRT4577_113378C.1.pep
TNDRLTYLQDRRTTIGQLLHKAQFCVSRQPHPCLMG

SEQ ID NO: 199345 - protein, 36 aa, Zea mays
  unsure (1)..(36): unsure at all Xaa locations
  Clone ID: MRT4577_113379C.1.pep
VPQGXRPLPSWCSRPPLTRHSVIQTRDRNDLHLRIP

SEQ ID NO: 199346 - protein, 64 aa, Zea mays
  Clone ID: MRT4577_11337C.1.pep
SARRISWATPRFSPSRRCKTSPHGSNKRGIIMEHRNSHAQFLSPRSFCNLFSFFYIFFFFFLFF

SEQ ID NO: 199347 - protein, 54 aa, Zea mays
  Clone ID: MRT4577_113380C.1.pep
PICGNRLHRTALMACDKDSTILHSAWTRISNRNVVRVLSVQLQHAKGGSRRKMS

SEQ ID NO: 199348 - protein, 76 aa, Zea mays
  Clone ID: MRT4577_113381C.1.pep
AGGEMCAFILPWMVITERAGGRVSFFELGAHEDYWATIRNCDGHHFFPLEHPERVNAPLRAKFFVYGGCPLKKMSV

SEQ ID NO: 199349 - protein, 51 aa, Zea mays
  Clone ID: MRT4577_113382C.1.pep
PTQKKQSLESLTGKLFSANNDLDHPAEFKGPPEAGIYLAAAKDARMDVLPK

SEQ ID NO: 199350 - protein, 77 aa, Zea mays
  Clone ID: MRT4577_113383C.1.pep
TYICARRKLELIYSRPKLNVCAEQRDYTNHGRDKLLPMGNMLKNQSGGPTSTEMKAWPTGTGTHLRQIQQKPGDHSR

SEQ ID NO: 199351 - protein, 596 aa, Zea mays
  Clone ID: MRT4577_113384C.1.pep
DSRNMRPALLLFYTLALVEASLFLFEKAYWTWKVSVCKLLHQVSAECELGPYGLVSLKRFFYDAYSRCIAGSIFDGIKMDLVTFAEDLILSDFLDEQIIGVRILQQFANSERSASDTLRKVGTTPRSIDRLVEMLNWKRTEEDEVRLCAAEIVSKLASKRQNALRVSGIPGAIESVTSLLYTATSPPVSGTHPQLPGAPAEHGASPPAASRGYDHLQFNLLGLLILKRLARDHDNCGKIGNARGLLAKVINFTQASRALLQNPHVTDSQVRAMKRALKVVKMLVSTTGSTGKALRESVAENVFTVSNLRGILRYGQQHRELQKLATDVLTGLAMHDSGKEAIVATGGVVKLLLSIFFKSQDTELGREAGEALAMLALESEAGCAAILRQTDVLDQFVSALQDGDARRRLNAARVLRNLCAYSGQQQRERLRVVTKALPAVLNATKVDKDRILEVSVGLSTEICQFIDGEQFAAELRGAGVADERAYVELLASILKQYRYPDIRVPRMRRFVVQQVIWLMTSSGGGGDHSGGYVQLLREVGMKRLLESIADTTSELECYHVFSGSVGISKHRESFSAIVDSALELIAGSGDGARAED

SEQ ID NO: 199352 - protein, 279 aa, Zea mays
  Clone ID: MRT4577_113385C.1.pep
MAMLARARLPPPTHLPPITTDGGGAGVEFRRKIHFLSSELHVDPFPLLAVNPMLRSAPLPLLRDSLRLLTSHGLTTLDAARVFSAFPSLLTSPPEEPLRFLSADAPLPPPLLRSAVVRSPRLLAASVPDTLRPALLFFRRRVSLRREPLPLAAALLLAFNVERTLLPKLLFLRDATGLPDSAVCAVLRRAPAILSYGIETNLRPKLEFLAERMQRDPAAELAEFPHYFAFSLEGRIKPRHEALRERGIEMPLKDMLTSNDDDFRERLVNVTLSDTKARL

SEQ ID NO: 199353 - protein, 171 aa, Zea mays
  Clone ID: MRT4577_113386C.1.pep
MGDACFSTQLIDGDGVFNVSGLENFMKDVRLGECGLSYAVVSIMGPQSSGKSTLLNHLFGTNFREMDAFRGRSQTTKGIWLAKAQNIEPCTLVMDLEGTDGRERGEDDTAFEKQSALFALAVSDIVLINMGCHDIGREQAANKPLLKTCFPGKEFYEYYFDAAFLPYLAFV

SEQ ID NO: 199354 - protein, 78 aa, Zea mays
  Clone ID: MRT4577_113387C.1.pep
GGSSSSPHKGAPVIFFAKLKTPPRHALSQVLFPGAPPRGFFLKFGSPFIWGQEPPVEPYVCCFIFRNVGPRRHVCPWT

SEQ ID NO: 199355 - protein, 64 aa, Zea mays
  Clone ID: MRT4577_113388C.1.pep
QGFQQSFSCSRVTVRSLVQANGVACQSGGHGIVSQSGSSDARTACLSVSALLVSLIEVNYRNAS

SEQ ID NO: 199356 - protein, 92 aa, Zea mays
  Clone ID: MRT4577_113389C.1.pep
GCEEYACLDYEMRLVYSCEVYPRPTVSSEGDSLLLVFSRYRAPDHVVIVPRERADKMHAHTHRQGGNLSIEIFLPCGLIQRGRLLGGGGQEA

SEQ ID NO: 199357 - protein, 86 aa, Zea mays
  Clone ID: MRT4577_11338C.1.pep
APPPPPGAGAGAPERDTHTAHIPGEKRRTHPAAPVPVAPGTKHLLYGVTVFCAPVETPVWRARFFRRRRRPPPPRGHWLSVLGPQV

SEQ ID NO: 199358 - protein, 70 aa, Zea mays
  unsure (1)..(70): unsure at all Xaa locations
  Clone ID: MRT4577_113390C.1.pep
HFLHLTYHQIXXFNQPFNLYHKYNNFFITTNYLITLILLLFLNHTKPYLHTIINYFKFSFKIYYLLPQPS

SEQ ID NO: 199359 - protein, 51 aa, Zea mays
  unsure (1)..(51): unsure at all Xaa locations
  Clone ID: MRT4577_113391C.1.pep
NGLGNSAKVVGFSQLSLGMWLTKAFCGSLVSSSSXRLGYCSIAYCLGGRVG

SEQ ID NO: 199360 - protein, 57 aa, Zea mays
  Clone ID: MRT4577_113392C.1.pep
GCTYVVHRQALLLAFPDGDSPVAVGTEFAMFIKAGKGPPSATSSSLALLRPATQART

SEQ ID NO: 199361 - protein, 77 aa, Zea mays
  Clone ID: MRT4577_113393C.1.pep
LSPPGGNWLFILRGPARKPRPLGCMGLNPRCISKSQPSFMKWVKNLTWVDPPPVVVGNKKKFPYLGFTVGLPGPHKG

SEQ ID NO: 199362 - protein, 96 aa, Zea mays
  Clone ID: MRT4577_113394C.1.pep
RGKASRLFPALAKGGKPQNTCRGGDPFRRAWGRGPLYFGAAGEASLTTSRISTRGGGPFLILMATSWGLKGGPNTKTRPGFLSNRGLSNPSIWRSA

SEQ ID NO: 199363 - protein, 91 aa, Zea mays
  Clone ID: MRT4577_113395C.1.pep
PFGGPQNPQGHAYGPVALGPQNLFKNPQAGFFAPQKIGGQIFRQPGPFPGVPPKIPPFFFPKGWKRVLVFPPPFPQEPPLRVGKPPGFVKK

SEQ ID NO: 199364 - protein, 41 aa, Zea mays
  unsure (1)..(41): unsure at all Xaa locations
  Clone ID: MRT4577_113396C.1.pep
RVPINFFYFFNLNADLLFHAVQDNPVTXFPKXIITVQSPIG

SEQ ID NO: 199365 - protein, 106 aa, Zea mays
  Clone ID: MRT4577_113397C.1.pep
RTRGKKKKKYFKKKKKKKKREENKKKKKKKDNQVVGLPAGSHFPPACLLLLSLLSKSNLISIHLSAFLHGKTWENPCLPHLNPLPLFPPFAISLSPEQVALDSLSQ

SEQ ID NO: 199366 - protein, 47 aa, Zea mays
  Clone ID: MRT4577_113398C.1.pep
HIHRLTRIFHNPRRHTAREISSQRRRASPLGHTQRQPQLPRQSRLQL

SEQ ID NO: 199367 - protein, 122 aa, Zea mays
  Clone ID: MRT4577_113399C.1.pep
GKTSWDNGLPSFGSDSWQPFSSSTLSVQNAGGESEADPWSKKTSAKDDSDPWGKKTDGDSDRWGKKTDGDSDPWGKEAVSAADGDSNPWGKETVPSAAGDSDPWGKKVVSSADGDSDSWGKK

SEQ ID NO: 199368 - protein, 118 aa, Zea mays
  Clone ID: MRT4577_11339C.1.pep
CTLKDSSTISLLRIRVLCVDGRRLTTSRGGREEELLPENQLAATPVNVRRPLHHLRVWRTYTRILCSYDGCPHDRRGCLLCRYHPSHYDYLQCSLLNLLACASYKHSTPTACNARTHL

SEQ ID NO: 199369 - protein, 57 aa, Zea mays
  unsure (1)..(57): unsure at all Xaa locations
  Clone ID: MRT4577_1133C.1.pep
PVLPPVRSRLAXXSGQAHQFKASFLLFWXMFDMGGPSPHSRSGDKIKXSRRTVKTWL

SEQ ID NO: 199370 - protein, 58 aa, Zea mays
  Clone ID: MRT4577_113400C.1.pep
VYRISIAIPSYGTAFQFCLLPKQNSFFLFFVPRLYGKLHAYSWYSIEPHSFLGPTYSH

SEQ ID NO: 199371 - protein, 315 aa, Zea mays
  unsure (1)..(315): unsure at all Xaa locations
  Clone ID: MRT4577_113401C.1.pep
MISSSKLKSVDFYRKIPRDLTEASLSGAGLSIVAALAMVFLFGMELSSYLAVNTTTSVIVDRSSDGEFLRIDFNMSFPALSCEFASVDVSDVLGTNRLNITKTVRKYSIDRNLVPTGSEFHPGPIPILNKHGDDVEEDHVDGAFSLSSRNFDSFSHQYPVLVVNFYAPWCYWSNRLKPSWEKTAKIMRERYDPEMDGRILLGKVDCTEEVELCRRNHIQGYPSIRVFRKGSDIKENQGHHDHESYYGERDTESLVAAMETYVANIPKEAHALEDKSNKTVDPAKRPAPMASGCRIXGFVRVKRFQGSVVISARSG

SEQ ID NO: 199372 - protein, 71 aa, Zea mays
  unsure (1)..(71): unsure at all Xaa locations
  Clone ID: MRT4577_113402C.1.pep
PAGQDSLATLVVFLLTPSSRLPHQIEVPALYDIAQWLQEISGHGLXFGDDLHQXSYAHSYVPHLHRRRNDL

SEQ ID NO: 199373 - protein, 237 aa, Zea mays
  unsure (1)..(237): unsure at all Xaa locations
  Clone ID: MRT4577_113403C.1.pep
MISSSKLKSVDFYRKIPRDLTEASLSGAGLSIVAALAMVFLFGMELSSYLAVNTTTSVIVDRSSDGEFLRIDFNMSFPALSCEFASVDVSDVLGTNRLNITKTVRKYSIDRNLVPTGSEFHPGPIPILNKHGDDVEEDHVDGAFSLSSRNFDSFSHQYPVLVVNFYAPWCYWSNRLKPSWEKTAKIMRERYDPEMDGRILLXAKVDGTEEVELCRXNHIXGYPSIRVFRXGSDIKEI

SEQ ID NO: 199374 - protein, 77 aa, Zea mays
  Clone ID: MRT4577_113404C.1.pep
TEHSPSYNSSTFSPILVAWCCSGEKAFCSADCRDQEMQLEEEEAENSTSGASPLSSCSSSSSFHDDDIFMAGMVVAT

SEQ ID NO: 199375 - protein, 485 aa, Zea mays
  Clone ID: MRT4577_113405C.1.pep
MISSSKLKSVDFYRKIPRDLTEASLSGAGLSIVAALAMVFLFGMELSSYLAVNTTTSVIVDRSSDGEFLRIDFNMSFPALSCEFASVDVSDVLGTNRLNITKTVRKYSIDRNLVPTGSEFHPGPIPILNKHGDDVEEDHVDGAFSLSSRNFDSFSHQYPVLVVNFYAPWCYWSNRLKPSWEKTAKIMRERYDPEMDGRILLGKVDCTEEVELCRRNHIQGYPSIRVFRKGSDIKENQGHHDHESYYGERDTESLVAAMETYVANIPKEAHALALEDKSNKTVDPAKRPAPMASGCRIEGFVRVKRVPGSVVISARSGSHSFDPSQINVSHYVTQFSFGKRLSPRMLHEFIRLTPYLRGYHDRLAGQSYTVKHGEVNANVTIEHYLQVVKTELVTQRSSKELKVLEEYEYTAHSSLVHSFYVPVVKFHFEPSPMQVLVTEVPKSFSHFITNVCAIIGGVFTVAGILDSIFHNTLRMVKKIELGKNI

SEQ ID NO: 199376 - protein, 93 aa, Zea mays
  Clone ID: MRT4577_113406C.1.pep
LNRPLAEHRPIHSIQLNLNTRHRIIRPQFSPILVAWCCSGEKAFCSADCRDQEIQLEEEEAENSTSGASPLSSCSSSSFHDDDIFMAGMVVAT

SEQ ID NO: 199377 - protein, 223 aa, Zea mays
  unsure (1)..(223): unsure at all Xaa locations
  Clone ID: MRT4577_113407C.1.pep
MAPTAVDPGPSDHLLAPAPAAMAGGGDGGDGQMEVVFNVSSSDTDSDDLGAGGGKRSRPVAGQGGGRDREDKKARILAAAATVPAGFLEPLSPVRLLPPPAPGRSVTKQFWKAGDYVGKPDHLLAVVAAQYSVVMSLLSSDSGMDHVRVHPKFLHSNATSHKWALGAFAELLDNSLXDEVVHGATYVNIDMIESKKDGTPMLLVQGAIGNPQFAWVTWHAFMN

SEQ ID NO: 199378 - protein, 85 aa, Zea mays
  Clone ID: MRT4577_113408C.1.pep
FCWFNLLRSFLMPSLFCSGFFYQRLFVSFFFLDGRVLVLDLGLPVLFLSSVPVFLLFDVLWFPPIFPAFFAWGFTPPIPKKNPPI

SEQ ID NO: 199379 - protein, 58 aa, Zea mays
  Clone ID: MRT4577_113409C.1.pep
IKLLVSTGSTICMLLYVSCLRMHMGVYNVLARVVRTRVCTHGAPHMNGVVIQYHPTFL

SEQ ID NO: 199380 - protein, 92 aa, Zea mays
  unsure (1)..(92): unsure at all Xaa locations
  Clone ID: MRT4577_11340C.1.pep
TTPXXXQENLPTGXRTQPPKIVXXRPXXCQIPXXXKXXPAEXCPXKEXPPTXQAXXLXGNPNHGXCXXPLAXRHPXXXTXXXXRCGWDLERP

SEQ ID NO: 199381 - protein, 81 aa, Zea mays
  Clone ID: MRT4577_113410C.1.pep
LACAFQCLSMTRSCGCTVVPSIVKIVPFHESIFLDYIPIAIRLSLVYQVYCNIPCDLFSISTSLFHLHRARSIKHSPSSMA

SEQ ID NO: 199382 - protein, 87 aa, Zea mays
  Clone ID: MRT4577_113411C.1.pep
QVFSPVQCPYPMCFGPWFFGCAPCTPVITFPRKIWGPPLRDFPWQGPGVPPLFWGGALEPRLVGLGTPLNGCPLHFPFSPPFFFGGA

SEQ ID NO: 199383 - protein, 43 aa, Zea mays
  Clone ID: MRT4577_113412C.1.pep
EGTVSAHNRPCGLRVTRSRRMVQVTSMAHYKALLWPTSCCCTP

SEQ ID NO: 199384 - protein, 177 aa, Zea mays
  Clone ID: MRT4577_113413C.1.pep
VSEGHKCFESMGRDHGIEPSMDHYACVVDLLGRSGRFAEAEQFIRDMPVRPDSTIWGPLLAACQLHGNVDLAEKAAKELSALEPESDIWRVSLSNTYASVGRWRDAAKIRSEMRRVGLRKETGWSFVDVGGVEGFKFVSADTRHHDAEKIYSVWHSMNRHMADLAADVHKLNPISAI

SEQ ID NO: 199385 - protein, 89 aa, Zea mays
  Clone ID: MRT4577_113414C.1.pep
SCPPIHHMCLIMRSHPSQSLASSLMLLHRYARCRYGIQGWLCSTKRVFICSSRECFIHIPLASLQHKMSCVTVQEMRNSPVWHLPLLLG

SEQ ID NO: 199386 - protein, 68 aa, Zea mays
  Clone ID: MRT4577_113415C.1.pep
DHTIKSYRTHMGNAQVQVANVFRITMHNRGKPTYNIIYRLKMVKTCLNLTQTSEMTTSMEPNIYTSLS

SEQ ID NO: 199387 - protein, 299 aa, Zea mays
  unsure (1)..(299): unsure at all Xaa locations
  Clone ID: MRT4577_113416C.1.pep
MYSCWCVRPVAAVGLLCLVLAIESRPAEGDLLVDRSGSFPSVSRCLLGTGTGGGVAMALQYVEAQRQLRPDLSDWYASLADLYQRKLWHQLTLKLDQFLQLQVAQTGDTIIQLYNNFIVDFETKINLLKLAHFAVITSRQYPDKDAAITFLEGVITKLRETRESRINEPILYVKMQIAAINLEKGNKKECKNLLEDGKTTLDSMTDVDPTVHASFYWISSQYHKACQEFAEFYKNALLYLAYTTVESLSESFKLDLAFDLSLAALLGDNIYNFGELLAHPIINSLIGTKXEWVYHMLQA

SEQ ID NO: 199388 - protein, 236 aa, Zea mays
  unsure (1)..(236): unsure at all Xaa locations
  Clone ID: MRT4577_113417C.1.pep
MALQYVEAQRQLRPDLSDWYASLADLYQRKLWHQLTLKLDQFLQLQVAQMGMPDRWITDAFVHKADLAANPPRLLDFPXLTGDTIIQLYNNFIVDFETKINLLKLAHFAAITSRQYPDKDAAITFLEGVITKLRETRESRINEPILYVEMQIAAINLEKGNKKECKNLLEDGKTTLDSMTDVDPTVHASFYWISSXYHKGLQEFAEFYKNALLYLGYTTVESLSESFXLDWAFDLS

SEQ ID NO: 199389 - protein, 99 aa, Zea mays
  unsure (1)..(99): unsure at all Xaa locations
  Clone ID: MRT4577_113418C.1.pep
TGKTTARGEPTDXPTARQPGTKKPRAHEGQPKXRGGAGKATEKHAAQXSGRAEDRDQPRHAKPXKAHRAEHKEHPATGPAAKTPGERAGPRKNDPDGKA

SEQ ID NO: 199390 - protein, 74 aa, Zea mays
  Clone ID: MRT4577_113419C.1.pep
LQRAKYKPLTHHRLPFITHFTTQTSQHIQHLIIMSRHDPHLSILPTHFPNLQILLNHPYNLNLHYLLHSISIYS

SEQ ID NO: 199391 - protein, 115 aa, Zea mays
  unsure (1)..(115): unsure at all Xaa locations
  Clone ID: MRT4577_11341C.1.pep
TXGLSXXXXSTIQKPRLNPXHFXGFFSATVNSTIACNTFFSKGKLLPTSACPPVSLNFLSETSLFPPQSHGVSLFSVLRPFLLLKSLSLSCSTHKRLSYFYTIIPISFPFLPFLP

SEQ ID NO: 199392 - protein, 71 aa, Zea mays
  Clone ID: MRT4577_113420C.1.pep
WTLAPSYLRRTWSSEQRSLQKRCCCWQRGPETHRRRLADASDVVGGSEHPVRYGHHGVSLLGVLLERALAQ

SEQ ID NO: 199393 - protein, 73 aa, Zea mays
  unsure (1)..(73): unsure at all Xaa locations
  Clone ID: MRT4577_113421C.1.pep
PLSLDRSGVWCGGNEXLSGYSNRRSYTTLYMGTGTEGGITSARIRVPNVGCEGFMCSSHLSITQRNSRLIHST

SEQ ID NO: 199394 - protein, 82 aa, Zea mays
  Clone ID: MRT4577_113422C.1.pep
GEESLDESRNPTIWTKIRHHKISCGALAMASITTTRTWAASSSHVTSWRRWTVIITSSHVVLRRQEKIVRFFRNGTIVIPFI

SEQ ID NO: 199395 - protein, 182 aa, Zea mays
  Clone ID: MRT4577_113423C.1.pep
TISKKLSVFRKETDSLIISTIMSSTSTTTTSTSASSSGSSSSGGSVTNSVMDLAMEEKQRIVDGEVDTTDTKARYLGLIGRIRPVLLPAARYLAYTSDVGEAFRPIINRKVVTAAYGVSIAYVAGDIGYEGYKAHLDRQDRLLKQSTSGSKEPGQAEINAATEIGLRVARKTVFQGLASISY

SEQ ID NO: 199396 - protein, 121 aa, Zea mays
  Clone ID: MRT4577_113424C.1.pep
PVSFFIDIIQLATLHVTILHWLISSLYSRQIQTVASLWRLFRGRKWNPLRQRLDSYDYTVEQHVVGSLLFTPILLLIPTTSVFYVFFSILTTTVIWVCVMLEIVIALIQSTPYAELTLWVM

SEQ ID NO: 199397 - protein, 78 aa, Zea mays
  Clone ID: MRT4577_113425C.1.pep
TLILSLLISIRITVIICFTLSISPTFSFSPTINKITLCNSRILYLTKLECFFSFKHIHSNLYIIYHFFFFLIYTIHKI

SEQ ID NO: 199398 - protein, 76 aa, Zea mays
  unsure (1)..(76): unsure at all Xaa locations
  Clone ID: MRT4577_113426C.1.pep
GFVEGRWLKVDVEYHYFVGXGLAWATSNELLENALDFYGEILDCKGIIDRETERFCGYGLDTFYFKNSMLXVFENM

SEQ ID NO: 199399 - protein, 52 aa, Zea mays
  Clone ID: MRT4577_113427C.1.pep
NFKYVMMVQDDNLAEGGDSYGNRVGVLAEGGSIVMYDGAVLVVSITTAGEFF

SEQ ID NO: 199400 - protein, 42 aa, Zea mays
  Clone ID: MRT4577_113428C.1.pep
LSGLFLNFRDVRNIVVPKIGVSGNYLKIHHSHEYEFGKFSLT

SEQ ID NO: 199401 - protein, 100 aa, Zea mays
  Clone ID: MRT4577_113429C.1.pep
PPNRRTTKNVGEKAPPAGGRVGQNGVGHYYYCPGRKRTNIISLKAGKTPGPENPKFKLRRFLKNSNQKSKKPPGVMTIGRAKRGGFFIRKKKKNSPGFLA

SEQ ID NO: 199402 - protein, 145 aa, Zea mays
  unsure (1)..(145): unsure at all Xaa locations
  Clone ID: MRT4577_11342C.1.pep
CTIRRHVDLETGEVQAGLXSGSYASATEFYRDLLLLCANALVFYPRGSPERSAAARTRALVAKHMSKDQPGPSGKAVAGPAASKKAKAEADVGSLLEKTAPIIVCRKRSSIAKAAAAATAKEERSEKAESDKEGEKQQEAVGKRK

SEQ ID NO: 199403 - protein, 41 aa, Zea mays
  Clone ID: MRT4577_113430C.1.pep
LCAGHKRSVSAPCRTILLSGLRSEIELRSVRWLARGHRFHS

SEQ ID NO: 199404 - protein, 102 aa, Zea mays
  unsure (1)..(102): unsure at all Xaa locations
  Clone ID: MRT4577_113431C.1.pep
AGDQLPVVYPHXFVQFSQWAALNCPRHIVQQXXVLSFSTYIAAVSPAALLIQXQLLPXFYLHAAXPNAGTLLQLQQLLPFNQLALTNPAGFYQQPIIDGALF

SEQ ID NO: 199405 - protein, 141 aa, Zea mays
  Clone ID: MRT4577_113432C.1.pep
IFFPKPKNMNCQKHNGFRTNKCYPGYKKANSSRLTRHGTSGGSQRLLTDHKPPTTTFNRNNGLAGHGPWPCFQKKPRRPGRGNQKATNIKAATATKANAPRMLLLPVNRHTFPMDGLATLGMEVQKGLQLQTGRKAVVRPG

SEQ ID NO: 199406 - protein, 73 aa, Zea mays
  Clone ID: MRT4577_113433C.1.pep
LGGAVFMGGFWVPKRGKPAKPPNFERGVYIMEGGAPDKFFAGYNSRDIWGFNKKEGGLWGFPVTPRGDMAKWP

SEQ ID NO: 199407 - protein, 59 aa, Zea mays
  Clone ID: MRT4577_113434C.1.pep
RSGELSAEGQTHCGKEGGIEGSTSRKSRCGFLNIGLRITCTLLLCRPLLYGAGCGKKAN

SEQ ID NO: 199408 - protein, 59 aa, Zea mays
  Clone ID: MRT4577_113435C.1.pep
LGTSRPAGIRSPTSLESAVHPWLPSAPHPLLYPCCKSEINTRRLLLSYLKQRDSSSSLN

SEQ ID NO: 199409 - protein, 57 aa, Zea mays
  Clone ID: MRT4577_113436C.1.pep
DVFLSYLEVEHFDGEGNHETEETRETNYGSGCIAQVVMGKPKESVDEIFHYFSVFSC

SEQ ID NO: 199410 - protein, 143 aa, Zea mays
  Clone ID: MRT4577_113437C.1.pep
PKAPSWWGCGSSPCSRTTGWCGRASPPSSPSAGSLRPVSPLARPGEGTAELLSGRGGTGHGCFLWISPGGCGNGAACSSGWAVGVCVRAFSTMVFVCPQPCFPLWGVPLLAPPAWVNRGVVSLVVPPVWEVFWEQKKIMRSVS

SEQ ID NO: 199411 - protein, 40 aa, Zea mays
  Clone ID: MRT4577_113438C.1.pep
APFSPRITQRVRQDAGANQVIPANWFPTPIPFHHPVLALG

SEQ ID NO: 199412 - protein, 116 aa, Zea mays
  Clone ID: MRT4577_113439C.1.pep
MAIEMPCNRMSTVALVVVVLLVVACQIAPAHCTAPTTVASTPRSRYPLVVQSSATTATAYSTTKAGMIEGTVTPSEGGAPGATEDVRPTNPSHSPGIGHAFTHNKIGRKLLAAISQ

SEQ ID NO: 199413 - protein, 46 aa, Zea mays
  Clone ID: MRT4577_11343C.1.pep
GVSESRYDLTLKKMRFSGLSKSHRTQDPHRKVTAVLVSLPVTRTVP

SEQ ID NO: 199414 - protein, 75 aa, Zea mays
  Clone ID: MRT4577_113440C.1.pep
GICGKMPPHNQSDKFLRTQTNLLNIYSDFYICSISTTKSLCCNLLAPSLLPLVYAHSLNFTQWSAALHIHIGMFL

SEQ ID NO: 199415 - protein, 171 aa, Zea mays
  Clone ID: MRT4577_113441C.1.pep
FRVFSPPSSAAASPAGAQRVLLYGRRAPFAGALLFFSIGAVSAAVAFRTGARGLSSTRMESASTTVPYIVVYVTVPNREAGKKLSQSIISEKLAACVNIVPGIESVYWWEGKVQSDAEELLIIKTRESLLDALTAHVKANHEYDVPEVIALPITGGNTKYLEWIKNSARDK

SEQ ID NO: 199416 - protein, 63 aa, Zea mays
  Clone ID: MRT4577_113442C.1.pep
TLCVFLVGGRQHHRRQEQREETIQLQFYGDDKLQYQIVLGRMNSDTPELEGERARAACKGRES

SEQ ID NO: 199417 - protein, 189 aa, Zea mays
  Clone ID: MRT4577_113443C.1.pep
MPLPAPFRVFSPPTSAAASPAGAQRALLYGRRAPFAGALLFFSIGAVSAAVAFRTGCAISHRRPPFLGARGLSSTRMESASTTVPSIVVYVTVPNREAGKKLSQSIISEKLAACVNIVPGIESVYWWEGKVQSDAEELLIIKTRESLLDALTAHVKANHEYDVPEVIALPITGGNTKYLEWIKNSTRDK

SEQ ID NO: 199418 - protein, 194 aa, Zea mays
  unsure (1)..(194): unsure at all Xaa locations
  Clone ID: MRT4577_113444C.1.pep
HWVPRGRPGPFRVFSPPSSAAASPAGAQRVLLYGRRAPFAGALLFFSIGAVSAAVAFRTGCAISHRRPPLPRGKRSXSSTRMESASTTVPSIVVYVTVPNREAGKKLSQSIISEKLAACVNIVPGIESVYWWEGKVQSDAEELLIIKTRESLLDALTAHVKANHEYDVPEVIALPITGGNTKYLEWIKNSTRDK

SEQ ID NO: 199419 - protein, 235 aa, Zea mays
  unsure (1)..(235): unsure at all Xaa locations
  Clone ID: MRT4577_113445C.1.pep
PTRPRHAGRDKHRESTRKGRGSELAEHDLHRSSKRRCEDHESHRSGKVETKEVNEQESSRGHAALSKKGQNPQPDNSLVNEVEEDAISDDENHEDSRRGRSKLERWTSHKEIEYSNMDDDSTQTFPTIKADVEADEVGKSQVSAAAGNSDINSNVDTGQTSDKMTEECERDRHLDXVERLKRRSERFKLPMPGEKDAPQGKKVDTEVQPPQNESSAADMEVKPERPARKRRWTGS

SEQ ID NO: 199420 - protein, 262 aa, Zea mays
  Clone ID: MRT4577_113446C.1.pep
MQNKGRSDVHPRDDSLNSERNSRQEKQNNNRLSGSSDARHAGRDRHRESTRKGRGSELGEHDLHRSSKRRREDHESHHSGKVETKEVNEQESSRGHATLSKKSQNPQPDNSLVNQVEEDASDDENHEDSRRGRSKLERWTSHKEIEYSNIDDDNTETFPTIKADVEADEVGKSEVSAAVGNSDINSNVDTGQTSDKSDRHLDTVERLKRRSERFKLPMPGEKDTPQSKKVDTEMQPPQNESTAADTEVKPERPARKRRWTGS

SEQ ID NO: 199421 - protein, 295 aa, Zea mays
  Clone ID: MRT4577_113447C.1.pep
PLFRPRVRGAGARQRERGDVVLNRRESLDDSHIKRNKDDENLRRLKPENEDMVMAHGHGGGDDNNRRKKERGDEIDQKRRDDSGRLQEKVDDRYHAKQKDDNWRQREREDRQRPKHENVLTLPKEEGRGTGRGNRMMDDKLVSGGRKKGEPRSSVLSKDTRERTRQNESSRRGQGVEENNMQNKGRTDVHPRDDSLNSERNSRQEKQNNNRLSGSSDGRHAGRDRHRESTRKGRGSELGEHDLHRSSKRRREDHESHHSGKVETKEVNEQESSRGHATLSKTSQNPQPDNSLVNR

SEQ ID NO: 199422 - protein, 83 aa, Zea mays
  Clone ID: MRT4577_113448C.1.pep
NNISLQRSLLDLLHHLYGSLVHEQQLCLTAFAGLIHKLIASPLKHCLSPKFKSYIHLCCFRTRSQTFSLGSKMLTKACYSIWQ

SEQ ID NO: 199423 - protein, 47 aa, Zea mays
  Clone ID: MRT4577_113449C.1.pep
YIGYRLYKDERWPRPRPMILVVSLACSTFFFFRTSAESGLIRRKKSG

SEQ ID NO: 199424 - protein, 106 aa, Zea mays
  unsure (1)..(106): unsure at all Xaa locations
  Clone ID: MRT4577_11344C.1.pep
SSPPLIXPPQEHDTTTGGNFLPGTDRLITMGEHGHIARGTHSYTKAYVKQKLHQAQGSQLEPTNTHPTGALAPLIRPVLGHLGKDLEHWVRAVSSQRCCCCKRAPL

SEQ ID NO: 199425 - protein, 47 aa, Zea mays
  unsure (1)..(47): unsure at all Xaa locations
  Clone ID: MRT4577_113450C.1.pep
FFFYFLFFTPTPKXHGRVQVTXIDPSMPALQNNLSLLTNFISTILYY

SEQ ID NO: 199426 - protein, 510 aa, Zea mays
  Clone ID: MRT4577_113451C.1.pep
MGRGRGHLLLPAAAACLWALSCALLLRASPHRAGAGAGGLLRVGLSRRGGGLDQRALAAAKAARQQEASRLGASGGGDVPLVDYLNTQYYGVVGIGTPPQNFTVIFDTGSSNLWVPSSRCYFSIACYLHHRYKSAKSSTYKADGETCKITYGSGSIAGFFSDDDVLVGDLTVKNQKFIETTRESSVTFIIGKFDGILGLGYPEISVGKAPPIWQSMQEQELLAEDVFSFWLNRSPDADAASGGELVFGGVDPAHFSGNHTYVPVSRKGYWQFDMGDLLIDGHSTGFCAKGCAAIVDSGTSLLAGPTAIIAQVNEAIGADGIISTECKEVVSQYGEMILDMLIAQTDPQRVCSQVGLCVFDGARSVSEGIESVVGKENLGSDVMCSACQMAVVWIENQLRENKTKELILQYANQLCERLPSPNGESTVSCQEISKMPSLAFTIANKTFTLTPEQYIVKLEQGGQTVCISGFMAYDVPPPRGPLWILGDVFMGAYHTVFDFGNDRIGFAESA

SEQ ID NO: 199427 - protein, 468 aa, Zea mays
  unsure (1)..(468): unsure at all Xaa locations
  Clone ID: MRT4577_113452C.1.pep
DAVAERAVGSDTRSYNLRVQQGSWGAGAATSGGGDVPLVDYLNTQYYGVVGIGTPPQNFTVIFDTGSSNLWVPSSRCYFSIACYLHHRYKSAKSSTYKADGETCKITYGSGSIAGFFSDDDVLVGDLTVKNQKFIETTRESSVTFIIGKFDGILGLGYPEISVGKAPPIWQSMQEQELLAEDVFSFWLNRSPDADAASGGELVFGGVDPAHFSGNHTYVPVSRKGYWQFDMGDLLIDGHSTGFCAKGCAAIVDSGTSLLAGPTAIIAQVNEAIGADGIISTECKXEVVSQYGEMILDMLIAATDPQTVCTNVGLSLDHANRSGSEGIESVVGKENLGSDVMCSACQMAVVWIENQLRENKTKELILQYANQLCERLPSPNGESTVSCQEISKMPSLAFTIANKTFTLTPEQYIVKLEQGGQTVCISGFMAYDLPPPRGPLWILGDVFMGAYHTVFDFGNDRIGFAESA

SEQ ID NO: 199428 - protein, 94 aa, Zea mays
  Clone ID: MRT4577_113453C.1.pep
GQRSRVIFAWLAYRQPQLLLLDEPTNHLDIETIDSLAEALNEWDGGLVLVSHDFRLINQVAQEIWVCENQEVTRWEGDIMDFKAHLKSKAGLSD

SEQ ID NO: 199429 - protein, 510 aa, Zea mays
  Clone ID: MRT4577_113454C.1.pep
MGRGRGHLLLPAAAACLWALSCALLLRASPHRAGAGAGGLLRVGLSRRGGGLDQRALAAAKAARQQEASRLGASGGGDVPLVDYLNTQYYGVVGIGTPPQNFTVIFDTGSSNLWVPSSRCYFSIACYLHHRYKSAKSSTYKADGETCKITYGSGSIAGFFSDDDVLVGDLTVKNQKFIETTRESSVTFIIGKFDGILGLGYPEISVGKAPPIWQSMQEQELLAEDVFSFWLNRSPDADAASGGELVFGGVDPAHFSGNHTYVPVSRKGYWQFDMGDLLIDGHSTGFCAKGCAAIVDSGTSLLAGPTAIIAQVNEAIGADGIISTECKEVVSQYGEMILDMLIAQTDPQRVCSQVGLCVFDGARSVSEGIESVVGKENLGSDVMCSACQMAVVWIENQLRENKTKELILQYANQLCERLPSPNGESTVSCQEISKMPSLAFTIANKTFTLTPQQYIVKLEQGGQTVCISGFMAYDVPPPRGPLWILGDVFMGAYHTVFDFGNDRIGFAESA

SEQ ID NO: 199430 - protein, 69 aa, Zea mays
  unsure (1)..(69): unsure at all Xaa locations
  Clone ID: MRT4577_113455C.1.pep
KAASVLQSFPFKAAVLALCVALLPLLPTQAPXXGAGGPGQEFLAKVWELLHLLFVGIAVSYGLFSRKNS

SEQ ID NO: 199431 - protein, 86 aa, Zea mays
  unsure (1)..(86): unsure at all Xaa locations
  Clone ID: MRT4577_113456C.1.pep
AWLAYRQPQLLLLDEPTNHLDXETIDSLAEALNEWDGGLVLVSHDFRLINQVAQEIWVCENQEVTRWEGDIMDFKAHLKSKAGLSD

SEQ ID NO: 199432 - protein, 523 aa, Zea mays
  unsure (1)..(523): unsure at all Xaa locations
  Clone ID: MRT4577_113457C.1.pep
MGRGRGHLLLRASPHRAGAGAGGLLRVGLSRRGGGLDQRALAAAKAARQQEASRLGASGGGDVPLVDYLNTQYYGVVGIGTPPQNFTVIFDTGSSNLWVPSSRCYFSIACYLHHRYKSAKSSTYKADGETCKITYGSGSIAGFFSDDDVLVGDLTVKNQKFIETTRESSITFIIGKFDGILGLGYPEISVGKAPPIWQSMQEQELLAEDVFSFWLNRSPXDAASGGELVFGGVDPAHFSGNHTYVPVSRKGYWQFDMGDLLIDGHSTGFCAKGCAGGGXWFSLLAGPTAIIAQVNEAIGADGIISTECKEVVSQYGEMILDMLIAQTDPQRVCSQVGLCVFDGARSVXRGSVLLDTASMFLFFSCXGKLSSDHAKTFCSEGIESVVGKENLGSDVMCSACQMAVVWIENQLRENKTKELILQYANQLCERLPSPNGESTVSCQEISKMPSLAFTIANKTFTLTPQQYIVKLEQGGQTVCISGFMAYDVPPPRGPLWILGDVFMGAYHTVFDFGNDRIGFAESA

SEQ ID NO: 199433 - protein, 67 aa, Zea mays
  Clone ID: MRT4577_113458C.1.pep
NTRKFVTLNLIKPNMPLHQIAMRFGLPTRKTLIPSIKNNTRDHFQRCVCGISIKLKMTIMRAYRSLM

SEQ ID NO: 199434 - protein, 88 aa, Zea mays
  unsure (1)..(88): unsure at all Xaa locations
  Clone ID: MRT4577_113459C.1.pep
SAVSTTHRTSPRYIRDSCTTTPFTKRSRRNCCARLNYECPEQNNGAAEKQQPPTSSAAWVTTPPSARSSAGTIERKXEHVCQKVLYYR

SEQ ID NO: 199435 - protein, 62 aa, Zea mays
  Clone ID: MRT4577_11345C.1.pep
MGSALVRNGAVEGGQCARRALAATTAQHRRRVGVGAGAARPRPSRLPPVSVAGDRPGDNGHL

SEQ ID NO: 199436 - protein, 70 aa, Zea mays
  Clone ID: MRT4577_113460C.1.pep
QSELFLCLLLKNAATRIGAKGKGRNAVKFMGFYVVHEHRSTYNHGRQFLLAQQSAEGLYKGILDIPFRFE

SEQ ID NO: 199437 - protein, 58 aa, Zea mays
  unsure (1)..(58): unsure at all Xaa locations
  Clone ID: MRT4577_113461C.1.pep
VXERAPPPQILHSIKSMLTLISWLTGKELRAALSHQQFGDMAIKLTRKRRKKKPHPPH

SEQ ID NO: 199438 - protein, 169 aa, Zea mays
  Clone ID: MRT4577_113462C.1.pep
DSRLVVAVASDALKKTALALSVGKAGSSVMEVESSAAVVSVPIADSGHHGLEAELQRSSESSCWSSVPSATGFLDTGSQRSAGFERNVLVPGTQRLLPKPRMISAIRRFPPGCGRVRASLVARGVSKVRLPLLGKVEVMPAKQQVVKAHASRKKRVRTEGDVAATIRNS

SEQ ID NO: 199439 - protein, 88 aa, Zea mays
  Clone ID: MRT4577_113463C.1.pep
THNTCQPQQPTFPPSSCISPPLSSASSRLPPPPWPHPSTPRPTPSPPALPLRGSSSPSSGPAMPPTPSARCRLGSTPRSAPSSTARTA

SEQ ID NO: 199440 - protein, 76 aa, Zea mays
  Clone ID: MRT4577_113464C.1.pep
NHHEHNKGTLKRDTKETAMKRTKESVEPIPENKECKRNCIAKTKAAPQICRENMGLLQANLMGERKALKCDKNLQT

SEQ ID NO: 199441 - protein, 89 aa, Zea mays
  Clone ID: MRT4577_113465C.1.pep
MVFLNLLTFGLWSKVGRLTHYAFDAVLISTILAGMKRSTGLTPSFKTDKIAGDNKDVNKWLDKYLGVGEWVMDQSVAIAGSSGYFERTR

SEQ ID NO: 199442 - protein, 95 aa, Zea mays
  Clone ID: MRT4577_113466C.1.pep
PIYAPPPPQPLDVCPINRISSDPRVDRGPQWGQRTLSGVCARGVAGHSIQWYRQCSFAPQVIIPGIICPTQTLSLRTIRAFVVRRSNIKNQKSFT

SEQ ID NO: 199443 - protein, 134 aa, Zea mays
  Clone ID: MRT4577_113467C.1.pep
ISVDGRRNFRDAPWLPQPSSASLASRQPRHPRLALRRWKPTTASSILAPLTAIPFHQHPSITAPHPQLSRPSIGVHTPCTAAVIAPAILAPLPAIPSIAPSSDPSGLFVINVRSPREVGEVLDGDRLRGSSGGL

SEQ ID NO: 199444 - protein, 42 aa, Zea mays
  Clone ID: MRT4577_113468C.1.pep
SLINLYKMWNTIALTLFLINLTLHFFLHPSRVPTIIVLIYFC

SEQ ID NO: 199445 - protein, 111 aa, Zea mays
  Clone ID: MRT4577_113469C.1.pep
QRTRVAVRRGMHHLRRLVRSPLRHVPPRAAFSGRPSVSHGNDAYGSSHAAASDAIACLVVAGGGGLEADLDRLFSAVLSHGLVCSVLRALTDRGVPAERFLRGALIPREGL

SEQ ID NO: 199446 - protein, 169 aa, Zea mays
  Clone ID: MRT4577_11346C.1.pep
MATAATTTRRPSGPVLSAAHYRYASPTRVSLSGAGQSVSVSVSSSSRGRRTCMCSPTSHPGSFRCSLHKERATKPPPPHGHGKPTSPPPPLTTTSRLCAAGRRMGSALVRIGAVEGGQCARRALAATARPSPATAQHRRRVGAGAGRPRPSRLSAVSVAGDRPGDNGHL

SEQ ID NO: 199447 - protein, 68 aa, Zea mays
  Clone ID: MRT4577_113470C.1.pep
IINASDRTSVCPPRSVQMHKYLRRGCQRPKRGQRGQHPLQGGVSIPYAMSTCTGCSRVSLNLKQRRRR

SEQ ID NO: 199448 - protein, 108 aa, Zea mays
  unsure (1)..(108): unsure at all Xaa locations
  Clone ID: MRT4577_113471C.1.pep
MAGQKDRARPAAAKPAKPGGGKQTKKKWSKGGQTERDSNAVLFDQATYDKLVSVVPKHKQITQSVLSERVRINGXLIRTAVKDLMAGGLIKMIYVYSIQPIYTRATNT

SEQ ID NO: 199449 - protein, 162 aa, Zea mays
  unsure (1)..(162): unsure at all Xaa locations
  Clone ID: MRT4577_113472C.1.pep
MVSHFYAAVPRTHGLRGYDAPMSALASLPSARAARXALPSQGIRCDYIXGSATNLIMVTTTTLMLFAGRTRLATXANRKATEEMXLDAPHSGLQTDDPVVFTLVYMLPCGDVGHIFSVSYRIGIKNTGRPLQEFWPKSLPRPLLTSALLSLRSSPHGTVSRP

SEQ ID NO: 199450 - protein, 108 aa, Zea mays
  Clone ID: MRT4577_113473C.1.pep
REPRLSLNFQGLSATIPLEKRITVDKLASDDECVHNRAATMHFRWRTLRIGFMEVGVVYTAPRMPRRPVLTSTSTLVNTSYTTLRRYGRIQAGEIAECVHVLPPEDMD

SEQ ID NO: 199451 - protein, 148 aa, Zea mays
  Clone ID: MRT4577_113474C.1.pep
QFRLDPSTSSLLHKLSRDTVVLNPGGQTSNPPWWCDLVNDDDTITIPRQRWTPTCVQSTAGTLRPNYRWRRRQTQFSGLNSMGTVWSGATLFRSTQDGRTENTNGKTFSDLRRTWNEGHAGWSLLETSWPRRGRQSVGVVTTDRRMTY

SEQ ID NO: 199452 - protein, 76 aa, Zea mays
  Clone ID: MRT4577_113475C.1.pep
LYFYAMLNKVLQETVLPKGGAIDKLQSRLAFSLNIQDVMRNAIQRAQDELICITPKAKLLLLHVSCSPCIFYILLS

SEQ ID NO: 199453 - protein, 91 aa, Zea mays
  unsure (1)..(91): unsure at all Xaa locations
  Clone ID: MRT4577_113476C.1.pep
FSFVFLPVLLFRSSSAPFPPAXPFSXFSALPFVLAXFLXXXXXAXSPPPPXPFSXXXXLXXXAXXLXFFLLXXSLCXVLXLXXXLWLPLAV

SEQ ID NO: 199454 - protein, 46 aa, Zea mays
  Clone ID: MRT4577_113477C.1.pep
NLSHYQGSSPPPGRYITCFCSPNIGCLLADQLSKCYAITRAYRSPS

SEQ ID NO: 199455 - protein, 92 aa, Zea mays
  Clone ID: MRT4577_113478C.1.pep
TEMRRLLPELLKTLASDGSRGLSTEKAVGAVVGIGRHTAKRMHDTSKKYPMELFYEVPHIKDDARIAVCEGAAEGVLLAHPIDVMGCCSGGT

SEQ ID NO: 199456 - protein, 48 aa, Zea mays
  unsure (1)..(48): unsure at all Xaa locations
  Clone ID: MRT4577_113479C.1.pep
SXSFFGFQXACIPNARLNFYQLSSKNKKSRHHESKWQXDENNFIDYYK

SEQ ID NO: 199457 - protein, 105 aa, Zea mays
  Clone ID: MRT4577_11347C.1.pep
SARGSSTAFLVALPPVRLGGGSSGAFTTPVVGHCGFLLRHLGGDVRAFKQRHRWRRERRKVLKDIAGAQDVTEHASYHKPTVTGAAVRRHSYEEAWHVRLEGGAL

SEQ ID NO: 199458 - protein, 38 aa, Zea mays
  Clone ID: MRT4577_113480C.1.pep
DDGQLPGVKALDHDGVVPPFGVNDGLEALRVEHDAGDP

SEQ ID NO: 199459 - protein, 105 aa, Zea mays
  Clone ID: MRT4577_113481C.1.pep
LEPGTRRAEEGDEQSAQRRMHIAGQNRARGARRCAEGLERRSNRRSEGLHHALLHTIVACLYGYSRRWKFPSRRWLLRCSAPSVPPQQRCDATADGSGQRWRPSE

SEQ ID NO: 199460 - protein, 313 aa, Zea mays
  unsure (1)..(313): unsure at all Xaa locations
  Clone ID: MRT4577_113482C.1.pep
MAKLQVTPGAAFTEYELNFQGLYMXHAXLGPKANQAAILESKAKIGIGATVVNNWAVYDGPGPGAKLVGRAQGLHILAGNWVNSFTLVFEDERFSGSTLEVRGITVETGEWAVVGGTGQFAMANGIISKKFHEQRSDGNVIELSVHAFCPLLKGKRGAVAKVGPWGGSGGSPMELTEAETPMRLESITVRSGVAVNSISFSYVDSAGHKRSAGPWGGSGGQPDQVQLAESEVVTQVSGTYGTIDDDDRTVITSIKFVTNLDKTYGPFGAYGDGDDTSFTVPVQPGSXAIVGFFARVGGAGDYLDAIGVYVRPL

SEQ ID NO: 199461 - protein, 54 aa, Zea mays
  unsure (1)..(54): unsure at all Xaa locations
  Clone ID: MRT4577_113483C.1.pep
RPLQGARLVHLMVAPQGDPIDRHFPGPLAGWSAPAAISRCGXKKXLAGTQRRER

SEQ ID NO: 199462 - protein, 59 aa, Zea mays
  Clone ID: MRT4577_113484C.1.pep
TIQQQSYSGLKVLKGPKERTESPIGSKREMKVHHEMLLCVSTSHIRNNAYLERLEHMHA

SEQ ID NO: 199463 - protein, 60 aa, Zea mays
  Clone ID: MRT4577_113485C.1.pep
CSRGDGVLVCVVVSCSVWGFRCSPRNQDSAWLASYGDEAVCVLKGDGQCRASSISSRRKV

SEQ ID NO: 199464 - protein, 34 aa, Zea mays
  unsure (1)..(34): unsure at all Xaa locations
  Clone ID: MRT4577_113486C.1.pep
ILWLEVVFCVKGLAQGVILGGKRLXYLQVYIFIL

SEQ ID NO: 199465 - protein, 515 aa, Zea mays
  Clone ID: MRT4577_113487C.1.pep
MDRFGNYKNYQTRRYEDGDDDAKQMLRPWEVPKGDWFPSDFIVGAATSAYQIEGGWNEGGKGPSTWDHFCHSFPSLIADGSNGDVAANSYHMYHEDVRLMKEIGLDPYRFSVSWSRILPKGTLEGGINQDGINYYKKLINLLLAEGIEPFITIFHWDTPQALVDKYGGFLDRRIVKDYTDFAMVCFENFGDKVKNWLTFNEPQTFSSFSYGIGLCAPGRCSPGQKCANPIGNSLIEPYIVGHNLLLAHAEAVDLYNKHYKDENGRIGIAFDVMGRVPYEKSAFVDQQAQERSWDINLGWFLEPLVRGDYPFSMRSLVRDRLPFFTVEEQERLVGSYDMLGLNYYTARFSKHIDISPNYSPALNTDDAYASQETYGPDDKPIGPWMGNPWIYMYPDGLKDLLMIMKNKYGNPPIYITENGMGDVDNGDLPMEDALNDQKRINYLQRHIAVIKDSMELGADVRGYFAWSLVDNFEWTAGYTERYGIVYVDRNDGYKRYMKKSAKWLKEFNTEKAGSA

SEQ ID NO: 199466 - protein, 440 aa, Zea mays
  Clone ID: MRT4577_113488C.1.pep
MAALCSASPAISAAASLGSPARVVASFLRLRLRLRAAKRSCSHAPAPSWRARRRFAASAAEAEECSGVETLIPPDNRIPATIITGFLGSGKTTLLNHILTAHHGKRIAVIENEFGEVDIDGSLVAAQTAGAEDIMMLNNGCLCCTVRGDLVRMIGELVNKKKGRFDHIVIETTGLANPAPIIQTFYAEDVVFNDVKLDGVVTLVDAKHARQHLDEVKPKGIVNEAVQQIAYADRIIVNKIDLVKEPEVLSLVERIRGINHMANLKRAEYGKVDLDYVLGIGGFDLERIESAVAEKSHEDHAEHDHEHHEHEHEHENEHDHDHHHHHDHDHDHHAHDHTHDPGVSSVSIVCEGEMDLEKADMWLGNLLLEHSEDIYRMKGLLSVSGMPQRFVFQGVHDIFQGSPERMWEPNEPRINKIVFIGRNLNKEELDKGFKDCLLKK

SEQ ID NO: 199467 - protein, 202 aa, Zea mays
  Clone ID: MRT4577_113489C.1.pep
MVSSSSPVVNVYPLANYTFGTKEPKMEKDTSVADRLARMKVNYMKEGMRTSVEAILLVQEHNHPHILLLQIGNTFCKLPGGRLKPGENEIEGLKRKLCSKLAVNSPSFPPNWQVGECVAVWWRPNFETVMYPYCPPHITKPKECKKLFIVHLSEREYFAVPRNLKLLAVPLFELYDNVQRYGPVISTIPQQLSRFQFNMVSS

SEQ ID NO: 199468 - protein, 152 aa, Zea mays
  Clone ID: MRT4577_11348C.1.pep
MATAATTTRRPSGPVLSAAHYRYASPTRVSLSGAGQSVSVSVSSSSRGRRTCMCSPTSHPGSFRCSLHKERATKPPPPPLTTTSRLCAAGRRMGSALVRIGAVEGGQCARRALAATTAQHRRRVGAGAGRPRPSRLSAVSVAGDRPGDNGHL

SEQ ID NO: 199469 - protein, 28 aa, Zea mays
  Clone ID: MRT4577_113490C.1.pep
LHAFGSFFFFFFFFFFFFFFFFFFFFFF

SEQ ID NO: 199470 - protein, 203 aa, Zea mays
  Clone ID: MRT4577_113491C.1.pep
MVGAPSSPVVNVYPLANYTFGTKEAKMEKDTSVADRLARMKVNYMKEGMRTSVEAILLVQEHNHPHILLLQIGNTFCKLPGGRLKPGESEIEGLKRKLCSKLAVNSPSFPPNWQVGECVAEWWRPNFGAVMYPYCPPHITKPKECKKLFIVHLSEREYFAVPRNLKLLAVPLFELYDNIQRYGPVISTIPQQLSRFQFNMVSS

SEQ ID NO: 199471 - protein, 202 aa, Zea mays
  Clone ID: MRT4577_113492C.1.pep
MVSSSSSVVNVYPLANYTFGTKEPKMEKDTSVADRLARMKVNYMKEGMRTSVEAILLVQEHNHPHILLLQIGNTFCKLPGGRLKPGENEIEGLKRKLCSKLAVNSPSFPPNWQVGECVAVWWRPNFETVMYPYCPPHITKPKECKKLFIVHLSEREYFAVPRNLKLLAVPLFELYDNIQRYGPVISTIPQQLSRFQFNMVSS

SEQ ID NO: 199472 - protein, 49 aa, Zea mays
  Clone ID: MRT4577_113493C.1.pep
FWVNEKFNSSLFPFPDLKVSFERGINGLQLKLGSVHLCNARSACRGGFS

SEQ ID NO: 199473 - protein, 104 aa, Zea mays
  Clone ID: MRT4577_113494C.1.pep
WRCWVGSFRLNKRTDQGRENKNSCRAKDPWGGKQHTVWDKMQPGRAYFHTNTYISLRPAGGGGPTHPLTCRKKSGWGPPLPGCWPGQGGGRGGYRSLPRRGRWA

SEQ ID NO: 199474 - protein, 50 aa, Zea mays
  Clone ID: MRT4577_113495C.1.pep
KGLSRVGWAQWLPPLMSSRSQGPGFESASLQNKQRQGCLGIPFPIGLEST

SEQ ID NO: 199475 - protein, 84 aa, Zea mays
  Clone ID: MRT4577_113496C.1.pep
RAWPCLLCRPWRCRPAGPRCSLSAEFSLLASLVLGVALVLRQQTLVVACRLGALLRARQVLHPGLCGPVVLPAPVVSARRLVLT

SEQ ID NO: 199476 - protein, 65 aa, Zea mays
  Clone ID: MRT4577_113497C.1.pep
YIGQTEQQHSHLLRVLQFYSGYHSTNQAARVLSTVYCHLHCCYRCDGAKWHIDPFFTILLPIVVP

SEQ ID NO: 199477 - protein, 68 aa, Zea mays
  Clone ID: MRT4577_113498C.1.pep
ESGGHTSSTLPYYCLFAFSFYSQGLNFGWEQYLKGQIRRPCNLETHLRPNPGGGTTEGTPGVHSFWTG

SEQ ID NO: 199478 - protein, 103 aa, Zea mays
  unsure (1)..(103): unsure at all Xaa locations
  Clone ID: MRT4577_113499C.1.pep
ETQIFLFSKFFFAFPPYFFSFNQGGALNLPAYLHHHQVIPFXQLVGVGPPPFFVQPQFFPFYKALGANXAPLLKLQQLVPFNPLFFENPKGFFQQPPIGGAPF

SEQ ID NO: 199479 - protein, 182 aa, Zea mays
  unsure (1)..(182): unsure at all Xaa locations
  Clone ID: MRT4577_11349C.1.pep
MPSPRSPKPQPTATTRRPLSWTWTASLIRPRRRPGAPTTGKXLAARWREIHGSDHWVGQLDPIDEVLRGELIRYGELAQACYDSFDYDRFSPYCGSCRFPAKTFFHDVGLGGAGYQVSRYLYATCNXSSSPNFGGRKHSSAANGKLWSELGTFIGYVAVSTDEETARLGRXTSAVSWRGTIP

SEQ ID NO: 199480 - protein, 106 aa, Zea mays
  Clone ID: MRT4577_1134C.1.pep
WRMLKLSVHRDEARLAFPTADTCNLPHVALIYKKCDLLPRPLDVRSLHANLIHEVRCNTRYMRIYIFLVAQDNTNLAIYFHVIETDRMLSLLYIFFTPKNNKKKCP

SEQ ID NO: 199481 - protein, 77 aa, Zea mays
  unsure (1)..(77): unsure at all Xaa locations
  Clone ID: MRT4577_113500C.1.pep
LRQLGARRGELEHAERLYRFCFVALSMSSALPIVEPYRLSTXRPHDDERTSIGEGKRQTTASPRGAIIKQWQQVRLK

SEQ ID NO: 199482 - protein, 109 aa, Zea mays
  unsure (1)..(109): unsure at all Xaa locations
  Clone ID: MRT4577_113501C.1.pep
MVARRIAPAPPSAASASSSPSPPQPSSWLPSASFGPHQESAAMEPPVRRPRVSFSYAAFPPSTRAPPLTEMPVAPPDSSSRXSXPASLPPLPSPPRLGFRERLVAATRT

SEQ ID NO: 199483 - protein, 212 aa, Zea mays
  Clone ID: MRT4577_113502C.1.pep
MDEVVSQILEKQVLSAAKAVEDKLDEEIAALDRLDPDDIEALRERRIQQMRRAAERRAKWRALGHGEYTEVPEKEFFSIAKASERLVCHFYRDNWPCKVVDKHLSALAKQHVETRFVKVHAEKAPFLTEKLRIVVLPTLAIVKNAKVEDYVVGFDELGGKDDFSTEDLEERLARSQVVFLDGEGSAHASKQAAAATKRSVRQSGTGDSSDSE

SEQ ID NO: 199484 - protein, 166 aa, Zea mays
  Clone ID: MRT4577_113503C.1.pep
EIRFQPFGLPGGKPGNGGFGGDPNNLVFFSFWFQGTIAPWGFGTTGSGNFTCRGSGPGNLVRYFGIRSVPGPKWVPLKYLYLGFHLGPWMPGLGRNCGPALGWGPGGSKFLPFFLGSLVQARVFLRPPFSWGPDLPAPGPVPGPGIKVSLPLRGRYLGATLPEPST

SEQ ID NO: 199485 - protein, 116 aa, Zea mays
  Clone ID: MRT4577_113504C.1.pep
QDTSAGCWNATGTIFAMSSDECRWRDIVRGCSSLFRLTSFALGHWRLVECGWRGSARAVDVLMVVPGALARRCVCHRHKGLSVSRASRRSAWRAWSFTDPALRSSAGGSWGERDCM

SEQ ID NO: 199486 - protein, 212 aa, Zea mays; identical to SEQ ID NO: 199483
  Clone ID: MRT4577_113505C.1.pep

SEQ ID NO: 199487 - protein, 135 aa, Zea mays
  unsure (1)..(135): unsure at all Xaa locations
  Clone ID: MRT4577_113506C.1.pep
LYPATLDRPPSVHGYPHTLAPSTDPPEQAHHPHPTPQSXGSSPTPQSPAHQPTSPAIADEPSSAXPPPFQSSPIYEHPPGRXRTPHRIPAPHTKTHAASRPPGMPRPQNLRAKDPRPPPPPRKGHKPSTLTAVSL

SEQ ID NO: 199488 - protein, 87 aa, Zea mays
  unsure (1)..(87): unsure at all Xaa locations
  Clone ID: MRT4577_113507C.1.pep
LPHGVFVVFASCLLRPRKERVGSSEEGVTAYGENTYAELERVPHWSSEKLRISITXTGGFIGAHMARRQKNEGHYIIASDCKKNAHT

SEQ ID NO: 199489 - protein, 85 aa, Zea mays
  Clone ID: MRT4577_113508C.1.pep
RPPQPHSRREEAGQPASPNPHPSTRAEEKKIMAPPPPSKGQEKQQACAHEEEGAAKYRQSRKQTSAAQRRTDTNERPEKCIHLGR

SEQ ID NO: 199490 - protein, 141 aa, Zea mays
  Clone ID: MRT4577_113509C.1.pep
LLWAIGTLEAGRDSKLYYRTVYATPEEHGAARSRMRVRCNYRLLQLRLFLIVFSSAVHPACALALLLSCANWATADADANADDLRQVLGFLSVPSVLRQLSSRPSPATSTHQSAQIIGCTPIGPLLKKTGIFCIHRGSSVS

SEQ ID NO: 199491 - protein, 252 aa, Zea mays
  Clone ID: MRT4577_11350C.1.pep
IEASPGSLSVGALPAACTSPWQWRLPPPSAPPRSLVLTCSLSRTLICPCSRINPELSCMDPADVPEGIDPKSACRVEVTVNSYFTMQDGRKEYNRGKTVSYVVDSEEYSVIDLEKDIASEFKWGSDQQPNFWVLTRGNMTSKLASDAQLLDLLRASRVVKLLMIVGNCEHNVGHGHIPATWNIQEEIPVAVNIEEEMLDAMDNNLEEADGGFAWAEIPEYGETTAGPPMAKEEEKEHFITVGCDPNGDSQLE

SEQ ID NO: 199492 - protein, 81 aa, Zea mays
  Clone ID: MRT4577_113510C.1.pep
RPSVREAKKKARLERFGQGTNVDKAEEEKRKARAARFGDTSSGSAQENGKTARSWTQLLLQAQLDFSSPALMRSQILSDFW

SEQ ID NO: 199493 - protein, 185 aa, Zea mays
  unsure (1)..(185): unsure at all Xaa locations
  Clone ID: MRT4577_113511C.1.pep
MAPRRSAAETADADRARLHQLGYKQELKRGLSAVSNFAFSFSIISVLMGVTATYNTGLRYGGPASMTLGWLVVTVFNGCVALSMAEICSAYPTSGGLYYWSAKLAGKEWAPLASWVTGWFNIVXQWAGTTSVDFSLAQLIQVIVLLGTGGAXNGGGYLASKYVVLAIYGIIXRLHGLINSLPHRW

SEQ ID NO: 199494 - protein, 161 aa, Zea mays
  Clone ID: MRT4577_113512C.1.pep
MGAGAGAAPGTTRTRRSAARVYILQYKNTTEAAVDAARIILRQCALSGTVKRVIHTASVTAASPLKEDGSGYKDFADESNWTPLNLSYEFTNAYLDVRNTVLYRTNLYIDYSCACTRTQDYVRSKTLPEEELPSHGFFFLFSKEDHRTPGVGGGHPSVRAR

SEQ ID NO: 199495 - protein, 49 aa, Zea mays
  Clone ID: MRT4577_113513C.1.pep
GSEIYPTCIQQTFYQPYLKQALPTVNCPPKHPPLKQNKPLPLTKLQKTQ

SEQ ID NO: 199496 - protein, 88 aa, Zea mays
  Clone ID: MRT4577_113514C.1.pep
AGPEDIGGLSSLVHRGRPFHQCAQVLLQDVTRQHGPLWMSADIISVARHKRAGAGPTGAKRGLLLFVLLCDEYESFSLERCTSDPTTR

SEQ ID NO: 199497 - protein, 39 aa, Zea mays
  Clone ID: MRT4577_113515C.1.pep
RDLEVHFFVSLNASFVSVILLRRYSRASRLVDADGFARR

SEQ ID NO: 199498 - protein, 38 aa, Zea mays
  Clone ID: MRT4577_113516C.1.pep
YIPTIIFDLYSTPSIRILFGQHSRTHYSSSRSCTDVSV

SEQ ID NO: 199499 - protein, 68 aa, Zea mays
  Clone ID: MRT4577_113517C.1.pep
GYLSMLLVRVDVCRPHRGCGRGDNLFSWAHNAHLKAMLEKLRAKHPNVRIIYGDDYTPVGQFMLKPEK

SEQ ID NO: 199500 - protein, 134 aa, Zea mays
  Clone ID: MRT4577_113518C.1.pep
MALAAAIFVVLCSVVASARGRREKALKLPPGPRGWPVLGSLGALAGALPPHRALAALAARHGPLMHLRLGSYHTVVASSADAARLVLRTHDSALADRPDTAAGEITSYRYLGIVNTPCGAYWRMKRRLCATEII

SEQ ID NO: 199501 - protein, 228 aa, Zea mays
  unsure (1)..(228): unsure at all Xaa locations
  Clone ID: MRT4577_113519C.1.pep
MEHDGTTNLAVTEAVRSVQLLKIDGYCATATMGASEFIKFRWHIDGHEWERDDDKLRVNLSCRLVCPSPTSQRRHLGTCWSEEKRVSHVFASDSKCSPELLLILKHELPSSGYLVDDSLTVECTVTVLRDLDAATDKALSSLPVPPPSDLHQHLGDLLQSEDGADVTFRVXGESFAAHRAILAAGSPXFLKASSSXGMEERSSAFXVEVKSMGXARCVRSMLRFIYTD

SEQ ID NO: 199502 - protein, 94 aa, Zea mays
  Clone ID: MRT4577_11351C.1.pep
ELGWAKLGWAEPLRGLKTHDARGPLNRLKTRIKIRNGTRRTLNLRQRNVLRHDATPMTLRFWFIHDTDTCRYTGLKLGRRSKRGKRRESNARIW

SEQ ID NO: 199503 - protein, 53 aa, Zea mays
  Clone ID: MRT4577_113520C.1.pep
PSVRVHGPFGFVSGYNQVAISCLVVSAGLMSSTSVRLWLAGIIISVVGGNGGY

SEQ ID NO: 199504 - protein, 222 aa, Zea mays
  unsure (1)..(222): unsure at all Xaa locations
  Clone ID: MRT4577_113521C.1.pep
MEHDGTTNLAVTEAVRSVQLLKIDGYCATATMGASEFIKFRWHIDGHEWEVRFYPDYWYFFEDEDCFSTYGDDDHSEWVGLKLILVSEPQRDDDKVRVNLSCRLVCPSPTSQRRHLGTCWSEERRVSHVFASNSKCSPELLLILKHELPSSGYLVDDSLTVECTVTVLRDLDAATXKALSSLPVPPPSDLHQHLGDLLQSEXGADVTFXVSGESFAAHRAYS

SEQ ID NO: 199505 - protein, 57 aa, Zea mays
  Clone ID: MRT4577_113522C.1.pep
IRVLYCLTSSFWCSQVFAVYTISLSPSFLCFVSCARELNASRAGDFVVYVYASDDVV

SEQ ID NO: 199506 - protein, 175 aa, Zea mays
  unsure (1)..(175): unsure at all Xaa locations
  Clone ID: MRT4577_113523C.1.pep
NIIINFQNTLSIHLISSYPXIXILPNPXLHNSNXISFFNKNPFYTLFHLFHNQNNIIYTLHHXFXSXXIFQQISXLFTLSITKPHLIYHNTFTFSIHSSXLHQKHFFNXLFNSTHQSKNHSLFXPPPPPYXNNXSFYITIIKKSXHTSFQNNFXXPKPKILLFTTTHILIYSPPP

SEQ ID NO: 199507 - protein, 40 aa, Zea mays
  Clone ID: MRT4577_113524C.1.pep
LVNLNKSLEGGLNFIPLKNQSIPVFKGQGKKLKRFRKRFE

SEQ ID NO: 199508 - protein, 84 aa, Zea mays
  Clone ID: MRT4577_113525C.1.pep
AGRIFGKTYRRYAGTVTNRSLKTVHELHMGICKLYGQVWGVDMVRNGLLLPSWLPALLAGKSARFVYVQAVPPGDDWVTGYKLI

SEQ ID NO: 199509 - protein, 83 aa, Zea mays
  Clone ID: MRT4577_113526C.1.pep
KTAAESLRKCTLRWAGLQPFVKVILLMLIETSACKDRCFDPRHLKVYRELYDIHHVDAVKFLRMDLISEANDQHVLVSISNSE

SEQ ID NO: 199510 - protein, 36 aa, Zea mays
  Clone ID: MRT4577_113527C.1.pep
ESDSSVLPLARCSGAAIVNAKNNGFDWLVQDYPEGP

SEQ ID NO: 199511 - protein, 108 aa, Zea mays
  Clone ID: MRT4577_113528C.1.pep
EDGSGTNAQDVGGSSSPALHGAGTILLGWWYDLRTQTHTDVAVAARMVDFLIGWFMHRMVLGDYPPVMRKNIGYRLPTFTYEEPARVSGSFVFVRFNLALTRPPRKWH

SEQ ID NO: 199512 - protein, 64 aa, Zea mays
  unsure (1)..(64): unsure at all Xaa locations
  Clone ID: MRT4577_113529C.1.pep
PGSASGTGRYGPGPGLPVGPVAGALGGLPIDXPVKSKEDKGPERVEKKVVPPGRDDSSEFRGAY

SEQ ID NO: 199513 - protein, 63 aa, Zea mays
  Clone ID: MRT4577_11352C.1.pep
ATQTSTRESSYVGLEQRCCPRSPVRLVHTSTLAEWTPPPLLHLQIRRHSTSGDSLLSAYKPVG

SEQ ID NO: 199514 - protein, 49 aa, Zea mays
  Clone ID: MRT4577_113530C.1.pep
GHKGYGTKGSPRPGSRLSGRIRVARATRKSKIIFWAPLKPQKKKVKRPK

SEQ ID NO: 199515 - protein, 70 aa, Zea mays
  Clone ID: MRT4577_113531C.1.pep
MSDQVQEILEVPSEFVRDGVQFMRRCTKPDQKEFLRLCQAVGVGFLIMGAVGYVVKLVHIPLNHALVGSA

SEQ ID NO: 199516 - protein, 264 aa, Zea mays
  unsure (1)..(264): unsure at all Xaa locations
  Clone ID: MRT4577_113532C.1.pep
MGKLTLGHRGEASEPDFFRGVLGELVLTFLFVFIGVGAAMTDGATTKGSTAGGDLTAVALGQALVVAVIATAGFHISGGHVNPAVTLSLAVGGHVTLFRSSLYIAAQMLASSAACFLLRWLTGGLATPVHALAEGVGPLQGVVAEAVFTFSLLFVIYATILDPRKLLPGAXPGAGPLLTGLLVGGNSVAGPALSGASMNPARSFGPAVASGVWTHHWVYWVGPVRRGPLAVLVYECCFMAAAPTHDLLPHSVHRAVGSSQCVLV

SEQ ID NO: 199517 - protein, 36 aa, Zea mays
  Clone ID: MRT4577_113533C.1.pep
FGVKKKKKKKKKKKKKKKPKPKKKTQKKKKKKKKKK

SEQ ID NO: 199518 - protein, 103 aa, Zea mays
  Clone ID: MRT4577_113534C.1.pep
GGENLTPYINTQKLPIGHHQTWAKQGLQRAQKGGIKMKKNKVPLNKKGTGTWKGRGPSNPPKKKKTLFRVKNPRETKPPPLFFGGSTGTSWEKKAWGKVKTPH

SEQ ID NO: 199519 - protein, 145 aa, Zea mays
  Clone ID: MRT4577_113535C.1.pep
MGSLFTSVCPSLVLRGIGETIASRSIPKILLLNGPYPRETAGLSASGFVTAITDSLNRTYGDPHKSLKNHTNDYVNAILVPEGGQVPLDIENLAAQGIFHVVTVKSIHDPKVGVIFDARSLIQALTILISEHMDMCVSKVQNVVM

SEQ ID NO: 199520 - protein, 35 aa, Zea mays
  Clone ID: MRT4577_113536C.1.pep
LTVSNNIFYLFTTWIRTHVSFDCQKKKRKKEKEKE

SEQ ID NO: 199521 - protein, 54 aa, Zea mays
  Clone ID: MRT4577_113537C.1.pep
DSSSRWPDMKIIKHLVRVLRRGSSLVVVVVSEPQHLNLSLSLSLSRTACAAHAT

SEQ ID NO: 199522 - protein, 86 aa, Zea mays
  unsure (1)..(86): unsure at all Xaa locations
  Clone ID: MRT4577_113538C.1.pep
QGKAWVRHRHRQPPRRRYSPSCRVDLWPDLEGLQRDLARGXRSTAPPTERRGXAISLVPSLARCVGQQEERRSHAYELCCVLCVCV

SEQ ID NO: 199523 - protein, 97 aa, Zea mays
  unsure (1)..(97): unsure at all Xaa locations
  Clone ID: MRT4577_113539C.1.pep
FPVGREGPXSEAXAEHSXRXXAWPXGAGRXLPALVNPVRFLPSLSCALRPLPXCFACCFLLQSQLSRGRAVXAAPLLEFWDQTYWAVLGELTLPLQL

SEQ ID NO: 199524 - protein, 93 aa, Zea mays
  Clone ID: MRT4577_11353C.1.pep
RRGFRQTLTHLVVHASATVVGGVGCSVDGDVGVGGGEDQGIISREVGAPGRVSLGPAFIRKMIFPNTMPVPYRYVSSSANASSYLVRASLAVS

SEQ ID NO: 199525 - protein, 103 aa, Zea mays
  unsure (1)..(103): unsure at all Xaa locations
  Clone ID: MRT4577_113540C.1.pep
QTSTIESTTVHQQWQANISGLIMLLVLTASAATATIVTQCSQADITCLNTANLLPAESSVCENSIVQPYRIQQAITAGILPLXPCTSNNNXALLHKVPXLVHL

SEQ ID NO: 199526 - protein, 50 aa, Zea mays
  Clone ID: MRT4577_113541C.1.pep
GQRPARRSQRRLSPMTASMVSIGLVTVLDPPSTMLVTIIKKLRVGTRTRE

SEQ ID NO: 199527 - protein, 96 aa, Zea mays
  Clone ID: MRT4577_113542C.1.pep
RSSTRLALCNELYTVVREVLDAIPPFETTRSGCSPGLLALSSLRISVEKAKNLLQYCSESSKLYLAVTAESVLTKFENSRQGLLESLHQVEETIPE

SEQ ID NO: 199528 - protein, 466 aa, Zea mays
  Clone ID: MRT4577_113543C.1.pep
MASSSSALLALPVLVLSIAFSIVHGTADDAQRYMVVASSSLEPSEVCSGHKVTSSKNGATVPLVHRHGPCSPVMSKEKPSHAETLGRDQLRAANIHAKLSSPRNSSAKELQQSGVTIPTSSGYSLGTPEYVITVSLGTPAVTQVMSIDTGSDVSWVQCAPCAAQSCSSQKDKLFDPAKSATYSAFSCSSAQCAQLGGEGNGCLNSQCQYIVKYVDHSNTTGTYGSDTLGLTTSDAVKNFQFGCSHRANGFVGQLDGLMGLGGDTESLVSQTAATYGKAFSYCLPPPSSSTGGFLTLGAAAGGTSSSRYSRTPLVKFNVPTFYGVFLQAITVAGTKLNVPASVFSGASVVDSGTVITQLPPTAYQALRTAFKKEMKAYPSAAPVSILDTCFDFSGINTIRVPVVTLTFSRGAVMDLDVSGIFYAGCLAFTATAQDGDTGILGNVQQRTFEMLFDVGGSTLGFRPGAC

SEQ ID NO: 199529 - protein, 113 aa, Zea mays
  unsure (1)..(113): unsure at all Xaa locations
  Clone ID: MRT4577_113544C.1.pep
MKRNTRVTSSRRKCRKEHFTDPSSVRRVLMSVGLSTELRHKHNVRSIPIRKDDQVLVARCTYKGPKEKEGHVYRRRWVIHDQRITLQXANGYTVHVGIXLSKVIVSDLKLRKD

SEQ ID NO: 199530 - protein, 418 aa, Zea mays
  unsure (1)..(418): unsure at all Xaa locations
  Clone ID: MRT4577_113545C.1.pep
MAAKQISFRGXKMDIHTKLMRRYRQVPEWWFICILVASVSATMLTCEYYIEQLQLPWWGVLLACALAIFYTLPIGILKATTNQVWTPNKHECRCKTXVYSSNIQPRSRNTANNTSVTXPGLNVITEYIMGYLYPGRPMANMCFKVYGYVGPHQALEFLQDFKLGHYMKIPPRAMFTAQVSSTSHTNYKYYTNKRMITTCSSYIYNVVHIGKEQVVGTLIAGSVYLGTIWWLLDTIPDVCNTELLPAGSPWTCPYDHVFYDASVLWGLIGPRRIFGDLGTYSAVNWFFLGGAIAPLLVWCTHKAFPAQKWIRHVNAPVLIGATTFMPPATAANYTTWILVAFLSGYVVYKYRRNWWERHNYLLSGALDAGLAFMAVLLYLCLGLENKSLNWWGNDLDGCPLASCPTAKGITVDGCPVHN

SEQ ID NO: 199531 - protein, 86 aa, Zea mays
  Clone ID: MRT4577_113546C.1.pep
HVFVKNAVGLVVVSPYLVFAGKKSPLSNLTSKKKKVVTFSIGTSTTPTVVCKVLVWSTIVTFRGTTSITTSSFISVYVVTLTNGLF

SEQ ID NO: 199532 - protein, 91 aa, Zea mays
  Clone ID: MRT4577_113547C.1.pep
NTVARERSRKKETKCFREGDRSAAAPLSIYIYRRRALSFWFHVVHGQNKEPFPFSYLKGNCSTHCFDILQTRTPQPNAILKHRFITGCQIG

SEQ ID NO: 199533 - protein, 62 aa, Zea mays
  Clone ID: MRT4577_113548C.1.pep
LRRLQSVWTSRHEVCTQPMFLVTLILKPTQSVRAQSDTKNTLYATLRDLNNVSNEDILNVHR

SEQ ID NO: 199534 - protein, 104 aa, Zea mays
  Clone ID: MRT4577_113549C.1.pep
PAPGDTRESGVCAGPCSREPGCMDAGFQLPPFLLLKYQIGLPNLCTIFQSILEAYIFQTLYIPVHSPYGLFWLWLLMSMLSVGRILLLSYPEVMLSSGSPLLEP

SEQ ID NO: 199535 - protein, 104 aa, Zea mays
  Clone ID: MRT4577_11354C.1.pep
GPVPLWCASVFGHGRCWGLCHIDPWWDVGKCCKRLKVDIGGGFSVGECKGFGRLLVLHVGAVMDFPCPAGESRPGSSTSPAGWGLFFFCIFLFLFFFFFFFFLY

SEQ ID NO: 199536 - protein, 36 aa, Zea mays
  Clone ID: MRT4577_113550C.1.pep
HSAKHHSHYGLYAVPHLAKHTLLLPNIHHVAIIPVL

SEQ ID NO: 199537 - protein, 168 aa, Zea mays
  Clone ID: MRT4577_113551C.1.pep
MMGRTSVAAAAALLVLAACAALPARTAANKISINWKPNVNYTDWLKQHSPFYKDDWLVFYYTAGQADVVQVDEVGYNKCDSTNAIYNYSKGRSFAFQLNETKTYYFICSYGYCFGGMRLAIKAEKLPPPSPPPSASDRSAAAIAAFARSHAPVIYAAVAVLAALLRMV

SEQ ID NO: 199538 - protein, 82 aa, Zea mays
  Clone ID: MRT4577_113552C.1.pep
LQLKPGEGMDLFVSPRKETVSPPSTNAPELADNPSPTRGIGFRLHKDVSGVYNISNYFCSVPFFFVCSRVRPTVIFSPFILV

SEQ ID NO: 199539 - protein, 157 aa, Zea mays
  unsure (1)..(157): unsure at all Xaa locations
  Clone ID: MRT4577_113553C.1.pep
LRPDRYPLADAWADACAVRVGGRVGGSPNVNYTDWLKQHSPFYKDDWLVFYYTAGQADVVQVDEVGYNKCDSTNAIYNYSKGRSFAFQLNETKTYYFICSYGYCFGGMRLAIKAEKLPLPPPXPAAAXAAAIAAFARSHSPVSHAPVILPAALLRMV

SEQ ID NO: 199540 - protein, 191 aa, Zea mays
  Clone ID: MRT4577_113554C.1.pep
PGVSSSLPPLSGQVRIACHSFFFLDLGSKCISTVHNICGTDLGQKHKQITENRAYGWIHAETTSKTGSPNFTSYPFHTFIHHRVGSSFGVRTGFKCSQTRQDGRSSYLTMSSRQGTTPKTTNFGRTYLATTERQPGTTARDPTDGGTPALGDELSGSRHCRAPSLTRLPIPAITGGGGEKQKLKNRLTIRI

SEQ ID NO: 199541 - protein, 308 aa, Zea mays
  Clone ID: MRT4577_113555C.1.pep
MVGFLRAFAAASAVPAAAAAAYTLFPSSAPSSSKLRFPLPDSFLSAAASSTSGRAPNAVPPMATAAATADLSAADDKQRDSALPELTTEFMVDMKCEGCVTAVKNKLQTLEGIKNIEVDLSNQVVRVLGSLPVKTMLDALHQTGRDARLIGQGNPNDFLVSAAVAEFKGPVVFGVVRLAQVNMELARVEATFSGLSPGKHGWSINQFGDLTRGAESTGNVYNPPDHLSDKPLGDLGTLEAGENGEAHFSGPKEKLRVVDLIGRSIALYATEDRSDPGIAAAVIARSAGVGENYKKLCTCDGVTIWESS

SEQ ID NO: 199542 - protein, 251 aa, Zea mays
  unsure (1)..(251): unsure at all Xaa locations
  Clone ID: MRT4577_113556C.1.pep
PAGSPENNNPVKDLTSPDIVCNVNGGKAAPKFATAVXGDEVTFEWYHNTRGDDIIDGSHKGPIITYIAPYTETDGTGAIWTKIAEDGLEGGQWAVDKLIKDKGKATFTLPSSLKAGKYIVRQEIIAGHEADXPSRTTAPRGAQFYPSCAQVEITGSGTAVPDENFDFQTGYTYTDKGIXFDVYNAQSYSFPGPKVWQGTSSGSGSGPGSAAPAPTXAETQAPAPTPTXFTVVKPSEEAAAPTQAPFTPVIL

SEQ ID NO: 199543 - protein, 90 aa, Zea mays
  Clone ID: MRT4577_113557C.1.pep
FCRLQPYRMFDMTLAPADELYITAVPRDKSHKAFAELPRRKSEKLAAPQRKAAARTHGSPSAAGVAACGRSKNLTRKRTRFFPLYIAARP

SEQ ID NO: 199544 - protein, 96 aa, Zea mays
  Clone ID: MRT4577_113558C.1.pep
VRGSAPGRIGGDAINQHLHARGRPQVEEEDGPVLVLLLVPGAAVLGPPHAPRRLPPPRLLLRESRSILRFPACFALLLQPVAFLGRWSSGSVCCSP

SEQ ID NO: 199545 - protein, 446 aa, Zea mays
  Clone ID: MRT4577_113559C.1.pep
MDLYDEGEEMALQDGDSCLAPRASRGGCEVDLQWADGLLEGADRKRRAREGFKDEVHFVQEMDEVDGSGKRSKPPSPQPHTPDIREAHAPGRRRTVVAGGGELSCGGGDLIGQIGRDLSINCLLRLCRSEYGSVASLNHDFRSLVRGGEIYRLRRQNNIAEHWVYFSCNVLEWDAYDPYRKRWISVPKMPPDECFMCSDKESLAVGTELLVFGMAHIVFRYSILTNSWTRGEVMNSPRCLFGSASVGEKAYVAGGTDSFGRILSSAELYNSETHTWTPLPSMNKARKNCSGVFIDGKFCVIGGVTNNNMILTCGEVYDVQSKTWRVIENMSGGLNGVSGAPPLVAVVKNELYAADYSGKDVKKYDKQNNGWITLGKLPERSVSMNGWGLAFRACGERLIVIGGPRTPVGGMIELTSWTPDDKPPVWNLMDRRPSGNFVYNCAVMGC

SEQ ID NO: 199546 - protein, 87 aa, Zea mays
  Clone ID: MRT4577_11355C.1.pep
CRCSMFPVCQAKDWVCLLGGQYVQASALPFACWGIGFFLLQVLFSVLSGWGAGPPPLVRGGFGWRVWLGWPASVPFPPMRPDPNRSY

SEQ ID NO: 199547 - protein, 75 aa, Zea mays
  Clone ID: MRT4577_113560C.1.pep
LGAPDVSLKLRAKSPLQPVRGLLPAQKNFCLEKGKMVRVHVYFTPTILLDVFLGLFHFAQGLEFQYHAPFLKTQP

SEQ ID NO: 199548 - protein, 168 aa, Zea mays
  Clone ID: MRT4577_113561C.1.pep
YQSQNRKGCPPSLPPFPEKKPTSSFRPKSIRTTEQRRLRCSSWDGHYHYHTSTDRRQGGRQSPARSPPTTTTTGSWTGISVPPPRPRSETHGSARQPQPAGWVGTGWMEKKGFSGAGKANPVSRKEEGFEQRRGLAAPLAGYWRRRGAERKEAILGLGSRAGGVPRAE

SEQ ID NO: 199549 - protein, 70 aa, Zea mays
  Clone ID: MRT4577_113562C.1.pep
AARHRVICSAAAGHAEAEAEAEPHLQGHRQGADGSSVVTLAHGKKVERSEAGVTDNEEDALVYSSLKKKR

SEQ ID NO: 199550 - protein, 122 aa, Zea mays
  unsure (1)..(122): unsure at all Xaa locations
  Clone ID: MRT4577_113563C.1.pep
GRVGRLVWESAVIFHVTTKHGGTFDNMWKLTXQAHCSNCXLHLATRLFQAINEQLPIVSYTEFLELAGVVVIDVTGGSDVPFHPRRQDIPDAPPEGGLPDATXNVLXLRQFFSTQMGLVNQD

SEQ ID NO: 199551 - protein, 719 aa, Zea mays
  Clone ID: MRT4577_113564C.1.pep
MARVRSTARVTRDGEEAEATETAPISEVMRQSGLVVTEEAIEQAGMPMMIKMGYFGEAEKKLIRFAGEETTPTPKNVEVLTPNAIVRLSVFIWALRSQGMDPNAEAFCRVHELHYQTKAREDGLHENFGCYNFTYRKDMKASVLSYLTKWPTGWKSEWFYVKADEKKREKLKTLVLSPLSLSFDLTMSLCRMTSESPCQQAVAEFRVVAEQINTRDLVQEYLANKTSPTLSEFSMTKLKGTNKGLELVRLPYRFKFEKQFKEPCQEWLEMIETICNEVLGNYTKKEDQLMTAAFGTRPKRRLNRVMDALNFEYTDYERLNKGAEGQKRKRIVGVLSRQAARMVKEDEEAIKKRKSSPEPKVAALKKRKAAALKPKTTKIEEETPSTPSAADVEEILKVMTKSLPIKLLSPLGPHLTKLLQKEETSVAKKVIGPKRRRIVTVIEAIEETPPPASTSKIIPAVEVVASVEAAPTEAATAKAATAEETNLKSTLSDIDRMLLDMAAEEDVADAKETLATVPEKGKEIAEDTSEEKGFNFQNIIGQELTKAEKEELQEYAISCGYQPGALLFGGINEESLGCIRDRTRAKVIADEGYFAQSMLLSKALRMQQDLEDKKNEVIIEGLESKIKDHEAALEKKDFVLQTMEGSLAEAQAEIAKLNSELLLKSESFEQEKKNFVAKLEAEVEKSLNLQKSLKELQDKCLDFGNRMMKPKSNDSKLDG

SEQ ID NO: 199552 - protein, 62 aa, Zea mays
  Clone ID: MRT4577_113565C.1.pep
FSKWKKRIQGRQGPQPMFLQGSPIQSLRVLSSRESWSVKKKGRIYSKPCTQPLFSSSLLLLT

SEQ ID NO: 199553 - protein, 103 aa, Zea mays
  unsure (1)..(103): unsure at all Xaa locations
  Clone ID: MRT4577_113566C.1.pep
WQTGAPVISCFCLSLFPEGDLSVSSTSSSSLSFCYAFKANCTLHVVVISAGGIKDRNCTGKKKKKKKKKKKKKKKKKXKKKKKKKKXKKKKKXKKKKKKKKGA

SEQ ID NO: 199554 - protein, 46 aa, Zea mays
  Clone ID: MRT4577_113567C.1.pep
SLLTYQFQFIFSTANKLKSAGITSYTCQKFNHSKSYFNHMHIQSTN

SEQ ID NO: 199555 - protein, 125 aa, Zea mays
  unsure (1)..(125): unsure at all Xaa locations
  Clone ID: MRT4577_113568C.1.pep
ATPSGIHLLGRIGTHGLLWVPLRDIYLRGRVKLATLRKFLXRRQRDVPHRIVKPAAXSXADAGPKHTRTPDYATTXGLVPDXGDRHRAKNDDQIRGLHQACQMSTHVLLSAGKSRKGVMTSVEID

SEQ ID NO: 199556 - protein, 231 aa, Zea mays
  unsure (1)..(231): unsure at all Xaa locations
  Clone ID: MRT4577_113569C.1.pep
MRKVCPNLERDDALDTVLEVPIPEEMFSGGGGSCGFRFGCTSVKAWMRSHAADRCGAGEPCSMSRGELQLMLGVIGAPLVPLPVXPSSAAPSSRPXVLCEQLKTGPIESSSAKYIVQQYVAASGGERALDRVKSMYAMGKVRMTAAEQLNGSDAAGHCGGATGKXTAAXRRKGRGGEVGGFVLWQKRPELWCLELVVSGCKISAGSDXXKFAWRQKPGHQSHASRGPPGPA

SEQ ID NO: 199557 - protein, 98 aa, Zea mays
  Clone ID: MRT4577_11356C.1.pep
LTVLPGHVLRCVLRVQVAIHDAGPDRHAQPVLSLITSAYAQPRCAPLLHPRSEAGPASLCTRARPGSCSWCSAPPPCSCRWTPPVDYPPLPRVSPRLT

SEQ ID NO: 199558 - protein, 52 aa, Zea mays
  Clone ID: MRT4577_113570C.1.pep
RMMALSPQDASVDWHGPTVRKDVIFCGPVTFPSRAPARAGERSPCPPSRPPC

SEQ ID NO: 199559 - protein, 112 aa, Zea mays
  unsure (1)..(112): unsure at all Xaa locations
  Clone ID: MRT4577_113571C.1.pep
DATVHNFTTLYVDYAQITANCINHGPLSICLNTDYMHTYIESVSCTYIXDTHLDHCALIAGYGDSDFATIHLNDKPYCIIKNSXGQNXCENGYYNICRSSNILNKCCIYYMV

SEQ ID NO: 199560 - protein, 74 aa, Zea mays
  Clone ID: MRT4577_113572C.1.pep
AVPHHLCSPHVASVITVFRVRRVGPYVPHVHRNHHHLHSIPANVLIHLPHLLHPAAVPHERARDIFMVFIVLLF

SEQ ID NO: 199561 - protein, 77 aa, Zea mays
  Clone ID: MRT4577_113573C.1.pep
LPMAPAPPFINRLGPNQGGFFFVFETKKRGMGSHVLLPPLGSRGSVGLLFFPGNPFDRPPVISPEIMNPCPRFCWII

SEQ ID NO: 199562 - protein, 141 aa, Zea mays
  unsure (1)..(141): unsure at all Xaa locations
  Clone ID: MRT4577_113574C.1.pep
NTLTDGSLTCIIXAILYAGSDQRSEHAEDDIRQNPRYKFRQTDNPEKXQKDNPMDPFGGITXTEGGTNQPIEKVLALQDAECTICLSTYDEGTYLLKLPCEHHLHCTCVDELLYMNAACPLSNGNILKSTLAKQVNKLMHP

SEQ ID NO: 199563 - protein, 64 aa, Zea mays
  unsure (1)..(64): unsure at all Xaa locations
  Clone ID: MRT4577_113575C.1.pep
MARLRPEPIDRETTCPMLXRVFTGAGGHHQHEQLFVRGKQPXDEGQIYTWKDATLRELTELAKE

SEQ ID NO: 199564 - protein, 59 aa, Zea mays
  Clone ID: MRT4577_113576C.1.pep
ALEAIATMAQAAMRTTQAIISIAIHEVAGILGTLELAENGMEWSLAQQRRSSLPALTLV

SEQ ID NO: 199565 - protein, 74 aa, Zea mays
  Clone ID: MRT4577_113577C.1.pep
YSLPLAQLLRVLLLSCAHIPSPPFGPPVVANLNASFRATLCGPYHRMAYIGLFHTHVPCPSGEYALCPAAAGHQ

SEQ ID NO: 199566 - protein, 112 aa, Zea mays
  Clone ID: MRT4577_113578C.1.pep
HWVPRGRPGSRRRGTHTAPHYPAESAHPHPEQRRYVAGEGRSVEEGGGGHQGVHHQPPQAPPRLVLLLLATLLRGLHTVLAARSGSLARFFVSLLIVFRRGSGWCFSIRYYS

SEQ ID NO: 199567 - protein, 63 aa, Zea mays
  Clone ID: MRT4577_113579C.1.pep
NRCEQVKSVSINMMPLASSEVTTDMEYSPSFASVSPSLRWGQRCKFVVSYRRRLVNVASVYFT

SEQ ID NO: 199568 - protein, 44 aa, Zea mays
  Clone ID: MRT4577_11357C.1.pep
LCALQLREEVLHAKGPGRPPAYRSTQVDPQLLHAPVVSDKCLCA

SEQ ID NO: 199569 - protein, 41 aa, Zea mays
  Clone ID: MRT4577_113580C.1.pep
LLIREWPNVLSLLGGLIVIKTLIITAIGPRVGLTLKESVRI

SEQ ID NO: 199570 - protein, 75 aa, Zea mays
  Clone ID: MRT4577_113581C.1.pep
SHADQPLAPLHSCRTNLWLHSMAPSVTYYCTLDHSTMFVDTHLQNLANMRDEESALTVCHRLRSRTISRLCCDHL

SEQ ID NO: 199571 - protein, 61 aa, Zea mays
  Clone ID: MRT4577_113582C.1.pep
GLHTVFTITNRRTGLFWLGHHLHLGDTHSWGRQKSRTASASPHLHQVPTDGGGKDMPRTRG

SEQ ID NO: 199572 - protein, 92 aa, Zea mays
  unsure (1)..(92): unsure at all Xaa locations
  Clone ID: MRT4577_113583C.1.pep
TTTLQRGGAKIFSCGXXFCYPRTHRRPLPNTSYTTPCKAFFLTLMLPIYDQVKSTCYHSNLPHKNSSAYIPPSPLHRSADSNNRSYLAMQEI

SEQ ID NO: 199573 - protein, 146 aa, Zea mays
  unsure (1)..(146): unsure at all Xaa locations
  Clone ID: MRT4577_113584C.1.pep
TRGRTRGRIRGERLRIEYEKRLTHLRNQDVKGEEPTSVDKTCAALRSLHTRLKVSIHTVQSVSRRIEILRDEELHPQLMELIQGLSRMWRAMAERHKAQKRTIEDAKLLFXSTTPRPPRLSPLVRWRPQLPLRLPWHWNPRSRPGE

SEQ ID NO: 199574 - protein, 204 aa, Zea mays
  unsure (1)..(204): unsure at all Xaa locations
  Clone ID: MRT4577_113585C.1.pep
MSDMESVATLMESTSLKIQQLQRAFAELESQSAVTMNFKWKQLEDHFRGLEQSLKKKFDELKKQEKEFQETVAKSEKMLEQQEAVVVAKELTSLERLQEKRDAALAMIFGKSKLSLNTNYITPMNKPQSNYTVGTLDVKWPKHSSEGNARMQDGNAAVKPRSELAXLCEEMNVKGLHKFISEHRKNLTSIREEIPSALKGASQP

SEQ ID NO: 199575 - protein, 59 aa, Zea mays
  Clone ID: MRT4577_113586C.1.pep
SLLDRERPPSGFIFFFNFFYFFFFFIYPFKFEGPNYSEQKQQNSNTVTRGHAPKKINYW

SEQ ID NO: 199576 - protein, 91 aa, Zea mays
  Clone ID: MRT4577_113587C.1.pep
VLPLPVFSRSQSLPQLLLWRGKPQGLFPPPQRFKGGFPNWQFFFSPPPPSLDYKAQFFCGWPQPFKCLNKPPLCSFSHPTFFVTKPFCFFF

SEQ ID NO: 199577 - protein, 143 aa, Zea mays
  unsure (1)..(143): unsure at all Xaa locations
  Clone ID: MRT4577_113588C.1.pep
MAVKLKDLVPAATNTVNTTFIVLDKAAPSXADRAAPGRRXCLALVADETAAAHFLLWGAECGAFEPGDIVRLTDGIFSYHRGNALVLRAGRRGRAEKVGEFAMLFVETPNMSELQWGPDPSDGRRMVQEAVVSPYSQIFKPLR

SEQ ID NO: 199578 - protein, 140 aa, Zea mays
  Clone ID: MRT4577_113589C.1.pep
MESADGAVWMLIGANVAVFLLWRVADPGFMRKHFMISLDNFKSGRLHTLLTSAFSHAEFNHLFANMFGLFFFGSSITNVFGPAFLLKLYVGGALTGSVFFLLEKAFLAYRKQDYVGWDTSRAAELGASAAVNATMLLQIF

SEQ ID NO: 199579 - protein, 105 aa, Zea mays
  Clone ID: MRT4577_11358C.1.pep
ADSVASLCFFQLKLQIALVQISHHADLVNALATHVWRYSMVGRHSFHHRGCLSLDGQATSRCCPDQPRWRYPPPGGGPSPSSELTPAGEAAASASAACCLRHCRA

SEQ ID NO: 199580 - protein, 315 aa, Zea mays
  unsure (1)..(315): unsure at all Xaa locations
  Clone ID: MRT4577_113590C.1.pep
MENRKTFSWLKEQMIRSISVSIMIYVITRTSISNAYPIFAQQGYENPREATGRIVCANCHLANKPVDIEVPQAVLPDTVFEAVLRIPYDMQLKQVLANGKKGGLNVGAVLILPEGFELAPPDRISPELKEKIGNLSFQSYRPNKKNILVIGPVPGKKYSEIVFPILSPDPATKKDVHFLKYPIYVGGNRGRGQIYPDGSKSNNTVYNATSTGIVXKILRKEKGGYEISIVDASDGRQVIDIIPPGPELLVSEGESIKLDQPLTSNPNVGGFGQGDAEIVLQDPLRVQDLLFFFASVILAQVFLVLKKKQFEKVQL

SEQ ID NO: 199581 - protein, 94 aa, Zea mays
  Clone ID: MRT4577_113591C.1.pep
GKTAAWMSPLATRRTCCCWPGPGPAASRDLGEVAEGEGRAWPVEARPAEAAPGCGRCQPRRVDEGAEQQDRRRRYRYGAVHTNASFLQRSVQRR

SEQ ID NO: 199582 - protein, 445 aa, Zea mays
  Clone ID: MRT4577_113592C.1.pep
MFPSFKIVYYSMPHELRLCFVYCSIFPKGYVIDKKKLIQQWIALDMIESKHGTLPLDVTAEKYIDELKDIYLLQVLERHQIDAEISNTSEEKLYMNNLAHDLARSVAGEDILVILDAENVRCNRNYDYRYAQVSTSSLQSIDSKAWPSKARSLVFKSSAELQHVSEVLSVNKYLRVLDISGCSVKEMPAPIFQMKQLRYLDASTLSIADLPPQISGFPKLQTLDLSDTEVTELPAFIANLKRLNYLNLQGCKKLKQLNNLDLLHELHYLNLSRCLEVRSFPASLKNLRKLRFLNLSQCSKLPTLPDELLQSFSSFSSIVDLNLSGFEFQMLPDFFGNICSLQFLSLSKCSKLELLPQSFGQLAYLKGLDLSFCSDLKLPESFKYLSSLQFLNLSHCHNVEYLPSFDKLSNLEYLNLLQCAGLKALPKSLSNQKISQIEGFWVPGI

SEQ ID NO: 199583 - protein, 72 aa, Zea mays
  unsure (1)..(72): unsure at all Xaa locations
  Clone ID: MRT4577_113593C.1.pep
ARTKKKRPDPHGREKAPLTGVESVPHXDNPTGKNVRRGSGXATQGKLKLQIIPHKSWAQTPTTPLGLIQKVF

SEQ ID NO: 199584 - protein, 78 aa, Zea mays
  Clone ID: MRT4577_113594C.1.pep
TSQKSASSTPHRYITKEELEHALKEQGLYDADKIKEVIADADSDNDGRIDYSEFVAMMRKGTAGAEPMNNKKRRDIVL

SEQ ID NO: 199585 - protein, 106 aa, Zea mays
  Clone ID: MRT4577_113595C.1.pep
PDLGGWLWTKNTESHPKYLLCIVLLISTIPIRDCCNWPSIAQKPRWPFLDLARNLGAPRDVYLRPRPPSTHPSVPKPSASCEQRGEERENNAATVDLVPHYLSRNS

SEQ ID NO: 199586 - protein, 100 aa, Zea mays
  unsure (1)..(100): unsure at all Xaa locations
  Clone ID: MRT4577_113596C.1.pep
XLVXLFINKWLWLHLTMARLGGTLYQARATGAAYGVLVNLQLQLVAFQLLAQTGLVLQLLQCDGVWDASVVPPPASAPLMGTWGEPRWGVDPYLGVINKE

SEQ ID NO: 199587 - protein, 149 aa, Zea mays
  Clone ID: MRT4577_113597C.1.pep
FPFPPLRGVGRSFLPCGAAGFSLFLSGSLVHPFIWGLVPPGGPRGFFFCCPPFFFLGSGGNYFFPPGPVCFPFPPRRGPTSGAPRSLPPRSCNCPLLTPPRRGFQKKHQKLDKQTKNKKKKKKKKKKNKKKKKKKEKKKKKKKKKSLYS

SEQ ID NO: 199588 - protein, 146 aa, Zea mays
  unsure (1)..(146): unsure at all Xaa locations
  Clone ID: MRT4577_113598C.1.pep
VGCILVKLCSGKALFRSHECLELLAMMATVLGPLPWLMIVRADRRSEKYVKPGVRLYWPKGSASRNSIXASXKLPRPQIRVMHHVDHCAGGLIDLLRRVLRYDPNERLKAHXALQRPLFTRCFIKNGLCGYSEIENVNAVVVLFDV

SEQ ID NO: 199589 - protein, 80 aa, Zea mays
  unsure (1)..(80): unsure at all Xaa locations
  Clone ID: MRT4577_113599C.1.pep
PAGPTAIFRHCKGLXSLYLKXEGPTEGKRKLLXLFCPSXIYGILFFPFYPKALFLFLYSPPFRCKKAPPPPKFRSDQKEK

SEQ ID NO: 199590 - protein, 67 aa, Zea mays
  Clone ID: MRT4577_11359C.1.pep
HAPQRRKASCSPYSAPKAIGGESAGGGTAPAKERGANIRTKRGDGERDAGRSGVLLLPGRRKEVGLT

SEQ ID NO: 199591 - protein, 51 aa, Zea mays
  Clone ID: MRT4577_1135C.1.pep
ALRVSSIILVMFNSHFLTKAFLYWPWFQKSSLILSFASSIGCLHRFLYFYF

SEQ ID NO: 199592 - protein, 75 aa, Zea mays
  Clone ID: MRT4577_113600C.1.pep
SRKKMYLHSPIHWIPDTCQLVYPMMGVYQVSTLKTLTVVTPESVFLLVRVLTEYEKVGKWNYQSISDNRKPRAEF

SEQ ID NO: 199593 - protein, 38 aa, Zea mays
  Clone ID: MRT4577_113601C.1.pep
KKKKKKKKKKKKKKKKKKKPKKKKKKKKKFCPWGREPP

SEQ ID NO: 199594 - protein, 133 aa, Zea mays
  unsure (1)..(133): unsure at all Xaa locations
  Clone ID: MRT4577_113602C.1.pep
AYRIQQERIAGLLTLSTGILQQPXVLLQHVPSVHLVVQNIWAQLLRLAXYANLCYITXEHQFLAFKQLVAXNSAAYLHQQLPLIQLVAAYPHHFLPFNQLAALNSAAYLQQQQLLPFSQLADVSPACFLTQQQ

SEQ ID NO: 199595 - protein, 245 aa, Zea mays
  Clone ID: MRT4577_113603C.1.pep
RRCAALQERLVYVPVLPGLARSYPITPARLGLIYEDVWLRAADGVRLHSWFIRHSPSYRGPTILFFQENAGNIAHRLEFVRLMMQRLQCNVFMLSYRGYGESDGYPSQKGITYDAQAALDHLAQRNDIDTTRIVIFGRSLGGAVGAVLAKNNPDKVKQPILFLSGLQDELVPPPHMKMLYDKASDHNRNCRFVDFPSGMHMDTWMSGGDRYWRTIQLFLDQYAPGVQNHDASFKSEITRDDEAAD

SEQ ID NO: 199596 - protein, 708 aa, Zea mays
  Clone ID: MRT4577_113604C.1.pep
MKQWRDDVDRLLGMAHSGSARPRPRSSRRQHEASASVRSPSVRAAPTEDLQVELNRRRAREDAPVSLERPDDLRAELNRSRAGEDARVSLERVRERRLNFEGRNLDHDFAAAAPQTPRDARIQEGVPLASVGCAALADHLRTAAWPSKFRPHLPEKYDGTSNPSEFLQLYVTAITAAGGDTIVMATYFHVDLSGPARTWLMNLTPGSIYSWEELYARFTANFASAYQQHGVEAHLHAVRQESRETLRAFISRFTKVRGTIPRISDASIITTFHQGVHDEKMLENLATHDVETVTTLFALADKCARAAEGRAWHSALQTGVAQTGGSGAVTQDGKKKKKKNIHPLCSQIIVPKANGKLRMCIDYTSLNKACPKDPYPLPRIDQIVDSTSRDKVEVYVDDLVVKTKRGSTLVEDLTLVFDKLWATHTKLNPDNKPREDQTIEAMRPSAHIKDVQKLMGSLAALSRFISRLAERALPFFKLLRKSDPFSWTEEVEQAFQELKQHLVSLPILVALEPGEPLYLYITAAAEAVALEGQGPEGSAGVRTVQRPVYYVSEVLHEAKARKLRHYFQAHMLVVVTSFLSRAILHNSNATGNIAKWAAELAEFQLDFQPRHVVKSQVLADFIMEWTPPPGAPGGPDPNSNPTPAEPRCLVFTGPHWTLFFDGSAHQQVGGARVVLIDPNGDQVKYMVHLEFKAERELGLHLFPNDSGG

SEQ ID NO: 199597 - protein, 59 aa, Zea mays
  Clone ID: MRT4577_113605C.1.pep
DPTFKYTILTYKRRLANDIIPPKYANANIWRCNSTCCHDIHNKVGCMTSPWPYRSYPIS

SEQ ID NO: 199598 - protein, 332 aa, Zea mays
  unsure (1)..(332): unsure at all Xaa locations
  Clone ID: MRT4577_113606C.1.pep
MVGWLKALVYGAGGMAVVGLAALVALQERLVYVPVLPGLPRAYPIKPSRLRLIYEDVWLRAADGVRLHSWFLRHSPTCRGPTILFFQENAGNIAHRLECVRLMMQRLQCNVFMLSYRGYGESDGYPSQKGITYDAQAALDHLAQRNDIDTTRIVIFGRSLGGAVGAVLAKNNPDKVATLILENTFTSILDMAGIMLPFLRWFIGGSSSKGPKLLNCVVRSPWNTLDIVGEXSQVKQPILFLSGLQDELVPPPHMKMLYDKASDHNRNCRFVDFPSGMHMDTWMSGGDRYWRTIQLFLDQYAPGVQNHDASFKSEITEDGNYSAPLYLKQPKL

SEQ ID NO: 199599 - protein, 65 aa, Zea mays
  Clone ID: MRT4577_113607C.1.pep
STCNEPWFVSLLGYDTRSTASHWCSLCAGCRHPATSPYIDAQNSLLAHASVAARDLTRDQAVYNG

SEQ ID NO: 199600 - protein, 325 aa, Zea mays
  Clone ID: MRT4577_113608C.1.pep
MGGGEMAGWLKALAYSAGGVAVAGLAALVALQERLVYVPVLPGLARSYPITPARLGLIYEDVWLRAADGVRLHSWFIRHSPSYRGPTILFFQENAGNIAHRLEFVRLMMQRLQCNVFMLSYRGYGESDGYPSQKGITYDAQAALDHLAQRNDIDTTRIVIFGRSLGGAVGAVLAKNNPDKVATLILENTFTSILDMAGIMLPFLRWFIGGSSSKGPKLLNCVVRSPWNTLDIVGEVKQPILFLSGLQDELVPPPHMKMLYDKASDHNRNCRFVDFPSGMHMDTWMSGGDRYWRTIQLFLDQYAPGVQNHDASFKSEITEDDEAAD

SEQ ID NO: 199601 - protein, 71 aa, Zea mays
  Clone ID: MRT4577_113609C.1.pep
MGPTYATCIHRCWFNKTILEAKAIDKNRIEYIYDELNRMDRALKDLDEMLYNKKESIFKMQQKMHAVQANA

SEQ ID NO: 199602 - protein, 52 aa, Zea mays
  Clone ID: MRT4577_11360C.1.pep
THTGAPAIVGRPRNNRALLHGALGGEARLGGLGVGAVVVGHGLAAPSASVRQ

SEQ ID NO: 199603 - protein, 66 aa, Zea mays
  Clone ID: MRT4577_113610C.1.pep
NLYIILNIKQASLSIHEINTENTNYSTVDEDTVQEKQPQHGCDRVSVLAICSRPPHMARLSFGYQK

SEQ ID NO: 199604 - protein, 130 aa, Zea mays
  unsure (1)..(130): unsure at all Xaa locations
  Clone ID: MRT4577_113611C.1.pep
KGTTDQGENIVKNMIEIHVPPSDVDEVNACPHYDCLXTASSPWATEPHXILAHNCXMNNLGAFFGETGADMLVPIGVLCDLHAHADNKALMGXYHELVQHKDVNALNQELDNIVCRGHNPDEKETVSTML

SEQ ID NO: 199605 - protein, 389 aa, Zea mays
  Clone ID: MRT4577_113612C.1.pep
MRSMESTDSSSGELPPQKQPSSAPDLPPGFRFHPTDEELVVHYLKKKAASVPLPVAIIAEVDLYKFDPWELPDKATFGEQEWYFFSPRDRKYPNGARPNRAATSGYWKATGTDKPIMASGGNREKVGVKKALVFYRGKPPKGLKTNWIMHEYRLADAASSTTSRPPPPCNAGGKATSLRLDDWVLCRIYKKIDKLGVGDPPRIMECGEDSVENAVAAYPTHAAAAAMAVAVAGGGGAYHTGNYTSLIHHHHEDSFLVDGLLTAEDAGGSSLSQLAAAARAAAPTDTTKQLLVPSSTTPFNWLDASALTILPPAKRFHGYNRDTTDGGGTSLPSPSERNNLQAAVGAVDSGASGGTSAVIPSFLNPLGVQGATTYHHHAIFGTPVTPEAA

SEQ ID NO: 199606 - protein, 58 aa, Zea mays
  Clone ID: MRT4577_113613C.1.pep
TFQKGKTPEIPSFPAVPLFDPRREFAPEPINLLSAATPIRESIRVSDQTATSSDLNAA

SEQ ID NO: 199607 - protein, 389 aa, Zea mays
  unsure (1)..(389): unsure at all Xaa locations
  Clone ID: MRT4577_113614C.1.pep
MDALSLYCSIYIFCCXILPFAMADIASEKQALLAFASAVYHGNKLNWSQNIPVCSWHGVTCSLDRSCILALRVPGAGLIGTIPADTLGRLVSLQVLSMRSNRLSGSLPNDVVSLPSLQAIFVQHNELSGDLPPFLSPNLNTLDLSYNSFTGQIPSGLQNLTKLSVLNLAENSLSGPIPDLKLPSLRQLNLSNNELNGSIPPFFQIFSNSSFLGNSGLCGPPLTECSFLSSPTPSQVPSPPKLPNHEKKAGNGLVIVAVAGSFVIFLLAAVMFTMCISKRKEKKDEAGYNGKVTDGGRVEKRKEDLSSGVQMAHKNKLVFLEGCSYNFDLEDLLRASAEVLGKGSYGTAYKAILEDGSTVVVERLKDVVAWKKEFEQQMELVGRVGKHAN

SEQ ID NO: 199608 - protein, 104 aa, Zea mays
  Clone ID: MRT4577_113615C.1.pep
ACQRLGWRTPRMWRWYETLRSCSGGFVPEVPLCRSCGSLGSLYVPRDLRRSAAFSSARDACTSFRSGVAVSVGDEVLADFGDGVVYGGDVHGGDVSARHDAGGG

SEQ ID NO: 199609 - protein, 86 aa, Zea mays
  unsure (1)..(86): unsure at all Xaa locations
  Clone ID: MRT4577_113616C.1.pep
EATQAGPDGTRATRAEHERDRKENTXEEEXXDTXDNDKDKXQDKEGKAPDQQRHNGEGKQXEEGRTXAHXNTQKESTXHQEHXHKG

SEQ ID NO: 199610 - protein, 341 aa, Zea mays
  Clone ID: MRT4577_113617C.1.pep
MYCALPPSEPPDGERPRCLRLIVGGAQPRGGWYLSAIARLQGFSSSSPAASPHQWSPETVTTSSMVGRSKPGCGLHPALSFKDLHHPCWGGGRAEPELYLPYGPAGHLLLHQSGERALTGLAEGTDFDNAAPIGRKRRQLQHAWFIGSAGSGTASGATSHRWAERGYLPAVRAAVAPRAPGDRLRRHALLGQRSCSWVVLPLLRHDASSRRSVLTRPRGLEWGSAGGQVAAIVGAEAVAAGEGLVADEIVGAIYALGLWLFGFDSLSSPLEWGRGRGPCCSSVCPEVIAAVVWPLGAEVVVAAAGVGGGEPPRSCRPAGPLMWGVVRTCGSGTGVPFVMAP

SEQ ID NO: 199611 - protein, 219 aa, Zea mays
  unsure (1)..(219): unsure at all Xaa locations
  Clone ID: MRT4577_113618C.1.pep
LEAGRGSQAPTSSSSRCPASTQXPASSPWLPAPSSSPWCHAGAXGTSSLHAAASPSPPSRFLCAPSPSVSSXPCARISSAPWRTRPSPQLESLPLLASSCACRSSPGRGARPSAISTPXSSSSSLPHGARPHPLAPAPSAPPPASTSPSVSSLFKAQAAIAPCRLSISDPLLDVILPCNACLVLDKTPELGPSSFRASARKPKNRVKTKLAARYSLSAR

SEQ ID NO: 199612 - protein, 93 aa, Zea mays
  Clone ID: MRT4577_113619C.1.pep
SIRYILSQQMVSTSNITCVCHVKARMHMRYASHARISSILYVASLSCDRIPTAVIAVGTALALVTHMQECIVMQQEVLVPVSQPEVPETEPEK

SEQ ID NO: 199613 - protein, 429 aa, Zea mays
  Clone ID: MRT4577_11361C.1.pep
MNARLSAEYQGLEVKVPSLFRCPISLDVMRSPVSLCTGVTYERASIQRWLDSGNTTCPATMLSLPSTDLVPNLTLRRLIALWASTAAPSSPSSSSSPAVGPTPAAAAAELLRRVADPAADPCPPLRKLAAFLSDDDVDEFDKNALARAGGAAETVASVLRRAGREAAEAAVRVLAAIAASDCIEEESKRRVAAALAADAPSTAAALARVLRSATSLEARVDAARLVESLLRNAAPGARATVADSEELLGELIRLVGPADDKGGLDRQAVAAGLSCLAAIAATRRARAEMVRLGAVPAAVRILEADAGSPSQALRVLEAAVGCAEGRAAVCESAGSAVPVVVSKMMKGGMAGAEAAVSVLWAVCHRYRDRRAVAAAAACESGLTKLLLLMQSGCSPAVRQMTSELLKIFRVNGKSCVAGYDSKTSHIMPF

SEQ ID NO: 199614 - protein, 56 aa, Zea mays
  Clone ID: MRT4577_113620C.1.pep
IRLEVNLVIERYQSMTEVTSVMRKSSLVIKFLLVTGILAVLTVMSRSDTHMINLWN

SEQ ID NO: 199615 - protein, 98 aa, Zea mays
  Clone ID: MRT4577_113621C.1.pep
WNFLGALYLERRNFDCAATTHIDGGRPCLSGRTVAYRTKILQDEFSPMTSLMRSGGLANTNLMRMMITSSPVGWSRMAGRLIFSTIQKLKSRPLLRTT

SEQ ID NO: 199616 - protein, 39 aa, Zea mays
  Clone ID: MRT4577_113622C.1.pep
LPVAPPRGVTLNLSSTGFCLPFPSGRLPSFNWVPENLTL

SEQ ID NO: 199617 - protein, 286 aa, Zea mays
  unsure (1)..(286): unsure at all Xaa locations
  Clone ID: MRT4577_113623C.1.pep
FLLPAVVIAXARVVVLVFLVAHPSEAGLDVEVMEVEMNGDGGEEVGLLGEDKKEVQGNEDNEFELEMGSQLPRAIGFVEAWKLPGVAPYAFCLFFSKLVAYTFLYWLPFYIRNNAVAGQFLSHKASGILSIVFGIGGVLGGISAGFLSDAIRARAITSVLFLLLSIPSLVVYRTYGSISMHHNIALMFLSGYFVNGPYSLITTAVATDLGTQDAIKGNSRALATVSAIIDGTGSVGAALGPLLTGYISTRGWNSVFFMLIVSISLAILFLIRLAKGEIVAKLSTWN

SEQ ID NO: 199618 - protein, 38 aa, Zea mays
  Clone ID: MRT4577_113624C.1.pep
NHITKNNKTQKFSNSSVIIVSSNHGITINLSIALLLLV

SEQ ID NO: 199619 - protein, 116 aa, Zea mays
  Clone ID: MRT4577_113625C.1.pep
PVDPAFANYFHPFHMIRTHFPLADRRRDGGDGWRAGGAQNPAVSMSGTPAARTSSSTYGWTLAQPRPTVGRLRPGCPHPVLHRHLTLIPCAGRGCRSDIHEVSVSGLHSCQIHHIP

SEQ ID NO: 199620 - protein, 61 aa, Zea mays
  Clone ID: MRT4577_113626C.1.pep
MGPPSAHVFPRNKPDLCGELSRRKKKRKKKKKKETKKKERKKKKKKKKKKKPNKKKKKKAA

SEQ ID NO: 199621 - protein, 50 aa, Zea mays
  Clone ID: MRT4577_113627C.1.pep
LWLFHTQVRTPPIDHHPRSRLLSPSLTGPMLVHITKDVSTTMGVCRYSPA

SEQ ID NO: 199622 - protein, 61 aa, Zea mays
  unsure (1)..(61): unsure at all Xaa locations
  Clone ID: MRT4577_113628C.1.pep
GELPRAMGVKLDLSDKPGGLGVRSRRYALVAEDGXVDKVINXLRRGGTCTNSNGQDMLNAL

SEQ ID NO: 199623 - protein, 233 aa, Zea mays
  Clone ID: MRT4577_113629C.1.pep
MPLPIPCPRHPLPPDLARARPRITRRASRGTRLHPRRPTARPQTSPALSRPPSPPRPTLSQICVRDILCQQQGLAFDRVAASFSKCAFAEKNECMVLGTYKTIPYAAALERNHGECAVLLNPSSVEPVPLTDSQASDAELCCICFEQACTIEVQDYGHQMCAACTLALCCHIKATKDTLLTPKDVQLEGDSRLASLSIGQMDVTVSHHRLGGGDAPPGVQGALEAAGVTILLV

SEQ ID NO: 199624 - protein, 80 aa, Zea mays
  Clone ID: MRT4577_11362C.1.pep
KPNWPLPRAKIACPFQGGLSSKKRTGPPPHTGRGKPPTLNSLIQKPKGTLFNRGFGFYPPQSTKKPNGCQAHFGLWTLAL

SEQ ID NO: 199625 - protein, 23 aa, Zea mays
  Clone ID: MRT4577_113630C.1.pep
QGMEQSCIGLLKSPVLGAIGLES

SEQ ID NO: 199626 - protein, 250 aa, Zea mays
  Clone ID: MRT4577_113631C.1.pep
DVIPVGPLIEVGGERDDDDGAVRGDLMKAADGCVEWLDAQAPRSVVYASVGSVVRLNAEEVGEMAHGLASTGRPFLWVVRPDTRPLLPEGFLDSVAGRCAVVPWSPQDRVLAHPSTACFLTHCGWNSTLETIAAGVPVVAFPQWGDQCTDAKFLVDELGMGVRLRGPLRRDAVREAVDAAVAGPEADAMLASARRWSAAAREAVAPGGSSDAHVQAFVDEVSRRACGVQVAKVVPPSSEELQQSPVRVQN

SEQ ID NO: 199627 - protein, 77 aa, Zea mays
  Clone ID: MRT4577_113632C.1.pep
LEHSHVKLHQHRDAGESRSSLSSKSSSNDDKDRGSRKCTSRSRSKSTKQGTKHRSRPKHRDSHSDEGPDRLSKFFWK

SEQ ID NO: 199628 - protein, 77 aa, Zea mays
  Clone ID: MRT4577_113633C.1.pep
QSSHFPYNSLTLSHRKVNLKKYHDLPQIKLTHSSFNLHQTLYKPKNFLPCKHYITPTSIFTQSPSSSFSLQFHSQYF

SEQ ID NO: 199629 - protein, 71 aa, Zea mays
  Clone ID: MRT4577_113634C.1.pep
RRSPSPMCPVAVVVSKSWVVLSAHVPASSGALSPYRGCHRFSCSCHAWGQCWFNNGPVVLRVCTPPYSPDS

SEQ ID NO: 199630 - protein, 136 aa, Zea mays
  Clone ID: MRT4577_113635C.1.pep
MARTKQTARKSTGGKAPRKQLATKAARKSAPTTGGVKKPHRYRPGTVALREIRKYQKSTELLIRKLPFQRLVREIAQDFKTDLRFQSHAVLALQEAAEAYLVGLFEDTNLCAIHAKRVTIMPKDIQLARRIRGERA

SEQ ID NO: 199631 - protein, 136 aa, Zea mays; identical to SEQ ID NO: 199630
  Clone ID: MRT4577_113636C.1.pep

SEQ ID NO: 199632 - protein, 33 aa, Zea mays
  Clone ID: MRT4577_113637C.1.pep
SYQIAYRQLNILSEISQDYILIPTDTYILQYTN

SEQ ID NO: 199633 - protein, 136 aa, Zea mays; identical to SEQ ID NO: 199630
  Clone ID: MRT4577_113638C.1.pep

SEQ ID NO: 199634 - protein, 187 aa, Zea mays
  Clone ID: MRT4577_113639C.1.pep
MNESNNLLERISQLHGSISTVESQLSMASLRGECLGRDSVGRLYWVTGRPCKRPRLVADGSMMIPKDRDISMVTSHSQSTFDRGWNSASLVIYESDEEMKCLVDWLRDIDPREKDLKDSILHWQKSIYRQASFPITDPPVSKFSKSEPLMELPNTNAFIVLEQKYGLQTDQDTSELSKRRGTKSRGF

SEQ ID NO: 199635 - protein, 71 aa, Zea mays
  Clone ID: MRT4577_11363C.1.pep
EPNKGGCPAGGQRALNRAHRARTLRLATLHRTAWHPVTKAHHGGQPTVGAVLSQNLHHSRTSWTWRTPWSS

SEQ ID NO: 199636 - protein, 134 aa, Zea mays
  Clone ID: MRT4577_113640C.1.pep
HVSSPQRQGCEGCCPRAQVEPWRVCYSGEQFSRITEPNPPVDATVISARIGWVTQTPHRTPNGGSYRRPRQRHGSPLRGTAFLDFLRLVAWSGGYEGEERNPDFIYIAPEGRFLNHTVISRALGVQFRGRWRSC

SEQ ID NO: 199637 - protein, 69 aa, Zea mays
  unsure (1)..(69): unsure at all Xaa locations
  Clone ID: MRT4577_113641C.1.pep
MCGGAILXGFIPHAVVAEAAAAANKNQXSGARXTADLLWPGPGTKXKLPKTXEDFEGDFPEFERGLGED

SEQ ID NO: 199638 - protein, 415 aa, Zea mays
  unsure (1)..(415): unsure at all Xaa locations
  Clone ID: MRT4577_113642C.1.pep
GGPIGYLEAGLCPTVGVGGHFSGGGFGMLLRKYGLAIDNVVDAVLVDARGRLLSKNTMGSDVFWAIRGGGGESFGVVLSWQVRLVPVPATVAVFNVPVPASQGAVDVVTRWQQVAPALPDDLFIRVVVQQQTANFESLFLGTCDALLPVMGSRFPELGLNRSSCKEMTWIQSVPYIYLGSGSTVEDLLNRXLRVRVQRXYKATSDYVRQAIPRDVWANIFSRLAQPNAGLMILDPYGAQISTVPESATPFPHRAGVLYNIQYMNFWPMAGGGDGAVQTKWVRDLYAFMAPYVSSNPREAYFNYRDLDLGENVVVGNVSGHQAGEERGEQHRQDDDRRRAAGQRAAGAGGYLRHARGAPRGAHGPGPPGRGGGRRAGARGAGPAPRRRADQHPDRGRQVGRRGWGGAKREGQGQVR

SEQ ID NO: 199639 - protein, 69 aa, Zea mays
  Clone ID: MRT4577_113643C.1.pep
KKRKKKNKNPILKKKKKKKKRKNQKKKKKRLKKKKKGNCPKGLKSIHVRPSCYNPLTRLLKPNQSFAYK

SEQ ID NO: 199640 - protein, 145 aa, Zea mays
  unsure (1)..(145): unsure at all Xaa locations
  Clone ID: MRT4577_113644C.1.pep
LLTRQQSPDVYKLQSLAQTINTQQLXXLELAKTNQXTLSSFNKQSQQEPYLPYNQLNTLQPDVYCKHQLLPLRHITSSYSHXQQPTTFNQXTVLNXSAYIRSINILLPFNHVAXMXRASSSTHIQSLTYYLLLSTNTSSILQLQQ

SEQ ID NO: 199641 - protein, 51 aa, Zea mays
  Clone ID: MRT4577_113645C.1.pep
NRRQWLSATNAACMRKGGASRENQENEGNEPPPHGVGRVQKKSGVDIANGL

SEQ ID NO: 199642 - protein, 151 aa, Zea mays
  Clone ID: MRT4577_113646C.1.pep
FPVLSGFTHIAHCSRTHLPQPIPSRNPQSTEQCDPLLSTQYIIGPKQPSSGLLISGTGTNRPHRNYFLLYIRLKKEEKRKSSREETRRLTFVPPAVPLVGDWTTDLRAGAAGRGLDDGAGPPSAPVLGSLEVGWRGRTTSYDADGWLARFE

SEQ ID NO: 199643 - protein, 126 aa, Zea mays
  Clone ID: MRT4577_113647C.1.pep
KKKPGEQGVVFLPHNKKTPVFVPPEQKNLGGGRQKLFQNGPFPQGPLNHLKEGPLPPWAQGGDCPPQKVGKKWAPPISTPKSVGGGKIKIYVSRGVFFVCLPPPPPWFFCAHTQSLYFPPPFFWGP

SEQ ID NO: 199644 - protein, 83 aa, Zea mays
  Clone ID: MRT4577_113648C.1.pep
DHEEAILPCALLVPDGPCRNCYGLGHVHHLSTSMNERLQLVRTLWKGGIQLCSHQRMWQPLASRWIGTCIRNRNNIRLSSTDH

SEQ ID NO: 199645 - protein, 52 aa, Zea mays
  Clone ID: MRT4577_113649C.1.pep
ARVCAFGGGSGSGGWCRARYSLPCVGGAGVINVVLRRAQPKTLKKADCLPAG

SEQ ID NO: 199646 - protein, 77 aa, Zea mays
  Clone ID: MRT4577_11364C.1.pep
FPVRHQKGPQEVYKKTRLAYRPPPQKKKICKPQRAKGKTNFIPNKRQAKAQTPNPIFLRVPKKQAYCFSPPPKDNFL

SEQ ID NO: 199647 - protein, 364 aa, Zea mays
  Clone ID: MRT4577_113650C.1.pep
MAEVHLGLPGPWAADYREMADHYTTKIGGVPDWPTGDMGFKPETLQCSLCGTKLCLVAQVHAPVAKLNIEERIIYVLVCPTPECGPKPQSWKVLRVQKCHNVMQTEGGGDELGQPNGPSSTSLPEEQSDKNKIPETNDDDFDLDALAEALEQAATLASNSKKKNKSKHANAPVKRPVLKEQACDLSIPVLPCFYIHYNKELYGGKGAVGSSSSELVLDKEIMDAANDEEEKWEGEKYEYDRAIGADRTFLKFKKRLDAYPQQCFRYSYGGKPLLATTKLQDPGTCRLCGSPRQYELQLMSPLSYFLHEAGDGSSNYAPSSWTWLTVIIYTCPKSCCPSSCGGKPQSCCWGAAEEEILIQEDEVL

SEQ ID NO: 199648 - protein, 391 aa, Zea mays
  unsure (1)..(391): unsure at all Xaa locations
  Clone ID: MRT4577_113651C.1.pep
MAEVHLGLPGPWAADYREMADHYTTKIGGVPDWPTGDMGFKPETLQCSLCGTKLCLVAQIRDGTKRLYVDESMSFXKKKLMWFGLKVHAPVAKLNIEERIIYVLVCPTPECGPKPQSWKVLRVQKCHNVMQTEGGGDELGQPNGPSSTSLPEEQNDKNKIPETNDDDFDLDALAEALEQAATLASNSKKKNKSKHANAPVKRPVLKEQACDLSIPVLPCFYIHYNKELYGGKGAVGSSSSELVLDKEIMDAANDEEEKWEGEKYEYDRAIGADRTFLKFKKRLDAYPQQCFRYSYGGKPLLATTKLQDPGTCRLCGSPRQYELQLMSPLSYFLHEAGDGSSNYAPSSWTWLTVIIYTCPKSCCPSSCGGKPQSCCWGAAEEEILIQEDEVL

SEQ ID NO: 199649 - protein, 57 aa, Zea mays
  Clone ID: MRT4577_113652C.1.pep
VVEIGALSPQKSILAHSLWLYGSRNGDREDILLLIGLALTVCESFSPAIYFFAHQHL

SEQ ID NO: 199650 - protein, 95 aa, Zea mays
  unsure (1)..(95): unsure at all Xaa locations
  Clone ID: MRT4577_113653C.1.pep
RYLSVLVPHPLGQHHRLRLLLMIVFVQPSCGAPARWAWQLIVNVLLRVRPPLNYVVGLRVPALMWTLVDRRHDAXVICSVATPGWKPSVCISLAR

SEQ ID NO: 199651 - protein, 90 aa, Zea mays
  unsure (1)..(90): unsure at all Xaa locations
  Clone ID: MRT4577_113654C.1.pep
PGDIRKGFXGTLVLSGGPPLFPGISARMSKEIPARGPSSMKIKGGAPPKKKSRVWIGGSLLGWVSPFHQMWIPKAGFPEFGPPLGPRKRF

SEQ ID NO: 199652 - protein, 87 aa, Zea mays
  Clone ID: MRT4577_113656C.1.pep
RMRKQSLHQGLNPQQQKKGKGYNKAKGPDPTLLMKFASPSCRSLFSRLSTVQHLFLIANQRKNLHFWGRSSDFINGFDHPSGNVQGN

SEQ ID NO: 199653 - protein, 69 aa, Zea mays
  unsure (1)..(69): unsure at all Xaa locations
  Clone ID: MRT4577_113659C.1.pep
RALEHLIFCVGHNEHDCVSDHTKKIGQGVDPRSIMLQRKXLNTRSKLLEPGFQKPTPHATRTIPVVNAH

SEQ ID NO: 199654 - protein, 133 aa, Zea mays
  Clone ID: MRT4577_11365C.1.pep
PRVRPHTRSGADENKRSTRLTINCILNTADCELILKDNTETANLCTKVLELDSHHVMALFRKVPAYIQLADLELGHADVNMALEIYPDIRDVKMEYGILDDTIKECSSNDAHSYIYICAKMTNAAFEVDDAEG

SEQ ID NO: 199655 - protein, 42 aa, Zea mays
  Clone ID: MRT4577_113660C.1.pep
PTRSQRSASDLSSTRLEPPPPGIFRTTRGAHSDGFAHHDVVL

SEQ ID NO: 199656 - protein, 126 aa, Zea mays
  unsure (1)..(126): unsure at all Xaa locations
  Clone ID: MRT4577_113662C.1.pep
MARSDVEYRCFVGGLAWATDDHSLHNAFSTYGEALXSKIILDRXTDRSRGFGFVTFSTEEAMRNXIEGMNGKEMDGRNITVNEAXSRGGRGGAAGGYAGARAGCGIPGCAPRNDAVRYCSLSRRLA

SEQ ID NO: 199657 - protein, 81 aa, Zea mays
  unsure (1)..(81): unsure at all Xaa locations
  Clone ID: MRT4577_113666C.1.pep
IDALVRLTGITAEGQGVNGGVLNRFLSXTPDVAEAQATAADEEDNYDVDLHVQETQHEHKAAEDRTATSNASITITESLMS

SEQ ID NO: 199658 - protein, 85 aa, Zea mays
  Clone ID: MRT4577_113667C.1.pep
ESGHKCPWAYLGPPVLFWLLHSPLGPDCGVLDAKGVPLRSSPVCPRPTQGSVSLGLSSVPGLSGGRAGAGTPGDSKGEVSVVRAA

SEQ ID NO: 199659 - protein, 107 aa, Zea mays
  Clone ID: MRT4577_113669C.1.pep
DPPLGVYDQLHTPAPHPPRPVLLRRLPLLVLCLLINYSPPSPPRPSPPPRPCCLLLLLRPVPSSSIHRHPLLVSSLQSLPSSSSSSLFQSFPKALISLHALPYCCCC

SEQ ID NO: 199660 - protein, 168 aa, Zea mays
  Clone ID: MRT4577_11366C.1.pep
GGGAQARALSDGVNGFPSRLRSSAHRPVTLQYLEKIHSCKEKIDKAKAETITDDELNALQSKMEEKLQEEKQLRQELRVLHDELDDLEIQRLSIKERKDAVKKKKNDTQKAERTLSMCLSVTNIIPNLEDQDKVSGYIVDQNRKKIEKFEFENTTPPVEICDELWKKI

SEQ ID NO: 199661 - protein, 173 aa, Zea mays
  unsure (1)..(173): unsure at all Xaa locations
  Clone ID: MRT4577_113670C.1.pep
LDIMVSEGLEITQPALDPDLSTDIHHRITIRNKMAKVHRRIYDNRPSMNCSDESKGPPCTXNDLIHGWGLDMKLGYCAQXQYMLTVLKDILIGCLLTIEGDRTEKVGVIDSEYVVHQGIPSLGGPSLSSKTPRRSLDLRTHIRRQSSAELEKFKERWNRAVREDEGWRDPFDS

SEQ ID NO: 199662 - protein, 353 aa, Zea mays
  Clone ID: MRT4577_113671C.1.pep
MKHQPPRRWGVVAAVVALVLLACLQIQYHHLKVDLGKAGFASATQENNAIRSRNRIRWGPDRNGAHSLPRGIVHRHSDMSLRPLWEDDTASTHKNKNSDYSALLAMAVGISQIKNIDTMARKFLKENYAVMLFHYDGNVDGWRHLEWSDKAIHILAHNQTKWWFAKRFLHPDVMAIYDFIFLWDEDLGVENFNPRRYLDIMVSEGLEITQPALDPDLSTDIHHRITIRNKMAKVHRRIYDNRPSMNCSDESKGPPCTGWVEGMAPFFSRTAWKRVWYLIQNDLIHGWGLDMKLGYCAQGDRTEKVGVIDSEYVVHQGIPSLGGPSLSSKVLDISATNYFFRNLESGRTKDEVY

SEQ ID NO: 199663 - protein, 76 aa, Zea mays
  Clone ID: MRT4577_113672C.1.pep
MDGYSNLALSPPTPTPTPTASGAPRAARPSMELTNTKETKAWEGLAIGAVTLARTFSTGSHRFCRSGSERRSRSRS

SEQ ID NO: 199664 - protein, 41 aa, Zea mays
  Clone ID: MRT4577_113673C.1.pep
RPGSVSLGSIFGHGLVWLMISSQGPHSTCDLTGEYLFRIAG

SEQ ID NO: 199665 - protein, 88 aa, Zea mays
  Clone ID: MRT4577_113674C.1.pep
PRAYSSSKGDADADDTPTTLLRRAAPQPAGQSGSGGGGSMRRCARWRAARGGCRRSACGPSAAGGCWARAGRFKPSPSTRPRVQTTVR

SEQ ID NO: 199666 - protein, 40 aa, Zea mays
  unsure (1)..(40): unsure at all Xaa locations
  Clone ID: MRT4577_113675C.1.pep
WKASKNENPPRLGDSSSVXPGRPAVDVCSVERIPSYYATG

SEQ ID NO: 199667 - protein, 86 aa, Zea mays
  unsure (1)..(86): unsure at all Xaa locations
  Clone ID: MRT4577_113676C.1.pep
GGFKTGPVAPPNVLEGPPPVFXGKQFYPVSVLPRTGGGDKGGKHQLFGAPVSGGKLYFCKGRAGAKRWFKGPRKGVEKAPPPFRVA

SEQ ID NO: 199668 - protein, 291 aa, Zea mays
  Clone ID: MRT4577_113677C.1.pep
GYEIDGSGYDYGAGKWYSFRLERGLILSNALRAQKDAEDEGCTIALSNLRSEVIELRNEGLEKDKILHSLMDKIKEDEAAFKAQAEAQKREIEYLRKQLAEAKEKCTVEEAKREISEQWANHLEKNVEELRASKKRCYEKSIECVKKIKTSFASVGAFSSEENFIRGDPEGPIEWVSHEAEAFEEVLNGCRDICAFSGARGIATILERKGCDHVKSLAQTEADLSSEDIKDPSAEASLVGGKFFTDIWENGGREMDQEIIRKSKKGIHDARKVAEAAEKSADLEGRIGIDY

SEQ ID NO: 199669 - protein, 254 aa, Zea mays
  Clone ID: MRT4577_113678C.1.pep
MPVMEKIEEPRAEETKTSEILSPSAKVEVPTPMPRAQRDLLTTPKRKRMVNVLDVLEMIKSSSSTSKIAAEAPKTQIEAEAAKSQAETETGLSEPTKREFLEIEKETEKESAEETFSEKIATHIPEASSEASDYVLRHASGKNLSEKEKREAQFYAQKLKYPKGALIFNGSGEEDFLYCLPHSKEISVCREMSKSFGFPTLEDGLLVLSKDELADSLAYNSLKVKQCRLKPYQCVIWVRCLYFHGIPIFLKHVL

SEQ ID NO: 199670 - protein, 77 aa, Zea mays
  Clone ID: MRT4577_113679C.1.pep
VFSSIPSLYPLHASNIHPQTMPTKMSPGIAENPWVAQYPTPTPVGNHCSLAHTMVLIFFLPRGFIILHLFSQGFGIP

SEQ ID NO: 199671 - protein, 198 aa, Zea mays
  Clone ID: MRT4577_11367C.1.pep
MAASAGESQGVERLLSYAEDLVAVLCVSTDCDDNAQVGAGVQRLLSACRSESDDLEMQLKEYQEKIHSCKEKIDKAKAETITDDELNALQSKMEEKLQEEKQLRQELRVLHDELDDLESQRLSIKERKDAVKKKKKDTQKAERTLSMCLSVTNIIPNLEDQDKVSGYIVDQNRKKIEKFEFENTTPPVEICDELWKKI

SEQ ID NO: 199672 - protein, 89 aa, Zea mays
  Clone ID: MRT4577_113680C.1.pep
GCCSFPIPAVGVGGVVLLPLALLGSLPTWVLSDPSRDCSQGPCCLHGPLWRVFMFPPLAPFYVCGPLLVRLLRPRLLPARNLCRRRCWL

SEQ ID NO: 199673 - protein, 98 aa, Zea mays
  Clone ID: MRT4577_113681C.1.pep
TGNAIAFQLTLVRHEGGLKRKTKPASNTNATPPGPQNEDWTFSKPHNTTLLKKNQSTRTRSLRYPTLPRENFSLAVPKLNSLAGALQHHVWKDPTLTQ

SEQ ID NO: 199674 - protein, 73 aa, Zea mays
  Clone ID: MRT4577_113682C.1.pep
FPEGVGCHMCRSLSSLANLFLMAFFATISSREHCAFPPGEGRGCVHNSRGCGCASPWRTHVWDLSPWFVFVLG

SEQ ID NO: 199675 - protein, 93 aa, Zea mays
  Clone ID: MRT4577_113683C.1.pep
KRVFSIKKQKSWKIYGLRLFPLGPPPPGLFWNGFFFPCNFVPQYVFTTLRFKTTPPVSVSPFFIGTHFKTPPPRPLLAPITACPNPIQKTGWP

SEQ ID NO: 199676 - protein, 49 aa, Zea mays
  Clone ID: MRT4577_113684C.1.pep
IRLERVAGMALGIAPGATHTRHVQRCPVDGVLLHELMGLELSEIMNYIF

SEQ ID NO: 199677 - protein, 246 aa, Zea mays
  Clone ID: MRT4577_113685C.1.pep
MDGDGATWGQPMLDKRPSHRERHFTAGEVVRDVIMGVSDGLTVPFAPAAGLSGASAPSSLVLTAGLAEVAAGAISMGLGGYLAAKSEADHYKREMRREQEEIIAVPDTEAAEIGEIMSRYGLEPQEYGPVVAGLRRNPQAWLDFMMRFELGLERPDPRRALQSAFTIALSYVVGGLVPLLPYVLVSAAQDAMLTSVGVTLAALLFFGYVKGRFTGNRPFASAVQTAVIGALASAAAYGMAKAVQAR

SEQ ID NO: 199678 - protein, 55 aa, Zea mays
  unsure (1)..(55): unsure at all Xaa locations
  Clone ID: MRT4577_113686C.1.pep
IALANSNWPKAVLWNPHLQKEASHKNFVCVENPKIXNXQLEPKQFWGAKQKIELV

SEQ ID NO: 199679 - protein, 69 aa, Zea mays
  Clone ID: MRT4577_113687C.1.pep
IMSWSLISDPNVLGPKKQTQMYKQDGSTRISSRFCSFLHACLRLPSCPYCILYTSSNSDLNQNASSIYS

SEQ ID NO: 199680 - protein, 80 aa, Zea mays
  unsure (1)..(80): unsure at all Xaa locations
  Clone ID: MRT4577_113688C.1.pep
MALCVEKTXSVRLYKAKDLYHADLTRIEIELDDVDMIGLMACRADVLPWNPFNGARISGYFHMTIHTGVLIXETLTALGA

SEQ ID NO: 199681 - protein, 85 aa, Zea mays
  Clone ID: MRT4577_113689C.1.pep
MESVAAESAPAPENEHSQETPESNSSVYTTFMKSHRCYDLIPTSSKLVGFDTSLQVKKAFFALVTNGVRAAPLWDSKKQSFVGML

SEQ ID NO: 199682 - protein, 108 aa, Zea mays
  Clone ID: MRT4577_11368C.1.pep
GWNFGLIYVLVYVLVYVLGFIYIKVKSTTITTVCVRAPSAASSSVVAVAVLPVGVVCADAAEGRLTVLVDVFEVVVDVFVFGFDLVLLLDLLLEVFLSSSLLDQLCIM

SEQ ID NO: 199683 - protein, 154 aa, Zea mays
  Clone ID: MRT4577_113690C.1.pep
MVKAVSVLRGDSKVSGTVVFEQESESAPTTITWDITGNDPNAKRGFHIHTFGDNTNGCTSAGPHFNPHNKTHGAPSDETRHVGDLGNVETDGQGNAKGSVTDSLIKLIGPHSVIGRTVVIHAGTDDLGKGDGEESLKTGNAGPRPACGVIGISN

SEQ ID NO: 199684 - protein, 165 aa, Zea mays
  unsure (1)..(165): unsure at all Xaa locations
  Clone ID: MRT4577_113691C.1.pep
LPRPARGGHETTRRRRPRRRPPPLARRXSPSPSXLRQRPPPLRKXSVAVVERDRRPASLPRXASGRGEPEPRPLXSPPVXTRSTPPPPPAPPSSSCWSPPSSTAPPPPKQMELAESPAVRRSRGRRGGRPAVRRGEAPRPDRPEPVASLRAAGLHPWAILHVLIL

SEQ ID NO: 199685 - protein, 220 aa, Zea mays
  Clone ID: MRT4577_113692C.1.pep
METPTPRVKPGFNGVGVGMGSSVNGSSRRAGYYMGPAGAVAVAGGGRAAAAAPVDGCSVALRVFVLAATLVSAVVMGVDRQTSTIRITVSDALPPLEVPLTANWSYSSAFVYFVVANAMVCLFSAAALAACRSRAATDAWADAWVLALALLYSAVGAAAEFGILGERGNSHVRWPKVCNVYGRFCERAMAAVIVSLIAAFANLVLLMLNILTIHKSSSYY

SEQ ID NO: 199686 - protein, 96 aa, Zea mays
  Clone ID: MRT4577_113694C.1.pep
GAMPCQSSFLGTIGAIWSPSYMARRSTGPCLGAATAGDNIGVTTARCSTIAVAAGARPQLSSGEDALRSSITPARLHSSSALGPSLSLSLSSNYRE

SEQ ID NO: 199687 - protein, 85 aa, Zea mays
  unsure (1)..(85): unsure at all Xaa locations
  Clone ID: MRT4577_113697C.1.pep
PLPKVPQYKKAKDTLSAQGKPRYAPNQPENGGQTKPVFPKKAKPPKKIVLKLQCQSSKPSSQPPIKKSNLFXIGGTKKGKGPSLF

SEQ ID NO: 199688 - protein, 87 aa, Zea mays
  unsure (1)..(87): unsure at all Xaa locations
  Clone ID: MRT4577_11369C.1.pep
MATAYAPMASQVMKSSLVVHSRPRGLSGAAALTRRPGGFNVQGNQPQKGTLQVVQPNNXGNPFIGSLKTPVTSSPLVAWYLSNLPAY

SEQ ID NO: 199689 - protein, 80 aa, Zea mays
  unsure (1)..(80): unsure at all Xaa locations
  Clone ID: MRT4577_1136C.1.pep
RPPPXPATPRTNPTDPGQNSAPDQMPPAGPQTLAKSPRRPRAPPPPAGPSPRPRPPAPSRAATSPCPGGSRTRRRSRGAH

SEQ ID NO: 199690 - protein, 70 aa, Zea mays
  Clone ID: MRT4577_113700C.1.pep
YCHSPTRARGAVLLRPGQGATAMDAGGPPPLFLLGAVLAAALGWLLVVWRAAAGRQLATSERLPPGSTGL

SEQ ID NO: 199691 - protein, 558 aa, Zea mays
  unsure (1)..(558): unsure at all Xaa locations
  Clone ID: MRT4577_113702C.1.pep
MRVMTTPRRHADPSPSPSXSPPQLLSRLRSGASSFLARQYSTEKGGDNTGPSKPKGGGSSAPRHLRPGFVDPSSWKHFDSRAVGIKPGAIHTDAWAVLKKLRREGFQAYLVGGCVRDLLLKRVPKDFDVITTASLEQLKKNIFRRSRIVGKRFPICLLKMRDSVIEISSFRTVANYGNRSEVVDYVAELNGSDVRDILRWKDSMRRDFTINGLFFNPMNCKIYDYVNGVRDMRKNKVCTVIPAHISFMEDPARILRGFRIAARLGFQFSSETSNAIRDFSSSINNIDKARLMMEMNYIMSYGAAAPSVRLLRKYGLLDILLPFQSAYLSEQMKGGSSDRHLMLMKLLSNLDRLLSADRPCHSSLWLALLAFHSTLVIYPQDTLVIRAFAAVLYFGTWETTVKFLREEVGAEVPFAPETMGPSRTKLDCLKEQTSHLASLVNSSVDILTCPHDLEQSLARFSEPLQFSGVVVASNNDRKKLSAVFEGLASDLHSYDGRRGMRGIDYSSLKLGDLAEVRFVLGKVIMDTMYDKLPCESTEDEGAAADVAGGSLPPLSALF

SEQ ID NO: 199692 - protein, 63 aa, Zea mays
  unsure (1)..(63): unsure at all Xaa locations
  Clone ID: MRT4577_113703C.1.pep
AGGYGGAREDGGYGGGGPRNGGGGYGGGGGYGGGGGGYGGGGGGYGGGNRGGGXGNSDGNWRN

SEQ ID NO: 199693 - protein, 113 aa, Zea mays
  unsure (1)..(113): unsure at all Xaa locations
  Clone ID: MRT4577_113704C.1.pep
PELVQGSGCSDESILNLYRFQGALMKNICIIINTCALGMACCCGVLFLSGFFWISFKIVSILAMGVLVLPVYGXGWLTCIEFAGYVFRACAKREGFLIYYYPNKPVKKIVLFL

SEQ ID NO: 199694 - protein, 85 aa, Zea mays
  Clone ID: MRT4577_113707C.1.pep
SHYIMGEQDAPAVDHGNIMSTVGPQRHRARVHACDMSTWGDLHTLLFGGGTLLIGEGSCYPGGIVGCVNWCLALLKMENSTSQGI

SEQ ID NO: 199695 - protein, 251 aa, Zea mays
  unsure (1)..(251): unsure at all Xaa locations
  Clone ID: MRT4577_113708C.1.pep
MTKTNTMRSHDLHGYSHRHLLVQSSILLFLGTFSAAQAASDILSKGSNLTYGETLVSANGSFTLGFFSRGVPARRYLGIWFTVSNSSGDAVCWVANRDHPLGDSSGVLAISDTGSLVLLDGSGRAAWSSNTXPPAPAPLPQXKLLESGNLVLLDGNDGGVDDYGVVKLWQSFDHPTNTLLPGAKIGINLWSGGGWSLTSWRDADDPSXGEFRYTMXGRGLLPEIVTLDSSXHQYRTGVGNRRWFSGIPEMT

SEQ ID NO: 199696 - protein, 145 aa, Zea mays
  unsure (1)..(145): unsure at all Xaa locations
  Clone ID: MRT4577_113709C.1.pep
DTPFRVVYARDPPTIRSYEPANARAPAVAQEMEERAAFLDDVRYRLHQAQESQRRXRVEEVINDVAVRLQLPPGARLHDVFHVGVLRKFVGAPPSEPPVLPATLNGATVSAPARVLAGRLARGVKPVLVQWQGEPATAATWEELE

SEQ ID NO: 199697 - protein, 80 aa, Zea mays
  Clone ID: MRT4577_11370C.1.pep
VLLTRKGLLKLGGPPNFFFFFFSSWKKWPWWEKGREDFGGPWAKGPGGFGKGVWGPFIQTIRVVKDILTRAPVKWGAFQF

SEQ ID NO: 199698 - protein, 28 aa, Zea mays
  Clone ID: MRT4577_113710C.1.pep
MYRCPFCKTPNYVVEYRGFKPKEERSIE

SEQ ID NO: 199699 - protein, 71 aa, Zea mays
  Clone ID: MRT4577_113711C.1.pep
KQLGPPLNFFPPLFFLLLGPPVIPPKGFYLIHRAPPYKNVQPRFFLEFPQIGPVSLGILSLCKGYPFILFA

SEQ ID NO: 199700 - protein, 1437 aa, Zea mays
  Clone ID: MRT4577_113712C.1.pep
MSEYTLADVVKMMQEMQADISGLKEKSASSSAGGTMQERPRDTDRLPKFQKWDFPRFDGKTDPLLFINKCESYFRQHRSSPEEQVWMASYSLEGTAQLWYMQLQEDDGTPSWRRFKEQLNLRFGPTSRSAPFFELTECRRTGSVEEYSNRFQELLPHAGPMEEAQRVQLYTGGLLPPLSHSVRILHPDTLSAAMSLAREVEQLEIARVQAATRPAARGILPAPPPRPAAPTLPAPPPPLALPAPPVGAAHARGEGARRLSPEEMADRRRQGLCFNCNEKYSRGHNRFCRRLFFVDGVEIDDTGVDGDTGAAEPNAPLFSLQAVAGVAPTDTMQIAVTLGPASLVALLDSGSTHNFISATAAHRSGLPIQRRPRLTAMVANGERISCAGVLRNAPLLVEGEPYPADLFVMPLAGYDVVLGTRWLGALGPIVWDLATRRMTFQRPGRSVSWTGTPRAAQPAVRTMTGGDALMEALLDSFGGLFAAPSGLPPKRAHDHRILLKPDASPVAVRPYRYPAAHKDELERQCAAMIEQGIVRRSDSPFSSPVLLVKKPDGSWRFCVDYRALNALTIKDAFPIPVVEELLDELHGAKFFTKLDLRSGYHQVRMRPEDVHKTAFRTHDGLYEFLVMAFGLCNAPATFQALMNDVLRPFLRRFVLVFFDDILIYSKTWADHLRHLRAVLDELQRHRLFVKRSKCSFGAPAVSYLGHIISAAGVAMDPAKVAAIRDWPPPRSVRAVRGFLGLAGYYRRFVHNYGTVAAPLTALLKKDGFVWDDAAMTAFAALKAAVSSAPVLAMPDFSKPFVVECDASATGFGGVLVQEGHPVAFFSRPIAPRHRALAAYERELIGLVQAVRHWRPYLWGLKYLLDQRLATIPQHHWVGKLLGFDFEVEYRSGATNTVADALSRKDTEEGALMAISAPRFDFITRLRQAQATDPALVAICEEIRAGTRTAPWSIMGGMVAMHGRLYIPASSPLLQEIVAAIHDDGHEGVLRTLHRLKRDFHFPNMRRVVQDFVKACGTCQKYKSDHLRPAGLLQPLPIPSAVWADIGIDFIEALPSAQGKTVILTVVDRFSKYCHFIPLAHPYTAESVAQAFFAEVVRLHGVPQSIVSDRDAVFTSAFWTELMELTGTKLFMSSAFHPQTDGQSEAANRVIAMYLRCFTGDRPRQWLRWLPWAEYTYNTAFQSSLRDTPFRVVYGRDPPTIRSYEPGDARIPAVAQEMEERAAFLDDVRYRLHQAQESQRRAYDQHHRRVIYQVGDWALLRLRQRPSATLPRSAAGKLKPRYVGPYRVKEVINDVAVRLQLPAGARLHDVFHVGVLRKFVGSPPSEPPALPATLNGAAVSAPARVLAGRLARGVKQVLVQWQGEPATAATWEELEDFTASFPQFQLEDELVFEAGRDVMYGNTFTRRRRARDVRRATERAAAEQAAAHAANQPPMASG

SEQ ID NO: 199701 - protein, 245 aa, Zea mays
  unsure (1)..(245): unsure at all Xaa locations
  Clone ID: MRT4577_113713C.1.pep
MFFSRNAFRDLDPIDSPASMASSKKVATRDEWERKLRDVKIRKEDMNRLVMNFLVTEGFVDAADKFRIESGTQPEIDLAIIADRMEVKRAVQSGNVQEAIEKINDLNPTILDMNPQLYFHXQQQKLIELIREGKTXEALEFAQEXLAPRGEENQTFLEEIEKTVALLIFKGVKNCPYRELLDVSQRLKTASEVNAAILASQSHGKDSKLPSLLKMLKWTQNHLDERAAYPAINDFTTAVVEDPSI

SEQ ID NO: 199702 - protein, 116 aa, Zea mays
  Clone ID: MRT4577_113714C.1.pep
MFFSRNAFRDLDPIDSPASMASSKKVATRDEWERKLRDVKIRKEDMNRLVMNFLVTEGFVDAADKFRIESGTQPEIDLAIIADRMEVKRAVQSGNVQEAIEKINDLNPTVRFCLCS

SEQ ID NO: 199703 - protein, 1587 aa, Zea mays
  Clone ID: MRT4577_113715C.1.pep
MSEYTLADVVEMMKAMQADISGLKEKSASSSSGGAMHQRPRDADRPPKFQKWDFPRFDGKTDPLLFINKCESYFRHHCSSPEEQVWMASYNLEGIAQHWYIQLQEDDGTPSWRRFKEQLNLRFGPNSRSAPFFELTECRRTGSVEEYSNRFQELLPHAGPMEEAQRVQLYTGGLLPPLSHSVRIFHPDTLSAAMSLAREVEQLEIARVQAATRPAARGLLPAPPPRPAAPTLPAPPPHLALPAPPVGAAQARGEGSRRLSPEEMADRRRQGLCFNCNKKYSRGHNRFCRRLFFVDGVEIDDTGDDTDTGATEPNAPLFSLQAVAGVAPADTMQIAVTLGPASLVALLDSGSTHNFISATAAHQSGLPIQRRPRLTAMVANGERISCAGVLRNAPLLVEGAPYPADLFVMPLAGYDVVLGTRWLGALGPLVWDLATRRMTFQRPGRSVSWTGIPRAAQPAVRTMTGGDALMEALLDSFGGLFAAPSGLPPKRAHDHRILLKPDAPPVAVRPYRYPAAHKDELERQCAAMIEQGIVRRSDSPFSSPVLLVKKPDGSWRFCVDYRALNALTIKDAFPIPVVEELLDELHGAKFFTKLDLRSGYHQVRMRPEDVHKTAFRTHDGLYEFLVMAFGLCNAPATFQALMNDVLRPFLRRFVLVFFDDILIYSKTWADHLRHLRAVLDELQRHQLFVKRSKCSFGAPAVSYLGHIISAAGVAMDPAKVAAIRDWPPPRSVRAVRGFLGLAGYYRRFVHNYGTVAAPLTALLKKDGFVWDDAAMAAFAALKAAVSSAPVLAMPDFSKPFVVECDASSTGFGGVLVQEGHPVAFFSRPIAPRHRALAAYERELIGLVQAVRHWRPYLWGRHFTVKTDHFSLKYLLDQRLATIPQHHWVGKLLGFDFEVEYRSGATNTVADALSRKDTEEGALMAISAPRFDFIARLRQAQATDPALVAICEDIRAGTRTTPWSIMGGMVAMHGRLYIPASSPLLQEIVAAIHDDGHEGVLRTLHRLKRDFHFPNMRRVVQDFVKACGTCQKYKSDHLRPAGLLQPLPIPSAVWADIGIDFIEALPSAQGKTVILTVVDRFSKYCHFIPLAHPYTAESVAQAFFAEVVRLHGVPQSIVSDRDPVFTSAFWTELMELTGTKLFMSSAFHPQTDGQSEAANRVIAMYLRCFTGDRPRQWLRWLPWAEYTYNTAFQSSLRDTPFRVVYGRDPPTIRSYEPGDARAPAVAQEMEERAAFLDDVRYRLHQAQESQRRAYDQHHRRVIYQVGDWALLRLRQRPSATLPRSAAGKLKPRYVGPYRVEEVINDVAVRLQLPAGARLHDVFHVGVLRKFVGAPPSEPPVLPATLNGATVSAPARVLAGRLARGVKQVLVQWQGEPATAATWEELEDFTASFPQFQLEDELVFEAGRDVMYARLQGEKRIYPSSTSSLLSLRLGGHNPDRRRRPTATSYVAEILDTNPQLYFHLQQQKLIELIRVGKINEALEFAQEELAPRGEENQTFLEEIEKTVALLVFEDVKNCPYGELLDVSQRLKTASEVNAAILTSQSHEKDPKLPSLLKMLKWTQNQLDEKAAYPRINDFTTAALEDPSI

SEQ ID NO: 199704 - protein, 245 aa, Zea mays
  Clone ID: MRT4577_113716C.1.pep
MFLSRIVLRDLDSIDSPASMASSKKVVTRDEWELKLRDVKIRKEDMNRLVMNFLVTEGFVDAADKFRIESGTQPEIDLATITDRMEVKRAVQSGNVQEAIEKINDLNPTILDTNPQLYFHLQQQKLIELIRVGKINEALEFAQEELAPRGEENQTFLEEIEKTVALLVFEDVKNCPYGELLDVSQRLKTASEVNAAILTSQSHEKDPKLPSLLKMLKWTQNQLDEKAAYPRINDFTTAALEDPSI

SEQ ID NO: 199705 - protein, 40 aa, Zea mays
  Clone ID: MRT4577_113717C.1.pep
IIYHVNTHKQVVDIFTKPLDGKRFCELRNELNFIDSRNLD

SEQ ID NO: 199706 - protein, 90 aa, Zea mays
  Clone ID: MRT4577_113718C.1.pep
IRLEAELVCDFGDAKDVVGRPLMFMQVTRFKCGGFAIGVSICHNMADAFGVIQFLKSRTSHRRSSPWPWTRWSVATSSSARERSPRFEAK

SEQ ID NO: 199707 - protein, 453 aa, Zea mays
  Clone ID: MRT4577_113719C.1.pep
MVTFKAHRSDPELVTPASPTPQGSKTLSDVDSQIPLWFYATVIEFFRPRNAVDGHDTQAVVDVAEAIREALAKALVYYYPIAGRLREVSKGKLAVECSGEGVVFVDAHADVRLDELGEPLLPPYPCIEELVCDIGDAKDVVGRPLMFMQVTRFKCGGFAIGVSICHNMADAFGVIQFLKCVTDLARGDEHPAVLPVWDRELLTARNPPDPTSLPFVQESHESSPVQPMAMDKMVGCYFLFGPREIAALRSQVTEPATNFELITAAMWMCRAEAIALALGCGSAGSQQQRASSSLLITMNVRGKAKLTPPLPRGFYGNGFVFVEAELRGATRSLGGTVELVQKAKRGMTEEYVKSMVDLFSLGGAAPYAQGWTFVVSDITRIGEDELDLGWAERVAGGVPIVGNDDATKMVSYQMRCKNADGEDCVVASMYLPEPAMNKFKEKILILATSKLAT

SEQ ID NO: 199708 - protein, 39 aa, Zea mays
  Clone ID: MRT4577_11371C.1.pep
LRVSYNNNEKTTNADLSGCHVLTTVIAGLDFKPTMHTDA

SEQ ID NO: 199709 - protein, 48 aa, Zea mays
  Clone ID: MRT4577_113720C.1.pep
VLRPHPSEPFLSVHVSIHPSALNRIHVPPCLSLNTNGMNDMVTNKAMV

SEQ ID NO: 199710 - protein, 66 aa, Zea mays
  Clone ID: MRT4577_113721C.1.pep
MWISVSTTVAAESCGLSAVPNYTRRRSGFACDRLIHTTRSQKAEGAFYVYIELKFAIVAGLRRLII

SEQ ID NO: 199711 - protein, 49 aa, Zea mays
  Clone ID: MRT4577_113722C.1.pep
SISTTQRIYQFIVTVRAHVSCSCQGAVGDPSFPVKIKMRAGFVGLYRDS

SEQ ID NO: 199712 - protein, 64 aa, Zea mays
  Clone ID: MRT4577_113724C.1.pep
GCFFFFFFFFFFFFFFFFWPQKFYYPILQVTSSFTHDPRDYQKGFKKATLNCYRGGGVSKPLLA

SEQ ID NO: 199713 - protein, 54 aa, Zea mays
  Clone ID: MRT4577_113726C.1.pep
TTVMKVLGTVMSASVTQVSLGTVVTTLLYGGGVVGFVGVNRVDVYGNSNGNCRT

SEQ ID NO: 199714 - protein, 148 aa, Zea mays
  unsure (1)..(148): unsure at all Xaa locations
  Clone ID: MRT4577_113727C.1.pep
RIRLEIDMSELDEDSDGFLXSDXMEAYIRGLIPNLAQLRDMPTAFVQMYCRIAAHKFFFFCDPYRRGKACIKKVLLNNCLQELMELYQESEEEVTDTKQAENLFSLTSAERICDMFLALDKDTNGTLSKHXLXEYADATLADXFIERV

SEQ ID NO: 199715 - protein, 127 aa, Zea mays
  Clone ID: MRT4577_113728C.1.pep
WCRVVRALRVSGRFLRGVVPGSLRAWALPVWAACSRLAALSGRCVLCGSVRWPVGLLLPALALCCAPLRPWFLSGFRVRSGGGLVLLGFAEGSWCRRLGCASVRWGGGFCLVVFCSPPLVCGRFAGV

SEQ ID NO: 199716 - protein, 60 aa, Zea mays
  Clone ID: MRT4577_11372C.1.pep
SHLLTKHPFAKDRGMWLKHQTYGNPTHTPEKKECIDDFDILTPETGPLPGPTGAPGWKAG

SEQ ID NO: 199717 - protein, 274 aa, Zea mays
  Clone ID: MRT4577_113730C.1.pep
MGSLDGGHSLQQGRHHGYAHSQSHVGAGPDSSNNNNNDEDDASPPPPSGAGGGPRRPRGRPPGSKNKPKPPVVVTRESPNAMRSHVLEIASGADIVDAIAGFSRRRQRGVSVLSGTGAVTNVTLREPAGAGGAAAVALRGRFEILSMSGAFLPAPAPPGATGLTVYLAGGQGQVVGGSVMGELIASGPVMVIAATFGNATYERLPLDQADAEEGAVLSGSSEGATAQQLEQQQSSGGPVVPPSMYAVPQTPPHPHDMFGQWGHAAVTRPPPTSF

SEQ ID NO: 199718 - protein, 159 aa, Zea mays
  Clone ID: MRT4577_113731C.1.pep
MASSSGSGSSGFLSAALDAAATAGTEEELRALMAQRRAKRMLSNRESARRSRMRKQRHLDELTAQAAHLRRENAHVATALGLTAQGLLAVDAENAVLRTQAAELAARLGSLNDILACMNTTNAAAASSDPYLAFDGAATALDDLLKSCPDSMMFEYQLC

SEQ ID NO: 199719 - protein, 138 aa, Zea mays
  Clone ID: MRT4577_113732C.1.pep
VPSGPPGCFLRVGWLLLPLRFGFGFVRFSGVRFRGWSGSRWRRLMLSTAASFGGLAWATDDHSLHNAFSTYGEVLESKGPFPSQIRSWFRPDLTCPGTPSPGSVPTSLHPCRSSSIGRCIGSEVLVLIPFPLRMRCGT

SEQ ID NO: 199720 - protein, 179 aa, Zea mays
  unsure (1)..(179): unsure at all Xaa locations
  Clone ID: MRT4577_113733C.1.pep
MARSHLRLLRCRRSMSAALITWPCLSLISLPHGEYRCFVGGLAWATDDHSLHNXFSTYGEVLESKIILDRETQRSRGFGFVTFSTEEVMRNAIEGMNGKELDGRNITVNEAQSRGGRGGGGDGGYGGGRVGGGYGGGGSRDGGGGYGGAGGYGGGAGGYGGGAGGYSGGHRXGGGYENS

SEQ ID NO: 199721 - protein, 123 aa, Zea mays
  Clone ID: MRT4577_113734C.1.pep
ECAYFDRVDQLQGFGAGTKASIGELLWGFFHYWASQHRYKRDVISVRLGKTIRKQEKGWTTRVGGDRHLMCIEDPFETGHDLGRVVDRQTIWIIREEMERAAPVLQNDDDPCATLFEPYGYDL

SEQ ID NO: 199722 - protein, 201 aa, Zea mays
  Clone ID: MRT4577_113735C.1.pep
MARRRKTDAPPRLDEADRTLYSTFCGAANSLSQLYAQAMAQQKLNFHAGERHALEKLYQWILRKHDEEARLTVAEIMSHIQHEIDYVGTDAHVSPRVPQHPQIANPFANSVVPPGTGLYGQSAAGFAPRPSVTDQSKNTIFSNALSSPVRRSLQNSHTTQGAGNGGRNAEANLAGANREANSTSSNDTSMDMVSDTNEFYQ

SEQ ID NO: 199723 - protein, 106 aa, Zea mays
  Clone ID: MRT4577_113736C.1.pep
GFVTFSAKQAIRHAIEGMNIKELAGRNITVNQAQSHVGRVVAAVGGFGGVRGGAGFDGGGLRYAGAVYVGDAGFGGDDDGYGGGGAGYGGGNRGGGYGNSDGNWRN

SEQ ID NO: 199724 - protein, 101 aa, Zea mays
  Clone ID: MRT4577_113737C.1.pep
SPIRNLTAENPRSNPSPPIPTSILPVRSVSSLLPCSSEGEEGVGRGIHRRGFLIRARDSPRPGTSEKSNQERGGGSETRARGAIKIASWSFRPPRANAGSG

SEQ ID NO: 199725 - protein, 79 aa, Zea mays
  Clone ID: MRT4577_113738C.1.pep
TTFRLHGRLRLQRLRSRLSLPGQPTCDLHQLHAEQPDISKEPHDEHEPAEEWQEHLHHDFSRLAADAPKRDKLAAHELD

SEQ ID NO: 199726 - protein, 192 aa, Zea mays
  unsure (1)..(192): unsure at all Xaa locations
  Clone ID: MRT4577_11373C.1.pep
GSASSTHICQAGIQVANARXELDCLNDVIQADGHMTGDQTIDXGSDDAXNTFYXETGARXHVPRGVSDDLDTTVIHEARSESYRQILHHGQFIRVQNDAANYFSRDHDTSAWDIVDLXLDRIAKIADNCTGLHRFLVFNAGAXNTLSXLXTLLLERLTVDYDKKSTLGYTEDPSPQVSTSVLAPYHSVLYTH

SEQ ID NO: 199727 - protein, 61 aa, Zea mays
  Clone ID: MRT4577_113740C.1.pep
LGCSSASFMDYYMPIRDSRKQGFMGVACRNSQPMRLYSSLWNADDWATQGGRVKTDWSHAP

SEQ ID NO: 199728 - protein, 463 aa, Zea mays
  Clone ID: MRT4577_113741C.1.pep
PSLGLVRVPGIGFVYTELASGVPHIFSHFITNLPAIHSVVVFVCVKYLPVYTVPTEERFLVRRIGPRSFHMFRCVARYGYKDLHKRDEDFEKVLFDCVLFFVRLESMMEGYSDSDEFSVPEQAPGSGRAAFLGVGERTCATVCSNGDLSFSSQDLVVPAAVQSPRAPTGLPLLQCSASARQGTSGGTVGDELGMMPSRRRARSASTSSPSQEVVRRKRTSSRAATSMMDNFLSLYHGGDVEEDPYGNAKFIDMRHVSVLFVGRPSLSDVFTKDKQKLDYHEDDDIAVDGVLNIGHPPNVIRRVIPIDSQLDWENYVTSTMKTQLQLMEVVVWWVVVDLPPEDYDRAMNDVPTVPDAQSGPNLIPLSHPGDDLQTDSPAYIPLAQTNCSKMSGLVWEHGENIGQGFRCKYRHEGKSGGSATRSKQHLAHRGKDVKNCPSVPPEIKKFFAGELDKTKEKKRQRIV

SEQ ID NO: 199729 - protein, 76 aa, Zea mays
  Clone ID: MRT4577_113742C.1.pep
MFCNWGSSCGCGSSCKWGKKYPDLEETSTPAQAPVVLGGAPEKKAAPEFVKAAGESGEAAPGCSWGGNCKWDPCNC

SEQ ID NO: 199730 - protein, 65 aa, Zea mays
  unsure (1)..(65): unsure at all Xaa locations
  Clone ID: MRT4577_113743C.1.pep
PFNQLTVXNTTAYLQQRQQLLNPLXVPXPLVTPFLQQPQLXPYSQFSXMXPALSWQQPIVXGAIF

SEQ ID NO: 199731 - protein, 128 aa, Zea mays
  Clone ID: MRT4577_113744C.1.pep
MALAGDKNWASSELLEFIGHMRNGDNSYISQFDVQVLLLEYIKQNNLHDPRRKSQIICDARLSNLFKKPRVDHFEMLKLLEMHYLVKQASTPNADSQRAIYSDSAQVNNGGHNELADTLFDRRKAHKK

SEQ ID NO: 199732 - protein, 41 aa, Zea mays
  Clone ID: MRT4577_113745C.1.pep
LKNGGHLTHPTMCPLKLTTSHSAGLFIGIRKSCTPHPHALS

SEQ ID NO: 199733 - protein, 83 aa, Zea mays
  Clone ID: MRT4577_113746C.1.pep
QRQGFQKRRPVPLRKNLARLENKKSWVSFGGPPQKKGEGKKSLGPLNKAGGPRKFFFRKKTPKEGFKLPLMGLFFLKDGPPFF

SEQ ID NO: 199734 - protein, 260 aa, Zea mays
  unsure (1)..(260): unsure at all Xaa locations
  Clone ID: MRT4577_113747C.1.pep
TTVQTAKVYQNVNCLGQEGSSPNSTPTTAISNGAAPVDNVKSPDGPDSSKQKQELTSGDEQTPDSFKQKQELTFGDEHTPDSSKQKPELTSLDKQTKSSEQLISCDQEVREPVTVETEKLSDVNSKKDHKLCSSIGSEMAEQSKVVKDNESIVASEELSPGTNDVDKKQITETGNITTEESSKPSDTKPAVVKPKRGRPPAAKSQEKKPAGKKHASDLXSAKLDPITDSGGRATRHLNKDAAKSSSTKAAEGESEKEQHK

SEQ ID NO: 199735 - protein, 29 aa, Zea mays
  Clone ID: MRT4577_113748C.1.pep
TQSYQKYVVSTEAKHVDMSICYRRMTCGK

SEQ ID NO: 199736 - protein, 86 aa, Zea mays
  unsure (1)..(86): unsure at all Xaa locations
  Clone ID: MRT4577_113749C.1.pep
PSSFFFFFAFCFSLLLSXPQTINLNSFKNRVGKLGPTMSYSQQWPSQYSVPKSGGTVQCHPLSARLVRSVRRKTNIPHRFGMFPPT

SEQ ID NO: 199737 - protein, 102 aa, Zea mays
  Clone ID: MRT4577_11374C.1.pep
LPPVQCNVMFCLNDLYRGPGVFSRRGGRQARFSFVSGCALKFYFWLRSTGSKKESSSSSRSRPQSPVCVWAKIKAPVPPPPKYSCFFPCSFFPLLSFIGQFL

SEQ ID NO: 199738 - protein, 72 aa, Zea mays
  unsure (1)..(72): unsure at all Xaa locations
  Clone ID: MRT4577_113750C.1.pep
GLVLLLCPSPSFRVCLFVFFFXQNMYITCDQPLTVIPRDTPLRNHCRHLYINCPVTTIKDNSSVICILSVSL

SEQ ID NO: 199739 - protein, 55 aa, Zea mays
  Clone ID: MRT4577_113751C.1.pep
ALKIKHLLPISMIKRKSTLVSYRQTDFQCELRILFLEQERMFSPMITAVCARYIE

SEQ ID NO: 199740 - protein, 100 aa, Zea mays
  Clone ID: MRT4577_113752C.1.pep
SEKVFNLPFFITDMISVGALERPPLQASWETAHGTLTCRPGRCLRAMRIAPAHWYLAVSTGRLSSIDTVHRLWRYPNLHSYRLRSPLVSHHPTAPAIRVL

SEQ ID NO: 199741 - protein, 65 aa, Zea mays
  Clone ID: MRT4577_113753C.1.pep
GIDCTGLWRRSSPNIPKSLLYWLIFSFCPLQFLISYIGAGGYCQQYYMDEWMGWRRVRSIWLTLV

SEQ ID NO: 199742 - protein, 167 aa, Zea mays
  unsure (1)..(167): unsure at all Xaa locations
  Clone ID: MRT4577_113754C.1.pep
KPLCPNKTPGVLLEFPYQPLEGFSRSMGETTVGCGHFWAQPDXGFPLGGKRFNFNPSRAFFKFGKXQGSPCLHGFSPLGFPPPPGPLWVLGGGFLGGFPPLFFFCQIRGGFSKVPLGNGFGATPPKGKGVFLGFFPPPRGVIFPPPVYSAFPDLRPPPFFFTWGQKK

SEQ ID NO: 199743 - protein, 404 aa, Zea mays
  Clone ID: MRT4577_113755C.1.pep
VPLLRRRPRLGHGRPLPPQRLQHLRRGPRVQDHPLNSKVVSQYSTLLSPLAVDAALSVVDPAHPDLPDLRDIRIIKKLGGTVDDTELVPGLIFDKKASHAAGGPTRVENAKIAVIQFQISPPKTDIEQSVIVSDYAQMDRILREERNYILGMVKKIKAAGCNVLLIQKSILCDAVTDLSLHYLAKAKILVVKDVERDEMEFITKTLNCLPIANIEHFRTDKLGYADVVEEISVGEGKVVKITGIRDMGRTATVVVRGSNQLVIDEAERSLHDALCVIRCLVNKRFLIAGGGAPEIEMSMQLAAWAKELRGMESYCIKEFADALEVIPYTLAENAGLNPISIVTELRNRHARGEKNAGINVRKGQITNILEENVVQPLLVSTSAITLACECVRMILKIDDIVTVR

SEQ ID NO: 199744 - protein, 60 aa, Zea mays
  Clone ID: MRT4577_113756C.1.pep
PYDFLSLVPVIEGAGGSITDWRGDKLYWPVTAESQPTSFNVVAVGDARVHKEALDALRWR

SEQ ID NO: 199745 - protein, 43 aa, Zea mays
  Clone ID: MRT4577_113757C.1.pep
VPRLREGTKLKDFFGAWKLSGITKMKMAPVHFYLSTNHSLEEA

SEQ ID NO: 199746 - protein, 83 aa, Zea mays
  Clone ID: MRT4577_113758C.1.pep
PAAERSSRVPGARVTRDRLTDRSPRPAFTRVRAAVALSAPCPPLTDATSSPRRYGALARFKCPAVVRQVARSTVARRSPQTRT

SEQ ID NO: 199747 - protein, 112 aa, Zea mays
  unsure (1)..(112): unsure at all Xaa locations
  Clone ID: MRT4577_113759C.1.pep
QRSLGLGFVPFPPEQPIRTXIQGMQXKDVHGHNISVIESQSIVGHGVDVVGGHGGARAGAGYAGDGHRDGDDGYDGVGDYGGDGGGYGGGGGGYGGGNRGGGYGNSDGNWRN

SEQ ID NO: 199748 - protein, 114 aa, Zea mays
  Clone ID: MRT4577_11375C.1.pep
FRFVKKKKKKKKKNSRGKSPPSRGMAYRNSLLPPTRPAPRSLLNCIAPCEAPCHLKSKLVPGISSARSLRTQAKSMSGVKSMIVPKVGVAPKLPVRELRLNGGKRNRLKGEKAI

SEQ ID NO: 199749 - protein, 339 aa, Zea mays
  unsure (1)..(339): unsure at all Xaa locations
  Clone ID: MRT4577_113760C.1.pep
MLSSSSSTHSATSPFPGLASANPNPRSRLLRLRAASPVSSAVLSASGPPPMSTVRASFAAGAAGRRAAAVGELATERLVEVAQRAADAAGEVLRKYFRQRVEIIDKEDHSXPVTIADREAEEAMVSVILKSFPTHAIFGEENGWRCAENSADFVWVLDPIDGTKSFITGKPLFGTLIALLHNGKPVIGVIDQPILRERWIGVDGKQTTLNGQEISVRSCNLLAQAYLYTTSPHLFEADAEDAFIRVRNKVKVPLYGCDCYAYALLASGFVDIVVESGLKPYDFLSLVPVIEGAGGSITDWRGDKLYWPVTAESQSTSFNVVAAGDARVHKEALDALRWR

SEQ ID NO: 199750 - protein, 177 aa, Zea mays
  unsure (1)..(177): unsure at all Xaa locations
  Clone ID: MRT4577_113761C.1.pep
LFWLLQLLGLYACAVTATLLQHCSQAPTISLLPPNLSPTXKSGCENAILXPYRNQQPILGAMLPXNPTSSNNHKTYYSSHHLVHLLAQNIRXAQQLQQHVLPNLAGYYQQHQVLPYNQLSALNSASYYQQQQLPFIQLSADYPQQLLAVNQLTSFNSPAYLQHEHLLPFMQLAGVSP

SEQ ID NO: 199751 - protein, 140 aa, Zea mays
  Clone ID: MRT4577_113762C.1.pep
GSPGFGFVGERIEMAASDVEYRCFVGGLAWATDDHSLHNAFSTYGEVLESKIILDRETQRSRGFGFVTFSTEEAMRNAIEGMNGKELDGRNITVNEAQSRGGRGGGGGGYGGGRGGGGYGGGGRRDGGGGYGNSDGNWRN

SEQ ID NO: 199752 - protein, 111 aa, Zea mays
  unsure (1)..(111): unsure at all Xaa locations
  Clone ID: MRT4577_113763C.1.pep
LGEKNKKTYTQKKRCKNAIKGMNGKELDGRNITVNEAQSRGGRGGGGGGGYGGGRGGGGYGGGGRRDGGGGYCGGCGXYCGGGGXYCGGGGGYCGGNRGGGYGNSDGNWRN

SEQ ID NO: 199753 - protein, 76 aa, Zea mays
  Clone ID: MRT4577_113765C.1.pep
GTPPPHIQTECDCCQTPLAGLIVPLGVSTLITIRSHLPPPVHLLTAGHLTTAKTLPATDNVIDIESSDSDAMTLRY

SEQ ID NO: 199754 - protein, 138 aa, Zea mays
  Clone ID: MRT4577_113766C.1.pep
MAAEPIRTALLFLLLALASSVAAASTAPAPARAPTATGCRRGDLVVRQRATGRVVEGKPEYAVEVRNACRCAQSRVLLRCYGLSSVEAVDPRAIRAVDARRCLLRGGRALAPRGGAVRFTYAWMTPQDFPLLSSRPHC

SEQ ID NO: 199755 - protein, 492 aa, Zea mays
  Clone ID: MRT4577_113767C.1.pep
MKTRSSARGEPRRLGNAALLALMLCSVVALSLIRGRFAPIVTTAGDAIKSEDDAAAAALRVSKAAVNVDTGDSADEAAAEAAAEEKEKEEVQPKPADGSGSGSGGSAAKPVCYETSRRSDTCEAAGDVRVVGSTQTVYVDSLDREWKTKPYCRKHDNFALAHVKEWSLKPLPSGAAPQCTVNSSATAFVLSTGGFTGNPFHDYTDVLIPAFITAHPLRGEVQFLVSSYKSWWMNRYIQIFQQMSRHEVVDIDADDEVRCYRSVVVGATFHRELGVDASKSPPGYSTADFRKMLRDAFGLERATATPSGDRWDIRRRPRLLIISRRPSRGRAFMNERAMADMAASLGFDVRIGEPDTSTDTSKFARLVNSCDVMVGVHGAGLTNMVFLPAGAVVVQVVPYGRLEWLARNTFAEPSAGMEVHYLEYVVQLDETTLSEQYPSDHPVLRDPMAIHKQGWNALKTTYLDKQNVRPPPRWIKNTLLQALKMLPHGRDD

SEQ ID NO: 199756 - protein, 204 aa, Zea mays
  unsure (1)..(204): unsure at all Xaa locations
  Clone ID: MRT4577_113769C.1.pep
MAARVLAALALALALALVAVPAPTRASNDEGDALYALRQRLSDPNGVLQSWDPTLVTPCTWFHISCDQVGRVVRLDLGNSNVSGSIGPELGRLVNLKYLELYRNNLDGEIPKELGNLKNLISLDLYANKLTGGIPKSLSKLDSLRFMRLNNNKLTGSIPREFAKLSNLKVIDLSNNDLCGTIPVDGPFXNLPLXSFENNSRLNG

SEQ ID NO: 199757 - protein, 77 aa, Zea mays
  unsure (1)..(77): unsure at all Xaa locations
  Clone ID: MRT4577_11376C.1.pep
VHLGSGPNQGHXVAMIKSHDHWLSFDDDNVEMIPESTLQTFYGSSREYSGNTDHGYILFYGRIGGSGNEKTDSSDGV

SEQ ID NO: 199758 - protein, 100 aa, Zea mays
  Clone ID: MRT4577_113771C.1.pep
NAHRGKGLWAVDLGKPNADERTPSKATPKVVLPGKTPMVYDQPLVTPLINVETNFRALLPNSWNQEFLFPFKQYMVKVRPAIFSNVFRVVRFALNPPVRK

SEQ ID NO: 199759 - protein, 193 aa, Zea mays
  Clone ID: MRT4577_113772C.1.pep
MAARVLAALALALALALVAVPAPTRASNDEGDALYALRQRLSDPNGVLQSWDPTLVTPCTWFHISCDQVGRVVRLELYRNNLDGEIPKELGNLKNLISLDLYANKLTGGIPKSLSKLDSLRFMRLNNNKLTGSIPREFAKLSNLKVIDLSNNDLCGTIPVDGPFSTFPLRSFENNSRLNGPELQGLVPYDFGW

SEQ ID NO: 199760 - protein, 601 aa, Zea mays
  Clone ID: MRT4577_113773C.1.pep
TLWTRVNNTVANRITWPRGPHRSVPPVPVGVAVAAATVATAVAAATTTVAAAATTVAAATAVAAAAITAPATAVAAKVSSPSVIGTAMPSLDFETSVFKKEKVSLAGHEEYIVRGGRDLFPLLPEAFKGIKQIGVIGWGSQGPAQAQNLRDSLVEAKSDIVVKIGLRKGSKSFEEARAAGFTEESGTLGDIWETVSNSDLVLLLISDSAQADNYEKIFSHMKPNSILGLSHGFLLGHLQSLGFDFPKSISVIAVCPKGMGPSVRRLYVQGKEINGAGINASFAVHQDVDGRATDVALGWSVALGSPFTFATTLEQEYRSDIFGERGILLGAVHGMVEALFRRYTEQGMDEDSAYKNTVESITGIISKTISKKGMLEVYNSLTEEGKKQFIEAYSAAYYPCMDILYECYEDVSSGSEIRSVVLAGRRFYEKEGLPAFPMGKIDQTRMWKVGERVRSTRPQGDLGPLHPFTAGVYVALMMAQIEVLRKKGHSYSEIINESLIESVDSLNPFMHARGVAFMVDNCSTTARLGSRKWAPRFDYILTQQAFVTVDKKAPINQDLISNFMSDPVHGAIEVCAQLRPTVDISVTADADFVRPELRQSS

SEQ ID NO: 199761 - protein, 205 aa, Zea mays
  unsure (1)..(205): unsure at all Xaa locations
  Clone ID: MRT4577_113774C.1.pep
MAARVLAALALALALALVAVPAPTRASNDEGDALYALRQRLSDPNGVLQSWDPTLVTPCTWFHISCDQVGRVVRLDLGNSNVSGSIGPELGRLVNLKYLELCRNNLDGEIPKELGNLKNLISLDLYANKLTGGIPKSLSKLDSLRFMRLNNNKLTGSIPRGVCXLSNLKVIFENNSRLNGPELQXLVPYDFWMLDADQQCTTFPS

SEQ ID NO: 199762 - protein, 217 aa, Zea mays
  Clone ID: MRT4577_113775C.1.pep
MAARVLAALALALALALVAVPAPTRASNDEGDALYALRQRLSDPNGVLQSWDPTLVTPCTWFHISCDQVGRVVRLDLGNSNVSGSIGPELGRLVNLKYLELYRNNLDGEIPKELGNLKNLISLDLYANKLTGGIPKSLSKLDSLRFMRLNNNKLTGSIPREFAKLSNLKVIDLSNNDLCGTIPVDGPFSTFPLRSFENNSRLNGPELQGLVPYDFGC

SEQ ID NO: 199763 - protein, 81 aa, Zea mays
  Clone ID: MRT4577_113776C.1.pep
VIGRSCYMGLHAALVLYHLWADPLVLVFQSVLVEHQSPRLLCNSMISVIRNVGGPATPKKKPSDHCCLEIHAEVVALIKAS

SEQ ID NO: 199764 - protein, 100 aa, Zea mays
  Clone ID: MRT4577_113777C.1.pep
NKIKETCKTLETPVGPISDNAKELHSMVMKLGHLSSLHAGNLHKALEVPGERESMRSQDLLSTHPDLLQSDSSTEKDRASLGMDSGSPDLELNTDICLQD

SEQ ID NO: 199765 - protein, 50 aa, Zea mays
  Clone ID: MRT4577_113778C.1.pep
FAPPYKLFFFQKARGFRAGDFWPTKNKSFWALTSTWEPWLVLFTICRIST

SEQ ID NO: 199766 - protein, 157 aa, Zea mays
  Clone ID: MRT4577_113779C.1.pep
GCWTANHELKKPSISLLFPTIDRVKKGACGIQLCRNLLSLPEKTWQRLRSTGLFHDAIPQPNARIGHPMHVKVAQRRFKSCFGEHSFGWTYCGSHNFSPAAWGQPLSPPSKANPSKAKSAPSSPMLHICNYELGIILIALPPGMSKHACESRHRIED

SEQ ID NO: 199767 - protein, 108 aa, Zea mays
  Clone ID: MRT4577_11377C.1.pep
GEARLSDAVLQAKLVLVLSAACCILQLSWPPNWSRVYVYICWDLSSPLFSALDLDYCCTSTRFFLWFLLYKKIHQTLHTLGLAVRYTGPELPNLPLRPDRPCLEATSQ

SEQ ID NO: 199768 - protein, 156 aa, Zea mays
  unsure (1)..(156): unsure at all Xaa locations
  Clone ID: MRT4577_113780C.1.pep
CDSSKAGVGKTTTTASLAASLARHGLPAVIVDAGLLNLDLLFGFKNRVHLTAATVLAGDFPLDXALVCHHALHDLHLLCLXKPRSMLPLSFGSKTLTWVTDAVTSVGAKVAHPLARLINNGNMTSYNGGRAKSTSTKRRLWDGGIDQDRQGPCQLP

SEQ ID NO: 199769 - protein, 68 aa, Zea mays
  Clone ID: MRT4577_113781C.1.pep
PFSLLPLLGKGACSPGKLNWDQAGFSQTGQFKQPAKNFIIGEPYRKMVCLRKHEKKIFSTLNANALFF

SEQ ID NO: 199770 - protein, 198 aa, Zea mays
  unsure (1)..(198): unsure at all Xaa locations
  Clone ID: MRT4577_113782C.1.pep
LSDCDSSKAGVGKTTTTASLAASLARHGLPAVIVDAGLLNLDLLFGFKNPVHLTAATVLAGDFPLDXALVCHHALHDLHLLCLXKPRSMLPLSFGSKTLTWVTDAVQVAAIHATQKYFVSASGDNLWCFEFYDISTRSCLTQITSVRAKVAHPLARLINNGNMTSYNGGRAKSTSTKRRPWDGGIDQDRQGPCQLPKA

SEQ ID NO: 199771 - protein, 92 aa, Zea mays
  Clone ID: MRT4577_113783C.1.pep
AATSSSAPAVSAASASTAACCSAAVSSSGSAVAAAWASASTSPGADSSGSPDVGVVSSTGASSAATTVGVWTSAVAIGDDEKADGYAKEWRG

SEQ ID NO: 199772 - protein, 100 aa, Zea mays
  unsure (1)..(100): unsure at all Xaa locations
  Clone ID: MRT4577_113784C.1.pep
PHQTGQVQASSTPAQGGGYLAPPPYSHGRXPTYYPPPPPYGGYMPPPGMPYPPQYPPFQPMLAHPAQVQVSFFWHPPHAGGGHHHPPYGPPAHQQPHQPF

SEQ ID NO: 199773 - protein, 37 aa, Zea mays
  Clone ID: MRT4577_113785C.1.pep
PAPGSCLILSLQVTVEYLNKGYCYNFSFAFTPSSSSP

SEQ ID NO: 199774 - protein, 59 aa, Zea mays
  Clone ID: MRT4577_113786C.1.pep
LGVARETRRCASLERTVIGSCLYPACVRESLFVVGPQASMANASFQSLRSSSQICEVDC

SEQ ID NO: 199775 - protein, 101 aa, Zea mays
  unsure (1)..(101): unsure at all Xaa locations
  Clone ID: MRT4577_113787C.1.pep
DXFFXXKXFFFCFFLGVFRVLPXXPXGGKKGDQPWTTKFLGKTKPKAGPKKGGQEIKCPFYPGVYLKALKKGGHVEKKKQPLFFFRNLPKCLSRDQLKNVI

SEQ ID NO: 199776 - protein, 142 aa, Zea mays
  unsure (1)..(142): unsure at all Xaa locations
  Clone ID: MRT4577_113788C.1.pep
TSQVEEVFTFFDDVLYDRISTLDLPTVMRTWSLDPTQADLHHMINEADADVNGIIDFPEFLNLMASQINDTAXSEEELREAFRECDKDQNGFISAAEIRHVMTNVGDNLTDEEVDKMIREADVDADGQINYEECVKVXMMAK

SEQ ID NO: 199777 - protein, 96 aa, Zea mays
  Clone ID: MRT4577_113789C.1.pep
CRASELRAQTLTAFSRIARHVTLLRPLILLASPAVTRLASAACADEKFPAARAYSSCEDLPKLLASLHWTYDAYNSCLSMACAAAPDITADHWRMA

SEQ ID NO: 199778 - protein, 66 aa, Zea mays
  unsure (1)..(66): unsure at all Xaa locations
  Clone ID: MRT4577_11378C.1.pep
MQDWAPVFVSLVLFILLSPGLLFQMPGKCRIIEFGNFQTSAISILAXRHRSLLLCSLSIYIVCMNE

SEQ ID NO: 199779 - protein, 154 aa, Zea mays
  unsure (1)..(154): unsure at all Xaa locations
  Clone ID: MRT4577_113790C.1.pep
LITTHLSTAVMGIIWQLHSDDAGSFYVIYAAIXGLMTISLLYNIAQGGLLPFPITAFFLINTLSWTYRRRTTPDYEVSNLIDSXDFIKTVNTSNRVPAICIFCTDLMNCIPPIVRHYVEHMGCXRELMVFVTVRHLPATSVLPEERFLFDRLEP

SEQ ID NO: 199780 - protein, 42 aa, Zea mays
  unsure (1)..(42): unsure at all Xaa locations
  Clone ID: MRT4577_113791C.1.pep
FGSRAXLRDKPTKISYRVTDRPLWHRCRTRVMHAPSLTRGAL

SEQ ID NO: 199781 - protein, 324 aa, Zea mays
  Clone ID: MRT4577_113792C.1.pep
MADEVQQLTRAFSGLGGLGVDEPAMVSALARWRGQPEKRSAFRKGFPGFFSSHGGDMDRREEEYMLHLAAEFARFRDLVVLWATHPWERDARLAHHVLHHHHHHPPAVVVEVACARSADELLGARRAYQALFHRSLEEDVAHRARDKPYCSLLVGLVSAYRYEGPRVDKEVAKAEAEALGAAVKRAGNGKLVENDEVLRILTTRSKPHLVQTFMYYKEMHGRHVEEDLGQRGEETLLETVLCLVAPAQYFSQVIEGALRDGADHHGKEALTRVAVTRSDHDMDDIRAAYHQQFGAKLEDVIAAKAHGHYRDALLSLVGAGNSSV

SEQ ID NO: 199782 - protein, 115 aa, Zea mays
  Clone ID: MRT4577_113793C.1.pep
GPEINGDNFYRTTGGVIYPFVPWGGYAYQFWLNFKAALHALGANEHLLWPFLGWAPEHRDNELPDPLFRGDLVPGWGAQFPGLLKGSNLSLAETGDLTHSFFTSRQAPLGLVPPP

SEQ ID NO: 199783 - protein, 131 aa, Zea mays
  Clone ID: MRT4577_113794C.1.pep
LAGTRFPFPARFTAAPSASASGFATSLSPVGPRTCTRSPARPAAAHTQEKKIAVRSGAEELCCQRERERRQLRPSSCARRSRCSRACPGRGARRPPRGSGGRAPGTPGARPAARRRTARRRPPRRRRAGGG

SEQ ID NO: 199784 - protein, 237 aa, Zea mays
  unsure (1)..(237): unsure at all Xaa locations
  Clone ID: MRT4577_113795C.1.pep
MPAPAPWPVSQDVAALADRASSFSRAVVGPRNDLGALAAALLRIQPVARELERWRWLTPGDPEVPDLHAWLELTDAVADAESILDELHRRRQIGPPLSACVYATFRGPGRKLRRLTERLNRARDDSERLRPGSAAAIYGVRSPNRVTGSVFAERKVLGRGEECNSIISRLVDDCEETCRPVSPVIAVIGHGGIGKTTVAQCVYNDARVEARXDLRAWVCVWDRSDEAELTREILQSI

SEQ ID NO: 199785 - protein, 48 aa, Zea mays
  Clone ID: MRT4577_113796C.1.pep
PSFRHGDEDREGHGDHRHGYEDCELCVNTCDIMYRHYKCCIIEIYHIL

SEQ ID NO: 199786 - protein, 67 aa, Zea mays
  unsure (1)..(67): unsure at all Xaa locations
  Clone ID: MRT4577_113797C.1.pep
RRFICKLVNMGEQLLTEEALMTXGKFTLDNLSYLGNSDRLGADRQCARLMESRTNLSKWWDTVSRHD

SEQ ID NO: 199787 - protein, 153 aa, Zea mays
  Clone ID: MRT4577_113798C.1.pep
GIYREIAAETIYKERCITVDNGDSWTKYMSISGSSEDEHDIITLQYTEEGLLTIDENRDGRAAAFGDDIAIECLATEFKREVYVVQAHGADAMVDEDNCVFFLPHSPRGEVCEPPIFLFMKGTAWCGAGADHYEPLIATVLQHVTPDKAAVIL

SEQ ID NO: 199788 - protein, 187 aa, Zea mays
  Clone ID: MRT4577_113799C.1.pep
MATPPALLFPSPSSASSPPSSAQVEAVVLFNVCDSYVRRPDQADRVIGTLLGSLLPDGTVHVRNSYVVPHSESADQVAIDIDYHHNMYASHQKVNPKEVIVGWFSTGFGVSGGSTLIHEFYSREVQSPIHLTVDTGFTRGEASIKAYVSSNLSLGDRQLAAQFQEIPLDLRMIGAEKAGCMCHFPVC

SEQ ID NO: 199789 - protein, 186 aa, Zea mays
  unsure (1)..(186): unsure at all Xaa locations
  Clone ID: MRT4577_11379C.1.pep
MAEKTVVLYPSLGVGHLNPMVQLAKAFLRRGVAVTIAVVDPPGKDPVLEAAVTRLASASPSIAVHLLPIQPASTNEQYSNTALRMLDELRLASPVLREFLRSLPAVDAIVLDMFCVDALDVAAELAVPAYMFYASAAADLAIYLQVPDIFRAAPFSFKDMGDTALPFSGVPPXRALEMPDNMAERE

SEQ ID NO: 199790 - protein, 78 aa, Zea mays
  Clone ID: MRT4577_1137C.1.pep
KGTRFGSCGLSAHQVVFARLASGNLCSGSKHFFFFWDKYPGLMGFNVVGSQSAPEVLLMIPPRMIFLPSILLFPRLRT

SEQ ID NO: 199791 - protein, 88 aa, Zea mays
  unsure (1)..(88): unsure at all Xaa locations
  Clone ID: MRT4577_113800C.1.pep
FAVVGVFQLCVCRLLVRCVLLHGVFWVWVGGFGGLAVRWVARLCCVCCQALGVCVGLGGSGLPPXVGFGARPPPCCSAPLLGSAMAIV

SEQ ID NO: 199792 - protein, 105 aa, Zea mays
  Clone ID: MRT4577_113801C.1.pep
AMHALSSNGSRTAARDLKRGGGVPKRERLCPCRAIYRHPPQERERGPKKNGFPPDLSYRALNLKTERDPQKNVVRPPEHLRHMEDWGASRTWKSIKQSERQREHA

SEQ ID NO: 199793 - protein, 84 aa, Zea mays
  Clone ID: MRT4577_113802C.1.pep
EALVLEDDPVWKKKENQAILSSSPHVSRQCQRTQPRHLMAFRTQVFELISIFGRQCGYAQHRLPAECIKHQSCCSAEEKRSIPA

SEQ ID NO: 199794 - protein, 112 aa, Zea mays
  unsure (1)..(112): unsure at all Xaa locations
  Clone ID: MRT4577_113803C.1.pep
TLGCHLLCHLYSHLYPIHYTAFNNKTTFDTQLNTLLTHLPLHTSLNIXHASTYPPSQHFHKLNLKLNSPCNSPLISAFIFFTLIFTITLTNTLTPPPFLFFPSFFSNFLPFF

SEQ ID NO: 199795 - protein, 65 aa, Zea mays
  Clone ID: MRT4577_113804C.1.pep
TCRNPLGLTCFTKSACRDLGTIRYTSYNTIKSNCVRALMVARSAKQTYSVLEVMQLDQVLNPRYL

SEQ ID NO: 199796 - protein, 48 aa, Zea mays
  Clone ID: MRT4577_113805C.1.pep
IGARELIRNHSSDWFSKGIGILTLFLVDALMILSFRNQDSIRYKLSPS

SEQ ID NO: 199797 - protein, 184 aa, Zea mays
  Clone ID: MRT4577_113806C.1.pep
PSQPELTNVTMGRLQEYEVIGRHLPTEADPTPALYRMTIFAPNETVAKSRYWYFLRGLKKVKKATGEIVSVKVLHEKHPLKVKNFGVWIRYDSRSGTHNMYKEYRELSRTDAVESLYSDMAARHRARFRSIHVLRVVEIEKTEDIKRPYIRQLTQKNLSFPLPHRITKENTQKLFSAKRPSTFA

SEQ ID NO: 199798 - protein, 101 aa, Zea mays
  unsure (1)..(101): unsure at all Xaa locations
  Clone ID: MRT4577_113807C.1.pep
QPTRRMAPQXDRKPKMATWTSNLDLTPPVEDGICDSGDFXEQFLREKVIVNGKTGNLGYVVHIERFKNSITVVSEKQFSKRYLKYLTKKYLKKNNLRDWLR

SEQ ID NO: 199799 - protein, 109 aa, Zea mays
  unsure (1)..(109): unsure at all Xaa locations
  Clone ID: MRT4577_113808C.1.pep
MKRTPAVRGGTFIINVVWRNILGQALVQILDMGGLQTEEQWLIVAEEHIXDVVSITVYIIQKESTLHLMLGITGGMQRFEKTLTGKTITLEVESFDTIDNVKVMIQDME

SEQ ID NO: 199800 - protein, 51 aa, Zea mays
  Clone ID: MRT4577_113809C.1.pep
MNEWQEQCDKDYVVNVAEVTKDCNTTCDEGNHSLLQKNCKTDWHRSSFLNG

SEQ ID NO: 199801 - protein, 70 aa, Zea mays
  Clone ID: MRT4577_11380C.1.pep
MQDWAPVFVSLVLFILLSPGLLFQMPGKCRIIEFGNFQTSAISILVHAILFFALAAIFLVAVGVHMYLGS

SEQ ID NO: 199802 - protein, 112 aa, Zea mays
  Clone ID: MRT4577_113810C.1.pep
SLHQPCVNIPCSTKPCEHSNNNLCKHSGETERKNNEYEEAETDNGQEKLERRERESEVSPNQNVMMKTFITCQIHIRKREVEAGHHYTNLVAPRPRSPQQASKQTKRHHVEK

SEQ ID NO: 199803 - protein, 42 aa, Zea mays
  Clone ID: MRT4577_113811C.1.pep
KKKQKKKKKKRNFKKKKKKKKKKKKKKKKKKKKKKKRGLLLN

SEQ ID NO: 199804 - protein, 131 aa, Zea mays
  unsure (1)..(131): unsure at all Xaa locations
  Clone ID: MRT4577_113812C.1.pep
MQWQGKTKERMASPIPSEWIGLQQFPAGTQTKLHXLLGKLKEEDVSTXTILAMGKGGVGKSSTGNYDRWERAAYVSGFQGXTLNIIDTPGLIVGGYINEEADDIIERLLLSMTIDVLLDLDRMDAYIMDTL

SEQ ID NO: 199805 - protein, 135 aa, Zea mays
  Clone ID: MRT4577_113813C.1.pep
MASSSKQNAAVAAISVALLLTSHLAVAVAVAAGAEAGGVAPLNTCETPIAWAPCFGKTWVCVPLCLGLHYTGGFCQQEQMSEGDAGAEPAIIGGAICVCTKQCLLDVEAVQGAPAPSQPPVAEPPRGMRGVGMLN

SEQ ID NO: 199806 - protein, 117 aa, Zea mays
  Clone ID: MRT4577_113814C.1.pep
NGITVVAVAVAAGAEEAEAEGIAPLNTCETPIAWAPCFGKTWVCVPLCIGLRYTGGFCQQQQVIEGDAEPAIIGGAICVCTKQCLLVDVEAEQGAPAPSQPPVAEPPRGMRGVGMLN

SEQ ID NO: 199807 - protein, 85 aa, Zea mays
  unsure (1)..(85): unsure at all Xaa locations
  Clone ID: MRT4577_113815C.1.pep
HQTVRAGPHRLICAEAADEAPEXPXMSRVGGGXXHXXKQIGWGTLVTCVGAARLDGPAGETTXKGIMVFAHLVVGILWQYSWPLA

SEQ ID NO: 199808 - protein, 91 aa, Zea mays
  unsure (1)..(91): unsure at all Xaa locations
  Clone ID: MRT4577_113816C.1.pep
VSGVQYEDVKGPFTVRAGPLGCSDSSPCSGIPLPGIQLQPLPLPQHPRLLFDPFCWQAFGELYPXXVPPIPCLQIGRPAPGNSVLSDGALC

SEQ ID NO: 199809 - protein, 344 aa, Zea mays
  Clone ID: MRT4577_113818C.1.pep
MEVVNRYVATRHHIEGAPTEADFEVKEETARWAPDSGEVLVRNLYLSIDPYQLNRMKRSSASHLAVDGTLPGQRIAAYAAGEVVASACEEYKVGDVVAGVLGWEDYTLFKPSPAVLMSKVADADAAGFPLSHHISVLGTSGMTAYGGLFEVGKPVKGEKVFVSAASGSVGSLVGQFAKLAGCYVVGCAGTTAKVDLLKDKLGFDDAFNYKEEPDLKSALKRYFPDGIDIYFENVGGEMLEAALANMNTYGRVALSGVISEYTGGGRRAVPDLLEVIYKRITIRGFFAWDFLPRFAEFNAVIGGWVRDGKVQVLEDVSDGLESVPSAFAALFRGQNVGKKLVKLA

SEQ ID NO: 199810 - protein, 356 aa, Zea mays
  Clone ID: MRT4577_113819C.1.pep
MEVVNRYVATRHHIEGAPTEADFEVKEEMARWAPDSGEVLVRNLYLSIDPYQLNRMKRSSVTHLAVEGILPGQAASTLLSPSPSVKRITTYAAGEVVASACEEYKAGDKVAGVLGWEDYTLFKPSPAVVMSKVADDAAGFPLSHHINVLGTSGMTAYGGFFEVCKPVKGEKVFVSAASGSVGSLVGQFAKLAGCYVVGCAGTAAKVDLLKGKLGFDDAFNYKEEPDLKSALKRHFPDGIDIYFENVGGEMLEAALANMNPYGRVALSGVISEYTGGARRAVPDLLEVIYKRITIRGFFAYDFLSKFAEFNAVIGGWVRDGKVQVLEDVSDGLESVPSAFAALFRGQNVGKKLVKLA

SEQ ID NO: 199811 - protein, 180 aa, Zea mays
  unsure (1)..(180): unsure at all Xaa locations
  Clone ID: MRT4577_11381C.1.pep
SVPLLPTTFCRPTTTTTTFLPPHPRPPLPSAAXPPSAVPPSDPATSNTXQPAPPLNHQHPRVPPSTPTCAPPPLCSSPPKATWLPPTVAALPNPVRSGRSGDPATSNRRCPAGSGEIWPPRHGSPPTPTTSYYVSAPWLGHDLPATPLWSAPTPMDRLPPHLSPTDRQRTPPPSPRQAPC

SEQ ID NO: 199812 - protein, 75 aa, Zea mays
  Clone ID: MRT4577_113820C.1.pep
ASRPSKTARAQFTPIHQTWSCPPHREKIRRERKKAAKPTPDRQHRTNALGSVSIYVSPILKLNKKQIFKKQKNTH

SEQ ID NO: 199813 - protein, 100 aa, Zea mays
  Clone ID: MRT4577_113821C.1.pep
KQIPRLLGPGLTKAGKFPPLVPPPESLGSRVNEPKAPVKFPLKKVLCMGVPVGTSGMDKNQIFQNGQKRGPFPGSLFKKNWQNVKCLSLKSPMGKGARLF

SEQ ID NO: 199814 - protein, 58 aa, Zea mays
  Clone ID: MRT4577_113822C.1.pep
KTKTTQKLHVWLTKKNAILKLRLYLLSRGGYLRPCLHSANTAFLSKIVSAQIPSQLTT

SEQ ID NO: 199815 - protein, 87 aa, Zea mays
  Clone ID: MRT4577_113823C.1.pep
SERAYTQPDLTQIETSVPWLLGTTLVLSNVNETNATVKFQLKKVHCMGVDVGNMAMEEKQIQQNIQVSVNIRVSLLRKNWQDVRSLY

SEQ ID NO: 199816 - protein, 115 aa, Zea mays
  unsure (1)..(115): unsure at all Xaa locations
  Clone ID: MRT4577_113824C.1.pep
YYYILHALRRFAYRLRTGQHISSSQRTHADQFHQNAAGSRSGSRSAVVVVVVVVAVGLCHPSPRAAAIPRVNGTRRGGNAAAFDEHQVASRLRRHWCHRSLSVCDRTKCKLMPKX

SEQ ID NO: 199817 - protein, 57 aa, Zea mays
  Clone ID: MRT4577_113825C.1.pep
PVPRLLSSEPPAFFFFVLEVVCICILRSYQVEPKGDGSYHISYRHREATLRSWPKPN

SEQ ID NO: 199818 - protein, 107 aa, Zea mays
  Clone ID: MRT4577_113826C.1.pep
MGGSPVWDGTLSPDSFNTSAAALVKRWKEIEVDDSLPEWTWKPCSKLGVPSEVEGYLALERVYRSCGTSQSVLPGADRRDEVRWSGDVAWVESSSDNVHVYDFHARY

SEQ ID NO: 199819 - protein, 113 aa, Zea mays
  Clone ID: MRT4577_113827C.1.pep
ASWCTPAWRPRCTPRRSSGAQRLADAPGSGLLPKYNVCQLGFQEGPRRFLLSAKADTERHNGLQRRVDRGPQKEVGRQGGQAHRTLERGRRRRRTLADSRGRGRHQQRAAVPQ

SEQ ID NO: 199820 - protein, 86 aa, Zea mays
  Clone ID: MRT4577_113828C.1.pep
NLTASDVHHNPQGYYHYGQINITLTIKVMVYLGHIDRKLRYGFNGIFYSDTETPLKLSEYFNVTYRVFSYNQIGDMPPVVYGPLHV

SEQ ID NO: 199821 - protein, 150 aa, Zea mays
  Clone ID: MRT4577_113829C.1.pep
VPKSCVPCRQRPPILEVSSEFMSTWLTLSALFKYLLTPRDCVISFFLAAVAPQKPGIQRQVLLPHQVTPAPSAPPIHGSYCASMASTYLCLRPLLHQPLVSNLHPPINAVRLSPTVLLTSPRTERRGAQCPPNGSNTARKYCPNLTGPAG

SEQ ID NO: 199822 - protein, 113 aa, Zea mays
  Clone ID: MRT4577_11382C.1.pep
VPPSIPFIGVQFYLVLIHPFFPAKRPFSQVWGFFINKEFCLTPLMGFFFFPPFLGAGPRSKCWSPQLCFLVPPGTFSPKKKKLIQKHKKKQTTTKNKKKTQQFGNRHPSTDRP

SEQ ID NO: 199823 - protein, 35 aa, Zea mays
  Clone ID: MRT4577_113830C.1.pep
GPTIWLNESWFSLPVKEGFELIIVGACAPGLSNIP

SEQ ID NO: 199824 - protein, 67 aa, Zea mays
  Clone ID: MRT4577_113831C.1.pep
KPSTNGLRSQNPFTTYWTLFHHNALTLENMLSNSPVPVQSKKKMNERDTGKRPERRQTSSSCSTLAF

SEQ ID NO: 199825 - protein, 50 aa, Zea mays
  Clone ID: MRT4577_113832C.1.pep
RGVMTSAHNNFAPPHNLTLLGAHVFYSSISIIHDPSRRAFLFWALVMPPL

SEQ ID NO: 199826 - protein, 52 aa, Zea mays
  Clone ID: MRT4577_113833C.1.pep
LMFARKVGSFRRPEEGGAAGGSRFKWALPWQSRALLLGLGPYSRFGVIVVKF

SEQ ID NO: 199827 - protein, 85 aa, Zea mays
  Clone ID: MRT4577_113834C.1.pep
GFLSGKRDSTSGGRGEAPCDVGAVLGQQSLIYALGARGTDILADYKDSTDNFTTIYCQCLMNLSASNNQFTYYCDRHTSNFLVVD

SEQ ID NO: 199828 - protein, 56 aa, Zea mays
  Clone ID: MRT4577_113835C.1.pep
FYSGPHWSSHCVRCNVRTTTSELCSIKKPTDINLTGEICVVTNPTASRRADYNFTR

SEQ ID NO: 199829 - protein, 135 aa, Zea mays
  unsure (1)..(135): unsure at all Xaa locations
  Clone ID: MRT4577_113836C.1.pep
AASPSASLQRAAIXMYIDTLLFLYITWVTGMEDYDQTDSSXAGPDSLCRSAXILNIYRAFCDMIFILDYXCTAXGISGGHINPLESFGLFRDKKETLDRTLMXYILEQRLHAICARVPRMDFQSAYYVLYCEIAH

SEQ ID NO: 199830 - protein, 94 aa, Zea mays
  Clone ID: MRT4577_113837C.1.pep
SLEKKQKSHWDFVLEEMVWMANDFTQERLWKNTVAAQMSHWISSRGRAVFEEASIQRKQKSVARVLANGIMNFWCSVHTLRASGGIPKPVEIEQ

SEQ ID NO: 199831 - protein, 76 aa, Zea mays
  unsure (1)..(76): unsure at all Xaa locations
  Clone ID: MRT4577_113838C.1.pep
CIDHVFDKVDLFGNLRIYAYFPLPEAFCRLLLPSSSLLPTFPPEAFALLNLSINXKAMPSYGASQWEDRINVHDPP

SEQ ID NO: 199832 - protein, 73 aa, Zea mays
  Clone ID: MRT4577_113839C.1.pep
KFTIPSIYILILSFTFLKFPIHLILQQYIILSTIIFFFHIQIHSSITTFLILLSTHTSLYTPYTSNYHNNILK

SEQ ID NO: 199833 - protein, 94 aa, Zea mays
  unsure (1)..(94): unsure at all Xaa locations
  Clone ID: MRT4577_11383C.1.pep
SFSVHAAIYSRAYSGQSCSPTHRSRLSDRDYMVPDASTLSXQLYYSMPPQSFVEIKLLIHPQSQQSVPPTSSRCAPPSIRHLSHPVQCTLQPHQ

SEQ ID NO: 199834 - protein, 88 aa, Zea mays
  Clone ID: MRT4577_113840C.1.pep
EGFPKLGVSPCAFGGVHVWYMPGRRGIFGNNSVLQSGDGTSGHPCVNAPGAGSNRVDLEPCVKAGKKGRYFVREGNEFIKPAFKWSVE

SEQ ID NO: 199835 - protein, 51 aa, Zea mays
  Clone ID: MRT4577_113841C.1.pep
LTYCVFVRKEYTMDEPRLNSIRVAFNHDGPKYVPNSIDRQAFLLTGCELGQ

SEQ ID NO: 199836 - protein, 103 aa, Zea mays
  Clone ID: MRT4577_113842C.1.pep
PGRAKVSKGEFKERLSKMYEVKDPNPIFVFKFRPPFGGGKSPGLGLIYDNLEFAKKFEPKNPLIRKGFATKVEKSPQQIKKRKNRAKKIRGVKKTKAGDPKKK

SEQ ID NO: 199837 - protein, 154 aa, Zea mays
  Clone ID: MRT4577_113843C.1.pep
MGVHRRNYSDDEFSVAGERPEVEFMDFQNDDTFQDYSCEDTPVLVSAPFPFEDGKPKSALVGETSADTIQIENTSPESVNLWSVRIFSSNPEDSYVLSMMRPPSDDANEEEKHAFLALTSVEDRTLLPGTTLTVWLSCTPKDIGLHTSIVHVDI

SEQ ID NO: 199838 - protein, 68 aa, Zea mays
  Clone ID: MRT4577_113844C.1.pep
PIAHTNVSTKYNTTHHTPRAQAPQQQPHVSHVLLQPHRHLPRDHARQDTKRTAPKPKLQATEPKFEAI

SEQ ID NO: 199839 - protein, 86 aa, Zea mays
  unsure (1)..(86): unsure at all Xaa locations
  Clone ID: MRT4577_113845C.1.pep
SVLRSHKSFPFVIQYLLFESSMSVTKFHAMISGLFQLWSEYELVVAXXSGRSSEGXDLIALAPLKESVKLHSTRTGSVPNLTXVAK

SEQ ID NO: 199840 - protein, 66 aa, Zea mays
  Clone ID: MRT4577_113846C.1.pep
AHPRYVSINLGADTPLSLPKRMKSRLERPTDSHHHQASVPMHACRRKVVSSPAKPEPQCSTAWAVA

SEQ ID NO: 199841 - protein, 104 aa, Zea mays
  unsure (1)..(104): unsure at all Xaa locations
  Clone ID: MRT4577_113847C.1.pep
MPSQREQYGSTVHLFIGTGRSPCKITSRSFAFDNNSIVIHRGLDSLFLFKSVSSFLPSCRSFLVHSFGSVPSFXLFMFLHTTILTCPKGPCSKVPCSCIILSET

SEQ ID NO: 199842 - protein, 149 aa, Zea mays
  Clone ID: MRT4577_113848C.1.pep
QAISLAFPGVKCSVLDLDHVVAKAPSDTQVSYIGGDMFESVPPADAMFLKWVLRDWGHEECVKILRNCRKAIPPREGGGKVIIIDMVVGAGPADPRHREMQALFDLYIMVVNGMERDEQEWKQIFVEAGFTDYRVTPVLGVRSIIEVYP

SEQ ID NO: 199843 - protein, 97 aa, Zea mays
  Clone ID: MRT4577_113849C.1.pep
PAVYRSGSGRRARSTPTSGSTPAQQCYDGRSIYAVLVPFCVLFVLSCVIFVVCSGVVQPLLHVMPDGSCMSAIRLLGPGAVDDVLEVGHLDPLNPGT

SEQ ID NO: 199844 - protein, 88 aa, Zea mays
  Clone ID: MRT4577_11384C.1.pep
ECELDTQTCDGETSIDCTPYIDSPLEHALHTDTGSNPGAWQADTVCRTHIHIINARFYRTINRVRSPQHTNWTNTIGTCAQGVMQPRA

SEQ ID NO: 199845 - protein, 91 aa, Zea mays
  Clone ID: MRT4577_113850C.1.pep
NKGGPFEGSLKGPPPRVSAPPIPKAPAFAQTLQQFPGFGRKFRFPPQPPASPGFFFGADPFASPAAAAGDDGLYSLINSPVFWPKLRTLFR

SEQ ID NO: 199846 - protein, 78 aa, Zea mays
  unsure (1)..(78): unsure at all Xaa locations
  Clone ID: MRT4577_113851C.1.pep
RHWSGPEHSGSRLPAFPTTSTWTDSARDPTPATTRGTGRKLYXGNAPRKQLATKAARKSAPTTGGVKXPHXYRPGPVP

SEQ ID NO: 199847 - protein, 102 aa, Zea mays
  Clone ID: MRT4577_113852C.1.pep
MAGKVDGPGIRLDLGTTYSCACVWQHDRGEIIANDQGNGTTPSYLAYPDSERLILDGGTNQGVMKPINTVFDAQRLIGRTVTDGGGHNGINLRPFRVLPGPG

SEQ ID NO: 199848 - protein, 201 aa, Zea mays
  Clone ID: MRT4577_113853C.1.pep
MLNHSPNANCFLHWRFKDRMLEVMIKAGQAIKKGDEMTIDYMSGVNSKFMERYGFSSPTNPWELINFSSPATIHMDSFLSVFNIAGLHDELYHNSALTSVVETDFVDGAVVAAARALPTWSDGDVPAIPSVERKSAQALQEECRQMLDSFPTTIEQDQQILDSDAHISKTREIAIKYRLHRKMLLQKIMDALDIYQDRILF

SEQ ID NO: 199849 - protein, 70 aa, Zea mays
  Clone ID: MRT4577_113854C.1.pep
GLSKNNLSGAAKRPGPKMGTPAQFIPQTVGKSLNWLKKVGKKNLPGKGWRPPRDRERELTEKAPEFGPPL

SEQ ID NO: 199850 - protein, 284 aa, Zea mays
  Clone ID: MRT4577_113855C.1.pep
MELEDEDLASQMLKHQERAIDFWQKHWDKPIPLKLKRLARDHERFLWALSIVQSRSVNLKLRMGAFIQDANVLAPYADMLNHSPNANCFLHWRFKDRMLEVMIKAGQAIKKGDEMTIDYMSGVNSKFVERYGFSSPTNPWELINFSSPATIHMDSFLSVFNIAGLHDELYHNSALTSVVETDFVDGAVVAAARALPTWSDGDVPAIPSVERKSAQALQEECRQMLDSFPTTIEQDQQILDSDAHISKTREKCDQVGELPICYDGLVIDLCVYMFLLWDCLWIIF

SEQ ID NO: 199851 - protein, 202 aa, Zea mays
  unsure (1)..(202): unsure at all Xaa locations
  Clone ID: MRT4577_113856C.1.pep
HASVDTQIWYTIFSTLLGGIYGAFQRLGEIRTLGMLRSRFDSIPLAFNSCLIPVETSDAKRKKGLRSYLHNRFKEMEHADKENIAARFAQMWNEIVTSFRDEDLIDNREKELLLVPYVSDRTLGVVQWPPFLLASKIPIAVDMAKDSNGKDRDPRKRLDNDYXFKCAIEECYASFKNIINGLVQGXPXKRVINKIFVEVEKC

SEQ ID NO: 199852 - protein, 73 aa, Zea mays
  Clone ID: MRT4577_113857C.1.pep
TSLILIWVRIQAIPSQPTKYIPLVYFRPQISRALVLPLPPFVVPCSGGNKHFLCVGEGITLLSFVGFMWFPSI

SEQ ID NO: 199853 - protein, 74 aa, Zea mays
  Clone ID: MRT4577_113858C.1.pep
WGAPPEFPGRPTRALSFFFFILNDLGGFLINLGVCYSWGPPQAPPFNINIKRREGYKGDLRGIYPATNGFLSFQ

SEQ ID NO: 199854 - protein, 91 aa, Zea mays
  unsure (1)..(91): unsure at all Xaa locations
  Clone ID: MRT4577_113859C.1.pep
HISXYPGGDYLRLTGXRHXTSYINTFXLGVSNRCASVRVGLYTYNECKFYFYDRMPASNIYPYVVTSLISYTTILCEPIHSNFDYNGPPAP

SEQ ID NO: 199855 - protein, 157 aa, Zea mays
  Clone ID: MRT4577_11385C.1.pep
YVAYGLRNSITLACFCLPRTSQTGWDWEFVVAKKAVAITHPVICKSARLKKSFSVWPRDRKTSLNHAGVLASTVVALLCSCILVLLQPTVLNPSMILKKKKKKKKKKKKKKKKGGAIELALRRAPVWLGVFCFVNGVIAPPFCSLTNVAVKKESSSP

SEQ ID NO: 199856 - protein, 52 aa, Zea mays
  Clone ID: MRT4577_113860C.1.pep
QKPTSKPKNNSIVDNSVIKTRRQAYFLIPSGPMILLKRHTLQLRITARPHYP

SEQ ID NO: 199857 - protein, 49 aa, Zea mays
  Clone ID: MRT4577_113861C.1.pep
VYKINCDGAFTPTSKNAGWGFVIRNHLGIVVAAGAGSAYALLPAVHFLL

SEQ ID NO: 199858 - protein, 35 aa, Zea mays
  Clone ID: MRT4577_113862C.1.pep
RGVLVADDLAHLCSGGFGSHSSECELRRVIGSPNT

SEQ ID NO: 199859 - protein, 802 aa, Zea mays
  Clone ID: MRT4577_113863C.1.pep
MAHRTVRCATGAPTVRHRGLDAFRRSVMEQLQEIQLLVRDLVQYGCVLPDSFQVNAILAKLPPSWRDFVTSRRHMKKQMTLTELSAAINVEERARSSNKPSQQLQAHVVEKGGDRKFQKKKKNSPQKNLNQPKSKKMKKKKDFICYVCGVSGHTARRCNLRKGKGPPPQRKEGNVVVNSTPGYALQAFMACPSDDWWMDSGATIHICADRSMFSSFQGYSSAPVLMGNGVPAAVRGTGQVYLKLTSGKTLVLKVVLYVPSMSQNLISVSLLCRQGLKLVFKSNKVVLSKFGTFVGKSYESGGLFRLFVLNNHSSYHVNVMMLATRFCYIYLLRTKDEALEHFKIYKTEVENQLDKKIKRLWSDRGGEYLSNLFDEYCKECGIIHETTAPYSPQSNGVAERKNRTMCDLANALLQSWGMPDIWWGEEVLTVCYVLNRLPPRNRDKCVYYRFSGGKGVIMCLYVDDILIFGTDLEAIMETKVFLSKNFDMKDLGEADVILNIKLIKGEDGITLSQSHYVEKVLTCFGHMDCKPVTTPYDPSYTLSKYEGEPVNQLLYSQIIGSLMCLSSATRPDISYEVCRLARYSASPGDRHWVALYRVLQYLKGAMNLGIKYTEFPSVLEGFSDANWISDSDQMKSISGYVFTLAGGAVSWRSSKQSVSTRSTKEAELVALDSAALEAEWLRDLLSDLPMLAKPILAVLVYCDNTSVLLKVNSRKDNQKSSRHIRRRLDSCRHARETGVITVDYIKSQRNLADPFTKGLAQKPIQAACMGMGLVERYALNEVNAISREIVLQNFLNDFTYMS

SEQ ID NO: 199860 - protein, 1246 aa, Zea mays
  Clone ID: MRT4577_113864C.1.pep
MDLCSYFTCLHVLELLLFIAAIITYGIYLSYMPVLFGIRIFNLFKYIESMSLISLNLQQSRKPIRIMASSSDVIKPEAFDGASFKRWQIKTRMWLTDLKLFWVVTSAVPQAASDDSDDAAKAAALAEKAKWDEANEACLSRLLNVLSNRLFDVYSGFTSAKGLWTELENEFSEVDNGNESFTTENYLNYKMVEGRSVMEQLQEIQLLVRDLVQYGCVLPDSFQVNAILAKLPPSWRDFVTSRRHMKKQMTLTELSAAINVEERARSSNKPSQQLQAHVVEKGGDRKFQKKKKNSPQKNMNQPKSKKMKKKKEDFICYVCGVSGHSARRCKLRKGKGPPPQRKEGNVVVNSTPGYAPQAFMASPSDDWWMDSGATVHICADRSMFSSFQGYNSAPVLMGNGVPAAVLGTGQVYLKLTSGKTLVAEGLKLVFESNKVVLSKFGTFVGKSYESGGVKCGICVQAKQPRKPFHTVEGRSTTPLELIHSDICEMNGIITKGGKRYFLTLIDDATRFCYIYLLRTKDEALEHFKIYKTEVENQLDKKIKRLRSDRGGEYLSNLFDEYCKECGIIHETTAPYSPQSNGVAERKNRTVCDLANALLQSSGMPDIWWGEAVLTVCYVLNRVPPRNREVTPYEGFKGRKPDLSHLRTWGCLAKVNVPLPKKRKLGPKTVDCVFLGYAHNSAAYRFLVVHSETSEIAVNVIMESRDVTFFESIFPMRDKEVVAPDGPSRTYSLPSSVHDQTPDLELRRTGCKPVGCKWIFRRKRRPDGTIEKYKARLVARGFTQKKEEDYFDTYSPVARLPTIRVLLALAAAYKLLVHQMDVKTAFLNGELEEEIYMQQPEGFVVKGQESKVYRLIKSLYGLKQAPRQWHEKFNNTLTTAGFCVNEADKCVYYRFSGGKGVIMCLYVDDISIFGTDLEAIMETKLFLSKNFDMKDLGEAGVILNIKLIKGEDGITLSQSHYVEKVLTRFGHMDCKPVTTPYDPSYTLSKYEGEPVNQLLYSQIIGSLMYLSSATRPDISYAVCRLARYSASPGDRHWVALYRVLRYLKGAMNLGIKYTGFPSVLEGFSDANWISDSDQMKSTSGYVFTLAGGAVSWRSSKQSVSTRSTKEAELVALDSAALEAEWLRDLLSDLPMLAKPIPTVLVYCDNTSVLLKVNSRKDNQKSSRHIRRRLDSCRHARETGVITVDYIKSERNLADPFTKGLAQKPIQAACMGMGLVERYALNEVNAISREIVLQNFLNDFTYMS

SEQ ID NO: 199861 - protein, 99 aa, Zea mays
  Clone ID: MRT4577_113865C.1.pep
NPTSPVSPQAVGGGQCPALGCPINLNCDCPPQNRTAEGAACRGPPEYFKNRCPLTRTTPTDVEPVPQSCRAPGELKVIFCQATIVTCGGEAERTVLADS

SEQ ID NO: 199862 - protein, 37 aa, Zea mays
  unsure (1)..(37): unsure at all Xaa locations
  Clone ID: MRT4577_113866C.1.pep
VILWTRCKLLSYNIFYIHKNNXQXLGHTIGYNLNITL

SEQ ID NO: 199863 - protein, 1537 aa, Zea mays
  Clone ID: MRT4577_113867C.1.pep
MLDPGAMGACWAAARPLGRAAQQGSRLVTKGRARRALRRGGGKRPGGLWRRQLVLFRSGRRILPELSRYGCCSSSRLHIWRLVPLAGSPRERSWFCVLLPLTVSIATRSIHCSTSGCSTEVVLLVRSEDLRCSIASPVRVCAAVDSLVSVHRGLVLGLPAARCSSSRAGAVDVSLGSGSGSSISVNLPPCRMFNIFKYIGSMSLISLNLQQSRKPTRIMASSSDVIKPEAFDGASFKRWQIKTRMWLTDLKLFWVVTSAVPQAASDDSDDAAKAAALAEKAKWDEANEACLSRLLNVLSNRLFDVYSGFTSAKGLWTELENEFSEVDNGNESFTTENYLNYKMVEGRSVMEQLQEIQLLVRDLVQYGCVLPNSFQVNAILAKLPPSWRDFVTSRRHMKKQMTLTELSAAINVEERARSSNKPSQQLQAHVVEKGGDRKFQKKKKNSPQKNMNQPKSKKMKKKKEDFICYVCGVSGHTARRCKLRKGKGPPPQRKEGNVVVNSTLGYAPQAFMASPSDDWWMDSGATVHICADRSMFSSFQGFNSAPVLMGNGVPAAVRGTGQVYLKLTSGKTLVLKDVLYVPSMSRNLISVSLLCRQGLKLVFESNKVVLSKFGTFVGKSYESGGLFRLSVLNNHSSYHVNVVCNNDSINNIWHSRLCHVNFEAIKRLSDMSLIPEYKHVKGVKCGICVQAKQPRKPFHTVEGRSTTPLELIHSDICEMNGIITKGGKRYFLTLIDDATRFCYIYLLRTKDEALEHFKIYKTEVENQLDMKIKRLRSDRGGEYLSNLFDEYCKECGIIHETTAPYSPQSNGVAERKNRTVCDLANALLQSLGMPDIWWGEAVLTVCYVLNRVPPRNREATPYEGFKGRKPDLSHLRTWGCLAKVNVPLPKKRKLGPKTVDCVFLGYAHNSAAYRFLVVHSETSEIAVNVIMESRDVTFFESIFPMRDKEVVAPDGPSRTYSLPSSVHDQTPDLELRRSKRQRTEKSLGDDYIIYLVDEEPRSLTEAYTSPDAEYWREAVRSEMDSIISNRTWEIIDLPAGCKPVGCKWIFRRKRRPDGTIEKYKARLVAKGFTQKKEEDYFDTYSPVARLPTIRVLLALAAAYKLLVHQMDVKTAFLNGELEEEIYMQQPEGFVVKGQESKVCRLIKSLYGLKQAPRQWHEKFNNSLTTAGFCVNEADKCVYYRFSGGKGVIMCLYVDDILIFGTDLEAIMETKLFLSKNFDMKDLGEADVILNIKLIKGEDGITLSQSHYVEKVLTRFGHMDCKPVTTPYDPSYTLSKYEGEPVNQLLYSQIIGSLMYLSSATRPDISYAVCRLARYSASPGDRHWVALYRVLQYLKGAMNLGIKYTGFPSVLEGFSDANWISDSDQMKSTSGYVFTLAGGAVSWRSSKQSVSTRSTKEAKLVALDSAALEAEWLRDLLSDLPMLAKPIPAVLVYCDNTSVLLKVNSRKDNQKSSRHIRRRLDSCRHARETGVITVDYIKSERNLADPFTKGLAQKPIQATCMGMGLVERYALNEVNALSREIVLQNFLNDFTYMS

SEQ ID NO: 199864 - protein, 408 aa, Zea mays
  unsure (1)..(408): unsure at all Xaa locations
  Clone ID: MRT4577_113868C.1.pep
MASSSDVIKPEAFDGASFKRWQIKTRMWLTDLKLFWVVTSAVPQAASDDSDDVAKAAALAEKAKWDEANEACLSRLLNVLSNRLFDVYSGFTSAKGLWTELENEFSEVDNGNESFTTENYLNYKMVEGRSVMEQLQEIQLLVRDLVQYGCILPDSFQVNAILAKLPPSWRDFVTSRRHMKKQMTLTELSAAINVEERARSSNKPSQQLQAHVVEKGGDRKFQKKKKNSPQKNLNQPKSKKMKKKKEDFICYVCGVSGHTARRCKLRKXEKVLHLSAKKGTWWLTPPQGIQQRTSLXMGNGVPAAVRGTGQVYLKLTSGKTLVLKDVLYVPSMSRNLISVSLLCRQGLKLVFESNKVVLSKFGTFVGKSYESGGLFRLSVLNNHSSYHVNVVCNNDSINDIWHSRLCHV

SEQ ID NO: 199865 - protein, 57 aa, Zea mays
  unsure (1)..(57): unsure at all Xaa locations
  Clone ID: MRT4577_113869C.1.pep
TGAVLVEEAQAVPMVVAMDLEVEVVDMVAEGFKIKQXRLQFLAVERARSCQESCRLL

SEQ ID NO: 199866 - protein, 149 aa, Zea mays
  unsure (1)..(149): unsure at all Xaa locations
  Clone ID: MRT4577_11386C.1.pep
MARGWFVNCAAVLLALTAGVDAYTVPALSARAKDSGPKAVNISVPVDHFHNETIYEPHSDKKFPLRYWFDAQYYRKGGPVIILASGETSGEDRIPFLEHGILQMLANATGGIGVILEHRYYGTSFPVPDLKPENMRFLSTEXXLGDTYF

SEQ ID NO: 199867 - protein, 85 aa, Zea mays
  unsure (1)..(85): unsure at all Xaa locations
  Clone ID: MRT4577_113870C.1.pep
GPHLLGFTSVGWHFGPAGRFETLRGPTMGTGPGSVHQELDKACAQGGKVDPNKXNQKVRFINLVSRFLNGEGGPNRLSQVQTPSG

SEQ ID NO: 199868 - protein, 159 aa, Zea mays
  unsure (1)..(159): unsure at all Xaa locations
  Clone ID: MRT4577_113871C.1.pep
RNADKSSHEPRLRLKSFFGSLYICRAGGARAVLQPYPDNVKHSEMIVTFAMPAGFAGGVGADWPHISKAKKSYLVLTCGPPSGTTSLSKGKGEXETACIHDDHNESSGQDGYRTVGIYERNMPLKRLNTKKNCKSNDWLLRKMEQMIKRGHDVPVDTKY

SEQ ID NO: 199869 - protein, 75 aa, Zea mays
  Clone ID: MRT4577_113872C.1.pep
GRSSLLGLSVLNGMIVGLPPYLFLGGDVFSFLVGGLPFGPFKGGGVVPIQENSPPPPPNEGVVLFLKHARGDVFW

SEQ ID NO: 199870 - protein, 53 aa, Zea mays
  unsure (1)..(53): unsure at all Xaa locations
  Clone ID: MRT4577_113873C.1.pep
VVVNGNPSYSTSPQPPRWPRPLYFLSEVLSETKVXYPQVQKLLYVVVLARRKL

SEQ ID NO: 199871 - protein, 67 aa, Zea mays
  unsure (1)..(67): unsure at all Xaa locations
  Clone ID: MRT4577_113874C.1.pep
HNIYSFLIILFHITYFFYFGGKIYIKHINLNSFKNYNYQFLNPYIVILCHNHFNTISNINLFIFXFL

SEQ ID NO: 199872 - protein, 74 aa, Zea mays
  Clone ID: MRT4577_113875C.1.pep
RQRFVGEKLTCQHSYFTVQSNTIEPVVFTHPNKPDSRTKMHTAAQNCSLANTRGALSVYAWILDTGTGNYLNVT

SEQ ID NO: 199873 - protein, 79 aa, Zea mays
  Clone ID: MRT4577_113876C.1.pep
HQRPPNLPYHRCFQSGRKRSVYLQNHHHGRLDGPKPRLNFNMLRRLKWKLMCRGMSNKSSLQTVTMCIPYENLILPPLV

SEQ ID NO: 199874 - protein, 80 aa, Zea mays
  unsure (1)..(80): unsure at all Xaa locations
  Clone ID: MRT4577_113877C.1.pep
TGTANSRAFFPLVRRRWXALLRXDPNPYQTLNQNYPKKPQNQKKTQNHHLIGDGDARASGGWIRVRVRRLSGCLSCSSRG

SEQ ID NO: 199875 - protein, 68 aa, Zea mays
  Clone ID: MRT4577_113878C.1.pep
HPNSNQPKNKGAENNFFLFQTKKTTQPGRLTKKRLKFQHTARTRLKIIAKTKSLQTTYKNKTTSHGIP

SEQ ID NO: 199876 - protein, 41 aa, Zea mays
  Clone ID: MRT4577_113879C.1.pep
WMDNLVQGHLIIQLIICISFSLLIIFISNHELVVHYIDFVS

SEQ ID NO: 199877 - protein, 160 aa, Zea mays
  Clone ID: MRT4577_11387C.1.pep
MSRATAAVLFYILAVAALSAAEAPAESPKAGSPAKAPAESPKAGSPAAPAKAPESAATRTAPAKAPQAASTPAAAAAPSSSSSRKSGPAAAPTTAASTPSSSTDEELSPSPSASTAEVASPAADGPAEGPAAADASGAATLGSGAAIAGVAAAVATMIFY

SEQ ID NO: 199878 - protein, 69 aa, Zea mays
  Clone ID: MRT4577_113880C.1.pep
PPNPSSMGTAASPSPSLSLDTAASRPDPPSPEATATPAKEDHQHSASDAATAAAGGGADDAAAAPSVGG

SEQ ID NO: 199879 - protein, 95 aa, Zea mays
  Clone ID: MRT4577_113881C.1.pep
MSSIAKKKTTSKEDCKVKLCGNRESKGDTKPRKQVIKPSKDELREAVFLILDTADFATMTFGDVVKEVDKYFGKDLFERKPLIRSLIEEELFRLA

SEQ ID NO: 199880 - protein, 117 aa, Zea mays
  Clone ID: MRT4577_113882C.1.pep
PIFGNIKSKLALKLPLKLPPLFLTSISQFTKNGEVQAIGGRRGLTGWPPQPGVPSSHASFLGSSGDDAFYTSWGASLGMAQMGDGQNLYPRQTEGKVLLPEKLASGHLGPPQTGLQS

SEQ ID NO: 199881 - protein, 54 aa, Zea mays
  Clone ID: MRT4577_113883C.1.pep
NSSHDNKKIRMQGIAQEIPATRRLRPHQRQKGGGRASHHTINLPSDNEPPSRSA

SEQ ID NO: 199882 - protein, 140 aa, Zea mays
  Clone ID: MRT4577_113884C.1.pep
RTRGGSSFHQIAHCLNSSHFQVAERVLFFWNNIHFENFVKQNSKVILPIILPALEKNINGHWNQVVQSLSLNVRKLLSDRDPQMFTECLRKYEEDKGREKEFKLKQELAWKRLDEIASAKVTSGEAVLVSPTLPRQPSFL

SEQ ID NO: 199883 - protein, 349 aa, Zea mays
  unsure (1)..(349): unsure at all Xaa locations
  Clone ID: MRT4577_113885C.1.pep
IPFDLNELPLDELDEDFQEPDDANELGLNDVLLENGNDFDLNLPLDEFGAVVENHRRKEMTKDMRKQVYQALLARSNNGRLHKKDTQIVANQFDLHLRSVQRVWNRGKIQLANSVPVVVASLKKGRVGRKAIPIDLEVLRNIPLKDRMTLEDVCAKLNMSKWKVLRYLKQGLLRRHSSSIKPFLTEGNKKTRLKFCIDMIKRGLNGDPSFRDFXDFVVIDEKWFYLSQKSEKYYLLPEEDDPHRTCKNKNYFPRLMFLAVCARPRFKDGQCIFDGKIGCFPLVNYEPAIRGNAKIGPPPRNMVMKPIQSIPRDVIREFMINKVFPAIKKKKKKKKKKKKKKKKKKTPHT

SEQ ID NO: 199884 - protein, 61 aa, Zea mays
  Clone ID: MRT4577_113886C.1.pep
QTKFSEVLRALGQGRSNLGNLAGLGNLGGGQGLGGLGQGLGGLGNLAGLGGANQGLGAGQG

SEQ ID NO: 199885 - protein, 66 aa, Zea mays
  Clone ID: MRT4577_113887C.1.pep
LAAPALHLPLPKQRKTATLFNVIQPSGSKCKQKQIPMATLHMNMAPYQKMIHTTPGDQQVSYQATQ

SEQ ID NO: 199886 - protein, 89 aa, Zea mays
  Clone ID: MRT4577_113888C.1.pep
CYSTPKPGMFSSIIRSMRLIPRYANTWCYSLPSETSSSQVVYVDSGTLKLYYHNKIIHNIMYVRHPHIMLAGLQPYGLVSSGRAAHRLK

SEQ ID NO: 199887 - protein, 49 aa, Zea mays
  Clone ID: MRT4577_113889C.1.pep
EGDAMNALALLRYCCRRMLMAHVVLIEKMRAYNTLEKFETSLVNMLIKT

SEQ ID NO: 199888 - protein, 106 aa, Zea mays
  Clone ID: MRT4577_11388C.1.pep
RNWFASCPLHLFVAQPAGRCSPQNRPTNRARLSLIPHRVQELLGISSPPMRSSSPPKHPVWSSPGPGPPLLLPVDMFPYCCYLSVPLPPFLVADDIKVRAVEMIYF

SEQ ID NO: 199889 - protein, 151 aa, Zea mays
  Clone ID: MRT4577_113890C.1.pep
RTRGQLVNQQNAPVSVSNTGIARASFCCSTLNKNASLSDGDSSHNRRWDTIRSGHIVSSHSSDSTMLSRPASAVSSTDVASLHRKERRQACPPGFEKPHLYSGSGKACSGHCSAPDALVQDCGIPDQQDLTSLTTDCLKDDGDVTQNLSMN

SEQ ID NO: 199890 - protein, 74 aa, Zea mays
  Clone ID: MRT4577_113891C.1.pep
MVVVVHMTIEGRKQMVGVKWDDDAKPCCNGAHVYEATSSPRSRSLSKEIATAAVASVFLGFGSLFVLLASGVYV

SEQ ID NO: 199891 - protein, 56 aa, Zea mays
  unsure (1)..(56): unsure at all Xaa locations
  Clone ID: MRT4577_113892C.1.pep
LTMTFEAKRAYLYXILPHIFLVFKKAQLCSCTLGLSPTFNDSNGIHIFSPKINLQY

SEQ ID NO: 199892 - protein, 206 aa, Zea mays
  Clone ID: MRT4577_113893C.1.pep
MAAKAISSPVPVEWYPTLAVVMVSVGLMFTASFFIYEATSSRRSRSLSKEIATAVVASFLGFGSLLLLACLCLMTLLCFLGAVACKAGAPTRPGESGSARHKSVCASRRRPGGDEAGRAGGDYSGSRSHGMAAKAISSPVPVEWYPTLAVVMVSVGLMFTASFFIYEATSSKRSRSLAKEITTAAVASVLLGFGSLFVLLASGVYV

SEQ ID NO: 199893 - protein, 50 aa, Zea mays
  Clone ID: MRT4577_113894C.1.pep
SLSVQASCFLPIKSLESRFDASLACVYYSRHWLSSFMQLKTFRPVGWLVI

SEQ ID NO: 199894 - protein, 103 aa, Zea mays
  Clone ID: MRT4577_113895C.1.pep
MCGSRRRPGSDEEGRAGGDYNGSRSHGMAAKAISSPVPVEWYSTLAVVMVSVGLMFTASFFIYEATSSKRSRSLAKEITTAAVASVFLGFGSLFVLLASGVYV

SEQ ID NO: 199895 - protein, 121 aa, Zea mays
  unsure (1)..(121): unsure at all Xaa locations
  Clone ID: MRT4577_113896C.1.pep
MSDQLADDQIGEFXEAFSLFDKAVEGCLTTKELGTVMRSLGXNPTXDDLQNMINEVDDDGNDIIDFPEYLNLMDRKTNDTDSEEKLKEAFRVVAQDQNGFTLXDELRHDVTNLEEKLTDEE

SEQ ID NO: 199896 - protein, 26 aa, Zea mays
  Clone ID: MRT4577_113897C.1.pep
FRYVNKFGWVNYNSRPQTWLLVSTCP

SEQ ID NO: 199897 - protein, 59 aa, Zea mays
  Clone ID: MRT4577_113898C.1.pep
PCSRSIGHGGDPSGLHYKNGHHWVLVSIMISAPLSNMVRPLPPSAPLSYRIVLPECYEH

SEQ ID NO: 199898 - protein, 185 aa, Zea mays
  unsure (1)..(185): unsure at all Xaa locations
  Clone ID: MRT4577_113899C.1.pep
MGSLANNIMVVGAVLAALGVGGSCGPPKVPPGPNITTNYNGKWLTARATWYGQPNGCRGLLDNGXGACSYHRIXTLLTHTGCMTAXGNVPIFKDGKVCGSCYEVRCKEKPECSVNPVTVFITDMNYXAIAPYHFDLSGKVFGSLIKPGLNDKFLHCGIMDIQFIMVERKKPDGRTSRRGSPAPPC

SEQ ID NO: 199899 - protein, 49 aa, Zea mays
  Clone ID: MRT4577_11389C.1.pep
NAISTSYFGLNESGSVNSPAVVSVFLLRDKANNHHPGGRFSHVAFSGPR

SEQ ID NO: 199900 - protein, 58 aa, Zea mays
  Clone ID: MRT4577_1138C.1.pep
HYLTKSQIFNLHHHLFTSFFSKILLTRILDPNPITVYNITKADRNKILPKTMYQFWRV

SEQ ID NO: 199901 - protein, 69 aa, Zea mays
  Clone ID: MRT4577_113900C.1.pep
MADEEVTDPKALLEDRSKAKCVSQWYDYQKCVKRIEDDETGHKHCTGQYFDYWKCVDKNVAEKLFEMLK

SEQ ID NO: 199902 - protein, 42 aa, Zea mays
  Clone ID: MRT4577_113901C.1.pep
LLREGRQPVERRPKTNAVRDAPGVCRCLYAFLSSSWWQHTFG

SEQ ID NO: 199903 - protein, 66 aa, Zea mays
  Clone ID: MRT4577_113902C.1.pep
EKSYAVAWTHKLFLYFIYFLSFFFFFFFFFFKKGQVLKDILLGGNSIFLLNYTAKYHVHKREIHLA

SEQ ID NO: 199904 - protein, 65 aa, Zea mays
  Clone ID: MRT4577_113903C.1.pep
CQPLMSSGCRRPGYCPWSGRSQFTPRRMEFARGRGSPFLLGFVWNCWFQLWRALAVAVAVALGVR

SEQ ID NO: 199905 - protein, 96 aa, Zea mays
  Clone ID: MRT4577_113904C.1.pep
LNIFIIFFDKQEQPGRNMDGPRLLTPERAIMKVPNKTPCQPCAKTSARTSSLREQHQGVNHSIPPSAPVQHCGGGFMTDSPKPESDPALLLRTIAD

SEQ ID NO: 199906 - protein, 63 aa, Zea mays
  Clone ID: MRT4577_113905C.1.pep
SPTLKVVPYLFRKKVWPGNGQAHMYTMFRSNLKRQSQAEFPGCDGKVSPRSLKLALFGRCSAF

SEQ ID NO: 199907 - protein, 90 aa, Zea mays
  Clone ID: MRT4577_113906C.1.pep
QNFGPPAHAVWAWGFQCPSPARLAASSSRSIRAPVHVPPGIWFSHLFLLAFFQLAFLGARNPIKVLAFGVHLLSEVLLKGPIYIRQPGIG

SEQ ID NO: 199908 - protein, 59 aa, Zea mays
  Clone ID: MRT4577_113907C.1.pep
RCPFALNFERRICIPGLPDRLCVPSVHGLKLLRGIQKRHCGCGLFAQNIKKKVAMVCYA

SEQ ID NO: 199909 - protein, 146 aa, Zea mays
  unsure (1)..(146): unsure at all Xaa locations
  Clone ID: MRT4577_113908C.1.pep
DANQKWTYEQAVEFGSRVQSLHLEYIEEPVSSVYDLIKFCEKNVLPVALDETIDNLRGDVICKLHQFVHPGIIALVIKPSVVGGFENAAHIAKWAQLHDKMAVISSTYESSIGLASYIQXAHYVDQQSSIVSRIRNKDTCRATAHG

SEQ ID NO: 199910 - protein, 451 aa, Zea mays
  unsure (1)..(451): unsure at all Xaa locations
  Clone ID: MRT4577_113909C.1.pep
RLSTGLLDLNEALSEPTGLNNPYVPHEEVSNLEQAQVGTWNLDQQVLGNGRKNIDSSFDLHGQEQLRHSTELDTTSKGKSPCTLSNGFQDSVHLQQNWSSMTLHHGVSQLSTGGEPSSFEVRESNISHSEKRNFSSETNVEQELRPSAGQTLRLMGHDLTVSDTRVDYLSXGTESHXNTADHLTTKVVLELPRQGQPFLALQTQSIPSVSASSARTAQAHFGYRTTHNISHPLLAANVFSGDPSVYEDRCRDFTNLQSHRNSLLGYPPLSNHGSAAFLQNSPPWRYYSDHSTRRDSLSAPFTPTVMQHVATPSDYRANLPHQSYGVYSGSSTVRPLNSASFTCTNQIVQAVDSRATANLPSRSPTTGTTRTHHNSNTSSSSRLVLRSGPVKLSAGAKHILIPNENTEDDNSAPMYSCVSFGSSGGNVSAAYQNKGAGSHRHQNKGAGSRRF

SEQ ID NO: 199911 - protein, 62 aa, Zea mays
  Clone ID: MRT4577_11390C.1.pep
KDIDCESARACKPTTTSQSMADRQDVTHNRSRKVDLQHVNGPEPPLLTGDFSHPMPTSLAHQ

SEQ ID NO: 199912 - protein, 77 aa, Zea mays
  Clone ID: MRT4577_113910C.1.pep
KKKIPPKIGPPFPKFRFQGSNKKSQALGGPKKKKKSFLPTARGVNGQKSLSFGALRFITPCSFWTPHKPFFSYRIYS

SEQ ID NO: 199913 - protein, 55 aa, Zea mays
  Clone ID: MRT4577_113911C.1.pep
YSFITFRDGLTSNKNLTTTNFLTTFINKLHYNISISITYHLHSIKNHINIYKFIL

SEQ ID NO: 199914 - protein, 54 aa, Zea mays
  unsure (1)..(54): unsure at all Xaa locations
  Clone ID: MRT4577_113912C.1.pep
EGVNTRPHAFQTXQRGXGGRQATRNPKEGVEGYLLATMRHKEHXARXHRHFKRI

SEQ ID NO: 199915 - protein, 62 aa, Zea mays
  Clone ID: MRT4577_113913C.1.pep
VSFLHSILELSTWSLCLRVPQPILATGSVRKPSDYHELKYKSKSQSSTNVILKAGQISLLGD

SEQ ID NO: 199916 - protein, 79 aa, Zea mays
  Clone ID: MRT4577_113914C.1.pep
KSDFYPTIFFLSPIRKKPIRNCFAKPNCPALPPLEKPKEQELELLVEESGTLPPRINKVVPSPFKLKKKKKKKKKKGGG

SEQ ID NO: 199917 - protein, 90 aa, Zea mays
  unsure (1)..(90): unsure at all Xaa locations
  Clone ID: MRT4577_113915C.1.pep
VIIAVYDVTDHDSFNNVKHWLGEIDSYASGNVNKLXAENKCNLTDNRXIPSYEAXGRSLGDDIRIPLLDTTAKDAAHAQKAFINILRHIN

SEQ ID NO: 199918 - protein, 54 aa, Zea mays
  Clone ID: MRT4577_113916C.1.pep
GVGIDGPEDGAVSIGHRRADGQQVKCRSQACCTGTPSRLLQVLSGLRYAAEQML

SEQ ID NO: 199919 - protein, 90 aa, Zea mays
  unsure (1)..(90): unsure at all Xaa locations
  Clone ID: MRT4577_113917C.1.pep
MAGAEGRGPRRICVAFVLVDGIGDVSVPSLGGLTPLEAACTPGLDAVAAVGVTWLMDPVEPGLACGSXTAHLSLLGYDPRVYYRSRGAFE

SEQ ID NO: 199920 - protein, 64 aa, Zea mays
  unsure (1)..(64): unsure at all Xaa locations
  Clone ID: MRT4577_113918C.1.pep
SNQLEGAELWEYALRLTGSVISHFVRKXLIWGGGVXYNIRCRVLNFSIGKPGXKFSRKRIPVKI

SEQ ID NO: 199921 - protein, 40 aa, Zea mays
  Clone ID: MRT4577_113919C.1.pep
SEIKELILTDWCQASRSGKPSTCKVFRPIKGLPTHESVHS

SEQ ID NO: 199922 - protein, 162 aa, Zea mays
  Clone ID: MRT4577_11391C.1.pep
MGRRGEPYYVEAVPPVDVNKNTEWFMYPGVWTTYILMLFFAWLLVLSVSGCSPGAAWTVVNLAHFAITYHFFHWKKGTPFAADDQGIYSRLTWWEQIDNGQQLTRNRKFLTVVPVVLYLIASHLTDYKQPMFFLNTIAVFVLVVAKLPNMHKVRIFGINADI

SEQ ID NO: 199923 - protein, 68 aa, Zea mays
  Clone ID: MRT4577_113920C.1.pep
SSLVCGRPPFFLGGFFKNQGGYQTQSTSNYTSSAKYDPYINRKGKNTKPLSMFHELYKTITEPLHHST

SEQ ID NO: 199924 - protein, 451 aa, Zea mays
  Clone ID: MRT4577_113921C.1.pep
HKLDGKLQPTSHPASNYRIYLPGSLSQVVLHAAPGYAPLPKPQSMELNRNVTAAIRGKAKLSGSDSDAESGSSTYESSSVYDSESEGAGLSDRDTVESHQRQEDRADAPLVQIYDASIQQGQAGQNTEENLADLISTDLTELMSKSALESWLDEAPAEPVVQNLTQTSSARVSFTNRNFERKPKLHTLLDPSGSNGLSVLYAFSPEVSPRSRLLVCVDLYFENVTTQQLTDITIESEEASSSVDFIDQTSEGYSGVPTIVPVGGIHSLAPQQMAKLVLQVHFHHHILPLKLSVFCNGKRHPAKLHPDIAYFVRPLPMDLNTFLCKENQLRGMFEYARRCAFKDHLQKLGHEDSAEHIDKNLQVAQSVASKILSNANIHLVSMDMPVTFSVDDASGLCWRFSGEILSTSKPCLITILAEGRASGPLDLAVKVNSEDTVFALNLLNRVVAIID

SEQ ID NO: 199925 - protein, 293 aa, Zea mays
  unsure (1)..(293): unsure at all Xaa locations
  Clone ID: MRT4577_113922C.1.pep
MLVSESTAIPSSLSCSLELDPLLRDLVEKKLSLKRNVTAMATELRDARNRLASQELLLAQEIEARKVAELKTRNLEDEVSKLQKCLGDKDEQLRASLCSADQFRNELDGFRSQLPVMTTLLHCSYLLGKLNDRNNSMSEGEFPVNNLAEQLNHLEKCLESRDPTLRQFKDCYSLRTESDITDAFARVAFDNDDGVAKPGEDIRALSAHWVNRSKELESQLDQHRRTAQELKRRVMRLELCILEPXKLHRLRNQMAVQQPTCSGSGEKRNLWESSAFKLIASVSMLVLFTLANR

SEQ ID NO: 199926 - protein, 80 aa, Zea mays
  Clone ID: MRT4577_113923C.1.pep
FFPNGRWAIKSRPVVGGFALRVNWANARGGAVYSLIFSRLELFEQEVPQNICSRRPCQVGFGRNGNHQFAAFVQVKKKAK

SEQ ID NO: 199927 - protein, 58 aa, Zea mays
  Clone ID: MRT4577_113924C.1.pep
SGPMPMGHPSVEGAELSVRAESGRVVGLGGADLVTRQLDVRLCADARVLHRQRVEICL

SEQ ID NO: 199928 - protein, 87 aa, Zea mays
  Clone ID: MRT4577_113925C.1.pep
GFINQWLSLLKRGSLVSFLALGGLFLFCQRFNSAWGVLVRFYSFFFFRQLYPASRVFPKKKPKPQVFFLGWGSLKKKIQFCSLGPVP

SEQ ID NO: 199929 - protein, 106 aa, Zea mays
  unsure (1)..(106): unsure at all Xaa locations
  Clone ID: MRT4577_113926C.1.pep
FVQSFFLFGKKKKKKKKRAPRKKKKKKKKKKKKKKKKKKKKKKKKKKKKKKKKKKKKKKKKKKKKKKKKKKXXXXXLKKTNFYIPPPSHKNFFFLNTPFFTPLPLF

SEQ ID NO: 199930 - protein, 99 aa, Zea mays
  Clone ID: MRT4577_113927C.1.pep
GVFGIKQLGKRGFCVKELNWGKARFFQVKSCKKEGSEFNFGGTIKKICVCNGGEFRLGYLKGGRMIYKDLWVFSLYGFNYWGVLWFFYKRVGYFFFVLL

SEQ ID NO: 199931 - protein, 94 aa, Zea mays
  Clone ID: MRT4577_113928C.1.pep
MPLPVSQAEPEPEPEPQSHAPPASSQQQANQDHQDDEEEELALELTLGLEPLVRQRQPAACVKIKQPKSSRCDCDHSGLSAASSLMCLRLQLPA

SEQ ID NO: 199932 - protein, 75 aa, Zea mays
  Clone ID: MRT4577_113929C.1.pep
SVFEIIKVSLGGDISYVKKTLVWLIVSKGGDGEWINDILNEGNLEWLFWLVEGIGYVNLIVYMGCGVRYEYKKGW

SEQ ID NO: 199933 - protein, 162 aa, Zea mays
  Clone ID: MRT4577_11392C.1.pep
MGRRGEPYYVEAAPPVDVNKNTEWFMYPGVWTTYILLLFFAWLLVLSVSGCSPGAAWTVVNLAHFAITYHFFHWKKGTPFAADDQGIYSRLTWWEQIDNGQQLTRNRKFLTVVPVVLYLIASHLTDYKQPMFFLNTMAVFVLVVAKLPNMHKVRIFGINGDI

SEQ ID NO: 199934 - protein, 50 aa, Zea mays
  Clone ID: MRT4577_113930C.1.pep
NYGPGFLTIWPEKSFDSPRLTLFGYIPFSHKRANTEGPRTEGPSQLYPTP

SEQ ID NO: 199935 - protein, 53 aa, Zea mays
  Clone ID: MRT4577_113931C.1.pep
GPCMIRLGSRWSSPTFDSGGRACTDPTQPLLPRVSRCLSHPVNPMRLLMLNTT

SEQ ID NO: 199936 - protein, 72 aa, Zea mays
  Clone ID: MRT4577_113932C.1.pep
WKLLSFFLGLVSFWEGLVRNCYSLGSKILRTFGLSQVKLYKSIKNSNIYDIKSALLDPLTIMLYISQLTLIL

SEQ ID NO: 199937 - protein, 221 aa, Zea mays
  Clone ID: MRT4577_113933C.1.pep
MFVNDARADASFTCCNDLGDLAIKMVQTDRHTTFPLVYRLVELALILPVATATVERAFSAMKIVKTDLRNKMGSDWLNHRMFQEMKSRMKMLPKQHQAASVMSCREQSSATGPKGTLFPMCGMNLAFDRDLIGPAMYFGLMGDGQPIGRYDDMWAGWCVKVICDHLGLGVKTGLPYIWHSKASNPFVNLKKEYKGIFSQEDTIPFFQVVVLPKDCDIALSQ

SEQ ID NO: 199938 - protein, 89 aa, Zea mays
  unsure (1)..(89): unsure at all Xaa locations
  Clone ID: MRT4577_113934C.1.pep
MDAXVHVFCVHTQANFLLLPEGNRRYRLXKSRLSFSGRRXITYGHSAQHYTHDKLKKCGSDTQDLDTLLVIGTECEIAVSTADDDQLCK

SEQ ID NO: 199939 - protein, 572 aa, Zea mays
  Clone ID: MRT4577_113935C.1.pep
MAPLLKDELDIVIPTIRNLDFLEMWRPFFQPYHLIIVQDGDPTRTVMVPEGFDYELYNRNDINRILGPKASCISFKDSACRCFGYMVSKKKYVYTIDDDCFVAKDPTGKDIDALAKHIQNLLCPSTPLFFNTLYDPYQEGADFVRGYPFSLREGVPTAVSHGLWLNIPDYDAPTQLVKPRERNGRYVDAVMTIPKGSLFPMCGMNLAFDRELIGPAMYFGLMGDGQPIGRYDDMWAGWCVKVICDHLGLGVKTGLPYIWHSKASNPFVNLKKEYKGIFWQEDIIPFFQAAKLTKECDIALSQQVKEKLGKQRRISVMGSWGHGSTHPQNSFANFDEDKSIELAQIYVVDFTQYDCIVLRNQLEMFVNDATCCNDLGDLAIKMVQTDRHTTFPLVYRLVELALILPVATATVERAFSAMKIVKTDLRNKMGSDWLNHRMICYIERDIFSSIPNDKILYQFQEMKSRMKMLPKQHQATSVNVCAKFFLNGPGPVVSKVPPLSARSAPTSPSSTTGIWLFAECHILCRVFYFGHSQQVKEKLGKVDPYFTKLADAMVTWIKAWDSLNAANGKPKK

SEQ ID NO: 199940 - protein, 105 aa, Zea mays
  Clone ID: MRT4577_113936C.1.pep
KTKHGRLTLDLSARTPSGHDASCTSQRPRATAGPRTSPAKPAWSEMGATTTSARTGAQPCTTGRCSVRWTYGGQGTTRTAHGNLPGPLTQLAELQEGGGRRAMAM

SEQ ID NO: 199941 - protein, 143 aa, Zea mays
  Clone ID: MRT4577_113937C.1.pep
ALAEVSQNNPSFRNGVPFFNVLPVTGNGPFGCGNDIITWEFLGSHVFSGKSIPTEPFFFTPALKQLSFGNLRWGPVGIFSQGTGGPSTSRWGTPVCPLFLGWGRELCFFVGGRLKKKTVPPPSPMAPFCFFLFQGPIQRKPWG

SEQ ID NO: 199942 - protein, 142 aa, Zea mays
  unsure (1)..(142): unsure at all Xaa locations
  Clone ID: MRT4577_113938C.1.pep
MVVGKRQWSATYSEQKIFNCGTRGAVVGNAVMLSEIINYVQSLQXQVEFVFMKLATVNPQVDLNSLPNVLPKDVHQSCGPPHFSLETLGAPLSYLSQPHHGSPLGCMDNQSCMHPLDTTFCLAINPQYHFLNGVSDASSQLI

SEQ ID NO: 199943 - protein, 343 aa, Zea mays
  unsure (1)..(343): unsure at all Xaa locations
  Clone ID: MRT4577_113939C.1.pep
MQFLSASASASSLVPPSAHLLRLSRPQPFXAAPPPPLPAQTPRAHAPTAAPPRLATLXLSTPRAHGGHGHGHHHGHDHHHHHGHGHGHGHHEVDVHGGGGGAAVMRVARAIGWANVADALREHLHLCCISLGLLLIAAACPHVALLNSVSRLQAALIAVAFPLVGVSAALDALVNIADGRINIHVLMALAAFASIFMGNALEGGLLLAMFNLAHIAEEYFTSKSMFDVRELKENHPEFALLLETSGEESVQFSNLSYTKVPVHDLDVGSHILVRAGEAVPVDGEVYQGSSTVTIEHLTGETKPLERTVGDAIPGGARNLEGMMIVKVTKSWEDSTLNRIVQLT

SEQ ID NO: 199944 - protein, 127 aa, Zea mays
  unsure (1)..(127): unsure at all Xaa locations
  Clone ID: MRT4577_11393C.1.pep
EKKPFXPFFPPQQPYKICFLLXNGEFFFSGQKKSPKKWPKKLGHPXGKLKKIKKKKRGPFFPPKKTLRGPPNFSKNPVAPLXITPLTKSFKKKGKGFLKNRAPEKVXLNPFFPININXRPKKKKKSL

SEQ ID NO: 199945 - protein, 78 aa, Zea mays
  Clone ID: MRT4577_113940C.1.pep
SALSYLEEHVGYSNRWAIVVELELYYVVPVVVDNISYGVILVLQIWGDICTRQTDGKVTLCCIVCRSFTSGEHPFLRL

SEQ ID NO: 199946 - protein, 68 aa, Zea mays
  unsure (1)..(68): unsure at all Xaa locations
  Clone ID: MRT4577_113941C.1.pep
GGQFGINLLAPMMGPLLDPLEWSXPRGAXPEGVHILGSPGLVSFLGPPFQIFFKPRFEKEELFNRVPF

SEQ ID NO: 199947 - protein, 55 aa, Zea mays
  unsure (1)..(55): unsure at all Xaa locations
  Clone ID: MRT4577_113943C.1.pep
RXGSSLVXPWFXSLAVVFRRRAWETPGVAXLVRLAALPPFARWRXXXGARAVRPS

SEQ ID NO: 199948 - protein, 180 aa, Zea mays
  unsure (1)..(180): unsure at all Xaa locations
  Clone ID: MRT4577_113944C.1.pep
KTTVEVWASLKTRFVGADWVMTARLPTLKGEFDKLCMEDREQLDDYADKISGMSRVTSXLGTMLDDDAMVKKLLNTILDRLFPAVAGIEQFCNVEMMALEEALNGLKVFDERFRRRTRVGGKXVRTNSSRKSSGKXRQKPKSSIRRCFNCGIRSHFARDCHKPKKEEALLADDGEEATLL

SEQ ID NO: 199949 - protein, 155 aa, Zea mays
  Clone ID: MRT4577_113945C.1.pep
FEPLTVEDVSNVLDLERPDGIIVQFGGQTPLKLALPIQQYIEENEMVSASGTGNVKIWGTSPDSIDASEDRKRFNAILEELQIEQPKGGIARSESDALAIASEVGYPVVVRPSYVLGGRAMEIVYNDEKLIKYLATAVQVDPERPVLVDKYLIDA

SEQ ID NO: 199950 - protein, 126 aa, Zea mays
  Clone ID: MRT4577_113946C.1.pep
GYLLAATIFLNSVQPVLSGVAIGAGWQSLVAFVNVGSYYLVGLPLAAVFGFKLKLDATGIWVGVLIGTVLQTMVLFVILSRTKWQKEAMLAEERIREWGGNVELPQTQETGPSESTAAPDARKGPK

SEQ ID NO: 199951 - protein, 119 aa, Zea mays
  unsure (1)..(119): unsure at all Xaa locations
  Clone ID: MRT4577_113947C.1.pep
EIHAFAVQCGGIKCVHADKTLIXRGEASNGLVGAESIVEVTINKIGFLNAVSPESTHCAKLENNPSQVVTQEWCAGYPEEEIHYAHHCCLPWLACKLQLRAVQHDEETKSLGRADLRRE

SEQ ID NO: 199952 - protein, 92 aa, Zea mays
  Clone ID: MRT4577_113948C.1.pep
RSPDAARLCPAHCNPGASKTCQGNKGSDHSPFIYNPTSPTGINQKTKSPHLTASDKLTWATTCPKMHSSVTIHHLPQAGSIRNEAGHTSLWD

SEQ ID NO: 199953 - protein, 106 aa, Zea mays
  unsure (1)..(106): unsure at all Xaa locations
  Clone ID: MRT4577_113949C.1.pep
MSFAGCMAKTKGFKGVLRAYQGRLKDLDKHIPTXVKAGNDAEDMFHGEPRIHCSPPDKYYAGEVTVSSIYFWPQYLFPPPYISFERKVVHSNXINSSXSICXDILK

SEQ ID NO: 199954 - protein, 86 aa, Zea mays
  Clone ID: MRT4577_11394C.1.pep
MHVCHMHACLLGPRIVRHRRRLLLVEVLPWCSGPRVCMYFCLIFFVQIRHSGWPRLPPIYAGRYVLWSSCMSRILNSCSASGEPLA

SEQ ID NO: 199955 - protein, 93 aa, Zea mays
  Clone ID: MRT4577_113950C.1.pep
FLGWAPRFYGGPGGFPPPPGSFSPLFCPELFPFKKGVVRGETQGLFFGDSSLDIFLKKGDPKNPWAGFSPILVPRAVYLPQVVPFFKGLFPHP

SEQ ID NO: 199956 - protein, 172 aa, Zea mays
  unsure (1)..(172): unsure at all Xaa locations
  Clone ID: MRT4577_113951C.1.pep
PPHETVIGGFAKTHTTNAYLKSFQXRTQNSAAGKTNYRGSIKMINQDKNTYNTPKSRXAARFTNPDITPQIISARMTRDMXLASAYSHEXPRYALEAGMTNYAPVYCTGLMLTGRVLKTRVLNSEXEVNAEGPXRHFFGDHCDEKTPFRALLDVGHNKTSTVNPAFGGLTGS

SEQ ID NO: 199957 - protein, 200 aa, Zea mays
  unsure (1)..(200): unsure at all Xaa locations
  Clone ID: MRT4577_113952C.1.pep
VSFKGLLFVPGTLPSDSFNKYGTSNDHIKLFVRRVFITDEFNDLLPKYLSFLQGIVDSDDLPLNVSRETLQQHKLLKVIKKKLVRKALDMIKKLGKEEMEKFWKEYSTNIKLGVIEDPANRTRLAKLLMFLSSKENKMTSLADYVSRMKPKQEHIYYVAGSSKEEVXKSPFVERLIKKGYEVIYLVEAVDEYAISSLPRY

SEQ ID NO: 199958 - protein, 111 aa, Zea mays
  Clone ID: MRT4577_113953C.1.pep
SRISLSRLSLLPTVAEADITRAQKDTCLGYLMRNASSGGYIARNGTLQSSMEWVVNEKLLAVRTLWLIGIIGFITYGLVYAWDHNDRESHQCACCMLTLVTSLLWLSTRWW

SEQ ID NO: 199959 - protein, 213 aa, Zea mays
  unsure (1)..(213): unsure at all Xaa locations
  Clone ID: MRT4577_113954C.1.pep
ICTGLRSVCFVALVIGMDETLQALDDLISQFLSLDRSLWSSSDDAEAFLEAVDELTSTIHGLESTSADHALLESFDLLLERCSARLKDEFQRLVGTSGFSDDDHGDRSSKRSQNEDANDHTFVAQPVRNFDIIVDALPEGVVAEANRIATRMIAAGFGDTCAETYASARRSFIDESIARLGVDAHWEEEDXNKSTTAWEELETRIMRWIPEHA

SEQ ID NO: 199960 - protein, 64 aa, Zea mays
  Clone ID: MRT4577_113955C.1.pep
IRLEDKNGSVFSRMVLPHWMVFIKLGSAPQPTRLILVGLYSTHLLNFTILKNKKARTTRNTDIH

SEQ ID NO: 199961 - protein, 98 aa, Zea mays
  Clone ID: MRT4577_113956C.1.pep
KPQSHCLAHALSNMACLEATGMCIRGEQICWMVHHMEGMISTWSPIYQISCRQLAPLFLLFLKLSDRSNPTKKTRGVAETEGAQSTRLCSSVCLGDFG

SEQ ID NO: 199962 - protein, 69 aa, Zea mays
  Clone ID: MRT4577_113957C.1.pep
KSSKIWAKYSFSTGNFRPPYTSLGENFIRNLPSWPFMAQGHKHSTACSTLKELGQNEGKTQHFLYIHAI

SEQ ID NO: 199963 - protein, 323 aa, Zea mays
  unsure (1)..(323): unsure at all Xaa locations
  Clone ID: MRT4577_113958C.1.pep
GTHPSGDPRPNPPRAPKSIFFGASFGTSGNESSGTPFTLTTSPGQLFRPASLSIPSAQPAQPSQSTSSSSFSNSFSSGLTGFGQPAQIGSGQQSXLGSLHRLELVSMQDLGRLPKFDLVLASXQIQSGFGQSAQIGTGQQSGFGKPAQIGAVQSGFGQPAQFAAQQTLGSVLGSFGQPPQLGGIGSGRFGGFSSASTSAGFSSLSSGGGFAAAATGGGFAALASKSGGFVGAASSGGGFGGASQGGGFGSGGGGFGSFGGNQGAGFSAFGASGAGRPAADFLTQMRRCQQQHRRLVLDSLRVSLQGDQLAKAFMALSSGSMAA

SEQ ID NO: 199964 - protein, 643 aa, Zea mays
  unsure (1)..(643): unsure at all Xaa locations
  Clone ID: MRT4577_113959C.1.pep
MKSTAQSSKLTPSSPPSFSYTRMGAQDSINPSSVPSFGTKHTVSKPNTLTFKTTISPKSNANTEPNILPSITAPKTSLSPLSVKTAGESGDLPTLTMKNRQDGQSMPSLGNIKGPGASLQNKGGIFRDLDKSSFNSEHSKPAALHEKTDQLSGVGDAVQNTVKDISKMAPQPSAFLPAPVTQTNSYSLRPTVSSSATSGAKTSDVLSSSMQKVSPIVPGGTVSSSVPTPAKDSSTGLSQNASKPETLISKVTSTIVSASSTSVISVTESKPSVPPTTGASLPSTHVSAPQTAPTTSESVFTSTGKNVGPNTDTISTDEDDMEEEAPSASAELNLGALGGFGLGSQPSSSPQKSNPFGASFGTSGNKSSGTPFTLTTSPGQLFRPASLSIPSAQPAQPSQSTSSSSFSNSFSSGLTGFGQPAQIGSGQQSXLGSLXIGAGQHAGFGQTAQIQSGFGQPAQIQSGFGQSAQIGTGQQSGFGKPAQIGAVQSGFGQPAQFAAQQTLGSVLGSFGQPPQLGGIGSGGFGGFSSASTSAGFSSLSSGNAGFAGAASGGGFSAPTASAGGGFAAAATGGGFAALASKSGGFVGAASSGGGFGGASQGGGFGSGGGGFGSFGGNQGAGFSAFGASGAGRPAADFLTQMRK

SEQ ID NO: 199965 - protein, 114 aa, Zea mays
  unsure (1)..(114): unsure at all Xaa locations
  Clone ID: MRT4577_11395C.1.pep
VDMDRWEFVHESFLRCQACLLSLVVRMRLIAFAGVALXLELCEVGEDCAVTIRAVQRLFEHQRVVEYDLRSMDRLLRAAEIRPSQMIAFLSKLSDDPGLVLRAKLFKEEELALI

SEQ ID NO: 199966 - protein, 55 aa, Zea mays
  Clone ID: MRT4577_113960C.1.pep
GCDQARRQHLIFLQFGIGREKHFCRATACNKVTFIVSHFFSPGVVFGETTCFNWA

SEQ ID NO: 199967 - protein, 662 aa, Zea mays
  unsure (1)..(662): unsure at all Xaa locations
  Clone ID: MRT4577_113961C.1.pep
SGGQLRRRRXGPGSGRRSGPATPLLKWDVGGGGGRGEGRKAGADEAGDAARARETKAKATEVSVRRLAAGVWRLRPPEAVAGGGSGVRVGVEHIPRHLQVQLLKQNTSGHHQSSKNEVSSPISVLERKSGELHKGQLHATSAMLPVATMEKATKWEPGDIKGQESETERKARELTEEVCNELAREVGEDKAEIEALKRDCLRLREEIDDERKMLXHLFKNLADENAACWNMQNEILRANLHSWKAXQHDEEKNRRRLEMINMKLVNELKEAKMSAKQLLQEYETERKARELTEEVCNELAREVDEDKAEIEALKRDSQRLREEVDEERKMLQMAEVWREERVQMKLVDAKLTLDAKYTQLSKLQQDVEAFIAACSTANGDVTVVEQAESIIQAIKSVRAQDAEFRYEPPAASEDIFSIFEELRPSEEPVIKEIEPCYKNSSAKCEPEIQEVSPMTDIFLEKKAKANSNKSPKDESDTEDGSSWETISHEDVQGSSGSPDGSEPSVSNKVXRRKHSXKSRNGFERMESEKLKDESADACLTNMNQPKKKESAISKLWKSSRPKNSEICKKDAVETVNARSSNVRXSQSGPIPLLKVASKXGLSPPCVEQWSSPDSMNVQFNRGFKGCIEYPRMSQKHSLKAKLMEARLESHKVQLRQVLKQKI

SEQ ID NO: 199968 - protein, 97 aa, Zea mays
  Clone ID: MRT4577_113962C.1.pep
TWKARKNKSHTLFVKKKKKKKKYNKKKKKPKKKKKKKKKKKKKKKKKKKKKKKKKKKKKKKKKKKKKKKKKGGALLKNPIFTPGVCKLKFFFLGPQN

SEQ ID NO: 199969 - protein, 110 aa, Zea mays
  unsure (1)..(110): unsure at all Xaa locations
  Clone ID: MRT4577_113963C.1.pep
NRWTFDDVQVNDFXLNDYLAVTAAKHATLLHHSXGRYSKKRLQKAQCAIVERLTNXLMMHGPINSTKVLAVRIMNRSLEIIHLLTDANAMQMDVDAIINSGPRQDATRIG

SEQ ID NO: 199970 - protein, 42 aa, Zea mays
  Clone ID: MRT4577_113964C.1.pep
MAYARSGVAVNDESMLKFVELHSKRLHRFLTFKIDDKFMVIV

SEQ ID NO: 199971 - protein, 127 aa, Zea mays
  Clone ID: MRT4577_113965C.1.pep
PQKKGPILGGCPGPPLNGAWILGPLARGTFMLVPSGTGPVFPKFKGFLSPHPGLGFPAPLKILRKAVYLGQKVPGLPKPHSPGIFFYSGGRNKDGGEDLKTFPLSKRKKKKKKKKNQKKKKKKKKKK

SEQ ID NO: 199972 - protein, 95 aa, Zea mays
  Clone ID: MRT4577_113966C.1.pep
RGGCQTLKRRKGVVPPKARKGGPFFFPHREGCFKLGGAPFPIGTIWFLIWGPGGNKPAVFFLGGNKFFSNALKSGSGKASRSPKKKKKKKKTPPP

SEQ ID NO: 199973 - protein, 58 aa, Zea mays
  Clone ID: MRT4577_113967C.1.pep
KCRQPINNRRNEMNHLRSLNVSNQVSDYGILTFYFNRQAYKLSSPQKVTLGCMNVSDV

SEQ ID NO: 199974 - protein, 75 aa, Zea mays
  Clone ID: MRT4577_113968C.1.pep
PLLSVRTGTHIATHKAAHTCIAQTPRSSASTRQAPTGISVSHYAIPSHGRLWAMAFENTSTLHHDRRQQPHRMGQ

SEQ ID NO: 199975 - protein, 136 aa, Zea mays
  Clone ID: MRT4577_113969C.1.pep
SIIHTTSRTEQRSSPQIHEARSTSALPPLGGLLLGEREVAEREGLRPTRPRQAAAPPQGEDRASRQGLRRPGRPPPPPRPPPCPRLPSPQHESRRGHPHLHRRAPQIPLKASSPALTDPTIARNPCLFENACMPYV

SEQ ID NO: 199976 - protein, 64 aa, Zea mays
  Clone ID: MRT4577_11396C.1.pep
PLISTPSHLKIHPPFYRDAFKYMTIPQTTSFSMASSSTIIHFLYLYIYPSHLLFLNLTYITPSL

SEQ ID NO: 199977 - protein, 98 aa, Zea mays
  Clone ID: MRT4577_113970C.1.pep
TTNGRADGPVTNFTTANCDGDAFGRRGNNSRDQRRCASSRGSMTSSGMGRARERGSSERRRVLLWEGEEIRLQFIEGEERESQPASSNTINCIHQQRE

SEQ ID NO: 199978 - protein, 56 aa, Zea mays
  Clone ID: MRT4577_113971C.1.pep
MTFNRQCKVGNTGPELESRVFMGSHYDVSPFKSGVRMTGAVGVVMKFTAAYEYDRC

SEQ ID NO: 199979 - protein, 78 aa, Zea mays
  unsure (1)..(78): unsure at all Xaa locations
  Clone ID: MRT4577_113972C.1.pep
QTTSIWMYCARLLPYVLFEHASRKLQQKTHCAXQILKGVIWANITFLAXRDISEVYLKTLTTIGRSCSGEDIDRYITG

SEQ ID NO: 199980 - protein, 106 aa, Zea mays
  Clone ID: MRT4577_113973C.1.pep
RCKLSQLLGNRTAAFTKQMLSEVITLLITPSISTGLQGLLKANTPGLLRKIRTTASLKANLCNYQSESHGRNFCCNQTLTRWLPDNCFSPYLPSNGIHFPGRPRGS

SEQ ID NO: 199981 - protein, 84 aa, Zea mays
  unsure (1)..(84): unsure at all Xaa locations
  Clone ID: MRT4577_113974C.1.pep
TLKGITHFYAFCEERHKGDWVNTLWSKLXINQFILFCNSVYRVDLLAKKITVLGYSCFYMHAKMLQDHRNXVFHDFHNGACRNL

SEQ ID NO: 199982 - protein, 239 aa, Zea mays
  Clone ID: MRT4577_113975C.1.pep
PIRTVCVWRQTVRIQCRTVRPHGRTVRARSRTVRVFNQTVRHRVFKEDVYPTPYPSQLDSPSHHTTHQHHNIIYQTHESEYFPAPRRPERNGQSYEPHRACINAPQNPNQWGGKQHTNIQTNSPILDQRAGGLPPAAIDIVREEITGAFRDKLGVSIVPGGQSYRRPYDSQFDRLPYPQGTRIPEFAKFSGDQEKSTREHIEQFLAQLEELADTEAFCIRLFSLSLIGTAFTWYATLPP

SEQ ID NO: 199983 - protein, 412 aa, Zea mays
  Clone ID: MRT4577_113976C.1.pep
MSRKIRTAQSVSFDIPAAEQPYLHNRWHPEVPSIATVEPGETVKIECLDWTGGQIGNNDSADDVRDVDLTKIHYLTGPFEIKGSEPGDLLVVNITDIQPFDHSPWGFTGVFSKDNGGGFLSEHYPDAAKAIWDFDGVYCSSRHIPGVRFPGLIHPGILGCAPSAEILAEWNRREGELATSMAGPHPDKVFAQPPCEINAHGGLAKGDVMARIAKEGARTIPGRPEHGGNCDINNISRGSKTYLPVHVPGAKFSVGDLHFSQGDGEISFCGAIEMAGIITIKFDLIKGGVKSRGLKSPVYRPGDMGPTFSPSRYLTFEGFSVDEQGKQHFMDATIAYRQSCLRAIEYLKQFGYSGEQIYLLLSCAPIRGAIAGIVDIPNACTTLGIPMDIFDFDISIESEPVVRNLGACPISR

SEQ ID NO: 199984 - protein, 65 aa, Zea mays
  Clone ID: MRT4577_113977C.1.pep
LRGHLHSWEGLPSPSLFLLGEDSLMHQGHMGPAQWNSHALPEGAERHRTGAYQAVNSVAVAKTQR

SEQ ID NO: 199985 - protein, 100 aa, Zea mays
  Clone ID: MRT4577_113978C.1.pep
KIKMTVFFAKCVPQVFNVLNPADQKMHVVISLSTTTIGRTVVALRSFTRTVSGARPGHHVVPQLLQHVGRIAIHCSLIPSLHSSSQRHGSPAPRVRGRVG

SEQ ID NO: 199986 - protein, 118 aa, Zea mays
  unsure (1)..(118): unsure at all Xaa locations
  Clone ID: MRT4577_113979C.1.pep
MDATGTGAGGKAKKGAAGRKASGPRKKTVTRSEKAGLQFPAGRIGRYLKKGRYAQRVGSSAPVYLADDLEHIAAEDLELAGDSNNDTKKTRIVPSPGPLAIPNXKEPEKLLTGVNHRP

SEQ ID NO: 199987 - protein, 77 aa, Zea mays
  Clone ID: MRT4577_11397C.1.pep
SGGHMGVLHFLSVRDLQHLLNTIELDDSPFRGKDSIYYMERPVTITFYKLKKLGWKVRPLKESIPASVEFCHESGFL

SEQ ID NO: 199988 - protein, 130 aa, Zea mays
  unsure (1)..(130): unsure at all Xaa locations
  Clone ID: MRT4577_113980C.1.pep
MGVGGGGGQAAVSAPAPVPAEEAGKDAEEGGGWTVKAKLIAAAVLVWVLGSAALWVFLHSYFRHAALRKAEEALVSMCEERARMLQDQFAVSVNHVHALAILVATFHYEKHPPALDQSTVADYTXRTSFE

SEQ ID NO: 199989 - protein, 103 aa, Zea mays
  Clone ID: MRT4577_113981C.1.pep
RNLIYIRGGENKRETEAPSQTAQPKPCFTSGGEQSEPLDLHLTHLNPLSRENPVPTNNITTPAHYPFGCSISTPSGGAGPHITSTHRCSKTPRAAENRPSLGK

SEQ ID NO: 199990 - protein, 60 aa, Zea mays
  Clone ID: MRT4577_113982C.1.pep
RGCKFESRLHLVPIIPQPRDALRCSRPIDDLVIPYGIEGCLWQALVCPSRSCTTEVCRSR

SEQ ID NO: 199991 - protein, 107 aa, Zea mays
  Clone ID: MRT4577_113983C.1.pep
YVCAPSCLCQLLVREEMGGAYLQPPDPHSHSHKASSRKPRCFLFKTTCAWIACGFLYLALLHLLCCSPAGSQRAKVSPLLQYINNTCFFVSTVPGSGPAVDVEEEER

SEQ ID NO: 199992 - protein, 54 aa, Zea mays
  Clone ID: MRT4577_113984C.1.pep
RGQPALLHLSPPPGCSGRPVPPSVANPNPGSSDFTPPPPPPPPPSSHSVTAVCV

SEQ ID NO: 199993 - protein, 83 aa, Zea mays
  unsure (1)..(83): unsure at all Xaa locations
  Clone ID: MRT4577_113985C.1.pep
TLYCAAADDPNLAHYVRQGRMYCGTXRAGFVTNVTEYIAGAKERLECKHFSTGKLXRAIDGCTDATGTYTIELNDSXHEEDIC

SEQ ID NO: 199994 - protein, 48 aa, Zea mays
  Clone ID: MRT4577_113986C.1.pep
MEFAVKPKAYPLADAHLTIGILHIIHEAAHYQQPKKGANEAANTLNRG

SEQ ID NO: 199995 - protein, 636 aa, Zea mays
  unsure (1)..(636): unsure at all Xaa locations
  Clone ID: MRT4577_113987C.1.pep
MGRSLSPLLRQELDNLDKDADSRRAAMKALKSYARHLDSKSIPHFLAEVSDTTAAGAGAGSGMPTGGEFTISLYEVLARVHGRNIVPQIGNIMATIMCTLSSSGGSFPLHQACSKVVPAIARHGIDPSAPDGEKAGIIASLCRPLCSALMGGSQDGGAASGAALCLKALVESSNWRFASGELVNEVCLKVAGAMHDSATRSNAHMGLAMALVKHNGLIAEAYARSIVRSGLQILDGDTADSSSQKRLSAIQMINFFMKFVDPRCLSSELGRVIDVMERCQNDRMPFVRGAAFEASQSARNIAAQKGSRHEVGTSPMVGSNFHKRREKSPCRSLXVPSAALXSTMAAASPVQFRSPESQVVDSSIMNGSTLHDSPVSVGQSSCNFDQSRRTNRRLWSNDAVDVSLKDGLFIQLCSNSNSYEDDLGEVCDSEVTDANFECTNTFAGFVSPSHNGSISRDKTPSPRASDRPINIDDVKIYSTPRKLLRLLQSSYDSDSASNIGQSTAKLRGLSSPDQEHKGLVISSEQMQSLHSDNKGDEMKDENETIYMQNSKGRTQTLSNADASVLSTTEAENTSIKTSPEIELNGDDVCITSSIGKTRKYRAKFTLFLSVIVIFLAIITMLIRIENDDDSAYLVPT

SEQ ID NO: 199996 - protein, 92 aa, Zea mays
  unsure (1)..(92): unsure at all Xaa locations
  Clone ID: MRT4577_113988C.1.pep
PFYGDMAGGLMCAKAKMLLHNVPPALLVRFMKEHRSEWADPGXDAYSRSPLXANPYSASCIKACGLMGHQTILPLXRTVEHEQCYEVIRLQR

SEQ ID NO: 199997 - protein, 88 aa, Zea mays
  unsure (1)..(88): unsure at all Xaa locations
  Clone ID: MRT4577_113989C.1.pep
RQEQQGEGXASSRLVXXXLXRAAARXVRDAVEQPWQRXPSEPEIERSYATAIKLSLXAXVCVCVVFMVVYXASYSVTCLXXXVSRXDX

SEQ ID NO: 199998 - protein, 67 aa, Zea mays
  Clone ID: MRT4577_11398C.1.pep
LLGRPAAVAFGGVVLALAFRRVRGAVSAAPRVLVHAPGPRASVRVRNVLLGLLPGRVGPPGFPAGRR

SEQ ID NO: 199999 - protein, 51 aa, Zea mays
  Clone ID: MRT4577_113990C.1.pep
TTNNYRIKNTNDPHHQIRNGCGKRTLFGIHKRMINTTISERFFVHFLLYQR

SEQ ID NO: 200000 - protein, 135 aa, Zea mays
  Clone ID: MRT4577_113991C.1.pep
RHIGDLQGMTLQDAATERPEAYKAFMSHKRNQQVPGGGESLDQLSERCVSFLYDIVGKHKGERVILVSHGGTIRELYRHASPTKPLHGKIHNTSVSVILVSDATGRCIVKMCGDVSHLQETGVLENAFGGDKTSA

SEQ ID NO: 200001 - protein, 234 aa, Zea mays
  Clone ID: MRT4577_113992C.1.pep
MSSSASSVEGDAAGEFTEVVIVRHGETSWNASRIIQGHLDAELNDIGRQQAVAVAHRLSKEVKPVAIYSSDLKRAAETAQTIARICNVPNVVFDPALRERHIGDLQGMTLQDAATERPEAYKAFMSHKRNQQVPGGGESLDQLSERCVSFLYDIVGKHKGERVILVSHGGTIRELYRHASPTKPLHGKIHNTSVSVILVSDATGRCIVKMCGDVSHLQETGVLENAFGGDKTSA

SEQ ID NO: 200002 - protein, 312 aa, Zea mays
  unsure (1)..(312): unsure at all Xaa locations
  Clone ID: MRT4577_113993C.1.pep
MNTTHAMEQVDDGQHTQEGVSTERAFEADPIPSLSETITARAIAASFILGVALCAVAMKISLNSGFLPSLTVPAGLVGFYLVRAWIRALDCCFQVPHQLPFTRQENTVIQTCVVACSAITFSGGFGTYILAMGKNAAGGDVRDGKNIVEPSIGRTVAFLFLVSFSGMFVLMPFRKVMIIRHRLTYPNGMATAHLINSFHTPQGAXRQQVEMLFRSLGGTMLWNMFQWFFAAAKGCGFGVFPIFGLEAYKHGFYFDFSMSNIGIGMLCPYTITVSMFIGSVISWGLVLPYLATKAGVWYSSHLSPSRPQRHQG

SEQ ID NO: 200003 - protein, 114 aa, Zea mays
  unsure (1)..(114): unsure at all Xaa locations
  Clone ID: MRT4577_113994C.1.pep
EILASLNSILKKRQGGFQPCRSVDPSKYGDHTITIKEADLXNKLEGLTVQHALHGNPLYILDHHDNFMPFLVRVNSLEGNFIYTTRTVLFLRGDGTLVPVAIELSLPELRDGLT

SEQ ID NO: 200004 - protein, 98 aa, Zea mays
  Clone ID: MRT4577_113995C.1.pep
FVMLTTQLIKHGDPDSNILDQHGDLLLGLTGTPMGGPSRSPIIDRCCCDLPCRRSSLYVGWGRPAEGSADEGDATAATILSCLPEGLAEGLAEGVAEG

SEQ ID NO: 200005 - protein, 195 aa, Zea mays
  unsure (1)..(195): unsure at all Xaa locations
  Clone ID: MRT4577_113996C.1.pep
MEQVDDGQHTQEGVSTERAFEADPIPSLSETITARAIAASFVLGVALCAVAMKISLNSGFLPSLTVPAGLVGFYLVRAWIRALDCCFQVPHQLPFTRQENTVIQTCVVACSAITFSGGFGTYVLAMSKTAAGGDVRDRKNIVEPSIXRTVAFLFLVSFSGMFILMPFRKVMIIRHRLTYPYGMXHGALINSFHTP

SEQ ID NO: 200006 - protein, 89 aa, Zea mays
  Clone ID: MRT4577_113997C.1.pep
MANTNLEDVPSLDLMTELLRRLTCSSKPDKRLILIGPPGSGKGTQPPIIKDEYCLCHLATGDMLRAAVAAKTPLGVKANEAMDHGELDS

SEQ ID NO: 200007 - protein, 38 aa, Zea mays
  Clone ID: MRT4577_113998C.1.pep
FHSPKHLIILNKKDFEYISYVSNFKTPLITYKFTTQPN

SEQ ID NO: 200008 - protein, 61 aa, Zea mays
  Clone ID: MRT4577_113999C.1.pep
LVLSQCGSGVPMTHGSSMNHRSSYRPILRLCCIRLCRVMLQPFYSRSEVQIGKASQEQVFR

SEQ ID NO: 200009 - protein, 70 aa, Zea mays
  Clone ID: MRT4577_11399C.1.pep
TRRFQNVRGSQAVTFFRQHDHEHLPDMTIRRDHLQLHPSYFCGLWRVPCRAISPLHVSCELKNTNDLPPE

SEQ ID NO: 200010 - protein, 211 aa, Zea mays
  Clone ID: MRT4577_1139C.1.pep
MSLSPLDSSSPPAAAAAAATEVPLAPGFRFHPTDEELVSYYLRRRVLGRRLRVGMKKTLVFHAGRAPKGERTNWVMHEYRLLDADGPQDLHVVCRIFQKHGSGPQNGAQYGAPYMEEEWEEDDDAIENGSTHDASGQIAATTCAVDEESNEDDENAYCETNRPARVEPSHLPSVHEMLNPPEMAPLQGQDSKETSDGSWSDVAISLEEILQ

SEQ ID NO: 200011 - protein, 150 aa, Zea mays
  unsure (1)..(150): unsure at all Xaa locations
  Clone ID: MRT4577_113C.1.pep
PWAGPPFWANFCPFPPLWGRFGLPFTGPYSPFGGEFYISLALFLHRGTWDTPGVPQLNSLAPLPLFTSWGNSKGAGPALFFHHFATLIGXFAPPLTGAFNRAGGRVPPQVALSXSTPLRPFPFVFFLSFSRPCSGFPLXALIRASPLGFR

SEQ ID NO: 200012 - protein, 66 aa, Zea mays
  Clone ID: MRT4577_114000C.1.pep
MLLNLQFMYVIEQSAAVLTSSMCICFCRWVNAAPCDSCGRETSNVGMGTPLTSEIKFGASRVEMYR

SEQ ID NO: 200013 - protein, 101 aa, Zea mays
  Clone ID: MRT4577_114001C.1.pep
RSKFSPMANKGPNGTQGPPIHRAGHTPPQTQGEGGALLGGGPHGGPQPPEQFKHGTQPGTPHEKPRTGETPGGFYPPGPGLGQIPGTGHAKCTTPPQTRGP

SEQ ID NO: 200014 - protein, 140 aa, Zea mays
  unsure (1)..(140): unsure at all Xaa locations
  Clone ID: MRT4577_114002C.1.pep
ARAAGLKGMKSLVALNASYNAFTKGIPSGLGLLVNLQSLDLSWNQLDGGVDWKFLIESAVAHVDFSGNLLTSTTPKELKFLADISETVLYLNLSNNKLTGSLIDGVELSTFGRLKVLDLSNNQLSGDLPGFNYVYXLEVC

SEQ ID NO: 200015 - protein, 257 aa, Zea mays
  unsure (1)..(257): unsure at all Xaa locations
  Clone ID: MRT4577_114003C.1.pep
FSEXKMAIXKRCESSDVIICTMAFSMKEKFNKYWDMNNMALAVGAFLDPRYKHKMVELYMSKMYDSERAELEKLSFINVINELFALYSSNINAKTTNMASTSKESELVPHKNGSFMDDEDEDEVDLDELYAAANNVKKVSELDVYMSEGLVKVNEGDAPFDILSWWRGQVTNLPILSTLARDVLSMQVSTVASESAFSSSGRIVDAFRSKLKPEIIEALVCTKDWKIASEKDLETEIRTISEDMNAMDLDEDAIAAT

SEQ ID NO: 200016 - protein, 65 aa, Zea mays
  Clone ID: MRT4577_114004C.1.pep
LYKKDISRPSARASPLSSAHASALCDLRSGWIGTFNMRMWKINYLYEGGLLQMSTLTPRKLFYLL

SEQ ID NO: 200017 - protein, 113 aa, Zea mays
  Clone ID: MRT4577_114005C.1.pep
YQLPSPHVIAYHEHFLLAPDTQSNPKDRHGLHRYQMMGQGLESTAHEQRQIYQDRNSVSRTMNAAIQISGTCLESYLKRGRYMHRGLTSTTSYIAAVLPIPNYVMLCSLLEML

SEQ ID NO: 200018 - protein, 126 aa, Zea mays
  Clone ID: MRT4577_114006C.1.pep
WPPVRNIAKFSPIRWTTMVVFSPEIFWPPPNFFASSWTLGALKPPRGRFFGLHLCYFSASLFSPMFFWLLLPKKPRPFFPPLVFYFLPPPFLFQGPPSNPGCFLACMFFKHLVVLCCQKFFFFCRL

SEQ ID NO: 200019 - protein, 813 aa, Zea mays
  Clone ID: MRT4577_114007C.1.pep
MDSPYALHLAIAALVGASFAAASAYYMHRKTLDQLLRFARDQQRRRNRLLPEGDELEDGEEDPPPHWDHDRRTLPIPPGLPPLHTGREGRPVVSPGSTKRVGPIVRPTTPKSSVPTISAFDRIEDSDDEEDLVPDAKNDTAYLTPNGAIGSDLTDKASQNGELTSAPSTQMIRSHSATGSLHVPQLNPIAADILRKEPEHETFSKINITAVETPSPDEIEAYKVLQKCLELRQRYIFREEVAPWEKEIITDPSTPKPNPNPFSYEHQAKTDHHFEMVDGVIHVYPNKDSKERLYPVADATTFFTDMHYVLRVLAAGDIRTVCHHRLNLLEQKFNLHLMVNTDRELLAQKAAPHRDFYNVRKVDTHVHHSACMNQKHLLRFIKSKLRKEPDEVVIFRDGTYLTLKEVFESLDLTGYDLNVDLLDVHADKSTFHRFDKFNLKYNPCGQSRLREIFLKQDNLIQGRFLAELTKEVFSDLEASKYQMAEYRISIYGRKKSEWDQMASWIVNNELYSENVVWLIQIPRIYNVYREMGTINSFQNLLDNIFLPLYEVTVDPASHPQLHVFLKQVVGLDLVDDESKPERRPTKHMPTPEQWTNIFNPAYAYYVYYCYANLYTLNKLRESKGMTTIKLRPHCGEAGDIDHLAAAFLTSHNIAHGVNLKKSPVLQYLYYLAQIGLAMSPLSNNSLFIDYHRNPFPTFFLRGLNVSLSTDDPLQIHLTKEPLVEEYSVAASLWKLSSCDLCEIARNSVYQSGFSHRLKSHWIGRNYYRRGPEGNDIHQTNVPHIRVEFRHTIWKEEMELIHFGNVNLPEEVDR

SEQ ID NO: 200020 - protein, 105 aa, Zea mays
  unsure (1)..(105): unsure at all Xaa locations
  Clone ID: MRT4577_114008C.1.pep
AFRWFVLXVVPGFVVLLGFWLLLSARRXRLLLPLGLLXWVFVGPCCSWWGALWLLGPRRXCALWPFGRFCCARCRRLWRLAGSFLGRXCCXVVAXPPRLVCFSLL

SEQ ID NO: 200021 - protein, 96 aa, Zea mays
  Clone ID: MRT4577_114009C.1.pep
RQAENGVKAASAGADGASRLELQESSTGNNCHDLSFKTILETTTTTIAADACDEGNDQDECVHTQLVVDAHRRYFYSQHKGEPRPTATMTVHAAAA

SEQ ID NO: 200022 - protein, 85 aa, Zea mays
  Clone ID: MRT4577_11400C.1.pep
SSSICCSRARLGLFDYDFRSIYGYIQSAYDAFVLCIPTAQKEGAFVNGAQVPGIISSTDSLQRVVFLKSSRLGFAETRLHRGPRP

SEQ ID NO: 200023 - protein, 94 aa, Zea mays
  unsure (1)..(94): unsure at all Xaa locations
  Clone ID: MRT4577_114010C.1.pep
MAEGQVLVLDGRGHLLGRLAXIVAKQVLLGRKVVVVRCEGINISGNFYRNKLKYLAFLRKRMNTNPSRGPYHFRAPSRIFWRTVRGMLPHKTKR

SEQ ID NO: 200024 - protein, 40 aa, Zea mays
  Clone ID: MRT4577_114011C.1.pep
KFNFFFLTDKQSLIIRQGYTTQGLPSHQDPPSPIHKLTKN

SEQ ID NO: 200025 - protein, 96 aa, Zea mays
  Clone ID: MRT4577_114012C.1.pep
RGNIWGKLGPNKPEDLFSGYYPRNPGGTQYGGQSGPNLPVLNNPHGQSAWALASHGRGGPPRAQRMHSLHLIHLPPHQGGAPPGPLKGARPYSRAP

SEQ ID NO: 200026 - protein, 108 aa, Zea mays
  unsure (1)..(108): unsure at all Xaa locations
  Clone ID: MRT4577_114013C.1.pep
TRGRTRGRDGQSQSHSHSHPVGEWGQGKRSLTCPDLNLDLCIIPTCQEEEEEMEEAAMRXETGSEAGGRALXLGCRLRLCMTVDCKCSSSSLLGLRTAMLDFRSLEMK

SEQ ID NO: 200027 - protein, 123 aa, Zea mays
  Clone ID: MRT4577_114014C.1.pep
LHQSDHHPTTTTLSLQILPALPPLSQIPLHGAHGEQQDHPELLQASSHENTRQHTHFLPIPGPPAGELISHLHPMIPLRSAQRESTKYIGVLLLVVLDCTLQLMCAAPPDYTVLISSPDLLSS

SEQ ID NO: 200028 - protein, 87 aa, Zea mays
  Clone ID: MRT4577_114015C.1.pep
GAPRDGHPVQATQRSFCLPSMCVSIYAITQHASWTEYEIQTVLLHTYESHPAAEIQIRSHLADIRHPYTIARHIYASPLELSNTHTC

SEQ ID NO: 200029 - protein, 137 aa, Zea mays
  Clone ID: MRT4577_114016C.1.pep
GKKNHFFYTKAPRRELKGTQGHYKGPEPLAHNAFRKKPVPNQTTIFNGPPDSRFLIFRSIGEGIQIQRHHREKQIWGGGKKKKKYWAFARGLAFGAQKNTLGKPSGGKGGRDLAPPKPCSPGGGTALLYLGAQGAGG

SEQ ID NO: 200030 - protein, 208 aa, Zea mays
  unsure (1)..(208): unsure at all Xaa locations
  Clone ID: MRT4577_114017C.1.pep
PRRRPRRAKEPPAFSPPPTPPQVAETGKVGSAGGGAARGSDRNSRSAARAQLSPSAEVQDSGGSSPHNQSSSKLGTPGPDFWSWLPPVQDSSKQKESNTGLKPSKKLDTFSSQPDLLMEKERLADSLPLPFETXLSSRRXDRSLPPFQSFAEPENVDSSADLAADKEDTFEEQFSKNAAEVARALSESVGKPSHGIHLDGSMWWKEVG

SEQ ID NO: 200031 - protein, 33 aa, Zea mays
  Clone ID: MRT4577_114018C.1.pep
MGNCFGSNVAEVGAVKAMAQPITRTREVRTSYL

SEQ ID NO: 200032 - protein, 162 aa, Zea mays
  unsure (1)..(162): unsure at all Xaa locations
  Clone ID: MRT4577_114019C.1.pep
LAYLRDSKLLPFPTGAVADPPHSRPHHEGVASSIHIGQAGVQARDACWELYCLEHGCQADGQMPGDKTIGGGDDASHTLFSETGAAKHXPHAVIGDLEPTVIDEVRTGTYRQLFHSEQLISGTEDAASNFARGHYTIAKEIADLCLDRIRKLADNSTDLQGF

SEQ ID NO: 200033 - protein, 92 aa, Zea mays
  Clone ID: MRT4577_11401C.1.pep
KSRQPSHPASLVTRGGICESEGTHQSSYNVPRSMRFQQEHSVAPHQSISRDVVGDWGFFAGEEQVESLCSRWRMDGSVSPRRRHPPGRPRGT

SEQ ID NO: 200034 - protein, 201 aa, Zea mays
  unsure (1)..(201): unsure at all Xaa locations
  Clone ID: MRT4577_114020C.1.pep
XGKRKGLPANNLMAXARRRXKKLNDRLYMLRSVVPKISKMDRASILGDAIEYLKELLQKINDLQNDLESSPSTASLPPTPTSFHPLTPTLPTLPSRVKEELCPSALPSPTFQQPRVEVRMREGRAVNIHMLCARRPGLLLSAMRAIEGLGLDVQQAVISCFNGFSLDIFKAELCKEGPGLLPEEIKSVLLQSAGFHGGVMP

SEQ ID NO: 200035 - protein, 123 aa, Zea mays
  Clone ID: MRT4577_114021C.1.pep
SVKTQNPVPLPFALRSMTSFPRGFSLSEQVPFSLWPKLPVVVGSKIVEVGSFSFSRAPKFGAVGEINPCFPPVLVLPPFFFLPPHGLLFSFFWPPKKKKDVLFYFLGRPPLATYLCLLGALVL

SEQ ID NO: 200036 - protein, 94 aa, Zea mays
  Clone ID: MRT4577_114022C.1.pep
MSSPTHARLAQQGKAGVALRLLLSAALAGFLLVFAARTLVTSPVPASPSYSSQPHPLPLPVAEALVHYATSNATPQQTAEEIGVALRVLQRCAP

SEQ ID NO: 200037 - protein, 303 aa, Zea mays
  unsure (1)..(303): unsure at all Xaa locations
  Clone ID: MRT4577_114023C.1.pep
MDLDLWISKVKEGQHLAEHELQTLCEYVKEILIEESNVQPVNSPVTVCGDIHGQFHDLMKLFATGGHVPETNYIFMGDFVDRGFNSLEVFTILLLLKARYPAHITLLRGNHESRQLTQVYGFYDECQRKYGNANAWRYCTDVFDYLTLSAIINGTVLCVHGGLSPDVRTVDQIRTIDRNCEIPHEGPFCDLMWSDPEEIETWAVSPRGAGWLFGSRVTAEFNFVNGIELVCRAHQLVQEGLKYMFQEKGLVTVWSAPNYCYRCGNVASILSFDEKMXRDVKFFPETEENNQMRGPRTAVPYFL

SEQ ID NO: 200038 - protein, 83 aa, Zea mays
  Clone ID: MRT4577_114024C.1.pep
STSALAGGAELMSGSLIVSQQRQCQCRITSDQWLEIAGEAELKFRFFDCFVQLLLTFLFFFRFLVSYRQVIALVILIYRCFLS

SEQ ID NO: 200039 - protein, 197 aa, Zea mays
  unsure (1)..(197): unsure at all Xaa locations
  Clone ID: MRT4577_114025C.1.pep
SYSAYTGGWGGDTTFAICGDYKRFDVFEEAEANKAAXKYYNASIVFLTXLYRNEGLSGGGAAKLPITSXVNGGGDGNNVDGDSCWKSXAERPLLLGXDVPEGCVIIREHIPITNLFTCLWFNEVDRFTSRDQISFSTVRDKIRARVGWMPEMFMDCERRNFVVQVLPLTHNPLCHSVLPHLFWLHGCLTAGTNKLAT

SEQ ID NO: 200040 - protein, 63 aa, Zea mays
  unsure (1)..(63): unsure at all Xaa locations
  Clone ID: MRT4577_114026C.1.pep
KNIFGFGFXSPQQSPPIKSWVNLSREPLTPAGKDPPVIPLTRALSLKRPPSLLKAAFATPKPG

SEQ ID NO: 200041 - protein, 59 aa, Zea mays
  Clone ID: MRT4577_114027C.1.pep
FHPYGINSRSHFAMKLKEGYGKTSFKTMGKKAPGDWKDMIDGGLAYPSFSIERKRLLAR

SEQ ID NO: 200042 - protein, 115 aa, Zea mays
  unsure (1)..(115): unsure at all Xaa locations
  Clone ID: MRT4577_114028C.1.pep
AHSRPTLGXSFLVXWVXIGEKCXSTFGACSLVWFVXDNXLCGXVAGKDGGXEERQAPEELLGGASQEPHRRCHDAGLPRCQSRQGATCRSGQGGCPKNESIKVCSWILHSERLKR

SEQ ID NO: 200043 - protein, 319 aa, Zea mays
  unsure (1)..(319): unsure at all Xaa locations
  Clone ID: MRT4577_114029C.1.pep
MERRGLLKAALLASCLLVVCSGRVPTVIQQPSTTIYNSTLAKTLVEYAAAIYTADLTQLFTWTCDRCGDLIEGFEMMDIIVDVENCLEAYVGFASDINAVVVVFRGTQENSIQNWIEDLLWKQLDLDYPRMPEAIVTRGSYSAYLNXVQRFTMASFWALDLVVNYGLDGVNLMTFGQPRIGNAAFASYFKTYLPQAIRVTHAHDIVPHLPPYFSFFPQKTYHHFPREVWIHNIGLGTLVYPVEKICDDSGEDPTCCRSVSGSSVRDHIYYLGVSMHAEDWSSCRIVMDYSKLQYQMDLNGNLVLSKQPGLSNARGFSAQ

SEQ ID NO: 200044 - protein, 70 aa, Zea mays
  Clone ID: MRT4577_11402C.1.pep
MRYCKVRNNYFNKWLHKCGTVKSETIISTNGCTIKRCPIFQKFTGVSFLSKRVFNGVALQGLLHHLRLLL

SEQ ID NO: 200045 - protein, 59 aa, Zea mays
  Clone ID: MRT4577_114030C.1.pep
NTLKSIVQPRLRFYNMVSMITSVRRRGPSRKPMARVLLQDYLLAWCSTDFSLKWMYQAA

SEQ ID NO: 200046 - protein, 44 aa, Zea mays
  Clone ID: MRT4577_114031C.1.pep
HASGHHMHWDAHAVYPTASLMRPTTHGAGGGHEDAMTGKDYYRG

SEQ ID NO: 200047 - protein, 168 aa, Zea mays
  unsure (1)..(168): unsure at all Xaa locations
  Clone ID: MRT4577_114032C.1.pep
EPRPLHEEGIRFAHRDLPWGFILCCWVGWGEVSSTWCLQFGLFVLTISLWGVAGKMGVEERQAQKSSXEEHPKNLIVDAMMLDSRAVNLDKGPPCRSGQGGCPKVLFLLPSDEGTSILELGAGIGCFTGELAKTVRNVFALDFIESAIKKNESIKVCSWILHSERLKR

SEQ ID NO: 200048 - protein, 89 aa, Zea mays
  Clone ID: MRT4577_114033C.1.pep
RLHPPTALRYGDSPTPHQSPAQIRRPLIAASANQRSGAVVSSHKTLPTPASQPRRLLPHSRSISPSPRSNSRVLPPLPPCLSLCIRPSL

SEQ ID NO: 200049 - protein, 121 aa, Zea mays
  Clone ID: MRT4577_114034C.1.pep
EFVMFDRSKLSRVDWKYIIIDEAQRMKDRDSVLARDLDRYRCQRRLLLTGTPLQNDLKELWSLLNLLLPEVFDSSKAFSDWFSKPFQRDGPTHNEEEDDWLETEKKVIIIHRLHQILEPFM

SEQ ID NO: 200050 - protein, 52 aa, Zea mays
  Clone ID: MRT4577_114035C.1.pep
PRFCVWDWGRCAVHVVGGTPLAPQPWRSPLPPRYVSALVPVGLSLSERRLPL

SEQ ID NO: 200051 - protein, 146 aa, Zea mays
  Clone ID: MRT4577_114036C.1.pep
MASSRVFASRLASQMAVKAARPAVRANVAAASKRTISGVSPLQAMKRQTLLQATTRNAFQVQRRAYSSEIAQAMVEVSKNLGMGAAAIGLTGAGIGIGLVFAALLNGVARNPALRGQLFSYAILGFAFVEAIGLFDLMVALMAKFT

SEQ ID NO: 200052 - protein, 111 aa, Zea mays
  Clone ID: MRT4577_114037C.1.pep
LARGSGDPFLSPVSHIWLHRLTLRLRLFVFICVYAAACHRNSELTVQCPSVVLCSAAATTSNSSPGVYSPPTMGPTALNDNSAAASVLPVAGLTTVRLLILASCSHVALCI

SEQ ID NO: 200053 - protein, 79 aa, Zea mays
  Clone ID: MRT4577_114038C.1.pep
HKGKNTKKSNKKKKHKQNANLYKVPKPTYLHLRAQIRHIGAQKPNPHHFHQHQRYNKNQPPTKLNQLASQTSFATSPHT

SEQ ID NO: 200054 - protein, 51 aa, Zea mays
  Clone ID: MRT4577_114039C.1.pep
STAACIRCMYSAMMFRHLQFPSFAHRAETAVTACHCSRQVQNQRFGRHQHH

SEQ ID NO: 200055 - protein, 168 aa, Zea mays
  unsure (1)..(168): unsure at all Xaa locations
  Clone ID: MRT4577_11403C.1.pep
LGTSVPAAAGEYLTLAPAARSPRTTPPPRPPARATASPSRAPSRTPPRSPQPWPRSPPPRPRRPARGVAARAPSRSSGARPTRSRCSRALPPSRTAPALRRASRTWASCSTPSGTPSHRISTRPRCTTSSSASRASSSTPCRVTPAPRTSXPAARPGRSPLGRRAHAP

SEQ ID NO: 200056 - protein, 43 aa, Zea mays
  Clone ID: MRT4577_114040C.1.pep
KDRRYKQNEEADTRRLSSLSPLSEMMKMDVQKDEHRTRARITT

SEQ ID NO: 200057 - protein, 77 aa, Zea mays
  unsure (1)..(77): unsure at all Xaa locations
  Clone ID: MRT4577_114041C.1.pep
FLYFFIFXNFFFNFFFLFLLIFFIFXFIFLFFILFFFIFFFSFIFFFFFFFPKEINICTYIIIRSVQYKVNILELKR

SEQ ID NO: 200058 - protein, 45 aa, Zea mays
  Clone ID: MRT4577_114042C.1.pep
LGPIHVKKVTLYIYLLPKKNFSLRFSTQFFSFGQLERGPNLLISL

SEQ ID NO: 200059 - protein, 149 aa, Zea mays
  Clone ID: MRT4577_114043C.1.pep
MELDSLREAFDRVVEKRVLSSTKVQEAIDQIVDEVKQVISKMQMMDTDSMDSCDHSPILAELKAKLNEMVPLNQLEGCQKELNVALSKYLKVLEKSFSTDISKAYRNVDFEASTVNNIIANHFYRQGLFDLGDSFVHECAGSDQTYLKL

SEQ ID NO: 200060 - protein, 80 aa, Zea mays
  Clone ID: MRT4577_114044C.1.pep
MVPHLWPLALLRARARPPQLTRAGTQHEYAPETHHLRADAGTGRRSDTHQVAATAGHGRRDGRCGATGGGTLRATTGPVG

SEQ ID NO: 200061 - protein, 66 aa, Zea mays
  Clone ID: MRT4577_114045C.1.pep
FNGYDDLIYASIVISRRRRTSDRNTRAALNNEPIRYCARSTTTNNKISPSPLKKKKTKQKKTKKET

SEQ ID NO: 200062 - protein, 47 aa, Zea mays
  Clone ID: MRT4577_114046C.1.pep
LFHLRFRHKLWLYLGGHVFYAWHISYGWALIFSGSGGFLTGRVITVV

SEQ ID NO: 200063 - protein, 149 aa, Zea mays
  Clone ID: MRT4577_114047C.1.pep
MQVPTAVVSTVHRPRAPQGGKQLITQAKAMAPRSRLLDLERHDVLSFYGGGAYHQSASASAWPPTATGSFSGPIDFLVAALLLHLVVPFPHAAAVCGALYVAYCFLLDRSAQVSSWPSAAAAMPSAEPSRPTNPGKVAAMQVAAGLRLP

SEQ ID NO: 200064 - protein, 162 aa, Zea mays
  unsure (1)..(162): unsure at all Xaa locations
  Clone ID: MRT4577_114048C.1.pep
GYNLPTDLGNAEAVFLGYSGKIHRKDRIQHGNRSPVLTLRLEKTHQLHASHKTDSIPALQQXETTLIEMEHXMQSSPYLKDEAAQRLLEGVQKLKGXHGSCITALDELTGVNQHEXLTTSERFKLTAYMSHHIQTLRQLFXGIASKADNSLDELQRSLSKQD

SEQ ID NO: 200065 - protein, 92 aa, Zea mays
  Clone ID: MRT4577_114049C.1.pep
YLFRLSIFSLRISPRLTASWGRLSSSSVSRDELSYHHEIRLDIHENGNNLWFEPFVERLVSNALDFAFSFIYSSTFFHTKIIRTGRRRGLGT

SEQ ID NO: 200066 - protein, 51 aa, Zea mays
  Clone ID: MRT4577_11404C.1.pep
LSVVVAITGGTASLATTTETWGRQHELAMHRNFSYRTWMRTRLRPWTSGRV

SEQ ID NO: 200067 - protein, 64 aa, Zea mays
  Clone ID: MRT4577_114050C.1.pep
MLLLLFFSVLAAVAAFLLFKFATVVDGDLTLVSRGPPLRERVDGKVVWITGASRGIGQRASSTL

SEQ ID NO: 200068 - protein, 30 aa, Zea mays
  Clone ID: MRT4577_114051C.1.pep
GSNKIHHSQRRSEAIDPYIMLSDASRAARH

SEQ ID NO: 200069 - protein, 71 aa, Zea mays
  Clone ID: MRT4577_114052C.1.pep
CPRPRRGDAVAPDLLRGDMALVPVDLICEIARKTPPSWGLSLATVNANAQLTKEPNNLYIVHSYGASWLAG

SEQ ID NO: 200070 - protein, 141 aa, Zea mays
  Clone ID: MRT4577_114053C.1.pep
SAHQLCLFGSNPPSALDPRTSEIRPSPLRGQEMLLLLFFAVLAAVAAFLLFKFATVVDGVTPISFFNPTMPSFLSLSVLLFAPVGLGRLGLTPCSLMAVGDLTLVSRGPPLRERVDSKVVWITGASRGIGQRASSTLNLSF

SEQ ID NO: 200071 - protein, 75 aa, Zea mays
  Clone ID: MRT4577_114054C.1.pep
NICQSWLKWFIYHSSISVWCYVPARYKVRKLLCNAVCDINNIVKLHFTIDKKLFWTAHLHTLRTVAFQRVLSICK

SEQ ID NO: 200072 - protein, 57 aa, Zea mays
  Clone ID: MRT4577_114055C.1.pep
SYAPVPKLGIRLERCWKRAFIFMVQGNCMGGANLVRGPQREPLDFLWPNWNNLRLYA

SEQ ID NO: 200073 - protein, 71 aa, Zea mays
  unsure (1)..(71): unsure at all Xaa locations
  Clone ID: MRT4577_114056C.1.pep
MYHERGHIQADHAQDLLDDETNEALMHRINDDLEYFAAICDRSATGYXPYVTYDEHLQIAMMSAYVLKTML

SEQ ID NO: 200074 - protein, 92 aa, Zea mays
  Clone ID: MRT4577_114057C.1.pep
VQEGTMKGVTKIPTIKNCGSTQLLQALTVTLKHHTEVATDITPYMAITSPVDASMKLTTPHPALDSVPRFCYMITHLCFQDVHSKAKSIYYQ

SEQ ID NO: 200075 - protein, 116 aa, Zea mays
  Clone ID: MRT4577_114058C.1.pep
RRNGSKQLAKKGTKVKAAMQRIAKNHQRKRQSNHCMCHNQGPWSLSCGVRDQPGDDKAAGITSALVPMNVGYASSPSEYPLAMSRCLPESSEGACIHSFVTVPITRPSVRPSGRPP

SEQ ID NO: 200076 - protein, 130 aa, Zea mays
  unsure (1)..(130): unsure at all Xaa locations
  Clone ID: MRT4577_114059C.1.pep
MLQARIPTGVDSSAQELPIEYGRSPLRTFGCLSAMIPYKACSWIXLIFCGSPVSKMXTFENNVKPLXSVLHVWCYGYGDELFWYRSAWQYXADVXEKSPCTSFFILHIVDLLAASHSLGADLMYVLFDQT

SEQ ID NO: 200077 - protein, 52 aa, Zea mays
  unsure (1)..(52): unsure at all Xaa locations
  Clone ID: MRT4577_11405C.1.pep
XTMXLTSKSLNXYSYXLGXICVTPVRLTXFPELISPFHXXVYTQFVSXPSXX

SEQ ID NO: 200078 - protein, 69 aa, Zea mays
  unsure (1)..(69): unsure at all Xaa locations
  Clone ID: MRT4577_114060C.1.pep
XIWGIKHPRNKRPQAKKTKQVKRRPPKRIRRQRHPTVQTTTQMILANATPNWRRLMPNKTTYMPRAQTT

SEQ ID NO: 200079 - protein, 183 aa, Zea mays
  unsure (1)..(183): unsure at all Xaa locations
  Clone ID: MRT4577_114061C.1.pep
NERSIPSDQISTSNSAEYNLPDLETQTLAVKCLVGLFVNFFDVIRSELGRTASIVTSFIRSPYKHCATIGVSAIMRLADGVGNKLSKEEWKEILIFFRESVTHTFITFSKIVRMMQDIDIPDRIDSYSETEQYLDHEMYVNDEEEANMETASYAIVXLKNHMALLLMVIQNIIKLYEDDSNEF

SEQ ID NO: 200080 - protein, 298 aa, Zea mays
  Clone ID: MRT4577_114062C.1.pep
MELEKESMGTATQFEQATMETTGDQSQTIRGKSSGTEGQVDANFVDPENETEKKEARKEIVPRSSMWDHFIKIKDEKGRLKSAKCKYCQRILKADSNQHGTSSLNKHFNVCKRNPNKFDKDPKQGTLQATGGEAPSTWRFDQNSLRDAFAEMLIEDELPFAFGEKSGFRKFMSKACPRFQVPSRRTCTRDIVRTYFLERAKLKKFFKDSCQRVSVTTDCWTSQQQDGYMTVTASFIDENWILQKKVISFFKIKGHKGDDIGKSLIKSLVDWGLDRIMTVTVDNASANDSAIGYLRRQL

SEQ ID NO: 200081 - protein, 126 aa, Zea mays
  unsure (1)..(126): unsure at all Xaa locations
  Clone ID: MRT4577_114063C.1.pep
MGWSGXKCVIEVXNGXXXXXXILFFFEXXEKRWGGGXFLFXMXXXXRGGGGXKIVEKYXXXKIEIYILNEXEYGGIVXEEXLXXXXXGKCGKDXWYXFGXGDVFXFLNNRGKFEILLGEGGEYVFV

SEQ ID NO: 200082 - protein, 37 aa, Zea mays
  Clone ID: MRT4577_114064C.1.pep
LLIRGIAIINTGGAGPWGCCCCYYHGNLPFARFPAEG

SEQ ID NO: 200083 - protein, 119 aa, Zea mays
  unsure (1)..(119): unsure at all Xaa locations
  Clone ID: MRT4577_114065C.1.pep
MRECMSLHMXGRRGFQVGNACWELYCLEHGIHADGQMPGDRTIGGGDDXFNTLFSETVAGKHVHRADFVDPEPSAIDEVRTATYRQPLTSLSQLXIVGKEXDAANNFARGHYIYWQGDC

SEQ ID NO: 200084 - protein, 160 aa, Zea mays
  Clone ID: MRT4577_114066C.1.pep
SAPELLYQAKLNNYDKFLNNTIGLVFYSCPHFGSKLADMPWRMGLVFRPAPSIGELRSGSPRLVELNDFVRQRHNKGFLDVLSFSETQVTPIVEGYGGWALRMEIVPIESAYPGFGELVVLPSTDHINSCKPVNKNDPSYAETLAFLEKNFKLCLERAES

SEQ ID NO: 200085 - protein, 84 aa, Zea mays
  Clone ID: MRT4577_114067C.1.pep
SYNVRVTFDGCFMGCFRIIDSLHSSSVLKNRNLIAGKVQGRIPRVFSRKRVFELQGRWMKWESYGIGRGLAIALEMLRRRKEGR

SEQ ID NO: 200086 - protein, 293 aa, Zea mays
  unsure (1)..(293): unsure at all Xaa locations
  Clone ID: MRT4577_114068C.1.pep
VSSTDATTDPSSVRVPPAAHIRRHAGRLLTILSLLPNSKKEIISDAVWCKWLEDCASGRIPCNDIKLKSYCRLTLLNILCSESPNTRKASDEYPDSESEYKRNCPQFGDALFLLNPELPLEVHVDNSGFGILRVSRDNCKEDGGIGGSGSETVNSVDDAEAASKSVPLMDVVFVHGLRGGPFNSWRIADDKSSTTKAGLVESIDEDAGKEGTCWPREWLAADFPQARFFTVKYKXFDPMDWSQLASXEVSSMLLRKLVAAGIGSRPVIFVTHRFSIVVRILAVNLHTCHGVWV

SEQ ID NO: 200087 - protein, 307 aa, Zea mays
  Clone ID: MRT4577_114069C.1.pep
HILLGDDYEKLAAIEAYDASRTREVQDKNVAPNVSSTDATTDPSSVRVPPAAHIRRHAGRLLTILSLLPNSKKEIISDAVWCKWLEDCASGRIPCNDIKLKSYCRLTLLNILCSESPNTRKASDEYPDSESEYKRNCPQFGDALFLLNPELPLEVHVDNSGFGILRVSRDNCKEDGGIGGSGSETVNSVDDAEAASKSVPLMDVVFVHGLRGGPFNSWRIADDKSSTTKAGLVESIDEDAGKEGTCWPREWLAADFPQARFFTVKYKTNLTQWTGASLPLQEVSSMLLRKLVAAGIGSRPVIFVTHR

SEQ ID NO: 200088 - protein, 87 aa, Zea mays
  Clone ID: MRT4577_11406C.1.pep
YPHCGVSRLSRPCPSLKSDVYAFGGVLLGLLSGKIAGEIMCLSDGAVFLSRWVRMLPLEERVWACVPRLFTRVAGPVGAPQALYGVL

SEQ ID NO: 200089 - protein, 58 aa, Zea mays
  Clone ID: MRT4577_114070C.1.pep
LYDFFFMYLYAFYTLVHKLLVLVRLYCPFCIFDVSSLNSATATPTYFMYKCTNTWSSS

SEQ ID NO: 200090 - protein, 99 aa, Zea mays
  unsure (1)..(99): unsure at all Xaa locations
  Clone ID: MRT4577_114071C.1.pep
CSPTATPYCSPQRQSLRXQGCQQLMQVEPQHRFQTIFGSDLQLILQHQPHRGQLVALLAAQIAQQLTAMCGLQHTTTCPYAAGGREPTEETMCCTIAVG

SEQ ID NO: 200091 - protein, 109 aa, Zea mays
  Clone ID: MRT4577_114072C.1.pep
RISVNCHAPYNSGNMPPSYKLRNTSGNLAISLSTCPLCLQSGALLSSRRRRPQCQRIPRAVIQVTIFASPSPTPPQNQAATDSLPVEVTVLLLSTTGLASSLGGGYLVE

SEQ ID NO: 200092 - protein, 102 aa, Zea mays
  unsure (1)..(102): unsure at all Xaa locations
  Clone ID: MRT4577_114073C.1.pep
MRECISIHIGQAGIQGXNASWELYCLEHGIQPDGQKNGDKTIGGGDDXFNTFFSDTGAGKHVPRADSVDLYFFLTDPARTSAYRQXIFHPEQLIRDKEDSAN

SEQ ID NO: 200093 - protein, 49 aa, Zea mays
  Clone ID: MRT4577_114074C.1.pep
SDRKKRTVSFDFLAATHNSKSLLPLTNVFLTQTQPKQTLLLTNEKHLIP

SEQ ID NO: 200094 - protein, 178 aa, Zea mays
  unsure (1)..(178): unsure at all Xaa locations
  Clone ID: MRT4577_114075C.1.pep
FLAALSXHLALVNPAACLLXQQHAFFPLALASVVAILFXQQLQQFLPPLSXLAMVNLFSFVHQRHLLSSSLLAVGNALSFLQQQLLQPLVPFLTHLGVAFPVAYLPQLCPFFQLTLLSSPASLFFCHPSLVSLVVPNPLVPPFFLLLQLLPYNQFFFMIPVLPDKQNHRFWFLLINYK

SEQ ID NO: 200095 - protein, 106 aa, Zea mays
  unsure (1)..(106): unsure at all Xaa locations
  Clone ID: MRT4577_114076C.1.pep
TELYRSCGALSHDKNSGEGCSHINLQXVRRHDVNEVVXRIKKATQLNKLMNXYCHRQSEDMXNSIAFLLDVRTVRGNQTPDDLEMKDGDYTHAMIHQTAGGDTTPT

SEQ ID NO: 200096 - protein, 124 aa, Zea mays
  Clone ID: MRT4577_114077C.1.pep
LPSLDSVPSSLSSLEAVSSSSEAHSSSSWRSSSLVSSSVSSPCNVLAAAPSLTSVRSSSPSLVSLSASSACSTSSAAPSLNSVSSSCSLVSAACGILSSAPSLPSMILSSPAAVRLISFGVGSV

SEQ ID NO: 200097 - protein, 283 aa, Zea mays
  unsure (1)..(283): unsure at all Xaa locations
  Clone ID: MRT4577_114078C.1.pep
IVRLIAQEHMNTKQYVGKADFLVFRXFNHHGFLXTLQEKKLCAVIQLPSQTLLLSMADKAGRLIGMLFPGDMVVFKPQASTQQTPMQQQQLQQFQQQQQQLQQHMHMQPQGLPLQQSQMQLQQQQPQMQPMQQQQPSQMQQQMQSMQQQMQPMQQQMQHQQQQMQHQQQQMQQMQQQQQQQQMQPQQQQMQQMQQQQQQMQPQQQQMQQMQQQQQQMQPQQQQMQQMQQQQQQMQPQQQQQPQMVGTGMGQQFMQGHNRAVQMMQGKITPQGPGSMPGGGFLP

SEQ ID NO: 200098 - protein, 62 aa, Zea mays
  Clone ID: MRT4577_114079C.1.pep
AAATRDNQLVDLAQFLPKKILPIVHCRIIPVLFNPPGYAQIICNKTISLVGFKNPLPLPPFQ

SEQ ID NO: 200099 - protein, 106 aa, Zea mays
  unsure (1)..(106): unsure at all Xaa locations
  Clone ID: MRT4577_11407C.1.pep
CFSKDADKIRTKMAVAXGSXRVWVGQNSLMSTPAVSAVMRERIGANGXTGTGASMFTASHLPCGPTEDYRLQCYMTNRGPDRECGTDETMSNTTTISEYLISEDLS

SEQ ID NO: 200100 - protein, 541 aa, Zea mays
  unsure (1)..(541): unsure at all Xaa locations
  Clone ID: MRT4577_114080C.1.pep
HKRISNRSSHTSRTGGQGSLLNNLSDVRLKKSTSLGGGATSMGLPNMGATPIQVHMSNMISSGMTSTPSVISSMSGPGQPISTQQMVQSTALGSFGSNTPTVTDKAITAVSASLTKNQSSMGMGHSVQSVAQTEFVSGRKLGQGGIVANQNVMSTLXRTAISSTPAMMPTPLYDSTYTXVNSLEVNNNSAMNMPITQQHANAQQPPPKYVKIWEGTLSGQRQGQPVIICKLEGYRSGTASETLAADWPETMQIVRLIAQEHMNNKQYVGKADFLVFRTLNHHGFLVQLQEKKLCAVIQLPSQTLLLSMADKAGRLIGMLFPGDMVVFKPQASTQQTPMQQQQLQQFQQQQQQLQQHMHMQPQGLPLQQSQMQLQQQQPQMQPMQQQQPSQMQQQMQSMQQQMQPMQQQMQHQQQQMQHQQQQMQQMQQQQQQQQQQQQQIQPQQQQMQQMQQQQQQQMQPQQQQMQQMQQQQQQMQPQQQQMQQMQQQQQQMQPQQQQQPQMVGTGMGQQFMQGHNRAVQMMQGKITPQGPGSMPGGGFLP

SEQ ID NO: 200101 - protein, 119 aa, Zea mays
  Clone ID: MRT4577_114081C.1.pep
TAHTACSTCRLYTQSCTYSYGCNSRPEPGPVFFSTCLGLDFSVGTRSFQYSAHRRIRAAVLGLLQNLQPLPHPRSLARGALRAQHPSLKLAEHISTPRACYSAQLVVHYMVRPLAPTCG

SEQ ID NO: 200102 - protein, 92 aa, Zea mays
  Clone ID: MRT4577_114082C.1.pep
IPILGICTSHSYSTADGQQRNGHSSHWHSHPLPGGHPARVATPPYLWVVHMPFFPHSLTRATAQEAICSPKLPFCWTPTLVLGCKPAQLRRS

SEQ ID NO: 200103 - protein, 66 aa, Zea mays
  Clone ID: MRT4577_114083C.1.pep
MARRHAQPPWPAKRAENRGAGGARRAGRGGLGKNGGWADSAGANTPNRGPSRAGADSHGRSGASAR

SEQ ID NO: 200104 - protein, 102 aa, Zea mays
  Clone ID: MRT4577_114084C.1.pep
SLRQVRRHAVCNTFQCLHQQTFPFRVSTNYSRRPPRCVSISAETHPLTDSDFCQQRLVEAAVELWRQRRHPHRKEGNVGGLEKTSLAFHGGRICRVRVRIIC

SEQ ID NO: 200105 - protein, 87 aa, Zea mays
  unsure (1)..(87): unsure at all Xaa locations
  Clone ID: MRT4577_114085C.1.pep
VVVFSPSCFGPSGWLFFGCFFGLCPFWPCSFVSAWWVCPLPXWFASLVXFVFFSPPSFRVPPPVSFVGLFWFPGRVGXRVXVAWVPP

SEQ ID NO: 200106 - protein, 63 aa, Zea mays
  unsure (1)..(63): unsure at all Xaa locations
  Clone ID: MRT4577_114086C.1.pep
WDLEPAGKGCYNVRSXKETTVVLDEPLSYSLDDCIEFIQEDEIVEVTPASIRMCKNPKVSKKK

SEQ ID NO: 200107 - protein, 209 aa, Zea mays
  Clone ID: MRT4577_114087C.1.pep
PSAESLTVRVHPSHLLSAGMWGRPTLALGYESHLRVRLMGTMNAHRKWNQHTPIPRGYYGNAHVSPMAEATAGELCSQPLARTVDLVRRTKLSVTKERMESMVDTIASTRQWPPPTMDRIYEVSDTKWIATNATQFGWAELVGGGIPLAGDLASKLGSDHMSCRNQDGDHSTIVSMLLPKPAMDKFSTELSVWLNNKHDHKNLLILSSL

SEQ ID NO: 200108 - protein, 671 aa, Zea mays
  Clone ID: MRT4577_114088C.1.pep
MQTQTLILRAGPSARRSTPPPASTVHLAASGRCLLRAPSSLRRRRTRSLRASASLEQVKEVASSPAPSAGKSSQATRRDVRNIAIVAHVDHGKTTLVDSMLRQAKVFRDNQVVQERIMDSNDLERERGITILSKNTSITYKGTKINIIDTPGHSDFGGEVERVLNMVEGVLLVVDSVEGPMPQTRFVLKKALEFGHAVVVVVNKIDRPTARPEFVVNSTFELFIELNATDEQCDFQTVYASGIKGKASLSPDNLADDLGPLFEAILRCIPEPRVEKDGALQMLVSNTEYDEHKGRIAIGRLHAGELQRGMEVKVCTPDDACRVGKVSELFVYQNFSRAPVESVSAGDICAVCGIDDIMIGETIADKVTGTPLPTIKVEEPTVRMSFSINTSPFVGREGKYVTSRNLRDRLYRELERNLAMKVEDGETADTFLVSGRGTLHLTILIENMRREGYEFMIGPPKVINKTVDGKLLEPYEIAAVEVPEESMGSVVELLGKRRGQMVDMEANGTEGTTLLKYKIPTRGLIGLRNAILTASRGRAILNTIFDSYGPWAGDLSSRDQGSLVAFEDGSTTSYALLNAQERGMLFVQPGQDVYKGQIVGIHQRPGDLAINVCKKKAATNVRSNKETTVVLDEPLSYSLDDCIEFIQEDEIVEVTPASIRMCKNPKVSKKK

SEQ ID NO: 200109 - protein, 60 aa, Zea mays
  unsure (1)..(60): unsure at all Xaa locations
  Clone ID: MRT4577_114089C.1.pep
MEADTGCRVEVDDXMFFVDDLISVLRRSDDSHANSQVIAGAGLLRTACRFECDHLHLEVK

SEQ ID NO: 200110 - protein, 155 aa, Zea mays
  Clone ID: MRT4577_11408C.1.pep
GPRLRTLTLVHRSFARQSPRSPVSPGGRPTPVRRPPSQPPAATLPAAASHHLGTHGPRTHMHGTDRPHCSPASGARESLALCTCATRGPEQAAGSQVQATNRVAGQSAIPATRAGTGQQVVLNSIHGACVFFASLCSWPCPYVACWLLSVEDFEH

SEQ ID NO: 200111 - protein, 44 aa, Zea mays
  Clone ID: MRT4577_114090C.1.pep
LFFIKVMIFLLVGLIGVPPDISVPDSEKMASEEDKHINQPKGSD

SEQ ID NO: 200112 - protein, 92 aa, Zea mays
  unsure (1)..(92): unsure at all Xaa locations
  Clone ID: MRT4577_114091C.1.pep
LAAGQGDCPFRAAADLRLAGGGERLRDWVGAHEKERERDHTEPEETEWDGEREEDPEVERXAERPRRGFAIVPGGSGGSGCGRATGGDPGRW

SEQ ID NO: 200113 - protein, 43 aa, Zea mays
  Clone ID: MRT4577_114092C.1.pep
HQVKLYYMPIGKLRDSEEFLFDSQQPYYLKWNLATVNDSLDEI

SEQ ID NO: 200114 - protein, 60 aa, Zea mays
  Clone ID: MRT4577_114093C.1.pep
PPYFWGFFGLFDLTLETLFECVSFLGVLFFYSHVVCDLLIPWDWLNRGGELITSDGKLWP

SEQ ID NO: 200115 - protein, 93 aa, Zea mays
  unsure (1)..(93): unsure at all Xaa locations
  Clone ID: MRT4577_114094C.1.pep
GREADFTCGQARWAVAPCLSYARGTGSDPSESRCSGVRNLKSAGRTAADRHAACNCLKNAARTVGGGNAGNAGSIPSKXRRSMHYTIRSFTKC

SEQ ID NO: 200116 - protein, 83 aa, Zea mays
  unsure (1)..(83): unsure at all Xaa locations
  Clone ID: MRT4577_114095C.1.pep
NRGPGPPAVVGAFNSQLQGMQAIPITLLGAVPPVPXNILAKAFRIKSGKVDPIKANFAAQVKKPMSAFPLIFPNNKPPRCPVR

SEQ ID NO: 200117 - protein, 44 aa, Zea mays
  Clone ID: MRT4577_114096C.1.pep
MRECISIHIGQAGIQVGNACWELYCLDHGIQVTNRPFPLLFSRC

SEQ ID NO: 200118 - protein, 112 aa, Zea mays
  Clone ID: MRT4577_114097C.1.pep
KGPYRNKHAIIVRLYGAHDIFSGRVICEQLDNSKHLNGYFSHRLLVRCSDNSRDIPICIADKCTEQTVGILLTIYMHDNSSLSLSLSLSLSLFQISLYLSYHCIILYMYIGP

SEQ ID NO: 200119 - protein, 54 aa, Zea mays
  Clone ID: MRT4577_114098C.1.pep
QDPSIRGELAVILLSCVADMISRGIQPGPEFMPAMSQIVQDLARIAGASSEVSE

SEQ ID NO: 200120 - protein, 48 aa, Zea mays
  Clone ID: MRT4577_114099C.1.pep
RQSFIAQDADGAQATSLTASTGSCDSYTMQLRMPTTAHGMRHYSALIS

SEQ ID NO: 200121 - protein, 368 aa, Zea mays
  unsure (1)..(368): unsure at all Xaa locations
  Clone ID: MRT4577_11409C.1.pep
MGPRHKFRLSDMIPNAWFFKLRDMRARGGGGAAASPRVAAHAASRTPPTTPRHGHGXRPPPPPPLXLPHRASHYYTPRAGDLVLGSPLRPKASDTRFPPLQLSPPRRSRRRHRRRSAVKLPPPPSASSSGGVASSPASTACRCGRRPELVVAEAPDTPPCRRDVFVGYSSDDDEYVKKPTAAVRAHDKLYAQVITSATDIVIDLRTKRRPEKTLPPIMTKTRPAKPDVFRLEDKHVDVLAHAARRASPVPEQGKLRPRRSVSSARRLKTRANTPRLASSMKCKSPTTATPPTKPPPLAESFAVVKSSRDPRRDFRESMEEMIVENGIRTATDLEDLLACYLALNAAEYHDLIVEVFEHIWVTLSDAKL

SEQ ID NO: 200122 - protein, 657 aa, Zea mays
  Clone ID: MRT4577_1140C.1.pep
MSLSPLDSSSPPAAAAAAATEVPLAPGFRFHPTDEELVSYYLRRRVLGRRLRVDAIAEIDLYRLEPWDLPSLSRIRSRDAQWYFFARLDRKVAGAGAGGRGGPGNRTNRATPRGYWKTTGKDREVHHRGKPVGMKKTLVFHAGRAPKGERTNWVMHEYRLLDADGPQDLHVVCRIFQKHGSGPQNGAQYGAPYMEEEWEEDDDAIENGSTHDASGQIAATTCAVDEESNEDDENAYCETNRPARVEPSHLPSVHEMLNPPEMAPLQGQDSKETSDGSCSDVAISLEEILQEPLSNISVENMHRLEGQNATDDNISVDNLLSAYPTKDNGYVGQYNTMNGSAPADEAHARWPLRTYSNQNYVNGPLADEFFDTGNDTNGVAYSRQQQADGFPAPRQVDESMVFYDAPSDYNLVDGKDDFVYLNDILNEPLGNESLFDGDDMMAYFDATENDFKYDILGSGQGLDYPLADMPLNFAQKSDKEDKFTFEGISEVPEANPQYGASSSGSHEDLYTDTEFLGVPTDDTADKTYGNRLASMLGSIPAPPAMASEFPPSTGKSAGMLSAVSSSSIRFTAGIIQLDGLTFSSGSGQWPLQKNGDLSLLVSFAVEGDVASKLPVGLGRATRISTVPMVLRSGFYLFFMSAMILLFSYKVGSCIYSR

SEQ ID NO: 200123 - protein, 151 aa, Zea mays
  Clone ID: MRT4577_114100C.1.pep
MGRMHSRGKGISSSALPYKRTPPSWLKISSQDVEENICKFAKKGLTPSQIGVILRDSHGIAQVNSVTGSKILRILKAHGLAPEIPEDLYHLIKKAVSIRKHLERNRKDKDSKFRLILVESRIHRLARYYKKTKKLPPVWKYESTTASTLVA

SEQ ID NO: 200124 - protein, 91 aa, Zea mays
  unsure (1)..(91): unsure at all Xaa locations
  Clone ID: MRT4577_114101C.1.pep
HXCTPAKSFGICAPTTASHPGRAHQIRTRKRIERVRTRTCCDLSTGARWTTYRSSWTSRREGSALGVVKHRSKHRGGKRKKWERSSCLPWI

SEQ ID NO: 200125 - protein, 400 aa, Zea mays
  Clone ID: MRT4577_114102C.1.pep
MPSSPPPGPPPPPGVPPPAPSPGRSPLPPLRRPRCSASFRQPPSPRNPPIPHPTNLPTPPTMPSAPALVPACDMQEPLLAESSDRFSMFPIRYPQIWEFYKKAVASFWTAEEVDLSADARHWDAALSPDARHFISHVLAFFAASDRIVLENLASRFMFDVQVAEARAFYCFLIAIENIHSQMYSLLLETYIRDGTEKDRLFRAIETVPAVRRKADWAMRWIDGGERFAERLVAFACVEGIFFSGSFCAIFWLKKRGLMPGLTFSNELISRDEGLHCDFACLLYDLLRGKLDESRVREIVADAVDIEREFVCDALPVALVGMNGGLMSQYIEFVADRLLMALGHRKMYNVANPFDWMELISLQGKTNFFEKRVGEYQKASVMSSLNGGAAANHTFSIDEDF

SEQ ID NO: 200126 - protein, 78 aa, Zea mays
  Clone ID: MRT4577_114103C.1.pep
MEKATRLALAAALVLCLLLATGPQEAAGAEGMLSYDKLLSCKVLGNCDKNRGPGATRPGKPVNKYTRGCSPLTRCRGG

SEQ ID NO: 200127 - protein, 78 aa, Zea mays
  Clone ID: MRT4577_114104C.1.pep
WLSFPSKTSRSRVQSPWGRISGLVKKNPLTVSRQFLGYVLCATLRLGRRRVGGDGPLVKGGRVWGYFRLGPCFSLFLV

SEQ ID NO: 200128 - protein, 196 aa, Zea mays
  unsure (1)..(196): unsure at all Xaa locations
  Clone ID: MRT4577_114105C.1.pep
MDRLAENEKSLHETNQYLSGLLNALNRVDVAREFDMDPITKVEKMAKFFLDLQSTVASSQNEVMKSKRATELLLAELNEAHERADNLQEELVKAEAALSESSKQYIVTESARADAVRQLELIMHAQSQTRRRHAAXLLELNSTSSQLREVCFELSHCLVNTFSKDVDLICYVVNFMRSSGKMMDDTNTMDIPIASK

SEQ ID NO: 200129 - protein, 126 aa, Zea mays
  Clone ID: MRT4577_114106C.1.pep
TFIRFLQGVLAIGIIAGIVLLIVLTSFTIADLFASALAFIATGWCILCLAVTWKKVVKTLRLWDSVREIARMYDAGMGAIIFVPIVFFSWFPFVSTFQSRFLFNQAFSRGLEISLILAGNKANQQT

SEQ ID NO: 200130 - protein, 105 aa, Zea mays
  Clone ID: MRT4577_114107C.1.pep
MSSSSSFAADTPPAGALSEDTLSNVAAEELHPSDTVEFGASRMSSVCVQDMQQLGYFGGGVARVPGAEEVPDPEGELVVFEAFFAAGLRLPAHRFVAEVLRRFEV

SEQ ID NO: 200131 - protein, 96 aa, Zea mays
  unsure (1)..(96): unsure at all Xaa locations
  Clone ID: MRT4577_114108C.1.pep
MPEPPPFPSFQFGMAGAIYIKGIPVTNYKRSAVNSEEEWPSKHSKFFAELDDGLEFSFTDKRRFARVRLFEXCPDALFEPMSVDSFLDSLGRKKIG

SEQ ID NO: 200132 - protein, 348 aa, Zea mays
  unsure (1)..(348): unsure at all Xaa locations
  Clone ID: MRT4577_114109C.1.pep
MPEPPFPSFQFGMAGAIYIKGIPVTXYKRSVVNSEEEWPSKYSKFFAELDDGLEFSFTDKRRFARVRLFEDPETVPPISELGPDALFEPMSVDSFLDSLGRKKIGIKALLLDQXQHPTYKLCLCNFFPALYILDLLQFFIKXQSFISGIGNWIADEVLYQSRIHPLQIASNLPRESCEALHQSIEEVVKYAKKKKANMDRFPKEWLFHHRWGKKPGKVDGKKIEFITAGGRTTAYVPQLQKLVGTQSSKTISVAENGDAKDSGTEGEDADADVLNPRKRAAASRGQRNKDTAGSRKARGNGADAEAAEPTTGVVGSNGEQAFGQPNSDAVDKSDRATRRSSRKVKARK

SEQ ID NO: 200133 - protein, 97 aa, Zea mays
  unsure (1)..(97): unsure at all Xaa locations
  Clone ID: MRT4577_11410C.1.pep
SCKRRIVSHRVHVLIHQLYEQAIQFVEFRLNSIPYWLCRTAPYVNLCTLNRISSLFPRCSNRLPRRHLGLCGVVGLEGALGLGIFFFFFPGRPXXGY

SEQ ID NO: 200134 - protein, 415 aa, Zea mays
  unsure (1)..(415): unsure at all Xaa locations
  Clone ID: MRT4577_114110C.1.pep
MPELPEVEAARRALQAHCVGRRIARCAVADDAKVVVAAAGRAAFERAMVGRTIVAARRRGKNLWLQLDAPPFPSFQFGMAGAIYIKGIPVTNYKRSAVNSEEEWPSKHSKFFAELDDGLEFSFTDKRRFARVRLFEDPETVPPISELGPDALFEPMSVDSFLDSLGRKKIGIKALLLDQXQHPTYKLCLCNVFPALYILDLLQFFIKXQSFISGIGNWIADEVLYQSRIHPLQIASKWARAWGEALHQSIEEVVKYAVEVDADMDRFPKEWLFHHRWGKKPGKVDGKKIEFITAGGRTTAYVPQLQKLVGTQSSKTISVAENGDAKDPGTEGEDADVLKPRKRAATSSAARGQRNKDTAGSRKARVNGADAEAAEPTTGIVGSNGEQAFGQPNSDAVDKSDRATRRSSRKVKARK

SEQ ID NO: 200135 - protein, 94 aa, Zea mays
  unsure (1)..(94): unsure at all Xaa locations
  Clone ID: MRT4577_114111C.1.pep
LTYKKKKLVQSPNTLLMDXKCHGCFSITTVFSHSQTDDVCPGWQTVLCQPTXSKARLTEGCSLRMKGDYSGRGLQCLLYARYYRHELALAKIFH

SEQ ID NO: 200136 - protein, 385 aa, Zea mays
  Clone ID: MRT4577_114112C.1.pep
MPELPEVEAARRALQAHCVGRRIARCAVADDAKVVVAAAGRAAFERAMVGRTIVAARRRGKNLWLQLDAPPFPSFQFGMAGAIYIKGIPVTNYKRSVVNSEEEWPSKYSKFFAELDDGLEFSFTDKRRFARVRLFEDPETVPPISELGPDALFEPMSVDSFLDSLGRKKIGIKALLLDQSFISGIGNWIADEVLYQSRIHPLQIASNLPRESCEALHQSIEEVVKYAVEVDADMDRFPKEWLFHHRWGKKPGKVDGKKIEFITAGGRTTAYVPQLQKLVGTQSSKTISVAENGDAKDPGTEGEDADVLKPRKRAATSSAARGQRNKDTAGSRKARVNGADAEAAEPTTGIVGSNGEQAFGQPNSDAVDKSDRATRRSSRKVKARK

SEQ ID NO: 200137 - protein, 64 aa, Zea mays
  Clone ID: MRT4577_114113C.1.pep
AFPAETARPVGWRGRPGLQTTSAITWLWVPRQDIHTVPLWPSSSSAAKEKPRETGSGTMVTRLF

SEQ ID NO: 200138 - protein, 129 aa, Zea mays
  Clone ID: MRT4577_114114C.1.pep
GQGNAPGDAVFVKIDELLGFILGKKNEMVSGPLARDFSRGFYFKPRAPRHSNVSQFPVMGIFPCGCGQSKGFFFSHFLLFGNGSARSFVGFEGFKDHLLLDMFCCCFVNKHVLFFFTWRNGVNGVGLFL

SEQ ID NO: 200139 - protein, 96 aa, Zea mays
  unsure (1)..(96): unsure at all Xaa locations
  Clone ID: MRT4577_114115C.1.pep
GTNVIGTXNMLGLAQRVGAMILLASTSEVYGDPLEHPRTDAYWGNVNAIGAXSCYDDGKRVAXTLMFDYHRLHCVVIRIADIFNAYLPRMIIDDGR

SEQ ID NO: 200140 - protein, 143 aa, Zea mays
  Clone ID: MRT4577_114116C.1.pep
SPAVILLPPRHLRPPLRSHGWKDRYRPCPRPRSPCLSMEGSLPRYRPCPRLRNPWTPPPRDVPTPRQPLAHLATPHPSRSAPRPGAPTTPLHGAQVRLLVPPPASLFHFCCLLTGESSVGSLCCVGDESARALSVGTKWRRLL

SEQ ID NO: 200141 - protein, 148 aa, Zea mays
  unsure (1)..(148): unsure at all Xaa locations
  Clone ID: MRT4577_114117C.1.pep
MGQAKRGDNAGPPPHPTPEGRAAKKKKXGGGRERGTRPGXGLGPLPLGTPTPLFVQDPHPLGGKKTGLKMGSPGVVVVVVGPRGGAGHRPKSEKGGQKGKARHFKPLGGPPGGGGPPPAFGPGGGVQKPHQGPPPRGVGKKPQRDNPL

SEQ ID NO: 200142 - protein, 81 aa, Zea mays
  unsure (1)..(81): unsure at all Xaa locations
  Clone ID: MRT4577_114118C.1.pep
AVVNXGYTNTGLPTSTSSHRSTSGPPSSWTLWPWTYHGGAEGSRAVARSRLTGWRIWEELQGVRKKEKRNSRSEEKPTSVS

SEQ ID NO: 200143 - protein, 56 aa, Zea mays
  Clone ID: MRT4577_114119C.1.pep
GPTHACGNLRVGFDAKISACRHQARDGVTGQLLPPIPHLTSYRPDSHCSNIPSILK

SEQ ID NO: 200144 - protein, 105 aa, Zea mays
  unsure (1)..(105): unsure at all Xaa locations
  Clone ID: MRT4577_11411C.1.pep
PCSHLCDLPRLGDYIWSGYESRKELYRTAREGETCVPGETSSKSFDAQXHLTKGRSRGCQTXKEHLTQQLYSVMGXXGGLCTSDESTGKRSAREGVSIDESKFTM

SEQ ID NO: 200145 - protein, 467 aa, Zea mays
  Clone ID: MRT4577_114120C.1.pep
LHEKKIVYISKITIERAKLGFRVVDNPYMVKLNKRTIVLEDKDQIQGFPKYTFSLTPLDKLDQYKNKTDRFIDVIAKISGVSNVAKVPTTSGDQQMRRVVLLEDLKGNMIELSLSGKRALEFDGDQVLDVGQQHHVIAIFVGTLVKLYKGEYTFLSGTSACRWYINENDIAEIKAFQKSLPSEPVPTKKTYLQNDDATHKFEEKSLEQLKHVDPFLDMGQRYQCTATIIGITENQTWCYKACKICNSAIIQKENGYKCTKEGCPSTQFEWKYKIPFIASDHTYNLEFMFFEKKGMELIGKSASTLRKQYEPKEIPPDITSWIGYKFTFVVRVLSKKSVKTIDPSFEVLMIKEKYQKEPIISFISSSGVVPAESTSSTMAEYKELPLLMPITSKDIEKKERSTSQPEHTEETQDMDIEPSGIWEESQISNKRSFGDPNYDKQETTDDKDDLPQFKKIRSTHSQGKSKK

SEQ ID NO: 200146 - protein, 94 aa, Zea mays
  Clone ID: MRT4577_114121C.1.pep
MFRVLYKNALPIIIYVFEFCKGNMIELSLSGKRALEFDGDQVLDVGQQHHVIAIFVGTLVKLYKGEYTFLNGTSACRWYINENDIAEIKAFQKR

SEQ ID NO: 200147 - protein, 116 aa, Zea mays
  Clone ID: MRT4577_114122C.1.pep
TTRPDAPTNHPPTAPATQPHAPQGPDGNRTPQNAASNAGAPHQGERTRTPTTPREQGTTRRSRRATPATEKLSRHSGETRRPTTATQTIMIPPGRGLGRNGRRSRQPVARKPEPGT

SEQ ID NO: 200148 - protein, 146 aa, Zea mays
  unsure (1)..(146): unsure at all Xaa locations
  Clone ID: MRT4577_114123C.1.pep
DRSNDWLVDIINCNIGHDASSACLIGVLHIYGFESFTVNRFVQFCINYTIETLHRQLTHHVFNTVHDEYPGQQTDXRHIQRGDNRDALDLMEWXPRGGIVLLDEACMLHTATDETCVLKVYHSFEKHKLLVKPQLSRDDCTICHYA

SEQ ID NO: 200149 - protein, 126 aa, Zea mays
  unsure (1)..(126): unsure at all Xaa locations
  Clone ID: MRT4577_114124C.1.pep
PPTPTPPPXTPXTTATPPRPPTTXHTQPNPSTPHTTPTQQPTHRPQTPGRLTTTKQTNHRHTGTRGSTNQSKPPPGPSAQIDSSHPTPRTQGPETDHKHDRPQQESPPRGPSAQRRAARHPALLAP

SEQ ID NO: 200150 - protein, 94 aa, Zea mays
  unsure (1)..(94): unsure at all Xaa locations
  Clone ID: MRT4577_114125C.1.pep
SKNYPCVSAESRVALVKVRRRLLALIVERSWAPMMLRLSWYXVGTCDMNFGTGVPFRTRERYWELIQCSMAMLNMAXHVIAPIKEETTHPAPMT

SEQ ID NO: 200151 - protein, 61 aa, Zea mays
  Clone ID: MRT4577_114126C.1.pep
GTRALLEFFFFFFFFFFFFFFFFFFFFFFFFFWGGKILPGTINFLFRGGPKIFSGGGAPPR

SEQ ID NO: 200152 - protein, 64 aa, Zea mays
  Clone ID: MRT4577_114127C.1.pep
TASSMVSRFPFSGLCCDLQLVSSQCNGCGHSLVSVLMKGQVLLLLFASQVNFHTAQWFKTVLCN

SEQ ID NO: 200153 - protein, 171 aa, Zea mays
  Clone ID: MRT4577_114128C.1.pep
QKDLTPLWDVDLKGMVNGAVETCKESFHRFDTYLNFSHPKISENFDPHACGWAFGMNMFDLKEWKKRNITGIYHYWQDLNEDRKLWKLGTLPPGLITFYNLTYPLNRTWHVLGLGYDPAVDIAEIDNAAVVHYNGNYKPWLDLAISKYKPFWSKYVDVDNSHVRRCYEGKQ

SEQ ID NO: 200154 - protein, 53 aa, Zea mays
  Clone ID: MRT4577_114129C.1.pep
LSRTHTQVSDANKGIQYWIAYSLFFASIYVAMHMFLASCSHLAPTVIYHINRY

SEQ ID NO: 200155 - protein, 116 aa, Zea mays
  Clone ID: MRT4577_11412C.1.pep
ASWLYTWPPWRSICSCSPCSGRLRRATAFLWLPMTKRPHGWCSVGGVFVLRRDASPPKESPSPVPPCDLVHSSNAWTQLIVLYVRKGCEIVLPVFYPSPFSILLLLRGKIKNSCFL

SEQ ID NO: 200156 - protein, 64 aa, Zea mays
  unsure (1)..(64): unsure at all Xaa locations
  Clone ID: MRT4577_114130C.1.pep
NDVWPIILTHHKHLLDXSLSTPAQLQVHIEINLPDENATLQILHIHTYNTNDNSLLSPDINLLD

SEQ ID NO: 200157 - protein, 122 aa, Zea mays
  Clone ID: MRT4577_114131C.1.pep
QNKLIYVAKIMNSWLATRNYLSYCPERLDSLPSEGGTDNNLLHAALEATGRGPSSTPQGAGLEHRVDRKRRLHDTGEPTHPDGRRLADEHVALLNSRDVNARTEMKAYATCAPHALGRTCCP

SEQ ID NO: 200158 - protein, 173 aa, Zea mays
  Clone ID: MRT4577_114132C.1.pep
IPSGWVFPNDGQPLRVGVPVNQLKALVSGSTPDSVRGYCIDVFKSAIKLLPYPVPYQFIPIGDGTKNPSYVSIVGMVASNTLDAAVGDFAIVRNGTRLAEYTQPYIDSGLVIVAPVKHITSSAWAFLKPFTWEMWFITGALFILVGIVVWLLEHRSNPEFRGPPCNQVITIFW

SEQ ID NO: 200159 - protein, 69 aa, Zea mays
  Clone ID: MRT4577_114133C.1.pep
TDSCMTPLSLLRSKGGLLKGQEAIYMFSSQGERHMLIFMANFPRCYHKVIYSIDEAIHLFFLGSTHMQN

SEQ ID NO: 200160 - protein, 68 aa, Zea mays
  Clone ID: MRT4577_114134C.1.pep
KSVLLRYRSHHVINVLIYVLVTLGAILVVGVYAAAPCHDESVWHLAVPGDIGLVMSSPGLTGAGPPQR

SEQ ID NO: 200161 - protein, 74 aa, Zea mays
  Clone ID: MRT4577_114135C.1.pep
LSSMLRSYTWTTKFGKCLDVTLEIWPTKSQKNWHTKVLQFPEPFTIAGTLIATFKDSPYFEGKPSFATSWYVRK

SEQ ID NO: 200162 - protein, 51 aa, Zea mays
  Clone ID: MRT4577_114136C.1.pep
GPWRAGMPPSSSFIVAGERHCLVPYGHGTSCLLMAFYHLVGTRSTMVRGLA

SEQ ID NO: 200163 - protein, 96 aa, Zea mays
  Clone ID: MRT4577_114137C.1.pep
AANQSLGCVYNRHAWSCATCVCMYSLIQDGLVLMVIFCDLPFKGYKIDFACISESFQLPRKIVSAYGMDRVDLSQRLRNIVLQTKGKRRTRLCCSL

SEQ ID NO: 200164 - protein, 46 aa, Zea mays
  Clone ID: MRT4577_114138C.1.pep
ETHSICHGGRRWGNYPPASKIQFVLYPLFAGLTGPHRDLEPNSELT

SEQ ID NO: 200165 - protein, 90 aa, Zea mays
  Clone ID: MRT4577_114139C.1.pep
SGGQGRQAQRVLGQVPHGLVSARLLTPVSRHSGLDALPPEPFSCMFHATFLLLGIAVRGAHLCRPPQEFLPRHLVSSKIICMWSLLCKLN

SEQ ID NO: 200166 - protein, 80 aa, Zea mays
  unsure (1)..(80): unsure at all Xaa locations
  Clone ID: MRT4577_11413C.1.pep
ACSLDSLHGASTAWRCDSPAPMAGLGAAEALPIXAIDHEGSEKTLEITFSDAPGSDDPYGRSMRALCRDHTDYVVELARC

SEQ ID NO: 200167 - protein, 80 aa, Zea mays
  Clone ID: MRT4577_114140C.1.pep
PPGVLQFVHTQCLPATWVGSGTLQGMSRAWVRMCRGIRIDGPVLSMVCKAQVLSNVNSTVLCNNKDGFVYRFRCARSGPV

SEQ ID NO: 200168 - protein, 55 aa, Zea mays
  Clone ID: MRT4577_114141C.1.pep
RSYRWKLFTLKKKKKKKRRKNKKKKKKKKKKKKKKKKKKKKKKKKKNKHSTTFLF

SEQ ID NO: 200169 - protein, 160 aa, Zea mays
  unsure (1)..(160): unsure at all Xaa locations
  Clone ID: MRT4577_114142C.1.pep
MGHSYGKRAGTRYAFSRDFRKKGMIALNTYLRQYRVGDIVDIKANGAVQKGMPFKVYHGKTGVIYNVTKSAVGVIIYKQVKHRYIEKRINVRIEHISQSRSREDFLKRVKANAEAKREAKATGXVVQVKRQPLGPRGAHTLSLSENPPMTVTPLAYETTI

SEQ ID NO: 200170 - protein, 67 aa, Zea mays
  Clone ID: MRT4577_114143C.1.pep
GLKETKRRGTIFCPSNQIKSKQKLICPPSPSFGSTPGRLSDIKNIYFFICPPHIKGVSKKRFNIPYS

SEQ ID NO: 200171 - protein, 203 aa, Zea mays
  unsure (1)..(203): unsure at all Xaa locations
  Clone ID: MRT4577_114144C.1.pep
CKVFKYIPGIPDVHRWSPSASGDYSTKSXXYDRFMAGSVSFEPATRIWKSWXPPRCKFFIWLASLNRCWTADRLSRRGLVHPVRCPLCDQQEETVQHILVACVFARDTWWQTLHKVGLHRLTPGLTTTAFQDWWREAECQVPKNQKRGFNSLVILVAWWLWKHRNECVFDGASPNISIIMQHIHEDAVRWGLAGARDLRRLWP

SEQ ID NO: 200172 - protein, 115 aa, Zea mays
  unsure (1)..(115): unsure at all Xaa locations
  Clone ID: MRT4577_114145C.1.pep
MEAADSESVISTFTCPHCQREVPSSNIALHRGDCARNLQKCEHCGDMVARKLMDEHYDENHAPXRELWDLHTGIQCPQRMLACQYCQFELPAVDLFEHXDLCGKGTEYWKSGRKG

SEQ ID NO: 200173 - protein, 222 aa, Zea mays
  unsure (1)..(222): unsure at all Xaa locations
  Clone ID: MRT4577_114146C.1.pep
MFFLASCTLYYELRFSSCSLSNQLGLSLLIVDEISLLIFYSQREVPSSNIALHSAHCARNLQKCEHCGDMVARKLMDEHYDENHAPMNCSLCKHTVERELWDLHTGIQCPQRMLACQYCQFKLPAVDLFEHQDLCGNRTEYYXSCRKYIRLREWIGHELQFHTILNAASELSSDRTRAAAEQPVPKPARPATGSLHKQLLLTVAVTGVAVLIGSILYQGKGK

SEQ ID NO: 200174 - protein, 238 aa, Zea mays
  unsure (1)..(238): unsure at all Xaa locations
  Clone ID: MRT4577_114147C.1.pep
MASPSSSSWLLLLLSCLALALLAADAEVHHHEFVVQETPVKRLCKTHNVITVNGQYPGPTLEVREGDTLVINVVNRAQYNVTIHWHGIRQMRTGWADGPEFVTQCPIRPGGSYKYRFTIEGQEGTLWWHAHSSWLRATVYGALIIRPRENRTYPFAKPSREVPVILXGEWWDANPIDVIREAQRTGGAPNVSDAFTINGQPGDLYKCSQKETTAIPXVKPGETALLRFINAALNHELF

SEQ ID NO: 200175 - protein, 308 aa, Zea mays
  unsure (1)..(308): unsure at all Xaa locations
  Clone ID: MRT4577_114148C.1.pep
MASSSSSRLLLLLLPCLALTLLGAADAEVHHHEFVIQETPVKRLCKTHNIITVNGQYPGPTLEVREGDTLVINVVNRAQYNATIHWHGIRQIRTGWADGPEFVTQCPIRPGGSYKYRFTIQGQEGTLWWHAHSSWLRATVYGALIIRPRENKTYPFAKPSREVPVILGEWWDANPIDVIREAQRTGGGPNVSDAFTINGQPGDLYKCSNKETTAIPVKAGETALLRFINAALNHELFVTIAQHKMTVVATDASYTKPFTTSVLMVAPGQTTDVLVTMDQAPARYYVAARAYVSGQNVAFDXTTTTAGV

SEQ ID NO: 200176 - protein, 102 aa, Zea mays
  Clone ID: MRT4577_114149C.1.pep
KRPFSSLSLFLTGEASDPNLIDTLPRWGPKVFVGGNWECHGTTDHVEEIGKTLDGGQGSPSDVVEGGGRPSYGFLSVGKSQLRPEVHVAAQNWWVKKGGAFT

SEQ ID NO: 200177 - protein, 53 aa, Zea mays
  unsure (1)..(53): unsure at all Xaa locations
  Clone ID: MRT4577_11414C.1.pep
FQDLQFCLQNRIXFLNCKKYSTYAEIKSILMAGRGGLKPVXPATLGRPEAGGX

SEQ ID NO: 200178 - protein, 78 aa, Zea mays
  Clone ID: MRT4577_114150C.1.pep
DAPYGSLMSYMVSASWVQCPTSWILGGCIGLKPVLRKGCQVWLARCPSRASWQQPVVLGSCFRHLFLGLVLVICLLRS

SEQ ID NO: 200179 - protein, 74 aa, Zea mays
  unsure (1)..(74): unsure at all Xaa locations
  Clone ID: MRT4577_114151C.1.pep
ITKQEDVGFEALDTLLIMRLEVGKSLIEYGLLRFASLMQIDHQTHRGSISPSREVSQRTERETHYSMRERKRXR

SEQ ID NO: 200180 - protein, 91 aa, Zea mays
  Clone ID: MRT4577_114152C.1.pep
WGRKSRAWTRRGGTRAPKRGARAQPRPPPPPRPPPFPPPRSPPPPAPPPRPPPTPAPPPLPRPPPPPSPPPFPPPKPPPPPVPRPPPPPTP

SEQ ID NO: 200181 - protein, 147 aa, Zea mays
  Clone ID: MRT4577_114153C.1.pep
RPPSAAPASARSPASAPRSQHRGSAAMDGRAQRERMGRIAARRDPRPWMEGRRGSATAMDGRGDVICGHGRAWSCDLRARWLSSAGREDDGGGCGCGEGNRGRSGGREDMEGHGHVICGRDSCPRQVARTPAGAAGAESQRRRNRDG

SEQ ID NO: 200182 - protein, 176 aa, Zea mays
  unsure (1)..(176): unsure at all Xaa locations
  Clone ID: MRT4577_114154C.1.pep
MDSRRRTLIRVIILGDSEIGKTSLMNQYVNKNLITHDEATIAVDFRPTHEHIMDTIFALRLCHADVQDXFITHKVAPYIGIIWXITNAITESLKGLYDNVHRFKKYNVNLAIFSKPDHYAYALDSTPDDVDAGXSRHGDYMTITRCDNCSVNVANFTTAAKDVTNDENVRHCIVNN

SEQ ID NO: 200183 - protein, 197 aa, Zea mays
  unsure (1)..(197): unsure at all Xaa locations
  Clone ID: MRT4577_114155C.1.pep
THVLLLRSCPGSCTDEKHQPDRAGSRSLVATKHPGTTTHRPHSTDEYGLFDGLTLIQTKLSKAPLRLNGSLPRYHLPTLCASXRTCWLTKLKAGVWCKERITCVFRKATPRASSKHMKRLLQNYDSSYRMNAPEENPDFYICYMVHDRXSDAGSVHXDGSDEAASHYSRGQHNREVATHELMISCMRSADLALLSGC

SEQ ID NO: 200184 - protein, 72 aa, Zea mays
  unsure (1)..(72): unsure at all Xaa locations
  Clone ID: MRT4577_114156C.1.pep
MHGCTVYDLSCASELKMLDEYLLPRSYITGYQATXDDLTVYAALPTAPXDEYGNVSRWHKHIDALLRISVVS

SEQ ID NO: 200185 - protein, 58 aa, Zea mays
  Clone ID: MRT4577_114157C.1.pep
WNCSCGSYRSAVPFVRSKCPGLSATLDFLKYCNFSRFIVPLKISFVKRPSIDVVRLYK

SEQ ID NO: 200186 - protein, 103 aa, Zea mays
  Clone ID: MRT4577_114158C.1.pep
ILLEPRGGKGKALKLIQSRVRPLLEEAEVSFKLMLTERQNHARELVCAEELGHWDALAVMSGDGLMHEVVNGLMERPDWESAIQKPLCSLPGGSGNALAASLN

SEQ ID NO: 200187 - protein, 56 aa, Zea mays
  Clone ID: MRT4577_114159C.1.pep
GGHFSVGQFNLKAKAVRVLEILTLVLRSISGLLRIERHGARGDITRALYLRDGEMV

SEQ ID NO: 200188 - protein, 153 aa, Zea mays
  Clone ID: MRT4577_11415C.1.pep
MKNVAKCDTWCELQYPANHRVFERKLRPKPSGGGHVCLGVTHPRRRANPSERESPEPRDQPAMALRALYNEIRSMKVRDVPAYLKPRLTWDNVKKSADQAVDRYIEKYIDTSSPDPLYHVCIGGMIFSYFVNLPWERAHLAHLEEMERTGGKH

SEQ ID NO: 200189 - protein, 157 aa, Zea mays
  unsure (1)..(157): unsure at all Xaa locations
  Clone ID: MRT4577_114160C.1.pep
MWIQVRTMDGKETHTVNSLSRLTKVQELRKKIEEVFHVEPQLQRLFYRGKQMEDGHTLFDYDVRLNDTIQLLVRQSLALPLSTKERDSELSDSDSGYGVGHSESDKSSTHGEGAAEADDKTVWEDTDLXLYKVNEYVDVRDNIFGAWFEAQVVQVQK

SEQ ID NO: 200190 - protein, 121 aa, Zea mays
  unsure (1)..(121): unsure at all Xaa locations
  Clone ID: MRT4577_114161C.1.pep
GPPLVGVEPFVSPRFFSGPPLLPFPALGRAALFCLALPLSSPFFFPGPVRPHGFFPFLAFVLFAPFCFPAPGGTPPAPALQKPAFGFSCFTGRVGNNRDGFLNKPPPXXXXXGVNIIXXEG

SEQ ID NO: 200191 - protein, 324 aa, Zea mays
  Clone ID: MRT4577_114162C.1.pep
MDEAAIDDLIRRLLEARGGRTPRNAQVTDAEIRRLCATAKDVFLSQPNLLELEAPIKICGDVHGQYSDLLRLFEYGGYPPDANYLFLGDYVDRGKQSIETICLLLAYKIKYPENFFLLRGNHECASINRIYGFFDECKRRFNVRIWKIFTECFNCLPVAALIDDKIFCMHGGLSPELKNMDQIRNISRPVDVPDVGLLCDLLWSDPDKEIVGWGENDRGVSYTFGADIVAEFLQKHDLDLICRAHQVVEDGYEFFANRQLVTIFSAPNYCGEFDNAGALMSIDDSLVCSFQILKPSEKKRKAGAENMPKPGTPPRKIKISVTRI

SEQ ID NO: 200192 - protein, 324 aa, Zea mays
  Clone ID: MRT4577_114163C.1.pep
MDEAAVDDLIRRLLEARGGRTPRNAQVTDAEIRRLCAAAKDVFLSQPNLLELEAPIKICGDVHGQYSDLLRLFEYGGYPPDANYLFLGDYVDRGKQSIETICLLLAYKIKYPENFFLLRGNHECASINRIYGFFDECKRRFNVRIWKIFTECFNCLPVAALIDDKIFCMHGGLSPDLKSMDQIRNIPRPVDVPDVGLLCDLLWSDPDKEIDRWGENDRGVSYTFGADVVAEFLQKHDLDLICRAHQVVEDGYEFFAKRQLVTIFSAPNYCGEFDNAGALMSIDNSLVCSFQILKPSEKKGKAGNGNMPKPGTPPRKIKISVTHI

SEQ ID NO: 200193 - protein, 116 aa, Zea mays
  Clone ID: MRT4577_114164C.1.pep
FPLFFCCIKFYTDVFLPKNKSFCSIAGQLALQKRITGAVRAKLNKLSTYFVPVSPNAKVNQATLWMLIPFRGPGLESPSLPASVFPERGRLPPVSCRGSPRSLGVPLGAPPPGGIK

SEQ ID NO: 200194 - protein, 90 aa, Zea mays
  Clone ID: MRT4577_114165C.1.pep
AGGTRAPPIPWAGLKKGTEDGKIKNWGLGGHCQKTIRSLLTGVRGQTVPGQSVTTHHWYTRAGGAPKMAQIWMPPPCQIKFQGKNGRVFT

SEQ ID NO: 200195 - protein, 66 aa, Zea mays
  Clone ID: MRT4577_114166C.1.pep
GSEVRHEPCCSGLLGVQKRCERSSAQEQADTSVRDRKMVRRPHALRQPSSPEGSHAQALDPSACPD

SEQ ID NO: 200196 - protein, 143 aa, Zea mays
  Clone ID: MRT4577_114167C.1.pep
MRLLVVQGMAMSTAVAGLPSHNHGAASSYVCASSYAIAVFADLRGARHGFGVVPDLSDSGTPVLDVYCLRGDEKTKRRKRLTLSYGNGRPRNQKKGTGPARLFAPPAPPSKDQCYDGEIFSIGDRLGHTWNTSSEFCIALYLP

SEQ ID NO: 200197 - protein, 81 aa, Zea mays
  Clone ID: MRT4577_114168C.1.pep
HTLANIETVNMKDEIEVGVALFRTSSILSAMVGHTIGIHNGKDHIPIHITNHMAGPILGEFVPTRHLTSYESTREGTKSES

SEQ ID NO: 200198 - protein, 170 aa, Zea mays
  unsure (1)..(170): unsure at all Xaa locations
  Clone ID: MRT4577_114169C.1.pep
MYLAADEADLHSRQEHIFAKTLTGKTMTLQGESSDTIDNGKAKIQDKEGMPPDQQRMIFAGKQLEDGRTLGDYNIQKXESTLYLVLRLRGGAKKRKKKTYTKPRKIKHNHKKVKLSALQLYKVDDATGKVTRLRTECPNTQRGAGVFMDNHLDRHYCGKSGLTYVYNQRA

SEQ ID NO: 200199 - protein, 151 aa, Zea mays
  Clone ID: MRT4577_11416C.1.pep
MPQQLHESTQARPGRDAAQEPPSLDSSNKFPFPLLPIPTHPRRRANPSERESPEPRDQPAMALRALYNEIRSMKVRDVPAYLKPRLTWDNVKKSADQAVDRYIEKYIDTSSPDPLYHVCIGGMIFSYFVNLPWERAHLAHLEEMERTGGKH

SEQ ID NO: 200200 - protein, 96 aa, Zea mays
  Clone ID: MRT4577_114170C.1.pep
NSLRGSYLAPVCFYGHMNPPGPFLPSWFFFKNKVLKTFFSLRQLELPPPLWCGGHAKNRIINALFSPFPKLLYFPQTNFPPFGSGETHTDPISYLF

SEQ ID NO: 200201 - protein, 123 aa, Zea mays
  Clone ID: MRT4577_114171C.1.pep
KVGEPGVHLSGGQKQRIAIARAIVKDPAILFLDKATSALDVESERVVHQALNRVMRNRPPVMVGPRLSPVKNPDVISVLQDGKIIKQGGPQPLIEDKNGAFPKLVSLQQQQQMQTQQSSSEDL

SEQ ID NO: 200202 - protein, 154 aa, Zea mays
  unsure (1)..(154): unsure at all Xaa locations
  Clone ID: MRT4577_114172C.1.pep
MIIPKADRRTIYENLFKEGVLVAKKDFNAPKHQDLDVKNLFVIKACQSLTSKGFLTTHFSWQYYYYVLTPEGIDYLREYLHLPAEIVPATFKKQVRAPRPGQGGARPEXSLPRXRAGGDEGYRRRQDGGNAKETGDDFKPRFAGVGRGGPRTEA

SEQ ID NO: 200203 - protein, 72 aa, Zea mays
  Clone ID: MRT4577_114173C.1.pep
IRGGQWGEVSGATYGKRARCFYAVGSLTGATARPHIGIAHALPHGYWFRRSVRPLGEERNRHCICKVDKPGW

SEQ ID NO: 200204 - protein, 176 aa, Zea mays
  Clone ID: MRT4577_114174C.1.pep
TQVAPEATRPRARLPGRHASSQPNQSRSESLLESPLRVACSFPDPARSPISDDGDAGRTRDGRGVWRSVNSRSRIRSSLAQVVSGAMPWWSAPPAHASCAWWLASAFLMVAVARCCVQPEEMTAATPSISSLCFLLRWRPGCSSLSFQAIVVVDGGRRRGGELDFAVWEGAHPQWV

SEQ ID NO: 200205 - protein, 68 aa, Zea mays
  Clone ID: MRT4577_114175C.1.pep
PASQGRAVVSFFYVAAAAWNPPNNVGRNLCYPRLCCRVLGLFLNGFLFSAPPTVFVVHPPVTPVVLFV

SEQ ID NO: 200206 - protein, 74 aa, Zea mays
  Clone ID: MRT4577_114176C.1.pep
AERRLVLEQRPVAQQGDESSSLFRLSASRPEIEAPALHRMVPPSVLALREYNGLSFASIMSPARCCGYRGAGHQ

SEQ ID NO: 200207 - protein, 51 aa, Zea mays
  Clone ID: MRT4577_114177C.1.pep
ICVVSAHVIYSFKFTLVVRLCNMVIDGMNFVAFCVQRHLTLSICTVFNILL

SEQ ID NO: 200208 - protein, 190 aa, Zea mays
  Clone ID: MRT4577_114178C.1.pep
EETSQKNKDNRSKVKFHQTTGSRSYMVHVENLGDKNIGQEPDALDLFKECHYSRKKKCYTSTVQQAITQMDNKRSATTEGEKSMSATEVVANVLAENTKKNLFLQNVGIQNVGPRSSLRNIEAQLEVEKRANSDLKSIVDAQHEQLDALLKQMQETEENRIREQEEVKKKQAEMETKMQLVLSQIHSRLR

SEQ ID NO: 200209 - protein, 155 aa, Zea mays
  unsure (1)..(155): unsure at all Xaa locations
  Clone ID: MRT4577_114179C.1.pep
ARPPASPPPSALRSRPPCRPPRTASRPPCPPSPPRATAAPRPSSPSCPPPPAPPPAPCPRSSPXPEXPPSPRPLLPLSPPAVPPRAPARLPLETTAPCRPLPLAWVLCSVVLLSSPTCRWGSLQVNGSGVHFLSNGETESTLLYLITWSTPTRRL

SEQ ID NO: 200210 - protein, 91 aa, Zea mays
  Clone ID: MRT4577_11417C.1.pep
MALRALYNEIRSMKVRDVPAYLKPRLTWDNVKKSADQAVDRYIEKYIDTSSPDPLYHVCIGGMIFSYFVNLPWERAHLAHLEEMERTGGKH

SEQ ID NO: 200211 - protein, 135 aa, Zea mays
  Clone ID: MRT4577_114180C.1.pep
FSTECNIAGGERGPVYKHWRDYKNRNGLFNLFTDKLSAKFDINTNDAPVQKACSQMMKKWWGGQRCRLKKKFFYPFPLHLVTKTSPIRSMSNEERNDLVEYWKSPKGWRHHKRTKIIDSKLNFIKQRDLVAIWFM

SEQ ID NO: 200212 - protein, 193 aa, Zea mays
  unsure (1)..(193): unsure at all Xaa locations
  Clone ID: MRT4577_114181C.1.pep
MVSDASKKKAAQKKAAAAAKRGGKAAAASSSSSSAAAAAAVDKAANGVAALKLXDRTCTGVLASHPLSRDIHIESLSLTFHGHDLIVDSELELNYGRRYGLLGLNGCGKSTLLTAIGCRELPIPEHMDIYHLSHEIEASDMSALQAVVTCDEERVKLEKEAEILAAQASSWNHRITLICSFSMYGLFMLQTIN

SEQ ID NO: 200213 - protein, 120 aa, Zea mays
  Clone ID: MRT4577_114182C.1.pep
LEYRPPVKNLLGILSEWLVSPPEAVTGGFNHPLESVLGGLQNLEGLLGGFPQVDGGVPITPREDEPNPGLMSRFYNKETQAETVLELKMGPLPQLEKMKIFGGPAQLEKERGQLRAVLPS

SEQ ID NO: 200214 - protein, 50 aa, Zea mays
  Clone ID: MRT4577_114183C.1.pep
VLGGGIVFVSVVKCDFENCGLTHVCIHISHLSFDPTPIVPYSSLLHKNFL

SEQ ID NO: 200215 - protein, 57 aa, Zea mays
  Clone ID: MRT4577_114184C.1.pep
WYLHYIILKPLILHANVRMLVSHRWVSLLHIYNAGHILYTTLHRYDKRIALKCDQFH

SEQ ID NO: 200216 - protein, 51 aa, Zea mays
  Clone ID: MRT4577_114185C.1.pep
VQLRVHALSDVLAVFPDQWVDAAACTASVRVEVNCHRVAGLEWPWSCGGKA

SEQ ID NO: 200217 - protein, 64 aa, Zea mays
  Clone ID: MRT4577_114186C.1.pep
NLKTEPPIHRGGIRNYLHYFFIRPRLRPIGSAYSHKYEVDAIRPLKGTRIPGMRDQRTYVRAET

SEQ ID NO: 200218 - protein, 95 aa, Zea mays
  Clone ID: MRT4577_114187C.1.pep
SSERLLLAFLHIGCPLHRPLSITDDSMEDRTEEQTPMRRTPLEEEPWRHKATCALKPKVQNGCTRWSFRCQGTREGSEAKQEGQQNCVDLQYHTS

SEQ ID NO: 200219 - protein, 61 aa, Zea mays
  Clone ID: MRT4577_114188C.1.pep
KRTPSGQGKRVQKKYHWPPLLEEGGPIEYIPIYGPKKRAFKGKKSSFFSFFLGRGEKPPPF

SEQ ID NO: 200220 - protein, 83 aa, Zea mays
  Clone ID: MRT4577_114189C.1.pep
MANRLTLCFLGNLIMLHHPPRPSLTPYSRCVLEYQNPRATATSCPTPGHMCCASRLGIGFVRCSHGTAASTAEKHGKVTGDGE

SEQ ID NO: 200221 - protein, 93 aa, Zea mays
  Clone ID: MRT4577_11418C.1.pep
GHARACWLADTSHDLSPALVRETGRPTQLPHATKRTWRRCPPNASSGRGADDTDPSPRAGRSSDSPRDSSRCASPRVPTRGDAWLRVARWRGG

SEQ ID NO: 200222 - protein, 74 aa, Zea mays
  unsure (1)..(74): unsure at all Xaa locations
  Clone ID: MRT4577_114190C.1.pep
GPLERAALFFFFFLNQRVGGSPRREGHLSLKYKILPPVFVNYGGLSIKRTSRPPPFXSXRGGGSTPWCRTGHSR

SEQ ID NO: 200223 - protein, 711 aa, Zea mays
  unsure (1)..(711): unsure at all Xaa locations
  Clone ID: MRT4577_114191C.1.pep
KMGDLIKQMVNIYSLPKLLPYILEGLRSKNNRTRIECVDIVGYFIDHHGTEVGGLMKNLPSVAALTAERDGEIRKAALNTLATAYKNLGDDVWRYVGKLSDAQRSMLDDRFKWKAREMDKRREGRPGDARAALRRSVRENGSDIAEQSGEVVSRPVTGSMISRDLGYADAHMDRHMVPRQIPSTTGPVDWREALDIVALGLPEQSVEGMKVICHELTQAADPESTLLEDLIKEADRLVSCLAVMVPKTFNFSLSGASSRSCKYVLNTLMQTFQIKRLAHAVKEGTLDNLITELLLWLLDERVPLMDDGSQLLKALNVLMLKILDNAERTSSFVVLINLLRPLDPSRWPSPTPMESLAVKNQKFSDLVVKCLIKLTKVLQSTIYEVDLDRILQSIHIYLQELGMEEIRRRAGADDKPLRMVKTVLHELVKLRGTAIKGHLSMVPIDAEPQPIILAYIDLNLQTLAAARMLTPSGPMGQTHWGDAASNNPNPSTHSADAQLKQELAAVFKKIGDKQTCTIGLYELYRITQLYPKVDIFAQLQNASEAFRTYIRDGLAQVEKNAAAGRTPSSLPLSTPPPIAAIPSPKLAPSPVHTKSIGSKTDYNEDNASGETQPFRGQGAITDQQTDRYHTSGTLDALRERMKSIQAAAIGHFDGAQARPLASMNGSNMVHGGTRLDGEPQXRSNIPPMDERALSGLQARMERLKSGSMELQ

SEQ ID NO: 200224 - protein, 103 aa, Zea mays
  Clone ID: MRT4577_114192C.1.pep
LPTTGDRSARAGRAPPHGNPRCTLPTTIRSLSLGSGSLCTMNLKTGVLLETVTDLAARALHGLESVVFKQITPALPFISESFQDEWLTGADREPDLWERYMHH

SEQ ID NO: 200225 - protein, 26 aa, Zea mays
  Clone ID: MRT4577_114193C.1.pep
ECRTLFFDSRSRHTSYGIILEVDDHS

SEQ ID NO: 200226 - protein, 87 aa, Zea mays
  unsure (1)..(87): unsure at all Xaa locations
  Clone ID: MRT4577_114194C.1.pep
SIKHSLTLSFILFXKTREKLTRMTFLDRWQVNNXFINQMKSLSNPSHLIPFAHNGACSPMIDRFFVCLGQYLAFALRIIIVVKPDND

SEQ ID NO: 200227 - protein, 68 aa, Zea mays
  Clone ID: MRT4577_114195C.1.pep
ASPINAQLIIQGSTRQNPCSRRTFRKVKSCKTVDVMPHMYSYKLKFDIVRLRMFLEQLTQIARARDEV

SEQ ID NO: 200228 - protein, 88 aa, Zea mays
  Clone ID: MRT4577_114196C.1.pep
CMPESFCLRCSTGFIQKQVMSDLHVVLVSFVAVDVFMRTANEHAGRFDMCSRARARNIVSYARHRLSIIMGNTEAMVVFWPAVSPNGA

SEQ ID NO: 200229 - protein, 50 aa, Zea mays
  unsure (1)..(50): unsure at all Xaa locations
  Clone ID: MRT4577_114197C.1.pep
ITMGPAKFHXGSSHDTTVTTTNAGAPVWNDNEALTVGPLGPILLEDYHLI

SEQ ID NO: 200230 - protein, 120 aa, Zea mays
  Clone ID: MRT4577_114198C.1.pep
MERERLVSARQLEEQRVQFFLKMQMELSKATGGAATATPTPMAVPIPTDGNGTRRAGVTAEVATSSNHRVRYRIKGSRHQHAPQQAHYQNSTSPTGGDDNGSDSDKEAQEDAEDEDEESQ

SEQ ID NO: 200231 - protein, 159 aa, Zea mays
  Clone ID: MRT4577_114199C.1.pep
GAWNKGGLKKREKKKNEAGVFGFFPPPFGETYPIGPGKGPYLKKKGFSTPFWDFWHPKRNFPPFWTKKNPPPRGGPGGGFFFGGGAKIWGENISPFFQLKKGVNWGAPQNTGGFPLKNKGVPPPKKKGWGTKNGPFLGFGDFLPKGAGGGPKTLGRIPG

SEQ ID NO: 200232 - protein, 134 aa, Zea mays
  Clone ID: MRT4577_11419C.1.pep
DSVTSLEPERRRKEGAAPAAERRCRRGGAARRGAGTGTRKDEVVTREYTINLHKRHHGCTFKKKAPNAINEIRKFAQKTMGTTDVRIDVKLNKHVWSSGIRSVPRRVPSLLSLHIPSICIYYAETDSSIFACTT

SEQ ID NO: 200233 - protein, 60 aa, Zea mays
  Clone ID: MRT4577_1141C.1.pep
PDSRALAKLTPHSHAPPLQKFTPPLSFGHSQKSFFSRIFLYPVFPTQNLFFKAPRVFFPN

SEQ ID NO: 200234 - protein, 223 aa, Zea mays
  Clone ID: MRT4577_114200C.1.pep
MAIVGAEYCDPEERVLTVRKTSHFSPGDGFAAYDHRTGGLSFRADTYGRGHGGGAASAGELALLGPAGEPLLTVRRRRPSLHQRWEGFLGARADGQKAIFSARRPSILGGAAAGAVIELLPPAPAAAPVLLRVDGSFPRRCCRVVLAPRAEGEKAKVVAEIGRKVDEGARVVMGRDVFVLRVSPGFDAAFAMGIVLVLDQIVGDESGGVDAGADVIDAKPKVW

SEQ ID NO: 200235 - protein, 137 aa, Zea mays
  unsure (1)..(137): unsure at all Xaa locations
  Clone ID: MRT4577_114201C.1.pep
ILNGKRKRNGTKKKKKEKEKGREPKTKTKTEAGREGGKQKPKQKRKWRAREEGKRERKRNGKTQTGDPARNQTKERGAERXRTENQKKGQGTGKKTGTRPDPGAGPGNEPXPEPGPGRGREKRIRRGRREGPSQGQS

SEQ ID NO: 200236 - protein, 126 aa, Zea mays
  unsure (1)..(126): unsure at all Xaa locations
  Clone ID: MRT4577_114202C.1.pep
MATKILALLALLALFVSATNAFIFPQCSLAPSAIIPQFLPPVTSMGSEHSAVQANRLQQALAASVLQQPIAQLKQQSSVHLTIQAHPTQQELQKLPXLYHLAMGNHADYFXQKLXLFNXLPPAFVV

SEQ ID NO: 200237 - protein, 103 aa, Zea mays
  unsure (1)..(103): unsure at all Xaa locations
  Clone ID: MRT4577_114203C.1.pep
RLPRYRVAQQDIPXEAGQGILRDELVLHRLPQQYLWTFDTTXMESERDYLIMDSVSINYLLLXEXPGTTELQNRCDHMIARLHLASIGELHTAVWGAELLRSS

SEQ ID NO: 200238 - protein, 65 aa, Zea mays
  unsure (1)..(65): unsure at all Xaa locations
  Clone ID: MRT4577_114204C.1.pep
LGRAPLPQSAEEIPLLGLDSWVLAHRLFLGPQTGLQGSRGVSXEKDLRLTVKTDRAVSHLHSLTL

SEQ ID NO: 200239 - protein, 82 aa, Zea mays
  Clone ID: MRT4577_114205C.1.pep
LCERRPPKVLIISSRTPLIGGDVLRFINNGATCLVDNNMALDCGVLLGENFGRPDYHFPQENIRRAFLKNTNPQPNYFVWLP

SEQ ID NO: 200240 - protein, 67 aa, Zea mays
  Clone ID: MRT4577_114206C.1.pep
HPSRLRSIRSCTRATGSPHVSIRERWTHRTIMHGSSLLTGPLVLETETICHRVLHCCLLLLVPNACR

SEQ ID NO: 200241 - protein, 121 aa, Zea mays
  Clone ID: MRT4577_114207C.1.pep
CPWGFCWWAMCACPPRRQGRPRLALGLVRPRAGVPGGARAPPSAAPCWCCSFPCFCAELPGAWAFLCVGVFFHLLCFGLVAAGDRSCGVLGGPPLAFLNPPRFRGAAAGWTPRRPSYFFRA

SEQ ID NO: 200242 - protein, 49 aa, Zea mays
  unsure (1)..(49): unsure at all Xaa locations
  Clone ID: MRT4577_114208C.1.pep
MSLLKSLSDNSTVHVIQCLVSTELSLPDKWRFLQLILXXPVVPICTLDM

SEQ ID NO: 200243 - protein, 75 aa, Zea mays
  unsure (1)..(75): unsure at all Xaa locations
  Clone ID: MRT4577_114209C.1.pep
QANAMLKKGFRYPMIRLMSHSGQVKHINRRGAGVLFINLSPXTSKKTELTTKISENGGGTYRAQKGFYGANYFFF

SEQ ID NO: 200244 - protein, 79 aa, Zea mays
  unsure (1)..(79): unsure at all Xaa locations
  Clone ID: MRT4577_11420C.1.pep
GSSRSSNLSLSPSQGPGGGRSPPPPARRRGRNHGRFHGRPRRWGSGPRHRHTGAHEKPDGXTQHPRGKLEPTPPPPQTE

SEQ ID NO: 200245 - protein, 64 aa, Zea mays
  unsure (1)..(64): unsure at all Xaa locations
  Clone ID: MRT4577_114210C.1.pep
PGNNQXTEXNXAAHXQQRRQGRNPPAXXNPGXRAXRQQQQRRPHNQTTQRNPAGQRQQPTEGGA

SEQ ID NO: 200246 - protein, 238 aa, Zea mays
  Clone ID: MRT4577_114211C.1.pep
SRLFENDTSIFSLGTDEKVGDPTKTHNGSEKVAATEPLGRCSLLITPTEDRTDGITEPVDLAKNNENAPQEYQAASEIIPDKVAEGNDVSSTGITKDTTGHSADGKALTSEPHIGETHVNSASESIPNDAAPPTQSKMNGSTKKSLVNGVLDQPNANSGLESSGNDYPSYTNSSSAMPPASTELIGSAAAVIDVDSAENGPGTKPEQPAKGASRASKSKVVPRGQKRVLRSATRGRAT

SEQ ID NO: 200247 - protein, 115 aa, Zea mays
  Clone ID: MRT4577_114212C.1.pep
THASAPLHSPQVSFFFRGDRSGGCFHILLERNMQLHPLHLSPHLQYKLFYKLIKDIEGTCNGRNDFLEAITAVEDIGKGLILEGTGYVTFHVKYHCVEFRPLNGQILQSVFTMVN

SEQ ID NO: 200248 - protein, 131 aa, Zea mays
  Clone ID: MRT4577_114213C.1.pep
NTSVHHTERSSSRWIYYTVHVPGGYNTVCLQPANTTTNSLFPTAQTTQKGPYSTAQNKGYMSTSPETPASIIQRGAALAGFTTQYTYLVATTLSACNLQIQPPTVSFRLRKLHTGPNQILTPKHKSSSNWS

SEQ ID NO: 200249 - protein, 50 aa, Zea mays
  Clone ID: MRT4577_114214C.1.pep
KLQSMDAPRVRVELLRRQRAASEQAAMDAKQRQSSGGMWGWLAGSPTPAV

SEQ ID NO: 200250 - protein, 577 aa, Zea mays
  Clone ID: MRT4577_114215C.1.pep
MASLFGARRRRSPEDDSEDDRSGRGRTKRFRLSPEEDAASPAEAGPAPATETGWLSGFVYGAKRVISSVLLFSSPEETGSGEDEEEEKDDDDDEEGIHLNEHEATHDTHGAIVPYSEPKLTIEQMVMKETFSRDECDRMVELIKSRVRDSTPETHEYVKQEEIPSRNAGIAHDFTGTCRSLSRDRNFTESVPFSSMRMRPGHSSPGFPLQASPQLCTAAVREAKKWLEEKRQGLGVKPEDNGSCTLNTDIFSSRDDSDKGSPVDLAKSYMRSLPPWQSPFLGHQKFDTSPSKYSISSTKVTTKEDYLSSFWTKLEESRIARIGSSGDSAVASKLWNYGSNSRLFENDTSIFSLGTDEKVGDPTKTHNGSGKFAATEPVGGCSLPITPTEDRTDGITEPVDLAKNNENAPQEYQAASEILPDKVPEGNDVSSTGITKDTTGHSGDVKAPTSEPHLGETRINSASESIPNDAGPPTQNKKNGSTTKKTLVNGLVDQPNANSGLESSGNDNPSYTNSSSAVPVPPASTQPVESAAAAVDVDSVEKGPGTTPEQPAKRRAPNVRRGQRRVLRSATREGRAT

SEQ ID NO: 200251 - protein, 159 aa, Zea mays
  Clone ID: MRT4577_114216C.1.pep
MRHLALLALLLAPVLFATRTTLSPSPAATDSPANQGQASSPPQSAFALGPVAVPTAPTTPSASPSPEKAAAVSPAAPTEPRIAPDPVTPPKEYSAPPPVEVAPTDPTDEVSPPVAQPQAAVGNPTPILSGTPALLPYVQAGAPWGGCGAEGRVGGGAWG

SEQ ID NO: 200252 - protein, 130 aa, Zea mays
  Clone ID: MRT4577_114217C.1.pep
MAAAGLRKGNARLPPEVNRVLYVRNLPFNISSEEMYDIFGKYGAIRQIRLGNAKDTRGTAYVVYEDIYDAKNAVDHLSGFNVANRYLIVLYYQPAKMSKKSDVKKKEDEITRLQEKYGIGSKTPGPGSTD

SEQ ID NO: 200253 - protein, 130 aa, Zea mays
  Clone ID: MRT4577_114218C.1.pep
MAAAGLRKGNARLPPEVNRVLYVRNLPFNISSKEMYDIFGKYGAIRQIRLGNAKDTRGTAYVVYEDIYDAKNAVDHLSGFNVANRYLIVLYYQPAKMSKKSDIKKKEDEITRLQEKYGIGSKTPGPGSSD

SEQ ID NO: 200254 - protein, 82 aa, Zea mays
  Clone ID: MRT4577_114219C.1.pep
LFSKLQNLLRSAFSGSCREIYRYDGTLFNDCTEPHRKLCKMGFFHGDLAPIWEWFFLPPERKQAVFCGRRLCSHSRNNCADV

SEQ ID NO: 200255 - protein, 76 aa, Zea mays
  unsure (1)..(76): unsure at all Xaa locations
  Clone ID: MRT4577_11421C.1.pep
MERTVQTNDHLXHGKDLELLVTSTTEHIVSYVHETSPERSDDALDDYHPGAVNPFEQLELFIKVDYEEYDKQCSLH

SEQ ID NO: 200256 - protein, 331 aa, Zea mays
  Clone ID: MRT4577_114220C.1.pep
MGGSQYDDDWVLPSADITLVLVGKLGYGKSATGNSILGREAFVSEYSHASVTNTCQLGSTTLKDGRTINVIDTPGLFDMSITSDEAGKEIVKCMNMAKDGIHAVLMVFSATSRFSREDASTVETIKVFFGERIVDHMILVFTYGDLVGESKLKKMLNNAPEYLQNVVELCQNRVVVFDNVTEDRRLQAQQLDKLLDVVDSVCAKNGGKPFSDQMFTSIKEVHDREKEVHTSGYSDEQISELKKEIHRTRDEQLAHITNMVEEKLNCTVEKLQQQLMEEQNARLEAEKVAYEARLKSEAEIQKLKESLKKAQMENDEFRRMAQSQGSKCAIL

SEQ ID NO: 200257 - protein, 165 aa, Zea mays
  Clone ID: MRT4577_114221C.1.pep
MNNSETEGPSRPGTCSLLMGNGSHVHVIGVDTLNMKLTLGKIVQLKNMQHVSTIRKNVVSGCLLCRDGFKLVFKSNTCVLSMFDDTSRTIEEAYSSPIANYWKEVVRSEMDSVKSNGCKWVFKTKLRPNGITKKYKARLVATDYTLKEREDFFETYSPVPRLATY

SEQ ID NO: 200258 - protein, 108 aa, Zea mays
  Clone ID: MRT4577_114222C.1.pep
MGGSQYDDDWVLPSADITLVLVGKLGYGKSATGNSILGREAFVSEYSHASVTNTCQLGSTTLKDGRTINVIDTPGLFDMSITSDEAGKENVKCMNMAKDGDHAVLMGF

SEQ ID NO: 200259 - protein, 331 aa, Zea mays
  unsure (1)..(331): unsure at all Xaa locations
  Clone ID: MRT4577_114223C.1.pep
KDCRPHDFSQFGPSADITLVLVGKLGYGKSATGNSILGREAFVSEYSHAGVTNTCQLGSTTLMDGRTINVIDTPGLFDMSIASDDAGKEIVKCMNMAKDGIHAVLMXXTGTSRFSREDASTIETIKVFFGEKIVDHMVLVFTYGDLVGESKLKKMLNNAPEYLQNVAELCQNRVVVFDNVTEDRRLQAQQLDKLLDVVDSVCXXXGGKPFSDQMFTSIKEVHDRXXEVHTSGYSDEQXXXXXXXIHRTRDEQLAHITNMVEEKLNCTVEKLQQQLMEEQNARLEAEKVAYEARLKSEAEIQKLKESLKKAQMENDEFRRMAQSQGSKCAIL

SEQ ID NO: 200260 - protein, 215 aa, Zea mays
  unsure (1)..(215): unsure at all Xaa locations
  Clone ID: MRT4577_114224C.1.pep
MGGSQYDDDWVLPSADITLVLVGKLGYGKSATGNSILGREAFVSEYSHASVTNTCQLGSTTLKDGRTINVIDTPGLFDMSITSDEAGKEIVKCMNMAKDGIHAVLMVFSATSRFSREDASTVETIKVFFGEKIVDHMILVFTYGDLVGESKLKKMLNNAPEYLQNVVELCXNRVVXFDNVXKDRRLQAQQLEXFAPMEXNSVCAKNGGKPFFRSN

SEQ ID NO: 200261 - protein, 51 aa, Zea mays
  Clone ID: MRT4577_114225C.1.pep
RPGLSLSSGFPSYVRWSLCRQDGVTSSPQSLALICTRAEHAWKAFPCLEED

SEQ ID NO: 200262 - protein, 89 aa, Zea mays
  unsure (1)..(89): unsure at all Xaa locations
  Clone ID: MRT4577_114226C.1.pep
VLKKEEGGRXFSFFAGYRPQFYMRTTDVXGKVXKFMTAKDEESKMVMPGDRVKIVVELIVPVACEQGMRFVIKKGGKTVGAGVIGTILE

SEQ ID NO: 200263 - protein, 67 aa, Zea mays
  Clone ID: MRT4577_114227C.1.pep
IRLEAAPPFFLVGNVNSHWGESSIAWPAERRGTTPHSCSYMGTARCFFCRARSQKCGCSRPGSTHSS

SEQ ID NO: 200264 - protein, 329 aa, Zea mays
  Clone ID: MRT4577_114228C.1.pep
MGGSQYDDEWVLPSADITLVLVGKLGYGKSATGNSILGREAFVSEYSHSGVTNTCQLGSTTLMDGRTINVIDTPGLFDMSIASDDAGKEIVKCMNMAKDGIHAVLMVFSGTSRFSREDASTIETIKVFFGEKIVDHMVLVFTYGDLVGESKLKNMLNDAPEYLQNVVELCQNRVVVFDNRTKDRRLQAQQLDKLLYVVDSVCANNGGKPFTDQMFTRIKEVHDREKEVHTLGYSDEQISELKEEIHRTRDEQLAQITSMVEEKLNRTVEKLQQQLMEEQNARLEAEKVAHEAMRKSEAQIQELKERLEKARLENEEFRRMAQSSKCAIL

SEQ ID NO: 200265 - protein, 55 aa, Zea mays
  Clone ID: MRT4577_114229C.1.pep
NILAGRKSSFLRITPELGINAKDNLYPQDLSRAKHFCKSYFDTSSEVSIKVWISR

SEQ ID NO: 200266 - protein, 127 aa, Zea mays
  Clone ID: MRT4577_11422C.1.pep
MSERRRGAGAGTGTRKDEVVTREYTINLHKRLHGCTFKKKAPNAIKEIRKFAQKTMGTTDVRIDVKLNKHVWSSGIRSVPRRVRVRIARKRNDEEDAKEGQYSLVTVAEIPPEGLKGLGTKVVEDED

SEQ ID NO: 200267 - protein, 116 aa, Zea mays
  Clone ID: MRT4577_114230C.1.pep
CLHPDLGCRSEIKSPQLRISNHTTYVALNPCICQPATGVLKTGSGSRKPRAQIHHRPASCQGGYTLLSPPLHAHFVLSYSGLSLPEAKLTHDEACDQLKGPRSSSLHTHPILNQPG

SEQ ID NO: 200268 - protein, 53 aa, Zea mays
  Clone ID: MRT4577_114231C.1.pep
PLSTSQWPELLPEGVKIQPEVVTEEESTPVAADQVEDPSNWGLIEGSSTSSLQ

SEQ ID NO: 200269 - protein, 57 aa, Zea mays
  Clone ID: MRT4577_114232C.1.pep
KHKEGVACTGACLGNTRLVLLGDHLASILWLGTRSDYPSSGPSISIILRISPRLGST

SEQ ID NO: 200270 - protein, 74 aa, Zea mays
  Clone ID: MRT4577_114233C.1.pep
DPWASLGKVWSRPESISLASASVLFSSSSAIPLSGTLVPQQPSFHLAVVRASREVCYPERSCATADRSREQPLC

SEQ ID NO: 200271 - protein, 130 aa, Zea mays
  Clone ID: MRT4577_114234C.1.pep
ALVGRLRQAAAGSTGSRGASAVPRPDLRIYGLTRCLAAGISCADCRRCLGGALAVVEREYNGSAGMQVLRLSCMARYESYPFYNTKSLARRSLASAMIDYFPLNVSSSFPASVGGVQPTPAPPGGRNPSP

SEQ ID NO: 200272 - protein, 117 aa, Zea mays
  Clone ID: MRT4577_114235C.1.pep
GFTLPTHKGGWDPRYYKRGMAPKPKVKIKAPRGGVKNREGEWYRGPRGGTLMGGGAKHPKGHFAPGVSRKGACIRAPFPKIFLRIKNQKCFPKKKFGPRKGIGVKNMGGLGFPLKFR

SEQ ID NO: 200273 - protein, 131 aa, Zea mays
  unsure (1)..(131): unsure at all Xaa locations
  Clone ID: MRT4577_114236C.1.pep
QPLCXTDNSRFLRSIPCEHQSLELLPEGVKIQAEVVTEEESTPVAADQVEEPSNWGLIEGSSTSSLQQRQAPVHLPLPCIFKKGFYTLKSSEMCIKFIGIAWKLFDALTTLISIPVIGTSLEVSNIVYKNA

SEQ ID NO: 200274 - protein, 87 aa, Zea mays
  Clone ID: MRT4577_114237C.1.pep
LLHMSTILADPPLHEQVRATREHTTPFRRSFARRVRATLAISPLPVRDCLFMYGIAGFKLTLSHIQGMWLVKIVLDHTGLHTHPILN

SEQ ID NO: 200275 - protein, 47 aa, Zea mays
  Clone ID: MRT4577_114238C.1.pep
APIHSFICVPVPPITGAKLVECHLVTDLPTHKIRVQFKGTFIWFAWP

SEQ ID NO: 200276 - protein, 97 aa, Zea mays
  Clone ID: MRT4577_114239C.1.pep
KGSFVPNGSFPKVGQTPQAWFVPLPKKNKRCYFPPCGRDFKKPHFPKKFGCFVLGGMKQFLEPQIYQRPPGHSKFLFGGDSFWFGFNNPNGVFSFFL

SEQ ID NO: 200277 - protein, 147 aa, Zea mays
  unsure (1)..(147): unsure at all Xaa locations
  Clone ID: MRT4577_11423C.1.pep
TNSXGEAPXPPXXPGGXQHXPEXXXPEEQRXTPXXGQQQXRGEGXTTTSXPXPGQGGDXRGGHQXPXRXGREPRGXXXGGXAREPXXXQXRRPPRXXRXAGDGGPXQTGSSAGGRXXARPXPHPGXGPQRXPDPGGXGGPXPRPRGG

SEQ ID NO: 200278 - protein, 243 aa, Zea mays
  Clone ID: MRT4577_114240C.1.pep
FLLLSLVSFKPEPDANPAPPPEDTSEIDVYFNPKPFEVRCVILLLPWLTHSVFLVPMPMAAPSLLHFSCARARLQSCRERPARSPSSARSTLWPRATPLSRAPSMAASRAPPSRGPCSQHRVPFFSASPSLFPAVSSSPGRGARPSAISTPELVLQLAPWRSASPPCPSAIGSPSSFNDLAVGLVSVQAAIAPCRLSIFDPRLDVILPCNTCLVLDKTPELGPSSFRASARKPKNRVKTKLAA

SEQ ID NO: 200279 - protein, 130 aa, Zea mays
  unsure (1)..(130): unsure at all Xaa locations
  Clone ID: MRT4577_114241C.1.pep
SVIIQKLSGQVVTLSKQKFASNVIEKCVXFGTHEECDSLIGEIISSGQTFQELMKDQFGNYVVQKVLETCDDKYLEMILSSIKLHLNELKNYTYGKHIVARVEKLIVTGXYGLHTNPLLGIGVRYDEQVV

SEQ ID NO: 200280 - protein, 104 aa, Zea mays
  Clone ID: MRT4577_114242C.1.pep
MAAGSACSRGARPWLPCARETREEGAMGGPMLLRTYRKNRGKRRGENGEGRWLLAAGGTRKGRCAGRNEGAAGLRKKKGLGAIHGSGCSLLAAVCALNREVSCA

SEQ ID NO: 200281 - protein, 52 aa, Zea mays
  Clone ID: MRT4577_114243C.1.pep
ACYRAFPLTWMVKKTLLQIEMHILRASRQLDWTGVCTLQWKQLKPHISQSSC

SEQ ID NO: 200282 - protein, 83 aa, Zea mays
  Clone ID: MRT4577_114244C.1.pep
ASSGAEPGQGSTSPSRSSIGSILPPYALLKGMARRMMRPTSDLPMRLQLSAILQMGARAVLRSPDATFDLAQGTGIAPVERTL

SEQ ID NO: 200283 - protein, 115 aa, Zea mays
  unsure (1)..(115): unsure at all Xaa locations
  Clone ID: MRT4577_114245C.1.pep
KRENHPTGLATIPVFLATILVAVLLAVGRPACLGATATDTNTDGAIRFPRSFVPVGQPGKCCNYVTKEPLLRPPRWXLNHLVDXKCSANCQKCKKSPAGNGFFCRDWILSLFKPP

SEQ ID NO: 200284 - protein, 54 aa, Zea mays
  unsure (1)..(54): unsure at all Xaa locations
  Clone ID: MRT4577_114246C.1.pep
RQFLIHSCTIMIRSIVIXYSLHVTYMTHHSXSMQVHCPSFVTYRSIYNTSCLSA

SEQ ID NO: 200285 - protein, 41 aa, Zea mays
  Clone ID: MRT4577_114247C.1.pep
VLVRLFITNRAPLIATHNLQLASWMTGARSLVFVSHSTFYT

SEQ ID NO: 200286 - protein, 65 aa, Zea mays
  Clone ID: MRT4577_114248C.1.pep
EEHRKLLYGLRHLDKAHVDVIFKGFVTTTTSTHVASHPQKYFLLQTHPRMKKRPSSLFYFCITDY

SEQ ID NO: 200287 - protein, 91 aa, Zea mays
  unsure (1)..(91): unsure at all Xaa locations
  Clone ID: MRT4577_114249C.1.pep
RTRGLVLRLRGGMQIFVKTLTGKTITLGGESSAPIXIAKPKIQAREGFQPNQQRLFFXGKQLEDGRTLGDFHIQKESTLHLVLRLRGGMQI

SEQ ID NO: 200288 - protein, 79 aa, Zea mays
  Clone ID: MRT4577_11424C.1.pep
MWTIRKVATPQVAVLLLLLIVVAQEAAPLAEARVCRRRSAGFKGVCMSDHNCAQVCLQEGYGGGNCDGIMRQCKCIREC

SEQ ID NO: 200289 - protein, 46 aa, Zea mays
  Clone ID: MRT4577_114250C.1.pep
NKGQTCLEEPRGSIKEQTLNKGFPRHPVRTKKYKGVEKKKGLKNKN

SEQ ID NO: 200290 - protein, 122 aa, Zea mays
  Clone ID: MRT4577_114251C.1.pep
DAWAFVGNPGLCGPYLGPCSAGIPGADHTAHGHGELTNSVKLLIVLGLLICSIAFAAAAILKARSLKKASEARVWKLTAFQRLDFTSDDVLDCLKEENIIGKGGAGIVYKGAMPNGELVAVK

SEQ ID NO: 200291 - protein, 96 aa, Zea mays
  unsure (1)..(96): unsure at all Xaa locations
  Clone ID: MRT4577_114252C.1.pep
GVCKDPPVIPENKDKFKQVLXIFRQNFFRNEYLAGEEFTLGDFSPLPNLHXIFNPQKERKFFLYKKNLAKWYKKLFKPXTLKQVVKIQKEHPGGFK

SEQ ID NO: 200292 - protein, 111 aa, Zea mays
  unsure (1)..(111): unsure at all Xaa locations
  Clone ID: MRT4577_114253C.1.pep
SRPYLVYTLLSERKLLWLVQNKKVLDWTDTRFPTXQSIVRRCSSVEALIHFILQQGASKNLTLMEWNILWTIPRRXIAPVXARRTAALKHQRVIFTPTNGPXEPYTRPLPR

SEQ ID NO: 200293 - protein, 55 aa, Zea mays
  unsure (1)..(55): unsure at all Xaa locations
  Clone ID: MRT4577_114254C.1.pep
AIVFPCGRCARRRFXRTDGRCRRRGAFGRLXGLCACLVARLCLRRLGSPLKFRPG

SEQ ID NO: 200294 - protein, 119 aa, Zea mays
  Clone ID: MRT4577_114255C.1.pep
CAHALLCLSSLALFRYVYAHGLVGGSVPLHRVVRQGVVQYGRVALILEPVFVQDACHLSAHFARGGSATQQLDMYRVPRTLASLRWVRLSTVGSVLSAARHVDWMPPPVDSKYAHSAAQ

SEQ ID NO: 200295 - protein, 68 aa, Zea mays
  Clone ID: MRT4577_114256C.1.pep
AYCVKLPEKMVLPSNSKAGTQTLLESTMRLKCGIIRLYITAMFGYVQKKNKVLLLKTLLSALIAIFYL

SEQ ID NO: 200296 - protein, 81 aa, Zea mays
  Clone ID: MRT4577_114257C.1.pep
GQKSPLHLGPVQHPFVNNCTKYLLITNVDPCLCDLRSLLLSQTQRWTLSIRSSLTNPLLLIHWFILLLHKHLNKLVMHLYL

SEQ ID NO: 200297 - protein, 60 aa, Zea mays
  unsure (1)..(60): unsure at all Xaa locations
  Clone ID: MRT4577_114258C.1.pep
MNTMNNAILMDCWLLHCQGWHAQAHAHARVYEKPCISENSETDDASFSRLVTYXFQVDGR

SEQ ID NO: 200298 - protein, 215 aa, Zea mays
  Clone ID: MRT4577_114259C.1.pep
MFLEERQLHGDFVTKISDMVWRRNGGNVDAVEATTDQGNAVDVAQPEDVREDVVDDGMLRLAATRGWVPGDSSPPLSKRLSAKLKDELLLLTTGIGAACSLYCLLVFSLETAVSYALGVGFRIGITSEDLKNTIEKTLGGGRVALSSPRLVIPAVIFGLSALSDHFKNSFFSFEVLPGMMGFLAYKAAALVQVYRDNEDLRLILPEEEDADSEST

SEQ ID NO: 200299 - protein, 79 aa, Zea mays; identical to SEQ ID NO: 200288
  Clone ID: MRT4577_11425C.1.pep

SEQ ID NO: 200300 - protein, 58 aa, Zea mays
  Clone ID: MRT4577_114260C.1.pep
FCHVKIHEAKADGTILYFPLEKISSIEWSQQKGIPCFFFLHFTKVPSECQTLVKQHFE

SEQ ID NO: 200301 - protein, 102 aa, Zea mays
  Clone ID: MRT4577_114261C.1.pep
PPLSKRLSAKNWQNESAKRKELNLLKYEALKDELLLLTTGIGAACSLYCLLVFSLETDVSYALGVGFSCLYLQLLCQHADNLSKQDIPQVFLKKKVKKFFQG

SEQ ID NO: 200302 - protein, 229 aa, Zea mays
  unsure (1)..(229): unsure at all Xaa locations
  Clone ID: MRT4577_114262C.1.pep
HWVPRGRPGASIRHGHGAPRPPLPPPPRSRVTPXLGPALYRRPLERTSALCYSSLQAQAGDGIGEEALRMFLEDRQLHGDFITKIFDMVWRRNGANVGAAEATTGQGSAIDVAQPEDVREDVVDEGMLRLAAISDWVSGDSSPPLSKRLSTEERQNESNKRKELNLLKYEAELEQHVVYIXPGFLSGDCCQXALGVGSSCLYLQLLYQLADNLSKEDIPEVFLKKKVKK

SEQ ID NO: 200303 - protein, 108 aa, Zea mays
  Clone ID: MRT4577_114263C.1.pep
MMYHAKKFSVPFAPQRAQNSEHVSNIGAFSGSNISNPTNPVGSGKQRLRWTSDLHSRFVDAIAQLGGPDRATPKGVLTVMGVPGITIYHVKSHLQKYRLAKYIPESPA

SEQ ID NO: 200304 - protein, 326 aa, Zea mays
  unsure (1)..(326): unsure at all Xaa locations
  Clone ID: MRT4577_114264C.1.pep
MAMGLPGHRCCRLPALGSVTPLCPALARRPLPRTSALRYSSLEAQAGDTIGEEVLCMFLEQRQLHSDFVTKISDMAWRRNXAIDAVEATTDQGSAVDVXLXEDVREDVVDEAMLRLAATRGWVPGDSSPPLSKRLSAKDWQNESDKRKELNLLKYEVLKDELLLLTTGIGAACSLYCLLVFSLELXFNKCFKYSETCCSMWNSCLYLQLPCQHDDNLSKQDIPQVFLKKKVKKIGITSEDLKNTIEKTLGGGGVALSYPRLVIPAVIFGLSALSDHFKNSFFSLEVLPGMMGFLAYKAAALVQVYRDNEDLRLILPEEEDADSEST

SEQ ID NO: 200305 - protein, 111 aa, Zea mays
  Clone ID: MRT4577_114265C.1.pep
MMYHAKKFSVPFAPQRAQNSEHVSNIGAFGGSNISNPANPVGSGKQRLRWTSDLHSRFVDAIAQLGGPDRATPKGLLTVMGVPGITIYHEKSHLQKYRLVKYITQSPAEGS

SEQ ID NO: 200306 - protein, 325 aa, Zea mays
  unsure (1)..(325): unsure at all Xaa locations
  Clone ID: MRT4577_114266C.1.pep
LASNRHGHGAPRPPLPPPPRSRVTPXLGPALYRRPLERTSALRYSSLQAQAGDSIGEEALRMFLEERQLHGDFVTKISDMVWRRNGANVGAAEATTGQGSAIDVAQPEDVREDVVDEGMLRLAAISDWVSGDSSPPLSKRLSAEERQNESNKRKELNLLKYEALKDELLLLTAGTGAACSLYCLLVFSLETAVSYALGVGFSCLYLQLLYQHADNLSKEDIPEVFLKKKVKKIGITSEDLKNTIEKTLGGAGLALSSPRLMIPAVIYGLSALSHHFQNSFFSFEVLPGMMGFLAYKAAALVQVYRDNEDLRLILPDEEAADSDST

SEQ ID NO: 200307 - protein, 55 aa, Zea mays
  Clone ID: MRT4577_114267C.1.pep
LLGRQLFSLALVFYFCHQCCFMCHLMYSLSVPSLSVIKLIFFCSCPFTFISCKLD

SEQ ID NO: 200308 - protein, 313 aa, Zea mays
  unsure (1)..(313): unsure at all Xaa locations
  Clone ID: MRT4577_114268C.1.pep
MMEGDLPTPANARVVAVVTGGNKGIGLEVCRQLACSGVTVVLTARDDARGAAAVENLRGLGLSDVLFHRLDVTDAPSIARLAGFLETRFGKLDILVNNAAIGGVEYVHDQDCGSVTSEEKAXERHGHGSEXGWLWENCRETYDDAKTGLRTNYYGTKQVIETLLPLLQASSDGRIVNVSSHFGQLRLFRNEELKRELNDIDNLTPERLDGLLDMFLNDLEAGEVESSNGWPMYFSAYKVAKAAMNAYSRILARRHPELRVNCVHPGYVRTDMTIHSGLLTPEEGGSRVAMVALLPGGGPTGAFFEDFQQSSFV

SEQ ID NO: 200309 - protein, 49 aa, Zea mays
  Clone ID: MRT4577_114269C.1.pep
KTLGFFTPPLIHSRNSADPDGTLAWAAPTSGREKTRRALKTPHHTIGIS

SEQ ID NO: 200310 - protein, 85 aa, Zea mays
  unsure (1)..(85): unsure at all Xaa locations
  Clone ID: MRT4577_11426C.1.pep
MSLVTRTSVFDTVSVDLLNPFETMFRSIMPPSLSSSAXXTASFANARIDWNETPYAHVFNADLTGVYTEEVTVKVDDCNVLLISG

SEQ ID NO: 200311 - protein, 171 aa, Zea mays
  unsure (1)..(171): unsure at all Xaa locations
  Clone ID: MRT4577_114270C.1.pep
MDSLDRSPISLVIALRVNMCSFRAVGHVLFSLSGNGSSPSYCWLGGLLCFSVTFGVPPGSPSFLSFDVAMVFVVKSAFRVSLITVKTNXLIXSLPEYIFDCTXLESFNLSSNKLLSNIPFTMPKMKHLKNLILVKNKLVGVIPSTLSQLPNLKILCEDQVGEQLMGCKQIF

SEQ ID NO: 200312 - protein, 55 aa, Zea mays
  Clone ID: MRT4577_114271C.1.pep
RGCKKNFARFKPQLQYLNYKIEQFSSDRNTKPSMSPSLFTTYHKKPSPISHILPL

SEQ ID NO: 200313 - protein, 92 aa, Zea mays
  unsure (1)..(92): unsure at all Xaa locations
  Clone ID: MRT4577_114272C.1.pep
VYTHAKTTQQAEDPQVFCXTFNSTTALTEKRLLAYHETFNTRNIESMHGIVSIPASTARALVQHISHEYPRQTKENTNVRRNRTETYIRALL

SEQ ID NO: 200314 - protein, 54 aa, Zea mays
  Clone ID: MRT4577_114273C.1.pep
DFRVWFFQASLYDGSSYCVRRYVLGDCDQCAKIVVLAVSLAHSSGIWRKVIMGC

SEQ ID NO: 200315 - protein, 67 aa, Zea mays
  unsure (1)..(67): unsure at all Xaa locations
  Clone ID: MRT4577_114274C.1.pep
MXIDLFPGGRNKKTKRTAXNSDDXYLKLLVKLYRFXVRRTKSNFNAVILKRLXMSKTNXPPXSMXXL

SEQ ID NO: 200316 - protein, 200 aa, Zea mays
  Clone ID: MRT4577_114275C.1.pep
RLQVPVRNSRVDPRVRGSPETKERRRLCRRDGPGRGRPGTLNMSGIALSRLAQERKAWRKDHPFGFVAVPTKNPDGTMNLMNWECAIPGKKGTPWEGGLFKLRMLFKDDYPSSPPKCKFEPPLFHPNVYPSGTVCLSILEEDKDWRPAITIKQILLGIQELLNEPNIQDPAQAEAYTIYCQNRVEYEKRVRAQAKKFAPS

SEQ ID NO: 200317 - protein, 52 aa, Zea mays
  Clone ID: MRT4577_114276C.1.pep
DLCGPVHRCVQQFVQSFTLECFLASPNWVQAACTQRTHYVRHLQIRPNVARE

SEQ ID NO: 200318 - protein, 36 aa, Zea mays
  Clone ID: MRT4577_114277C.1.pep
MESVSVLKVFRVNQRLVECVRKLTFPIGLVFKNFRG

SEQ ID NO: 200319 - protein, 63 aa, Zea mays
  unsure (1)..(63): unsure at all Xaa locations
  Clone ID: MRT4577_114278C.1.pep
XLYGGSRVXSXXLXRXGLXLFNLFXXRXPYITDAYRMRXXRVGKTQKXMLFMRGNXISGXXXI

SEQ ID NO: 200320 - protein, 94 aa, Zea mays
  Clone ID: MRT4577_114279C.1.pep
FVRWYSSSYGHPYPDSAHMVVQVVNSPQPPASVSFWFALCRRCDSAVARTTRLARLGPQSRPRRSRKSRPRRRGLSSWTRPHRTPESSLRSAHA

SEQ ID NO: 200321 - protein, 79 aa, Zea mays; identical to SEQ ID NO: 200288
  Clone ID: MRT4577_11427C.1.pep

SEQ ID NO: 200322 - protein, 56 aa, Zea mays
  Clone ID: MRT4577_114280C.1.pep
CCHAFKFWRPKGKIRLNYNNQKNLNIKKKNIKKKKKKYQNLKLKNIRINLKKAKFK

SEQ ID NO: 200323 - protein, 128 aa, Zea mays
  Clone ID: MRT4577_114281C.1.pep
MAASAATATATAAAVGAGEVISVHTLEQWTMQIEEANAAKKLVVVDFTASWCGPCRIMAPVFADLAKKFPNAVFLKVDVDELKPIAEQFSVEAMPTFLFIKEGDVKDRVVGAIKEELTTKVGLHAAAQ

SEQ ID NO: 200324 - protein, 68 aa, Zea mays
  Clone ID: MRT4577_114282C.1.pep
SRPNAKAFKRAGAKDAHPVIIALRPITRAEEIPIPSIDEALPSEERQAHLPDSGFTCTSLKSQKDRPV

SEQ ID NO: 200325 - protein, 47 aa, Zea mays
  unsure (1)..(47): unsure at all Xaa locations
  Clone ID: MRT4577_114283C.1.pep
SNSLQEGLNKLVKLLDVARVASCPQAGFVSLLTXLSFKKLKEAFSTD

SEQ ID NO: 200326 - protein, 111 aa, Zea mays
  unsure (1)..(111): unsure at all Xaa locations
  Clone ID: MRT4577_114284C.1.pep
TGSMSGIAPVTHAKSRFTDYPAPTAMMIEQEVAGLASRTRTRSXQAEREITTKSTXGISLYYQMXDDSLKNYKGEWDVKQHLIKRIDSPGYVKFSSQTTTARLKNDGALLA

SEQ ID NO: 200327 - protein, 118 aa, Zea mays
  Clone ID: MRT4577_114285C.1.pep
RQAKTVAATRDSPLRRRSLPAATFSPVFLFLLSLLSHLEPRISSGIDLLKHLGFLILASMPSRSSITTDSRRPPPTKRPWARIHPPPHHRRCRALPSRRRQCQCLSSCVWRPVPVLEL

SEQ ID NO: 200328 - protein, 137 aa, Zea mays
  unsure (1)..(137): unsure at all Xaa locations
  Clone ID: MRT4577_114286C.1.pep
PTSLLFPXLPSSSSFPPPPPXPPFSFPFPPPLFLFXSPPPSLFPSSPPPSXPPXXLPPPLXXPPPPPPPPXPPPSSPLPPSPPSPPXPPFSFLPPPPPFPPLPPSPPLSPLSPXPFLPPLPPLFPPPFPSSFLFFFL

SEQ ID NO: 200329 - protein, 231 aa, Zea mays
  Clone ID: MRT4577_114287C.1.pep
MKDCPSRLRTNLSSLLTYTFIKYNHSRLYGQSLDLNLYGPNPRVMMAGEHREDKEMECFVRFGHGGGLTPSGIIIKRRRSLIGNYIIFESQRIGTLKLVFQFYTLQRLTSLPTSHVTHLPRGHESHTPLPRKRGRVTIRGLYKVPLALENPLQFLGISNARIPRLTAIAAKSTQGPPYTDHSPTALAPFGQGSLPLAFLISQPRASHSTLVVAHVSQVKLHVPIKNIMMLT

SEQ ID NO: 200330 - protein, 39 aa, Zea mays
  Clone ID: MRT4577_114288C.1.pep
RRGESVNQGNAQSLQTQWVPDLTGNSNSTYPRRPLDQGS

SEQ ID NO: 200331 - protein, 84 aa, Zea mays
  Clone ID: MRT4577_114289C.1.pep
PSKRAADLLRSVEDLPVLVVAGSEDALVSLKSAQAMASKFVNSRIVIISGCGHLPHEECPKALLSALAPFISTLVPSEDLLQRL

SEQ ID NO: 200332 - protein, 113 aa, Zea mays
  Clone ID: MRT4577_11428C.1.pep
AERRRGTTGHAGAHASTPAQSRAGCTRARARRTPPAAPPEPRRPAATVPPAAGPSPPSRPPWAATATAGAGSRTRRGRAGAAPGLGTSTASCPPGWMPACPRAAAKAGTGCRK

SEQ ID NO: 200333 - protein, 57 aa, Zea mays
  Clone ID: MRT4577_114290C.1.pep
AGQRRDFFFFFFFFFLKLNQTSFKYTDSYCATNPFPCQSTLDSRSHLRRPRSLRCPC

SEQ ID NO: 200334 - protein, 109 aa, Zea mays
  unsure (1)..(109): unsure at all Xaa locations
  Clone ID: MRT4577_114291C.1.pep
SGKREGSQTGRSEGVTNLELLPKKLPPTKPLLTHQQAFIPRNVITLLYXITSFAXLLILLYDLKHLEHEGLEDLLVQNHGYEKNLNVNDVQKDDHHEDLLDNNLNNLDK

SEQ ID NO: 200335 - protein, 146 aa, Zea mays
  unsure (1)..(146): unsure at all Xaa locations
  Clone ID: MRT4577_114292C.1.pep
LVDLPKQSLRTGRSGKWMDNGALQRPADADIGTDPSPKATVDERPSDTRAPVRASVDTLRLQEHTCYDMKPSTLLHINXMNNPTYVLEPETADDSTKYVPAYTNVLLTTLNDLQFFAAESLNDDSALVXPYYKVGATNPTFIYVFY

SEQ ID NO: 200336 - protein, 40 aa, Zea mays
  Clone ID: MRT4577_114293C.1.pep
ISSTLDGASNECKTASAMEREEEHGFSPHGRVVTTRLHQG

SEQ ID NO: 200337 - protein, 439 aa, Zea mays
  unsure (1)..(439): unsure at all Xaa locations
  Clone ID: MRT4577_114294C.1.pep
MAKHLAAMCRCSLLVLVLLCLGSQLAQSQVLFQGFNWESWKKQGGWYNYLLGRVDDIAATGATHVWLPPPSHSVAPQGYMPGRLYDLDASKYGTHAELKSLTAAFHAKGVQCVADVVINHRCADYKDGRGIYCVFEGGTPDSRLDWGPDMICSDDTQYSNGRGHRDTGADFAAAPDIDHLNPRVQQELSDWLNWLKSDLGFDGWRLDFAKGYSAAVAKVYVDSTAPTFVVAEIWSSLHYDGNGEPSSNQDADRQELVNWAQAVGGPAAAFDFTTKGVLQAAVQGELWRMKDGNGKAPGMIGWLPEKAVTFVDNHDTGSTQNSWPFPSDKVMQGYAYILTHPGTPCIFYDHVFDWNLKQEISALSAVRSRNGIHPGSELNILAADGDLYVAKIDDKVIVKIGSRYDVGNLIPSDFHAVAHGNNXCVWEKHGLRVPAGRHH

SEQ ID NO: 200338 - protein, 140 aa, Zea mays
  Clone ID: MRT4577_114295C.1.pep
NCPWNFSTRVPPSKFKVAFPSFKGLFKVFELAPPIRKSPFIWRPLIFSKTVVSLIFKFPPPKIGKKSRLPLQKISLGVYLPPHFFPKVLEGTFEKACGPKKTLKEHPPPGGTVIKPVLERVLFPPKKWAPFSKTKQTVCF

SEQ ID NO: 200339 - protein, 510 aa, Zea mays
  unsure (1)..(510): unsure at all Xaa locations
  Clone ID: MRT4577_114296C.1.pep
MAKHLAAMCRCSLLVLVLLCLGSQLAQSQVLFQXCAASSSLPGRSLKKYSSIRRARKHKSGFNFDADTYMLRVCVQGFNWESWKKQGGWYNYLLGRVDDIAATGATHVWLPPPSHSVAPQGYMPGRLYDLDASKYGTHAELKSLTAAFHAKGVQCVADVVINHRCADYKDGRGIYCVFEGGTPDSRLDWGPDMICSDDTQYSNGRGHRDTGADFAAAPDIDHLNPRVQQELSDWLNWLKSDLGFDGWRLDFAKGYSAAVAKVYVDSTAPTFVVAEIWSSLHYDGNGEPSSNQDADRQELVNWAQAVGGPAAAFDFTTKGVLQAAVQGELWRMKDGNGKAPGMIGWLPEKAVTFVDNHDTGSTQNSWPFPSDKVMQGYAYILTHPGTPCIXSPTGSVHHQIQNPGRHTDTLVLASVIQFYDHVFDWNLKQEISALSAVRSRNGIHPGSELNILAADGDLYVAKIDDKVIVKIGSRYDVGNLIPSDFHAVAHGNNYCVWEKHGLRVPAGRHH

SEQ ID NO: 200340 - protein, 85 aa, Zea mays
  unsure (1)..(85): unsure at all Xaa locations
  Clone ID: MRT4577_114297C.1.pep
GNRDERHRHFYNLGVGAIEEVRGQQDTGPESLRDNTHXQERLAIPMGNAAATRGKPPQXSWGGAPAPPPAGSKNLPPPPATHHPN

SEQ ID NO: 200341 - protein, 50 aa, Zea mays
  Clone ID: MRT4577_114298C.1.pep
RYNSLLGLWLHYKCVKTKELFMEVSTRLKQAVRDIFTRREWRHSLCISPS

SEQ ID NO: 200342 - protein, 93 aa, Zea mays
  Clone ID: MRT4577_114299C.1.pep
GHWRRENMCDFVNAFDFGNPDYSIPQVPTAETPHTDSNGNFDGTSLCESTYSSTRPPVPYGKQSLEDALYFEDGYKQVIGYLTEGRYLTFEYN

SEQ ID NO: 200343 - protein, 145 aa, Zea mays
  unsure (1)..(145): unsure at all Xaa locations
  Clone ID: MRT4577_11429C.1.pep
CVRXCXRPXLLXXXLFPVXPPAXLLXFPLLPWLSGLXSXSXPXPAXVAPXXXPXAXPLAXXGLSPXFFFSRFXPAGSPCSCSGXVLSWRPSASXXLLFLWXPSPPPLWSXPRGXRXAPLGXPPRAAAPXRPASRXAPLPQXRAAP

SEQ ID NO: 200344 - protein, 115 aa, Zea mays
  Clone ID: MRT4577_1142C.1.pep
EIGTVREVDVKSGLPATRSTERLELLDDNEHILSIRIVGGDHRLKNYSSIISLHPETIEGRIGTLVIESFVVDVPEGNTKDETCYFVEALIKCNLKSLADISERLAVQDTTESRV

SEQ ID NO: 200345 - protein, 136 aa, Zea mays
  unsure (1)..(136): unsure at all Xaa locations
  Clone ID: MRT4577_114300C.1.pep
ARQGPKRMDKHIQNNGGGEDHPSDGATIMRLDDIEHPADRKLGDSPKPEDYEXRESTTTEELIAAHFLKDAKPYIEDREHPYKVISRHRTARNMAIQRVKELAVSIKAKNLRKEEXLLSKXAATTLRYKTSAVVKK

SEQ ID NO: 200346 - protein, 143 aa, Zea mays
  unsure (1)..(143): unsure at all Xaa locations
  Clone ID: MRT4577_114302C.1.pep
VVVSTAFVDSPCCLVTGEYGWTANMDRVXMKAQALRDSSMSAYMSSKKTMEINPDNGIMEELRKRAEADRNDKSVKDLVLLLFETALLTSGFSLDDPNTFAARIHRMLKLGLNIDEDAAADEDADMPALDEGAPEESKMEEVD

SEQ ID NO: 200347 - protein, 357 aa, Zea mays
  Clone ID: MRT4577_114303C.1.pep
MTTRIAPGVGANLLGQHSAERNQDATTYVGNLDPQVSEELLWELFVQAGPVVNVYVPKDRVTNLHQGYGFVEFRSEEDADYAIKTLNMIKLYGKPIRVNKASQDKKSLDVGANLFIGNLDPDVDEKLLYDTFSAFGVIVTNPKIMRDPETGNSRGFGFVSYESFESSDQAIEAMNNQHLCNRPITVSYAYKKDTKGERHGTPAERLLAANNPGSQKNRPHTMFASGPPTQGHPNGGPPVPRPYGNGTIPGQIQHIRQPPPPPVGQFPPPMQMHGQPTWPAQHSMPPPMPSQLQYRLPMRPPPPNMMPPPVGMVRPPPPPTGMSAPPMWMPPPPPPHQGGGMPPPPMSMPPPPPPPSS

SEQ ID NO: 200348 - protein, 74 aa, Zea mays
  Clone ID: MRT4577_114304C.1.pep
IKRTKMNQNFSFLRYRIRPRGGGASSCSRPTNNPQHRPFCYRSPMNRIPSTIDNKNSEKTHYVQPFMIQTKTAQ

SEQ ID NO: 200349 - protein, 164 aa, Zea mays
  Clone ID: MRT4577_114305C.1.pep
RGRPGKNKKIGAGNVERAKNAVSVTMKLSVLLAVTFVLLLAFGHGLWARLFSGSATIASEFAAITPLMVISIVLDSVQGVLSGVARGCGWQHLAAVTNLVAFYIVGMPLAILFAFKLDLRTRGLWAGLICGLTCQACSLLVITVRTKWSKLADAMKEEKANYVA

SEQ ID NO: 200350 - protein, 182 aa, Zea mays
  Clone ID: MRT4577_114306C.1.pep
MSLARYDANVLLAAVTALSAAVAFVAALHLYARCLLQRRVALAEGSPRVVALQRQRPPDGYVVEVVRIVEDASVCGQQAAGLDAKALRALPVFTLESEQANEEGGVAAELHGQCVVCLGEMEDGELGRLLPGCRHVFHVECIDTWLGVSSTCPVCRTAATPAAPSAVGVDHGGGEESIAVEC

SEQ ID NO: 200351 - protein, 70 aa, Zea mays
  Clone ID: MRT4577_114307C.1.pep
TKASCLGPFLFKPVPFLQGRGGQDYPPVQLDPALPSWGRVLTLVPGTDWDTRALPLFPWAWAPSPHSKTG

SEQ ID NO: 200352 - protein, 77 aa, Zea mays
  Clone ID: MRT4577_114308C.1.pep
RSGIACHTVSSCWFRVHKNPLESPNMFYLMHQRRSKDACDICQPNLQICMRIVASPVCVILEAIPGRNPCINDLVHG

SEQ ID NO: 200353 - protein, 39 aa, Zea mays
  Clone ID: MRT4577_114309C.1.pep
ELRLSYLSKCNSEATVGIIPWNQKTRGFVSMEPQKNGGP

SEQ ID NO: 200354 - protein, 789 aa, Zea mays
  unsure (1)..(789): unsure at all Xaa locations
  Clone ID: MRT4577_11430C.1.pep
MASSLPPRSSYQKKENAVPARREMGYNKATPRRNVLSALNNAEANGGTPSVPADGGGGGGAAEAAPVIEFSGREDVERLLAEKMKGKSKNDFKGRVDQMSDYIKKLRACIRWYMELEDGYLAEQEKLLGAMDSENTRHTELEAQLSTAIEELKATNLDLTRRCESLEESFNKEKSEKLIAVESYEKEKQERESAESSRDVLTVDLERVTHDAKRFSEQLKMVQDTNKRLQEYNTSLQQYNSNLQADASKSGETISKLQKEKSAMMETMATLRECNSSMGNQLESSRVSQQEAIRVKEELRKEVECLRVELKQVRDDRDHSAIQLNSLNIELGNYKEQIGKTSKECERFRTKVSELEETCSTQQEQIRTFQKQLAVATEKLKLADVTAIEAMTGYEEQKEKIKYLEERLAQAESQIVEGDELRKKLHNTILELKGNIRVFCRVRPLLRFEGDSNGPEGASISFPTSVESTGRSIDLINQGQKLSFSYDKVFDHGASQEDVFVEISQLVQSALDGYKVCIFAYGQTGSGKTYTMMGKPGNDQKGIIPRSLEQIFKTSRFLESQGWNYSMQASMLEIYNETIRDLLAPGRSNSFESSKQCTIKHDPHGNIVSDLTIIDVFGIADVTSLLEKASQSRSVGKTQMNEQSSRSHFVFTLKISGSNENTGQNVQGVLNLIDLAGSERLAKSGSTGDRLKETQSINKSLSALSDVIFAIAKGDDHVPFRNSKLTYLLQPCLGGDSKALMFVNISPEASSVGETICSLRFASRVNACEIGIPRRHTXSPSLRSRLNYG

SEQ ID NO: 200355 - protein, 121 aa, Zea mays
  Clone ID: MRT4577_114310C.1.pep
IRCYTATSAPAFTLAPTPPPAPTPASAPTAPPTPAPTPTLAPAAAPAPTPAPTSAPTPTFPPKPPMPPSPGMAPKKGIMPPILPREDIMPPAEGIRPPIEGSMPPRPPEPCPGSLGEGFIV

SEQ ID NO: 200356 - protein, 65 aa, Zea mays
  unsure (1)..(65): unsure at all Xaa locations
  Clone ID: MRT4577_114311C.1.pep
ILRGLFPXLADPRHPAESTSTTNESVLKVALDHGKASGVIKSHDRVVVCQKVGDSSVVKIIELDD

SEQ ID NO: 200357 - protein, 89 aa, Zea mays
  Clone ID: MRT4577_114312C.1.pep
TPAGIGPEFPGRPTRPRKVGLIAARRTGRLRGTKTVQEKEHPFGGGNHQHIGKPSTIRRDAPAGRKVGLIAARRTGRLRGTKTVQEKEN

SEQ ID NO: 200358 - protein, 54 aa, Zea mays
  Clone ID: MRT4577_114313C.1.pep
MTMLRGALLFAAVLFAASAAAVSGFNFAGDETGFLRGFFTAVRERAEAKAENAA

SEQ ID NO: 200359 - protein, 147 aa, Zea mays
  unsure (1)..(147): unsure at all Xaa locations
  Clone ID: MRT4577_114314C.1.pep
MSSQGFGAGSPKSFRYPRGGDFDLESGSPRKGRKPKNPHLETSIVMRIRYFYEAHPVAVALILLSFGLSVLILLSVYETRFRTMRSVSAWSSDGGDYPLPMLRNLVMVAGHSIYTSSRCGETESENSWFLEPYQKHAGQAXTFLAHI

SEQ ID NO: 200360 - protein, 69 aa, Zea mays
  Clone ID: MRT4577_114315C.1.pep
SKVTKQGNVRVLVSHEVVEGRAVSASNPGHYRPHGLAAASSRSYGIRYSFDMDIKSRQGTGQAKGKWRY

SEQ ID NO: 200361 - protein, 340 aa, Zea mays
  Clone ID: MRT4577_114316C.1.pep
MSSQGFGAGSPKSFRYPRGGDFDLESGSPRKGRKPKNPHLETSIVMRIRYFYEAHPVAVALILLSFGLSVLILLSVYETRFRTMRSVSAWSSDGGDYPLPMLRNLVMVAGHSIYTSSRCGETESENSWFLEPYQKHAGQAATFLAHIKEGVGIAARDEGALLLFSGGETRRDAGPRSEAQSYWAIAESKGWFGNDEGVRSRALTEEHARDSFENLLFSVCRFRELTGRYPQNITVVSYDFKEERFAQLHRTALGFPEGRFFFSGTPATPSAREAALKGEAAVRAQFLEDPYGCLGSLHVKRLKRDPFHRTIPYPAGCPELKGLFSYCGPVPYSGHLPWTE

SEQ ID NO: 200362 - protein, 34 aa, Zea mays
  Clone ID: MRT4577_114317C.1.pep
ETGVRDLQCVKFPGETQYNCPQTTVTLGRAFRPT

SEQ ID NO: 200363 - protein, 73 aa, Zea mays
  Clone ID: MRT4577_114318C.1.pep
MTRYHSKTTVFRTGMSGLVHDSISSAIARNVYNYHLLVDVSDMRVNSGAMYEGTMLVSGVIPDVYSVSTKFPR

SEQ ID NO: 200364 - protein, 77 aa, Zea mays
  Clone ID: MRT4577_114319C.1.pep
IRNGNSSCLTMQEEHLQAECGGYPHPDYISVDMIDERSLHDLPHGLSQNNEQYEMEQLPQNICESGSMQMASPDQYC

SEQ ID NO: 200365 - protein, 165 aa, Zea mays
  unsure (1)..(165): unsure at all Xaa locations
  Clone ID: MRT4577_11431C.1.pep
PAGSGLNLIDLAGSERLAKSGSTGDRLKETQXVFAYHRFPIFQAFYNVIFKLLLMLQSINKSLSALSDVIFAIAKGDDHVPFRNSKLTYLLQXVIRACLCRVECCSPFXNLSYIFTLQPCLGGDSKALMFVNISPEASSVGETICSLRFASRVNACEIGIPRRHT

SEQ ID NO: 200366 - protein, 42 aa, Zea mays
  unsure (1)..(42): unsure at all Xaa locations
  Clone ID: MRT4577_114320C.1.pep
KGKLATHSPENGVLFVTCASKSVSHSILEGAIEGLGFFXKLY

SEQ ID NO: 200367 - protein, 131 aa, Zea mays
  Clone ID: MRT4577_114321C.1.pep
SESAKNSCRAVTVIAKNCEQISSLCLRNCLLITDSSLEVLGSMGCEWGKCPLRMLDLAYCSKLSRNFLRHFEPPLFRGLRWLGIGKNVAQRRGCSLTIAEVLERKPGLTICCNACDMGCRNKCHPDIRFLQ

SEQ ID NO: 200368 - protein, 75 aa, Zea mays
  Clone ID: MRT4577_114322C.1.pep
FVYKLDTLRGPRHFFFHLYFNFFSKPGTWTPFFQPLVNPLGVFSPTLKLNSETRVFLRGGLKFFLGGWKSLFKGP

SEQ ID NO: 200369 - protein, 68 aa, Zea mays
  unsure (1)..(68): unsure at all Xaa locations
  Clone ID: MRT4577_114323C.1.pep
PGISFRIRXPSGAPGVADLPPHRRGEDQTYHTVPVTSAAHEPANFIRLSSRATELSQLSFWGPGTKIF

SEQ ID NO: 200370 - protein, 36 aa, Zea mays
  Clone ID: MRT4577_114324C.1.pep
QEPKMHIDDRAFNSAEITYVIDLINASRRNQKMLKS

SEQ ID NO: 200371 - protein, 151 aa, Zea mays
  unsure (1)..(151): unsure at all Xaa locations
  Clone ID: MRT4577_114325C.1.pep
TPRAARPPPRRWRRTARPPQGPPPPPPTVLRIXPPPHPRXPSGRAQKPRPRPRARPPPRPQXPPAKHPPPPPPSTRRCAARCSAARGPDSTRPSSPPGRRRSASSAPSRSTSSRCSPAEAHTLLAFPMHPRRDDDEAPRAYADDVTTIFLA

SEQ ID NO: 200372 - protein, 66 aa, Zea mays
  Clone ID: MRT4577_114326C.1.pep
CFFVEARLCIHCMFYDTQAISNHSPYQSLHLDLLFIIEIHSPQLFFPLIFLLSTHSPYSTPPLLFN

SEQ ID NO: 200373 - protein, 71 aa, Zea mays
  Clone ID: MRT4577_114327C.1.pep
EKFHSYDTLRRFTLTLPLAAFSSLHVPPLVQRCPLTSSRPSSPTHPSDRGVSISSFRELVVLTTKPIFLKF

SEQ ID NO: 200374 - protein, 49 aa, Zea mays
  Clone ID: MRT4577_114328C.1.pep
GNKHSRAVVYINLSYLVGLSIWFLSIIYFISGVPASYVMWYRPLYRATR

SEQ ID NO: 200375 - protein, 60 aa, Zea mays
  Clone ID: MRT4577_114329C.1.pep
DEGSGTRLAVKFIDSLQPQAGRVARHKEKKMRTKDYTGDKHETTTTVGHDSDIKRFCWGG

SEQ ID NO: 200376 - protein, 85 aa, Zea mays
  Clone ID: MRT4577_11432C.1.pep
WILVLHGVLLQYSDEFELNALAGHDMCDIKCHNHKDPTRRQLHEDQSHNREHHDPCRESCKMKCRDHHDRARKEICQQHSMSYGL

SEQ ID NO: 200377 - protein, 671 aa, Zea mays
  Clone ID: MRT4577_114330C.1.pep
MALPPPQTLILFFLLASLAPAVTAVAFSGLDAFFASAAARDPSAGNDTFAALPAALRRALSARTSLLPSFFLNLSATVPVHVRLAGSSFPASSGRSLPSLVNAAVSSAQFLSSRRPHRLAVSHTLHLDVTGPVAASKLASKAGAAVRAHLDKSPAPFHNNALSGVPYSLVDDLVAEDYRALAGSGPAEAVYIYLLDLGKQSRQYAYTAASSGTDASSPGYSRCLGPVWAGKNRYIWIDLGAGPVNYGPALSGDGVLPRGEFHPLATLHGRPKSEKALLADLASLVLSAYKSLLVPSLRIPVHYENSLLIRFIHIHGDRKEEEGLDFRVIEQSIRDGDLPYGGQSLKFDLHTVKYSECPICSFAVARSTNSFTSRFLFENYTLIVNEYLDSKRLRQVLSDSSDEIHRLAGVHENYEHDKVVPVYVFDLDYDKLLPLDRYHQAVAFGGTGLAVRTRSSQTVSDYTCNGRHVLTMTRNLERAIIGSLLQSMWGVSPTHLSWSPEHHATVVDYTWSTGHTPFGPFSETKSLSFVQKDAARRNVLLTTLNYTITSTIDVLESMVAHGGEKILRKKRHVEFIQRWNLLTYKLEKVISAMSRLDYDKAMYYLRSSDHDLYEIHSLVYQASQELEASLVCFKDPPFPWVSVSMSGLFVFGFFYMCSKRDKLFRSKRKQF

SEQ ID NO: 200378 - protein, 437 aa, Zea mays
  Clone ID: MRT4577_114331C.1.pep
TRPKKMVVALVDMERAFVPPQHFIRLVQRRMERQRREDELRNRSSKKTQEAEQPTSKRASSPQTDAEQGGGSLKSMKDKSGQQDKDTKEGSNLQVAGPAGEITAGYLLKKSAKTNGWSKRWFVLNEKSGKLGYTKKQEERHFRGVITLEECNLEEVEEEEPSKSSKDSKKANGSEKISSLVFKITNRVAYKTVLKAHSAVVLKAESMADKVEWVNKIKAVIQSKGGSFKGPSTEGGSMKQSNSDGALDTMARRPADPEEELRWMSQEVRGYVEAVLNSLAANVPKAIVLCQVEKAKEDMLNQLYSSISGQSNAKIEELLQEDHNAKRRREKYQKQSSLLSKLTRQLSIHDNRASVSSYSNDSTEVESPRTPSRSGEDWRSAFDSSSNGPVATSTNSESRSRSADGRSRRYENGDVSSGANSGSRRTPNRLPPAPPKY

SEQ ID NO: 200379 - protein, 198 aa, Zea mays
  Clone ID: MRT4577_114332C.1.pep
FQGDPDKRSRNLHRIQNSVKNMVQLLDDILIINRAEAGKLEFNPNWLDLKLLFQQFIEEIQLSVSDQYYFDFICSAQDTKALVDERLVRSILSNLLSNAIKYSPGGGQIKIALSLDSEQIIFEVTDQGIGISPEDQKQIFEPFHRGKNVRNITGTGLGLMVAKKCVDLHSGSILLKSAVDQGTTVTICLKRYNHLPRA

SEQ ID NO: 200380 - protein, 39 aa, Zea mays
  Clone ID: MRT4577_114333C.1.pep
NGLIFLPVPVVACQVGELPFPRVVFWVTKHDWMLPFPGF

SEQ ID NO: 200381 - protein, 89 aa, Zea mays
  Clone ID: MRT4577_114334C.1.pep
GKVKTRMDAAKLSLKQMQELIADIQNESAKFEKVVEFSQDKEGTIEAVGCDNDHLSYQTGAQTEDQHRNVLHMLEQSIASEIDLEKKLS

SEQ ID NO: 200382 - protein, 140 aa, Zea mays
  Clone ID: MRT4577_114335C.1.pep
MKKAAAAAAVLATLLLSSAVSPTAVSGQQPWTNQQTAANNPRLHKAYVALQALKRAITEDPRNLTRGWCGPDVCAYFGVYCAAAPDGDADTDTQTVAGLDLNHGDLAGTLPEELGLLADLALLHLNSNRFAGTLPDSLPA

SEQ ID NO: 200383 - protein, 57 aa, Zea mays
  Clone ID: MRT4577_114336C.1.pep
ASVFSHSFIAYMFNYFFFFIYSGSSSAQPYRASCMLVRSILACPKIDQTWGRRTHAS

SEQ ID NO: 200384 - protein, 138 aa, Zea mays
  Clone ID: MRT4577_114337C.1.pep
AGRAGAQHRIVSLVAALLILLALAVSSTRNAQEDSMADNTGTLAGGIKDVPGNENDLHLQELARFAVDEHNKKANALLGFEKLVKAKTQVVAGTMYYLTIEVKDGEVKKLYEAKVWEKPWENFKELQEFKPVEECASA

SEQ ID NO: 200385 - protein, 150 aa, Zea mays
  unsure (1)..(150): unsure at all Xaa locations
  Clone ID: MRT4577_114338C.1.pep
PTRAGIISFLAVLLILLALAESSTRIAQVDSMADNTGTLAGGIKDVPGNENDLHLQELARFAVYEHIKKANXAFLGYEKLVKAKTQVVAGTMYYLTIEVKDGDMNKLYEAKGWEKPWENLKVLQEFKXPVEEGAYPLRISPLHGRAWSSK

SEQ ID NO: 200386 - protein, 104 aa, Zea mays
  Clone ID: MRT4577_114339C.1.pep
RLVVSLVAALLILLALAVSSTRNAQEDSMADNTWTLAGGIKDVPGNDNDLHLQELARFAVDEHHNNANAPQGFQKLVNANTQLVAGTMYYLTIELKDRELNKLY

SEQ ID NO: 200387 - protein, 232 aa, Zea mays
  unsure (1)..(232): unsure at all Xaa locations
  Clone ID: MRT4577_11433C.1.pep
GRYPTPTITCAVISDLLTFSEVIAEFSLSHGVPDKHIWRXASSGQYSSKSTYDMLFLGSTSFGAFERVWKSWAPSKCSFFLWLAMHSRCWTADRLAKRGLPHPIACPLCDQEEETIQHLLISCVFARQFWYLLLRRSGLPNLSPDNALCSLKDWWSRAVEKVPRDLQSGFNSLVILGAWSLWRHRNDCVFNGRSPSLASVLTLAGDELRMWCLAGAKRLNLLSAVVFVFDPG

SEQ ID NO: 200388 - protein, 71 aa, Zea mays
  Clone ID: MRT4577_114340C.1.pep
VVANGRPGKRVGGTALGFDKAPASVVVVPTQGCVTERTWNSDSDVFAVPELRQPPPAKKARPAPAPTFWCF

SEQ ID NO: 200389 - protein, 88 aa, Zea mays
  unsure (1)..(88): unsure at all Xaa locations
  Clone ID: MRT4577_114341C.1.pep
HXXTQPPRPQPXPQPHPXPXQQPXPSPXQXQGTSGXGSTPNRGQGDEKQRQQSRPTATPNRTTESQTKRQQXAQKHRQEEPKDRDQAN

SEQ ID NO: 200390 - protein, 52 aa, Zea mays
  Clone ID: MRT4577_114342C.1.pep
EEAETRAEFAERSVAKLEKTIDDLEDEVYAQGGECEAISEELDNALNDITSL

SEQ ID NO: 200391 - protein, 41 aa, Zea mays
  Clone ID: MRT4577_114343C.1.pep
KHSFFLTRPYFALPFISLNLNSMDLPKFNNILLKKTLLSPN

SEQ ID NO: 200392 - protein, 61 aa, Zea mays
  Clone ID: MRT4577_114344C.1.pep
RGCCKAEVAAEAETMFRAAAPGQLRRAASLLRFQSTLVIAEHANVSLAPITLNTITAATRL

SEQ ID NO: 200393 - protein, 113 aa, Zea mays
  Clone ID: MRT4577_114345C.1.pep
KRRGPRSGTSSSVKRPLGLLLFCRGVFSVVVNLPLWFLFVGSPHFFWITIMCVFPGFGFCSFPVSSFSSCCTPKKNFSGPKPARANNLFFFERFFPPPPNFFSTNFPIFVNPI

SEQ ID NO: 200394 - protein, 88 aa, Zea mays
  Clone ID: MRT4577_114346C.1.pep
GVSVPSHHRPKQNCTHPVSGPPTPNSTPTPASSRRRPAAMVFRLSNNLIGVLNFVTFLLSVPISGVGIWLGHVLTAPSASATSRRRYR

SEQ ID NO: 200395 - protein, 90 aa, Zea mays
  Clone ID: MRT4577_114347C.1.pep
DSQHVSDASCLALAIGLCQQHQASYLLETMSTGANNALSSRYQHHSISWMHHQMEALLVVRLPTYERKPTDTFSISRTFSIRLLLLLFTQ

SEQ ID NO: 200396 - protein, 51 aa, Zea mays
  Clone ID: MRT4577_114348C.1.pep
SGHIKYDALDQCWQRVAFGVLQVVVLRLFQFPQPLNVRPWLCLSGIKARTA

SEQ ID NO: 200397 - protein, 57 aa, Zea mays
  unsure (1)..(57): unsure at all Xaa locations
  Clone ID: MRT4577_114349C.1.pep
MAASTEAPCYESRDGVDVRXRFNRXLAGMLTHDSLDFVAGLQREFQAVVRYAIEQRL

SEQ ID NO: 200398 - protein, 345 aa, Zea mays
  Clone ID: MRT4577_11434C.1.pep
MAPAGNGADDHELPLFHPSPCAHYYVQSPSAASHTLSHPASDSMALILSPFPNLHHDADARHSSDGRDHEHDHEEASRLTLSRYSSSRGSNSSFPVGDKKPGRRRHALSGRSSGRHDDGDDDADGEAQRSGAWRYVKLDPEAPCCCIAFQVAWRVAASAALALLVFVLATRPRHPRVSFRVGKVQRFALGEGLDGSGVETSFLNCNSSVDMAVENHSKVFTLRVGPPRLEMSFGRFVFATSQGDGWSHDVGPRGTSTVRLFVAAQDKPMYAAGRGMQDLLESSHGLPLTVTVRARSRYRVVGSLVRLTYRHDSECVVLLRRTPDRSNGIRAAAGSRATTTCSALS

SEQ ID NO: 200399 - protein, 50 aa, Zea mays
  Clone ID: MRT4577_114350C.1.pep
TPPNFNHIPPFYHPAPLLNLPFSPLNLLAPHPLFPILPNTKKPLTYSPFP

SEQ ID NO: 200400 - protein, 142 aa, Zea mays
  unsure (1)..(142): unsure at all Xaa locations
  Clone ID: MRT4577_114351C.1.pep
GGGGVXAGALRWLSTDGVAPLVAVYVSRXNHNIYQLEPSIFLILAASFLVLAGPHWAGNXSSGIDARFLREALGVCLRVADKLRSRCDMRGXIVRVEPVHCFHQLNPSPSSSSFSFPSSLGHFQSCHRDVVMXSFCAMEVRH

SEQ ID NO: 200401 - protein, 44 aa, Zea mays
  Clone ID: MRT4577_114352C.1.pep
VEDDAANRACFYESMDADTRLVMQAVIRKCPAVFDDGLTSLVDV

SEQ ID NO: 200402 - protein, 137 aa, Zea mays
  Clone ID: MRT4577_114353C.1.pep
VLQTKQAARPIDCVLLPPSQDIRRNHLRINQRRRTTAEPAAERAGRALLLAAAGVQRGQLFRPDSLERRARHAGNGEENEEAPGEGGGEVVVCWGRTRRDETSERPTRAGGFKDGWAQCRGTGPGTFGIPAGFEVPN

SEQ ID NO: 200403 - protein, 174 aa, Zea mays
  Clone ID: MRT4577_114354C.1.pep
MLTRAPPPPSVFLQPPRPVMVAAASPSATPLALPASSALPLRGIAPVAARPISHRPAPAFALLLPPRAAAASRSPADDVPDGNSSHLLAVPVPVPMDPAAAEDVPVAKQLQVPDVSPRPPERDFAGTPYVPVYVMLPLGVVNGNGEVVDADELVGQLRVLKASGVDGVMVDCWW

SEQ ID NO: 200404 - protein, 53 aa, Zea mays
  Clone ID: MRT4577_114355C.1.pep
MKTGLSQCFNLTRAVSWSTPRSLLVPYDSPHQMTLAKSRFLCGQGWLADWWKV

SEQ ID NO: 200405 - protein, 52 aa, Zea mays
  Clone ID: MRT4577_114356C.1.pep
IADPTITTWQFLPRNNILPTARDHGALYEVMALSLLTLLLRMPPRLTCVLSY

SEQ ID NO: 200406 - protein, 100 aa, Zea mays
  Clone ID: MRT4577_114357C.1.pep
ETSHIAAQNEGFATQCITSQPTVDSGQNTDFRYTKKIDVTPSIHDSVDDLLEDTSPCLNEPKQTTTAQASNSTPLDSVPIRYGPSNASASEDFDSWFDSL

SEQ ID NO: 200407 - protein, 39 aa, Zea mays
  Clone ID: MRT4577_114358C.1.pep
YCAVFLVSHAPLPSCRQIDLSCRLDICGLEPDFELTSAC

SEQ ID NO: 200408 - protein, 148 aa, Zea mays
  unsure (1)..(148): unsure at all Xaa locations
  Clone ID: MRT4577_114359C.1.pep
VSQRPSLLARGRKRSPPPGGRGQRGVSWLALSFQEAVPLVRXLEKLXAASSAPGAGSTLSRXAVAGGLRGYNTGAQLRRYEGRESEDDSVREYESRRGSRDYAAPSLFSDVFRDPFIAPHSLGRLLSLMDDFXVAAPGLAGAVRRGWN

SEQ ID NO: 200409 - protein, 179 aa, Zea mays
  unsure (1)..(179): unsure at all Xaa locations
  Clone ID: MRT4577_11435C.1.pep
MRGGFVKTHKXNAYXSAFQVTFKRRRXGKTDFRARTRLVYQDQNKHNXPKYRIVXVRFTXQDYTXTNLSPSISGDMVPASAYSHQLARYGXLELVLTHYAAAYCTGPLSASRALKTXGPDKEYEGXNVEATGEGFXFFEPLDEKEALSVLSLDVGXLLGTSTXGNRXVFGAPQGKLLDG

SEQ ID NO: 200410 - protein, 89 aa, Zea mays
  Clone ID: MRT4577_114360C.1.pep
IEFHRLARVANYIRSNRVLTCHAHHPRSLQPCIYMSPPTSTPMLRVVLDAPAPTASMHAVTAILATRMPHLHPPFIVLIRDDMLERHKA

SEQ ID NO: 200411 - protein, 110 aa, Zea mays
  Clone ID: MRT4577_114361C.1.pep
MQAVARARGLAAAAVAARPSAMEAGHRGQVQQARGIVVQVRDGNLERALAVMERKMRSSGMERLIRARTHYHVKDSEKRVLARKALMQRVRSQELGKKLREILIKKIRGQ

SEQ ID NO: 200412 - protein, 38 aa, Zea mays
  Clone ID: MRT4577_114362C.1.pep
AWDPKLKRQARSSPGHVLLADWIIQITTFECKQNNLCG

SEQ ID NO: 200413 - protein, 336 aa, Zea mays
  Clone ID: MRT4577_114363C.1.pep
MHASLASYAAAAMPALDLRPEIAHAHQPVMSPSHHGWDGNGATAVPTPMPKRLDGKVAIVTGGARGIGEAIVRLFAKHGARVVIADIDDAAGEALASALGPQVSFVRCDVSVEDDVRRAVDWALSRHGGRLDVYCNNAGVLGRQTRAARSILSFDAAEFDRVLRVNALGAALGMKHAARAMAPRRAGSIVSVASVAAVLGGLGPHAYTASKHAIVGLTKNAACELGAHGVRVNCVSPFGVATPMLINAWRQGHDDATADADRDLDLDLDVTVPSDQEVEKMEEVVRGLATLKGPTLRPRDIAEAVLFLASDEARYISGHNLVVDGGVTTSRNLIGL

SEQ ID NO: 200414 - protein, 110 aa, Zea mays; identical to SEQ ID NO: 200411
  Clone ID: MRT4577_114364C.1.pep

SEQ ID NO: 200415 - protein, 99 aa, Zea mays
  Clone ID: MRT4577_114365C.1.pep
HSGVLGLHPRGILSTGTLMVKFSSGECSKCMMGLLRQLSLPGSNPSCCRAPFALSGIGGIEVSPSCRRTLMVKFSSGECSESAGMLLNSICALYNQNPA

SEQ ID NO: 200416 - protein, 49 aa, Zea mays
  Clone ID: MRT4577_114366C.1.pep
PESTRVYICIVPCDTQTHVWAHHLNRQHRQNTCLHNQGLTAKPVNRWHA

SEQ ID NO: 200417 - protein, 63 aa, Zea mays
  Clone ID: MRT4577_114367C.1.pep
LDYKLPEYSRIESRSKIVPPELLIFNTLRWPSTKHTPQKYYIPAGPHKAYRTNSMWLPYTDQT

SEQ ID NO: 200418 - protein, 81 aa, Zea mays
  Clone ID: MRT4577_114368C.1.pep
MAPLPFLVTDQFPKKFKRGAPGEDMGGGPGENRRNFGAVAKVWGLWVGSPPPPSGVGFRVPGPLEPKTGLALAPPGGLFSP

SEQ ID NO: 200419 - protein, 178 aa, Zea mays
  unsure (1)..(178): unsure at all Xaa locations
  Clone ID: MRT4577_114369C.1.pep
IDVASAPRSPGSQAGVPVLQRHVLSLVVQIHPRRGFLKEPDAAAAGSYKNRTRQAQARRGEPVSISSPPSLPPLRIYTPRFALAPISRTHPPTHSSVTRMTNPPPPIRELNPPTQESAHVPRQIKASDRRTPNQRRQMRRRQLDPGSKAKRKGSHIKPFPSTTLSLSLXLYKISFPAP

SEQ ID NO: 200420 - protein, 65 aa, Zea mays
  Clone ID: MRT4577_11436C.1.pep
VTREWFILRRRCEQRTCRREGGQHNSKTIAESQYLQTHRTERIQAYLGPRVPENTYELMSKRISL

SEQ ID NO: 200421 - protein, 290 aa, Zea mays
  unsure (1)..(290): unsure at all Xaa locations
  Clone ID: MRT4577_114370C.1.pep
MDLYDKREDMALQDGDSCLASRASRGGCDVDLQWVDGLLEGAGRKRRAPEDFEDEVQKMDEVDGGGKRSKPPSPQPHTPDIHEAHVPGRRTTVVAGGGEHSGGGGDLIGEIGRDLSINCLLRLSRSEYGSVASLNHDFRSLVRGGGIYRLRRQNNIAEHWVYFSCNVLEWDAYDPYRKRWISVPKMPPDECFMCSDKESLAVGTELLVXGMAHIVFRYSILTNSWSRGEVMNSPRCLFGSASVGEKAYVAGGTDSLGRILSSAELYNSETHTWTPLPSMNKARKNCSGLF

SEQ ID NO: 200422 - protein, 71 aa, Zea mays
  unsure (1)..(71): unsure at all Xaa locations
  Clone ID: MRT4577_114371C.1.pep
ALTCFGHGRSSASQASLLLQKQIKDLAKNPVDGFSAGLVGDSNIFEWQVTIIXPPDTLYDGGYFNAIMTFP

SEQ ID NO: 200423 - protein, 155 aa, Zea mays
  unsure (1)..(155): unsure at all Xaa locations
  Clone ID: MRT4577_114372C.1.pep
DCCSGKLCGVQGCLRTEDELMIEERCMPRWELISPCRRDPHLPRSLDALKAGLLMLASASTPVIAGCLPQVKSFLAMPASEQFLAAGVPFPGCGDPSELKKSEGDLFLWREARTRPPLRDEVASSLRPPWRDDAWWHRPGCEVEHGAFPSLXRXA

SEQ ID NO: 200424 - protein, 82 aa, Zea mays
  Clone ID: MRT4577_114373C.1.pep
QLKIDENWPIIQLPLSIPTRTNNDSVFYINLHVDIYKFVDPFYNNNCYRTVIVRFCLVFTTPHLCYCNPTPWTGHIQCKIEI

SEQ ID NO: 200425 - protein, 35 aa, Zea mays
  Clone ID: MRT4577_114374C.1.pep
HRKFSSKGYLMLLGGSPTIPLYPCYDSLLFRFDLK

SEQ ID NO: 200426 - protein, 74 aa, Zea mays
  unsure (1)..(74): unsure at all Xaa locations
  Clone ID: MRT4577_114375C.1.pep
LNPDAPLFMPTALLWVEDFSPHWWNLITTTGWLRDHWLRERXSGRDGRADRLGTISFHTTRTSCTTTSSSRAPS

SEQ ID NO: 200427 - protein, 73 aa, Zea mays
  Clone ID: MRT4577_114376C.1.pep
RSYWLCCYREHGVVGDMRDAWPNARVRKNVSIIHTYHGFKGAPDTSFRSYFPVSVVKTAREFLRLLCQSKTWN

SEQ ID NO: 200428 - protein, 116 aa, Zea mays
  unsure (1)..(116): unsure at all Xaa locations
  Clone ID: MRT4577_114377C.1.pep
MRDPREAFRVTRCRIGRGEGMRGGGMAWIWPIRQDWEPVVVLNKGPTGGGNKDEKGVNGGRRSGAEIETMKNVNAGMNKGGGIGTFLNIKWLDDDYXNLGDERGPRDLKKNLMQGR

SEQ ID NO: 200429 - protein, 169 aa, Zea mays
  unsure (1)..(169): unsure at all Xaa locations
  Clone ID: MRT4577_114378C.1.pep
PRGFFCRHRSQPPGRETDWPPPGSGGPIPPGERPGPPPGGPPPPPGSPPRPLGGGPKAGGLFFPPTRFDGAPRPPLKPPNSPGAPPPELFCPFPXPSTIPFPPLPEPGPGXFPPELNPPPMAGPGXFPPPGRVPPLKGGPKRPFLGWSPPFFFVFFPPPPFFLIPPFLK

SEQ ID NO: 200430 - protein, 75 aa, Zea mays
  Clone ID: MRT4577_114379C.1.pep
TPFRDTLGPGPTLAKIKPKALFGQGKLKKVPGQITLATIVTYMILGFLVGSSVYLAYRSCWPGTGPPEALAPQGN

SEQ ID NO: 200431 - protein, 39 aa, Zea mays
  Clone ID: MRT4577_11437C.1.pep
RSYNVKGLMFLLPIYYNKCVHINFSELLSCEPLILKVFI

SEQ ID NO: 200432 - protein, 44 aa, Zea mays
  Clone ID: MRT4577_114380C.1.pep
SHGDRNTEVLDTFLRRPHRVSIRLIRGRILMRVISYAANCLMPY

SEQ ID NO: 200433 - protein, 138 aa, Zea mays
  Clone ID: MRT4577_114381C.1.pep
PDQKLGAPRGSFGVSGTLALPFLAPFSGGQKGGVAFPKIPFKKPPFFFLGGPFTLFVLAPVGGLLRGFLFFQGGVFLVGPVGLFFPGRVADLWVVSEGRVPPFWGPFRGSKKLLRFPNPVFSPLAFISFGLLFCCFPG

SEQ ID NO: 200434 - protein, 122 aa, Zea mays
  Clone ID: MRT4577_114382C.1.pep
PAGIAPLLQHRSRGLLSPLSSAPGDTQASRSREHALKMPPAFAAAPSSSICGVRIPTVRRFEAQSTVSTPRFLRNRVAGKAPLPALQCTTLSELPTVNCCSAAYKFQLVYFLDSGYTTTILS

SEQ ID NO: 200435 - protein, 55 aa, Zea mays
  Clone ID: MRT4577_114383C.1.pep
FQNLLPKKIPNLVRVTPPKKKFVSFPGIKGQFFHGTATRVVILGVVDGKISPKII

SEQ ID NO: 200436 - protein, 107 aa, Zea mays
  Clone ID: MRT4577_114384C.1.pep
GVGRGHFRFSAFRDPPRPPGGLGYQVREGSCFFLNPLGGELFPHAWPKKFFALQTPLVLACIFQFFPCPFFKLFFWHIPPTIPWFFGFSPFLAPHFFGALLSLLKFF

SEQ ID NO: 200437 - protein, 120 aa, Zea mays
  unsure (1)..(120): unsure at all Xaa locations
  Clone ID: MRT4577_114385C.1.pep
PFDALGRTGWLVPFNRGGPCHVAWAXPGWGSLVCFSLWRPSGGVCPFWGGACVLPPFCALLFLGIGIEGWSLNFCAGPLLYIGPRKEFRGKKSGVGLSFLFRAGRFSGFRPGVMLRRAQF

SEQ ID NO: 200438 - protein, 218 aa, Zea mays
  Clone ID: MRT4577_114386C.1.pep
MTATAWVTHAHRRPPGDSHHHASTSDLQKNFFEAHDAMKADEEAKKAAEDEVCNLSIAFDDAITMQVQAQTSLKEHSAELQKLHLATSEVCDHLSPTPPTHAPLIDRLLALLEHVEHVVLEGAFNMGSLALGQMVSNFDEIDVGVIAVGFAACRSNEELDSIEEQGLATDPLTVPQSRPFRMEIRLGVDREPGYMSSSPRAGHMHRTVQWHIGQSGAF

SEQ ID NO: 200439 - protein, 41 aa, Zea mays
  Clone ID: MRT4577_114387C.1.pep
CQVQCCFARAPLRFFAPCGGAASQAPKRVPSRFYSRVMLVE

SEQ ID NO: 200440 - protein, 130 aa, Zea mays
  Clone ID: MRT4577_114388C.1.pep
VFGPPPPPPPQPQKCRCTRLSVKKKLAKKMGQNRPIPMDPHGPFNTSGNPRAGTGAAPSWVFRLGLAGFFVGRLGFKSYFPFVLSMGQFFCKLASVVITLLLRFWLAVMFKKNWPYCGVPQDSFQHCFVK

SEQ ID NO: 200441 - protein, 44 aa, Zea mays
  Clone ID: MRT4577_114389C.1.pep
VCKHANVHSVSVVILYCSVGRPVSSSLFRLIHDIELADVSGLPC

SEQ ID NO: 200442 - protein, 53 aa, Zea mays
  Clone ID: MRT4577_11438C.1.pep
SVRTTLSQYYHQVQAPGPNVVDVVALSGGHTIGMYRSTSKPAEAIQPDRQWHG

SEQ ID NO: 200443 - protein, 133 aa, Zea mays
  Clone ID: MRT4577_114390C.1.pep
GSVGVFLTLLVGRARLASTSALPCLTPLAHPCSRRPSSPQLRCAPVFSLLPPSADVLGLSRAPAPTLAGDGCCERPFILPSLAVASNFKSMGEPASSPCRALGASLCSTRCGALAVRPLHYDVEPPCCPQLSH

SEQ ID NO: 200444 - protein, 91 aa, Zea mays
  Clone ID: MRT4577_114391C.1.pep
NEIKKLNGLAHDTVQYAVPMHASPIVPHFTAQCKPNIISPSPSILKPHPRTNGASSPTPTSCFLAPPWTGSQGVSPPHMEHMPPGSSAANY

SEQ ID NO: 200445 - protein, 68 aa, Zea mays
  unsure (1)..(68): unsure at all Xaa locations
  Clone ID: MRT4577_114392C.1.pep
IGIKAGTRTNIHCTSSCIHRLVRSDLSLRGSRGKAPPPLPTPATGLRLPITTPSNPKDIHXRFLFYAH

SEQ ID NO: 200446 - protein, 67 aa, Zea mays
  Clone ID: MRT4577_114393C.1.pep
GGFGGLIQGFTNVGTCIFGEKTFLFSFQGLSLFNQFHFLFLRGSLVVWAPLSMFPNFVAVPFCSLSR

SEQ ID NO: 200447 - protein, 64 aa, Zea mays
  Clone ID: MRT4577_114394C.1.pep
TKPPTWVIKYECILLYISIWCAWIWTSTWMTRGMCWATMARIFEFMVLRILDLDTAYPAISAAT

SEQ ID NO: 200448 - protein, 94 aa, Zea mays
  Clone ID: MRT4577_114395C.1.pep
MAKWASAARATTMTIDRLDALNSYMKSHIASSDFEGIVQVWDVTRSQVFVEMREHERRVWSVDFSIMDPTKLVSGSDDGSVKLRDMKSGWEYWH

SEQ ID NO: 200449 - protein, 50 aa, Zea mays
  Clone ID: MRT4577_114396C.1.pep
PKKKKKKKKKGGGGGKKKKKKKKKKKKKKKKKKKKKKKKKRGGGFGWLRG

SEQ ID NO: 200450 - protein, 106 aa, Zea mays
  Clone ID: MRT4577_114397C.1.pep
RKTHSVYCITKKKLLEFRGSGTTSELQSHSHTSTQLSYSILLTRQHCVFRGYAKIYNLRQRILTKAPLLIFPPIRQQKLLPLEQFNDGVAELFGSSTPSLPALGAS

SEQ ID NO: 200451 - protein, 142 aa, Zea mays
  Clone ID: MRT4577_114399C.1.pep
EVRTSTTLHPDLHPARTSFPSTTTKQLRPRDRRVEMGMSQFVLVQTNVNSSRPPSRHLKSTSYLVTHRLYYLDGELPVSTCDTVRDDKVVNLRDIPVPLVARLTTTSTCGSKTSPYLAAYKGTKLTNLLIYPKAKCSGTYRV

SEQ ID NO: 200452 - protein, 132 aa, Zea mays
  Clone ID: MRT4577_11439C.1.pep
RPASSASSFFHSTGWRPCLGFLWASPTGSVQPGACCLPPAISSMSGRLAALCSRAYWEQRRLPPFSRLAGVSPAPSGVGPVVAVLPARCALRGPPFRSATSGAFATNVFWRTQGGSRALPVFFGGFFGKQIR

SEQ ID NO: 200453 - protein, 50 aa, Zea mays
  unsure (1)..(50): unsure at all Xaa locations
  Clone ID: MRT4577_1143C.1.pep
IACFTSXKKKKKKKKVKIKKKKKKKKKKKKNKKKKKKRGGPFKKSKFTYP

SEQ ID NO: 200454 - protein, 233 aa, Zea mays
  unsure (1)..(233): unsure at all Xaa locations
  Clone ID: MRT4577_114400C.1.pep
NKHLVCSVGFDRDREFFXATAGVNKKIKVFEYNMIVNEHRDIHYPVVEMSNRSKLSCISWNSYMKSHIASSDFEGIVQVWDVTRSQVFVEMREHERRVWSVDFSIVDPTKLVSGSDDGSGKLWDMNQAGSIGTIKTRANVCSVQFQPDTARSIAIGSADHKIYCYDLRHIRAPYCTLVGHTKTVSYVKYLDASTIVSASTDNSLKLWDLSMSPGRIIDSPVQTFKGHTNTKVG

SEQ ID NO: 200455 - protein, 798 aa, Zea mays
  unsure (1)..(798): unsure at all Xaa locations
  Clone ID: MRT4577_114401C.1.pep
MEPSRGGVGGGGXGGGGXGGGXCGGGRXRRGEDGGEVSLREWLDRPGRAVEAAECVHVFRQVAEAVAVAHAQGVAVGSARPSCFVVSPPFARVAFIESASGSDASGSCSGSDASEDADGDPDPDPDASPPLRRRDSAVPGEERAGRSFPLKSVLAMELNWYTSPEEADDSAATFASDVYRLGVLLFELFCTFETMEDKMRAMANLRHRVLPPQLLLKWPKEASFCQLLMHPVPETRPKMSEVLQSEFLNQSRNSLEEREAALRLREEIEEQELLLDFLQQLQKRKQDMADSLQDTVAFLSSDINEVLHQQSALGHCVNFSPDLDKEVCSGTVEDQSDCGSRKRFRPELQGVDMEENNRSVEECSRTVPSSELIQENVLSKSSRLMKNLKKLETAYFLTRSKLAKQVGNQINSCNRVVKRTTGSAVGTEASSIDDFSLERQYGRRQRGWVNSFLEGLCKYLSFSKLKVRAELKHCDSLNSSNLVCSVGFDRDREFFATAGVNKKIKVFEYNMIVNEHRDIHYPVVEMSNRSKLSCISWNSYMKSHIASSDFEGIVQVWDVTRSQVFVEMREHERRVWSVDFSIVDPTKLVSGSDDGSVKLWDMNQAILFLHLXAGSIGTIKTRANVCSVQFQPDTARSIAIGSADHKIYCYDLRHIRAPYCTLVGHTKTVSYVKYLDASTIVSASTDNSLKLWDLSMSPGRIIDSPVQTFKGHTNTKNFVGLSISDGYIATGSETNEVFVYHKEFPMPVLAYKFSVTDPISGQEIDDQSQFISCVCWRGQSSTLLSANSSGNIKILEMD

SEQ ID NO: 200456 - protein, 232 aa, Zea mays
  Clone ID: MRT4577_114402C.1.pep
FVRIPNLPGFDRDREFFATAGVNKKIKVFEYNMIVNEHRDIHYPVVEMSNRSKLSCISWNSYMKSHIASSDFEGIVQVWDVTRSQVFVEMREHERRVWSVDFSIVDPTKLVSGSDDGSVKLWDMNQAGSIGTIKTRANVCSVQFQPDTARSIAIGSADHKIYCYDLRHIRAPYCTLVGHTKTVSYVKYLDASTIVSASTDNSLKLWDLSMSPGRIIDSPVQTFKGHTNTKVG

SEQ ID NO: 200457 - protein, 110 aa, Zea mays
  Clone ID: MRT4577_114403C.1.pep
MLPRKIYQLCTDGHEVSLYLRDQQRWVENAKILTLEGDLVTFRYETEEEDEVCAWEEMVRLESIGSVNRKLASVSRLGHELLISEDCPEAEQLLARSPKSHQEEEEEDCD

SEQ ID NO: 200458 - protein, 146 aa, Zea mays
  Clone ID: MRT4577_114404C.1.pep
MENEQLKQEVARLGNALYDKKGKGKQIQPPHDNTTAGVNKPMEGKTVICRLLHKEGHKVFPMQGLVKDYIVWTFHGERRDASVDESSCGGGNSSMTNSGGPLAGTTVASNNNNADHNDYIIVHDLFSDDAGDKGGNEDVGATSQEP

SEQ ID NO: 200459 - protein, 55 aa, Zea mays
  Clone ID: MRT4577_114405C.1.pep
DTLKEGALFFFFFFFFFLTFFLYFGPNKNPDNLLSKGLKGTFIQENVLANNNLGT

SEQ ID NO: 200460 - protein, 129 aa, Zea mays
  unsure (1)..(129): unsure at all Xaa locations
  Clone ID: MRT4577_114406C.1.pep
MPPKLDPSQVVEVFVRVTXGEVGAASSLAPKIGPLGLSPKKIGEDIAKETAKDWKGLRVTVKLTVRNRQAKVSVVPSAAALVIKALKEPERDRKKVKNIKHSVGCTVDGKDPKDLQQEIDDGEVEIPSA

SEQ ID NO: 200461 - protein, 110 aa, Zea mays
  Clone ID: MRT4577_114407C.1.pep
MPPKLDPSQVVEVFVRVTGGEVGAASSLAPKIGPLGLSPKKIGEDIAKETAKDWKGLRVTVKLTVQNRQAKVSVVPSAAALVIKALKEPERDRKKVKNIKHSGNIEIPSA

SEQ ID NO: 200462 - protein, 158 aa, Zea mays
  Clone ID: MRT4577_114408C.1.pep
MPPKLDPSQVVEVFVRVTGGEVGAASSLAPKIGPLGLSPKKIGEDWKGLRVTVKLTVQNRQAKVSVVPSAAALVIKALKEPERDRKKVKNIKHSGNISLDDVIEIAKTMRNRSMAKELAGTVKEILGTCVSVGCTVDGKDPKDLQQEIDDGEVEIPSA

SEQ ID NO: 200463 - protein, 114 aa, Zea mays
  Clone ID: MRT4577_114409C.1.pep
HASGLRVTVKLTVQNRQAKVSVVPSAAALVIKALKEPERDRKKVKNIKHSGNISLDDIVEIAKTMRPRSMAKEMAGTVKEILGTCVSVGCTVDGKDPKDLQQEIDDGEVEIPSA

SEQ ID NO: 200464 - protein, 69 aa, Zea mays
  Clone ID: MRT4577_11440C.1.pep
LLSACHAIPVMKYSDPSHDPQSVRLRQELALSTSGRWHTACPRSEPLLHHMRNVRRVQLMSAHHQAPCR

SEQ ID NO: 200465 - protein, 166 aa, Zea mays
  Clone ID: MRT4577_114410C.1.pep
MPPKLDPSQVVEVFVRVTGGEVGAASSLAPKIGPLGLSPKKIGEDIAKETAKDWKGLRVTVKLTVQNRQAKVSVVPSAAALVIKALKEPERDRKKVKNIKHSGNISLDDVIEIAKTMRNRSMAKELAGTVKEILGTCVSVGCTVDGKDPKDLQQEIDDGEVEIPSA

SEQ ID NO: 200466 - protein, 166 aa, Zea mays; identical to SEQ ID NO: 200465
  Clone ID: MRT4577_114411C.1.pep

SEQ ID NO: 200467 - protein, 168 aa, Zea mays
  unsure (1)..(168): unsure at all Xaa locations
  Clone ID: MRT4577_114412C.1.pep
MPPKLDPSQVVEVFVRVTGGEVGAASSLAPKIGPLGLSPKKIGEDIAKAXETAKDWKGLRVTVKLTVQNRQAKVSVVPSAAALVIKALKEPERDRKKVKNIKHSGNISLDDVIEIAKTMRNRSMAKELAGTVKEILGTCVSVGCTVDGKDPXDLQQEIDDGEVEIPSA

SEQ ID NO: 200468 - protein, 78 aa, Zea mays
  Clone ID: MRT4577_114413C.1.pep
LDRGNKVLTDHHRYCYIVITILKSKTETIIAERNYSLRVTTLLHLMGTKPNQILPTPPTYHLFKQKKGDPNQPPAPKS

SEQ ID NO: 200469 - protein, 166 aa, Zea mays; identical to SEQ ID NO: 200465
  Clone ID: MRT4577_114414C.1.pep

SEQ ID NO: 200470 - protein, 58 aa, Zea mays
  Clone ID: MRT4577_114415C.1.pep
MASSPLAISGTQPTWVPYEPTKDCSQGLCSMYCPQWCYFIFPPPPPFDVGGPSPDHPM

SEQ ID NO: 200471 - protein, 75 aa, Zea mays
  Clone ID: MRT4577_114416C.1.pep
GSFILCSQVVQLVIFGTFGSIFGEFNVNFNFMSVGKIAPRKQTFMAFGVDAIPSKEPLKKIGEIPAVEEFVFLKL

SEQ ID NO: 200472 - protein, 51 aa, Zea mays
  Clone ID: MRT4577_114417C.1.pep
RNKLTRAHSQPCWRVVACFGNGRGSGGRGRTAEGLDRRVVVQAACVLARIT

SEQ ID NO: 200473 - protein, 145 aa, Zea mays
  Clone ID: MRT4577_114418C.1.pep
RWLCYRITYQNSAQLIFPESNLNILNVDFKTLMNCINSKFPGKIKNAVLTNSGYKITIEKETASKLLESKIFIGNNSLNPLLSCRYCSICEGSHSFNTDETIKNVEMKKIHVSCGFRKSTPHSDYAISERRNMKSDNNKRIDLTV

SEQ ID NO: 200474 - protein, 84 aa, Zea mays
  Clone ID: MRT4577_114419C.1.pep
TSSRDARNMRDVYLLELTTADLTRCGGILGAMADVLPEAQQSPSRSQKYHARLSSREWTYQPAHCSCYDAATTSWIYASQCQEN

SEQ ID NO: 200475 - protein, 116 aa, Zea mays
  unsure (1)..(116): unsure at all Xaa locations
  Clone ID: MRT4577_11441C.1.pep
PTLPLTRQDASCELHCLQDAMTXEGQKLGDKTTRXGDDGFHTXFFSETXAQKNVPRAVFVXDLETTVXEEVSERNYRLLFHPETIMTGKEDARNNFARGHXYTIGRDIADLSPDRI

SEQ ID NO: 200476 - protein, 103 aa, Zea mays
  Clone ID: MRT4577_114421C.1.pep
LHHPLTFTWITQRHSPLPVPLRNSSHALFSKKQAPFLLVTGWASSDLGACAAPSKAGSRSAGLLSASRQSSSCATDQGRIGMRSPGKIRARRSIPRGAELSSR

SEQ ID NO: 200477 - protein, 105 aa, Zea mays
  Clone ID: MRT4577_114422C.1.pep
PVQFLSSLHHHPIPPGRFHLSVGDPFHPLLLLYLPRSAQHLRVFLYTPILITRSYVLITQFTHIYNLMYAMNYDPYLHEPIQLFHIPLHPYFPQHLRHLPYHLHH

SEQ ID NO: 200478 - protein, 92 aa, Zea mays
  Clone ID: MRT4577_114423C.1.pep
MSNRRSRSRQSGSSRITEEQISDLVSKLQDLLPEARLQSNARVPSARVLQETCNYIRNLHQEVDDLSERLSELLATSDMSSAQAAVIRSLLM

SEQ ID NO: 200479 - protein, 87 aa, Zea mays
  Clone ID: MRT4577_114424C.1.pep
DECIVNLNSVGGSLFKADLIYHVLVYQTTSNIKPTQRILTPNQQVKCYRIFSHRHHIPSEEADAFRAAGRGHLQLVTHIYCGLHLLE

SEQ ID NO: 200480 - protein, 347 aa, Zea mays
  unsure (1)..(347): unsure at all Xaa locations
  Clone ID: MRT4577_114425C.1.pep
TYRRRFEQSFRSSYYDFCIIIILPSMIEICRALCSLATQNSGYPMLARTHGQPASPTTVGKEMANFAARLSDIGKSFSEVKILGKFAGAVGNYNADVVAYPEVDWPKVAEEFVRSLGLQFNPYVTQIEPHDYISKLFNLFTQFNNVLTDFDRDMWSYISLGYFKQIPKAGEVGSSTMPHKINPIDFENSDGNLCQANSILSGISMKLPISRXQRDLTDSTVLRNLGMGLGHSLLAYNATIRGXSKVQVNEARLAEDLEQTWEVLAEPIQTVMRRYGIPEPYEKLKELTRGQAVTKDSMQQFIDGLDIPGEVRAKLSKLTPHSYTGLAEDLARYIEKWVDLESGFQIK

SEQ ID NO: 200481 - protein, 97 aa, Zea mays
  Clone ID: MRT4577_114426C.1.pep
PASGLGIGLELSSAPILSPEPDRQSSSSPIHLRLRPPRSTTHQGAREEDRRRRRRLPSAFLKAVQLLMLLQAEHWIIQPQHHHMSFSYFTLSLLLHV

SEQ ID NO: 200482 - protein, 397 aa, Zea mays
  unsure (1)..(397): unsure at all Xaa locations
  Clone ID: MRT4577_114427C.1.pep
HWVPRGRPGRVLIEIXWLLKLSXIPEITEVPQFSKEAQSLLNAIIENFCMDDAKEVKKIEKVTNHDVKAVEYFLKQRCSSNPEIAKVSEFFHFGCTSEDINNLSHALALKEGVNKVMFPAMIDLCRAMCSLATQNSGYPMLARTHGQPASPTTVGKEMANFAARLSDXRKEFLRGEVEPHDYISKLFNLFTQFNNVLTDFDRDMWSYISLGYFKQIPXAGEVGSSTMPHKINPIDFENSDGNLCQANSILSASSRKLPISRLQRDLTDSTVLRNLGMGLGHSLLAYKATMRGISKVQLNESRLAEDLEQTWEVLAEPIQTVMRRYGIPEPYEKLKELTRGQAVTKDSMQQFINGLDIPEEVRSKLSKLTPHSYTGLAEDLARDIEKWVDLESGFQIK

SEQ ID NO: 200483 - protein, 60 aa, Zea mays
  Clone ID: MRT4577_114428C.1.pep
RRCSSKSWISILTSGSACGAHDLMENKKNRMKTPCLAKVQVSLVLLLGHQASKQKQKAVA

SEQ ID NO: 200484 - protein, 156 aa, Zea mays
  Clone ID: MRT4577_114429C.1.pep
MVSEFFHSGCTSEDINNLSHALALKEASNVFLGNTKFRLPYVGSNSWAVLSLRQIEPHDYISKLFNLFTQFNNVLTDFDRDIWSYISLGYFKQIPKAGEVGSSSMPHKINPIVDTFLEASITQENQRRCSLALATIILSFSIAPKAITLLSVTEST

SEQ ID NO: 200485 - protein, 81 aa, Zea mays
  Clone ID: MRT4577_11442C.1.pep
SARRNRPQVLVGASSVLRTMLGPEIAAASGAREMEFSKLARAQREALIMPSSPGKEYEEHGKNGRETEESLPMAVEQCRPE

SEQ ID NO: 200486 - protein, 254 aa, Zea mays
  Clone ID: MRT4577_114430C.1.pep
MSAPPSLKTPATAVAVSRRSVATPRATGLRGACAPPTRRLRCSASAAVAGASTEMADAPLDWAERSLEELRSLPDHDTFCLMALSPLDGRYDRFVKELMPFFSEFGLIRYRVLIEIKWLLKLSQIPEITEVPQFSKEAQSLLNAIIENFCIDDAKEVKKIEKVTNHDVKAVEYFLKQRCSSNPEIAKVSEFFHFGCTSEDINNLSHALALKEGVNKVMFPAMIDLCRAMCSLATQNSGYPMLARTHGQPASSTN

SEQ ID NO: 200487 - protein, 272 aa, Zea mays
  Clone ID: MRT4577_114431C.1.pep
KAQGGYTHVLVAVDKFTRWIEFKPIASLTSAKAVEFIQDIIFRFGIPNDIITDLGSNFTSSEFFDFCEQKSIQIKYASVAHPRANGQVKRANGMILEALRKRVFEKNEKFAGKWIRELPYVVWSLRTQPSRALHGNTPFFMVYGSEAVLPADLKFGAPRLVFESIAEAEATRLEDIDVLEEERLNAIIQSARYQQTLRRYHDKAVRQRSFSVGDLVLRRILTGEGWHKLSPLWEGPFIVAEVTRPGSYRLTQMDGTGIGNSRNIEHLRKFYP

SEQ ID NO: 200488 - protein, 383 aa, Zea mays
  Clone ID: MRT4577_114432C.1.pep
PRVRNYDVKAVEYFLKQRCSSNPEIAKVSEFFHFGCTSEDINNLSHALALKEGVNKVMFPAMIDLCRAMCSLATQNSGYPMLARTHGQPASPTTVGKEMANFAARLSDIGKSFSEVKILGKFAGAVGNYNPDVVAYPEVDWPKVAEEFVRSLGLQFNPYVTQIEPHDYISKLFNLFTQFNNVLTDFDRDMWSYISLGYFKQIPKAGEVGSSTMPHKINPIDFENSDGNLCLANSVLSGISMKLPISRMQRDLTDSTVLRNLGMGLGHSLLAYKATIRGISKVQVNEARLAEDLEQTWEVLAEPIQTVMRRYGIPEPYEKLKELTRGQAVTKDSMQQFIDGLDIPEEVRAKLSKLTPHSYTGLAEDLARYIEKWVDLESGFQIK

SEQ ID NO: 200489 - protein, 135 aa, Zea mays
  Clone ID: MRT4577_114433C.1.pep
QRDLTYSSVLRNLGMGLGHSLLSYKATMRCISQVQVNESRLAEDLEQTWEVLAEPIQTVMRRYGIPEPYEKLKELTRGQAVTKDSMQQFINGLDIPEEVRSKLSKLTPHSYTGLAEDLARDIEKWVDLESGFQIK

SEQ ID NO: 200490 - protein, 46 aa, Zea mays
  Clone ID: MRT4577_114434C.1.pep
FCLRHTPKRRDVVIYSSKAQQNPNTTKLLSNHNSSYSSYQTEYTVS

SEQ ID NO: 200491 - protein, 105 aa, Zea mays
  Clone ID: MRT4577_114435C.1.pep
DHTTASSSILDLEHGKILSGPPQVNSGKLAAAQSIHNSQLLNKLKKNEHLRFMHLYSVPSRRDMRPWSWTKSSSSSFFCHALLQDMICNNLPVSIMIETPVVANL

SEQ ID NO: 200492 - protein, 76 aa, Zea mays
  Clone ID: MRT4577_114436C.1.pep
ASSCRSVYGIHNFPGFAVIVCSVLCHQSKFTMIAGEILARLHSTGSQGPLCSVDIDRAPIEAVIGFVTKEDRVTAE

SEQ ID NO: 200493 - protein, 59 aa, Zea mays
  Clone ID: MRT4577_114437C.1.pep
IPAYVSCCKASSTLCFTQLVYLRTTGNMNAASGRTHASQKSPRLYQCIDPLRKISGMSF

SEQ ID NO: 200494 - protein, 70 aa, Zea mays
  Clone ID: MRT4577_114438C.1.pep
LGQDDIAADDDGRAEDPTVLQVKVILAPGSQEILQGPCWRRYCGRPSRARQTSLIEPPLHTPSAQQRLAT

SEQ ID NO: 200495 - protein, 69 aa, Zea mays
  Clone ID: MRT4577_114439C.1.pep
QKEKIANTRPSSTRAAGTGGSSSTMLRLYTDESPGLKVDPVVVLVLSLVFIFSVVALHIIAKITRKFSS

SEQ ID NO: 200496 - protein, 121 aa, Zea mays
  unsure (1)..(121): unsure at all Xaa locations
  Clone ID: MRT4577_11443C.1.pep
PPPRPHFEIPRPPPHMGTRAXALXPDPGAPAQNIGDGGHWGKGHSPPPRGTLTTWRTNTPPRPARVPNQATPPEERDGEDTQTILATEKKETNEAGRQGQRSRSKGLKARPYEPYQHHKLT

SEQ ID NO: 200497 - protein, 73 aa, Zea mays
  Clone ID: MRT4577_114440C.1.pep
STIWIPCHIYIYEINPRSWMLGHLSPCLVICDRAIQICMSALRALSLLVEVLKGGISQANNDFSMVFFNPSTI

SEQ ID NO: 200498 - protein, 70 aa, Zea mays
  Clone ID: MRT4577_114441C.1.pep
VIRICHILGTQLKGLGAIIPGLVIIHSRVMICSRIHAAKRNSFKNRMIFSMPSIFRFETNRCPDSLFWAA

SEQ ID NO: 200499 - protein, 392 aa, Zea mays
  Clone ID: MRT4577_114442C.1.pep
MSDNLMDKVSAFGERLKITGTEVSKKMTAGMSSMSFKMKELFQGQTPADKIVEGATSEDLDGPDWNSNLEICDMINTEKVDSVELIRGIKKRIMLKDARVQYLSLVLLETIVKNCDKAFSEVAAERVLDEMVRLIDDPQTVVNNRNKALMLIEAWGESGDELRYLPVYEETYKSLKSRGVRFPGRDNESLAPIFTPARSVAEADVDASLPQQVFEDVHVHTYTAEETKEAFDVARNSIELLSTVLSSSPEQDASQDDLTATLVQQCYQSQHTIQRIIETVGDNEAVLFEALSVNDEIQKVLSKYEEMKQPRASEHAEQRAVVIPVATEHEDLTAAVNEDALVRKPAAARTRSGGDDDILDDLDEMIFGKKGGSSSQEGPKKPDPKKDDLITF

SEQ ID NO: 200500 - protein, 200 aa, Zea mays
  unsure (1)..(200): unsure at all Xaa locations
  Clone ID: MRT4577_114443C.1.pep
LGTSRPAGSASSKRRRKLSPEPDRSSISPLPPTRSDLSRAIIVAAFLKVVVAASRLDDRHRVEIGVSVISFPHSGRTGMQVVSACWELYCLEHVPHPDGQKPGXKTARHPEDAFSNFFSHTGAGKHDPRAIFVDLQPNVIYEVRTAADRQVFHADYLMNGKRHAANHFPRGHYTIGKDIGDLCLDRIRKLADNGTGLEGF

SEQ ID NO: 200501 - protein, 53 aa, Zea mays
  Clone ID: MRT4577_114444C.1.pep
DCLYVIMTFINFVTFISIHFVIICVVLLWRTYETHLALSLKSGCDNNAMHMTN

SEQ ID NO: 200502 - protein, 62 aa, Zea mays
  unsure (1)..(62): unsure at all Xaa locations
  Clone ID: MRT4577_114445C.1.pep
XTVVNNRNKALMLIEAWGESGDELRYLPVYEETYKVCEHKPSFSLPLFQPNQLHNAYIVPVD

SEQ ID NO: 200503 - protein, 391 aa, Zea mays
  Clone ID: MRT4577_114446C.1.pep
MSDNLMDKVSAFGERLKITGTEVSKKMTAGMSSMSFKMKELFQGQTPADKIVEGATSEDLDGPDWNSNLEICDMINTEKVDSVELIRGIKKRIMLKDARVQYLSLVLLETIVKNCDKAFSEVAAERVLDEMVRLIDDPQTVVNNRNKALMLIEAWGESGDELRYLPVYEETYKSLKSRGVRFPGRDNESLAPIFTPARSVAEADVDASLPQQVFEDVHVHTYTAEETKEAFDVARNSVELLSTVLSSSPEQDALQDDLTTTLVQQCYQSQHTIQMIIETVGDNEAVLFEALSVNDEIQKVLSKYEEMKQPRASEHAEHVPVVIPIAAEHEDLNAVGNEDALVRKPAAARATSGGDDDILDDLDEMIFGKKGGSSSQDPKKPDPKKDDLISF

SEQ ID NO: 200504 - protein, 391 aa, Zea mays
  Clone ID: MRT4577_114447C.1.pep
MSDNLMEKVSAFGERLKITGTEVSKKMTAGMSSMSFKMKELFQGQTPADKIVEDATSENLDGPDWNSNLEICDLINTEKVNSVELIHGIKKRIMMKDARVQYLSLVLLETIVKNCEKAFSEVAAERVLDEMVRLIDDPQTVVNNRNKALMLIEAWGESGDELRYLPVYEETYKSLKSRVRFPGRDNESLAPIFTPPRSVAEADVETSLPQQAFEDVHVHTYTAEETKEAFDVARNSIELLSTVLSSSPEQDASQDDLTATLVQQCYQSQHTIQRIIETVGDNEAVLFEALSVNDEIQKVLSKYEEMKQPRASEHAEQRAVVIPVATEHEDLTAAVNEDALVRKPAAARTRSGGDDDILDDLDEMIFGKKGGSSSQEGPKKPDPKKDDLITF

SEQ ID NO: 200505 - protein, 110 aa, Zea mays
  unsure (1)..(110): unsure at all Xaa locations
  Clone ID: MRT4577_114448C.1.pep
ATGGRETTTXXKXXAXPXSSEGGKGTTXXTQRGGGXGAFFFXXXGXXXGRQGGXXXARGDTTXGXXXXGPHXXXASKEXGAPXDENRHAGXXGXXTXGADGXANXXGTDS

SEQ ID NO: 200506 - protein, 392 aa, Zea mays
  unsure (1)..(392): unsure at all Xaa locations
  Clone ID: MRT4577_114449C.1.pep
MSDNLMDKVSAFGERLKITGTEVSKKMTAGMSSMSFKMXELFQGQTPADKIVEGAPLTSLDGPDWNSNLEICDMINTEKVDSVELIRGIKKRIMLKDARVQYLSLVLLETIVKNCDKAFSEVAAERVLDEMVRLIDDPQTVVNNRNKALMLIEAWGESGDELRYLPVYEETYKSLKSRGVRFPGRDNESLAPIFTPARSVAEADVDASLPQQVFEDVHVHTYTAEETKEAFDVARNSVELLSTVLSSSPEQDALQDDLTTTLVQQCYQSQHTIQMIIETVGDNEAVLFEALSVNDEIQKVLSKYEEMKQPRASEHAEHVPVVIPIAAEHEDLNAVGNEDALVRKPAAARATSGGDDDILDDLDEMIFGKKGGSSSQEGPKKPDPKKDDLISF

SEQ ID NO: 200507 - protein, 46 aa, Zea mays
  Clone ID: MRT4577_11444C.1.pep
LEPAGAQFAPQAKEVRCPLNQQLKLPRLIIETSKLTWRIISSGILI

SEQ ID NO: 200508 - protein, 86 aa, Zea mays
  unsure (1)..(86): unsure at all Xaa locations
  Clone ID: MRT4577_114450C.1.pep
EFRCLIPPCCSKYGHPAFPQPWTPFLPPPPPLNLLSPSCFLFHWAXWTLSLPLFHFYSFESFPGXXFTSRXLVFSPPPPPHAAAHA

SEQ ID NO: 200509 - protein, 75 aa, Zea mays
  Clone ID: MRT4577_114451C.1.pep
LGLGGVLAVVLVGMEGSVNLGYVERLAFFFCCMFVFFCFGFFFGAPFFFFKPSFFFFFFVFERVGERVGESAGRT

SEQ ID NO: 200510 - protein, 99 aa, Zea mays
  unsure (1)..(99): unsure at all Xaa locations
  Clone ID: MRT4577_114452C.1.pep
LQYPQNAIIFFTAHPLPLSYVXKKXDPYKSKIXKILSILSSNNYKNXITNPYILSYXSYFNQLNYSXPYTHHTIIXLSHKFLKNLLSYPITFFIQHIKT

SEQ ID NO: 200511 - protein, 69 aa, Zea mays
  unsure (1)..(69): unsure at all Xaa locations
  Clone ID: MRT4577_114453C.1.pep
XXFQIMPXEXGALCXQKLVQXWIHLVTLXAALPITYTRLQIIEVRXDTEQESERKLEVVRTESLTSGRR

SEQ ID NO: 200512 - protein, 83 aa, Zea mays
  Clone ID: MRT4577_114455C.1.pep
NSAATSGSTIGRIIHHGYAWHSSGSADRGWPNPVKIKLPKRGLVRTLRQARSENGISTSSVARSRYSEANRHRTTEHHVSCNR

SEQ ID NO: 200513 - protein, 133 aa, Zea mays
  unsure (1)..(133): unsure at all Xaa locations
  Clone ID: MRT4577_114456C.1.pep
MMRGDEYRYQQQQQHGPGGGAPHGLIMAVVAGLVVAGPLFLGDGGEAVTSAVADLLGPTGLLLLPVGPVLVIRVLSSVLGAAALAGALSLGGSPDSVHRVGGLXLCCALALALIAALLYYRSALFGGGGGDDE

SEQ ID NO: 200514 - protein, 59 aa, Zea mays
  Clone ID: MRT4577_114457C.1.pep
CIHVNLSNFHRSGPRNEAFNSQNLAINRNKQALWPIQVFKTCKPTTLAQTNSLGTDHGL

SEQ ID NO: 200515 - protein, 110 aa, Zea mays
  Clone ID: MRT4577_114458C.1.pep
ISLEKEIAKGGPCRNAAPILLNTGSGKCTDLQKMNGCPSENNCGDKGRDSASSSKSTPVKVSSFDGTCQSDGAQHHITENNTQGRSSPFKKMLDPIMKFKSPKSPSIMER

SEQ ID NO: 200516 - protein, 111 aa, Zea mays
  unsure (1)..(111): unsure at all Xaa locations
  Clone ID: MRT4577_114459C.1.pep
RPGPGRARRXIQRGLKRKPMGLIKKLRAAKKAATPGERPDVVKTHLRDMIIVPEMIGSVVGIYNGKTFNQVEIKPEMTGHYLGEFSITYKPVKHGRPGIGATHSSKFVPLK

SEQ ID NO: 200517 - protein, 62 aa, Zea mays
  Clone ID: MRT4577_11445C.1.pep
KLPLSLLTERYLTQFFYYTIHSSYTQITSIHIPIHYTTTNHYPLQTHSPYHYHPPPTISHHH

SEQ ID NO: 200518 - protein, 143 aa, Zea mays
  Clone ID: MRT4577_114460C.1.pep
EAKGDVVADTNFKSDAFRKVVTSGMPPSHVRDGPGFCSRKPVLGSATPSTGKRHPWTSPSPRLSPKKSPSTNVKPRPWDNAGYVHQLRCPDIPPKPSQRDIDVLAAVAAAKLCRMPPPPTGHHLAASTPLPQARVAAPRDDNS

SEQ ID NO: 200519 - protein, 100 aa, Zea mays
  unsure (1)..(100): unsure at all Xaa locations
  Clone ID: MRT4577_114461C.1.pep
TGLPYFNNSHRLSTKHALLNASLNILTIINNPTHAAIHYHLYKKPTHVTEKHHLIFNPLLCSYDIILLTIXLNIFQVNITTTYTHLFHPDSDYRLVNHYF

SEQ ID NO: 200520 - protein, 123 aa, Zea mays
  Clone ID: MRT4577_114462C.1.pep
SLSTRRREGHQNGARRGERRCTPGHAGPRRRQGPHYQTTARNPRTNRRTPRNSRRRKAKQAPTSPTAEHDHTKRNYDANDTGTGNNAEEEPPENRSAQDPRSGADRTGGKIPRRVDGQDIREG

SEQ ID NO: 200521 - protein, 154 aa, Zea mays
  unsure (1)..(154): unsure at all Xaa locations
  Clone ID: MRT4577_114463C.1.pep
MSQVLGLTKLAYSRVWHDVSASAPHDTLSTQPGVTPPSLGRLASRIGVLLMGKHKPIFDPSTDCGDYVVVTNCAALHXTGRKKWQKPYYRHTTRPGSLKTVTMDVLMEQHGGSEVLRKAVSGMLPKNRLRDKRLARLKAFEGDAHPYKQNLIRL

SEQ ID NO: 200522 - protein, 61 aa, Zea mays
  Clone ID: MRT4577_114464C.1.pep
VSGFRFHPTDEELVRFYLKRKIHQKSLPIELIRQLDIYKYDPWDLPSKLLCTSSPCTMFFS

SEQ ID NO: 200523 - protein, 90 aa, Zea mays
  Clone ID: MRT4577_114465C.1.pep
IEYLHASSILHHAGSPVVESVATNQGGSGSPVAWYTATGGLTSDRPGSSSGLASASAAGQELSPFQGHAHHRRVEFISYLVSIIVLNSRL

SEQ ID NO: 200524 - protein, 38 aa, Zea mays
  Clone ID: MRT4577_114466C.1.pep
QEQTCKCKTHVAHLVVVSSPSHFVPPHPPWTIQSTQGS

SEQ ID NO: 200525 - protein, 74 aa, Zea mays
  Clone ID: MRT4577_114467C.1.pep
CTNNGSQNILLPYAPWSFCKCCYRNHFPTCSQLYASFSHPYHGLVVNHFTSDHRHRDYFTCLTRSHKRLVIVTT

SEQ ID NO: 200526 - protein, 71 aa, Zea mays
  unsure (1)..(71): unsure at all Xaa locations
  Clone ID: MRT4577_114468C.1.pep
GQPKGPPTGXRRGGWDPTGRFPVKNYIVKEGQLASQYQCPRKMFLSRVGFFGEKLRGKNPCWGLALLYEKL

SEQ ID NO: 200527 - protein, 91 aa, Zea mays
  unsure (1)..(91): unsure at all Xaa locations
  Clone ID: MRT4577_114469C.1.pep
AHLXAAALLLFFAAMFKTKLNMFTRYQKKNAWRTQINNKQAGPRAKHTACSHGARPRRRKHKWNTNNEHWGIYKTCINIKEGSKIYLWNSP

SEQ ID NO: 200528 - protein, 183 aa, Zea mays
  unsure (1)..(183): unsure at all Xaa locations
  Clone ID: MRT4577_11446C.1.pep
MPHVTQWVPPREAKRQGETIAKGHKHYELMLKLQLGIRHAVGKQGPIVLDLKSSAFDPKEKVWTKFPPQGSKYTPPHNSCDFRWKDYCPQVFRTLRKLFKVDAGDYMLSLCGNEALRELSSPGKSGSFFYXTNDDRYMIKTMKKSEVKMLLKMLPAYYNHVRAFENTLVTKFFGLHCVKLAGA

SEQ ID NO: 200529 - protein, 150 aa, Zea mays
  unsure (1)..(150): unsure at all Xaa locations
  Clone ID: MRT4577_114470C.1.pep
HDETRPEEACASACEDTVKQTILLPXEDFTCMNTLSSSGPXCSAHATIWASSLICLSSTLPSQYKDHGKSIQILRWDNLXITRNGSLDTDPTIERSKNSCTKNHDCWILPNSIRLALYEQHGVWHSPRLLNCQVFHMNMNPCDHVLDPDT

SEQ ID NO: 200530 - protein, 81 aa, Zea mays
  unsure (1)..(81): unsure at all Xaa locations
  Clone ID: MRT4577_114471C.1.pep
CPRPCCRRRRRRCWSSPLARRRVSPCRXXRFRFRAXAVASXRFRLSSPGCXVARVPAGXAPAAAGSXVGAXXARXEAEGMR

SEQ ID NO: 200531 - protein, 121 aa, Zea mays
  unsure (1)..(121): unsure at all Xaa locations
  Clone ID: MRT4577_114472C.1.pep
MHTCVCLTSCARPLTSVRTNSVKERDPQNDKHPILNHPPKAYIPTMIKKVLIALEKLTKKPYTQPEKINXIHNLILHAYKDIYKTVNVGSIHMNTANHPKYPLAMHKNAIEILPGLYAPNS

SEQ ID NO: 200532 - protein, 88 aa, Zea mays
  Clone ID: MRT4577_114473C.1.pep
GRGWVPLPGDDERAPDVGAAHQRSAAERRQLHGANAALAPRARAAGASGTGPPSCTAPRATPGMTPTSRVPNAVDIRPLEPPHPNGHG

SEQ ID NO: 200533 - protein, 49 aa, Zea mays
  Clone ID: MRT4577_114474C.1.pep
HYFHHFMICLVLTSIASKFLADICQSDIQSAHDSLACSTNLPSSASRSC

SEQ ID NO: 200534 - protein, 187 aa, Zea mays
  unsure (1)..(187): unsure at all Xaa locations
  Clone ID: MRT4577_114475C.1.pep
MPTVLSTRRAASPETISLPSSRSSHSRTASPLHPVSRGNRALRLLAALRSPSAPRPRLRRRPGLPPARAGLAAAAAMPAPETKARILVAGGGIGGLVFALAARRKGFEVLVLERDVSAVRGEGRYRGPIQLQSNALAALEAVDAAAADEVMDAGCVTXDRVNGIVDGVSGSWDIKFDTFTPAAEXGL

SEQ ID NO: 200535 - protein, 124 aa, Zea mays
  unsure (1)..(124): unsure at all Xaa locations
  Clone ID: MRT4577_114476C.1.pep
GPFFFFFLEARRTIMNLFHILLNVIVGVVLCNVTAFPMDVMFELFSIFLFMAAILXGRLMVVSNLHESSTLPHLIFSHGLPGCRLLQTRRPRPAVPAPPALPRHAIAPVAAARWRRDPVVRWRR

SEQ ID NO: 200536 - protein, 125 aa, Zea mays
  unsure (1)..(125): unsure at all Xaa locations
  Clone ID: MRT4577_114477C.1.pep
RTIMNLFHILLNVIVGVVLCNVTAFPMDVMFELFSIFLFMAAILXGRLMVVSNLHESSTLPHLIFLSWPPRMQIVADQATAPSRTGSSRASSPRHCTWRRMELTVSRWRWMENGEGHVWAVQDNQ

SEQ ID NO: 200537 - protein, 38 aa, Zea mays
  unsure (1)..(38): unsure at all Xaa locations
  Clone ID: MRT4577_114478C.1.pep
SLVXEWASPFFGSLYGHFIADDYRKPICLIAVEATVSG

SEQ ID NO: 200538 - protein, 50 aa, Zea mays
  Clone ID: MRT4577_114479C.1.pep
RKCLWLEKLTYFMTYHSILCPNQHPIYLSCSLHPCSPSLLPHFWYNTVLL

SEQ ID NO: 200539 - protein, 155 aa, Zea mays
  unsure (1)..(155): unsure at all Xaa locations
  Clone ID: MRT4577_11447C.1.pep
ANIVPRFHQNVTASQKPTHPLKKKYSKWWYSHFSVLDGXVLSNXTIQSHCNATIFFLSFSNFIRXXWCAXPAXRCHHCESQACSXXWKHRLLXESTFWYASAGLXLHFTVPTGXECNWKVKALXLAXSIGSTAXCPRXNVSKVKRQAQRSIKNAM

SEQ ID NO: 200540 - protein, 41 aa, Zea mays
  Clone ID: MRT4577_114480C.1.pep
AMRLPHDLRADIQQAADNNGGIDEAIVVQTLNRRSYSRQRY

SEQ ID NO: 200541 - protein, 63 aa, Zea mays
  Clone ID: MRT4577_114481C.1.pep
QEEICDVVLARSPNPGCAEIEEFLDRARVPLTSNNGIKQQGVRYANPMAFFRKDPINDCRALL

SEQ ID NO: 200542 - protein, 103 aa, Zea mays
  unsure (1)..(103): unsure at all Xaa locations
  Clone ID: MRT4577_114482C.1.pep
GLGGGPRVPPRAGCSCPGGPGGFLWFPGPFPMRVAPGFFVFPRFSCFCFGFWGPGWGVPFLGGCPLGPRFDWPFSGWAGVFGSPPVGCFLXLFFFXXXFFXXS

SEQ ID NO: 200543 - protein, 112 aa, Zea mays
  unsure (1)..(112): unsure at all Xaa locations
  Clone ID: MRT4577_114483C.1.pep
LALXXXXSXXXRRRXXXPAXXGXXRFAGXXVXPVGSRRXAXRPARPXVXXXAFXLXXLXXXXLXLXXPRLLXXXLPSXXSSXXPLXCXXSXSXXXXRPVLFXXVXGRVGXPG

SEQ ID NO: 200544 - protein, 147 aa, Zea mays
  Clone ID: MRT4577_114484C.1.pep
PLPAQLHLAVEECLFFSFRMAWQDYTGGLYFSYPYLAYVFGAEDERIMAHRLALAAREVHRPLAVRLLALHWLLGSGMFKIWCLVSPIGFTLSCLFMPLYDGVAHRLPYHHINRGPSPYQSRNGSWLPLLDRQAVGGGLLLASFLSS

SEQ ID NO: 200545 - protein, 46 aa, Zea mays
  Clone ID: MRT4577_114485C.1.pep
FCCSSCGGAFLRGKRIPTLFSIGQKFVFFHESSNPKGLKFCQSQSI

SEQ ID NO: 200546 - protein, 170 aa, Zea mays
  unsure (1)..(170): unsure at all Xaa locations
  Clone ID: MRT4577_114486C.1.pep
HMSVPMPGLXASVHALXCVEHKRTIAKPXAGLSIYFPNTASHKRLSSLHPEIEELLYRPTDXAAHYSPLNHRNETIIFYMDRLDRANNMTALVELYTRXNKRLQELVKLVXTXPDHGNPSQGXDQQAELKKMFDLIXEQYNPERRTSAWISKHMNRVRNGXELYRYICDT

SEQ ID NO: 200547 - protein, 457 aa, Zea mays
  Clone ID: MRT4577_114487C.1.pep
MTSLSSAVALPSSCRARPAGGSRRARMVVTRAAASSPKLPNGRRLRVAVVGGGPAGGAAAEALAKGGVETVLIERKMDNCKPCGGAIPLCMVSEFDLPLDLVDRKVRKMKMISPSNVAVDIGRTLAPHEYIGMVRREVLDAYLRSRAQSVGAEVVNGLFLRYEAPKEPNGSYVVHYNHYDGSNGKVGGEKRSFEVDAIVGADGANSRVAKDMGAGDYEYAIAFQERVKIPDDKMVYYEERAEMYVGDDVSPDFYGWVFPKCDHVAVGTGTVTHKADIKKFQAATRLRAKDKIEGGKIIRVEAHPIPEHPRPKRVSGRVTLVGDAAGYVTKCSGEGIYFAAKSGRMCAEAIVAGSANGTRMVEESDLRKYLAEFDRLYWPTYKVLDILQKVFYRSNAAREAFVEMCADDYVQKMTFDSYLYKRVVPGNPLDDIKLAVNTIGSLVRATALRREMEKVTL

SEQ ID NO: 200548 - protein, 84 aa, Zea mays
  Clone ID: MRT4577_114488C.1.pep
MDALRPLVKPKIVKKRTKKFIRHQSDRYVKIKRNWRKPRGIDNRVRRRFKGQILMPNIGYGSNKNTKHMLPSGFRKFLVHNVKE

SEQ ID NO: 200549 - protein, 91 aa, Zea mays
  Clone ID: MRT4577_114489C.1.pep
LLTIFIIIPQLIHTVYHILNRESPIIFTLQLVWTVCYRYSIYYLSDSSDASIPYHSMSRHVMNKSRLNEQNDILPVSIYIARDKNNTRLQP

SEQ ID NO: 200550 - protein, 256 aa, Zea mays
  unsure (1)..(256): unsure at all Xaa locations
  Clone ID: MRT4577_11448C.1.pep
SRPAGPGLTTHAQFSLSTGRRRRCRALNPTPVCLLIQCKERPPLPVSXSPEMDGDEENVGPFRRTSARTRRMATRMASALASSDNRAQVAXADQLLCLKLFSFMFCCLIMETPLYLXAIQAALARLEALESDNGGVEVVDLNDDEYGSTDEEDPVLMQKKQSKIMKRKTRQGKALEKRAARSLMDVLQEANLESVPPHVPTYSRAAVGPPSTSSRRHYCSVCGSSATYTCVRCGTRFCSCRCQVIHNDTRCLKFVA

SEQ ID NO: 200551 - protein, 68 aa, Zea mays
  unsure (1)..(68): unsure at all Xaa locations
  Clone ID: MRT4577_114490C.1.pep
LTHVDGYKFLFKPDXMRGGVXVPTKDDLLFTHRIPSFQLTTEKGGELCGFYXLDPAAISDSFLSVGTH

SEQ ID NO: 200552 - protein, 74 aa, Zea mays
  Clone ID: MRT4577_114491C.1.pep
SACGRHHQVSGRAFPITVRGTYRPQWETCLPGHRVTVLVPRGCTVPDLGKQWGRVCRSGHGRTAQRPQVWSMVS

SEQ ID NO: 200553 - protein, 89 aa, Zea mays
  Clone ID: MRT4577_114492C.1.pep
DFFTTGTFLGYTKVLLEQYRATLGPSPLVRRFSFHCSTVLKRWLYDCLFGSLTCDAYRYNMGLPDPVVMVYCYGCLIGSQVLGIVLWDA

SEQ ID NO: 200554 - protein, 113 aa, Zea mays
  unsure (1)..(113): unsure at all Xaa locations
  Clone ID: MRT4577_114493C.1.pep
MAGSICAGMDSSNSARMAAPPPHLGGTIDQRNIIYPGYLNSHNTXVRDGRRVTAAYGCPDPSCLESPEXCPHHKIPRGNEMDTVHCHHDFQVDEVRXMLXKDYYSPVNPAILT

SEQ ID NO: 200555 - protein, 76 aa, Zea mays
  unsure (1)..(76): unsure at all Xaa locations
  Clone ID: MRT4577_114494C.1.pep
RRSSSAGDGEILLQRRFDERKGVIXRECNEATRDRPYGHCLVERLPKYPKKVVRKDSANKTENKPRVQRFIKLVNL

SEQ ID NO: 200556 - protein, 51 aa, Zea mays
  Clone ID: MRT4577_114495C.1.pep
ASSLHRLSQPSGHDTHTWLIRSRTLVFIPIRSCFWSCSSTDHREPSHYVDR

SEQ ID NO: 200557 - protein, 359 aa, Zea mays
  Clone ID: MRT4577_114496C.1.pep
MDKYEAVRDIGSGNFGVARLMRNRETRELVAVKLIERGHRIDENVYREIVNHRSLRHPNIIQFIEVILTPTHLAIVMEYAAGGELFDRIVDRGRFSEDETRYFFQQLICGVSYCHHMQICHRDLKLENVLLDGSPAPRLKICDFGYSKSSVLHSRPKSAVGTPAYIAPEVLSRREYDGKLADVWSCGVTLFVMLVGAYPFEDQDDPKNIRKTIQRIAAIQYNIPDNIRISDDCRQLISRIFVSNPLRRITMREIKSHPWFLKNLPRELTEAVQLSYFRRDNSVSAFSDQTTEEIMKIVKEARTLPKSSRSGYGYSEECSDEEEKEVESEPKEEEEEAECDKTVREVRESGELDMTSLHI

SEQ ID NO: 200558 - protein, 49 aa, Zea mays
  Clone ID: MRT4577_114497C.1.pep
LYPLKGAKPLGGAFLKEQKLVPNNQFFFKNPGLVREQPNVGGAIFLITN

SEQ ID NO: 200559 - protein, 56 aa, Zea mays
  Clone ID: MRT4577_114498C.1.pep
KLLNINGNFISGEGIDEVEEILKAGKKPLKVLGPLDENEPDGEPDDDDEEVEDNED

SEQ ID NO: 200560 - protein, 91 aa, Zea mays
  unsure (1)..(91): unsure at all Xaa locations
  Clone ID: MRT4577_114499C.1.pep
GHAAVGARCFAXAVANXPDFVLLNINGNFISDEGIDEVKEILKAGKKSLDVLGPLDENEPDGEPDDEDAADDEDELDLNLQSVKVEQDEDD

SEQ ID NO: 200561 - protein, 79 aa, Zea mays
  unsure (1)..(79): unsure at all Xaa locations
  Clone ID: MRT4577_11449C.1.pep
RERWYPWRDRARISGVDQPFRWVGPGSFLVTPXLLPFYQHVGLNVGTLXQLQQWLPLNQLAWTNPGVSYQQPIIGGALF

SEQ ID NO: 200562 - protein, 89 aa, Zea mays
  Clone ID: MRT4577_1144C.1.pep
SESYVSSWISRSASSFVHFRSDELCFLDYRYPVLVEYLWTHTQDDCAIVQRERKYHWLSQRYASHRNRERRSAVDHVMRRLDLGTGLKF

SEQ ID NO: 200563 - protein, 136 aa, Zea mays
  unsure (1)..(136): unsure at all Xaa locations
  Clone ID: MRT4577_114500C.1.pep
AQSTASPPAPPRTTRGAAAAAPPQGRPRRPAAPRPQAPXNSTTAAHSAAPDRCXEAVPPXAEAPPRAPSTTANPPAGERRGGRGSPAXAPPRTPEXPPPPLKPNLWRRGGVFIVRRGPNSRNMRRLYLHKLIPTAT

SEQ ID NO: 200564 - protein, 548 aa, Zea mays
  Clone ID: MRT4577_114501C.1.pep
MDSTQDFQPRTFSIKLWPPSESTRLMLVERMTKTMSTESIFSRKYGLLGKQEAHENAKRIEELCFASADEHFKNEPDGDGSSAVQLYAKESSKMMLEVLRKGPRTTAELEAPVDDTSLVSADAPRVLADTVLDISGGERAFIEADEAKELLSPLTKPGNSYKRICFSNRSFGIGAANVAGPILESVKNQLTEVDISDFVAGRPEDEALDVMRIFSKALEGSVLRYLNISDNALGEKGVRAFSELLKSQESLEELYVMNDGISEEAAKALSELIPATEKLKVLHFHNNMTGDEGAMYIAEMVKRSPNVESFRCSATRIGSDGGVALSEALGTCTRLKKLDLRDNLFGVDAGLALSKTLPKLPDLVELYLSDLNLENKGTIAIAKALEQSAPQLEVLEIAGNEINAKAAPDLAKCLAAMQSLKKLTLAENELKDDGAVIIAKSLEDGHIDLKELDVSVNMLQRVGARCFARAVANKPAFELLNINGNFISGEGIDEVEEILKAGKKPLKVLGPLDENEPDGEPDDDDEEVEDNEDELNSKLQSVKVEQDD

SEQ ID NO: 200565 - protein, 96 aa, Zea mays
  unsure (1)..(96): unsure at all Xaa locations
  Clone ID: MRT4577_114502C.1.pep
TKQRTKMALADEHDSLSLDFDHRQRQQSTAGRRLVVTRSGGPPSDRPHHDRADLHAPPAGGHLTKLPPSTAGAAATTTTCRLGAVAXGGEAQAEAS

SEQ ID NO: 200566 - protein, 541 aa, Zea mays
  Clone ID: MRT4577_114503C.1.pep
MDSAQDFQPRTFSIKLWPPSESTRIMLVDRMTNNLSTESIFSRKYRLLGKQEAHENAKTIEELCFALADEHFREEPDGDGSSAVQLYAKETSKMMLEVLKKGPRTTAELEAPVADTPLVSADTVLDISGGKRAFIEADEAKELLSPLTKPGNSYKRICFSNRSFGIGAANVAGPILESVKNQLTEVDISDFVAGRSEDEALDVMRIFSKALDGSVLRYLNISDNALGEKGVRAFSELLKSQESLEELYVMNDGISEEAAKALSELIPATEKLKVLHFHNNMTGDEGAMYIAEMVKRSPNVESFRCSATRIGSDGGVALSEALGTCTRLKKLDLRDNLFGVDAGLALSETLPKLPDLVELYLSDLNLENKGTIAIAKALKQSALQLEVLEIAGNEINAKAAPDLAECLAVMQSLKKLTLAENELKDNGAVIIAKSLEDGHSDLKELDVSTNMLQRVGARCFTRAVANKPDFVQLNINGNFISDEGVDEVKEILKAGKKSLDVLGPLDENEPDGEPDDEDAEDDEDELDLKLQSVKVEQDEDD

SEQ ID NO: 200567 - protein, 79 aa, Zea mays
  unsure (1)..(79): unsure at all Xaa locations
  Clone ID: MRT4577_114504C.1.pep
VQVPVAENNLRLLSYRVHATLLTESGGRLSSAGAAPLLRGGRRSAGEVVXGRLWGWNKKXGDETLGGGGGDGGRGSTRR

SEQ ID NO: 200568 - protein, 76 aa, Zea mays
  Clone ID: MRT4577_114505C.1.pep
RPYQCHFDIIRFYVALNDFDTLYMFTDLVCYILSQILSPPQDPRREVHGAGSHPSLLCSPMLAPFRLIWLQLTYRS

SEQ ID NO: 200569 - protein, 85 aa, Zea mays
  Clone ID: MRT4577_114506C.1.pep
ADAVTREIRLPDRERERGREPKTSGGRQARCYIGARPHRRATAGAHQTDEKTVEHHKEETPQKTPTEATPRHGPGQDQAKPKGDQ

SEQ ID NO: 200570 - protein, 71 aa, Zea mays
  Clone ID: MRT4577_114507C.1.pep
LGGTLDKSSYGGQVGLCFPYMILLLTCIVHAQHAIVIFIPNCVQAPHYGFLICVMVNPGGRVLWFCNRLGC

SEQ ID NO: 200571 - protein, 94 aa, Zea mays
  Clone ID: MRT4577_114508C.1.pep
DGSISPCEGAIQKEKRRTGEAKCEKGETPSDPPKKEKEETIILRPLNMTDLKEAKNQVAASFAAEGAIMSELRQWNELYGEGGSRKKQQLTYFL

SEQ ID NO: 200572 - protein, 95 aa, Zea mays
  Clone ID: MRT4577_114509C.1.pep
EPSSRRPPFFLGVFLRAFAVCPRQFTRKQETQSQSNASSASYTNLQYQPDLLRTDWAYRTRPMRNWHGGTGKRTQLNYSRPARVQKAKRYEEKSD

SEQ ID NO: 200573 - protein, 79 aa, Zea mays
  Clone ID: MRT4577_11450C.1.pep
QGCLGTVPECGGDDADVAAGLCRGIQGSPETSSFRPESFPCAPRIRLGRIGERNPNVIRQWQATTGELGSSAPKEGGQK

SEQ ID NO: 200574 - protein, 73 aa, Zea mays
  Clone ID: MRT4577_114510C.1.pep
MQPILGHVLWGTHTHTHTHTHTHTHTHTHTHTHTHIVWCWNKALHGKTGWFFFAVFVPEASRNGVSQRHIPCF

SEQ ID NO: 200575 - protein, 64 aa, Zea mays
  Clone ID: MRT4577_114511C.1.pep
TYIYIYIPPPPRRRAQQDPEKEHVMLLYKEPPTHVQMPPPPIIYPVVVYKAKITKHKTIGEAPP

SEQ ID NO: 200576 - protein, 61 aa, Zea mays
  unsure (1)..(61): unsure at all Xaa locations
  Clone ID: MRT4577_114512C.1.pep
HWYLEPAGSPSSPAARNPNAAASQVSRRHGLRFRVCAKRIVGGTRATTXLGRCRHIARTAH

SEQ ID NO: 200577 - protein, 90 aa, Zea mays
  Clone ID: MRT4577_114513C.1.pep
MLSASFPVVVCRIAIAVLIVSTLSSYAEARYYCYAPCKDCPNCSSWCKGKGYPKGGRCHPKDGGGDIVFCCCDRADVMKLLVSADANAIL

SEQ ID NO: 200578 - protein, 119 aa, Zea mays
  Clone ID: MRT4577_114514C.1.pep
PAGARPAKSRKQSRGEPAASNKSQPEKLIKLSPPPSERTSQPTPSPAARPPSPPRPPRSSSPSSPTTSTKRVRAYVRAHGRRWIRPPLPLQLPRSFLVTVAAVVDLEDVTCTAVSIYYY

SEQ ID NO: 200579 - protein, 40 aa, Zea mays
  Clone ID: MRT4577_114515C.1.pep
RAGVDPGLFRADLVTGDPEGKKSSCYSKLNCEGITSPWIP

SEQ ID NO: 200580 - protein, 130 aa, Zea mays
  unsure (1)..(130): unsure at all Xaa locations
  Clone ID: MRT4577_114516C.1.pep
QKMPLVRFIVRSNMRXQQLQQLVLANQGDYCXNSKMVPXSTLAGLNYGCYWRLLQLPFKLIAVAYLHGIICLKQVAGLXTXAYCRWRQLLPFTLLVGGSPDNLLXHPKLMPVYXHTVPNAVTLLQLRQLL

SEQ ID NO: 200581 - protein, 167 aa, Zea mays
  unsure (1)..(167): unsure at all Xaa locations
  Clone ID: MRT4577_114517C.1.pep
GREKESRGEPAASNKSQPEKLIKLSPPPSERTSQPTPSPRQSVADVPPPPQERDGDEEDPXPSSSSSPPRPPQCWPPPRPPPRAPQLPPSRPPAAARPPSPPRPPRSSSSSSTTTSTKRVRAYVRAHGRRWIRPPLPLQLPRSFLVTVAAVVDLEDVTCTAVSIYYY

SEQ ID NO: 200582 - protein, 47 aa, Zea mays
  Clone ID: MRT4577_114518C.1.pep
FRIGLGVRLEFYVGLLLDSFFCMVYLKVELNVCLRFVLFFWAMMVAD

SEQ ID NO: 200583 - protein, 200 aa, Zea mays
  unsure (1)..(200): unsure at all Xaa locations
  Clone ID: MRT4577_114519C.1.pep
SYGRLGPSRPAGSRKQSRGEPAASNKSQPEKLIKLSPPPSERTSQPTPSPRQSVADVPPPPQERDGDEEDPLRRPRRHRRLGTPXAGPPPRPPPRAPQLPPSRPPRLPLALALALPLAPPPRGPPPAAARPPSPPRPPRSSSPSSPTTSTKRVRAYVRAHGRRWIRPPLPLQLPRSFLVTVAAVVDLEDVTCTAVSIYYY

SEQ ID NO: 200584 - protein, 103 aa, Zea mays
  unsure (1)..(103): unsure at all Xaa locations
  Clone ID: MRT4577_11451C.1.pep
DNLSKENIPKVFLKKKRKKIGLHRXDFKNTIKKTLGGAGLSFLFPRVIIPAVIYGMSALSHPFQKSFFSFEVFSRKMGFLGDKGATLVQVYKNNEDLRLKLSY

SEQ ID NO: 200585 - protein, 186 aa, Zea mays
  Clone ID: MRT4577_114520C.1.pep
MYKFSFLLDCVCVSVCGLAPLLGCRPIKVRVESIYIVSHLLSIHFHITTWYQRIRVRASSHPTAATSSLPRSSRHWLQRRRPGRLIHPSRGGPSPQPAAAAPSRRLPWPSPPPLRWARPSRASISTRPVWPPSGTGVRARAAASQPRTRKRADVAATLGAPPRGGALPPQLRRGLAGRGLRPSVAQ

SEQ ID NO: 200586 - protein, 380 aa, Zea mays
  unsure (1)..(380): unsure at all Xaa locations
  Clone ID: MRT4577_114521C.1.pep
MLTKFETKSNRVKGLSFHPRRPWILASLHSGVIQMWDYRMGTLLDRFDEHDGPVRGVHFHATQPLFVSGGDDYKIKVWNYKTHRCLFTLHGHLDYIRTVQFHHEYPWIVRASDDQTIRIWNWQSRTCVAVLTGHNHYVMCAXFHSKEDLGVSAXLGQTVRVWDIGALKKXTVSPADDILRLTQKNTDLFGGVDAVVKXVLEGHDRGVNWASFHPTLPLIVSGADDRQVKLWRMNDTKAWEVDTLRGHVNNVSCVMFHAKQDIIVSNSEDKSIRIWDATKRTGIQTFRREHDRFWILAAHPEMNLLAAGHDSGMIVFKLERERPAFCVSGDTVFYVKDRFLRFFEYSTQKEVQVAPIRRPGSVSLNQSPRMLSYSPTEMLS

SEQ ID NO: 200587 - protein, 93 aa, Zea mays
  Clone ID: MRT4577_114522C.1.pep
APAPRSLMSQQPTAGAPSMLSDWGSPDGRLDWGVQGDELHKFRKSASFAFRGQSPAPAPAPAEPDVSWVNSLVKDGHAGDIFAQWSEQEQMVA

SEQ ID NO: 200588 - protein, 600 aa, Zea mays
  unsure (1)..(600): unsure at all Xaa locations
  Clone ID: MRT4577_114523C.1.pep
MCSGPRKPSTPPLPAATAKDSSAMAVLLELAAADDVVGFRRAVEGDKAPALDDAGHWYGPSAAAAGRLRLRLEARTPAMVAALYGSTAVLAYVLSAAPAEAARASPTDGATPLHLAAAGGAPGAVAAAHLLLAAGASADALAFSGLRAGDLLPRANAAADRDRALRVLLKSPAASPSSSPKKSASPPPPTAAAAAPEPRKEYPPDLTLPDLKSGLFSTDEFRMYSFKVKPCSRAYSHDWTECPFVHPGENARRRDPRRFSYSCVPCPEFRKGGACRKGDNCEYAHGVFECWLHPAQYRTRLCKDEVGCARRICFFAHKPEELRAVNPSAVSVGMQPTVSSPRSSPPNGLDMGXPCSTRPGPPPRPAGSRLRSPPAGSWTWTSSCSRSTSTSRSCSTRCRRRGPAGEAGWARRCPPRRPAPGPCRTTRTXGSVDPAMLSQLHALSLKQAGDMPAYSSMADTQLHMPASPMVGPNSAFGLDHSMAKAIMSSRASAFAKRSQSFIDRGGRAPAARSLMSQQPTAGAPSMLSDWGSPDGRLDWGVQGDELHKFRKSASFAFRGQSPAPAPAPAEPDVSWVNSLVKDGHAGDIFAQWPEQEQMVA

SEQ ID NO: 200589 - protein, 73 aa, Zea mays
  Clone ID: MRT4577_114524C.1.pep
RRPLRVRQPETARVIRRDFGGHRRQRRAVRIEQPALDEHLRVGRRAVAEPRKAVAIAEPQLVVEQPTALAIEP

SEQ ID NO: 200590 - protein, 83 aa, Zea mays
  Clone ID: MRT4577_114525C.1.pep
SQITPVLRGGPSPLNPFTTEKPHPLVCSPPGGQYPNLKSSIRCFTFPRSVKPRTIRPLRLNMRPCVGTRPTRGRGWKPRADLA

SEQ ID NO: 200591 - protein, 63 aa, Zea mays
  Clone ID: MRT4577_114526C.1.pep
FLPSKGKWGTMGGPGPIFRGPFFINLKIQWDFFLDRKRSFLGPFQKKIKLELVKVLKETLCML

SEQ ID NO: 200592 - protein, 606 aa, Zea mays
  unsure (1)..(606): unsure at all Xaa locations
  Clone ID: MRT4577_114527C.1.pep
MDLLSIILVIASLLPFAASDGQGDALYDMKLKLNATGSQLSDWNQNQVNPCTWNSVICDNNNHVVQVTLASMGFTGVLSPRIGDLEYLNVLSLPGNNISGGIPEEFGNLSRLTSLDLEDNLLVGPIPASLGRLSKLQLLILSQNNLNGSIPDTLASILSLTDIRLAYNKLTGQIPSQLFQVARYNFSGNNLTCGANFLHPCASNMSYQGSSRGSTIGIVLGTVGGLMGLLIIWAVFIICNGRRKSHLREIFVDVSGEDDRRIAFGQLKRFAWRELQLATDNFSEKNVLGQGGFGKVYKGALPDGTKIAVKRLTDYESPGGEAAFLREVELISVAVHRNLLRLIGFCTTQTERLLVYPFMQNLSVAYRLREFKPGEPILDWSARKRVAIGTARGLEYLHEHCNPKIIHRDVKAANVLLDEGFEPVVGDFGLAKLVDVQKTAVTPHSQXSMGHIAPXEYLSTGKSSERTDVFGYGIMLLELVTGQRAIDFSRLEEEDDVLLLDHVKKLQREGHLDAIVDRNLNSCYNGQEVEMMIQIALLCTQASPEDRPSMSEVVRMLEGEGLAERWEEWQQVEVTRRQDYERMQQRFDWGEDSIYNQDAIELSAGR

SEQ ID NO: 200593 - protein, 81 aa, Zea mays
  Clone ID: MRT4577_114528C.1.pep
PGQLPEGPKKGVKHGLVLLLHPLPPSSSWCYCYIHCPPAVASQVRQSKNQLVGFSPSAQLNRQEMAINPCVTRLEMNATSS

SEQ ID NO: 200594 - protein, 119 aa, Zea mays
  Clone ID: MRT4577_114529C.1.pep
MSRSVALAVLALLSLSGLEAIQRTPKIQVYSRHPAENGKSNFLNCYVSGFHPSDIEVDLLKNGERIEKVEHSDLSFSKDWSFYLLYYTEFTPTEKDEYACRVNHVTLSQPKIVKWDRDM

SEQ ID NO: 200595 - protein, 88 aa, Zea mays
  unsure (1)..(88): unsure at all Xaa locations
  Clone ID: MRT4577_11452C.1.pep
EAGFHLFXSLTXXGSPGLRHLLELTLYHXNPHTGNIFAMQDYRIDYVDXQNVDALSQQNKQILIDTLAHACNKHYSEMANDFTWFAFL

SEQ ID NO: 200596 - protein, 91 aa, Zea mays
  unsure (1)..(91): unsure at all Xaa locations
  Clone ID: MRT4577_114530C.1.pep
FRDPHLSASPXFNRPQVPACNMKLKSAQSLELPGGLALQGAPFFFPKPASDGHGIPKEVEPFVSRGFVGPFRFSAKALFKRRPYLLEMNGF

SEQ ID NO: 200597 - protein, 72 aa, Zea mays
  Clone ID: MRT4577_114531C.1.pep
YLFLNTTGVYPPQGIYHQSPHLRFPRIPNQIIFTSKPASPPMVYPPTHHHDFRQQNKGAGELHYDLIRSHTN

SEQ ID NO: 200598 - protein, 121 aa, Zea mays
  unsure (1)..(121): unsure at all Xaa locations
  Clone ID: MRT4577_114532C.1.pep
ALIYHTFAFIKSGTLREIRAVNRVPVHXVXPLDHLVMATTAKLQGEAQADXSCLYLLNAQRSAAXICTVSFYSMAAMDPHKFVELPCGLSHAGRPFVRVVRPAISNGFELSAVPDVRKEKR

SEQ ID NO: 200599 - protein, 116 aa, Zea mays
  Clone ID: MRT4577_114533C.1.pep
GAGDLQPVGLGRGLGRCSVGLRRRAVLGTGGALVIMGGGEVFFLWPFVSLLLRFVSLFGRSQLMFGGVCSRAKQLFLWWALFFHKSSFFFFLFCFWRVVVCPRRYFVCLKFFWWSR

SEQ ID NO: 200600 - protein, 46 aa, Zea mays
  Clone ID: MRT4577_114534C.1.pep
RLVFDYLWLNHKGNWKVNKIKGYLIGYIIENDRQDKGGNDQYVELK

SEQ ID NO: 200601 - protein, 248 aa, Zea mays
  Clone ID: MRT4577_114535C.1.pep
MECLLQQLHEVFETPSGLPPARCCDHRIHLLPGTSPVAVRPYKYPQLQKDELEAQCKAMLQQGIIRHSTLAFSAQGARFFTKLDLRSGYHQVRVHPDDVHKTDFRTHHGHFEFLVMPFGLSNAPATFQALINEVLGQFLQRFVLVFFDDILIYSASWSDHLIHVKVVLESLKANKLFTNQSKCSFGTSTVTYLGHVISAEEVTMDSVKVEVVPSWPQPQAPRGLRGFLGLAGFYRKFIKGFGVIVKVA

SEQ ID NO: 200602 - protein, 83 aa, Zea mays
  Clone ID: MRT4577_114536C.1.pep
PKFYRRFGKEFKKDPNFLKNVYLGMVKMVPPKPLVVEPFFKNPPFGRFPARKIRQTVVVGFFKSVEKKVPLGPRVPKAPPKKK

SEQ ID NO: 200603 - protein, 48 aa, Zea mays
  Clone ID: MRT4577_114537C.1.pep
PPQFYMFIPMGPLLVFASSHATNFPGHSLTPLCLGSTLKIGYTELDFP

SEQ ID NO: 200604 - protein, 63 aa, Zea mays
  Clone ID: MRT4577_114538C.1.pep
EALNAQPIKPSKGVNNFFYKPGDATQTARTGGPNTERLLLAPGRRRSEENKLRRPFGPTNPEK

SEQ ID NO: 200605 - protein, 77 aa, Zea mays
  Clone ID: MRT4577_114539C.1.pep
IRLEQILCFFTPRAGRMTAGTLHAVTGCNKVEASLCRFLMNALVQKIYEMTEGLTVVHRKSYRFYGNIETAENGILN

SEQ ID NO: 200606 - protein, 112 aa, Zea mays
  unsure (1)..(112): unsure at all Xaa locations
  Clone ID: MRT4577_11453C.1.pep
LSYLGIYLVLCPSSEVIVXADTIRIWDLRAHRLXPLRGPNRLDLSMLKKDIQPWQELRSSXYMTHAPLSSLNSLGDLATXINADNYICPITWLSTSHFVLRFIYFVVHLWHS

SEQ ID NO: 200607 - protein, 103 aa, Zea mays
  Clone ID: MRT4577_114540C.1.pep
WRLAYSSSDTKLVPATTPTPSRLTVLARPTPTTITTRQLPPPDTSPAPAPSLPDTQVLHAASYPTGASVRWNHNPDHCRHHGRRNLKYLHRHTHSRRWHVDRH

SEQ ID NO: 200608 - protein, 83 aa, Zea mays
  Clone ID: MRT4577_114541C.1.pep
VNKSPYVSLTEVKCVKDLSCNNIGNKTLSMQLLSKTNPTKENTLKGMLADLGIKVKVINVQILKFCIRAYYNFIFRPAFYFPS

SEQ ID NO: 200609 - protein, 62 aa, Zea mays
  Clone ID: MRT4577_114542C.1.pep
ARYTFKVVYLLCSWDLNNPSYNNRLGSLCAGKELAPVQNKMGSRLGSLCAGKELAPVQNKMG

SEQ ID NO: 200610 - protein, 174 aa, Zea mays
  Clone ID: MRT4577_114543C.1.pep
PFFLPVFSPRQQASPMAQQQIPCSELLPHAGSGHHFFTCAGSPSPIPCGGRTTVVSLGAQLLGADPSMAEDAQARSALSSPLLLWLLIFPDAVGLLQRWPLSSSTPPAAMDAQAGKRWNSRSLWFGWSSAFPCAQPPQLGALAVGEQQLPIHGATAIFPFLLPPFCFLISLGCQ

SEQ ID NO: 200611 - protein, 123 aa, Zea mays
  unsure (1)..(123): unsure at all Xaa locations
  Clone ID: MRT4577_114544C.1.pep
MATAATTGDAPFPIEDRDNVELFTLTYGDIVRKLLTDLEEAEEVNKQLDHMCYNMGTRLDAEPPAKTNASRCADFEETXAHAIAKLDSKMFLRATATATNCHAEDXSCSLGLEDHPLPDFAEI

SEQ ID NO: 200612 - protein, 70 aa, Zea mays
  Clone ID: MRT4577_114545C.1.pep
TGGKEGAPPVGTSPPAKGKAPANNGQSTGEFPKFGGAVPCQSCRQAFHSGMGLQGPFQGKHGGQLVAGPT

SEQ ID NO: 200613 - protein, 388 aa, Zea mays
  unsure (1)..(388): unsure at all Xaa locations
  Clone ID: MRT4577_114546C.1.pep
DILQAQTVYGALHALETFSQLCSFDFNANLIELHSAPWTILDAPRFPYRGLLIDTSRHYLPVPVIKGVIDSMTFSKLNVLHWHIVDEQSFPLEISSYPKLWNGAYSYSERYTVDDALDIVQYAEKRGVNVLAEIDVPGHALSWGVGYPSLWPSATCKEPLDVSNEFTFQLINGILSDFSKIFKFKFVHLGGDEVNTXLMQHSMNESDAYRYFVLRAQKIAISHGYDIINWEETFNNFGDKLDRKTVVHNWLGSGVAEKVVAAGLRCIVSNQDKWYLDHLDATWEGFYTNEPLTNIYNPEQQKLVLGGEVCMWGEHIDASDIQQTIWPRAAAAAERLWTPIEKLAKDTRSVTARLARFRCLLNQRGVAAAPLAGYGRSAPSEPGSCLRQ

SEQ ID NO: 200614 - protein, 47 aa, Zea mays
  Clone ID: MRT4577_114547C.1.pep
CPHDNLVWSIPCWIIVCGSSIKFHISREIVYHYSQAVIDIIIAWSVT

SEQ ID NO: 200615 - protein, 476 aa, Zea mays
  unsure (1)..(476): unsure at all Xaa locations
  Clone ID: MRT4577_114548C.1.pep
MAAALRPRLLVLLAVAAAATGPSCAGAGRVDLWPMPASVARGAQTLLVSKDLRLSTAGSSYPDGKGILTEAFRRMVAVVELDHAINGTYSRGAPVLAGVHVAVRSPNDELNFGVDESYRLSVPATGDPLYAQXVEAQTVYGALHALETFSQLCSFDFNANLIELHSAPWTILDAPRFPYRGLLIDTSRHYLPVPVIKGVIDSMTFSKLNQLMMHSTAYSTSEXRGVNVLAEIDVPGHALSWGVGYPSLWPSATCKEPLDVSNEFTFQLINGILSDFSKIFKFKFVHLGGDEVNTSCWSTTPHIKSWLMQHSMNESDAYRYFVLRAQKIAISHGYDIINWEETFNNFGDKLDRKTVVHNWLGSGVAEKVVAAGLRCIVSNQDKWYLDHLDATWEGFYTNEPLTNIYNPEQQKLVLGGEVCMWGEHIDASDIQQTIWPRAAAAAERLWTPIEKLAKDTRSVTARLARLRCLLNQRGXA

SEQ ID NO: 200616 - protein, 48 aa, Zea mays
  Clone ID: MRT4577_114549C.1.pep
WCPYYRMCFLEIINLLLEIHLNIFLTKLKQLAMENPAVYLQQQQTDFI

SEQ ID NO: 200617 - protein, 100 aa, Zea mays
  unsure (1)..(100): unsure at all Xaa locations
  Clone ID: MRT4577_11454C.1.pep
LIIIFFFFFFLQREHTVASLFIQVEQSGSAQSFYFFFYDDYYYCMVGGGGFLXNSXFTFXGGGGPSFYWGRAFPCRSHGFILDAVPSHVRVGPGSSRCCW

SEQ ID NO: 200618 - protein, 107 aa, Zea mays
  unsure (1)..(107): unsure at all Xaa locations
  Clone ID: MRT4577_114550C.1.pep
PTRPFYTNEPLTNIYNPEQQKLVLGGEVCMWGEHIDASDIQQTIWPRAAAAAERLWTPIEKLAKDTRSVTAXLARFRCLLNQRGVAAAPLAGYGRSEPAEPGICLWH

SEQ ID NO: 200619 - protein, 279 aa, Zea mays
  Clone ID: MRT4577_114551C.1.pep
RPVRYAQIEAQTVYGALHALETFSGLCSFDFNANLIELHSAPWTILDAPRFPYRGLLIDTSRHYLPVPVIKGVIDSMTFSKLNVLHWHIVDEQSFPLEISSYPKLWNGAYSYSERYTVDDALDIVQYAEKRGVNVLAEIDVPGHALSWGVGYPSLWPSATCKEPLDVSNEFTFQLINGILSDFSKIFKFKFVHLGGDEVNTSCWSTTPHIKSWLMQHSMNESDAYRYFVLRAQKIAISHGYDIINWEETFNNFGDKLDRKTVVHNWLGSGHRKQPDKCT

SEQ ID NO: 200620 - protein, 118 aa, Zea mays
  Clone ID: MRT4577_114552C.1.pep
APSAENGHSPGTEAESGRAKVVLPVYPRVFVVSQVPRQVQALIHTVRRVTNLVLSLHAAIVMTRRPAPRTAPEDAQCGTSCDRSSAAPRRGSTDTTSGCDVRRREEHKRSGEQATSVW

SEQ ID NO: 200621 - protein, 71 aa, Zea mays
  unsure (1)..(71): unsure at all Xaa locations
  Clone ID: MRT4577_114553C.1.pep
WSVVLRSCFSPAPKTGSFWFPTRIHPSETMLARCFXKFCHKSSSTDXPSQSLELSCDPXWLLSILCCVEEK

SEQ ID NO: 200622 - protein, 446 aa, Zea mays
  Clone ID: MRT4577_114554C.1.pep
MREILHIQGGQCGNQIGAKFWEVVCAEHGIDATGRYGGDSDLQLERVNVYYNEASCGRFVPRAVLMDLEPGTMDSVRSGPYGHIFRPDNFVFGQSGAGNNWAKGHYTEGAELIDSVLDVVRKEAENCDCLQGFQVCHSLGGGTGSGMGTLLISKIREEYPDRMMLTFSVFPSPKVSDTVVEPYNATLSVHQLVENADECMVLDNEALYDICFRTLKLTTPSFGDLNHLISATMSGVTCCLRFPGQLNSDLRKLAVNLIPFPRLHFFMVGFAPLTSRGSQQYRALTVPELTQQMWDAKNMMCAADPRHGRYLTASAMFRGKMSTKEVDEQMLNVQNKNSSYFVEWIPNNVKSTVCDIPPTGLKMASTFIGNSTSIQEMFRRVSEQFTAMFRRKAFLHWYTGEGMDEMEFTEAESNMNDLVSEYQQYQDATADEEGEYEDEEEGDLQD

SEQ ID NO: 200623 - protein, 143 aa, Zea mays
  unsure (1)..(143): unsure at all Xaa locations
  Clone ID: MRT4577_114555C.1.pep
IPKYLGXKPGGFFPAHFKKKVFIPPPGAPPQGQLFKGKGLFKLLGPPKKGSPQTQGXPAKAPPSKTPAPQPGKGPPPQSKKGTGSQPKKAPFFGAQPQGPQKKVVGKPKKFPPPQGQGQPKTVKFPPPQKGRKAPPLKGVLLG

SEQ ID NO: 200624 - protein, 446 aa, Zea mays; identical to SEQ ID NO: 200622
  Clone ID: MRT4577_114556C.1.pep

SEQ ID NO: 200625 - protein, 88 aa, Zea mays
  unsure (1)..(88): unsure at all Xaa locations
  Clone ID: MRT4577_114557C.1.pep
EKSKNXKDXNGXDRDDDRPEPGEDTHKXGXXKXRDQERXXXTRQAGXGHAPXXXKAXARDKGGXXXPNXNSXGAGXXXNEKXKAPTXN

SEQ ID NO: 200626 - protein, 278 aa, Zea mays
  unsure (1)..(278): unsure at all Xaa locations
  Clone ID: MRT4577_114558C.1.pep
IGYLEAGRVLXSPEYPWLYAIPAVLFGGGYVAAVSTGMAGLVQAGYLVSSVLCVASLSGLASQVTARRGNLLGILGVMSGIIASLAAVGFTPDVLTQFAGVAAIGTIAGLAIGRRITPTSLPQTVAALHSVVGLAAVLTSIGSVVGHTGDISTLHLVSAYLGVLIGGVTFTGSIVAFLKLAAKMSSKPLVLPGRHLVNGTLLGANFATLGAFLAYAPGAPIIGAACLLGNAVLSFTKGYTTTAAIGGADMPVVITVLNAYSGFALVAEGFMLDNSLLT

SEQ ID NO: 200627 - protein, 111 aa, Zea mays
  Clone ID: MRT4577_114559C.1.pep
TCSRSQFLSLYNQYIIDVQVISLERRIVRASSSSHSGAFTRVLKQIIVRTFQYVLCRMNSSLLYQSTLTLILSQGLSQSPLVSHSVIPAPKMISCRGEVMAAVQHIVFGCA

SEQ ID NO: 200628 - protein, 152 aa, Zea mays
  Clone ID: MRT4577_11455C.1.pep
MAPKAEKKPAAKKPAEEEPAAPAEKAPAGKKPKAEKRLPAGKSAGKEGGVDKKGRKKAKKSVETYKIYIFKVLKQVHPDIGISSKAMSIMNSFINDIFEKLAGEAAKLARYNKKPTITSREIQTSVRLVLPGELAKHAVSEGTKAVTKFTSS

SEQ ID NO: 200629 - protein, 79 aa, Zea mays
  Clone ID: MRT4577_114560C.1.pep
DLSVIREYRNKGRVPPNRHRLDRGKWDVHYGHNKHGGRHDGEEHKAPIPAQCDRKAQLYLQASSRDQRLNNVFDLKGVL

SEQ ID NO: 200630 - protein, 41 aa, Zea mays
  Clone ID: MRT4577_114561C.1.pep
IQILCQFILNLYCEIKSTNLRSIITYMLFIFYTLYSFSPYF

SEQ ID NO: 200631 - protein, 301 aa, Zea mays
  Clone ID: MRT4577_114562C.1.pep
MAFTRRHPCGILLLSLLAASGSLSLAATGPGDVAVFWGRNKDEGTLREACDTGTYTTVIISFLRGFGHGAAYYSLDLSGHPLAGVGADVKHCQAKGILVLLSIGGPPNTNTGAGAGYSLPSARAAADLAAYLWDAYLGGSRAGLRRPFGDAALDGVDLYIDQGGVDGHYDELARRLYAYNRSYRGRLGVTLTATVRCAYPDPRAQAALATGLVSRVHVRLYGDLKCTWSDREAWEKWAAAYPASRVFVGVVASPEADKDAYMFQKDLYYNVLQFAQKAPNYGGLMIWDRYYDKMNHYISSS

SEQ ID NO: 200632 - protein, 58 aa, Zea mays
  Clone ID: MRT4577_114563C.1.pep
IVFEGRDLIAGAHTGAGMTLDFGIPKIKHLIEQDNGRIPRSGRTTRVMVLARTRELAK

SEQ ID NO: 200633 - protein, 95 aa, Zea mays
  Clone ID: MRT4577_114564C.1.pep
EAKGTNKSPLLALLALFLIATNAFIIPQCSLAPSAIIPQFLQTVTSMGLEHLPVQANMQQQALATSVLQQPIAQLQQQSLPHLTIQTITTQHQQQ

SEQ ID NO: 200634 - protein, 183 aa, Zea mays
  unsure (1)..(183): unsure at all Xaa locations
  Clone ID: MRT4577_114565C.1.pep
APSPMAPPXTPSRPPLPSSRAPSSLPGSXRPSPXPSLPWREAPTPISLPAPSHGGRRPPXPCCCSPCLDEKQPXPPCPWRGAAAPIPRRHPPRRRPWRPCEPPCPWPXPCALPAQRXAPPLPQRPLSPMAEQQLCSPPPPSFSLAQQQEAPARSLGVQLRCAAVPIQNSSPESPASRARSICA

SEQ ID NO: 200635 - protein, 52 aa, Zea mays
  Clone ID: MRT4577_114566C.1.pep
ERCKLQAQHVMQYLLSTYVKLNLSEKFLLHIIIKDSQLFHDLLVYQSQSVCQ

SEQ ID NO: 200636 - protein, 137 aa, Zea mays
  Clone ID: MRT4577_114567C.1.pep
MEYVTFPGLPADAQPPPPPAPRAGRAAAATATVSVPAAAPAAPAPRQRDRRRRSARPPPAAMERSTAQKKKKPLERATPLPPAPVVTEALDDLEQEVARNFVEDLLHVLAPPPSSLPLPRFSVVVKASPAKDARLVA

SEQ ID NO: 200637 - protein, 150 aa, Zea mays
  unsure (1)..(150): unsure at all Xaa locations
  Clone ID: MRT4577_114568C.1.pep
MVDQLTDDQIAKFKEAFTLFDKDGDGCITTKELGTDMRSLGQTPTEAELQDMINEDDADGKGTIEFAEFXLDRMARKMKDTDSEEELRXAYRVIDKDQNDFVSXGELRRVMTNLGENLTDDEVDEMIREADVDGDGQSNYDEXVKVMMAK

SEQ ID NO: 200638 - protein, 75 aa, Zea mays
  Clone ID: MRT4577_114569C.1.pep
YELQTAAHHHQHGHEADSIPVWLWLSPRARTRAGLASRASARATPRHRHLSLPCDALWGSPARLNWPVGMRERLQ

SEQ ID NO: 200639 - protein, 84 aa, Zea mays
  Clone ID: MRT4577_11456C.1.pep
PKQSLPRAGSDKLFTTNGLLKPSNPRGFPGRMSLEGGNRPWPKNEGTVELNMSYTPLNSPSPTGRVLDVAKPHDCWHGARGKLP

SEQ ID NO: 200640 - protein, 87 aa, Zea mays
  Clone ID: MRT4577_114570C.1.pep
HTIDNSVELVKSIDPGHDLVFCDIYIALFSVILDNNRCRHETSTHFGICHPCCSTPQICHHSKKCTPSLTSYPSPYATADLASSTLH

SEQ ID NO: 200641 - protein, 153 aa, Zea mays
  Clone ID: MRT4577_114571C.1.pep
MPRQTRSSARPAARPSAPAPQQQSRGAHTQAAPPPAYAQQAHPPAHAPAAPSAGGGMFANMASTAAGVAVGSTMGHGLSNMLFGGGGSSQQEVAAPVTPQEQSQFVQATNVGGKCDIQAKDFVSCLNATGNDTQSCSYYLDMLKQCQSAAAPY

SEQ ID NO: 200642 - protein, 137 aa, Zea mays
  Clone ID: MRT4577_114572C.1.pep
KSERGREKNKQKENEGVPLPCPIRAHPPTHWECAGAEKQGRATKFFPPLVFSLRKSGFLSGGLVNVVPKKGGHGGPNNGGCNRGGTLGGGRSRPLRGQRHGGRGGNKDGPSNFFHLHPWMRGFISHRKHRGGGMGWR

SEQ ID NO: 200643 - protein, 69 aa, Zea mays
  Clone ID: MRT4577_114573C.1.pep
QCLLNPATCLLVGSNQYQPNRAGPRHISEHLAVRVPSNANQMPSVTGRIHADRMSQRAKWGATQCHTTY

SEQ ID NO: 200644 - protein, 74 aa, Zea mays
  Clone ID: MRT4577_114574C.1.pep
LWQSAPWEKGGILIRTTKGAQTSYRAIWPGDDEGMRFRVSVTKNMGLSAPLRTFWGPPGFTRLFTFSTYSWNFF

SEQ ID NO: 200645 - protein, 45 aa, Zea mays
  unsure (1)..(45): unsure at all Xaa locations
  Clone ID: MRT4577_114575C.1.pep
DHLSSLQANTPMSHDVPPKSMDTRCSGCQLGDGRSDEAGTSAXXI

SEQ ID NO: 200646 - protein, 93 aa, Zea mays
  Clone ID: MRT4577_114576C.1.pep
EKRTGKAAAKPPQQRSRRPRCRESTMGQTGCAKMGRSIATALKFNYGNTKKGHVMQEQGSGETKALTHPPLCKTYGHLLYFYFTLYYIFSPSP

SEQ ID NO: 200647 - protein, 65 aa, Zea mays
  Clone ID: MRT4577_114577C.1.pep
KKKEKTFYMVNFFGIIIWVFINLIELKNGGPVGKIPTQFVHAKWGGGCPQNWGFPWGFFWGHHGG

SEQ ID NO: 200648 - protein, 54 aa, Zea mays
  Clone ID: MRT4577_114578C.1.pep
TKMLYRPRGYSPCQRYLSSIDTSCKDEYSLTSEDSPLIDFYYSITIPITERYCL

SEQ ID NO: 200649 - protein, 58 aa, Zea mays
  Clone ID: MRT4577_114579C.1.pep
VATFGQAKVSGRVIGLIFRGKRPWLSKTYTLTLSHKTPNQDAVLEMVALVKIKNQLLL

SEQ ID NO: 200650 - protein, 82 aa, Zea mays
  Clone ID: MRT4577_11457C.1.pep
ATRISVASRPSTSNLSPFCQYPPLGADPSLSQYHAEGVAFQTTTAEERLASAAPVGDSTASSMAFRPRDLTRSASSLGESGF

SEQ ID NO: 200651 - protein, 86 aa, Zea mays
  unsure (1)..(86): unsure at all Xaa locations
  Clone ID: MRT4577_114580C.1.pep
GARRPGTGRAGAGAAVSGEPXVIVSSSTFGPPTRVAPRSRPRLRGFHPSIHTXAARLRRPIPAASSIVTHPKSPRRGGPAHPTPPR

SEQ ID NO: 200652 - protein, 49 aa, Zea mays
  Clone ID: MRT4577_114581C.1.pep
TRTRPKHTIDASCSTLCYLPTCIGHSTSPYISDMHAHYGHLNCRYLCTW

SEQ ID NO: 200653 - protein, 74 aa, Zea mays
  Clone ID: MRT4577_114582C.1.pep
VLVPQLFKMEYVSMWMWVEKFNRTRRSVEIQPDVLVYQSVCYNRYFTAHYQSPQHMICLWRKLHSSSARCYNAT

SEQ ID NO: 200654 - protein, 54 aa, Zea mays
  Clone ID: MRT4577_114583C.1.pep
MWTGSPLLRDVGAAVLTGVGAAAVLRFWEEIANRALLDQVTLFLCFFPQFLCSV

SEQ ID NO: 200655 - protein, 399 aa, Zea mays
  unsure (1)..(399): unsure at all Xaa locations
  Clone ID: MRT4577_114584C.1.pep
MATTGSPSRTALPSSPPAPSSCKLAAACCFVLIVPILLTDEHVAVAESLSIGVNYGQIANNLPSPAQVSWLLRSMRVSKVKLYDAGPNVLRAFLGTGVEFVVGIGNEYVPAMVSPAXRPFRSGARITCVTVGNEVFKGNDTALQAAVLPAMQSVHRALGALGLQGRINVTTAHSLDVMGVSFPPSAGAFAPAALAHLQPFLSFLSATRSPFLINCYPYFAYKDDPGXVPLDYVLFRXRPNAGVADARTGLRYDNMLYAQVXDAVYAAIQGLGYTDVEVKVSETGWPSRGDADEPGATPEYAGTYIRNLLQRIEMKQGTPLRPATPVDVYVFALFNENLKPGPASERNYGLFYPDGTPVYNVGLHGYLPPMLVSSTAARQLIRYFALVAIASVAYSSVLS

SEQ ID NO: 200656 - protein, 275 aa, Zea mays
  unsure (1)..(275): unsure at all Xaa locations
  Clone ID: MRT4577_114585C.1.pep
MATTGSPSRTALPSSPPAPSSCKLAAACCFVLIVPILLTDEHVAVAESLSIGVNYGQIANNLPSPAQVSWLLRSMRVSKVKLYDAGPNVLRAFLGTGVEFVVGIGNEYVPAMVSPAAAQAWLQQHVVPYLRSGARITCVTVGNEVFKGNDTALQAAVLPAMQSVHRALGALGLQGRINVTTAHSLDVMGVSFPPSAGAFAPAALAHLQPFLSFLSXTRSPFLINCYPYFAYKDDPGXVPLDYVLFRXRPHAGVADARTGLRYDNMLYXASVDAVY

SEQ ID NO: 200657 - protein, 111 aa, Zea mays
  Clone ID: MRT4577_114586C.1.pep
MPTRAPTMAGKILRLVMLLGAAAGAVTATSLQDCLHAPIASLLSPYLSPAGDYACENPFLIPHAIPHAITAGIPPLLPLLLQQSPDLPHEHPLAHLLAQNIMAQHLLQLVV

SEQ ID NO: 200658 - protein, 57 aa, Zea mays
  Clone ID: MRT4577_114587C.1.pep
PTRPIAFNLHAVFKEVCTISFLILFPFQVLGYFSFALSQTLTLAKFLEKYVNFYKLK

SEQ ID NO: 200659 - protein, 133 aa, Zea mays
  Clone ID: MRT4577_114588C.1.pep
SPPPSSTPAPFAHLTCRRRGLRLPIPDVRARHGGSRGSPKLERGDPSAGLYPFSFDSFSRLACYRGSGLKAGAKHRRPCPRFVVFPDDPPHTATPSTAAADHRTRGEESDCQTMHSTELKDKGWAGPLTVYHS

SEQ ID NO: 200660 - protein, 125 aa, Zea mays
  unsure (1)..(125): unsure at all Xaa locations
  Clone ID: MRT4577_114589C.1.pep
QKKKKKKKKKKKKKKKKKKKKGENTNRGPXPPERGRPKDETPPKERPPQKTARARGVPGRGGGPPRGAPPPPPRPPKPARGPEGGPPPQEAPARAAPPPRAGEPQRGGRPPPXGGRPPPPRRGGG

SEQ ID NO: 200661 - protein, 43 aa, Zea mays
  Clone ID: MRT4577_11458C.1.pep
VLNKHTASQGRCIILLLLPPPPTPIQMADDFDNHQRINIYRRL

SEQ ID NO: 200662 - protein, 123 aa, Zea mays
  Clone ID: MRT4577_114590C.1.pep
QINGHKPPGETLCHHLIRGPTSQSRRPARRRHSSPTPVNTARLDLICTIGFTIYGPAIIFNLPILPLSSISFLSYSIVDELHRRGNELHRAHHSSPNYRLDTTAPSLHGYNQQVGKNSPLDKR

SEQ ID NO: 200663 - protein, 108 aa, Zea mays
  Clone ID: MRT4577_114591C.1.pep
DLEAAVPSPGQPSVQTSVMASFFMILLFPSLLPLHSSAAPRDTLPLGSSLSVEEHQTDVLRSPEGTFSSGFHSIYHNAFTFSIWYANSANKTVVWTANRESPVHARGL

SEQ ID NO: 200664 - protein, 120 aa, Zea mays
  Clone ID: MRT4577_114592C.1.pep
LALPDHPPTRPVSLHYTVRRDDADGSNSNQWQVEKIIPLDPGFRYYIRGAMERYTLLLRFPEHLSLAGVHVSSSAVIEDLECFSMDTKTLQLERVCELNHHIMRAYVYTNFPPSLSPQSI

SEQ ID NO: 200665 - protein, 296 aa, Zea mays
  Clone ID: MRT4577_114593C.1.pep
MNKSMKWAVIKRSGGALDSEQWMYGGTSDSLRREARNYALSGCNTGLSGVHRIVWVTVDSYRPQRSAAVARASDEQWMSSVHWTVRCLMQSLQGSTQVNKCDGPKTGISIDNGHHNGDESDDEEEHDDSKDESTSSQGTFSHIASTNNDDMQRNNNDVLYDVAQLKTENSMLKSQVEMINLEKLALSEKYDMVSYSQNELVDDHIMFDIAHKKLEKRETITSVKLHEKEVPRAISEAINMNKEKGSKRKLLGNKKRRRLRRRRHARFPQDIQEHVVKKLEKRETAANIKLHEKEVP

SEQ ID NO: 200666 - protein, 38 aa, Zea mays
  Clone ID: MRT4577_114594C.1.pep
QGNQIIANGSFIGAGIFLALLVRSMQRVKKLDKFETMI

SEQ ID NO: 200667 - protein, 277 aa, Zea mays
  unsure (1)..(277): unsure at all Xaa locations
  Clone ID: MRT4577_114595C.1.pep
GDPHPGNLAVDKDGSXLIYYDFGMMGEIKQFTRERLLSLFYSVYEKDANKVMKALIDMEALQPTGDLSPVRRSIQFFLDNLLSQTPDQQQTLAAIGEDLFAIAQDQPFRFPSTFTFVIRAFSTLEGIGYILDPEFSFVKVAAPYAQELLDLKQRRQTGPQLVQEIRKQANDARDSTISMPYRIQRIEDFVGQLETGDLKLRVRVLESERAARKATVLQMATMYTALGGTLLNVGVTLNSQGNQIIANGSFIGAGIFLALLVRSMQRVKKLDKFETMI

SEQ ID NO: 200668 - protein, 119 aa, Zea mays
  Clone ID: MRT4577_114596C.1.pep
GYWGCMVPGAWSLPWPVQPQPPSSRSQGQGLSSSSSPPPPTTTTIGTPSVSSSSGAADFDSHALGLGLGKHPRDRDGDDGRKRNASAHGSGSAKVWAPKPIRIDNVPEVARSSIWSPLK

SEQ ID NO: 200669 - protein, 125 aa, Zea mays
  Clone ID: MRT4577_114597C.1.pep
LGLCSPSPGEEGSNLKQNLYVSRGLERLERQRRHQAVRRKNLRGGGRQAPPRRALRLLRGLHSRGRQGGGRRQPHFPRCRESYLRSGQRSKSVAWPRFVDIYDGRVGTQVSSLFFNFVRLSSFPS

SEQ ID NO: 200670 - protein, 60 aa, Zea mays
  Clone ID: MRT4577_114598C.1.pep
KILYITHPIFLFTRLLPLSGWDLYNRGAGFTSTIPIPSTPTTLTTPHITTHNYHSPSIIS

SEQ ID NO: 200671 - protein, 324 aa, Zea mays
  Clone ID: MRT4577_114599C.1.pep
MTARSALDEVTDTGAFDRSPSTFRSSVSRDGRFPAVAGRYHLYVSYACPWASRCLAFLKLKGLDHAIGVTAVKPIFERTKESDEHLGWVFPAAADEEPGAEPDPLNGARSVRELYEIASSNYAGKPTVPVLWDKQLKTVVNNESSEIIRMLNAEFNGIARNPGLDLYPAHLRASIDEANELVYDAINNGVYKCGFAKKQGPYDEAVTRLYEALDRCEEILGKRRYICGDQLTEADIRLFVTLIRFDEVYAVHFKCNKKLLREYPNLFNYTKDIYQIPGISSTVNMEHIRKHYYGSHPSINPYGIIPAGPNIDYNAPHDRERFSA

SEQ ID NO: 200672 - protein, 152 aa, Zea mays
  Clone ID: MRT4577_11459C.1.pep
EFPGRRTRPAFCTRQGIQSPISDLTERLGFEDRDPPVVPLECSLEAPSFDEVDVQALAHAVELTRQGAVDSLKFAKGHLYQAFQNELCRMKLDLTLLDKLVHEYCVYRGIVEGSSHVLSGTADLKCNQNNDVNNETQLYCEMTNNQNGHCST

SEQ ID NO: 200673 - protein, 59 aa, Zea mays
  Clone ID: MRT4577_1145C.1.pep
QMSIQHSKVNRIILGQVSPYTATACPPMMTLVLCNTHLSYYHISGRGSISRSCYGSNYS

SEQ ID NO: 200674 - protein, 43 aa, Zea mays
  Clone ID: MRT4577_114600C.1.pep
LVVFFRGWGGLIFVILFIEQTFFGTKPYLHFFQAQILVPQKYV

SEQ ID NO: 200675 - protein, 68 aa, Zea mays
  unsure (1)..(68): unsure at all Xaa locations
  Clone ID: MRT4577_114601C.1.pep
PNGKRKLCWNKPKKVRAGLIELRICTXAEKKWHNVSKVFLIRIITAYLKKRYSYITLPLSDCMYSLVK

SEQ ID NO: 200676 - protein, 195 aa, Zea mays
  unsure (1)..(195): unsure at all Xaa locations
  Clone ID: MRT4577_114602C.1.pep
RSTHLPPALRRLAFSPIPRQPPRSPPPRYGSSSTPSAPTTPAPPSPPARTITSRPPAASPPRSAPPWRPPTPTPPHPPRPPHXPLPPSSCPAATTLLRRHPASPXPPARALAEXRGRVTRRKPRPSRCPXLPTSRSTPPTPTHGAXSPASLSPGPPPSPLPQRLPPSRRTTGRPRPRACSRFLTLDTFAFGLHLC

SEQ ID NO: 200677 - protein, 209 aa, Zea mays
  unsure (1)..(209): unsure at all Xaa locations
  Clone ID: MRT4577_114603C.1.pep
FTMRTLKIPVMVINGIDCIRRDCRQQLNNQXDCQQQLKCALETLWLXDKVCCPRNRGGLGVLNLKIQNTTLLLKYIHKFYGREDIPWVNLXWDHSLXSGGRVSHGYPKTGSLWWKDVSRLVDYFRGHTMPWAGDGXTILLWLDVWNNISPRFTFPCLFSFAKKKRMXIQEFLTNXDLEHNFHTPLSSQTAQEYLWFPQACELPSELYSC

SEQ ID NO: 200678 - protein, 90 aa, Zea mays
  unsure (1)..(90): unsure at all Xaa locations
  Clone ID: MRT4577_114604C.1.pep
MATRYWIGSRDLESPGATGTSRRSRLQDGISRQTFDTPQCRCNVANVRRXRRETLRAHSDEIVNSNLFVNGFSQIMRRHIHDLDRIGGID

SEQ ID NO: 200679 - protein, 59 aa, Zea mays
  Clone ID: MRT4577_114605C.1.pep
TWRPRSHYPIPYLIPYFKLHSANHAKYSFASPILRNPLKTVLALFSWAQTYLSILLFNE

SEQ ID NO: 200680 - protein, 173 aa, Zea mays
  Clone ID: MRT4577_114606C.1.pep
SPFSFPLNSFSPNFQEKFPPSVLRFRPGLRALVNGEFQKAPPLKLRPGPPPRLARYIPQSGLKPQWFQRGPPDWPFRFLGGFWEARGPRPLVGFNYIFGNFFFSPMFPPFPFLQEFKFFRVGLAGRGCSFVFSLPFFLGFFFLFFFFYFFPPLFFFAIDPFIPCSSPHNPPFF

SEQ ID NO: 200681 - protein, 100 aa, Zea mays
  Clone ID: MRT4577_114607C.1.pep
GFFRGFTHKGQVQKKKKEKKKTKHKHKKKQKKPKKQKKSPRGKSKQKTTPETNHLLGQGQHSPKDKQGAHQETQPGGAKKKHEKAQANQTKNFSKNKEGP

SEQ ID NO: 200682 - protein, 37 aa, Zea mays
  Clone ID: MRT4577_114608C.1.pep
MAVEDVQPLVYADGTGMVMAGFAGDDAPSAVFPSIVG

SEQ ID NO: 200683 - protein, 138 aa, Zea mays
  Clone ID: MRT4577_114609C.1.pep
RDSVGRTSTQVPPLVVPLGATRVRLASVTQSSKQVPLVGTDQPVSVIQSSMQAPLSPLAGRTATVSQTVDSKEALLPPVVTHQLERVVQSKVMLLPNDGSCNEGLGTRLVQIAVVKTQLRVGSSRRPRGRSRAPHRGD

SEQ ID NO: 200684 - protein, 58 aa, Zea mays
  Clone ID: MRT4577_114610C.1.pep
GQVAIVSSSRYTSMNAPQYNGNRGVIGSSPAQENPAAIVPERTMVIMRAPGLGLDGAP

SEQ ID NO: 200685 - protein, 124 aa, Zea mays
  Clone ID: MRT4577_114611C.1.pep
RRDHRSSARKNAGRAPGRDTGTQGKKSGRSMARRDKFTHTPGRNCARPKSSAQRGRLSSGRARRTRAQEGDLGRAQLESSSAWRAGAPWGSQRGREKGRTPQSSARHLEKLSRSTGRGTRWLRP

SEQ ID NO: 200686 - protein, 68 aa, Zea mays
  Clone ID: MRT4577_114612C.1.pep
RFKGTQTGSGNSWTRSTDNTCTISRARVPSPVIRHMKLNSGLLLFYYCGLSELGWLKSNQIKLFINIS

SEQ ID NO: 200687 - protein, 52 aa, Zea mays
  Clone ID: MRT4577_114613C.1.pep
LGSRPTFWYQPSTVLVPHTACHAHVAVGRDAMFIVPFATKLCLIHAFLLVSI

SEQ ID NO: 200688 - protein, 151 aa, Zea mays
  Clone ID: MRT4577_114614C.1.pep
NSILILINSLPSCRKICGQTPRTRRLLLLPTTRKGSTSPILFSRYYRHRPSNMSGTAHDSRLLYKVNNIRAFHIQDGEEQELTPSGPQILSLLMVPTAAPANASAGGTQTPEEDFYLHLSIPPELDLAIPATTQIFHQPPDSYLIPRWDVG

SEQ ID NO: 200689 - protein, 51 aa, Zea mays
  Clone ID: MRT4577_114615C.1.pep
GHGCHNSNPGWPNRPLFCRGRLTICTTRVTARGGTLNPLLRKPYIGTQASS

SEQ ID NO: 200690 - protein, 184 aa, Zea mays
  Clone ID: MRT4577_114616C.1.pep
MAWATRFLSAVCFFAAGVLFAPDVFIGDRSGSGATAVTAAKVSHLLCFATCWGAALWATFIGGIIMFKNLPRHQFGNLQGKMFPAYFTLISACAAVSVAAFAYLHPWKAASAVERYQLGFLISALGFNLSNLLVFTPMTIEMMKKRHKIERELSIGDEVGWSKNVRTAKSNPTLAAMNKKFGMI

SEQ ID NO: 200691 - protein, 84 aa, Zea mays
  unsure (1)..(84): unsure at all Xaa locations
  Clone ID: MRT4577_114617C.1.pep
VTSLLYRKEPLESSEDIHRCPHRASCIDADGLTDAAEGAADKRRCLRSRLLAAAISXRMNWFCSLGRGSEEAAKEGNRTRAVPR

SEQ ID NO: 200692 - protein, 229 aa, Zea mays
  Clone ID: MRT4577_114618C.1.pep
MAAGAALYYYHPGAGKVSLEAVAPSSPSLALRPSQSKVLCVSSSRWWMRRRWEGKASSVSSRARASARPALFSPVAMDWQECTTELEVDVPCSVAYQCYSERESIPQWMPFISSVKILEDKPDLSRWTLKYEVLGRDVEFSWLARNMTPIKNQKIHWRSLEGLANRGAVRFFPKSSSSCRVQLTVAYEVPEILAPVASALKPFLESLLLKGLERFATFAKERNSKIPQA

SEQ ID NO: 200693 - protein, 86 aa, Zea mays
  Clone ID: MRT4577_114619C.1.pep
DSRDLLLKGLYNNGETSCSAEAMFQVMNDEVVFINEYYHSVVPVVLASPFFLVLNYFLLNIVVAILCVMTVILCANGDVPYAFQSI

SEQ ID NO: 200694 - protein, 76 aa, Zea mays
  Clone ID: MRT4577_114620C.1.pep
MGILCCFQSHTSDHAVASSPATSSSSAPSSCRNNDRRAPPERQAPGEEKSRRRNDSVDNSNLVDLVNDIVAESVSY

SEQ ID NO: 200695 - protein, 202 aa, Zea mays
  Clone ID: MRT4577_114621C.1.pep
GQEFPGRPTRSAHASEDTSSDEDPASFVPPIPVASSISSETTAVLGQGRPLPVAVVIDVITQQEEEARRQEALELQQIGTQRRAMRRSRSGRKPVPTQLARSHSTGHSLAVRLDRDLERFTLRLPEHVRREMVAAAGEHSHSMQLRRGRRAGEGSSRGGRSAPLGRTPRWQSLLARTLSGKLSFFSASRVTVSSELGEVSSW

SEQ ID NO: 200696 - protein, 88 aa, Zea mays
  unsure (1)..(88): unsure at all Xaa locations
  Clone ID: MRT4577_114622C.1.pep
QKGFQMLADPRSFDSNAFTLLLRAAFQSLLDAQADEAVLDHPDFQHIDPVVLKHCHAAAATYILAAGKHRADKSTLSTYLEDXKFDRE

SEQ ID NO: 200697 - protein, 68 aa, Zea mays
  Clone ID: MRT4577_114623C.1.pep
SWYNRKKQCWSCSFSLVGVHRVNPQVFLQYLDQRQKNSLYLFSFCDVLTTRSPLGMLCDNNWAVTRIL

SEQ ID NO: 200698 - protein, 108 aa, Zea mays
  unsure (1)..(108): unsure at all Xaa locations
  Clone ID: MRT4577_114624C.1.pep
MVVYLDXLYPAHHLLSDSFTYXSSQNDILXEVEAIRLTQGADDVYIGDDPSCEGVEYESLDVTLVKVYDIAYTFRLPDSPPFDDKTFASYILEYIQILNASDVYLQSS

SEQ ID NO: 200699 - protein, 77 aa, Zea mays
  unsure (1)..(77): unsure at all Xaa locations
  Clone ID: MRT4577_114625C.1.pep
EPWRWWPCWPPPXADTAAGRLPGYGVVTNIINGGLECGHGADSRVADRIGFYKRYCDLLGVSYGDNLDCANQTPFNG

SEQ ID NO: 200700 - protein, 78 aa, Zea mays
  Clone ID: MRT4577_114626C.1.pep
FGSRCDSSAKKKKKGRVKKKIKKKKKKKKKKKKKKKKKKKRGARPLKKKKNPGLNSDMEPVAPEINPKPSLVSAPLYH

SEQ ID NO: 200701 - protein, 267 aa, Zea mays
  unsure (1)..(267): unsure at all Xaa locations
  Clone ID: MRT4577_114627C.1.pep
MMRALAXWWPCWPXAFFAVPARAEQCGSQAGGALCPNCLCCSQFGWCGSTSDYCGSGCQSQCSGSCGSTPNPPSSGGVASIIPESLFNQMLLHRNDAACPANGFYTYAGFIAAANAFPGFGTTGAPDVQKRELAAFLAQTSHETTGGWATAPDGPYAWGYCFKEEQGGATGPDYCAGILANPDLVAXRPHRVXRXPPXSGSGLTPQSPKPSCHDVMXTGQWTPSAADTAXGRLPXXYGVVTNIXSNGGLECGXHGADRRVAXDRIGF

SEQ ID NO: 200702 - protein, 215 aa, Zea mays
  unsure (1)..(215): unsure at all Xaa locations
  Clone ID: MRT4577_114628C.1.pep
PDMYRANAIRVLCRIIDGTLLTQIERYLKQAIVDKNPVVASASLVSGIHLAQANPEIVKRWSNEVQEAVQSRAPLVQFHGLALLHQIRQNDRLAVSKLVSSLTRGSVRSPLAQCLLIRYTXARHKAEMVALEAARKITEMDVTSRELAPAITLLQLYLSSSKPVLRFAAVRTLNKVARTRPLAVTNCNVDLESLLSDQNRSIATLXITTLLKTGM

SEQ ID NO: 200703 - protein, 127 aa, Zea mays
  Clone ID: MRT4577_114629C.1.pep
RSFFFFFFFFFSKLCNTIVRTLWPTTTKRGQKKIRFNPLNGLLGKFHIWAIKRTRPFAPPLLWAADYTHQGCRGKCFPKILRAKEGSLHGLQDACGVKPQVFKAVTRAAGRVLELKFSFKNKDFPLG

SEQ ID NO: 200704 - protein, 120 aa, Zea mays
  Clone ID: MRT4577_11462C.1.pep
FEENNRLLQPRYIYFFEGLGHGQGRVVSLIYYFGSWGVWPLLSSIICTVLGACSAVTMVLVGSTKCGCRACLCGVPSWCAPGSGRPPVVVWYWSLVCRRSWLSFWCRFVRDPFPICSVGR

SEQ ID NO: 200705 - protein, 899 aa, Zea mays
  Clone ID: MRT4577_114630C.1.pep
MPRSLVVGDLAVPEMAHPYMKKDDDDEDVEYSPFFGIEKGSVLQEARAFHDPQLDVRRCSQVIIKLLYLLNQGETFTKVEATEVFFAVTKLFQSSDAGLRRLVYLMIKELSPSSDEVIIVTSSLMKDMNSKTDMYRANAIRVLCRIIDGTLLTQIERYLKQAIVDKNPVVASASLVSGIHLAQANPEIVKRWSNEVQEAVQSRAPLVQFHGLALLHQIRQNDRLAVSKLVSSLTRGSVRSPLAQCLLIRYTSQVMCESSMNTQNGDRPFFDFLESSLRHKAEMVALEAARKITEMDVTSRELAPAITLLQLYLSSSKPVLRFAAVRTLNKVARTRPLAVTNCNVDLESLLSDQNRSIATLAITTLLKTGNESSVDRLIKQITLFMSDIADEFKIVVVEAIRSLCLKFPLKYRSMLNFLSNSLREEGGFEYKKAIVDSIVTLVSEIPDAKEIGLLHLCEFIEDCEFTYLSSQILHFLGNEGPRTSDPSRYIRYIYNRVILENATVRASAVSTLAKFGALVDTLKPQIFVLLQRCLFDTEDEVRDRATLYLQTLSGEVAIGNDEKDVKDFLFGSFDVPLANLEASLRTYEPSEEPFDISLVSREVRSLPPKEKAAPGKRPPAGAAAAAAPVSTVDAYQKMLSFIPEFSGFGRLFKSSEPMELTEAETEYAVSVVKHIYDGYIVLQYNCANTIEEQLLEDVTVCVDASDAEEFSEICSKPLASLPYNSPGQVFVAFEKPERVPVVGKFLNLLKFTVKEVDTTTGEADEDGVEDEYQLENFEIVSADYMLRVVVSNFRNAWENMDPDSERVDEYGLGVRESLAEAVNAVINILGMQPCEGTEVVPKNARSHTCLLSGVFIGNMKVLVRLSFGLSGPNEVAMKLAVRSDDPEVSDKIHEIVASG

SEQ ID NO: 200706 - protein, 128 aa, Zea mays
  Clone ID: MRT4577_114631C.1.pep
GSGVCLMPPISTSTKNLPSPRVRHIYTMSPGRTAYSSRNLCQPRSQNPGPNSPMIDHDFILPVVLWLQRLAHPRAYSLWPQRIAHVQYMRRALACCSMEQTVLPSRHNYEVFRIRSRYMWITNRAVST

SEQ ID NO: 200707 - protein, 44 aa, Zea mays
  Clone ID: MRT4577_114632C.1.pep
RVQATHGADSRVADRIGFYKRYCDLLGVSYGDNLDCANQTPFNG

SEQ ID NO: 200708 - protein, 899 aa, Zea mays
  unsure (1)..(899): unsure at all Xaa locations
  Clone ID: MRT4577_114633C.1.pep
MAAPGRRTADVSSSSPAPSPSPSTGRRLLRTQTVGNLGESIFDSEVVPSSLVEIAPILRVANEVEATNPRVAYLCRFYAFEKAHRLDPTSSGRGVRQFKTALLQRLERENDPTLKGRVHQSDAREMQRFYREYYKKYIQALQHAADKADRALLTKAYQTAAVLFEVLRAVNVSQSVEVDQAILDTHNKVEEKKKLYVPXSSLPXDPESTGQAIMRYPEIQAAVYALRNTRGLPWPKDQDKKPGEKNTGKDLLDWLQAMFGFQKDNVSNQREHLVLLLANVHIMKVPKVDQQPKLDDKALDAVMKKLFKNYKKWCKYLGRKSSLWLPTIQQEVQQRKLLYMGLYLLIWGEAANLRFMPECICYIYHHMAFELYGMLAGNVSPMTGENVKPAYGGDEEAFLIKVVTPIYKVIEKEAERSKTMKSKHSHWRNYDDLNEYFWSVDCFRLGWPMRADADFFKTPKDAYLNLLNGENRSAGNTHWMGKVNFVEIRSFWHIFRSFDRMWIFLILSLQAMIIIAWNGGTPSDIFDAGVFKKVLSIFITAAILKLGQAILDLIFGWKARRNMSFAVKLRYILKLICAAAWVVILPVTYAYTWENPTGLARTIKSWLGDGQNQPSLYILAIVIYMAPNIVASMLFLFPFMRRFLESSNVKVITIIMWWSQPRLFVGRGMHEGAFSLFKYTMFWVLLLATKLTVSFYIEIKPLVQPTIDIMREPIRTFQWHEFFPHGTNNIGVVISLWAPIILVYFMDTQIWYALFSTLIGGIYGAYRRLGEIRTLGMLRSRFESLPEAFNERLIPSDANKSKGLRAAFSSRPKASGDERQKEKRAARFAQMWNVIITSFREEDLIDNREMDLLLVPYCKDHGADSRVADRIGFYKRYCDLLGVSYGDNLDCANQTPFNG

SEQ ID NO: 200709 - protein, 321 aa, Zea mays
  Clone ID: MRT4577_114634C.1.pep
MMRALAVVAMLATAFFAVPARAEQCGSQAGGALCPNCLCCSQFGWCGSTSDYCGSGCQSQCSGSCGSTPNPPSSGGVASIIPESLFNQMLLHRNDAACPANGFYTYAGFIAAANAFPGFGTTGAPDVQKRELAAFLAQTSHETTGGWATAPDGPYAWGYCFKEEQGGASGPDYCEPSAQWPCAAGKKYYGRGPIQISYNYNYGPAGQAIGAGILANPDLVATDPTVSFETAVWFWMTPQSPKPSCHDVMTGQWTPSAADTAAGRLPGYGVVTNIINGGLECGHGADSRVADRIGFYKRYCDLLGVSYGDNLDCANQTPFNG

SEQ ID NO: 200710 - protein, 410 aa, Zea mays
  Clone ID: MRT4577_114635C.1.pep
MAIAAVRRLLWREVGTAAAAAALGTDGNLFARLVSEPECRVKATMEEAASSGTHRDGAFWEPPVTALLRASSPTKAHLILEWKLEKLLKEDIQDCEPYSRIIRFCGQTRNATFAMRVFECVEAKGIQLNTNICNALVDAFLSAGDLLSAMTLYETMESMDACSPNSATYDAFICAFSLLGSGHAMMSWYVAAKNAGFTPSIQAFESLITGFVRLNMLDDAKTVFEEMIALEIKPNSTILEASLEILSRKEEASRVGDFLKRARDDNWELNKATVVRLTRICLDGGVIDEMEQLLALIQKGTHLNSETQLHHGIIRFYANADRLADMEDAIYRMLDNGVMFTCPEDVDDVICCYFRHREFDRLDLFLNRIRSLFKLNRSTYDILVAGYRKFDLHERLDSTMADMMREAGFA

SEQ ID NO: 200711 - protein, 135 aa, Zea mays
  unsure (1)..(135): unsure at all Xaa locations
  Clone ID: MRT4577_114636C.1.pep
SPVRASRQAASQPXSKGSRAPPEARWAYAPLLHRAGWLSRSRLXCXARARAVSWSSPRAHGRDLRSAAARAGRGQWRPTTLTGCRLGPLPGDAETVHGFFRAARWNSHGPTTSAWRLGAERRHGGRTARQRVLDR

SEQ ID NO: 200712 - protein, 113 aa, Zea mays
  unsure (1)..(113): unsure at all Xaa locations
  Clone ID: MRT4577_114637C.1.pep
KGGQRPXPGPNXSPAPPKIPPAPARAGRRXPRPGXFLADPPXPPGPKNPXPRPPGAXDPPNPPPPETXKPWPCPPLCLPXPPWGGPPGGNFWGGPTGPKENPGGGGGGGPPGD

SEQ ID NO: 200713 - protein, 49 aa, Zea mays
  Clone ID: MRT4577_114638C.1.pep
NVGLLLPLNVSARTVGQKTWWIASVVQSDKPSSTPTHVATFHSQKAHEN

SEQ ID NO: 200714 - protein, 55 aa, Zea mays
  Clone ID: MRT4577_114639C.1.pep
KLKLVKDGGLADGIEPNHEYPQLLLDKRRLNSFPKKRPISSPGQSASVANAFLKR

SEQ ID NO: 200715 - protein, 766 aa, Zea mays
  Clone ID: MRT4577_11463C.1.pep
MSKRPKLEGFSIPRPTSYNFERSQSVQRLYRPTDDPDLDDIAFSDDAPSDAQASTAVEGKAENEEEMDPLDAFMAEIQEEIRAPPPPPKPEALRRTDSDDDEDDPVESFLRAKKDAGLTLAADVMRAGYDSDEEVYAAAKAVDAGMMEYDSDDNPIVIDKKKIEPIPALDHSTIEYDAFTKDFYEEKPSISGMSDQEVTDYMKSLSIRVSGFDVPRPIKNFEDCGFHVPLMNAIAKQAYEKPTTIQCQALPIVLSGRDIIGIAKTGSGKTAAFVLPMIVHIMDQPELEKEEGPIGVICAPTRELAHQIYLEAKKFAKPYNLRVAAIYGGVSKFDQFKELKAGCEIVIATPGRLIDLLKMKALKMFRATYLVLDEADRMFDLGFEPQIRSIVGQIRPDRQTLLFSATMPYKVERLAREILTDPIRVTVGQVGGANEDIKQVVNVLPSDVEKMPWLLEKLPGMIDDGDVLVFASKKARVDEIERELNQRGFRIAALHGDKDQASRMETLQKFKSGTYHVLVATDVAARGLDIKSIKTVVNFDIAKEMDMHIHRIGRTGRAGDKDGTAYTLITQKEARFAGELVQSLIAAGQDVPNELMDLAMKDGRFRAKRDSRKGGKKGGKGKGGVGGAGRGRGVRGVDFGLGIGYNAESGSQVPAARSAAVNSLKTGMLQRFKSSFVSGSSNTPSSSAPSFVRPALRGFVSGGTIGGDTRPAQAAPTFIPASRPAQPAPAVPASQPAGNNNENGNPNPESSRDQFRERKRPSGWDR

SEQ ID NO: 200716 - protein, 59 aa, Zea mays
  Clone ID: MRT4577_114640C.1.pep
ARERDSRLWYLVPEPAWPCLAALNECYVRVRRHNVTVIDFLSVQQNVYMLFFCSRNICC

SEQ ID NO: 200717 - protein, 327 aa, Zea mays
  Clone ID: MRT4577_114641C.1.pep
MGSSSAPAAAAAAAPSRRKVALYLALLTLQYGAQPLISKRFVREDTIVTSLVLATEAAKVICAIILLIAEGSLKKQFSNWTLTGSLTASGLPAAIYALQNSLLQVSYKHLDSLTFSILNQTKLLWTAFFTFLILGQKQSSRQVLALALLIGAAVLLSVGESSSKGSKGGGSDYILLYGIIPVTVASVLSGLASSLCQWASQVKKHTSYMMTIEMSFIGSMCLLASTYRSPDGEAIRKYGVFHEWTFWTMIPVLMNAVGGILVGLVTTYAGGVRKGFVIVSALLVTALLQFIFDGKPPSLYCLIALPLVASSIFIYQKHPYVDRKKKD

SEQ ID NO: 200718 - protein, 224 aa, Zea mays
  unsure (1)..(224): unsure at all Xaa locations
  Clone ID: MRT4577_114643C.1.pep
MPFKLVKNSAYYSRYQTKYKRRQQGKTDYYARKRLITQAKNKYNAPKYRLVVRFTNKDIICXIVTSEISGDKVFISAYAHELKAYGIEHGLTNWAAAYATGLLVARRALKKLGLDEDFAGVEEADGEYKLTEAAETDDGERRPFKVFLDVGLKRTSTGARVFGAMKGASDGGILVPHSEKRFPGYDMETKELDADTLRNYIFGGHVAEYMETLADDDEERFRSQ

SEQ ID NO: 200719 - protein, 122 aa, Zea mays
  Clone ID: MRT4577_114644C.1.pep
PVVPRYRWFHFFQLVQSGLLDQRQDHPLQYCMLRVSPCLLWLGPRWWSSPPFSNGQVRPFPYIQCSSFVLIAIAAYRRSSYSVSLRRPPLGVGVFSFSNNFVFGSLFSSFYGSKLTFLNYVK

SEQ ID NO: 200720 - protein, 64 aa, Zea mays
  Clone ID: MRT4577_114645C.1.pep
PKDDFKINWVVFGSNCSCSFNFQVSWKLDVAIVKCIFTNHLTPVATFKLDIRGNSTCMHACQLF

SEQ ID NO: 200721 - protein, 99 aa, Zea mays
  Clone ID: MRT4577_114646C.1.pep
VVPIEARRATRWGLSRDHLPWPEFFLERDLALRTHRKRATGDLLVRGDSYPSIPDLLLAHPPGLWVLTTSSHMSADIPPDINSLDHVLSVYIHCYEIDL

SEQ ID NO: 200722 - protein, 989 aa, Zea mays
  Clone ID: MRT4577_114647C.1.pep
MAAPPRRSLLVLLSGLLVFASLVALTTAIYEDQVGLADWHQKYIGKVKQAVYHSQKSGRRRVVVLTEENVISSLDLRSGDIFWRHVIDKNDPLDQLGLSLGKYVLTLSSGGTILRAWNLPDGLMIWETNLRTSTASNSQLHVMSNNKAARDNLVLVSAGRWIYAVSSIDGAISWEKEFSLDDLEIKRILQSPENDVVYALGLAGSSKLALYHLSAKTGQILKDIQESFPGGLCGKTVLGSDNVFVALDKARSSLLLIEFKGERISYNKVLVSDLVQDLSGSFELQSLSSDIISLQTSSSISLLKLKGTDGLEVLQRFDQPAAVSDSLPITEKEEAFAVVQHLGSEIEFIVKFTSDLSSEIIREKVNIDQNKGNVERVFLNSYIRTDKSHGFRALVVMEDHSLLLIQQGEVVWSRDDGLASIVDVTTSELPVEKDGVSVAGVEHNLFEWLKGHMLKLKGTLMLANADEVAAIQALRLKSSEKNKMTRDHNGFRKLLVVLTKAGKVMTLHTGDGRVIWSKLLPSLRASRFGGVPSALRIYQWQVPHHSVMRENPSVLVVGRTGAESSAPGVFSILDSYSGEELNSMKLDHSVFQIIPLTLKDSSEQRLYLILDSNSNAHLYPKSADTLNVFLHEMSNLYFYSVDIQANVIKGYSLQKSCDLNFGDDYCFSTKELWSIIFPSDSERIVISETRNMNEVVHTQAKTIGDHDVMYKYLSKNLVFVATLSPKAAGDIGSVLPEEASLVAYLIDAVTGRILHRVTHHGAQGPVHAVLSENWVVYHYFNLRAHRFEMAVIEIYDQSRADNKDVMKLILGKHNLSAPITSYARPEVAVKSQSYFFTHSVKAMAVTQTAKGITSKQLLIGTIGDQVLALDKRYLDPRRSVNPTQQEKEEGIIPLTDSLPIIPQSFVTHSHQVEALRGIVSIPAKLESTTLVFTYGVDLFYTQLAPSRTYDSLTDEFSYALLLITIAVLVAAIIVTWIWSEKKELGDKWR

SEQ ID NO: 200723 - protein, 122 aa, Zea mays
  Clone ID: MRT4577_114648C.1.pep
TPPNSKTKPQPERGLAFIYRGKQRTPHPSEGDKTTAHPTGADEKTNPDTRTVYLNLYPIHVKTSKPEAKTHLHLLQPVNKAKIHLHAPGQSKAHKPPVPAHRHKPRRKYRRATPSTPPTRWA

SEQ ID NO: 200724 - protein, 55 aa, Zea mays
  Clone ID: MRT4577_114649C.1.pep
PGCGTFHFSRSKCIGAPLNDWLFFLCGFLSGYGYAILSETSCIHCPPVMRRAIAL

SEQ ID NO: 200725 - protein, 274 aa, Zea mays
  Clone ID: MRT4577_11464C.1.pep
MSKRPKLEGFSIPRPTSYNFERSQSVQRLYRPTDDPDLDDIAFSDDAPSDAPAGTAVEGKAENEEEMDPLDAFMAEIQEEIRAPPPPPKAEALRRADSGDDEDDPVESFLRAKKDAGLTLAADAMRAGYDSDEEVYAAAKAVDAGMMEYDSDDNPIVVDKKTIEPIPALDHSTIEYDTFTKDFYEEKPSISGMSDQEVADYMKTAVACPLSPCFSAVEAASQCEETPTQMASRWVPARGVPASRRRGVAVGICGFQLFRTSLAPGSQGNKAGRA

SEQ ID NO: 200726 - protein, 50 aa, Zea mays
  Clone ID: MRT4577_114650C.1.pep
PPPKLLFKGHLFQAPPPPLGPSLSLFVIRGSDRPAPQRGPESNPLSLSGV

SEQ ID NO: 200727 - protein, 36 aa, Zea mays
  unsure (1)..(36): unsure at all Xaa locations
  Clone ID: MRT4577_114651C.1.pep
FLTSPDKEIGGAHIFQRSRTITTPXTLTNSITSPNT

SEQ ID NO: 200728 - protein, 77 aa, Zea mays
  Clone ID: MRT4577_114652C.1.pep
RTAIYAGAELDLVRRYKRCGRITNILDTLRLLLLMDTFILNRAYGADVLPLAQVESKADDLVAEGGVHWGYLLSHPL

SEQ ID NO: 200729 - protein, 122 aa, Zea mays
  Clone ID: MRT4577_114653C.1.pep
LCWIGFGLQFGPGRFFRPWAQPPFAPGVYAPFAGGLCPCLLGAPSPFQWSGFGKISPVTYLGIWLLGLPPPPPMDGSFLGLWFLGKKLRVPLLLLKKKKKNKKKKIKKKKKKKKKKKPPPPP

SEQ ID NO: 200730 - protein, 39 aa, Zea mays
  Clone ID: MRT4577_114654C.1.pep
ENNLGKAGDVMPLFMWRSASLAIELFNTFAALQSNFYGW

SEQ ID NO: 200731 - protein, 93 aa, Zea mays
  unsure (1)..(93): unsure at all Xaa locations
  Clone ID: MRT4577_114655C.1.pep
AVGPASMPASTAGPAQAGCRKILARXKKTPINISLSTQXKAIQLSMYLVNPNSGYSVQALALIFKQLNHTERKCQVSQMHARAATTIPKQAIK

SEQ ID NO: 200732 - protein, 87 aa, Zea mays
  unsure (1)..(87): unsure at all Xaa locations
  Clone ID: MRT4577_114656C.1.pep
TEYMLLPRHNKGVENFELFTIIGRGSFGEGRLIGEXTSNKCVSQCNLXKPVMLRMGHVVHVKAEXTILLKXDSAYLVXKLYYSSQDQ

SEQ ID NO: 200733 - protein, 58 aa, Zea mays
  Clone ID: MRT4577_114657C.1.pep
LIKPWSTLSLGASPPNYPSFALISVAFLSIHLPLSFSLISHNEIITIHDSCSSFFLLY

SEQ ID NO: 200734 - protein, 74 aa, Zea mays
  Clone ID: MRT4577_114658C.1.pep
KKKKMGFLPRINFPHPLPSPPQEGVFLGLYPLKIFRKWLGPKTECCPSRGSCFPSPPGGEFMKMGIKMPFNKAF

SEQ ID NO: 200735 - protein, 115 aa, Zea mays
  unsure (1)..(115): unsure at all Xaa locations
  Clone ID: MRT4577_114659C.1.pep
RKTNPLIKLINHSFIDLPTPSNISAXXNFGSLLGACLILQITTGLFLAMHYSPDASTAFSSIAHITRDVNYGXIIRYLHANGASIFFICXFLHIGRAPYXYGSFLYSETXNXGIS

SEQ ID NO: 200736 - protein, 191 aa, Zea mays
  unsure (1)..(191): unsure at all Xaa locations
  Clone ID: MRT4577_11465C.1.pep
SRILHVRLIHHLQGSPCSDSEEHRFXSKADSGTTETYPLQDVTVRIIDFVDLKNRPCXAVEVXTSKTGKDDRAKCHFVAIDIFHGKQLEDIVPSLHLCDIAHVNRTDYQMIHISEDAFGMLLASYGNTNDDLILPTDETLEVHIIERFEXAKDLVIXTVQTDMDKDQSCSMKDVEPNILHCVFRRNPTVSR

SEQ ID NO: 200737 - protein, 40 aa, Zea mays
  Clone ID: MRT4577_114660C.1.pep
FFSPYIHCIEFGCVRVFACSQFIAREDMYSTFMFLSTGLA

SEQ ID NO: 200738 - protein, 137 aa, Zea mays
  unsure (1)..(137): unsure at all Xaa locations
  Clone ID: MRT4577_114661C.1.pep
XPGRPNPSNQTSHPKKTYFPPLSSFLCLVPNPVLPARSNLSKLPNQFPFLFPPMPKNHSTPNYHQPKKRKFLLNHHHPRRPPNLSYLNFFQLPVPQPAFSFVGFYGFSKDNPFLFLPIVNPFNFPLKAFFSPFIQPF

SEQ ID NO: 200739 - protein, 91 aa, Zea mays
  unsure (1)..(91): unsure at all Xaa locations
  Clone ID: MRT4577_114662C.1.pep
QPLFLPHVLPLFLTISSLLGECICITSTXPPNLPFTPHEEAQSVWHLKEVSNKAHNSELKLFLEIELGPELFPILPPHKSKEDILLFFKLY

SEQ ID NO: 200740 - protein, 47 aa, Zea mays
  unsure (1)..(47): unsure at all Xaa locations
  Clone ID: MRT4577_114663C.1.pep
ACWXRREQSRVNTMMWTSFLYRYARIALAAADDDHDCLAMPLSVVTS

SEQ ID NO: 200741 - protein, 82 aa, Zea mays
  Clone ID: MRT4577_114664C.1.pep
SIGLFRRNTTSSSVTVGEAWNLCDRVGLHAVESSPPWPCGQPSQTLQLSVKSKYCWRRTTTMNSMKSRGRLPVNYWHRGDIY

SEQ ID NO: 200742 - protein, 38 aa, Zea mays
  Clone ID: MRT4577_114665C.1.pep
DVLKELALCSTLCYEYNCLCKSLSVLRQVKLCKIMGMS

SEQ ID NO: 200743 - protein, 52 aa, Zea mays
  Clone ID: MRT4577_114666C.1.pep
RLRPGTVCPPLRFRSCRRGLGGVRVSRRRTPYTARPASRRAVVEGSVAWWVR

SEQ ID NO: 200744 - protein, 62 aa, Zea mays
  Clone ID: MRT4577_114667C.1.pep
ILLVLVGFISFYVFPRFVVFRFSFAFISLFFSLGLSSEVFIWDFISSLPQRAWDKKALLLLL

SEQ ID NO: 200745 - protein, 114 aa, Zea mays
  Clone ID: MRT4577_114668C.1.pep
RGRPGSAWLNHVDGAPRVRSVVSIPARERLDGSTHTTPLRPSEDSSPVESGGKVGLPLNDTNKAEGTNGENGKTSEASASDGSVLSPTEDKSQVSYKVYIPKRTPALARRKLQR

SEQ ID NO: 200746 - protein, 93 aa, Zea mays
  Clone ID: MRT4577_114669C.1.pep
VHAIFAAVVFLTVAFSDVGLQRCFFPHAGANTSELLKNLPLGTGFLSSFVFLMFPATRKGIGYSDTTPHQKASDEEDATTPVLLPTKSHQHTV

SEQ ID NO: 200747 - protein, 79 aa, Zea mays
  Clone ID: MRT4577_11466C.1.pep
LPFREWHHHLLDWRLGDGGNAVRAGLPTRDAAHALHVYCSVTNKWRNSRVVPRSPHGADMIMITPGGQVTFTKGTKPVR

SEQ ID NO: 200748 - protein, 137 aa, Zea mays
  Clone ID: MRT4577_114670C.1.pep
MLGSSAGLNHVDGAPRVRSVVSIPARERLDGSTHTTPLSPSEDSSPVESGGKVGLPLNDTNKAEGTNGENRKTSEASASDGSVLSPTEDKSQASIEGKDSFQKKTFSRMHDGETVEVSYKVYIPKRTPALARRKLQR

SEQ ID NO: 200749 - protein, 83 aa, Zea mays
  Clone ID: MRT4577_114671C.1.pep
ISFEPCVVVVDGAVVSIPVIDRGRCVENVRRVRVVHNSQVKCLRIVCIALRRAFSIYIVAQIEVRVVAVEVRHVVHVRVVVRV

SEQ ID NO: 200750 - protein, 106 aa, Zea mays
  unsure (1)..(106): unsure at all Xaa locations
  Clone ID: MRT4577_114672C.1.pep
MQMHHVGGGAADIPEAARPSRYESQKRRDWHTFGQYLRNHRPPLELARCSGAHVLEFLRYLDQFGKTKXHAAGCPFFGHPSPPAPCPXPLRXXWXXLXAXXRRRRA

SEQ ID NO: 200751 - protein, 117 aa, Zea mays
  Clone ID: MRT4577_114673C.1.pep
VPSVLLLHPSHCFRNPESSSRACASLCCMLRRITSTTLSRRARVSMADSEPFITRWTFEDFVVHYETRFGLRLEADRYGYCDGDDCTPVVRIRSWGQSSRHCPCQRWSHTMSVLDQI

SEQ ID NO: 200752 - protein, 91 aa, Zea mays
  Clone ID: MRT4577_114674C.1.pep
GMSGRILVADMQWGGSVDTDTPGSVRISLRRESRQPSRPAEEGRGQIGGGVISRAQATAAWSGTDLPRSKRQPTVAGPLDRAGTPRTLGRR

SEQ ID NO: 200753 - protein, 349 aa, Zea mays
  unsure (1)..(349): unsure at all Xaa locations
  Clone ID: MRT4577_114675C.1.pep
MPAAAFFSAGAAPALPPPSRTLSRRLVVSRAAAAAASASASSSSGWQGGGGVEFQGKVGFLGLGIMGAPMASNLIEAGCDVTVWNRTKSKSDPLLSLGAKYEPTPAQVASSCDVTFAMLADPQSAAEVACGSSGAAEGLAPGKGYVDVSTVDGATSKLIGERITSTGASFLXRLQFQARKNQQKMGFSSFLLQXESLYKRVAPLLDVMGKSRFYLGDVGNGAAMKLVVNMVMGSMMVSFSEGLLLSEKVGLDPNTLVEVISQGAISAPMFSLKGPSMVKAAYPPAFPLKHQQKDLRLALALAESVSQSIPTVAAANELYKAAKSLGLSDHDFSAVIEALKAKVQSQSSQ

SEQ ID NO: 200754 - protein, 43 aa, Zea mays
  Clone ID: MRT4577_114676C.1.pep
KEPGSYITHGKHPPGSRGKCSTYSIGSGASEVAELFHTNQLKT

SEQ ID NO: 200755 - protein, 67 aa, Zea mays
  unsure (1)..(67): unsure at all Xaa locations
  Clone ID: MRT4577_114677C.1.pep
MRVLFVALALLALGESATCTHTSGGCSCXSPHTVKVPPTRHLTAPCTLTSARLLLQHAIVGSVLHQP

SEQ ID NO: 200756 - protein, 123 aa, Zea mays
  Clone ID: MRT4577_114678C.1.pep
IKNPPTALKLKKRDGKLCANPWRLELLNKFPGNFFLTLGVHFFGPAMGETAPPMASWADKTTEKIKARGPLAAGLALVSANVAGFWQRLTLADLTPAKVPRPKGPAPAPAAKDAIIVNDAIAI

SEQ ID NO: 200757 - protein, 50 aa, Zea mays
  Clone ID: MRT4577_114679C.1.pep
SPSPSLTLSTGPERNPSDRSSILWPVLCLLSPYQLVLLDPLCFNCFRTMS

SEQ ID NO: 200758 - protein, 99 aa, Zea mays
  Clone ID: MRT4577_11467C.1.pep
GTIYLIGLSQKSLLKPVLHEVKDLLGQVSPGAKESFPHSTRSIVTSETERSIDRMLLFAFQQTMSGHMARRTSLVRSNQSVSVTNKEPTGVCVRIYKCS

SEQ ID NO: 200759 - protein, 83 aa, Zea mays
  unsure (1)..(83): unsure at all Xaa locations
  Clone ID: MRT4577_114680C.1.pep
MAAPIDEAEYPTLADRARRHLRALICNKGCAPIMLRLASDDAGTDDLKTKTGGAKGTIRXEEESTHGLNAGXKIVIDLLEPIN

SEQ ID NO: 200760 - protein, 183 aa, Zea mays
  Clone ID: MRT4577_114681C.1.pep
GDWFHRGRPGSGPLPSSSPVRPYRPYAGGVLPPCLDARGPAGCVPRTASLRRPDHRECSDLMTTDHDADAKARSAGGHRSIDGSGPVVHRRPIDRRRKQISGSSTHRVHALGRRRRRHTHFPCYYFSSLALIWRRYPQPACSDISLPESAPLPSAGGFTEYFLSGTRQIRLCRAPHSAKSCAR

SEQ ID NO: 200761 - protein, 130 aa, Zea mays
  unsure (1)..(130): unsure at all Xaa locations
  Clone ID: MRT4577_114682C.1.pep
MGMFLLTMTAGANSLHPPECSVGETCEKATSYQFAVLFVAFAFLVLGSAGIRPCSMPFGADQFDPNTESGKRGINSFFNWYYFTFTAAMMIFAPGIIYVQSNVSWPIGLGIPTGLMCLXCVLFFMGTRLY

SEQ ID NO: 200762 - protein, 241 aa, Zea mays
  unsure (1)..(241): unsure at all Xaa locations
  Clone ID: MRT4577_114683C.1.pep
MDTLELSKDSLSSDEQKASAFEERESGDFTVDEGEYDYETACSESRNDTDGNLGVPQSPNAKSRCSNLFSTRSTGSHLSLSLEKSAAKPSGRPHSTLTDPNFVENYFKYSRLHFIGTWRNRYRKRFSNLLEAKGIKLSADHSGKKKTIIHIDMDCFFVSVVIRNMPELHDKPVAVCHSDNPKGTAEISSANYPARNYGIKAGMFVRDAKARCPHPMIVPLYFEAYXEVADQFYGTLHKHCR

SEQ ID NO: 200763 - protein, 42 aa, Zea mays
  Clone ID: MRT4577_114684C.1.pep
MASINDNYLKLKAGYLFPEIARRVNAFTTANPNAQVIPGYRA

SEQ ID NO: 200764 - protein, 122 aa, Zea mays
  unsure (1)..(122): unsure at all Xaa locations
  Clone ID: MRT4577_114685C.1.pep
THPARIPGRPRPPRALTKHIKQWEGHTCGILSAVAPLHVSNVQFVDAVTGKPRKIGYKLLEHGTKIRCARRMLAYGAAVPRSEIMGDLRKPGPTXAGAKDTPILLAQDKTFHGKAGICVPEL

SEQ ID NO: 200765 - protein, 93 aa, Zea mays
  Clone ID: MRT4577_114686C.1.pep
LPDTHRTYWNTDSQQPPVSSSAMKRARLTCTPLVILDDPSYPLRLLTIWVSARVFIRSRMNRPRMDRLSKHKFPKNCEHVDDVNSLLNQCMCP

SEQ ID NO: 200766 - protein, 109 aa, Zea mays
  Clone ID: MRT4577_114687C.1.pep
MAGPTCFLAGGRPRGGRLTKKKEQEGAEATRRTSTPRGEDKQHQARGQAHPRQARSPERTRQDGRQDAEPAARPEEREGADAAEGRGQPPDRQRGGEDGQEHLTPEHTH

SEQ ID NO: 200767 - protein, 44 aa, Zea mays
  Clone ID: MRT4577_114688C.1.pep
LGIRKHWPFHLLYQDSLGLFKISKGVFFFPKVRPRLKPLELIVS

SEQ ID NO: 200768 - protein, 184 aa, Zea mays
  unsure (1)..(184): unsure at all Xaa locations
  Clone ID: MRT4577_114689C.1.pep
RLREPGCYRAVDLRVRLAGENPVTYLHQHMIESNPLGLDSVAHYQCHQQVGQFMPGLMQLAMDNPDLYLQLLSSILLXAEGNAHTYLQQQWMKQMVPVLTELARANPSXYLQQKLSLNXQLAGSNSAGYLQHRPQXLNTWGGANPLASTFLSELHQLLPYNQVCLINPGLLEPIVNCAICLDYI

SEQ ID NO: 200769 - protein, 96 aa, Zea mays
  Clone ID: MRT4577_11468C.1.pep
GGDPSQCPIDDTTPPRCGSHIPPFWSPDLPGHAPLPPRPLALHQHAFFGNATGGDAGTAGNRAVPAPSTASPTPMLRTFGVVLNWRQRFPLGLTLN

SEQ ID NO: 200770 - protein, 92 aa, Zea mays
  unsure (1)..(92): unsure at all Xaa locations
  Clone ID: MRT4577_114690C.1.pep
KPLSIGYLYSVAELKSGAYSKDTTNISLHATSTSATSKISVIHDNALPNALLGTVEYELPHVPPWFXHAGSQKLYGVLAGIIRLVGLSTVSG

SEQ ID NO: 200771 - protein, 72 aa, Zea mays
  Clone ID: MRT4577_114691C.1.pep
AASCVIALYSLLSINAVSLSLCLLYDGWQSADVDWIRLRMVWIPCVFSAAGWTPVPSLYYRENASMKKRARS

SEQ ID NO: 200772 - protein, 103 aa, Zea mays
  unsure (1)..(103): unsure at all Xaa locations
  Clone ID: MRT4577_114692C.1.pep
ASDASHSISLLYRVIHDPSCSGDALRTKEVAITYLTHYLTKQNRADELRFLLTQIIPCFAAIPKAXLHELXRGISDAVDTIPVTSYLQILLCKEMVDRTRAEN

SEQ ID NO: 200773 - protein, 74 aa, Zea mays
  Clone ID: MRT4577_114693C.1.pep
GRVRRHMLKIRLHWKMRGRKTEKRVQGGVQHHRTGDRGALLIRTLEHTDGRYGRYGHNTGSQVKNRAYCWAFGY

SEQ ID NO: 200774 - protein, 71 aa, Zea mays
  unsure (1)..(71): unsure at all Xaa locations
  Clone ID: MRT4577_114694C.1.pep
AGVVFGQLATTSPATFLTQQQLLSFYQQFVANPVTLLQLQQMLPFVQLALTNPACFXLQHIIGGALSYIAY

SEQ ID NO: 200775 - protein, 160 aa, Zea mays
  unsure (1)..(160): unsure at all Xaa locations
  Clone ID: MRT4577_114695C.1.pep
MGAYXYVSELCTRNQPDVMRFVQRVRCXEYRQFSAIVRLTRPTRLDNGRRLGFXAKKSYVVXRVSVRCAGRMRSVTNGIVYGKLKHQGIAQFEFQTNXISVAEEHFGQXLGELMIHDSYCVIEDSAYCYFEISLNDVAYCALXADSRINWLCDPVHKHPE

SEQ ID NO: 200776 - protein, 43 aa, Zea mays
  Clone ID: MRT4577_114696C.1.pep
DQIDEALTTTIYIKEQFVDDSIKIETFIHAQTLRSRPARAAAR

SEQ ID NO: 200777 - protein, 104 aa, Zea mays
  Clone ID: MRT4577_114697C.1.pep
RPGLSQSPLSPCPKMFEVIRMLKGPFLPKKWGVSQNVPIPEFFSSELLLQKSMVFPPDKSSFGVKPMDLFGLRCPFDRSNRPSPRSHRCLPISTLYYCCFPLAP

SEQ ID NO: 200778 - protein, 206 aa, Zea mays
  Clone ID: MRT4577_114698C.1.pep
GLSVENKGGMLDGEAVKNKGGNHDQENSTSFFFFLVTAVAPPAGPGTVCLHLGLGLLLRLPPSLLLLVPAESRSQRAVLGVRVQRRTKERQRADVTKEKGSYRREARQRVEVAGGGEDGSSSSAATAPGSHGLTGFVPDPCSLGSNPGPSLAMSLPPSTPRPTPDPPREARARPQAAAVDGRACITVAYNNNADRRPTASRARRTR

SEQ ID NO: 200779 - protein, 56 aa, Zea mays
  Clone ID: MRT4577_114699C.1.pep
SLSTAPVLSNLGTTPCKGDPKCPIKFVYPGPHFYLTRPFGFSCLCFDFIIDLPVLL

SEQ ID NO: 200780 - protein, 77 aa, Zea mays
  Clone ID: MRT4577_11469C.1.pep
LFQNLIRSRKNQPNMMKIADWCEGVPATLTKNQVSICFSPSINHYDTSFPFWPLDRGVTTRTLMHNKVGPTRPPTRP

SEQ ID NO: 200781 - protein, 178 aa, Zea mays
  Clone ID: MRT4577_1146C.1.pep
RNDRCIKRNDATGSLSLCAGKQLAPPPSNPASTTSAATASTVARHPSSAKPFVDDIALDVAAGERADLLVGLHAGLAQGKEVTQQVPRQGDTAAEPGPPYREPQEEGRGEGEHEEGQEEEEDDHGAVVHGNPTLSSSPLDRSLLSCSCSCSSSRSGFYRSLSHVVLSIVCDRFGTRPA

SEQ ID NO: 200782 - protein, 42 aa, Zea mays
  unsure (1)..(42): unsure at all Xaa locations
  Clone ID: MRT4577_114700C.1.pep
MSHRKXEHPRHGSLGFLPRNRSSRHRGKVKSFPRMTQKACIS

SEQ ID NO: 200783 - protein, 118 aa, Zea mays
  Clone ID: MRT4577_114701C.1.pep
HIASRLRKHRHVSPKPSPATATTTRTTISRPKNVRACPTGRRLCSRKSNGAVDRSGHRSSHRPPNVASDGRFDPGRRRRRSEDGDPGDGTAQREATPGVRRGRNPNERVTRLAGAMSQ

SEQ ID NO: 200784 - protein, 125 aa, Zea mays
  Clone ID: MRT4577_114702C.1.pep
GSHTLLFSRNPREIKAGWKQTGCKAPQQLHDCARTVARGGCGCLRKTDACAYSVRVLERTLLFVCTYLSLSPSLFAGRIDLKEMSQRAATSRTLLFVCTFPPSLRPASVLARFTLQIYISILTDT

SEQ ID NO: 200785 - protein, 301 aa, Zea mays
  unsure (1)..(301): unsure at all Xaa locations
  Clone ID: MRT4577_114703C.1.pep
MGGAAAGTKWIHHIQRLSAAKVSAEAVERGQSRVIDASLTLIRERAKLKAELLRALGGVKASASLLGVPLGHNSSFLQGPAFAPPRIREAIWCGSTNSSTEEGKELNDPRVLTDVGDVPIHEIRDCGVEDDRLMHVISESVKTVMEEEPLRPLVLGGDHSISYPVXIMEGGYARRLLQVGLRSITKEGREQGKRFGVEQYEMRTFSKDREKLENLKLGEGVKGVYVSVDVDCLDPAFAPGVSHIEPGGLSFRNVLNILQNLQGDVVAADVVEFNPQRDTVDGMTAMVAAKLVRELTAKISK

SEQ ID NO: 200786 - protein, 57 aa, Zea mays
  Clone ID: MRT4577_114704C.1.pep
RGLFFFFFSVLLYTSKVIALSAAQMRGAESLRSDRTAAPRPVRMRQGTRGPHPAGTR

SEQ ID NO: 200787 - protein, 340 aa, Zea mays
  Clone ID: MRT4577_114705C.1.pep
MGGAAAGTKWIHHIQRLSAAKVSAEAVERGQSRVIDASLTLIRERAKLKAELLRALGGVKASASLLGVPLGHNSSFLQGPAFAPPRIREAIWCGSTNSSTEEGKELNDPRVLTDVGDVPIHEIRDCGVEDDRLMHVISESVKTVMEEEPLRPLVLGGDHSISYPVVRAVSEKLGGPVDILHLDAHPDIYDCFEGNTYSHASSFARIMEGGYARRLLQVGLRSITKEGREQGKRFGVEQYEMRTFSKDREKLENLKLGEGVKGVYVSVDVDCLDPAFAPGVSHIEPGGLSFRNVLNILQNLQGDVVAADVVEFNPQRDTVDGMTAMVAAKLVRELTAKISK

SEQ ID NO: 200788 - protein, 59 aa, Zea mays
  Clone ID: MRT4577_114706C.1.pep
HLQLPMFLVLKTTQIVQTWTLTVQTPHSASSIYRHIGSDHCNEMRNVWIRRGRADIGTS

SEQ ID NO: 200789 - protein, 425 aa, Zea mays
  Clone ID: MRT4577_114707C.1.pep
MASSSSDSGRIAGTLALRTSSALAAASLIPGLPDDVAAVILCLLTFPDQSRLRATSRAWCLLLSAATLLPLRRSLRLPRRHLLCLFPTDPSLASPILLDPAAPTTWWPLPPLPCSPQLYGLANFTALAVGRHLYVLGGSCFDARSYPLGQPSASAAVYRLDLANSRHCWERLPDMQLPRGSFACAHAPSAGGLLVAGGGSRHPMFPSNGSRTGSTEWYDATTHSWHLGASMPRDRAGCVGFLARGAGDGGEDEFWVMGGYDGYTTLGGVVPNDVYCRDAVALGLWSGKWRVIGDMWEEGERRRLGPIAALSADDGRITEVFMLDGNDVFRYDFASNRWLKEATTRRKIPNTESCGFVPMNGELYVLRSAKVRVESSGPWRQLKKKLAMEFQVYNPGAKKWRVLTTYPPVDAPIDFRTAALCTVEL

SEQ ID NO: 200790 - protein, 126 aa, Zea mays
  unsure (1)..(126): unsure at all Xaa locations
  Clone ID: MRT4577_114708C.1.pep
RTEGKPDRRTGGHAQGHPQPKRGGRARPGGXPAQKEKGERGXTSDTRRRGSRRRKAERRTQERARKRXKAEKKAAQRRRAAKARRPRGRRRKRSTKRTRHEQGEKRKETEAKQKGAAQXXPPTKER

SEQ ID NO: 200791 - protein, 116 aa, Zea mays
  unsure (1)..(116): unsure at all Xaa locations
  Clone ID: MRT4577_114709C.1.pep
KQMHQVAYRDWGVAFLXQESLXGNSKLAIICSVXPSQIFNSXTLNTLMFAQLAKAIKNNALFNXKRKXNINAFLEQIIQLKDELHRMKSNGCXKGXNGSFATXWNPSPSLHLLKIN

SEQ ID NO: 200792 - protein, 118 aa, Zea mays
  Clone ID: MRT4577_11470C.1.pep
MAEEGKVIAIHSQEQWSTKIEEAGSSTNLVVIDFTATWCGPCRFISPILDEIAKKLPNVMFLKVDVDEMKSIAEEFSVEAMPTFVLMKEGKVVDKVVGAAKEELSGKIAKHSATACAK

SEQ ID NO: 200793 - protein, 165 aa, Zea mays
  Clone ID: MRT4577_114710C.1.pep
FFFFFFFFFFFFFFFFFFFFFFFFFYRRPGSPGETRPGPGGGKNGPERGGEKSLPEGRGKRAPGEKGKPAKNPKKKKAGKKKGKNGGAKKGGKPTGIKGGKPPPKKGEKKGPHPKKKNGQPPGKRGWPNGRKEGECLKERNGQHLIALKSGAQKKAPKAAHPGWP

SEQ ID NO: 200794 - protein, 271 aa, Zea mays
  Clone ID: MRT4577_114711C.1.pep
MQAPPAPSSVDLPLAVAPPPVKAPTPRPPPPASLQPESPGVFFSAAAAAAPLGTAHRRIAIAVDLSDESAYAVRWAVANYLRPGDAVILLHVRPTSVLYGADWGAVDVSLPNPSATAASEDGDGDGDCETAAAARRMEDDYDAFTATKADDFASPLKDAGIPYKIHIVRDHDMKERLCLEVERLSLSAVIMGSKGFGAARRTSKGRLGSVSDYCVHHCVCPVVVVRFPDDGSAEGGEAAGLSAAVGAEDVLHPVPEEEGEYHDAAEEHKDA

SEQ ID NO: 200795 - protein, 57 aa, Zea mays
  Clone ID: MRT4577_114712C.1.pep
HCFFMPIFCFGPPPPFYCEAHNPFLGAFLSMPGLCVTRKEEFQSVDMWPNSSFYLVR

SEQ ID NO: 200796 - protein, 290 aa, Zea mays
  Clone ID: MRT4577_114713C.1.pep
MHAPAPPSSVDLPLSAPPPPVKAPSPRPPPPASLQPESPGVFFSATAPLGTSHRRIAIAVDLSDESAFAVRWAVANYLRSGDAVILLHVRPTSVLYGADWGAVDVSLPIPSAYSEDGFGGGDADSEAAAARRMEDDYDAFTASKADDIARPLKEAGIPYKIHIVRDHDMKERLCLEVERLSLSAVIMGSKGFGAARRTSKGRLGSVSDYCVHHCVCPVVVVRFPDDGSAEGGEAAGLSAAVGAEDVLHPVPEEEGEYHDAAEEHKVPIQPCSSLLMFPPPCLGGSACGGH

SEQ ID NO: 200797 - protein, 81 aa, Zea mays
  Clone ID: MRT4577_114714C.1.pep
WPGSAGAGVSTSALCVYVLGPEHLQGDMHDVSGAGGACAAHGDVAGDQGHVHHRARAAAVHRPLAAENVRPEWPQALPHAK

SEQ ID NO: 200798 - protein, 43 aa, Zea mays
  Clone ID: MRT4577_114715C.1.pep
HGSARGPPPVAHSVPVEVGIFLVQWTPPFGTGLSRKNAWRLGF

SEQ ID NO: 200799 - protein, 132 aa, Zea mays
  unsure (1)..(132): unsure at all Xaa locations
  Clone ID: MRT4577_114716C.1.pep
GGPPKKAKKENQREAPKRKVTGKTGGPPTTXKEKSKRRGEPPPPKRKGPLGGPPQPPPFXAPRQRENQKPPKRQKSWETRRVPPPTQLNRRPKRXYFGADQKKGEPPGIPXRRTVNPPPPPPQKSRVHEKKI

SEQ ID NO: 200800 - protein, 83 aa, Zea mays
  Clone ID: MRT4577_114717C.1.pep
MAPKKEKAPPPSSKPAKSGGGKQKKKKWSKGKQKEKVNNAVLFDQATYDKLLSEVPKYKQITPSILSERLRVMLPRLRTLLPS

SEQ ID NO: 200801 - protein, 143 aa, Zea mays
  Clone ID: MRT4577_114718C.1.pep
MEEAGRGCGLLKVVVTHGRNLAVRDFTSSDPYVIVHVADKEVFDWDRFKYDDKMGQAFLDLQPVAAATKLRRALRLTAGETNLRKVNPDADNCLLSDSFVTYANGEVAIDARLRLREVESGELFVTIKWIEPDSANTGKQADH

SEQ ID NO: 200802 - protein, 145 aa, Zea mays
  unsure (1)..(145): unsure at all Xaa locations
  Clone ID: MRT4577_114719C.1.pep
GKPPGSLGGAFKIXGFSGGLDATPSREPLLGALGLGINTSSWGGAPGSSGFSFVLEGGEFGGALGGTARFKDLVLGGPPMNGAFWPPPCFTSPWAWGGAIILFPGGGIPGDTQAPPPGGPLSPWGGWGASRPPLLFLNFWAGPGE

SEQ ID NO: 200803 - protein, 77 aa, Zea mays
  unsure (1)..(77): unsure at all Xaa locations
  Clone ID: MRT4577_11471C.1.pep
LDLHYTSLQQTATFVSLRHTDRHVTAYXTSNCHNISGTIPSHENHHETPYTKIVVILFNIHPYYTVLAIADIIRKKI

SEQ ID NO: 200804 - protein, 175 aa, Zea mays
  Clone ID: MRT4577_114720C.1.pep
MEEAGRGCGLLKVVVTHGRNLAVRDFTSSDPYVIVHVADKTTKTKVINSCLNPVWNEEMTFSMKEPVGIIKFEVFDWDRFKYDDKMGQAFLDLQPVAAATKLRRALRLTAGETNLRKVNPDADNCLLSDSFVTYANGEVAIDARLRLREVESGELFVTIKWIEPDSANTGKQADH

SEQ ID NO: 200805 - protein, 22 aa, Zea mays
  Clone ID: MRT4577_114721C.1.pep
HRRWPHPFSLRDRSVAIDIRLF

SEQ ID NO: 200806 - protein, 175 aa, Zea mays; identical to SEQ ID NO: 200804
  Clone ID: MRT4577_114722C.1.pep

SEQ ID NO: 200807 - protein, 74 aa, Zea mays
  Clone ID: MRT4577_114723C.1.pep
KPQKQETLLLLQAFILKQKGPLTKQKMAGKKFLTQPQFNPPKTPPGRYKPFMEGILKKPRAGPPNSKKTRKPPN

SEQ ID NO: 200808 - protein, 138 aa, Zea mays
  Clone ID: MRT4577_114724C.1.pep
RGAPLFKRRQGGALFLFPPPFSKEFFPHPLFLWFPPGFSLCPRFKTPPPKIILGPPIKTILFSLPGGGTSYFGPPQKKGPQKKFWSPPPQKRGGSFRLFPFFFKGGLKREPHYDAGGGPQYHPCIKESWFLIPLNLYM

SEQ ID NO: 200809 - protein, 296 aa, Zea mays
  unsure (1)..(296): unsure at all Xaa locations
  Clone ID: MRT4577_114725C.1.pep
MRGSRMNPGDRRTRSTMTIVIVMGLSCFFYILGAWQKSGTGRGDSIALRVNQETDCTILPNLHFETHHTISGANPLIMSNKMIEPCHIRYSDYTPCQDQNRAMAFPRQNMTYRERHCPVENEKLHCLTPAPKGYVTPFSWPKSRDYVPYANAPYKSLTVEKAVQNWIQYQGDVFKFPGGGTMFPNGANAYLDELASIIPLADGTIRTALDTGCGVASFGAYLMDRNVLTMSFAPRDSHEAQVQFALERGVPAVIGVLGTIKVPYPSRSFDMAHCSRCLIPWESNGGMYMXEVDPGF

SEQ ID NO: 200810 - protein, 45 aa, Zea mays
  Clone ID: MRT4577_114726C.1.pep
INISMNFSIRYFKYCNLVDEFIVQNHLQVHMRKIFGFLRVNSVIG

SEQ ID NO: 200811 - protein, 75 aa, Zea mays
  Clone ID: MRT4577_114727C.1.pep
LVGYLDEASFQFRTCITMSRRIVGCQVAAVTRVQVVAARAEKISLCGPLYVLQGTVMVIVPRICTFSVSLSMSLW

SEQ ID NO: 200812 - protein, 100 aa, Zea mays
  Clone ID: MRT4577_114728C.1.pep
DFNILSWWHEHKLTYPILSLPAKDVMAVPASTISSESTFSLVGRVIEERRRRLPSDMVEILSCIKDWELADSHMQPNVEKDPKEMELIHESMILEDAASV

SEQ ID NO: 200813 - protein, 103 aa, Zea mays
  unsure (1)..(103): unsure at all Xaa locations
  Clone ID: MRT4577_114729C.1.pep
VRRPPVPVELKCKNVGAVELMGKIRRPPSNLKTHVLNVKFDGTHVFYVKFDGTHVLNVKFVGAVELKSLSSSKKRRPGGYSFPPIGSXSXRAHCPSXFNCLTG

SEQ ID NO: 200814 - protein, 98 aa, Zea mays
  Clone ID: MRT4577_11472C.1.pep
SMLCSWSTYAVSSMHPSSVRCVLSHILSLLRIIVECPCFGRWISSTWSVMSVSGLYADSSSSEEAYSVSDSVAAGSVRHVSLHNSSSRICCMAIPVVA

SEQ ID NO: 200815 - protein, 57 aa, Zea mays
  Clone ID: MRT4577_114730C.1.pep
SYFISFLFYAPTIDLVSCLLRPCFVSSSEPSLLLDYYMKALKTTQNKAPTIVLVSCL

SEQ ID NO: 200816 - protein, 182 aa, Zea mays
  Clone ID: MRT4577_114731C.1.pep
REGFRAVLDEMSRDPKSSTEGGWALYRDLASVYVDAGQLLGSVNSPPVEAGEARISQREWITYDFLVILHAGLGRPERIRDIWRSMVATSQSQSQQQQRMTSRNYVCVVSSYLACGRLEDAGEVVDQWQRSKAPEFDVSACNRLLDALLRAGLADAAGRFRELMLQKRCILTSSSSRATVVE

SEQ ID NO: 200817 - protein, 53 aa, Zea mays
  Clone ID: MRT4577_114732C.1.pep
EGTGPQRQSRGLEVILLAPGAPLQTLNHLSGIDRGWVMVTMSCPGLSCAVTFP

SEQ ID NO: 200818 - protein, 103 aa, Zea mays
  Clone ID: MRT4577_114733C.1.pep
NSARGFCHLPAAASVRCPHRRLHSPSAPSSSTLVASVPHPHHRRPRWSPPFPIHTSDSGQGRPLSNNRELEERLARLRGEAAAWQAKALSEQAAAVALHAQLQ

SEQ ID NO: 200819 - protein, 171 aa, Zea mays
  unsure (1)..(171): unsure at all Xaa locations
  Clone ID: MRT4577_114734C.1.pep
DLLVLSIGAGASVANGSSTPMPARSPPERELARVTAEGVADMVDESLGMAFGRARGSNYVRIQAGKALVPIRADEAAVAAEAMLSAAXVESVXLFRERRLSEQTNAEKVDALAVELVKEQERRRRSPLPNVAIKQVGTPARLSSATTASSGTGTARTASTMPSPASWESRR

SEQ ID NO: 200820 - protein, 59 aa, Zea mays
  Clone ID: MRT4577_114735C.1.pep
TRAATSISRLFRSTATTIASRPCADTFASSELRFVEAFEMALQPQLCRLGHGPISTGTV

SEQ ID NO: 200821 - protein, 30 aa, Zea mays
  Clone ID: MRT4577_114736C.1.pep
KKKKKKKKKKKKKKKKKKKKKKKKKKKNTH

SEQ ID NO: 200822 - protein, 169 aa, Zea mays
  Clone ID: MRT4577_114737C.1.pep
RGGVALVLTARDVAVEGFCTSRCGHHGSYGGGGGGRAAYAWVGDAADQCPGQCAWPFHQPAYGPQAPPLVPPSGDAGTDGVVINVASMVAGAVTNPFGDGFYQGDRGSPLEAATACAGVYGSGAYPGYAGQLLVDRATGASYNAHGARGRKYLLPALFDPDTSACSTLV

SEQ ID NO: 200823 - protein, 71 aa, Zea mays
  Clone ID: MRT4577_114738C.1.pep
PKFGFYFFIYNKRTFIEATNWTMVLPRPESDLRTEYFFFFNTKQNFRDAANWAMVFPVLSPISELRSACFS

SEQ ID NO: 200824 - protein, 37 aa, Zea mays
  Clone ID: MRT4577_114739C.1.pep
YRNLNIDNYPMLTNVFIQNTHVYKNYIFSNYFTFYKI

SEQ ID NO: 200825 - protein, 53 aa, Zea mays
  unsure (1)..(53): unsure at all Xaa locations
  Clone ID: MRT4577_11473C.1.pep
AIMPYNLAFEXMHMCLLHANQHLLLMPSLSKNRGFFTMKLLQEIAVEFYKIRP

SEQ ID NO: 200826 - protein, 1525 aa, Zea mays
  unsure (1)..(1525): unsure at all Xaa locations
  Clone ID: MRT4577_114740C.1.pep
MQSKATKEGRGIHRKQQAGEWTSGCNRRGASWSRKXDGHVTRKRPRRAAACSDFKEKSIRLSEKKSVVMVKKNRMEEEEVDAVNLTKLGPEDPPPCRKLIDFILHDAEGNPQPFEMSEIDDFFITALIMPMDDDLEKERERGVRCEGFGRIEDWNISGYDEGTPVIWVSTDVADYECVKPSTNYKSYFDHFYEKAQVCVEVFKKLAKSVGGNPNQGLDELLASVVRSTNAMKGYSGTMSKDLVISIGEFVYNQLVGLDETSNNDDEKFATLPVLLSLRDQCRSRVELTKLPSNFSNTSLKIKDSECDETAEDDDDAKLARLLQQEEEWKMMKKQRGRRGTPSQKNVYIKISEAEIANDYPLPAYYKPFSQEMDEYIFDSDDSIFSDDVPVRILNNWTLYNADSRLISLELIPMKSGAENDVVVFGSGFMRDDDGSCCSTAESVKSSSSSSKADQLDAGIPIYLSPIKEWIIEFGGSMICITIRTDVAWYKLRQPTKQYAPWCEPVLKTARLAVSIITLLKEQSRASKLSFADVIRKVAEFDKGNPAFISSNITLVERYIVVHGQIILQQFADFPDETIRRSAFVSGLLLKMEQRRHTKLVMKKKTQVMRGENLNPSAAMGPASRKKAMRATTTRLINRIWSDYYAHHFPEDSKEGDGNEIKEIDDEQEENEDEDAEDEGQIEENISKTPPSTRSRKLLSQTCKEIRWEGETSGKTLSGETLYKCAYVRELRIPVGGTVALEDDSGDTVICFVEYMFQKVDGSKMVHGRILQKGSQTILGNAANEREVFLTNDCLEFKLDDIKELVMVDIQSRPWGHKYRKENSEADKVEQVKAEERKKKGQPMVYFCKSLYWPEKGAFFALSRDKMGLGSGLCSSCDNIEPDSDELKIFSKTSFVYRKVTYNVNEFLYIRPDFFAEDEDRATFKAGRNVGLKPYAVCQILSIPEGAGSKKLNPASANISARRFYRPDDISSAKAYASDIREVYYSEDVIDVPVDMIEGKCEVRKKNDLASSDLPVMFEHVFFCELIYDRASGALKQLPPNVRFMSMVQRTSALKKNKGKQICEPDQIDSGKWLDVPKENRLATLDIFAGCGGLSEGLQQAGVSFTKWAIEYEEPAGEAFNKNHPEAVVFVDNCNVILKAIMDKCGDTDDCVSTSEAAEQAAKLPEVNINNLPVPGEVEFINGGPPCQGFSGMNRFNQSPWSKVQCEMILAFLSFAEYFRPRFFLLENVRNFVSFNKGQTFRLAVASLLEMGYQVRFGILEAGAFGVAQSRKRAFIWAAAPGEMLPDWPEPMHVFASPELKITLPDGQYYAAARSTAGGAPFRAITVRDTIGDLPKVGNGASKLTLEYGGEPVSWFQKKIRGNMMVLNDHISKEMNELNLIRCQHIPKRPGCDWHDLPDEKVKLSNGQMADLIPWCLPNTAKRHNQWKGLYGRLDWEGNFPTSVTDPQPMGKVGMCFHPDQDRIITVRECARSQGFPDSYEFAGNIQNKHRQIGNAVPPPLAYALGRKLKEAVDKRQEASAGVPAP

SEQ ID NO: 200827 - protein, 52 aa, Zea mays
  Clone ID: MRT4577_114741C.1.pep
SDVQDPSSPALAGRRRRLPWRHLNRREPRLFYNQGTCKAMAYLSYSSRWTAP

SEQ ID NO: 200828 - protein, 92 aa, Zea mays
  unsure (1)..(92): unsure at all Xaa locations
  Clone ID: MRT4577_114742C.1.pep
KGSPACSFTXGLANSQICCRPTRLLLIPYIYIINITNHLAIYMNHNYSQSKLYHAHPTPTPTNSNNISTIWHSSLPYFHQNTIYHEPTSHIT

SEQ ID NO: 200829 - protein, 103 aa, Zea mays
  Clone ID: MRT4577_114743C.1.pep
DSRYQLALQVTRVLAAFMEAGAMPTTIRGGTMAVLLLRRRIPIDSHDPEPKASTSRLPYSLLFLLDRSPRLNRRPSMEIKYGGTIPSSPILRQREPNPLLPPQ

SEQ ID NO: 200830 - protein, 120 aa, Zea mays
  Clone ID: MRT4577_114744C.1.pep
CFCLIIDFACQVAERALFLWNNDHIVSLIAQNRGVIFPIIFEALERNIHSHWNQAVHGLTANVRKMFLDMDSELFEECQQQYMDKQAKAKEMQEQRESAWRQLEAVVAAKAAGDDMVLVN

SEQ ID NO: 200831 - protein, 128 aa, Zea mays
  unsure (1)..(128): unsure at all Xaa locations
  Clone ID: MRT4577_114745C.1.pep
MVPLFKQIARCLXSSHFQXVAERALFLWNNDHIVSLIAXNRGVIFPIIFEALERNIHSHWNQAVHGLTANVRKMFLDMDSELFEECQQQYMDKQAKAKEMQEQRESAWRQLEAVVAAKAAGDDMVLVN

SEQ ID NO: 200832 - protein, 54 aa, Zea mays
  Clone ID: MRT4577_114746C.1.pep
YACRYRAEVSGSITRPPLQGDKQRLRDRILDSEKSAKIDAQLNDHVSRMLTSLD

SEQ ID NO: 200833 - protein, 404 aa, Zea mays
  Clone ID: MRT4577_114747C.1.pep
QYNGSLVRPIKFWYLKKKKKVQAPAQAAGANAPTRLPDHVQEALVAAISANIFRPLPPALHESAAAIDPGAAPDEEEEPYLDPSWPHLQLVYELLLRYVVSPDTDTKVAKRYVDHAFVLRLLDLFDSEDPREREYLKTVLHRIYGKFMVHRPFIRKAINNVFYRFIFETQRHNGIGELLEILGSIINGFALPMKEEHKLFLARALIPLHKPKSVAIYHQQLSYCIVQFVEKDYKLADTVIRGLLKYWPVTNCQKEVLFLGELEEVLEATQPAEFQRCMVPLFKQIGRCLNSSHFQVAERALFLWNNDHIVSLIAQNRVVIFPIIFEALERNIQSHWNQAVHGLTANVRKMFLDMDSELFEECQQQYMEKQAKAKEIQEQRESAWRQLEAVVAAKAAGDDMVLVN

SEQ ID NO: 200834 - protein, 67 aa, Zea mays
  Clone ID: MRT4577_114748C.1.pep
DLVVVRQGLTALGSCASSFAVVCSKKKIMTDNPYGIGGGLTVDVHTNARPAQVNGRVPSSFTCTERT

SEQ ID NO: 200835 - protein, 159 aa, Zea mays
  Clone ID: MRT4577_114749C.1.pep
MASSSSRPLLCRLAELASGRVRANYRMLSSAFSSTASTERVSQSPAEPEAVLMTEGCVRRLKELHAKEPSSEGKMLRLSVEAGGCSGFQYSFALDDKKNSDDRVFETDGVKLVVDDISYDFVKGATVDYEEELIRSAFVVSTNPSAVGGCSCKSSFMVK

SEQ ID NO: 200836 - protein, 82 aa, Zea mays
  Clone ID: MRT4577_11474C.1.pep
GQFFSEQAYILSEIYMHSFGNTSMLNVRRNNSFFTAIKQRMEKDIDEVGKIARQAKTKVDELEKDVCSCLSLIVISICPSNI

SEQ ID NO: 200837 - protein, 170 aa, Zea mays
  unsure (1)..(170): unsure at all Xaa locations
  Clone ID: MRT4577_114750C.1.pep
MIAAACDNRAVQSYMLHXAFSDCNIPLSPLRAQQSTALCLEHSLVQTIRGQKVNNLGLPXCNQVFVANLCPYCXHRRCVTYDQLFTLNPAVYLQEQLLPFNQLGSGYSQGQQLIPFYALXALNPAAYLQQQILLPFSQLAAAHRAYFLTQQQLLPFYQQFAANRVTLVQL

SEQ ID NO: 200838 - protein, 176 aa, Zea mays
  unsure (1)..(176): unsure at all Xaa locations
  Clone ID: MRT4577_114751C.1.pep
MASSSSRPLLCRLAELASGRVRANYRMLSSAFSSTASTERVSQSPAEPEAVLMTEGCVRRLKELHAKEPSSEGKMLRLSVEAGGCSGFQYSFALDDKKNSDDRVFETDGVKLVVDDISYDFVKGATVDYEEELIRSAFVAEVSILMVGTQQVGEYXVSTNPSAVGGCSCKSSFMVK

SEQ ID NO: 200839 - protein, 83 aa, Zea mays
  Clone ID: MRT4577_114752C.1.pep
SPQSCDTHSGGTQSHPAGGSNKPESSVHTQPAQQHSSNSSSYEPAQDVQHDKLTQSYMPSSVCTYGLKTQPSHSSLVLGTAKS

SEQ ID NO: 200840 - protein, 111 aa, Zea mays
  unsure (1)..(111): unsure at all Xaa locations
  Clone ID: MRT4577_114753C.1.pep
MGSQVIEAHRADADVHRGAALRAENPTELLCEVHLPMLLLPVFDMEEVVYNRATGXFMCLSQRKALTHVSRPISRQVSYAPRETAFVXEDRWLNRCPAPIQRCSPFWDTPP

SEQ ID NO: 200841 - protein, 118 aa, Zea mays
  Clone ID: MRT4577_114754C.1.pep
MHSYCPPACLIRTGASMPPSPSLLDLMSLPPDLSPSAEEAADSSSSEGSSCGLVQVVPRDLSDELLGKFEDTSEFGFEYSQSGLWSPLVLRPEVLATAVRDRRRRSRRSWRRKVFCCC

SEQ ID NO: 200842 - protein, 73 aa, Zea mays
  Clone ID: MRT4577_114755C.1.pep
LAKLYPGRYLQNLIQWLRRTLFFATLPQKNNPALAQFLFKIYFTLCHKGIGHIYTGQKHHLGHKICAPVFNQH

SEQ ID NO: 200843 - protein, 58 aa, Zea mays
  Clone ID: MRT4577_114756C.1.pep
RDSSGEVFTEVTTVTSRYRSVLEVVGVGRFTCTGGGVRQWREIRPAHDEIVHLVGLTR

SEQ ID NO: 200844 - protein, 111 aa, Zea mays
  Clone ID: MRT4577_114757C.1.pep
GAGPRIFKGPRGVPSVKAPVVERGRTALFFPFVMGGGQGGPPLKMGAGPFVPVVCVVGGRVFPKGDPFTPPPELGLLYTPPYPRGARRFYFVPGGARGDGNAGPRGDMGLV

SEQ ID NO: 200845 - protein, 64 aa, Zea mays
  unsure (1)..(64): unsure at all Xaa locations
  Clone ID: MRT4577_114758C.1.pep
PWLSLFLLRWSPAACSAALACALVLFFVVCRVPPLLVARSLHIAVXLGGXASRXRGSSRVSGSG

SEQ ID NO: 200846 - protein, 49 aa, Zea mays
  Clone ID: MRT4577_114759C.1.pep
PTQKTAFNGIQPKSAFQFQEPPGVFPIFFYPPHNGSINHPPQVLNINHV

SEQ ID NO: 200847 - protein, 133 aa, Zea mays
  Clone ID: MRT4577_11475C.1.pep
LRRWLHPASDLHQHLCLHVAGGSTHFRALATLDPVWWEAPPTPSSCTVITCACRAEDPSCILMRSLGYSAWCIPRLLSRHGAPSPGDGLNVGGRQGVKLPETARVQVLPALLDTGVPGADEHTAHSHGRVGGA

SEQ ID NO: 200848 - protein, 104 aa, Zea mays
  unsure (1)..(104): unsure at all Xaa locations
  Clone ID: MRT4577_114760C.1.pep
IPTIAFCDTDSSIPYLDVGIPANNKGRNTFGCLXFCLLPRMVLQLRGSILPAHKWKLMVNLLFYRPPENSKAREENFPVPPDFPAFTDYQRTDQWGGDQWTSYW

SEQ ID NO: 200849 - protein, 82 aa, Zea mays
  unsure (1)..(82): unsure at all Xaa locations
  Clone ID: MRT4577_114761C.1.pep
RGRPVPAYMCILLLSSTPLTTLCAGGVVXGQLLSVGGGPVVDYWVGTVGVSDRRVVVGGPAGRGGVPVAGARGCAGAAHLAL

SEQ ID NO: 200850 - protein, 80 aa, Zea mays
  Clone ID: MRT4577_114762C.1.pep
FSHIEGSAAFFISNFYEVNLPLSLECPQANKQNTISNFLLFGHIHISCILYFLNIPSLPKFLNPFCTCPQITSLMPSTKS

SEQ ID NO: 200851 - protein, 101 aa, Zea mays
  unsure (1)..(101): unsure at all Xaa locations
  Clone ID: MRT4577_114763C.1.pep
ESIRHIVFAWGDKTIKLWYTLCERKYTLGSDLXDSRALNRSVSCARFFLNTLXPTIAYGYWVRTVRVWYPTNSXLRGCLGWHRVYVNADTVSHNLYLCSSL

SEQ ID NO: 200852 - protein, 86 aa, Zea mays
  Clone ID: MRT4577_114764C.1.pep
GPQEFINPLDGWGRKQKQGIKQGDPKIFGGVLFPAPKKNLEQALGGRSILVWRDRTKQGTKVGGLNCGVPFLAQVPFLGGPRGAFW

SEQ ID NO: 200853 - protein, 51 aa, Zea mays
  unsure (1)..(51): unsure at all Xaa locations
  Clone ID: MRT4577_114765C.1.pep
EAHCHWASTPTSLCGGGGGAEXRKRTTPIILYGCQIHRQRISNQHPDDRQR

SEQ ID NO: 200854 - protein, 77 aa, Zea mays
  unsure (1)..(77): unsure at all Xaa locations
  Clone ID: MRT4577_114766C.1.pep
PSGSPGTFISAXSTLLLRGLVVNPNEDNVININQQDQSGAAEVCVGPNPQVQENLKNHIDRSQASESQSKPVPKLSL

SEQ ID NO: 200855 - protein, 48 aa, Zea mays
  Clone ID: MRT4577_114767C.1.pep
PLVMMSSQVAFRRMGSAAEFMRRDHSYSSPKSSRGSVVAQSMIKTRGR

SEQ ID NO: 200856 - protein, 68 aa, Zea mays
  Clone ID: MRT4577_114768C.1.pep
LFEVEPQDVPYVYCLVYVIFVPLRWIYYRYKKWHYYLLVSPLLSHIFYVPEMRQLPEMCFHIFLHHKS

SEQ ID NO: 200857 - protein, 71 aa, Zea mays
  Clone ID: MRT4577_114769C.1.pep
WIRGLLLLGWVLALQWGMYSMCSVVLDLYTLNKGLVCELDKIIKTLAVGVWFAWDREIVCERKSKTDASSA

SEQ ID NO: 200858 - protein, 45 aa, Zea mays
  unsure (1)..(45): unsure at all Xaa locations
  Clone ID: MRT4577_11476C.1.pep
VSVRISRVIMTFQGHCLYVEESLPPDELTPRFCSLGXQMKSNVSV

SEQ ID NO: 200859 - protein, 71 aa, Zea mays
  unsure (1)..(71): unsure at all Xaa locations
  Clone ID: MRT4577_114770C.1.pep
YPWKXEFALWRLLCDQSLTGGCGIGSSKRVNRFAFYVIGSKQAEPFXAGRFIXAPMWFQYTGRPHICGFKL

SEQ ID NO: 200860 - protein, 107 aa, Zea mays
  Clone ID: MRT4577_114771C.1.pep
SVNSIALLVESDKSLEELKTPLLESSEKHDTIARGGSAGDIIPGIGQSPSMSTVSGEEDDSNSKGKKMGAAKARMFDFRKKVGEKFEEKKRHVEEKSRQIVEKMRGP

SEQ ID NO: 200861 - protein, 44 aa, Zea mays
  Clone ID: MRT4577_114772C.1.pep
HRSAPKPSANAQTRAYHYSTPPSPYIKQACIQIKNMKIIDNSTK

SEQ ID NO: 200862 - protein, 86 aa, Zea mays
  Clone ID: MRT4577_114773C.1.pep
GAGARAGRAAISPVDPRRASKRPCLNLTDYPAGHSMEEDARSTLMGHGTIWAIICCGGRVAKARRTRKAIGSLARTWRKEEGLGMP

SEQ ID NO: 200863 - protein, 67 aa, Zea mays
  Clone ID: MRT4577_114774C.1.pep
GGDNRAFFFFFILGGFKKTTVWRPFISSFFKEGLGRKKKPLLNFLQKPGAYTAPGWEGFFGLLFVFL

SEQ ID NO: 200864 - protein, 54 aa, Zea mays
  Clone ID: MRT4577_114775C.1.pep
VEATLIFSSSGLLSLRFDNEKPSPPQMLGFRPINPSGLLQIASQVFKSNPLYCK

SEQ ID NO: 200865 - protein, 80 aa, Zea mays
  Clone ID: MRT4577_114776C.1.pep
PFLLQQKKSYPGKTGDPKKSVCGKCKKKGFQKKGEIKIWKATVKSKNGGKKCCNAVPKKTLGKLNSSKACNLLKKKLGMA

SEQ ID NO: 200866 - protein, 110 aa, Zea mays
  unsure (1)..(110): unsure at all Xaa locations
  Clone ID: MRT4577_114777C.1.pep
QQQVVLRTIQAAVDYPQXYXPFNLLATMNSTVYVQQXQLLPSRPLVAESPVALWTQQQLESGXLYATPNDRRLLLNAHVLSFKLLGVTNXIALXQQPIMGGVFFDIASEL

SEQ ID NO: 200867 - protein, 135 aa, Zea mays
  unsure (1)..(135): unsure at all Xaa locations
  Clone ID: MRT4577_114778C.1.pep
XXFFXQXXKNLWGAFFFFSPFFLFFFSHPQKKINGVHLTGIRGGPVFGPIIFLPGPKTNWGPLQKKRKPVLGENPFFPFGPIARNFAPRRAILLWDWVSPPKEISGFNLFFWEKKPGPGRACHQPGFWGRPLLPK

SEQ ID NO: 200868 - protein, 149 aa, Zea mays
  unsure (1)..(149): unsure at all Xaa locations
  Clone ID: MRT4577_114779C.1.pep
AQQLQQLVVPVINLVALANLSLYPQYQQFLPFPLLYPLTLAAYLQQQLLPFSQIDIAYSXYQQLLPFTLLAAVNLAAYFQQQKLIPFSQLDAATRASFLLQQQLLPLLQQFQAKPATLFLLQQLLPFAQLALADPAASSPQHIIGGARF

SEQ ID NO: 200869 - protein, 237 aa, Zea mays
  Clone ID: MRT4577_11477C.1.pep
MKKTVVLYPGLGVGHLVPMVEVAKLFLKHGLAVTVALVEPQVESTDFSAAVARARASNPSVAFHVLPSPPADSNPDGAPRHHVVKVIQLLAAMNAPLRDFLRSLPAVHALVLDMFCVDAQDVAAELKLPVYYSFASAAADLAIFLNLPSKFASNTAKVKELGDSIITFPGVPPFKASELPSEVIGDDEALVYVLRMFERMAEAKGILINSFDSLEEPALSALNDGLCVPGRATPPVY

SEQ ID NO: 200870 - protein, 82 aa, Zea mays
  Clone ID: MRT4577_114780C.1.pep
VLRALWGGFSYLPRSLPSIGKTCVLPCGITNKSQFLPHPASSHPYWCYPSEIGFVWLCFSCCTRSYQGEPLLALIPHFPCKI

SEQ ID NO: 200871 - protein, 103 aa, Zea mays
  Clone ID: MRT4577_114781C.1.pep
RYTTVICTVPLFTCLPLSYNTLSALLVREQREVDVERLKKQARKGNEELSWTLADGSLPCGTLACTWTLDFMRLSVDVSYLLRIQTKNQCVCLHHDDGYDVAG

SEQ ID NO: 200872 - protein, 318 aa, Zea mays
  unsure (1)..(318): unsure at all Xaa locations
  Clone ID: MRT4577_114782C.1.pep
MSTSSQCTLMEGAISLPRNTRIAVVTGANRGIGLEVCRQLAGNGVTVVLTAVDEELGAKAVGNLQGLALSDVLSHQLDITDASSIARLANFLKARFGKLDILVNNAAVAGVVYSQDHLXSRTERGKXSISWIGIXLEWLWRNCRETYHAAKECLQTNYYGTKHVIEALLPLLKASDDGRIVNISSDFGLLRHFRNEDLKQVLNDVGNLTEERLDELLDQFLRDFKVGTAEARGWPVAFAAYKESKAAVNAYSRMLAAKQPALRVNCAHPGYVKTDITLHSGLLAPEEGASNVVKVALLPDGGVTGAFFEEGNELASFV

SEQ ID NO: 200873 - protein, 64 aa, Zea mays
  Clone ID: MRT4577_114783C.1.pep
MAAGFPEAGRARAGFRGIRERGIRGAEVVGGRARAWVWVSGCEILDGCARGSGGGLLRAREPRA

SEQ ID NO: 200874 - protein, 324 aa, Zea mays
  unsure (1)..(324): unsure at all Xaa locations
  Clone ID: MRT4577_114784C.1.pep
MEGAISLPRNTRYSNKAQCRCGRCFSRIAVVTGANRGIGLEVCRQLAGNGVTVVLTAVDEELGAKAVGNLQGLALSDVLSHQLDITDASSIARLANFLKARFGKLDILVNNAAVAGVVYSQDHLXSRTERGKXSISWIGIXLEWLWRNCRETYHAAKECLQTNYYGTKHVIEALLPLLKASDDGRIVNISSDFGLLRHFRNEDLKQVLNDVGNLTEERLDELLDQFLRDFKVGTAEARGWPVAFAAYKVSKAAVNAYSRMLAAKQPALRVNCAHPGYVKTDITLHSGLLAPEEGASNVVKVALLPDGGVTGAFFEEGNELASFV

SEQ ID NO: 200875 - protein, 63 aa, Zea mays
  unsure (1)..(63): unsure at all Xaa locations
  Clone ID: MRT4577_114785C.1.pep
KSPLSVPPPINKPGAPQGLMFFWNVLPVMSLPCGLYIFIRRPWCSHATKTSKSIIPXXQKKKT

SEQ ID NO: 200876 - protein, 52 aa, Zea mays
  Clone ID: MRT4577_114786C.1.pep
RARWLSLQAFTATTFNECNLREDQDAHLQDLNMRTPTSSLSVYFLSISGQSI

SEQ ID NO: 200877 - protein, 92 aa, Zea mays
  unsure (1)..(92): unsure at all Xaa locations
  Clone ID: MRT4577_114787C.1.pep
KLSMQSMFLIVHHLIYASHHCPACSQLGVTYFSLLMTSFLSRSPQRRCRTAILRHHTDLAPSXGFHFCQDSMDARGRGSRLFNGIRLFAPST

SEQ ID NO: 200878 - protein, 80 aa, Zea mays
  Clone ID: MRT4577_114788C.1.pep
LASVIPVGVGRTAVLDRPLSVCGQAPSVWSEVPVRPQCMWDVAAGGPAYWVGIPPSVYVLFLALHKLKVKYPSSRIPSLR

SEQ ID NO: 200879 - protein, 91 aa, Zea mays
  Clone ID: MRT4577_114789C.1.pep
TRECFVYNPKRRSKAFFLQHFEPIRQITLLLLSTPFLNIMRWTDFTKELFKSSCFYSHTLYCPEYMLFFCNLLPLSFYMFHFCSHFTKFPF

SEQ ID NO: 200880 - protein, 98 aa, Zea mays
  Clone ID: MRT4577_11478C.1.pep
TRQASIIRIALSEATTMPESITEHATIITPHIQCMSHKQSLTHNLFPRGQFTDLFQHFWSTINYHSRGTRYRYVNHIHSNHYSIEHRLQLLDMRQYPA

SEQ ID NO: 200881 - protein, 47 aa, Zea mays
  Clone ID: MRT4577_114790C.1.pep
RSRTITTYTGPYPRGPRMVVRLLTLTPSIIILSPLQRTQRPTTSNRS

SEQ ID NO: 200882 - protein, 89 aa, Zea mays
  Clone ID: MRT4577_114791C.1.pep
RSFTMTTSSSASNMIVMNTSGDSIAADKTTSKGEINTLSAATDQELHNENSLSAVWARCGELGRLSEGETADRDALRPIPSSSVDGFGS

SEQ ID NO: 200883 - protein, 60 aa, Zea mays
  Clone ID: MRT4577_114792C.1.pep
LKKTGGTQQLTQTKKFIIDSRPNISFCITPDGIIWPSTTNLTRCASCTLPHLTNPTPSSR

SEQ ID NO: 200884 - protein, 266 aa, Zea mays
  Clone ID: MRT4577_114793C.1.pep
MCIAAWIWQAHPVHQLLLLLNRDEFHSRPTKAVGWWGEGSKKILGGRDVLGGGTWMGCTKDGRLAFLTNVLEPDAMPGARTRGDLPLKFLQSNKSPLEVATEVAEEADEYNGFNLILADLTTNIMVYVSNRPKGQPATIQLVSPGLHVLSNARLDSPWQKAILLGKNFRELLREHGADEVEVKDIVERLMTDTTKADKDRLPNTGCDPNWEHGLSSIFIEVQTDQGPYGTRSTAVLSVNYDGEASLYEKYLESGIWKDHTVSYQIE

SEQ ID NO: 200885 - protein, 96 aa, Zea mays
  Clone ID: MRT4577_114794C.1.pep
LALWVAAMAALFAWRFVQYRRSAAFRVMGYCLPTAKGAAETLKLNMALVLLPVCRNTLTWLRSTWARFFVPFDDSIAFHKIIATAIALGICLHAGN

SEQ ID NO: 200886 - protein, 215 aa, Zea mays
  unsure (1)..(215): unsure at all Xaa locations
  Clone ID: MRT4577_114795C.1.pep
MEGKEEDVRLGANKFSERQPIWTAVQGAAVDEDYDEPPQAPLFQPDELKPWAVXRAGIAQLVDMFLLLYITILTGMDVSXPPRSVHTVXSQGILCLFLRMIFPLDYCSAGISGGYVRXGVTFRVFLTRKLPLTRALFYIIVQCLRAICGAGVHDGFHDGFYVCDGGDANVVAPGYTKGDGLGAEIVGTFILVYTVFSVTDAKRNGRDSHVPILAP

SEQ ID NO: 200887 - protein, 194 aa, Zea mays
  Clone ID: MRT4577_114796C.1.pep
MGTMKRLVSTALAARGLLRSHGLPTTTSVMYQPAFQQFMNYSSPHGGDPNANMNSTATRIAADPDTHQDFEPKSRSSDMPLHAAIAQLPFFHAIFWQDIKENPVLIYMKGFPESPMCGFSALAVKVFQQYGVPICGRDILGDLKLKESVKAHTNWPTFPQIFIKGEFVGGSDIILSMHQKGELKDLLGDIAQRD

SEQ ID NO: 200888 - protein, 509 aa, Zea mays
  Clone ID: MRT4577_114797C.1.pep
MSRLTEVEELAYLRWINSCLRHELCNSDQAARATTDIDYNGGMAFNEDDNSEGDAKTSEDSSDIKFSIAERIKQWSQNDKSCQASKKESLLDRAWIEAAEARSPTRRHSLGGPKGCAQDFNIIKRRQSDTFISLPDATDESFAFNKDPAIREKRDLLVDKYDFGRSESSRFVLSKPEVCKSQCLDVEKRALRIPNPPPRPSVSVSNSGPSNGSTVNPPRPPPPPPPPKFSSKTTRPMKRAPQVAELYHSLMRRDSKKDTSGGGICEAANSANVRSSMIGEIENRSSHLQAIKADVETQGEFVKSLIKEVTSAAYKDIEDVVAFVKWLDDELGFLVDERAVLKHFDWPERKADTLREAAFGYQDLKKLESEVSNYKDDPRLPCEIALKKMVTLSEKTERGVYSLLRTRDAMMRQCKEFNIPTDWMLDNNNNLISKIKFASVKLAKMYMKRVAMELQYMGPLNKDPALEYMLLQAVRFAFRMHQFAGGFDPETMDAFEELRNLVHVRNSTQ

SEQ ID NO: 200889 - protein, 52 aa, Zea mays
  Clone ID: MRT4577_114798C.1.pep
LPPFFFFFSLFFFFFFFVCLRLLGGHFLVRQVRYPLKRPEWTSDVQCFAPPN

SEQ ID NO: 200890 - protein, 115 aa, Zea mays
  unsure (1)..(115): unsure at all Xaa locations
  Clone ID: MRT4577_114799C.1.pep
IMVDGDKAPVYXNPLKXFGRYKAQTKLPFNPFGTMAMAKKKFYDNFASNQVFWLFKKNXLPPTNSNILDGRYPVFGYVTXRXDYLADVKVGNVIESIPVVSGLDTLVNPRSKIVG

SEQ ID NO: 200891 - protein, 96 aa, Zea mays
  Clone ID: MRT4577_11479C.1.pep
RWPWTGGDTDACNVNVFPSPPAFACARTTRPGTQEGDTPLDTRLSVLVVQYSHCARQATVRSTGRPEGSSILSWLALAGAALSDDSQTCQLDKSFS

SEQ ID NO: 200892 - protein, 60 aa, Zea mays
  Clone ID: MRT4577_1147C.1.pep
LLFLIKGVCAGGKQSFAVSYIVVKILFNISFSELISHCSQFLQICGAPVTVRTSEIKDIS

SEQ ID NO: 200893 - protein, 226 aa, Zea mays
  Clone ID: MRT4577_114800C.1.pep
MASSSFYLLSVLLIVIASCAWATDPSPLQDFCVADKESPVRVNGFPCKDVKDVKVDDFFLAADLDKPRDTTMSKVKSNVTLINVMKLAGLNTLGISMARIDYAPQGQNPPHTHPRATEILTVLEGSLYVGFVTSNPDNKFISKLLNKGDVFVFPQGLIHFQFNPSHDKPAVAIAALNSQNPGAITISNAVFGSKPPIADDVLAKAFQVDKKVVDWLQAQFWEDNHN

SEQ ID NO: 200894 - protein, 55 aa, Zea mays
  Clone ID: MRT4577_114801C.1.pep
TLACPGCHPSAGVAFFILHMKRNRLWCPHTDMCLTEIINILLDIYLYQHIPLSPA

SEQ ID NO: 200895 - protein, 436 aa, Zea mays
  unsure (1)..(436): unsure at all Xaa locations
  Clone ID: MRT4577_114802C.1.pep
MDEAADAFAGVSSPGAFLHNVMIRGFADAGLPLDALAAYRAMLAAGARPDRFTFPVVIKCCTRAGALGEGRAAHAAVIKLGLGADMYTANSLVALYAKLGLVGDAERVFDGMPARDIVSWNTMVDGYVSNGMGALALACFREMNDALRVRHDGVGVIAALAACCLESALAQGREIHGYAIRHGLEQDVKXGYALNERPVDAFDCFMQMRAEGFQVEAVTAINLLAACGQTESSLYGRSVHAYVVRRHFLPHVVLETALLEMYGNVGKVEXSEKIFGQMTEKTVVTWNNMIAAYIYMEMYQEAIALFLELLNQPLYPDYFTMTTVVPAFVLLGSLRQCRQMHSYIIKLGYGDSTLIMNAVMHMYARCGDIVASREIFDKMPRQDVISWNTIIIGYAIHGQGKTALEMFDEMKXYGIEPNESTFVSVLTACSVLAWRL

SEQ ID NO: 200896 - protein, 119 aa, Zea mays
  unsure (1)..(119): unsure at all Xaa locations
  Clone ID: MRT4577_114803C.1.pep
LVGTRLDCCYFVLLKEMHERMANRQTYGGSGLASTVSGLSSHSWHGSIRLLDSTDTESLLQXYQTSADGDIAVRSQTMSRSSSPXTPQMRHAMSYPARPHPGNCYFVSPRICLKPILLA

SEQ ID NO: 200897 - protein, 80 aa, Zea mays
  Clone ID: MRT4577_114804C.1.pep
VLGFRHAPLPTYKFGFVAFLCKYMPYRSLWNLVDVSLVRIFCTPLARPFPASFFFASLDVVTKLYKQKKKQKKKKKKKKK

SEQ ID NO: 200898 - protein, 91 aa, Zea mays
  Clone ID: MRT4577_114805C.1.pep
KKKIITKIQIKIRLAYNSLPIIANLFITPSKNNKTSSNRMTSLTITTYPITKPIFPPLLYHLPLKAFFLCHPESYHLHHLRSFLQLHQTYL

SEQ ID NO: 200899 - protein, 113 aa, Zea mays
  unsure (1)..(113): unsure at all Xaa locations
  Clone ID: MRT4577_114806C.1.pep
HINKHPVRTGDIVVFNSEGCDIPIVXHRVNEVHECHELXESSIFSKGDNNPLHYRVLYAHGQLWFQGQHIFGRGVGYLPYAGWLSIVMTXKPVLXYVLIGALGLLVVASKECR

SEQ ID NO: 200900 - protein, 79 aa, Zea mays
  Clone ID: MRT4577_114807C.1.pep
LSRGRFTHRRRLGNDLVCRACDHQHVYHVVAVELTARVYGINVVRGDVDMYAVLHGGIRQWGALAAPPASKWNKVESRI

SEQ ID NO: 200901 - protein, 114 aa, Zea mays
  unsure (1)..(114): unsure at all Xaa locations
  Clone ID: MRT4577_114808C.1.pep
QISVVHAKLASIGANLLGYFIQGFRRTNGVSDVRIMYLHSVLTCRSGSALMLALIYSEILKTVRTYGSLDFDAENFFPXDLNSLPRGYDIQKSKLVDEPHIMTSKSLLVETLRT

SEQ ID NO: 200902 - protein, 85 aa, Zea mays
  Clone ID: MRT4577_114809C.1.pep
SLWRDRQRIMHRSLRPLWLGLHRRIPCELQLELSAQPCGLGKKQFVSLCVVPWVEGQPPVCLVSRISNRGRVLKHGQFVTKGRWC

SEQ ID NO: 200903 - protein, 243 aa, Zea mays
  unsure (1)..(243): unsure at all Xaa locations
  Clone ID: MRT4577_11480C.1.pep
RLGRRVWRRSYLLYGSPGTGKSTFAAAMARFLGYDVDLSRTDAAADDLRALLLHTTPRSLVLVEDLDRYLQGGGGDAEARVARVLSFMDGVASCCSEERXVMVFTMHGGKDSMDAAVVRPXRLDVHIQFTLCDFEAFKALANNYLGLKDHKLYLQVEKGFHRRQVKEMVNEAVDSDIQLWTLRTWRKNYFIFNDRHRGMGMDIDDMSYEELLALGERIGTVNTGLSDDVLSTCLNLSLYMPQL

SEQ ID NO: 200904 - protein, 206 aa, Zea mays
  Clone ID: MRT4577_114810C.1.pep
VKSDCCSKRLQQVLTDERVQPATIYLVYQDYILCTVVHHLYLHEQPTIIKKKRHPTTDARQVDHSYNRKPAEFYNALSRPPCHTTRVARVVALDATAARHYPILGLLCGRGSNALRWPPSIARLLPCLPRLRLLGPEIGMGKRSDGNLRLHSTWDVVLLLVGSVHLLDGRRRQRQLLWGVRQCRLLNRLVGGVPLRYVIVVVIPGT

SEQ ID NO: 200905 - protein, 74 aa, Zea mays
  unsure (1)..(74): unsure at all Xaa locations
  Clone ID: MRT4577_114811C.1.pep
LLASRSHAYHRRGLWAIKAKNGCVFPKVEKPAAAAEPXFYPADDVKPCVPSTRMPNPTMLRTSITPGTVLILFA

SEQ ID NO: 200906 - protein, 68 aa, Zea mays
  Clone ID: MRT4577_114812C.1.pep
ATRPPKRACGPTTTTCPQMHMAVDGVSGSAIAQLLKASSRARCLLAGSSIISPTTPACEVARTTTRAT

SEQ ID NO: 200907 - protein, 49 aa, Zea mays
  Clone ID: MRT4577_114813C.1.pep
MGVPPAPAPAPWTAPAAWSGLVVDDVHALVALASMAPHAPSCSAAGSSF

SEQ ID NO: 200908 - protein, 206 aa, Zea mays
  Clone ID: MRT4577_114814C.1.pep
MKAGPPHVAMLATPGMGHLIPLAELAKRLAAQRGATATLITYASAASATQRAFLASLPPSVSSRALPPADLSDLPRDAANVTLMTEECARSVPALSRLLAELRDTTRLVAFVADHFGTASLGAARDAGVSAVCLFMPMSLHAVSLFLHLPEVAASVPGEFRDLADPVRLPGCVPIPGPDILSPLQVRSDPAYAEMLRLAVRCREAA

SEQ ID NO: 200909 - protein, 269 aa, Zea mays
  unsure (1)..(269): unsure at all Xaa locations
  Clone ID: MRT4577_114815C.1.pep
RVRSLDADPTESWVITGHRHGDVALWKHGMQKMMSLITYREXSLPRNSLNTQHDVYSVKFIARKRWFVVWTCDGFIHVYKYETRIMDCIKRFRAYSSGIIDWGICSSRALIVHPTQPYLLSTCEEMKLWDWDDDWKCIQKFGREHTDSILQVAFSPNDSFASVSSDHTIKLWCLKSPTSECTLHGHSDKVNCLDFVTHDGQQYLISGSQDCTAKAWALKEKECVQTMDVXMSPVVSVISLPDTPYITTGSADGTIHLWSSANFRLERIL

SEQ ID NO: 200910 - protein, 245 aa, Zea mays
  Clone ID: MRT4577_114816C.1.pep
STHFRAGIMYASSDSSDEPLLKSNMFSLGGSKFFGAVSRSIVLGAGRARVRPRVRAVFSSKIASSANRPFGEEFRAARRVSEDIGAQLVLGDRPIEITLERAWKSLTWDQKANLLISLFRGITSTTQMPDEKAAVSPYELYEKLSTSYPALLQPLIHERDMFLAWSLKRSKAVNKSRTVVGVVGKGHINGIVYALISDQGDLRFRDLVGRASSDTWVSSLVKGLVRDTVIGLVLWALYEQLQAVL

SEQ ID NO: 200911 - protein, 114 aa, Zea mays
  Clone ID: MRT4577_114817C.1.pep
ARNSARGYKEETMGPLQKSMITSKTYLTYSDVNIDKAGSVRQFQPLHRHVEIGEGISNSSMVTAREISAAILLINRVYSLLVHDNSSIRTVIPESIMSIDTKKVYWSCLKWCCV

SEQ ID NO: 200912 - protein, 47 aa, Zea mays
  Clone ID: MRT4577_114818C.1.pep
TYDWGELLIPPNHSASGPFTMVPTIKTPNFIAPKKQLYGKMSVFFNY

SEQ ID NO: 200913 - protein, 103 aa, Zea mays
  unsure (1)..(103): unsure at all Xaa locations
  Clone ID: MRT4577_114819C.1.pep
KISVYFPKKEGEGLFKILVSLXKEXPMGVPKVDFSGSGLGGCPYSKGAPGKVSPEEFVYKVQGLGVETKVDLNKVMGGGGYISKHLGRPLGFKTPPSFPKRAP

SEQ ID NO: 200914 - protein, 40 aa, Zea mays
  unsure (1)..(40): unsure at all Xaa locations
  Clone ID: MRT4577_11481C.1.pep
REKGCXGKKKKKKKKKKKKKKKKKKKKKRKKKKKKKKKKP

SEQ ID NO: 200915 - protein, 66 aa, Zea mays
  Clone ID: MRT4577_114820C.1.pep
FHWRHVEDHDRFYCINNAIPAGSRSSISDLTSRLGCSLRSANGGTALRRLWLIRLSTRLTDYCRPS

SEQ ID NO: 200916 - protein, 45 aa, Zea mays
  Clone ID: MRT4577_114821C.1.pep
HLERPNNAKRKFCPDLNRIQLLTSKIHNWSLSHPIQVLLDFLESQ

SEQ ID NO: 200917 - protein, 108 aa, Zea mays
  Clone ID: MRT4577_114822C.1.pep
QHTSSILVVEQSVYAQVFFDVGCSVPPSRARPSRRRGVLCGSRVEADRCAPRCVSRCCQRTRLERCTPMSHEASLKGTRAVEQLQRSSPRKRRGCPAEQRRSAACRET

SEQ ID NO: 200918 - protein, 135 aa, Zea mays
  Clone ID: MRT4577_114823C.1.pep
KEFELFMDSVLFSCGEAGTTSEYKVASSEKPKEHFVRFDSSDCSCLCTCRKFEFMGIPCCHMLKVLDYRNIKELPQKYLLKRWRRTAKSANEDNEGNATNANNGSLLIVPAPPTNHHGLQSFSAMIQDASVSSMH

SEQ ID NO: 200919 - protein, 71 aa, Zea mays
  Clone ID: MRT4577_114824C.1.pep
LQAFIVRFFPVEAFHGASCSISAALMSFSFPLSMSASPAGVLALFSFRLDLAFPSVYTRSWFISMPMLIAS

SEQ ID NO: 200920 - protein, 71 aa, Zea mays
  Clone ID: MRT4577_114826C.1.pep
LAAVGVAVARVHADRTDPRFAAGAPLLEASSLLAHLFKELLFPPLPHLGPLLPGDVHIAIAVGVVLVLGRL

SEQ ID NO: 200921 - protein, 139 aa, Zea mays
  Clone ID: MRT4577_114827C.1.pep
AQEADHRNVCRLLFRAAHLPLLLCRLLCLSTRPVSTARRTMVHEHSMPPSNHDPALDTVHCSLSLGAKGPMVEHTKTVTTLRWTTTCQTYRRSQKTITSYEGTHDQGSTPVSLLQRPRSPATRTEATRYSRTHGRRFMI

SEQ ID NO: 200922 - protein, 98 aa, Zea mays
  unsure (1)..(98): unsure at all Xaa locations
  Clone ID: MRT4577_114828C.1.pep
PASGVTYLVLDEADRMLDMGFEPQIRKIVAXDRQTLYWSATWPREVEALARQFLQNPYKVIIGSPELKANHSIQQIVEVISDHEKYPRCEGHKVCDKL

SEQ ID NO: 200923 - protein, 100 aa, Zea mays
  Clone ID: MRT4577_114829C.1.pep
LKLKGKALDVKDGGVKKKKGYQHEKSSQTESDKNRDEENPHLDYDHLTPAERRYMKQKQKIDMQKIAKVANKSHKDRMQDFNQYLAKLSDHYDVPKVGPG

SEQ ID NO: 200924 - protein, 243 aa, Zea mays; identical to SEQ ID NO: 200903
  unsure (1)..(243): unsure at all Xaa locations
  Clone ID: MRT4577_11482C.1.pep

SEQ ID NO: 200925 - protein, 473 aa, Zea mays
  Clone ID: MRT4577_114830C.1.pep
MNPYDLRFADPSSYHDRRSDLTVAPTFAPPAPVAAANLNPYAAAYPLPVPVPVPAAPAGGDYQRYGQGGRGRGGGGRGGGGGYGGGGRGGGRGRDGLDSLALPKPDFRSLIPFEKNFYVECPSVQAMSEADVAQYRRLRDITIEGRDVPKPVRYFQEANFPDYCMQAIAKSGFVEPTPIQSQGWPMALKGRDLIGIAQTGSGKTLSYLLPGLVHVGAQPRLEQGDGPIVLILAPTRELAVQIQEESTKFGSYSRTRSTCVYGGAPKGPQIRDLRRGVEIVIATPGRLIDMLEAGHTNLRRVTYLVLDEADRMLDMGFEPQIRKIVAQIRPDRQTLYWSATWPREVEALARQFLQNPYKVIIGSPELKANHSIQQIVEVISDHEKYPRLSKLLSDLMDGSRILIFFQTKKDCDKITRQLRMDGWPALSIHGDKAQAERDYVLAEFKSGKSPIMAATDVAARGLGMMIYLNIRIR

SEQ ID NO: 200926 - protein, 79 aa, Zea mays
  Clone ID: MRT4577_114831C.1.pep
KGCWTYLENALLNTGLIVSSQTMQSISVETIDVNLHIEYYFQTSQVDAPLPSPVLGVSPCPLIISTRTKLCKKIVRVRN

SEQ ID NO: 200927 - protein, 43 aa, Zea mays
  Clone ID: MRT4577_114832C.1.pep
NRLWLPGVPFRINNSIYLQLRVTPPPTGVFYLPPHLCRLNNVF

SEQ ID NO: 200928 - protein, 63 aa, Zea mays
  Clone ID: MRT4577_114833C.1.pep
GLFLYYGLAVAAQGHIVLGDLPLYFINQITNSFRAYWATLTLLWPKKGFLTNTTLLFDLLVLG

SEQ ID NO: 200929 - protein, 168 aa, Zea mays
  unsure (1)..(168): unsure at all Xaa locations
  Clone ID: MRT4577_114834C.1.pep
LCESKKTYILPQCSFXTRAGISQRTASMASMGFEHRREQAYGLPPVLDESTVEHPIGPLQQQSQAHVTIQTIASQQQQALTHLAEENPIXYFEQHVVASXNPLALXTCTAYQQQPQMQQFLPALSKLTMENPMVYXLQQEQTVSSIPLAMGNAPTYLQQQLLQQQLLQ

SEQ ID NO: 200930 - protein, 140 aa, Zea mays
  Clone ID: MRT4577_114835C.1.pep
TEILRTKHPAPSDERGVRSDETDEKWAGMSIYVTLRRELGGAEGDGGVAEGLGVEAALRVRLQIQQRRYLRGRHLAGAHLLWIDRRGSSRCPLRVSSATDPHPRSNRPCRAQRGSGEDLNDWLVGFQGSAASSDCAPVFV

SEQ ID NO: 200931 - protein, 148 aa, Zea mays
  unsure (1)..(148): unsure at all Xaa locations
  Clone ID: MRT4577_114836C.1.pep
MAVFFDLHTGDRLKSLEAHLARKTYGSGDPIRGGDIKGFAGGPKKPGAXFPNAARWYQTVSAGGASRFPGKGGGVNLPAGSTPAAAAPADEAEDDDDLDLFGDETEEDKKAADERAAAAKASSKKKESGESSALMDVKPWDDETDMKK

SEQ ID NO: 200932 - protein, 38 aa, Zea mays
  unsure (1)..(38): unsure at all Xaa locations
  Clone ID: MRT4577_114837C.1.pep
VXKKKKKKKKKKKKKKEKKKKKKKLKKKKIKKKKKRAY

SEQ ID NO: 200933 - protein, 51 aa, Zea mays
  Clone ID: MRT4577_114838C.1.pep
EAPGELCTSCNKLLYVEISMYVASQNIVVIYTLACTTPVYLFIFERKKKKI

SEQ ID NO: 200934 - protein, 311 aa, Zea mays
  unsure (1)..(311): unsure at all Xaa locations
  Clone ID: MRT4577_114839C.1.pep
MAVFSDLHTADGLKSLEAHLAGKTYVSGDSITKDDIKVFAAVPSKPGAEFPNAARWYETVSAAVASRFPGKAVGVNLPAGSAPAAAAPADEVCSPHPKPYCHISFLFVYINLSYWSNNGAMLFCLIXMVQFFIDWSNNGEEIPVDLXLIFYSIKYQPICRCVINCMPSMLYINASFLVPLSSADESELTENINRVCHSLEFHCCCPCCSKLLILDXEDDDDLDLFGDETEEDKKAADERAAAAKASSKKKESGKSSVLMDVKPWDDETDMKKLEEAVRSVQMEGLTWGASKLVPVGYGIKKMTIMLTIVDD

SEQ ID NO: 200935 - protein, 68 aa, Zea mays
  Clone ID: MRT4577_11483C.1.pep
GDAHHPSIASLAVHAHNQGNLSRIQRPQLAEGRGVLQQSPAAYLPARRRLESHLWPNHMEAKLSTHQP

SEQ ID NO: 200936 - protein, 212 aa, Zea mays
  Clone ID: MRT4577_114840C.1.pep
AAAAAKIKNPPRVRDYLFKLLLIGDSGVGKSCLLLRFADDSYLDSYISTIGVDFKIRTVEQDGKTIKLQIWDTAGQERFRTITSSYYRGAHGIIIVYDVTDQESFNNVKQWLNEIDRYASDNVNKLLVGNKSDLTANKVVATETAKAFADEMGIPFMETSAKNATNVEQAFMAMAASIKDRMASQPAAANARPATVQIRGQPVNQKTSCCSS

SEQ ID NO: 200937 - protein, 65 aa, Zea mays
  unsure (1)..(65): unsure at all Xaa locations
  Clone ID: MRT4577_114841C.1.pep
RLELTTLLTVMITQKWQPSCRRCGAHHVLDAFATIGGSFDAFFIHKHKATLSIRRTRRCXWRCHA

SEQ ID NO: 200938 - protein, 114 aa, Zea mays
  Clone ID: MRT4577_114842C.1.pep
AAGIALLLGCAPPRPGSGRPAPVWSAVRGPRAPCTPPASIPFRASHSVERGVVRRLLLPRRAAPAPLLFLHLAHQPGLKLASRLARRVRLATTPLSSSFWISRSLSPIVDGSEK

SEQ ID NO: 200939 - protein, 55 aa, Zea mays
  Clone ID: MRT4577_114843C.1.pep
CNPNSFIMFDSRIGSLRSLVGRLSNHVVNYTLGSHSMMHLPACATSVLCCSAKFT

SEQ ID NO: 200940 - protein, 54 aa, Zea mays
  Clone ID: MRT4577_114844C.1.pep
SRTLSSTTTWAVAVALRREARTLKDLVMTIARAGTSVKEGAVMATDKKPPPVVS

SEQ ID NO: 200941 - protein, 418 aa, Zea mays
  Clone ID: MRT4577_114845C.1.pep
MAPPRWKSGDGRRRLLLLLCCCLLAFPCHAQVLTNNNISHRSDQGGIHSFVGTYGINYGRIADNLPPPEVVVRLLKLARIRNVKIYDAEHKVLDAFRGTGLNLVVAIPNEFLKDMAANPAKAMDWLTENVQPYYPSTRIVGITVGNEVLGGQDAGLAQALVGAVLNVHDALKMLRLDAKIELSTPHSEAVFANSYPPSACVFRNDLMVYLRPLLDFFSKTGAPFYVNAYPFLAYMSDPSHIDINYALFKPNAGIVDPKTGLHYNNMFDAQVDAAYFALEAAGYSGMEVRVAETGWASAGDATEAGANMENAITYDRNLRKRLFLRKGTPYRPDRVAKAYIFALFNEDLKPGPTSERHYGLFKPDGSVSINIGLKGLLPSSAPPRPLVAFKRAGAWGWILQYSAALLPCTLFSLALLGI

SEQ ID NO: 200942 - protein, 64 aa, Zea mays
  Clone ID: MRT4577_114847C.1.pep
FQHIFNMNFIILLLMECLPYRNVHDKFICVFYMSIMYAKLKCFPVILIDVIMASLIFLLLLYIG

SEQ ID NO: 200943 - protein, 56 aa, Zea mays
  unsure (1)..(56): unsure at all Xaa locations
  Clone ID: MRT4577_114848C.1.pep
FGLPLTIYPNFKYISCEMIYGQVPLPLKKKTVSNRACYPSLCSMXDXSAPACPKLQ

SEQ ID NO: 200944 - protein, 65 aa, Zea mays
  Clone ID: MRT4577_114849C.1.pep
TAPELPGPTTLTSRFVAQHCRSNTERWLTRLPHRATPSPSARFRNGGAICQGPTPIIPAELCKFS

SEQ ID NO: 200945 - protein, 403 aa, Zea mays
  unsure (1)..(403): unsure at all Xaa locations
  Clone ID: MRT4577_11484C.1.pep
MDANTLLLPCSDGAVAGAVDFRGRPASRSGTGRWSAAMFVLGVEIAERFAYHGVSANLISYLTGPLGESTAGAAAAINAWSGVATMLPLLMACVADAWLGRYRTIVLASLLFVVSMGMLTVSALPAFHHDGCSSYASASRPLACSPPPVQVGVFYVSLYLVALAEAGHKPCAQAFGADQFDQNDPKESASRSSFFNWWYFGMCSGTAVTTMVSSYIQDNVGWGLGFGVPCLVMLFALLMFLLGTRNYRYYTSTESSPFARLATAFVALIKGSKXDNMTALLXSDDAGHREEVKGVLRLFPIWATCIIYAVIFSQSSTFFTKQAATLDRRVGSTLRVPPAALQTFISVTIMAFIPVYDRAFVPLARRLTRLSSGITMLQRIGTGLVLALVAMVVAALVEKRRVA

SEQ ID NO: 200946 - protein, 109 aa, Zea mays
  unsure (1)..(109): unsure at all Xaa locations
  Clone ID: MRT4577_114850C.1.pep
RTRGRSFFRDRHSQRDRHTHPGGESPQGKRPLMCPDLNXLDLCISPPCQEEDEEMAEAAIRVRPSGKRAAGLCFGCSLGLPRTVDCRCSSSSFLGLKTAMLDFKSLEMK

SEQ ID NO: 200947 - protein, 199 aa, Zea mays
  Clone ID: MRT4577_114851C.1.pep
MPHLQPPRPHPHPTSRLSRASRPSPFPFFPAGTSRSGRLHPVPASGHSVSRVSKGKFAVAAVTLDDYLPMRSTEVKNRTSTDGIKSLRLITAVKTPYLPDGRFDLEAYDSLINTQINGGAEGVIVGGTTGEGHLMSWDEHIMLIGHTDNCFGANIKVIGNTGSNSTREAVLATEQGFAAGMHAVLHVNPYYGKTFTEGL

SEQ ID NO: 200948 - protein, 87 aa, Zea mays
  Clone ID: MRT4577_114852C.1.pep
WQAPGGEKSQWIPWGPPFLGGPWPLVCKGIFPFLFEPKKILAPSKKGPILRPFKGGGTNFSKTQTGGCLGKTPPKQLGGFLYPPLFF

SEQ ID NO: 200949 - protein, 442 aa, Zea mays
  Clone ID: MRT4577_114853C.1.pep
MEQAEVCYLISSISPLRENVVSKGGLCFVKLYQVDNLMRVLCFPTAGGKSVKKPRFSLRGYDFVPLDVKTDNLCIGEQDVSSAVPSTKASQTMVAERLENVEEQTEDLAPEFALPPKANTSVSELLDNLQRRGGSFVRTPSLLHQHAPSISIREQEVSSGVPPTKASQALMDEPFENVNGQTEELPSELPCSIKRPKFSVAELLEDLQGRSGSYVETASLSHQHTRAKHWKPKFLSSEKKTIAILGDRSIDSEDPLEHVIDGTSSEEEDATQNHLSLVNKDENQQTMADLFQEVFNPTNMDGAMKSMTSTGAGNYGRMQQIMQMEKYWHVEFLRQYSREHSYSGDLKGTTVQIMSRSLEGKLTVCSCMFQEKGNDATISNASADGTMDESRTRRTIIFSPKICNNVDLLVGNIIHIFPPWKEVKIQEEHVIICTYFSHHHRT

SEQ ID NO: 200950 - protein, 108 aa, Zea mays
  Clone ID: MRT4577_114854C.1.pep
NNPFFTSCSIYRCVLIPRMTTSQTIRSTFAVLPTMHCKLMTTRLLELNNTMKRSSSQDFHVTLLDLFELFFVVQPDDHRLGCEDEHDVPDDLLHALEPGHVRRPCCPS

SEQ ID NO: 200951 - protein, 157 aa, Zea mays
  Clone ID: MRT4577_114855C.1.pep
KTYRSHQHTRAKHWKPKFLSSEKKTIAILGDRSIDSEDPLEHVIDGTSSEEEDATQNHLSLVNKDENQQTMADLFQEVFNPTNMDGAMKSMTSTGAGNYGRMQQIMQMEKYWHVEFLRQYSREHSYSGGAVGSSWYNLYAFCFGLGSCLFVCNYTWI

SEQ ID NO: 200952 - protein, 98 aa, Zea mays
  Clone ID: MRT4577_114856C.1.pep
KNLLQSHQHTRAKHWKPKFLSSEKKTIAILGDRSIDSEDPLEHVIDGTSSEEEDATQNHLSLVNKDENQQTMADLFQEVFNPTNMDGCHEINDINRSW

SEQ ID NO: 200953 - protein, 189 aa, Zea mays
  Clone ID: MRT4577_114857C.1.pep
LLFNLEVQRQHWFIPRMNGGSVTSGGFCPKNNALVITTSKNEVYVFDVEAKELGEWSKRHTHELPTRFQDFPGEVIGLSFHKMSPFSVMIYSARAMCVIDFGLPVVQDVQLSTSEKTDSQKAAKTKVKRKHRDEDLKQEKRSNFTFFAFKDPVLFAGHLLDSSILVVEKQWMDVVQGFGPPVHRHIYGT

SEQ ID NO: 200954 - protein, 87 aa, Zea mays
  Clone ID: MRT4577_114858C.1.pep
RLLSGRWPFPFCRWPFWFFACSVGRPGFPVFVCWLSVWAPWAGHLCFRASCCAPLCARLGFPPGPAMTVLPPGWVPPSGPLAAPDSV

SEQ ID NO: 200955 - protein, 72 aa, Zea mays
  Clone ID: MRT4577_114859C.1.pep
DPIECFLPPKWPNFPETPGGGELPFKAHQTRGPVLSIKARGPLPLRSPPGWANLCPPYLGGNFFFRPGYGPT

SEQ ID NO: 200956 - protein, 79 aa, Zea mays
  Clone ID: MRT4577_11485C.1.pep
TLHLLFNGNKTVVVPLMRTTKFGFLQPKLFCSMDKHMAVCKQRCNTFAKFIFWREKSLNKLLLIKKTPPGSPKKSKKIV

SEQ ID NO: 200957 - protein, 126 aa, Zea mays
  Clone ID: MRT4577_114860C.1.pep
MAISVTAVAALPAFSAQRSLPQPSRQRVVAFIVVRPVRAHRRFVGVAASSPPTPPDLAKKVSESIKQAQETCADDPVSGECVAAWDEVEELSAAASHLRDRQKGADPLEEYCKDNPETDECRTYED

SEQ ID NO: 200958 - protein, 66 aa, Zea mays
  Clone ID: MRT4577_114861C.1.pep
LLENSLVIVKRKIFFREFQFWLFLLAHFTAFHCYYKARVSSCIVPLPHYTCIERFLRASQKKKKSP

SEQ ID NO: 200959 - protein, 82 aa, Zea mays
  unsure (1)..(82): unsure at all Xaa locations
  Clone ID: MRT4577_114862C.1.pep
IFHIDPPINTHLYIDSFHTPSKSYXXEFLQHYEYFXITNLPSKTVHYIYKVTSISLNPNIPMQIFNLIMINPPKPLDISYLN

SEQ ID NO: 200960 - protein, 159 aa, Zea mays
  Clone ID: MRT4577_114863C.1.pep
NVCVDPCSEDSHRSHLPPLRSPQRSAYFHNENGSGSVGVWQSSRRGGVDGLRAKRQSFKVSSSIKGSYVAKTSVPRPKPGDSLSQSATALRGVRKNTTAVEVGGHPVSLKPNAVRSVAKDPSSSRGPPRDSLSQSAIALPKHRKDATAVKSKTNNKPWL

SEQ ID NO: 200961 - protein, 132 aa, Zea mays
  Clone ID: MRT4577_114864C.1.pep
FSRKISRMDIILHLPDQLLLDCCWSRFFPIHPNTLKKPLGHHTTVSILSLSRTMDIPTQLNSSYNVFTGADSSFSCDALSFQPQLHRTKDSVTHFISSHSNPHTALDHQPCPNQFARDNSFRPNHKPKKRPS

SEQ ID NO: 200962 - protein, 57 aa, Zea mays
  Clone ID: MRT4577_114865C.1.pep
SFEGSGATASHLTHWWPLLYSSCESSDADTGRALVLRGRKGDPPTLLLPRVSTPDTP

SEQ ID NO: 200963 - protein, 58 aa, Zea mays
  Clone ID: MRT4577_114866C.1.pep
RALKTSTRGLFFLWTVEVRANQAAVAPQDLSKVFPQVKKMTKVPSSPLMHRRCQPLPK

SEQ ID NO: 200964 - protein, 244 aa, Zea mays
  unsure (1)..(244): unsure at all Xaa locations
  Clone ID: MRT4577_114867C.1.pep
MASATEMQPLAPSGYRRAPEMKEKVEASSIDLEAGNGETLYPGISRGENALRWGFIRKVYGILCAQLVLTTVVSAITVFHPTLNATLSNSPVLALVLAVLPFILMIPLYIYQHRHPHNLAILGLFTLCLSFSIGVACANTEGTIVLQALVLTSAVVVSLTAYTFWAAKKGKEFSYLGPFLFSALTILVVISFTQIFFPFGPASNAVIGGFGALVFSGFIVYDTENLIKRXTYDEYILXASVGLY

SEQ ID NO: 200965 - protein, 112 aa, Zea mays
  Clone ID: MRT4577_114868C.1.pep
MSTSYTEAQFGSLLDLPAGDDLTSWFTHLCGEEQAAALPAFQAPVAMADPRKRSAEYHLLEGEASGVKRQRSPTSSSRENSAGSNDGDYEHTSAAAAAAAAAAAAGGGGGGR

SEQ ID NO: 200966 - protein, 167 aa, Zea mays
  Clone ID: MRT4577_114869C.1.pep
MDLVGVEVKHAAEGAPEENCSAKPTKQGEGLRHYYSHNIHEHQLLLRQKTHNLNRLEAQRNELNSRVRMLREELQLLQEPGSYVGEVVKVMGKNKVLVKVHPEGKYVVDIDKSIDITKITPSTRVALRNDSYVLHLVLPSKVDPLVNLMKVEKVPDSTYDMIGGLDQ

SEQ ID NO: 200967 - protein, 98 aa, Zea mays
  unsure (1)..(98): unsure at all Xaa locations
  Clone ID: MRT4577_11486C.1.pep
MNHLHSPYFLPPLVSGAALGLEGQLTVYHHFFIPXGRCLFPTPPPRGXCQRCSHSGVLGVAPGAIACLQALDAIKAATGVAQPLCGRTLLFDPLSARI

SEQ ID NO: 200968 - protein, 75 aa, Zea mays
  Clone ID: MRT4577_114870C.1.pep
LRSRLHGSSIIACFIDSHAVYLVWVVPRLQHLWHYTLHCLWCIGLIYVAHASCQRQQSLIFRPCRSSRGMHKKHN

SEQ ID NO: 200969 - protein, 307 aa, Zea mays
  unsure (1)..(307): unsure at all Xaa locations
  Clone ID: MRT4577_114871C.1.pep
IGYLEAGQDPAFRLACRILRYDRTTPSSTPPAAAANPSHNSRRKRKPRPKTAPPSALNPNWALLQSKLPHRPAATHLGKRKHXVPLRRPRSRLHHPQRRTXLEPTSDDTSLTKVVAIDCEMVGVGFDGGKSALGRVTLVNSFGNIVYDEYVRAVERIVDYRTWISGIRPKHMNKAKEFWAVQKEVAELIKGRILVGHALHNDLKVLLLSHPKKDIRDTSEYEVFRRERKRRSLKDLAAEVLGAKIQQNEHCPIEDARAAMLIYNKHKKAWEKNMKEQFRFKKKLKKRGKKKTTESNGNDPNVPTVLL

SEQ ID NO: 200970 - protein, 91 aa, Zea mays
  Clone ID: MRT4577_114872C.1.pep
MAAAAAAKHVVLFPFPGQGHLSAFMSLAGLLHSALPDAAITFVSTPRNVASLQTSAWSNAPFLGFHALPFTPADHGLPPDCESSDAVQPGA

SEQ ID NO: 200971 - protein, 90 aa, Zea mays
  Clone ID: MRT4577_114873C.1.pep
LGAAPVQAPPPPRCDPPRQAQARRCHSGARGAVSTTHSAGGQTRANLRRYQVNSFGNIVYDEYVRAVERIVDYRTWISGIRPKHMNKAKE

SEQ ID NO: 200972 - protein, 308 aa, Zea mays
  unsure (1)..(308): unsure at all Xaa locations
  Clone ID: MRT4577_114874C.1.pep
MPGPTPSSTPPAAAANPSHNSRRKRKPRPKTAPPSALNPNWALLQSKLPHRPAATHLGKRKHXVPLRRPRSRLHHPQRRXRLEPTSDDTSLTKVVAIDCEMVGVGFDGGKSALGRVTLVNSFGNIVYDEYVRAVERIVDYRTWISGIRPKHMNKAKEFWAVQKEVAELIKGRILVGHALHNDLKVLLLSHPKKDIRDTSEYEVFRRERKRRSLKDLAAEVLGAKIQQNEHCPXLYIICMICVVLFLILSVLLQIEDARAAMLIYNKHKKAWEKNMKEQFRFKKKLKKRGKKKTTESNGNDPNVPTVLL

SEQ ID NO: 200973 - protein, 57 aa, Zea mays
  unsure (1)..(57): unsure at all Xaa locations
  Clone ID: MRT4577_114875C.1.pep
WAIPHRLKLAYFFLNSSPCNFNVPATFTRARFPWTYFKLEQILTKTHVYKSYLAKXY

SEQ ID NO: 200974 - protein, 92 aa, Zea mays
  unsure (1)..(92): unsure at all Xaa locations
  Clone ID: MRT4577_114876C.1.pep
GGRTRTSRYTRPYRSLSHFISSSTSKQPTTTNSLGMMNRRKNSINXRXNTSNKHSNKKTTNKTQDQDLHNRHRNNHQNNSRSNTNSLLRLRP

SEQ ID NO: 200975 - protein, 110 aa, Zea mays
  Clone ID: MRT4577_114877C.1.pep
IQFYRHWQAGRYRFFGKHEQDVFNLIKHEMTDRLGVAIQFLDTTYISGFCQLSRDLNKICTLHANCCVGLGAKLHDLRNVLDVWRNYTAAPVPDKRAGKFQWKVPGICIH

SEQ ID NO: 200976 - protein, 93 aa, Zea mays
  Clone ID: MRT4577_114878C.1.pep
GRVGARRPFTVDEDAAIARADARLGNRWAVIARLLPGRTDNAVKNHWNCSLKRKLGAADAASGSAVAADDCVADGETEARRGKMMMMSISPAD

SEQ ID NO: 200977 - protein, 122 aa, Zea mays
  unsure (1)..(122): unsure at all Xaa locations
  Clone ID: MRT4577_114879C.1.pep
RVACLASWTYSPPASMILGFRTCLVPCMHNQHKWITSRVYRFAVCGLSVLASVPGLCLRGVVCVRGRVPGVVAALVAVVGSPAFLVVSVLGPGLAPFVIVAPSPACPSGGWRRKXLRHILQG

SEQ ID NO: 200978 - protein, 49 aa, Zea mays
  unsure (1)..(49): unsure at all Xaa locations
  Clone ID: MRT4577_11487C.1.pep
RAXRASTLRRGPVKGSXVPRGXHGXXTXTVNGIRDFKIVYNCLCVRRSS

SEQ ID NO: 200979 - protein, 65 aa, Zea mays
  Clone ID: MRT4577_114880C.1.pep
HNLQSNPFKKKPTRGETLCKHYKRAIFGAKLPQEVRFLKPKNKVCLLLPKKGGKNHNLGAQPGLQ

SEQ ID NO: 200980 - protein, 71 aa, Zea mays
  Clone ID: MRT4577_114881C.1.pep
VVLNYEVFVSYQGGKGDLLIFLLKGKLYALVLQLPSLCDAIQPSPLEDQGENYEKFCAPGLCLFKSRQFNL

SEQ ID NO: 200981 - protein, 57 aa, Zea mays
  Clone ID: MRT4577_114882C.1.pep
LSPVDLIRRWRTYVRVDRRRETARRRPVSNNWSSLLQLASVRMLPWAKANIKPTGQA

SEQ ID NO: 200982 - protein, 82 aa, Zea mays
  Clone ID: MRT4577_114883C.1.pep
GLAPRSVPDSCGGVVDYDEDDGGGLADAERAEHELVLVGGVYPIYPVMHKPVDVIHADGEGRKRHSILHLHPGDVTAGVPRY

SEQ ID NO: 200983 - protein, 269 aa, Zea mays
  Clone ID: MRT4577_114884C.1.pep
PRPPRVRPASAHASVFLSNSLVDLYAATGDLVDAKSSLDDIPSEDVISWNSIVSVCASKGHTKEATGYLRQMLWHGKMPSVRSFVGLFALSGQTGDLQVGVQMHGIALKLGFSWSSAHVQTALISMYGNCCHFDCCLAIFNETPSLALECYNATITSSIGCKVFHSALEVLYCMVVEGVMPDNVTLSATMKAISLSASPSLISCQMLHSWVFKLGFEADMVVCSSLISAYARAGQVHSSRSVFESLRSPNVVCFTSMISACAPTRRWRK

SEQ ID NO: 200984 - protein, 54 aa, Zea mays
  Clone ID: MRT4577_114885C.1.pep
YLSPGQVGIQVIYFFCSPVAESLLLRLLKGKCHNRIDITPFSKATRHLESSTSW

SEQ ID NO: 200985 - protein, 56 aa, Zea mays
  Clone ID: MRT4577_114886C.1.pep
FFKISFFFSTTSTRMSSNCGGSSNFNSICKCVQKYHYLDHTSTYMHSTDELTFYPN

SEQ ID NO: 200986 - protein, 110 aa, Zea mays
  Clone ID: MRT4577_114887C.1.pep
AQVVKVGTLKKVDVGSKTESDTSSSTMAPSPPTTPSGRVTRDSSITVIDESPSVDQGPFSDPPERSSPQKANKAPSLGAVMEDSVGEDDKPLTLTRRDSSPFGDKHATKE

SEQ ID NO: 200987 - protein, 130 aa, Zea mays
  Clone ID: MRT4577_114888C.1.pep
LFLLSTWCKPMLIVLSSSLMPRSSDGSRAETAFLSLFSSFLKKVHLARRRMTGPVVHRLRVTVLVLVPEHNGREERSRGRLPLAAVQLALSQVGGVHDTVTATASARREIGGEVRPSGEGRAGGNKCVAK

SEQ ID NO: 200988 - protein, 91 aa, Zea mays
  Clone ID: MRT4577_114889C.1.pep
FSLGYRVLIYNEDHDLCIPYPGTEAWVKSIGYQVIDRWRPWYFGDQVAGYTEGYGHNLTFLTIKGAGHAVPEYKPKEALAFYSRWLAGEKF

SEQ ID NO: 200989 - protein, 67 aa, Zea mays
  unsure (1)..(67): unsure at all Xaa locations
  Clone ID: MRT4577_11488C.1.pep
ILGSHVAHAALTAFLYXEIYLSEVATFVPQKLIYAQGVIALPHLDTLVCTVTPMRQLLHTDPYLVLS

SEQ ID NO: 200990 - protein, 137 aa, Zea mays
  Clone ID: MRT4577_114890C.1.pep
MTMESPTTAAGGELESYFSLGLTVSHSQKDNAEFPKVLLLLSAYLDKTVQQTEELLDSSKIKESTTIFHGQRVPELSIKLYAERIFKYAKCSPSCFVLALIYMERYLQQPNIYMTSFRVHRLLITSGVVAAKFIDDA

SEQ ID NO: 200991 - protein, 519 aa, Zea mays
  Clone ID: MRT4577_114891C.1.pep
MMHSQSQAPTPTLRCCRTLAELPARISMASLFLLLLVVVAALLWPPAVAAPEEHLVTGLPGFHGAFPSKHYSGYVTVDERSERSLFYYLVLSERDPAGDPVVVWLNGGPGCSSFDGFVYGNGPFNFEPGSSPGSLPKLQLNPYSWSKVSNIMYLDSPAGVGMSYSLNRSDYVTGDLKTAADAHKFLSKWFELYPEFQLNPFYISGESYAGVYIPTITDEVVKGIERGVKPRINFKGYLIGNPLTDVDYDFNSFVPFAHGMGLISTDMYEDVKASCRGTFFGAVDDLCQEKIDRVRWELKDLNKYNILAPCYHHPEIQEVEFSNSSLPRSFRRLGETDRPFPVRKRMSGRSWPLRLALKDGHVPMWPGLSGRSLPCTSDEVATAWLDDEDVRAAIHAKPKSSIGSWELYTARIDFTHDTGTMVSYHKKFTALGYRVLIYSGDHDLCIPYPGTEAWVKSIGYQVTDRWRPWYFGDQVAGYTEGYGHNLTFLTIKGAGHAVPEYKPKEALAFYSRWLAGEKF

SEQ ID NO: 200992 - protein, 74 aa, Zea mays
  Clone ID: MRT4577_114892C.1.pep
VRYHQSGKKKPQSLKRCSRRKCDAKGTIDMHTMNSIVDMDFTRQTLYLGKNGASTMISNMMIVSLAQNIGPALS

SEQ ID NO: 200993 - protein, 102 aa, Zea mays
  Clone ID: MRT4577_114893C.1.pep
STVFFNNAYYGRVGGISTREMNMLELDLLFGLDFRLKVDIETFESYCLQLEEVLVLVLERPIQVQEANVTKHLICNSSADETCKHELGLERYSSQAVQGCSW

SEQ ID NO: 200994 - protein, 63 aa, Zea mays
  Clone ID: MRT4577_114894C.1.pep
YCSVLFLCIFATEMLRSFVCSASKMFGVVTDIMSTINLDGKLDLKAIALQACNAEYDPKEKME

SEQ ID NO: 200995 - protein, 236 aa, Zea mays
  Clone ID: MRT4577_114895C.1.pep
MTMESPTTAAGGELESYFSLGLTVSHSQKDNAEFPKVLLLLSAYLDKTVQQNEELLDSSKIKESTTIFHGQRVPELSIKLYAERIFKYAKCSPSCFVLALIYMERYLQQPNIYMTSFSVHRLLITSVVVAAKFIDDAFFNNAYYGRVGGISTREMNMLELDLLFGLDFRLKVDIETFESYCLQLEEALVLVLERPIQVQEANVTKHLICNSSADETCKHELGLERYSSQAVQGCSW

SEQ ID NO: 200996 - protein, 68 aa, Zea mays
  Clone ID: MRT4577_114896C.1.pep
PAGSRPRLPPHIQIAQEQVSQLGGYRSSRVRSLSSLALRIERDPFPSFGELTVKLRRPSDHSLRVPQG

SEQ ID NO: 200997 - protein, 57 aa, Zea mays
  Clone ID: MRT4577_114897C.1.pep
PCKLFYGAFQGKKPTFLFPGVGIFFNPQKFPFRGLNGGKLLGGGLFPKDPFWLVMVN

SEQ ID NO: 200998 - protein, 318 aa, Zea mays
  unsure (1)..(318): unsure at all Xaa locations
  Clone ID: MRT4577_114898C.1.pep
TCELLLNCSVHLVELLGTGEYFAMKAMDKSVMLNRNKVHRATAERQILDMLDHPFLPTLYASFQTKTHICLIVDYCAGGELFMLLDRQPMKVLKEDAVRFYAAEVVTALEYLHCQGIIYRDLKPENILLHRDGHISLTDFDLSCLTSCRPQVFLPHDIDKKKKRRKSRSNPIFFAEPMRASNSFVGXIITGAGHTSAVDWWALGILLYEMLYGYTPFRGKTRQRTFANILHKDIRFPASIQVSLAARQLIYRLLHRDPANRLGSYEGAMEIKQHPFFRGINWALVRAATPPELEAPLQDTLEATLPPPAADAAHTDMF

SEQ ID NO: 200999 - protein, 190 aa, Zea mays
  unsure (1)..(190): unsure at all Xaa locations
  Clone ID: MRT4577_114899C.1.pep
LLHRNGHISLTDFDLSCLTSCRPQVXTSLIYLNGQFMAISLTPWSIFLSCTXSLLLLFDXFLPHDIDKKKKRRKSRSNPIFFAEPMRASNSFVGTEEYIAPVFIYICNMLLLHFIYVIFPNIFISCLYLTCVIVIICFINPCIVCXXEIITGAGHTSAVDWWALGILLYEMLYGYTPFRGKTRQRTFANI

SEQ ID NO: 201000 - protein, 87 aa, Zea mays
  Clone ID: MRT4577_11489C.1.pep
LHSLIDAIKFMIDPKVKERAVELAKSIESEDGVDGAVKSFLKHLPQKRDSETTPTAPEPTFVHRLLHPVNRCFGMASYPRPPFILPN

SEQ ID NO: 201001 - protein, 42 aa, Zea mays
  Clone ID: MRT4577_1148C.1.pep
SLNRLADDSVSWSTTASQSFRSIQPFQPLLNHSSYKCRVTSW

SEQ ID NO: 201002 - protein, 81 aa, Zea mays
  Clone ID: MRT4577_114900C.1.pep
QVVFFPFGQHHHHTSSSLQAEAINLVIPSAFILIMLRSYLHLVCVHHEEKTSILKTKLPAVGGVESTTHDEGRLRGHEELR

SEQ ID NO: 201003 - protein, 60 aa, Zea mays
  Clone ID: MRT4577_114901C.1.pep
RRRSQIWDCKRTHTASTTKLKADLTPIDRAEYKEHEQVLVLRRLQSIVNIHNASPCLCPY

SEQ ID NO: 201004 - protein, 443 aa, Zea mays
  unsure (1)..(443): unsure at all Xaa locations
  Clone ID: MRT4577_114902C.1.pep
FILRDSPGQQVARSAPPQVASADRCAGSICVGFAVPRPTMPDRRPAAVTQQFFPPTTTAAQQATMEEQCHVPAGSAAEQWVRSSASRKSRRGPRSRSSQYRGVTFYRRTGRWESHIWDCGKQVYLGGFDTARAAARAYGRSALXSRGLTAYANFSLDYDYDGMEKVKDLTMVEFVMPADECSSGSPQGSSRCRGVTGNAGGSSRASSCRPAGDRCVIIGIFHTGHDAAHAYHIAAIPSVGPAAATDVVDPSHDQHVXSRSAHCSXELGLGLGSFPPGPLPLSGRCYFFGFAPRGGMLVTCSRSIGFLEEELTRVAYHQPAAGMFGRPADKNVHVAPPPHRQWQQQQQGNRSCLDTLPQQLAATLSXHLRVGQXARRPIPNDSGINWACAPPYATAGAGTDDEDASSAAAAASLGFPLWALRAAPSSPSWPSRCAFPVVPRHQQ

SEQ ID NO: 201005 - protein, 51 aa, Zea mays
  Clone ID: MRT4577_114903C.1.pep
VQRLAKDTSIVVTTYEGVHNHPCEKLMEALSPILKQLQLLSQLQSCTNQLL

SEQ ID NO: 201006 - protein, 103 aa, Zea mays
  unsure (1)..(103): unsure at all Xaa locations
  Clone ID: MRT4577_114904C.1.pep
SMAACVASSGGVVTVLEQLGLGVCRFVLILGRAPPRGCWWRCGASGGLWFXPPPSRASGHPLPPPASRSAGSGGLDLGGPGGRGSPVGGGVVALPWRVWPRVP

SEQ ID NO: 201007 - protein, 111 aa, Zea mays
  Clone ID: MRT4577_114905C.1.pep
IKSPVQVYCSLIHTMHISIFPFFLFMPGKRGISNNLFSKKNQCPLNAGVGNPTLSAFYFTYPRGTPPPCPEPECFSFIYRNLLLETRPGTKISKIYSTTPALLGTIQYPGC

SEQ ID NO: 201008 - protein, 106 aa, Zea mays
  unsure (1)..(106): unsure at all Xaa locations
  Clone ID: MRT4577_114906C.1.pep
PVSRSRVSGRSHVRMVARRAHGRLAMVVLERLCCGCLRSRSRVKPSVVDSLSGATGAQILLCPASESWSRSSPAPASSSRSTGSEVRGCHCTPRSCXVPGRPXRVP

SEQ ID NO: 201009 - protein, 84 aa, Zea mays
  unsure (1)..(84): unsure at all Xaa locations
  Clone ID: MRT4577_114907C.1.pep
PRVFFFFFCLGSLGVGDSRKVXRSXSNXVRQASGLKAGFCSLKIIYLAKSEGVFFPEIVARRQGRRARGVRRLLRLCIIFVRIA

SEQ ID NO: 201010 - protein, 80 aa, Zea mays
  Clone ID: MRT4577_114908C.1.pep
SSSHKTCATSSSSSSSPPPIVPAAHKVDHLSLFIATSRSPGEEGAMSPTASCRRYRTYSYRLLEAEGNYNHQEQSNDATA

SEQ ID NO: 201011 - protein, 284 aa, Zea mays
  unsure (1)..(284): unsure at all Xaa locations
  Clone ID: MRT4577_114909C.1.pep
PRSVQQRQLERRQIQEWRRKRRTRRRQWRRRRQRQRIRTARCTAASTRTRQARQRRPGRAPAASAPSVCRRSSACWSRRPSPAPSTRRRSSRSPPRRRPRRRRRRPTAPPPRRRRRHSTLPRRRARXDARAERGRRRXGSRGVSRSRRGRRSRCRRPRSRRTARARRASGPSSTSRRRQAATRAARHRLRRAAAAPRGGTPCRWRRPRRRRSGAGWRRSWSRRARAAGARAPRRRRSGGRWREHACGGSFMGLMLPLRKRSMAGESSSIPRPYILVLHKCLHLY

SEQ ID NO: 201012 - protein, 219 aa, Zea mays
  Clone ID: MRT4577_11490C.1.pep
MVYRSLALINDGILLFITKTVCLICLYLQLCWQSVLTFSNNQSSPGLKNSNLDACVLGALEVLATGVTITFLDRAGRRILLIISSCGMTLSLLAVAVVFYIKDNISHDSDMHNILSMVSLVGVVAYVIAFCFGMGAIPWIIMSEILPVSIKSVAGSFATLANWLTSFGITMTANLLLSWSAAGTFASYMVVSAFTLMFVILWVPETKGRTLEEIQWSFQ

SEQ ID NO: 201013 - protein, 64 aa, Zea mays
  Clone ID: MRT4577_114910C.1.pep
MHAAAAVHAAVGAAMMLLLDEELVGLSALMGLASAQAQLRWLREPEPLALPLALALAPSGAESQ

SEQ ID NO: 201014 - protein, 44 aa, Zea mays
  Clone ID: MRT4577_114911C.1.pep
LLIDLSFIKGPHTHCPLSRRETSLTNQIIESTNPRLNAGGKGRA

SEQ ID NO: 201015 - protein, 250 aa, Zea mays
  Clone ID: MRT4577_114912C.1.pep
ARAVRGRRRRRAQESKSVAPRGEPLPPPAVTADSPRKKSFWSFLHLSSSSGSHKGGASSASAGSGGAARRNSVSVASASSASLGGRLEAIVEPESPGRRSEGSSSSSFGRKVARSRSVGCGSRSFSGDFLERLSTGFGDCALRRVESHREPKPKAALGHLGGGEEHEQDQDQHHRIKCAGFFGGGLGAAAPPSSSYWLSAPDGASASGSARGSGSRSHRSWAWALASPMRALRPTSSSSSKSIMAAPTAA

SEQ ID NO: 201016 - protein, 44 aa, Zea mays
  Clone ID: MRT4577_114913C.1.pep
KAKRPEIYIGPVPLQFAYSYNTSSTIGASCGKILRNIRCWGLKH

SEQ ID NO: 201017 - protein, 95 aa, Zea mays
  Clone ID: MRT4577_114914C.1.pep
TRSGCHPPIIANNPVLNFFFFLNAKSKPVFWLRLGKAPRARLAFRRLGKKRNYFSGLLTPSDRECPGQSLLQLPSPPPFFVGGLNQAEGARSPEI

SEQ ID NO: 201018 - protein, 59 aa, Zea mays
  Clone ID: MRT4577_114915C.1.pep
PELLRSQPTTREWGKPLPCVTRIFYLTRVLPRRLIRSKKSRSTKVKLTIILRLSSYIFR

SEQ ID NO: 201019 - protein, 67 aa, Zea mays
  Clone ID: MRT4577_114916C.1.pep
QIQAGAGIEIHLSLIGAVDSRIWSSAVGYTPCRRVFSLAGVRRQALSVGCPPTAAPVGCRSGRRPRT

SEQ ID NO: 201020 - protein, 185 aa, Zea mays
  unsure (1)..(185): unsure at all Xaa locations
  Clone ID: MRT4577_114917C.1.pep
GTLEAGRAGFSLPQSAPLFPIGILPRRCRSRYVPRLTSHHEAPSPSSKKNRRGDXKYLSLGEVLCDKNDNNLTKRYVVDAHNLXSVNLVYHYQSHEYGCETFSWLKYYWYVTMDSVDNLPNFLILPSEDVANTLNKSSKPLSQXFYSGPPGVRDSGPRRDENEADKCDCIHGYKGCHPLAPGNFA

SEQ ID NO: 201021 - protein, 82 aa, Zea mays
  unsure (1)..(82): unsure at all Xaa locations
  Clone ID: MRT4577_114918C.1.pep
STEEQPRFHLRHLEPGSCSGISSWDXPPFATGAAVEVITSSSFSSSESSVNCDIIGIPSIWTSLSRALYPLGGRFDLDRTAA

SEQ ID NO: 201022 - protein, 38 aa, Zea mays
  Clone ID: MRT4577_114919C.1.pep
LLPKYTYKFQPLSILTFIKKLLLTTLIHFSNTKFQQFL

SEQ ID NO: 201023 - protein, 95 aa, Zea mays
  Clone ID: MRT4577_11491C.1.pep
HIMALATWDPYTIRNFFVDIKRKYDIFIKKTGKSQQTFCKKKIAQVISMPVTKGHNLSFFIKTEKGPMAMYKTQLELNEKYYTYSGQHLNIPRDS

SEQ ID NO: 201024 - protein, 49 aa, Zea mays
  Clone ID: MRT4577_114920C.1.pep
IPAPLLKNLKDHARNYGSPKNLLSRIWGPKPPLGMDPTVFFARGGRPWA

SEQ ID NO: 201025 - protein, 66 aa, Zea mays
  unsure (1)..(66): unsure at all Xaa locations
  Clone ID: MRT4577_114921C.1.pep
KGTATGDNRIADXASCXLYRLVRQELGCMFLSGXEALIQLGVXCNMAFICISHGWLDEPMLEWLME

SEQ ID NO: 201026 - protein, 73 aa, Zea mays
  unsure (1)..(73): unsure at all Xaa locations
  Clone ID: MRT4577_114922C.1.pep
SRLFSGCSSGTSFSFNYVRMNKSLFEFPHWNRFPKFVRQMSNARPFLTKLXFRKGHQNLFSKSVVWGVNRAWA

SEQ ID NO: 201027 - protein, 85 aa, Zea mays
  Clone ID: MRT4577_114923C.1.pep
SFLPRSDFDYLADTLIPQPSSSSPPSNLLGVLRLSCSLILFFPYGENADMLPLLLWMPPLSLAPRLSRRSFRVMGLCTRRTASSS

SEQ ID NO: 201028 - protein, 135 aa, Zea mays
  unsure (1)..(135): unsure at all Xaa locations
  Clone ID: MRT4577_114924C.1.pep
TKKIKIIKTKKNTGGGGGKKKKQLXSQARKETNQGAERKEESKGEEREGERGEHERVGKSGNEDPEERGEGGDSIASRGQGRVAAPFSMAATSSAPARPGHYFVPSPPSTTWPPLLRFLSLLPSFVSXLYFPPAA

SEQ ID NO: 201029 - protein, 49 aa, Zea mays
  Clone ID: MRT4577_114925C.1.pep
GAPRNFKGTYLLLVYNLAPKGITGVGHPPRPGQTYWSFLAGTPDLIYVG

SEQ ID NO: 201030 - protein, 82 aa, Zea mays
  Clone ID: MRT4577_114926C.1.pep
YFVNNCIFFYEPKCIKTGFYDNGSHSPLRCSSCHFLCNSTIDPYLVSHHLILSYASFVKLYLYKSHLYQNGKIVILLDFLWY

SEQ ID NO: 201031 - protein, 192 aa, Zea mays
  Clone ID: MRT4577_114927C.1.pep
LRVVDQPEEEPSGAGAAPGLHEFQFFGHDEDHDSVTWLFTDPSPHLHRGPAAAEVGNAVVAEAEQRRPPPVFVDGYAHAQYGELPGHGLTFDVPLSGRGGGEVASVAPVLEAGLGLGGGGSDLATSSSATIMSFCGTTFTDAASAVPGDAAAAAPNGSASGAADPAVDREAKVMRYNEKRKRRFYEKQIRYA

SEQ ID NO: 201032 - protein, 118 aa, Zea mays
  Clone ID: MRT4577_114928C.1.pep
FSGDSSVLFTFFDLIEIDKSSIKRTKKQTNIVIDSTASKQASKQTKLLCRKWLPLHTSFYAHCSLDLLQAPENTCNCKLDSITLRTIAKRCQCPLNFEIMTSDTTRVLCSKGTGVFVC

SEQ ID NO: 201033 - protein, 77 aa, Zea mays
  unsure (1)..(77): unsure at all Xaa locations
  Clone ID: MRT4577_114929C.1.pep
SAITSPLRINARSKDRDHDLSTPGRSTEEMYSLNGVTGIKYPDHFYELRVLPYTDAKTCIMSEXPARWEYLPHSDRL

SEQ ID NO: 201034 - protein, 63 aa, Zea mays
  Clone ID: MRT4577_11492C.1.pep
PLTHRDSLLSRVCVCGFLAVGYGPYFGKKVDPEPGRCRRTDGKKWRCSKEAAPDSKYCERHMH

SEQ ID NO: 201035 - protein, 99 aa, Zea mays
  Clone ID: MRT4577_114930C.1.pep
SGVFLQYYLSHIFFHFKKYYHFKPIIFNVSYNPIPKKHSQQMTAISLIPTSSSTTHITPTVANSLYPSNTSTPTTWPSYHIHGQHPPKLTNDLQNPNLH

SEQ ID NO: 201036 - protein, 80 aa, Zea mays
  unsure (1)..(80): unsure at all Xaa locations
  Clone ID: MRT4577_114931C.1.pep
MRVFVHFASAKGTPGKLSYDESQIKTYMYVKGTDSANQCWTIDSCFLSLSIKAGKNHMKKLXVXPTSMTAKAKGISKYSS

SEQ ID NO: 201037 - protein, 48 aa, Zea mays
  Clone ID: MRT4577_114932C.1.pep
LFPSLLPFFLLLLNPLNRCHCVHRIPSVLGQVLHPTLYRKICIRSRML

SEQ ID NO: 201038 - protein, 114 aa, Zea mays
  Clone ID: MRT4577_114933C.1.pep
YRCCATCVGVHYTHRETETDSQVVAQTTQGKERKKPWPPPCSVSTFRPAALRYVYVSSLALGRLWKVSRLADHTRTFGNSLTTTPVERLSSPISFVGHKQKTHTQIEPKQTFVL

SEQ ID NO: 201039 - protein, 1669 aa, Zea mays
  unsure (1)..(1669): unsure at all Xaa locations
  Clone ID: MRT4577_114934C.1.pep
MDPKGKGIVINDKEKESFVNEPRDDNSNDSGSGHRRKDGKKKKTRRIKEIVYYDSDESTSSQKDDDHNEYERKKPVNSNFSFDYSRIPQSTNAHLLSIPLGKPPHFDGEDYGFWSHKMRSHLFSLHPSIWEIVESGMHFDSTDSPMFINEQIHKNAQATTVLLASLCRDEYHKVSGLDNAKQIWDTLKISHEGNDVTLLTKMELVEGELGRFSMIRGEEPTQTYNRLKTLINKIRSYGSTRWTDHDVVRLMLRSFTVLDPHLVNNIRENXVHQDVARRSSGEVRXGRMMIKEARYVDDALNGPIHEPQPIALKATRSKEALPSKVAQVEAAGLNNEEMALIIKRFKTAFKGRKGQPSKTKTKEKRSCFKCGLAATAFNKSSLFPNERHTCLMAREKKVSTHDTSTYASSSEDESSDDDEIDYSCLFKGLDRSKINKINELIDALNDKNRLLEKQEDLLYEEHDKFVSVQNSLALEIKRNEMLSSELSTCHESISKLKSVNDDLNAKLEIASKSTSCVEIVETCNRCKDFDIDACSEHLVSISKLNDELASLNAQLKTSKSNFDKLKFARDAYTIGRHPSIKDGLGYKKEAKNLTSHKAPISAKEKGKAPMASSVQKNHAFMYHDRRQSRNAYRRCNAYDAFDSHDMFASSSSYVHDRNVGRRNVVHNMPRRNVVNVPRKVYASGGSSWIIDSECTNHMTGEKKMFTSYVKNKDSQDSIIFGDGNQGKVKGLVESLGYNLLSVSQLCNMGYNCLFTNVDVSVFRRSDGSLAFKGVLYGKLYLVDFAKEEAGLDACLIAKTSMGWLWHRRLAHVGMKNLHKLLKGEHVIGLTNVQFEKDRPCAACQDKSETQGTLKRFLRRAQNEFELKVKKIRSDNGSEFKNLQVEEFLEEEGIKHEFSAPYTPQQNGVVERKNRTLIDMARTMLGEFKTPERFWSEAVNTACHAINRVYLHRLLKKTSYELLTGNKPNVSYFRVFGSRCYILVKKGRNSKFAPKAVEGFLLGYDSNTKVYRVFNKSSGLVEVSSDVVFDETNGSPREQVVDCDDVDEEDVPTAAIRTMAIGEVRPQEQDERDQPSSSTTVHPPTQDDEQVHQKEACDQGGAQDDHVMEEEAQPAPPTQVRAVIQRDHPVDQILGDISKGVTTRSRLVNFCEHYSFVSSVEPFRVEEALRDPDWVLAMQEELNNFKRNEVWTLVPRPKQNVVGTKWVFRNKQDEHGVVTRNKARLVTKGYAQVAGLDFEETFAPVARLESIRILLAYAAHHSFRLYQMDVKSAFLNGPIKEEVYVEQPPGFEDERYPDHVCKLSKALYGLKQALRAWYECLRDFLIANAFKVGKADPTLFTKTCDGDLFVCQIYVDDIIFGSTNQKSCAEFSRVMMQKFEMSMMGELNYFLGFQVKQLKDGTFISQTKYTQDLLKRFGMKDAKPAKTPMGTDGHTDLNKGGKSVDQKAYRSMIGSLLYLCASRPDIMLSVCMCARFQSDPKECHLVAVKRILRYLVATPCFGLWYPKGSTFDLVGYSDSDYAGCKVDRKSTSGTCQFLGRSLVSWNSKKQTSVALSTAEAEYVAAGQCCAQLLWRRQTLRDLGYNLSKVPLLCDNESAIRMAENPVEHSRTKHIDIRHHFLRDHQQKGDIEVFHVSTENQLADIFTKPLDEKTFCRLRSELNVLDSRNLD

SEQ ID NO: 201040 - protein, 541 aa, Zea mays
  Clone ID: MRT4577_114935C.1.pep
MAIGDVRPQEQLEQDQPSSSTMVHPPTQDDEQPFRVEEALLDPDWMLAMQEELNNFKRNEVWTLVPRPKQNVVGTKWVFHNKQDEHGVVTRNKARLVAKGYAQVAGLDFEETFAPVARLESIRILLAYAAHHSFRLYQMDVKSAFLNGPIKEEVYVEQPPGFEDERYPDHVCKLSKALYGLKQAPRAWYECLRDFLIANAFKVGKADPTLFTKTCDGDLFVCQIYVDDIIFGSTNQKSCEEFSRVMTQKFEMSMMGELNYFLGFQVKQLKDGTFISQTKYTQDLLKRFGMKDAKPAKTPMGTDGHTDLNKGGKSIDQKAYRSMIGSLLYLCASRPDIMLSVCMCARFQSDPKECHLVAVKRILRYLVATPCFGIWYPKGSNFDLIGYSDSDYAGCKVDRKSTSGTCQFLGRSLVSWNSKKQTSVALSTAEAEYVAAGQCCAQLLWMRQTLRDFGYNLSKVPLLCDNESAIRIAENPVEHSRTKHIDIRHHFLRDHQQKGDIEVFHVSTENQLADIFTKPLDEKTFCRLRSELNILDSWNLD

SEQ ID NO: 201041 - protein, 1750 aa, Zea mays
  Clone ID: MRT4577_114936C.1.pep
MDPKGKGIVINDKEKESFVNEPKDDKSNDSGSGHRRKDGKKKTRRIKEIVYYDSDESSSSQKDDDNDYRKTIVENGMKFDSSDSPMLINEQIHRNAQATTVLLASLCREEYNKESGLDNAKQIWDTLKISHEGNDVTMLTKMELVEGELGRFAMIRGEEPTQTYNRLKTLVNKIRSYGSTRWMDHDIVRLMLRSFTVLDPHLVNNIRENPRYTKMSPEEILGKFVSGRMMIKEARYVDDALNGPIHEPQPIALKASRSKEALPSKVAQIEAAGLNDEEMALIIKRFKTALRGRKEHPNKTKTKGKRSCFKCGKIGHFIANCPDNDSDQEKKSGKWEKKKNYKKAKGEAHIGKEWDSDCSSSDSDNEGLAATAFNKSSLFPNEHHTCLMAKEKKVSTRNSTYASSSEDESSDDEIDYSCLFKGLDRSKIDKINELIDALNDKNRLLEKQEDLLYEEHDKFVEAQKTLALEIKRNEMLACELSTCHDSISKLKSINDDLNAKLVEAQKSNSCVEHVEICTRCKDVDINACSEHLVSISKLNDELASLNAQLKTSKSEFEKLKFTRDAYTIGRHPSIKDGLGFKREAKNLTSHKTPISTKEKGKAPMANSVKKNHAFMYYDRRYSRNAFRSNDVFDSHAYDSYAMTASSSSYMHGRSMTRRNAIHHVPRKNTIHAPRKVVNEPSTIYCALNASFAICRKDRKIVARKLGAKCKGDKTCIWVPKDICTNLVYASGGSSWIIDSGCTNHMTGEKKMFTSYVKNKDSQDSIIFGDGNQGKVKGLDVFVFRRSDGSLAFKGVLDGKLYLVDFAREEAGLDACLIAKTSMGWLWHRRLAHVGMKNLHKLLKGEHVIGLTNVQFEKDRPCAACQAGKQVGGAHHSKNVMTTSRPLELLHMDLFGPVAYLSIGGSKYGLVIVDDFSRFTWVFFLQDKSETQGTLKRFLRRAQNEFELKVKKIRSDNGSEFKNLQVEEFLEEEGIKHEFSAPYTPQQNGVVERKNRTLIDMARTMLGEFKTPEHFWSEAVNTACHTINRVYLHRLLKKTSYELLTGNKPNVSYFRVFGSKCYILVKKGRNSKFAPKAVEGFLLGYDSNTKAYRVFNKSSGLVEVSSDVVFDETNGSPREQVVDLDDVDEEDVPTATIRTMTIGDVRPREQLEQDQPSSSTMVNPPTQDDEQVPQVEAHDQGGAQDVQVEEEEAPQAPPTQVRAVIQRDHPVDQILGDISKGVTTRSRLVNFCEHYSFVSSIEPFRVEEALLDPDWVLAMQEELNNFKRNEVWTLVPRPKQNVVGTKWVFRNKQDEHGVVTRNKARLVAKGYAQVAGLDFEETFAPVARLESIRILLAYAAHHSFRLFQMDVKSAFLNGPIKEEVYVEQPPGFEDERYPDHVCKLSKALYGLKQAPRAWYECLRDFLIANAFKVGKADPTLFTKTCDGDLFVCQIYVDDIIFGSTNKKSCEEFSRVMTQKFEMSMMGELNYFLGFQVKQLKDGTFISQTKYTQDLLKRFGMKDAKPAKTPMGTDGHTDLNKGGKSVDQKAYRSMIGSLLYLCASRPDIMLSVCMCARFQSDPKECHLVAVKRILRYLVATPCFGIWYPKGSTFDLIGYSDSDYAGCKVDRKSTSGTCQFLGRSLVSWNSKKQTSVALSTAEAEYVAAGQCCAQLLWMRQTLRDFGYNLSKVPLLCDNESAIRMAENPVEHSRTKHIDIRHHFLRDHQQKGDIEVFHVSTENQLADILTKPLDEKTFCRLRSELNVLDSRNLD

SEQ ID NO: 201042 - protein, 2723 aa, Zea mays
  unsure (1)..(2723): unsure at all Xaa locations
  Clone ID: MRT4577_114937C.1.pep
MQEELNNFTRNEVWSLVQRPKQNVIETKWVFRNKQDENGVVTRNKARLVAQGYTQVEGLDFGETYAPVARLESIRILIAYATNHDFKLYQMDVKSAFLNGPLQERVYVEQPPGFEDPKKPNHVYLLHKALYGLKQAPRAWYDCLKDFLIKNGFTIGKADSTLFTRKVDNELFVCQIYVDDIIFGSTNEKFCEEFSKVMTNRFEMSMMGELKYFLGFQVKQLKEGTFLCQTKYTQDMLKKFGMEKAKHAKTPMSSNGHLDLNEEDYTDCKVDRKSTTGTCQFLGRSLVSWSSKKQNCVALSTAEAEYIAAGACCAQLLWMKQTLRDFGSAAAISFSPLSTPNSLEPSPFWKCGWRSVLPGVFPPSSSISLGDLDPIFGSRFYFLFLRMVRRRNPSVVESDSSDDQEIHGDTPPRSRSKRGRGSGNVMPGAEASGSQSARGRTSRTPSGRSRPATNPQAWEPASDDDGGKDDEVDLPPAQAPVIRGLVLHRAEAQCTGNEPVTDFTASGGSALLQDLRFQNPVLRIRDVRIDGNRFWTLHHVDFYNSVILPKKHQPILHQRYINWEGCEAIGDPEMSQALRACGRKQMKNIMTFQYDWNDEVIAQFYSTLWIKLAGVESHYNYPYLNFFIEGSWYKVSYRRFAHILGFSDNDISGDKIKIHDFRQPTRDEAKDLHLSESGKYWESTNIHKYYHYINSLCRMTLIPKGGNQMNILGESKVLLSFMKPNSSERVNVFDMIWQEIIHAACFPLKGCLHAPFIMKMIEVVTQFRFEKGTRHQSYTPFWIDPNNPAGRLRKAPSSSRGHTSAGPSAGAGAAAAAGGASRPSPGRGSPTPRGRGRGRGRGRGMGVRLAHGFAAFFSMCRNIAADVHEVARRQRETDDNLRRQASALGTPFAPRSPDVPLHPLLQMSTSGTSRRMGYLFHQPMTSKKKKLILMIRSSLTLPHITGIRANRPLTLRPRTRLAVLLLRPSLERNTLPPTWRNTSSLLIILLPTGDPWIGVSLSLFLVLGAKKGENVYYSVLYFCNEHLFVLASITKKGEIDDKSNDSGSGHRRKDGKKKKTRRIKEIVYYDDSDESTFSQKDDNHNDYERRKPVNSNFSFDYSCIPQSANAHLLSIPLGKPPHFDGEDYGFWSHKMRSHLFSLHPSIWEIVESGMHFDSSDSPLFINEQIHKNAQTTTVLLASLCRDEYHKVSGLDNTKQIWDTLKISHEGNDVTLLTKMELVEGELGRFAMIRGEEPTQTYNRLKTLINKIRSYGSTRWTDHDVVRLMLRSFTVLDPHLVNNIRENPRYTKMSPEEVLGKFVSGRMMIKEARYVDDALNGPINEPQPVALKATRSKEALPSKVAQIEAARLNDEEMALIIKRFKMALKGRKGQPSKIKAKGKRSCFKCGKIGHFIANCPDNESDQEHGSKREKKKNYKKAKGEAHLGKEWDSDCSSSDSDNEGLAATAFNKSSLFPNERHTCLMAREKKGLDRIKVDKINELIDALNDKNRLLEKQEDLLYEEHDKFVEAQKSHALEVKRNEMLFCELSSCHETISSLRSINDDLNAKIEIASKSTTCVENVVICNRCKDFDIDACSEHIASIAKLNDEMASLNAQLKASKSDFDKLKFARDAYTIGRHTSIKDGLGFKREAKNSTSHNDVISTNENGKALVASSTNMNHVFMYNDRRQSHKRCNTFDSLDCALYTSIATYIKDREILRKNGIHVPRKNVVHAARKVMNGPSTIYHALNASFAICRKDRKIVARKLGAKCKDVSVFRRSDGSLAFKGVLDDKLYLVDFAKEEAGLDACLIAKTSMGWLWHRRLAHVGMKNLHKLLKGEHVIGLTNVQFEKDRPCAACQAGKQVGGAHHSKNVMTTSRPLELLHMDLFGPVAYLSIGGSKYGLVIVDDFSRFTWVFFLQDKSETQGTLKRFLRRAQNEFELKVKKIRSDNGSEFKNLQVEEFLEEEGIKHEFSAPYTPQQNGVVERKNMTLIDMARTMLGEFKTPECFWSEAVNTACHAINRVYLHRLLKKTSYELLTGNKPNVSYFRVFGSKCYILVKKGRNSKFAPKAIEGFLLGYDSNTKAYRVFNKSSGLVEVSSDVVFDETNGSPREQVVDLDDVDEEDVPTAATRTMAIGDVRPQEQKEQDQPSSSTMVHPPTQDDEQVHQQEACDRGGAQDDHVMEEETQPAPPTQVRAMIQRDHPVDQILGDISKGVTTRSRLVNFCEHYSFVSSIEPFRVEEALLDPDWVLAMQEELNNFKRNEVWTLVPHPKQNVVGTKWVFRNKQDEHGVVTRNKARLVAKGYAQVAGLDFEETFAPVARLESIRILLAYAAHHSFRLFQMDVKSAFLNGPIKEEVYVEQPPGFEDERYPDHVCKLSKALYGLKQAPRAWYECLRDFLIGNAFKVGKADPTLFTKTCDGDLFVCQIYVDDIIFGSTNKKSCEEFSRVMTQKFEMSMMGELNYFLGFQVKQLKDGTFISQTKYTQDLLKRFGMKDAKPAKTPMGTDGHTDLNKGGNRVERXAYRSMIGSLLYLCASRPDIMLSVCMCARFQSDPKECHLVAVKRILRYLVATPCFGLWYPKGSTFDLIGYSDSDYAGCKVDRKSTSGTCQFLGRSLVSWNSKKQTFVALSTAEAEYVAVGQCCAQLLWMRQTLRDFGYNLSKVPLLCDKESVIRMTDTTNEQSHTKHIDIRHNFMGDHKQKGNMKVFHVSPDKKLTDISTKPLNDNTFCRLRSELNVLDSRNLD

SEQ ID NO: 201043 - protein, 104 aa, Zea mays
  unsure (1)..(104): unsure at all Xaa locations
  Clone ID: MRT4577_114938C.1.pep
MGMIKIGINGFGRIGWLVVRVVLQSEDVELVCVNDRFITTDYMTYMFKYDTVHGQWKHXDITLKDSKTLLVGEKPVTVFGIKNLREIPXCEAGAVYVVQSIGVF

SEQ ID NO: 201044 - protein, 1706 aa, Zea mays
  Clone ID: MRT4577_114939C.1.pep
MDPKGKGIVINDKEKESFVNEPRDDKSNDSGHRRKDGKKKKTRRIKEIVYYDSDESTSSQKDDDHNEYERKKPIHKNAQATTVLLASLCRDEYHKVSGLDNAKQIWDTLKISHEGNDVTLLTKMELVEGELGRFAMIRGEEPTQTYNRLKTLINKIRSYGSTRWTDHDVVRLMLRSFTVLDPHLVNNIRENPRYTKMSPEEVLGKFVSGRMMIKEARYVDDALNGPIHEPQPIALKATRSKEALPSKVAQVEAVGLNNEEMTLIIKRFKTALKGRKGQPSKTKTKEKRSCFKCGKIGHFIANCPDNESDQEKGNKREKKKHYKKAKDEAHIGKEWDSDCSSSDSDNEGLAATAFNKSSLFPNERHTCLMAREKKVSTHDTSTYASSSEDESSDDDEIDYSCLFKGLDRSKINKINELIDALNDKNRLLEKQEDLLYEEHDKFVSAQNSLALEIKRNEMLSSELSTCHESISKLKSVNDDLNAKLEIASKSTSCVEIVETCNRCKDFDIDACSEHLVSISKLNDELASLNAQLKTSKSNFDKLKFARDAYTIGRHPSIKDGLGYKKEAKNLTSHKAPISAKEKGKVPMDSSVQKNHAFMYHDRRQSRNAYRRCNAYGTFDSHDMFASSSSYVHDRNVGRRNVVHNMPRRNVVNVPRKVYASGGSSWIIDSGCTNHMTGEKKMFTSYVKNKDSQDSIIFGDRNQGKVKGLVESLGYNLLFVSQLCNMGYNCLFTNVDVSVFRRSDGSLAFKGVLDDKLYLVDFAKEEAGLDACLIAKTSMGWLWHRRLAHVGMKNLHKLLKGEHVIGLTNVQFEKDRPCAACQAGKQVGGAHHSKNVMTTSRPLELLHMDLFGPVAYLSIGGSKYGLVIVDDFSRFTWVFFLQDKSETQGTLKRFLRRAQNEFELKVKKIRSDNGSEFKNLQVEEFLEEEGIKHEFSAPYTPQQNGVVERKNRTLIDMARTMLGEFKTPECFWSEAVNTACHAINRVYLHRLLKKTSYELLTGNKPNVSYFRVFGSKCYILVKKGRNSKFAPKAVEGFLLGYDSNTKAYRFFNKSSGLVEVSSDVVFDETNGSPREQVVDLDDVDEEDVPTAAIRTMAIGDVRPQEQDEQDQPSSSTMVHPPTQDDEQVHQQEACDQGGAQDDHVMGEEAQPAPPTQVRAMIQRDHPVDQILCDISKGVTTRSRLVNFCEHYSFVSSIEPFRVEEALLDPDWVLAMQEELNNFKRNEVWTLVPRPKQNVVGTKWVFRNKQDEHGVVTRNKARLVAKGYAQVAGLDFEETFAPVARLESIRILLAYAAHHSFRLYQMDVKSAFLNGPIKEEVYVEQPPGFEDERYPDHVCKLSKALYGLKQAPRAWYECLRDFLITNAFKVGKADPTLFTKTCNGDLFVCQIYVDDIIFGSTNKKSCEEFNRVMTQKFEMSMMDELNYFLGFQVKQLKDGTFISQTKYTQDLLKRFGMKDAKPAKTPMGTDGHTDLNKGGKSVDQKAYRSMIGSLLYLCASRPDIMLSVCMCARFQSDPKECHLVAVQRILRYLVATPCFGLWYPKGSTFDLIGYSDSDYAGCKVDRKSTSGTCQFLGRSLVSWNSKKQTSVALSTAEAEYVAAGQCCAQLLWMRQTLRDFGYNLSKVPLLCDNESAIRMAENPVEHSRTKHIDIRHHFLRDHQQKGDIEVFHVSTENQLADIFTKPLDEKTFCRLRSELNVLDSRNLD

SEQ ID NO: 201045 - protein, 76 aa, Zea mays
  Clone ID: MRT4577_11493C.1.pep
FGFGYKISLNLLLIITKMIAADKQKCSSISDNLTARYQASISSPKAPLNPAVRVPRSLAEERTRRLGALNHQQPGR

SEQ ID NO: 201046 - protein, 95 aa, Zea mays
  unsure (1)..(95): unsure at all Xaa locations
  Clone ID: MRT4577_114940C.1.pep
MGKIKIGINGFGRIGRLVARVALQSEDVELVAVNDPFITTDYMTYMFKYDTVHGQWKHSDITLKDSKTLLFGEKPVTXVFGIKNPEEIPWGEAVA

SEQ ID NO: 201047 - protein, 1565 aa, Zea mays
  Clone ID: MRT4577_114941C.1.pep
MDPKGKGIMINDKEKESFINEPKDDKPTDLGSGHRRKDGKKKTRRIKEIVYYDDSDESTSSQKDNYDNDCERRKPVNSNFSFDYSRIPHSTNAHLLSIPLGKPPHFDGEDYGFWSHKMRSHLFSLHPSIWEIVENGMHFDSNDSPMDEYHKVSGLDSAKQIWDTLKISHEGNDVTMLTKMELVEGELGRFAMIRGEEPTQTYNRLKTLVNKIRSYGSTRWTDHDVVRLMLRSFTVLDPHLVNNIRENPRYTKMTPEEILGKFVSGRMMIKEARYVDDALNGPIQEPQTIALKATRSKEALPSKEKKSGKWEKKKNYKKAKGEAHIGKEWDSDCSTSDSDNEGLAATAFNKSSLFPNEHHTCLMAKEKKGLDRSKIDKINELIDALNDKNRLLEKQEDLLYEEHDKFVEAQKSLALEIKRNEMLACELSTCHDSISSLKSINDDLNAKLKITSKSTSCVENDVICNRCRDFDIDVCSEHIASIAKLNDEVASLNTQLKTSKSEFDKLKFARDAYTIGRHPSIKDGLGFKREVKNLTSHKASISTKEKGKAPMVYASGGSSWIIDSGCTNHMTGEKKMFTSYVKNKDSQDSIIFGDGNQGKRCDGSLAFKGVLDDKLYLVDFAKEDAGLDACLIAKTSMGWLWHRRLAHVGMKNLHKLLKGEHVIGLTNVQFEKDRPCAACQAGKQVGGAHHSKNVMITSRPLELLHMDLFGPVAYLSIGGSKYGLVIVDDFSRFTWVFFLQDKSETQGTLKRFLRRAQNEFELKVKKIRSDNGTEFKNLQVEEFLEEEGIKHEFSAPYTPQQNGVVERKNRTLIDMARTMLGEFKTPECFWSEVVNTACHAINRVYLHRLLKKTSYELLTGNKPNVSYFRVFGSKCYILVKKGRNSKFAPKAVEGFLLGYDSNTKAYRVFNKSSGLVEVSSDVVFYETNGSPREQVVDLDDVDEEDVPTAAIRTMAIGEVRPQEQKEQDQPSSSTMVIPPTQDDEHVHQQEACDQGGAQDDHVMEEETQPAPPTQVRAMIQRDHLVDQILGDISKGVTTRSRLVNFCEHYSFVSSIEPFRVEEALLDPDWVLAMQEELNNFKRNEVWTLVPRPKQSVVGTKWVFRNKQDEHGVVTRNKARLVAKGYAQVAGLDFEETFAPVARLESIRILLAYAAHHSFRLFQMDVKSAFLNGPIKEEVYVEQPPGFEDERYPDHVCKLSKALYGLKQAPRAWYECLRDFLIANAFKVGKADPTLFTKTCDGDLFVCQIYVDDIIFGSTNKKSCEEFSRVMTQKFEMSMMGELNYFLGFQVKQLKDDTFISQTKYTQDLLKRFGMKDAKPAKTPMGTDGHTDLNKGGKSVDQKAYRSMIESLLYLCASRLDIMLSVCMCARFQSDPKECHLVAVKRILRYLVATPCFRLWYPKGSTFDLIGYSDSDYVGCKVDRKSTSGTCQFLGRSLVSWNSKKQTSVALSTAEAEYVAAGQCCAQLLWMRQTLRDFGYNLSKVPLLCDNESAIRMADNPVEHSRTKHIDIRHHFLRDHQQKGDIEVFHVSTENQLADIFTKPLDEKTFCRLRSELNVLDSRNLD

SEQ ID NO: 201048 - protein, 1785 aa, Zea mays
  Clone ID: MRT4577_114942C.1.pep
MDPKGKGIVINDKEKESFVNEAKDDKPTDSGSGHRRKEGKKKKTRRIKEIVYYDDSDESTSSQKDDDHNDYEQRKPVNSNFSFDYSRIPQSSNSHLLSIPLGKPPHFDGEDYGFWSHKMRSHLFSLHPSIWEIVDSGMHFNSSDSPIFINEQIHKNAQATTVLLASLCRDEYNKLVEGELGRFAMIRGEETTQTYNRLKTLINKIRSYGSTRWTDHDVVRLMLRSFTVLDPHLVNNIRENPRYTKMSPEEVLGKFVSGRMMIKEARYVDDALNGPINEPQPFALKATRSKEALPSKVAQIEAVGLNDEEMALIIKRFKTVLKGHKGQPSKTKAKGKHSCFKCGKFGHFIANCPDNDSDQEKGNKRDSDNEGLAATAFNKSTLFPNERHTCLMAREKKVCTHNSTYASSSEDESSDEDEVDYSCLFKGLDRSKIDKINELIDALNEKNILLEKQEDLLYEEHDKFVEAQKSLALEIKRNEMLACEVSTCHDSISNLKSINDDLNAKLVEANKSNFCVEYVEICTRCKDINIDDYSEHLACISKLNEEVASLNAQLKTSKSDFEKLKFARDAYTVGRHPSIKDGLGFKREAKNLTSHKAPIPTKEKGKAPMATSTKRNHAFIYHDRRQTRNAYRSYNAYDDFSHAMFASSSSYVHNRNVGRRDVVHNMPRKNIIHAPRKVVNEPSTIYCALNASFAICRKDRKIIARKLGAKCKGDKTCIWVPKDICANLVGPNMSWVYASGGSSWIIDSGCTNHMTGEKKMFTSYVKNKDSQDSIVFGDGNQGKVKGLVESLGYNLLSVSQLCNMGYNCLFTNVDVSVFRRSDGSLAFKGVLDGKLYLVDFAKEEAGLDACLIAKTSMGWLWHRRLAHVGMKNLHKLLKGEHVIGLTNVQFEKDRPCAACQAGKQVGGAHHSKNVMTTSRPLELLHMDLFGPVAYLSIGGSKYGLVIVDDFSRFTWVFFLQDKSETQGTLKRFLRRAQNEFELKVKKIRSDNGSEFKNLQVEEFLEEEGIKHEFSAPYSPQQNGVVERKNRTLIDMARTMLGEFKTPECFWTEAVNTACHAIKKVYLHRLLKKTSYELLTGNKPNVSYFRVFGSKCYILVKKGRNSKFAPKAVEGFLLGYDSNTKAYRVFNKSSGLVEVSSDVVFDETNGSPREQVVDCDDVDEEDVPTAAIRTMAIGDVRPQEQDERDQPSSSIMVHPPTQDDERVHQQEACDQGGAQDDHVMEEEAEPAPPTQVRAMIQRDHPVDQILGDISKGVTTRSRLVNFCEHYSFVSSIEPFRVEEALLDPDWVLAMQEELNNFKRNEVWTLVPRPKQNVVGTKWVFRNKQDEHGVVTRNKARLVAKGYAQVAGLDFEETFAPVARLESIRILLAYAAHHSFRLYQMDVKSAFLNGPIKEEVYVEQPPGFEDERYPDHVCKLSKALYGLKQAPRAWYECLRDFLIVNAFKVGKADPTLFTKTCDGDLFVCQIYVDDIIFGSTNQKSCEEFSRVMTQKFEMSMMGELNYFLGFQVKQLKDGTFISQTKYTHDLLKRFGMKDAKPAKTPMGTDGHTDLNKGGKSVDQKAYRSMIGSLLYLCASRPDIMLSVCMCARFQSDPKECHLVAVKRILRYLVATPCFGLWYPKGSTFDLVGYSDSDYAGCKVDRKSTSGTCQFLGRSLVSWNSKKQTSVALSTAEAEYVAAGQCCAQLLWMRQTLRDFGYNLSKVPLLCDNESAIRMAENPVEHSRTKHIDIRHHFLRDHQQKGDIEVFHVSTENQLADIFTKPLDEKTFCRLRSELNVLDSRNLD

SEQ ID NO: 201049 - protein, 1658 aa, Zea mays
  unsure (1)..(1658): unsure at all Xaa locations
  Clone ID: MRT4577_114943C.1.pep
MDPKGKGMVVNDKEKESFVNDPKENKPTDSGSSRKRKDGRKKKTRRIKEIVYYDSDGSSSSQKDDDNDYEKKKTVNSNFSFDYSRIPQSTNAHLLSIPLDGVGGRRTREIRDDKRGGATQTYNRLKTLVNKIRSYGSTRWTDHDVVRLMLRSFIVLDPHLVNNIRENPRYTKMSPEEILGKFVSGRMMIKEARYVDDALNGPIHEPQTVALKATRSKEALPSKVAQIEAVGLNEEEMTLIIKRFKTALKGRKEHPNKNKTKGKRSCFKCGKIGHFIANCPDNDSDQEKKSGKWEKKNYKKAKGEAHLGKDEDESSDDDEIEYSCLFKGLDRTKIDKINELIDALNDKNRLLEKQENLLYEEHDKFVSAQNSLALEVKRNEMLSCELSTCHETISTLKGVNDDLNAKVEVANKSNSCVEHVMICNKCKDFNVDACSEHLVCISKLNDEVASLNAQLKTSKSEFDKLKFARDAYTIGRHPSIKDGIGFKREVKNLTSHKASISAKEKGKALMASSAQKNHAFMYHDRRHSRNVYRSYDAFDSHAMVASSSSIMHDRNLARKNAMPRKNIVHVPRKLMNEPSTIYYALNASFAICRKDKKVVARKLGAKCKGDKTCIWVPKAICTNLVGPNMSWVYASGGSSWIIDSGCTNHMTGEKRMFSSYVKNKDPQDSTIFGDGNQGKVKGLGKIAISSEHSISNVFLVESLGYNLLSVSQSCNMGYNCLFTNVDVSVFKRSDGSLAFKGVLDDKLYLVDFAKEEADLDACLIAKTSMGWLWHRRLAHVGMKNLHKLLKGEHVIGLTNVTFEKDRPCAACQAGKQVGSSHHAKNVMTTSRPLELLHMDLFGPVAYLSIGGSKYGLVIIDDLSRFTWVFFLQDKSETQATLKRFLRRAQNEFELKVKKIRSDNGSEFKNIQVEEYLEEEGIKHEFSAPYTPQQNGVVERKNRTLIDMARMMLGEFKTPERFWSEAVNTACHAINRVYLHRLLKKTSYELLTIFGSKCYILVKKGRNSKFAPKAVEGFLLGYDSNTKAYRVFNKSSGLVEVSSDVVFDETNGSPREQVVDLDDVDEEDVPTAAIRTMAIGDVRPQEQNARDQPSSSTMVHPPTQDDEQVHQEETCDQGGAQNDHVMEEEAQQAPPTQVRAVIQRDHPVDQILGDISKGVTTRSRLVNICEHYSFVSSIEPFRVEEALLDPDWVLAMQEELNNFKRNEVWTLVPRPKQNVVGTKWVFRNKQDEHGVVTRNKARLVAKGYAQVAGLDFEETFAPVARLESIRILLAYAAHHSFRLFQMDVKSAFLNGPIKEEVYVEQPPGFEDERYPGHECKLSKALYGLKQAPRAWYECLRDFLIANAFKVGKVDPTLFTKTCDGDLFACQIYVDDIIFGSTNQKSCEEFSRVMTQKFEMSMMGELSYFLGFQVKQLKDGTFISQMKYTQDLIKRFGMKDAKPAKTPMGTDGHTDLNKGGKSVDQKAYRSMIGSLLYLCASRPDIMLSVCMCARFQSDPRECHLVAVKRILRYLVATPCFGIWYPKGSTFDLIGYSDSDYVGCKVDRKSTSGTCQYLGRSLVSWSSKKQTSVALSTAETEYVAAGQCCAQLLWMRQTLRDFGYNLSKVPLLCDNESAIRIADNPVEHSRTKHIDIRHHFLRDHQQXGDIEVFHVSTENQL

SEQ ID NO: 201050 - protein, 1492 aa, Zea mays
  Clone ID: MRT4577_114944C.1.pep
MDPKGKGIVINDKEKESFVNEPRDDKSNDSGSGHRRKDGKKKKTRRIKEIVYYDSDESTSSQKDDDHNEYERKKPVNSNFSFDYSRIPQSTNAHLLSIPLGKPPHFDGEDYGFWSHKMRSHLFSLHPSIWEIVESGMHFDSTDSPMFINEQIHKNAQATTVLLASLCRDEYHKVSGLDNAKQIWDTLKISHEGNDVTLLTKMELVEGELGRFAMIRGEEPTQTYNRLKTLINKIRSYGSTRWTDHDVVHLMLRSFTILDPHLVNNIRENPRYTKMSPEEVLGKFVSGRMMIKEARYVDDALNGPINEPQPLALKATRSKEALPSKVAQIEAAGLNDEEMALIIKRFKTVLKGRKGQPSKTKAKGKRSCFKCGKLGHFIANCPDNDSDQDQGNKREKKKNYKKAKGEAHLGKEWDSDCSSSDSDNEALAATAFNKSSLFLNERHTCLMAREKKVSTHNTSTYASSSEDESSDDDEIDYSCLFKGLDRTKVDKINELIDALNDRNILLEKQEDLLYEEHDKFVEAQKSLALEIKRNEMLSSELSSCHETIAKLKSLNDDLNARLEVASKSNSCVEIVETCNRCKDFDIDACSEHLVSISKLNDELASLNAQLKTSKSNFDKLKFARDAYTIGRHPSIKDGLGYKKEAKNLTSHKAPISAKEKGKAPMASSVQKNHAFMYHDRRQSRNAYRRCNAYDAFDSHDMFASSSSYVHNRNVGRRNVVHNMPKRNVVNVPRKVYASGGSSWIIDSGCTNHMTGEKKMFTSYVKNRDSQDSIIFGDGNQGKDKSETQGTLKRFLRRAQNEFELKVKKIRSDNGSEFKNLQVEEFLEEEGIKHEFSAPYTPQQNGVVERKNRTLIDMARTMLGEFKTPERFWSEAVNMACHAINRVYLHHLLKKTSYELLTGNKPNVSYFRVFGSKCYILVKKGRNSKFAPKAVEGFLLGYDSNTKAYRVFNKSSGLVEVSSDVVFDETNGSPREQAVDLDDVDEEDVPTAAIRTMVIGDIRPQEQKEQDQPSSSTLMHPPTQDDEQVHQREACDQGGAQDDHVMEEEAQPAPPTQVRAMIQRDHPVDQILGDISKGVTTRSRLVNFCEHYSFVSSIEPFRVEEALLDPDWVLAMQEELNNFKRNEVWTLVPRPKQNVVGTKWVFRNKQDEHGVVTRNKARLVAKGYAQVAGLDFEETFAPVARLESIRILLAYAAHHSFRLFQMDVKSAFLNGPIKEEVYVEQPPGFEDERYPDHVCKLSKALYGLKQAPRAWYECLRDFLIVNAFKVGKADPTLFTKTCDGDLFVCQIYVDDIIFGSTNQKSCEEFSRVMTQKFEMSMMGELNYFLGFQVKQLKDGTFISQTKYTQDLLKRFGMKDAKPAKTPMGTDGHTDLNKGGSLLYLCASRPDIMLSVCMCARFQSDPKECHLVAVKRILRYLVATPCFGLWYPKGSTFDLVGYSDSDYAGCKVDRKSTSGTCQFLGRSLVSWNSKKQTSVALSTAEAEYVAAGQC

SEQ ID NO: 201051 - protein, 95 aa, Zea mays
  Clone ID: MRT4577_114945C.1.pep
MGSLGFLWTLSDHPKLPKGKPVAFVLLDRLGQAHPHQYNCIHVAQTSVMDLLKNGASEKWRLVKAYGTTVGLPSYDDMGNNEVGHNALGACPIFA

SEQ ID NO: 201052 - protein, 47 aa, Zea mays
  Clone ID: MRT4577_114946C.1.pep
GRSGRDVVRRTPWAGLLRMKTRDLPSYGDQYVHLNVSIREDLTCRQR

SEQ ID NO: 201053 - protein, 251 aa, Zea mays
  Clone ID: MRT4577_114947C.1.pep
RRGGGASGGFAYLSAASPAYDAACRRIARYAGAAVLSVDYRRSPEHRFPAAYDDGFAALRFLDGGPGPDPDPGAIAGAPPIDAARCFLAGDSAGGNIAHHVARRYALDPSAFTNLRLAGLIAIQPFFGGQERTPAELRLVGAPIVSVPRTDWMWRAFLPHGADRTHEASSPDVATAGIDGAPDFPPATVVIGGYDPLQDWQRRYCDALRGKGKEVRVLEYPDAIHAFYVFPEFAESKDLMLRIKEIVASSE

SEQ ID NO: 201054 - protein, 105 aa, Zea mays
  unsure (1)..(105): unsure at all Xaa locations
  Clone ID: MRT4577_114948C.1.pep
EGKREGGARKEEGEGPPKHTKREESGQARGERELDRERDTETEGEGREDTTKTLGQLKKRXAQGKEASGAEQQTGDGGSSETHGNKENGPDKQTKRKQGQGGRLG

SEQ ID NO: 201055 - protein, 61 aa, Zea mays
  Clone ID: MRT4577_114949C.1.pep
IRLEDLRHETRGGGIAGESTETRSRPGCRRPANEWTPGRWPRLRTDVAVREGAPRVRGRVG

SEQ ID NO: 201056 - protein, 409 aa, Zea mays
  Clone ID: MRT4577_11494C.1.pep
MLQIGSQEQREKHTTVMGHDHMSRIKMHMAEGSFGDRIRCQQPGCNEVVDRRVVYCKIHSGELSCQQFSYLQSGLESSGLSVRPVNDSQFKGSVSIAAVPCTEQELHVKHEGGDRGKLKDSSGYTLGQAAQFIFSGASMLCKNDNCSKQAHENSIHCKLHSGGVNKGCMARGCTRGAHGGTPLCIGHGGGRRCVVPGCPNAACGQGRSDRCVRHGGGKRCKFEGCAKGAQGNTDHCIRHGGGRRCRFQGCTKSAQGRTDFCIKHGGGSRCRFQGCGASAKWGTDLCSVHRKSLLGGDNAIPEALAAPSEKRRRAKTPQREAKPSEVFQENVTTAATAGNSTQHTGFLLVAAPVANRDILTNGMAVTGQAAIAPQRIVAPMFMRSPTPSGSVAASAQRWEAGASRGMLGL

SEQ ID NO: 201057 - protein, 122 aa, Zea mays
  unsure (1)..(122): unsure at all Xaa locations
  Clone ID: MRT4577_114950C.1.pep
ASCGYTRRSSEFGSRNFGKPMLWDPGLAMVMRGSLTQILQRTIQFMAPELFGENYNEVEDIYFMGMCMLEMETGECPYSECQGFVHIHKKISEGLKPVVFSKVNDXPXVRSFIESCLSSAAD

SEQ ID NO: 201058 - protein, 80 aa, Zea mays
  Clone ID: MRT4577_114951C.1.pep
KVHQNIRPRLFPINSTMWHLGNTIAYFFRICHYATFRPYHISLPPIHGVRDGLCFYSLTCIYFDVHHIALSSTCASITPM

SEQ ID NO: 201059 - protein, 44 aa, Zea mays
  Clone ID: MRT4577_114952C.1.pep
GILVAITFSNPFVLSLLACSTSTIWMKKLSFVGFQIVADSGILR

SEQ ID NO: 201060 - protein, 85 aa, Zea mays
  unsure (1)..(85): unsure at all Xaa locations
  Clone ID: MRT4577_114953C.1.pep
DWPWSXGSMGGSMSPGQFGGDGGAPVILRTSGFFNVDGQGPPEGGVGSPKGGGGSGGSLIKHAFQRGGPWPPNFYLVLLWGTRAI

SEQ ID NO: 201061 - protein, 45 aa, Zea mays
  Clone ID: MRT4577_114954C.1.pep
LCAYVCVIQIASLLITAHSYVHLWAQLGTATNVLKLRLRVVSTTL

SEQ ID NO: 201062 - protein, 75 aa, Zea mays
  Clone ID: MRT4577_114955C.1.pep
FIPFFGGPVFSFSPPGLYFLFTPVRFSVSARGIPFPLCAQVFSWVPHVLSGIPFGKSLCISGLGPIFHRKNHPAP

SEQ ID NO: 201063 - protein, 54 aa, Zea mays
  Clone ID: MRT4577_114956C.1.pep
MYNERITKKKKKKKKKKKKKKKKKKKKKKKKKKKKKKKKKKGGAPQKVQALLTL

SEQ ID NO: 201064 - protein, 65 aa, Zea mays
  unsure (1)..(65): unsure at all Xaa locations
  Clone ID: MRT4577_114957C.1.pep
RHPGRIXXVXLQDIRVSSQTATAQHKPPSLPRLYSGVMRLPPRMVPATLPPGRVVDREXRTGTAG

SEQ ID NO: 201065 - protein, 129 aa, Zea mays
  Clone ID: MRT4577_114958C.1.pep
ATLGGFFQQHRFFPFNQRGALNFAGFLHHHFPFSQLVVASPQHFFPFTQLAALNFGVFLQQQQLFPFSQLVDVGPAAFLTQQQLLPFSRPAMPNAGPLLQLHQLVPFTPLVLANPPGFSPHPPLGGAPF

SEQ ID NO: 201066 - protein, 316 aa, Zea mays
  unsure (1)..(316): unsure at all Xaa locations
  Clone ID: MRT4577_114959C.1.pep
LGNGLSMEVKLMKRREEMLVRXEQEIRKALISKNGKSEELTTLQQQLQSAREEASAAVKKLKEAESETQELHTMTRRMILSKEEMEEVVMKRCWLARYWGLAVQYGIYPDISMSKHEYWSSLAPLPFEYVTSAGQRAKDGSEAEGNGLEDVDKLVHDLTVTAGEGNVETMLAVDKGLQELAFLKVEDAVLFALAQHHRTNVAGAADPDIKSSGDEKFTEAFDLSKEEEEDVQFKQAWLIYFWRRAKTNNVEEDIAEERLHMWIDRHGQQPTSHDAVDVEQGIHELRKLGIEQLLWELSRHEANLAKDSPSDVEDLT

SEQ ID NO: 201067 - protein, 193 aa, Zea mays
  Clone ID: MRT4577_11495C.1.pep
KNTPPHTKLVPNCFRIPSLHSPPPSIRPIGGPLPRGDGRSTAAAEWVLAGDDRPPDTAAGFMLETSAEKHTTIMGHDHMSRIKMHMAEGSFGDRNRCQQPGCNEVVDGRVVYCKTHSGELSCQQFSHLQSGLESSVPCTEQELHVKHEGDDRGKLKDSSGYTLGQTAQFVFPGAGMFCQNDSCSKQAHENSFY

SEQ ID NO: 201068 - protein, 100 aa, Zea mays
  Clone ID: MRT4577_114960C.1.pep
GRAIADGKASQEDIKKAVSNAKFNLLSQNDLRQPSVVLAGTGIVNSGKPYDSAALAKAIDGVSAESVKAAAKAMLEGKATVSTVGDLFVLPYAEDIGLRV

SEQ ID NO: 201069 - protein, 90 aa, Zea mays
  Clone ID: MRT4577_114961C.1.pep
FGQAMAAGDIPLWPLLFPQSPALFLVQSLGKTIRAKHLQQLVLPVVNRPALADPPALYPDPFLGGAPFYISYGVRGKNKGFWMMFGASPQ

SEQ ID NO: 201070 - protein, 61 aa, Zea mays
  Clone ID: MRT4577_114962C.1.pep
VHQPRERVAGGGHQFGQRPLFGGPQLPPVPLLQEKGAHGSHRVAVAVAIQSNHGWIHHKWT

SEQ ID NO: 201071 - protein, 105 aa, Zea mays
  unsure (1)..(105): unsure at all Xaa locations
  Clone ID: MRT4577_114963C.1.pep
GQVAVGAQSALGAKKRGRTAGDKEQNRLKRLLRNRVSDQQAQXRENAFITELDVKVNGLELRNAXLEQIVCTLQNENNTLRQILKNTTAHASMTYRGLRGCHGKV

SEQ ID NO: 201072 - protein, 61 aa, Zea mays
  unsure (1)..(61): unsure at all Xaa locations
  Clone ID: MRT4577_114964C.1.pep
AFVVICDGDGHFELGVKFGKGVVTTIRVAIILAKLXLMPVKMGYCGNKIRHPHTIPYKGTS

SEQ ID NO: 201073 - protein, 114 aa, Zea mays
  unsure (1)..(114): unsure at all Xaa locations
  Clone ID: MRT4577_114965C.1.pep
IEAMTGLCCAPAAARLPWMNHPVKSDWSLKLLHQWPLRTEGXTQNLSRRAYKMQRVEQKLDIDFVMSTVYSFYMNGLNGVGDQALEESGGISTKVKSNRSHGSLLLGMDDYRRQ

SEQ ID NO: 201074 - protein, 77 aa, Zea mays
  Clone ID: MRT4577_114966C.1.pep
FVTLIVWLKQITEYFGRSLKVPNSLHQVCTDFPNSHNKHAREGGEQHPLASPSHVSPRHHQGSLCMYYQIMGFSNRI

SEQ ID NO: 201075 - protein, 43 aa, Zea mays
  Clone ID: MRT4577_114967C.1.pep
VVVRVKGKLSCSVAGVPHCLICNNASVMVVVMLICTMIYALHI

SEQ ID NO: 201076 - protein, 55 aa, Zea mays
  Clone ID: MRT4577_114968C.1.pep
VFKAPSTHEPNPMLWGAKETTIIPPIWLAPTIRIINTTSFCLQKHLYLHNTSTHQ

SEQ ID NO: 201077 - protein, 77 aa, Zea mays
  unsure (1)..(77): unsure at all Xaa locations
  Clone ID: MRT4577_114969C.1.pep
IFRGLSLLGLSASAATTTTFPQCSQAPIASFHSPYPLPAASSVYXNPNFKPYTIQHSIPPCILHLSPMFLQQPICLL

SEQ ID NO: 201078 - protein, 393 aa, Zea mays
  Clone ID: MRT4577_11496C.1.pep
MGHDHMSRIKMHMAEGSFGDRIRCQQPGCNEVVDRRVVYCKIHSGELSCQQFSYLQSGLESSGLSVRPVNDSQFKGSVSIAAVPCTEQELHVKHEGGDRGKLKDSSGYTLGQAAQFIFSGASMLCKNDNCSKQAHENSIHCKLHSGGVNKGCMARGCTRGAHGGTPLCIGHGGGRRCVVPGCPNAACGQGRSDRCVRHGGGKRCKFEGCAKGAQGNTDHCIRHGGGRRCRFQGCTKSAQGRTDFCIKHGGGSRCRFQGCGASAKWGTDLCSVHRKSLLGGDNAIPEALAAPSEKRRRAKTPQREAKPSEVFQENVTTAATAGNSTQHTGFLLVAAPVANRDILTNGMAVTGQAAIAPQRIVAPMFMRSPTPSGSVAASAQRWEAGASRGMLGL

SEQ ID NO: 201079 - protein, 82 aa, Zea mays
  Clone ID: MRT4577_114970C.1.pep
PKNALKLGGCANLLGFVKGSIAKVPPDFWSPLWYGFPGLGGAVFLSPALKGKVLGVNLDVPVKFPLVFNFWGGGVPQGFLWA

SEQ ID NO: 201080 - protein, 59 aa, Zea mays
  Clone ID: MRT4577_114971C.1.pep
SKGSDLYLLLLEETSLILIACTAVLLDSYSVLLLSYSYIIYIYIRFCYRWTTIGRLGVD

SEQ ID NO: 201081 - protein, 35 aa, Zea mays
  Clone ID: MRT4577_114972C.1.pep
LLMIRFQPPLVIEHQGCSATNSYQVIVLLTKDFFF

SEQ ID NO: 201082 - protein, 64 aa, Zea mays
  Clone ID: MRT4577_114973C.1.pep
YVEVGARTWDLPVTDGRLYRCTKPAFPFRDFIMEKKIYPTSIIRMAASGICIENCVIPTKGVVN

SEQ ID NO: 201083 - protein, 501 aa, Zea mays
  Clone ID: MRT4577_114974C.1.pep
DGYADNGNATEAMALFWRMVQEGMDVTDASVLAALQACGELGYLDEVRRVHELLVRVGLSSNVSVTNALITTYAKCKRADLAAQVFNELGNKKTRISWNAMILGFTQNECPEDAERLFARMQLENVRPDSFTLVSVIPAVADISDPLQARWIHGYSIRHQLDQDVYVLTALIDMYSKCGRVSIARRLFDSARDRHVITWNAMIHGYGSHGFGQAAVELFEEMKGTGSLPNETTFLSVLAACSHAGLVDEGQKYFASMKKDYGLEPGMEHYGTMVDLLGRAGKLDEAWSFIKNMPIEPGISVYGAMLGACKLHKNVELAEESAQIIFELGPEEGVYHVLLANIYANASMWKDVARVRTAMEKKGLQKTPGWSIIQLKNEVHTFYSGSTNHQHAKDIYARLAKLIEEIKDMGYVPDTDSIHDVEDDVKAQLLNTHSEKLAIAYGLIRTAPGTTIQIKKNLRVCNDCHNATKLISLLTGREIIMRDIQRFHHFKDGKCSCGDYW

SEQ ID NO: 201084 - protein, 112 aa, Zea mays
  unsure (1)..(112): unsure at all Xaa locations
  Clone ID: MRT4577_114975C.1.pep
PTTSARVKRWLLREEVNNILAXTAXTRRERHXRLNQWAARIEGASFPRVPMRYYALLQAQPTVQALGCYLFKVQNEKGAFLLCWQERAMFYVSSWRARSLEWRRNALTPSRL

SEQ ID NO: 201085 - protein, 215 aa, Zea mays
  unsure (1)..(215): unsure at all Xaa locations
  Clone ID: MRT4577_114976C.1.pep
LFLFASPGHPNQRSAGRPGNLPWHTTDGATPLRPEQNLGTTDPPRSPPLRAQTPIRXRPSSADFFPPGHRRRRXLLRLIADQGRGLETQSAPSRLADIVSCIDALAAVSPGADTVSDAAKLSGTWRLLWTTEQEQLFIVRNAPFFRTAAGDVLQVIDVAGGALNNVITFPPSGAFVVNGDIEVQPPQRVNFRXFTRAALRGSNWEVPFPPFGKGW

SEQ ID NO: 201086 - protein, 56 aa, Zea mays
  Clone ID: MRT4577_114977C.1.pep
PRQAVQVIGELRVRLRLLQHDAVRVLHLSVRFFRAPHAVGGQQPGISTGSARLQPG

SEQ ID NO: 201087 - protein, 53 aa, Zea mays
  unsure (1)..(53): unsure at all Xaa locations
  Clone ID: MRT4577_114978C.1.pep
PRVRPQLMKLDLLFPRLSHIREITRLLGGXRYITQHTFPASSNFPHYNLICFN

SEQ ID NO: 201088 - protein, 231 aa, Zea mays
  Clone ID: MRT4577_114979C.1.pep
EDCHFPNSIEKAIRSAFVKADNAIADSHSLDRNSGTTALTVLIFGRTLLVANAGDCRAVLGKRGRAVELSRDHKPSCIVERLRIENLGGTVFDGYLNGQLAVARAIGDWHMKGSKGSVCPLTPEPEFREVRLTEEDEFLIIGCDGLWDVMSSQFAVSMVRKELMEHNDPQRCSRELVHEALRRDCCDNLTVVVVCFSADPPPQIEIPRFRVRRSISMEGLHRLRGALDSNI

SEQ ID NO: 201089 - protein, 85 aa, Zea mays
  unsure (1)..(85): unsure at all Xaa locations
  Clone ID: MRT4577_11497C.1.pep
QGRGGYINVGYEEIVNTKVLVFNGQXMRNVMSWDTMGEKCKDEFLKSDLGXDQSGALETKTAKGASQDSVPGHCIPCASWDDLMD

SEQ ID NO: 201090 - protein, 75 aa, Zea mays
  Clone ID: MRT4577_114980C.1.pep
SMVRKELMEHNDPQRCSRELVHEALRRDCCDNLTVVVVCFSADPPPQIEIPRFRVRRSISMEGLHRLRGALDSNI

SEQ ID NO: 201091 - protein, 80 aa, Zea mays
  unsure (1)..(80): unsure at all Xaa locations
  Clone ID: MRT4577_114981C.1.pep
SRXVSLVQSNAIPWSPVCRAGPALQDVSVSLWSLSGEGWSLHCIEVVELDLTASRESDSFLRITSPADAYRAACSRQLRR

SEQ ID NO: 201092 - protein, 42 aa, Zea mays
  Clone ID: MRT4577_114982C.1.pep
MELFKPNCAAEFTAQVADFVRRHSSTVTAVAGSGDVVGMSKL

SEQ ID NO: 201093 - protein, 107 aa, Zea mays
  Clone ID: MRT4577_114983C.1.pep
VMSPIILRVIRTSWWRSRPRSVRCSHTTLSLYGDADGRLRRTHRWRHCHRWSSRTMPRRPNQAASLQAITRTYAPYLAPHCAPSAHISRDISPGRSEGDAAGCNWMY

SEQ ID NO: 201094 - protein, 207 aa, Zea mays
  Clone ID: MRT4577_114984C.1.pep
PRVRPRVRPRVRPRVRGKMWPDASDTDASSHYKLPFSRTVYIEKTDFRLKDSKDYYGLAPGKSVMLRYAFPIKCTDVIYGDTPDDIVEIRAEYDPLKTSKLKGVLHWVAEPAPGVEPLKVEVRLFEKLFMSENPAELEDWLGDLNPHSKEVIKDAYAVPSLATAVLGDKFQFERLGYFAVDTDSTPEKLVFNRTVTLRDSFGKAGPK

SEQ ID NO: 201095 - protein, 584 aa, Zea mays
  Clone ID: MRT4577_114985C.1.pep
AVATAAPPSEEELNPYTIFPQPEENFKVHTEIFFSDGNIWRAHNTKEILEKHLKATGGKVMTRFPPEPNGYLHIGHAKAMFIDFGLAKERNGHCYLRFDDTNPEAEKKEYIDHIQEIVHWMGWEPYKVTYTSDYFQALYEHAVELIQKGLAYVDHQTAEEIKEYREKKMDSPWRGRPIEESLKLFEDMRRGLIAEGAATLRMKQDMQNENKNMSDLIAYRIKFTPHPHAGDKWCVYPSYDYAHCMVDSLENITHSLCTLEFDIRRPSYYWLLVALGLYQPYVWEYSRLNISNTVMSKRKLNRLVTEKWVDGWDDPRLLTLAGLRRRGVSSTAINSFIRGIGITRSDNSLIRVDRLEYHIREELNKTAPRTMVVLRPLKVVITNLEEGKVLDLDGKMWPDASDTDASSHYKVPFSRTVYIEKTDFRLKDSKDYYGLAPGKSVMLRYAFPIKCTDVISGDSPDDIVEIRAEYDPLKTSKLKGVLHWIAEPAPGVEPLKVEVRLFEKLFMSENPAELEDWLGDLNPHSKEVIKDAYAVPSLATAVLGDKFQFERLGYFAVDTDSTPEKLVFNRTVTLRDSFGKAGPK

SEQ ID NO: 201096 - protein, 74 aa, Zea mays
  unsure (1)..(74): unsure at all Xaa locations
  Clone ID: MRT4577_114986C.1.pep
XQRIXXXPKRSSXXSFIHXPNXRRTREQRDXSFSXRNXRXQWTPPGRPXRRRXRRSXGXSXGXRCAXXSARSXA

SEQ ID NO: 201097 - protein, 325 aa, Zea mays
  unsure (1)..(325): unsure at all Xaa locations
  Clone ID: MRT4577_114987C.1.pep
LIAYRIKFTPHPHAGDKWCVYPSYDYAHCMVDSLENITHSLCTLEFDIRRPSYYWLLXLTLAGLRRRGVSSTAINSFIRGIGITRSDNSLIRVDRLEYHIREELNKTAPRTMVVLRPLKVVITNLEEGKVLDLDGKMWPDASDTDASSHYKVPFSRTVYIEKTDFRLKDSKDYYGLAPGKSVMLRYAFPIKCTDVISGDSPDDIVEIRAEYDPLKTSKLKGVLHWIAEPAPGVEPLKVEVRLFEKLFMSENPAELEDWLGDLNPHSKEVIKDAYAVPSLATAVLGDKFQFERLGYFAVDTDSTPEKLVFNRTVTLRDSFGKAGPK

SEQ ID NO: 201098 - protein, 76 aa, Zea mays
  Clone ID: MRT4577_114988C.1.pep
YLVHWFSLIPGSISFSCEHLSKFRAKFTFSTTDKEFGRPFWYGLQVPRGLYYGLQSGGGLKAGFTVSYWVNRISFC

SEQ ID NO: 201099 - protein, 240 aa, Zea mays
  unsure (1)..(240): unsure at all Xaa locations
  Clone ID: MRT4577_114989C.1.pep
QTXXTLYKEXKLEAEQRRLEEXGPIAYYSEXVEAYKNKDTSREAIQKHFEETGEDENVQLIKMFQHQTAGEYRIMMGTDVRIQRDPLAMRMREDQIKQIWGGDPVYPTINYVQDPDEVIDYRGPEFHEPTPEVVPYLMEHGIMITKEELYARLNEEREDVNQDITYIPEAKDPMATAIDIGEHSYNEDSDDEDEDVDKAAAQPQSLEDEEDDRDDVAEVEEKVNQNWSALKSTGQAEKPK

SEQ ID NO: 201100 - protein, 132 aa, Zea mays
  Clone ID: MRT4577_11498C.1.pep
RPGPGVSAQIRRHYARKFHLLRHRRRLPKEQKSIMGEGDELELMVPCDRPYEDQRQGEAGVEGAHLRVGLGGPVPQQRLAGVAQPGAHERAPWWSTARAPRASGSLFCITPTIAVHGSRNPLLPADVYDRSM

SEQ ID NO: 201101 - protein, 124 aa, Zea mays
  Clone ID: MRT4577_114990C.1.pep
TSDIRKNRHLHIDLVERDGTYGWRRSRRQLQRDVPTTEMCWCRSGRQSLRGVPATRGRSTAWRRGGSSLQCGRRVRTCAGGGVRQQHLDIAFGRDPVGRRGSRVCLRIGRPPKTPPDDVESKKG

SEQ ID NO: 201102 - protein, 100 aa, Zea mays
  Clone ID: MRT4577_114991C.1.pep
VFECEKGSESTANIVRYISHLAPQGFHFIFLRSYMLCDCESDITFCTQEHICARVCARAHIFPLYKRAQKWGSERAIGGHFFFFFTLFFVFPGPGRPRGT

SEQ ID NO: 201103 - protein, 37 aa, Zea mays
  Clone ID: MRT4577_114992C.1.pep
GPVPRDYDLRHPPWRGSGHKLPCCLIRASDHSIILYA

SEQ ID NO: 201104 - protein, 334 aa, Zea mays
  unsure (1)..(334): unsure at all Xaa locations
  Clone ID: MRT4577_114993C.1.pep
MKNVLFDVTEVNLPFNAIIGRLALYQFMAIAHCGYFVLKIPSPAGVLTVQGDRAAALAAVEKLHALVAEAARPDDGGRNPLTSGTKAPTKVPKANADVFAWEPSQMPGIPREVIEHHLKINPDAKPMSREDRKHTAFVTVDGLYCYVVMLYGLKNALPTFVRAMSKTFGDLIRDKVEVYVDDIVVKTKRGSTLVEDLTLVFDRLRATRTKLNPDKCVFGVSAGKLLGFLVSHWGIEANPEKIKAIEAMRPPTRIKDVQKLMGSLAALSRFISRLDERVLPFFKMLQKSGPFSWTEEAEQAFQELKQHLVSLPILVXPEPGEPLYLYITAAAEAV

SEQ ID NO: 201105 - protein, 46 aa, Zea mays
  Clone ID: MRT4577_114994C.1.pep
QQHLKTYRFHPGLPAYKTFKNMGPCFMPPSKPKKKNGRPLGKPNGP

SEQ ID NO: 201106 - protein, 66 aa, Zea mays
  Clone ID: MRT4577_114995C.1.pep
DLGGVSQPQLFRREGILSGILRLKGAKLKPFPLFFSSFLDTGKAKIFPWQNPKLIPSETAPLFFGG

SEQ ID NO: 201107 - protein, 102 aa, Zea mays
  unsure (1)..(102): unsure at all Xaa locations
  Clone ID: MRT4577_114996C.1.pep
KKKKKKLRNKKXKKXKKKLNKKKKKKIKKKNKNKIKKKKXKSKKXKKKYNNIKKXKKYKKIKKKKKKXEKKIKKKKKRKNKKKKKKKKMKKXKKKXKKMKKK

SEQ ID NO: 201108 - protein, 53 aa, Zea mays
  Clone ID: MRT4577_114997C.1.pep
TRLKIIQVQRYVTGGPYSGSRFPYAEEYRLALSQLSINERPLILVLPPHAGET

SEQ ID NO: 201109 - protein, 58 aa, Zea mays
  Clone ID: MRT4577_114998C.1.pep
VDMMCKLTTISFCDCFFHLLITCRENKLMRRSEILYWNSAGSSFLNGAKLKELGGTFF

SEQ ID NO: 201110 - protein, 94 aa, Zea mays
  unsure (1)..(94): unsure at all Xaa locations
  Clone ID: MRT4577_114999C.1.pep
GVHMFGPKSPGYKXVWHRGSLHHVVHTRALQRGPITKRPNVFGGHLPTGIILFCAKFETVAPLKNKXFSSRAPFRGVASKPFLTSNVKGTFCTL

SEQ ID NO: 201111 - protein, 74 aa, Zea mays
  Clone ID: MRT4577_11499C.1.pep
VGHVIGGDEGVVQRTSLEVVDLQEDVGHQPSDRSEPIDSDHDVGHEGESLPVEGSEDRLNLNGSKKMLDSVRTR

SEQ ID NO: 201112 - protein, 203 aa, Zea mays
  Clone ID: MRT4577_1149C.1.pep
VNTRPDLAYSVGYVSRFMEEPHMDHLAAVKQILRYIAGTRDWGLFYSRRNGGSDELLGYSDSDMAGDLDGRKSTSGILFFLGRSPISWQSTKQKVVALSSCEAEYIAAATAACQAVWLARLLAEIRNSETSRPLLRVDNKSTISLIKNPVHHDRSKHIDTRFHLIREYENSGQIKVKFISTEKQLGDILTKPLGKIKFQELCT

SEQ ID NO: 201113 - protein, 198 aa, Zea mays
  unsure (1)..(198): unsure at all Xaa locations
  Clone ID: MRT4577_114C.1.pep
AIDELTAFKEKPSKNVQSRVSWQKXEVVKEPSVGSFRNLLLYHPACVSVDEDGDRIFISDSNHHRIIISNSNGMILDYIGSSLGYEDGKFESAKFLRSASSFYHAAEDCQFIVXDSENHAVRKADLGRTLQTVYPVFNKSNGIWSWITDKLGMRKEATPTIQDFHADSMPLPWHLIQILEDTLLGRHLIVVVNGHKPS

SEQ ID NO: 201114 - protein, 96 aa, Zea mays
  Clone ID: MRT4577_115000C.1.pep
RVEGYTPALPLSMKRTFQRFISLPQSTSPRFAATLDRAFHTRLSSQGFSGMPYSHDINPVNTAFFSICQRSSPLGYGSLYAFCTGAPCYQACQTVA

SEQ ID NO: 201115 - protein, 159 aa, Zea mays
  unsure (1)..(159): unsure at all Xaa locations
  Clone ID: MRT4577_115001C.1.pep
MASPPPFDLCGDLDDDDIDEPVTAVPKDRHLPAAAPTPNGLNDHLLRFTRSLQRPTQNPNPSPNPPPPPPPAAAEEQVEKVKLAGRRRLCKLATTTTATQRVDEEEAEWDNQDDGESILDILDDLTTRFDSLSVQKPSTXARSTQQLTPLPCAITVDDD

SEQ ID NO: 201116 - protein, 86 aa, Zea mays
  Clone ID: MRT4577_115002C.1.pep
MAVNVRTMWSSMRAHVAMAVALVFLVSGAGCGPPKVPPGKNITATYSRDWLDAKATWYGKPTGAGPDDNGGGYGLKDVNKPPSITW

SEQ ID NO: 201117 - protein, 42 aa, Zea mays
  Clone ID: MRT4577_115003C.1.pep
VASSFSQSHRAKPSPSKVHFGGAVGQPSPNKRAAPPLAPASP

SEQ ID NO: 201118 - protein, 57 aa, Zea mays
  Clone ID: MRT4577_115004C.1.pep
EEARDGAASSHRSPVSLIMSRARSNVYSGTGFRRLSRRLVATRACLRRTSSRLWRWR

SEQ ID NO: 201119 - protein, 48 aa, Zea mays
  Clone ID: MRT4577_115005C.1.pep
AALGSFGFSIGKIREGINAHKRCAIMRLSYQANAEAEVNESVLHRRPA

SEQ ID NO: 201120 - protein, 127 aa, Zea mays
  unsure (1)..(127): unsure at all Xaa locations
  Clone ID: MRT4577_115006C.1.pep
TYSGAGGSYFCARRWRSLSEAAPGNPKGCEKIPKTKCAXQRHTXEKGAGHKQGANLTRLLGRQERTTGGSSYYDGNINIAXVXEEHTLYEYLLNPKKDIAETKMVFPGLKKPHERADLIAYLREATA

SEQ ID NO: 201121 - protein, 98 aa, Zea mays
  unsure (1)..(98): unsure at all Xaa locations
  Clone ID: MRT4577_115007C.1.pep
LLYLSVLSCAHSICKSHXPLIAKLXLNXTAHRDSDPTXDAANAGSRGGXAGAAGTTRRSRRRSRGAPPRXARPTTAXTRTEGAXPRRRGAAQERGYQG

SEQ ID NO: 201122 - protein, 81 aa, Zea mays
  Clone ID: MRT4577_115008C.1.pep
LFFFLNILLRGTFKHRGGLSGTIHMIVGSCTIPSATSILTIIGRWPLLICSRTLAPVPLIPTDQTIQPDLSKNCPPGATNY

SEQ ID NO: 201123 - protein, 105 aa, Zea mays
  Clone ID: MRT4577_115009C.1.pep
MLNRMLEPHNASAPSAYSSVWSSFSITVAIATIQEQQRGDDHATDHAAVQLPGKHIIRLDHRIRARMSVVPCQRHPLLQRPSRAGGLCPSYSRAQPRLYFKRMSE

SEQ ID NO: 201124 - protein, 64 aa, Zea mays
  Clone ID: MRT4577_11500C.1.pep
HLRAGRYSGSPYCNQALLHHGHSMFSCCIKWSLTTIHSRDEPVFFLEILEKARQRDSKHYSVVC

SEQ ID NO: 201125 - protein, 118 aa, Zea mays
  unsure (1)..(118): unsure at all Xaa locations
  Clone ID: MRT4577_115010C.1.pep
IKRSLAHGYGSNRHLALSEEDRXWVMNAIQANTVNFVKRMNEITQAMKTAHNLLDSQGETLEIIQHLWYELHVPLAYIGLPGHLHDKADLDRALNDLQDEKPIFYDMITHKMMIRHVH

SEQ ID NO: 201126 - protein, 339 aa, Zea mays
  Clone ID: MRT4577_115012C.1.pep
MHHHHQDQAMGDALWDLLGEEMAAAGGEHGLPPGFRFHPTDEELVTFYLAAKVFNGACCGIDIAEVDLNRCEPWELPDAARMGEREWYFFSLRDRKYPTGLRTNRATGAGYWKATGKDREVLNAATGALLGMKKTLVFYKGRAPRGEKTKWVLHEYRLDGDFAAARRPCKEEWVICRILHKAGDQYSKLMMVKSPYYLPMAMDPSSFCFQEDPTGHPLPNPSGCTPFHHGHPHHSMQPPPPLPPSNHAGKAVFTGAAAACCMQQEPADGSNSAVLPMPPFPPFTTIVAGKPAVPAPPPQVVNAGPQEPPPPTWLEAYLQHTGGILYEMGVGPTAAPRGA

SEQ ID NO: 201127 - protein, 125 aa, Zea mays
  Clone ID: MRT4577_115013C.1.pep
AGARAAFFFFFFEKARYKARKGPLHTMAATSQRANHNQPASPAHLAICHLPANQSHGYTDHSPFYCTQKRKNPRSRASGSRSLVISSRPSTRLDGGRLPNPKRQEAKTNPSPDGSSVLACCWLAP

SEQ ID NO: 201128 - protein, 68 aa, Zea mays
  Clone ID: MRT4577_115014C.1.pep
FKDHIYNDTNINQGFASSLKDNWPQATGFGDENLAPLDTTTPYIFFNADYNNLLSHKGLLHSDQELFN

SEQ ID NO: 201129 - protein, 319 aa, Zea mays
  Clone ID: MRT4577_115015C.1.pep
WDPRGRPGLVLQFKEGTQVCDIDMLPQDVNLIELPDQRKIIGRDVGAKAVTGMEEGKLDQSSSLNLSDVDLVGGTEVAAIHNNPVLVQLSAAGSSTESNNKQQQDPETFTGANASPTDDLCQLPLDNKDVQVVNIECGTPVEVGGFGLSKSIHNNPVLVQMSVAGSSAELINKQQEDPETFTGANANPTDDLCQLPLDNKDVQVIDIECGTPVEVGGFDLSKSKNKMVCSSMDSIMDPGDGIHTDVIPVVQDGYSLAFSDFLSSDIPCYPSMQSDLHAGISANDSEGITVMDDPIYGSLADIGFMDMWGQPTQDYDKFF

SEQ ID NO: 201130 - protein, 115 aa, Zea mays
  Clone ID: MRT4577_115016C.1.pep
LQRMLWWTQVRLRAVLGARAGRRRWQMRRGTVNPAAVSPCRLRAGSVRGGLRRIPSNPSQTKQCLIGHGGCVLRLRRGQNGHRPTGGSIQSKPPVRLQVGEAGCSGPADLAAKLN

SEQ ID NO: 201131 - protein, 94 aa, Zea mays
  Clone ID: MRT4577_115017C.1.pep
QGGLIFSGGGHSQALFSGGGLLPHPGLRVSPLPPPVLGGHRLQRLAGTGGSPSGWSLFLGRALLSYNELPCHRQGLRRAPSTALNMEAKEQGTI

SEQ ID NO: 201132 - protein, 154 aa, Zea mays
  unsure (1)..(154): unsure at all Xaa locations
  Clone ID: MRT4577_115018C.1.pep
TGGSCGCRAGSRVQARRTAPCEEIIRPVNWKYMKKGLSVWLDVPLDALARRIAKVGTASRPLLDQPSGDPYTMAFSKLSMLAEQRGDAYANADVRVSLEEIASKQGHXDVSKLMPTDIAIESLHKIESFVIEHAADNPASDSQAESQIQRIQTL

SEQ ID NO: 201133 - protein, 146 aa, Zea mays
  unsure (1)..(146): unsure at all Xaa locations
  Clone ID: MRT4577_115019C.1.pep
GYLEAGRDGGFQVSPLPLLPPSPRXSPPGEPPAHPHASMKSPSPGAPPGXSPPTARPLVHPFREPXPSPSVGXFPSEQPSPPPXPSNSSPXXXSPSRVPPHPSWPWLPSPAPKTQSSMAPAASSAPGVAPARPPPAPLARCSRARA

SEQ ID NO: 201134 - protein, 93 aa, Zea mays
  unsure (1)..(93): unsure at all Xaa locations
  Clone ID: MRT4577_11501C.1.pep
GRPKGLALVPTTFLQEPPGAFTALDGKTLDGRIIPLNHANEKTGGLRGGCGXCGGYGGGGGYGGAGGSRGYCGSDYGGSYSNMGGGGDYGDAG

SEQ ID NO: 201135 - protein, 303 aa, Zea mays
  Clone ID: MRT4577_115020C.1.pep
MEAGGVGLALQTRAAAFGSGQRRGGLQSPIGSLRVADPAGPAVAVRVRGSKPVVPLRAKKSSGGHENLHNSVDEALLLKRKSEEVLFYLNGRCIYLVGMMGSGKSTVGKIMSEVLGYSFFDSDKLVEQAVGMPSVAQIFKVHSEAFFRDNESSVLRDLSSMRRLVVATGGGAVIRPINWRYMKRGLSVWLDVPLDALARRIAKVGTASRPLLDQPSGDPYAMAFSKLSMLAQQRGDAYANADVRVSLEEIACKQGHDDVSKLTPTDIAIESLHKIESFVIEHTADSSASDAQAESQIQRIQTL

SEQ ID NO: 201136 - protein, 217 aa, Zea mays
  unsure (1)..(217): unsure at all Xaa locations
  Clone ID: MRT4577_115021C.1.pep
MEAGGVGLALQARAAGFGSSRHRGGLQAPTGSLRVADPAGPAVAVRARGSKPVAPLRLRAKKSSGGHENSHNSVDEALLLKRKSEEVLFYLNGRCIYLVGMMGSGKSTVGKIMSEVLGYSFFDSDKLVEQAVGMPSVAQIFKVHSEAFFRDNESSVLRDLSSMRRLVVATGSGAVIRPINWRYMKRGLSVWLDVPLDALARRIAXSGTASRPLLDHH

SEQ ID NO: 201137 - protein, 303 aa, Zea mays
  Clone ID: MRT4577_115022C.1.pep
MEAGGVGLALQTRAAAFGSGQRRGGLQSPIGRLRVAEPAGAAVAVRVRGSKPVVPLRAKKSSGGHENLHNSVDEALLLKRKSEEVLFYLNGRCIYLVGMMGSGKSTVGKIMSEVLGYSFFDSDKLVEQAVGMPSVAQIFKVHSEAFFRDNESSVLRDLSSMRRLVVATGGGAVIRPVNWKYMKKGLSVWLDVPLDALARRIAKVGTASRPLLDQPSGDPYTMAFSKLSMLAEQRGDAYANADVRVSLEEIASKQGHGDVSKLMPTDIAIESLHKIESFVIEHAADNPASDSQAESQIQRIQTL

SEQ ID NO: 201138 - protein, 497 aa, Zea mays
  Clone ID: MRT4577_115023C.1.pep
MMGRTGDGRRRDVDGRLEALLSGAGGEEPWLRRVALATALELRLLAPLAAPAVVVYMLIIVMSSTTQIVCGQLGNVQLAAASLGNNGIQVFAYGIMLGMGSAVETLCGQAYGAEKYEMLGVYLQRSTVLLTATGVPLAAVYALSEPLLLLLGQSPEIAGAAAEFAYGLVPQIFAYAANFPIQKFLQAQSIVAPSAYILAASFALHVPLSWLAVYGLGLGLLGASLTLSLTWWVLVLGQFAYIVWSPRCRATWTGFTWAAFADLPGFAGLSAASAVMLALEVWYFQVLILLAGMLPDPQIALDSLTVCTSIQSWVFMISVGFNAAASVRVGNELGAGNPRSAAFSAWVVTALSAFVSGIAGLVTFLLRDKLSYIFTGGEAVSRAVADLCPLLVGTIVLCGIQPVLSGVAVGCGWQAMVAYINVGCYYFIGVPLGVLLGFKFGFGIKGLWGGMIGGTLIQTLALIWITLRTDWNKEVEEARKRLDKWDDKRQPLLASKE

SEQ ID NO: 201139 - protein, 128 aa, Zea mays
  unsure (1)..(128): unsure at all Xaa locations
  Clone ID: MRT4577_115024C.1.pep
IQKLXRKVIVDHALINGESEKNAVTSIFHKIGAFEEELKAVLPKEVEAARAAYDNGTSAIPNRIKECRSYPLYRFVREELGTELLTGEKVTSPGEEFDKVFTAICEGKIIDPMMECLNEWNGAPIPIC

SEQ ID NO: 201140 - protein, 193 aa, Zea mays
  Clone ID: MRT4577_115025C.1.pep
SRPAGTKHFGFRGFEARAPRCLRFPTSHPKQKLARKQHGPCGRDGQSANPYLAGQLRPAALFPIPRLGSPHFSCLLPSPSSVEWFGPVLCCAWGQLQAATGKATRSSADACCELLGKDGCSCSAGRRTPGTSCREIAMCFTRRLAPGQSDQLVQGNFRGRTIRWASGGCKDFALSPAQKDFWPSRQRWYHEHT

SEQ ID NO: 201141 - protein, 314 aa, Zea mays
  Clone ID: MRT4577_115026C.1.pep
MEGGAVPKPSEKRVALVTGGNRGMGFEICRQLASSGLTVVLTARSETRGAEAARELRGFGLPDVVSHQLDVTEPTSAARLADFVRTKFGKLDVLVNNAGIMGVTMEIGDDEAAVKEMMVGKDQNEIAEWLKQRTTQSAEQAEECVRINYHGTKTVTEALLPLVQSSSSSSSGGRIVNVTSSFGLLRFFSGEELRQELSSVDTLTTQRLDELSALFLEDYRSGRLEPRGWPTDRVYAAYQVSKALVSAYARVLARDNPALRVNCVHPGYVQTEMNRNTGDLTAAEGARVSVAVALADQGGVTGAYFDRTQIASFV

SEQ ID NO: 201142 - protein, 88 aa, Zea mays
  Clone ID: MRT4577_115027C.1.pep
PVDPAFACYDLSGYTSVRVPTVSFYFDGAATLTLPARNLLLEVDGGIYCLAFAPSSSGPSILGNIQQEGIQITVDSANGYIGFGPTTC

SEQ ID NO: 201143 - protein, 92 aa, Zea mays
  Clone ID: MRT4577_115028C.1.pep
VDRGLLRPCGALPEAGAQGAPVVWTDGAAVHELGPIRRVAVKLAAGVARAQQQNTAVVVCVRGMTGSHQNPTIATISVIESRAHEHTARAAV

SEQ ID NO: 201144 - protein, 65 aa, Zea mays
  unsure (1)..(65): unsure at all Xaa locations
  Clone ID: MRT4577_115029C.1.pep
MDASAAGSMAKKGAGGPMDGGLRKKSXERNXKAALHEPVGRIGRYLKKGLNTQRMGTGDPDYLVV

SEQ ID NO: 201145 - protein, 43 aa, Zea mays
  Clone ID: MRT4577_11502C.1.pep
IKITLIILTNTLNIIFGITKTLNYTIFWLVGHYIEYIPNAHFV

SEQ ID NO: 201146 - protein, 73 aa, Zea mays
  Clone ID: MRT4577_115030C.1.pep
KRKGETFWAAMKNVGLLGTVGASHLFEKEVPWVIHVHPEFLFSCGLFSWRQLKFVSEIKVPPRVLICPPISFG

SEQ ID NO: 201147 - protein, 117 aa, Zea mays
  Clone ID: MRT4577_115031C.1.pep
LRNLASISKQLGSQKTFQKQVALAQSKAEQWQPADLGSSNCVVAGLCSALYYGLAPPKDEEAPAHREARRGGAVGPCRWPGGVVTAALLIVEADRSLSRSWPPAARKEAEEPTPLRL

SEQ ID NO: 201148 - protein, 64 aa, Zea mays
  unsure (1)..(64): unsure at all Xaa locations
  Clone ID: MRT4577_115032C.1.pep
GPAGSSAWHLALLEXALLGLFAAAVVAIAVDKLSGKRYRLPPGPPGAPVVGNCLHERHYLNHRN

SEQ ID NO: 201149 - protein, 153 aa, Zea mays
  unsure (1)..(153): unsure at all Xaa locations
  Clone ID: MRT4577_115033C.1.pep
PRSLWPRRRPPPPPRARPSSLPSARGTLPSARPPPRGPARPRRPRPRTPAPXPPPRNSADRSHPGEXSGCRTRSAPCPRRPRPPPPRPTLLRXSPPPPXSAGVPSPRRWRRAGTRGAPRCCPRQRAPNGSGCSTRRSSPRSAGEKHAGHRNLP

SEQ ID NO: 201150 - protein, 117 aa, Zea mays
  Clone ID: MRT4577_115034C.1.pep
EAPLALGNLPPGPGRDGTQARAGSVHPGVGPLKKAGVLCRFSFRRKTREPILKPTSSLWYSTVQASPVQLRRRCNCFVTNPEGKTWRGGQRCFVAFQAPAIPEVCPGNTSISSRNKR

SEQ ID NO: 201151 - protein, 58 aa, Zea mays
  Clone ID: MRT4577_115035C.1.pep
HSHDLEIKNGVGGLTFYWLTNTSYYSCMTFLLMHCWRIPFQETLLLPLNTWLKEGRSP

SEQ ID NO: 201152 - protein, 219 aa, Zea mays
  Clone ID: MRT4577_115036C.1.pep
MTLSPPTGVFVPVPTFFKPKSASSTLQAAVDVQTQIDHSVFLAKNGVRGLVLLGSTGEAIHMSRQERIDVVSGVRKGLEDAGFKDYPIMAGTLINSVDETLEWLEDFKKAGAQWGLVLAPGYFGAAASQEGIREWFTVVADKSPLPILIYNYPGVTNGVMVTPDTYRVLAQHPNIVGCKMSHAVVSWHNQVSLDPKIDHNKFRVYSGLGQNWVPLSFLT

SEQ ID NO: 201153 - protein, 75 aa, Zea mays
  Clone ID: MRT4577_115037C.1.pep
PVWETIVSNSSGKSKFPTAESIMSVCQINSQDSNSIRWMWICYRTGNIFIDNDSRAYPLFSCTQNYPYIWNILVV

SEQ ID NO: 201154 - protein, 61 aa, Zea mays
  Clone ID: MRT4577_115038C.1.pep
VLPKWVMKRSSTKFLRSCYVLSFFNGGDVSCIRAYEVGVGVKKVIDADILKVPPPMLIRIS

SEQ ID NO: 201155 - protein, 81 aa, Zea mays
  unsure (1)..(81): unsure at all Xaa locations
  Clone ID: MRT4577_115039C.1.pep
RSTFFLFWDEIFVLSIIFXEFESVGRGVEFFFILIFFFFFYFFFFYFFIYFYFFFSFVIYIFLFFIFILLNFFFFHLYFFF

SEQ ID NO: 201156 - protein, 197 aa, Zea mays
  Clone ID: MRT4577_11503C.1.pep
GASDCVAFVGAPPTDVPMSIRIRDHVIAQCRASSACAMLGCARTLGSTQCHTPASIMRLFQKSVFCLQPPGDSCTRRSVFDSMVAGCIPVFFHTGSAYEQYPWHLPRDDGHLRYSVFIPDADERRRNVSVEAVLRAIPPPTVERMRQEVIRLIPTLLYADPRSKLETLKDAVDVAIDGILDTMAGTQDPPRLFADIF

SEQ ID NO: 201157 - protein, 96 aa, Zea mays
  Clone ID: MRT4577_115040C.1.pep
GPKITGPHKLWGGKKEQGPTPSLGEGGEIKARTWAYGTLLGFFIFSKPGSINGETCFFGLGLRGRGGEPPPKNPSRRGGPKKGGYPGQIQVVPWGG

SEQ ID NO: 201158 - protein, 34 aa, Zea mays
  Clone ID: MRT4577_115041C.1.pep
RTMSLQYHQSVRIERRVPMRAPQSASNDSSYYTQ

SEQ ID NO: 201159 - protein, 50 aa, Zea mays
  Clone ID: MRT4577_115042C.1.pep
MMDARSSLINFRRVEVIFRAAASQSDCMIVAGTLTNKMAPALRKVYDQMP

SEQ ID NO: 201160 - protein, 58 aa, Zea mays
  Clone ID: MRT4577_115043C.1.pep
VPNNPFPQILFLSISRGHSGEGGHRPPRGGGTPRYSRAVNEGTSYRELGRGSITLLLQ

SEQ ID NO: 201161 - protein, 54 aa, Zea mays
  Clone ID: MRT4577_115044C.1.pep
LLMIPSLAPNTYSPFFYRFQQPYLNGLTNTLCEGFIREDSPTLSAPLWGGIFPL

SEQ ID NO: 201162 - protein, 74 aa, Zea mays
  Clone ID: MRT4577_115045C.1.pep
PIRLQSPDQALGLRFFRPCRASSTAPPSPPPPQLRACPLLSRGPHFVPPTCGFSLFSVDAHRPRRGLRSPSPRP

SEQ ID NO: 201163 - protein, 58 aa, Zea mays
  Clone ID: MRT4577_115046C.1.pep
QRRVLFFFFFFFFFFFFLGGRWTAKTYIAKETNEQHVQNVKKQPTSIHQSMDLQTLPW

SEQ ID NO: 201164 - protein, 77 aa, Zea mays
  Clone ID: MRT4577_115047C.1.pep
LGTSRPAGIHLSMNTIATVFFFRFDFRSANPPFGVDPLQLCPTPLILRPGADWRLTQTMPPVFDTFIGEVPSLTDHA

SEQ ID NO: 201165 - protein, 367 aa, Zea mays
  Clone ID: MRT4577_115048C.1.pep
MHPKLSRAARRLLCCGRAASPEDLSDEGSGSLRWVFSLRELRSATNSFNYDNNIGEGPLGSVYWGQVWDGSQIAVKRLKSAKNGTEAEFASEVEILGRIRHKNLLSFRGYCADGPERILVYDFMANSSLYAHLHGPHSAECLLDWRRRISIAINTARALLYLHHYATPKIIHGSIKTTNVLLDSDFQAHVGDFGLIRFIPDGMDHEKITSESQRGYLAPEYIMFGKPTAGCDVYSFGIILLELASGKRPIEKSCSVKTYGIRNWVLPLARQGRYDEIADSKLSDKFSESELRRMVLVGLACTHSESEKRPTMLEVVPLLKGESKETLIKLERDELFSSDSMVSSQGTPTPDGGTDSVPKEDQELVGA

SEQ ID NO: 201166 - protein, 108 aa, Zea mays
  unsure (1)..(108): unsure at all Xaa locations
  Clone ID: MRT4577_115049C.1.pep
EKDVASHFKESMMRFFXDETENVYWFTSQSTVSYRDRLKMMVRLIYQDDLQLGSTERKLVQAYKEKPVLSRSLYTFYDGEDYLDVDLDMHQVRYIVRKELDSFRALLK

SEQ ID NO: 201167 - protein, 64 aa, Zea mays
  Clone ID: MRT4577_11504C.1.pep
RHFWGDPRVAGRATHITPHRPVSIHAAVLGVRPRVPPSSRSARPHLTVCCLLLLNIRPPVRVRK

SEQ ID NO: 201168 - protein, 67 aa, Zea mays
  unsure (1)..(67): unsure at all Xaa locations
  Clone ID: MRT4577_115050C.1.pep
MRPAVLAALLLVAAAASKAAALYSSGSPVLQLNSNNFRSRVLNSNGVVLVEFFAPWCGLCXXXVPRW

SEQ ID NO: 201169 - protein, 187 aa, Zea mays
  unsure (1)..(187): unsure at all Xaa locations
  Clone ID: MRT4577_115051C.1.pep
LAHPSSHSTILPNRRGEGVLQRQWPEPEDPAGGGIREQHEQRFTWDLLLLLLDLQRRHLHGRHGGHDVTSTHRPTTEPFPRRKRFFHPSSEYDSGTGDPTRSRSRFGANRRGQHHHAVAFDSTNCTTGGRSQEGIKRGKALLGSWGDIAARRPGNLREICIIFFFXMTKRGLRRPPATELLIQRMPA

SEQ ID NO: 201170 - protein, 71 aa, Zea mays
  Clone ID: MRT4577_115052C.1.pep
GGAFFKLGHKKTTFFKTSMDPAFSGTVHIYSTIYKQQKRLRPNAIGRPSIGKQKSIFLLADWVLNMCRIRS

SEQ ID NO: 201171 - protein, 99 aa, Zea mays
  Clone ID: MRT4577_115053C.1.pep
IASLLQTLVTLMQPAHIGGGAPYDLLSQRPYFQLFFKEFPIHPGAPSITFSLHNFYNMCVHTANLDCFALANKKLLFSCASTYGTHKMLYYYEIQNKTY

SEQ ID NO: 201172 - protein, 713 aa, Zea mays
  Clone ID: MRT4577_115054C.1.pep
MPGITEDGLVAEEVPSGVNFSPQNESLPAPKSTAASTMAGSMQSEALEMHVEASGAGEPSIEQLYNNVCEMESSSEGGSPSRESFGSDGEESRIDSELRHLVAGEMEAMKVIEEEEENGSVANVVPPAPAENGTPVKEHSSSSSKKSKKASKSQLESDASVGLNGKASTEEGESEVSKPASRVGRRRKSNANPQNGTEDAGLDNPDLGPFLLKHARDLIASENPRRALKYALRATKSFEKCAGGKPSLNLVMSLHVVAAIYCNLGKYEEAVPVLHRSIEIPVIEEGQEHALAKFSGCMQLGDTYGMLGQTAHSLQWYASGLEIQKQTLGEQDPRVGETCRYLAEAHVQALQLDEAQRLCQIALDIHREHRETASLEETADRRLMGLICDTKGDHEAALEHLVMASMSMVANGQETEVASVDCSIGDIYLSLGRYDEAVFAYQKALTVFKTSKGENHATVASVFVRLADLYNKTGKLRESKSYCENALKIYQKPIPGTSLEEIATGLTDVSAIYETMNEHEQALKLLQKALKMYNNSAGQQSTIAGIEAQMGVLHYILGNYGESYDSFKSAIAKLRTCGEKKSAFFGIALNQMGLACVQRYSINEAAELFEEARTVLEQEYGPYHPDTLGVYSNLAGTYDAMGRLDEAIEILEYVVGMREEKLGTANPDVDDEKRRLGELLKEAGRVRSRKAKSLENLLETNPYIATKRNAVAA

SEQ ID NO: 201173 - protein, 142 aa, Zea mays
  Clone ID: MRT4577_115055C.1.pep
VQVKSYGLYPRYSGCAMMLSLWHATRWMRQSLTQMAQQRLNQESRSPSASSIGQPCWYLRSPTQWRHITLALTIEHEASQSDIISCLVSSIASAAQSAWRCDAWATTGGFAATRADSRQEAQVKDDRDLGSQRWRWAVANPV

SEQ ID NO: 201174 - protein, 643 aa, Zea mays
  Clone ID: MRT4577_115056C.1.pep
MPGITMDGFVAEEVPNRVNSSPQNENLPAPNSTAASTMAPSMESEALEMHVESSGTGEPSIEQLYNNVCEMKSSSEGGSLSHESFGSDGEESRIDSELRHLVAGEMEAMKVIEEEEENGSVANVVPPVPAENGTPVKEQPSKSSNKSKKDSKSQLESDASVGPNRKASTEEGEREVSKQATRVGRRRKSNANPQNGTEDAGLDNPDLGPFLLKHARDLLASENSRRALKYALRATKTFEKCAGGKPSLNLVMSLHVVAAIYCNLGKYEEALPVLHRSLEIPVIEEGQEHALAKFSGCMQLGDTYGMLGQTALSLQWYASGLEIQKQTLGEQDPRVGETCRYLAEAHVQALQLDEAQRLCQIALDIHREHGGTASLEETADRRLMGLIYDTKGDHEAALEHLVMAGTAMIANGQETEVASVDCSIGDIYLSLGRYDEAVFAYQKALTVFKTSKGENHATVASVFVRIADLYNKSGKLRESKSYCENALKIYQKPIPGTSLEEIATGLTDVSAIYETMNEHEQALKLLQKALKMYNNSAGQQSTIAGIEAQMGVLHYILGNYGESYDSFKSAIAKLRTCGEKKSAFFGIALNQMGLACVQRYSINEAAELFEEARTVLEQEYGPYHPDTLGVYSNLAGTYDAMGR

SEQ ID NO: 201175 - protein, 450 aa, Zea mays
  Clone ID: MRT4577_115057C.1.pep
MDTESLQQGSSSSWHTTGAVSCGAAQQQKRQRCQGSSSDQAGSSSSSSLQISEPEPQQIQEEEDYYMEDDCDDDFDGYDEDDYDFDEADFNQHLADKFDDLDLPPGVEATVPWLQKTTPKEDVKEPPKSNTADENANKYTQFKQFDTVQNFSDHYYAKNSHGEPNRAWSKRVQHDWKLLEKDLPAYIFVRVAEDRMDLLRAAIIGPKGTPYHDGLFFFDIHIPSAYPCAPPLVYYHSGGLRINPNLYNNGKVCLSLLGTWDGRGCEKWNPAQSTMLQVLVSIQALILNDKPYYNEPGYESYANTPNGERLALDYNDNTFLHSCKTMLYSLRRPPEHFADLVAGHFRVHGHTILAACKHYMAGNDIGSVVPEEEEEEEEEESSEHKSGDAGASGSAPELGVIKAIPTKRRSSFNPSLKVLYEDLLMEFNVKGADTRKFIDEKLKKNKPAAA

SEQ ID NO: 201176 - protein, 64 aa, Zea mays
  Clone ID: MRT4577_115058C.1.pep
SYARKAAKLVNLSTCHPFLPELSLDFTICDLAPHSCAKERQKERNLDLESRRLAPDPAASSAAQ

SEQ ID NO: 201177 - protein, 267 aa, Zea mays
  unsure (1)..(267): unsure at all Xaa locations
  Clone ID: MRT4577_115059C.1.pep
SPRAVGSCRSLQQGSSSSWHTTGAVSCGAAQQQKRQRCQGSSSDQAGSSSSSSLQISEPEPQQIQEEEDYYMEDDCDDDFDGYDEDDYDFDEADFNQHLADKFDDLDLPPGVEATVPWLQKNTPKEDVKEPPKSNTADENANKYTQFKQFDTVQNFSDHYYAKNSHGEPNRAWSKRVQHDWXKLLEKDLPXMSTAVRRYNHPEWSGQVSLAYIFVRVAEDRMDLLXAAIIXPKGTPYHDRLFFFDIHIPSGYLCSPLDITLRLRIST

SEQ ID NO: 201178 - protein, 102 aa, Zea mays
  Clone ID: MRT4577_11505C.1.pep
RETHPCVIWINSNLFLVKNTRICLKLLLIPQRICPSGDDRHRQEDAQLDLHPGQRSELERHVHSPNWLEPNISDGSESRAHRPHFLSSLFDTNEAAALVTEI

SEQ ID NO: 201179 - protein, 78 aa, Zea mays
  Clone ID: MRT4577_115060C.1.pep
HEEEEEEESSEHKSGDAGASGSAPELGVIKAIPTKRRSSFNPSLKVLYEDLLMEFNVKGADTRKFIDEKLKKNKPAAA

SEQ ID NO: 201180 - protein, 308 aa, Zea mays
  Clone ID: MRT4577_115061C.1.pep
MEDSFLIRTSYCSEVEGFPHLLHSCVLRMRIRKKPEYVWKEYRENGIEKCSMAVYLGESRNYPNHPPFQVVATGHRFPDTCQNVAQKALRQLCQNYSREVSETPLRYFPPSNKNTPTWRKRLQALSGRDPTEDDPTIVYMAIYLHTLDNHYDNIFSHYTHLISWMASDKTMPTASGIGARSPLGAEGEVDGEGSETHLPAPPELPLDLAQVLANQTRLIEVLTRSLENQRPNGGRPQDRMGDFLRLKPPTFAGSNNPLDADDWLRTIKRKLEAIGCPENQRVHLAAHQLSGMALSWWDTFSATVRDAT

SEQ ID NO: 201181 - protein, 72 aa, Zea mays
  Clone ID: MRT4577_115062C.1.pep
CGRDTLQASNKKMEAAESELEDNGGLMPRFTGMHVCIQLIGSVSANQKRKRQSAIGFRLINCHPAKHMTPNM

SEQ ID NO: 201182 - protein, 119 aa, Zea mays
  unsure (1)..(119): unsure at all Xaa locations
  Clone ID: MRT4577_115063C.1.pep
LDSGTITEFDEDFNVLSWWHQHKLTYPXLSLLAKDVLTVPASTISSESTFSLAGRVIEERRRRLAPNMVEILSCIKDWELADGHLQHSVEEDTQELEAEHDNLXLDDPATQSTRDDENA

SEQ ID NO: 201183 - protein, 91 aa, Zea mays
  Clone ID: MRT4577_115064C.1.pep
LSIYHISYGWSDDGWLFRCPQVLKDDNYLSCCLHPQSPGEGWDSRNTSEREGKGKQGEAGRLFSLHFHFGLRKFHFHFLNNKQDFHFLACS

SEQ ID NO: 201184 - protein, 152 aa, Zea mays
  Clone ID: MRT4577_115065C.1.pep
SPTTSGSRICQTQGNQADKFQEIVSSNTLFFEEFTSTEPSSDTEADNSQLAEETEDPEIVKSNTALAEAAAPETDATADTSSFHETDLEENKDTGTIETEDGTPPSDYTSEKMDTETMETEAVPHDSSDANIKEPPIYYFKKKKKKKKKKKN

SEQ ID NO: 201185 - protein, 55 aa, Zea mays
  Clone ID: MRT4577_115066C.1.pep
RHACGRRAGVNCLVDELSCRPPPAMYSCGFFGEHSCAFPNVLDAICCQSWAEPKL

SEQ ID NO: 201186 - protein, 83 aa, Zea mays
  Clone ID: MRT4577_115067C.1.pep
MIFQYSPVSCICSLITPSMNIVVYLFKLRCLNSIQVYNLFINICINIFLCMIIIIFSTSRNSDRIIIPNNVASNMCVLYPIFK

SEQ ID NO: 201187 - protein, 47 aa, Zea mays
  Clone ID: MRT4577_115068C.1.pep
CNWPDELSETHMSSADRATNCYHRLILASDTFMQSVLYRRKVVRRLC

SEQ ID NO: 201188 - protein, 123 aa, Zea mays
  Clone ID: MRT4577_115069C.1.pep
LTSRFPRRSQNYGLLAPPLCCLHPKFFSPLLRVAGPLPPNTNGIPFPPTVQQGARRPKKNIFKHMSVFPPPGWITFTGRLFPFGGTPRPTCHGGLGRTGGNRIPRQKLIASHFTGRARSNPPP

SEQ ID NO: 201189 - protein, 73 aa, Zea mays
  Clone ID: MRT4577_11506C.1.pep
PPRWRPPFFFFFDNYVTFDRPFITEVEADLELAYISHRKVTRGAVRGPYKQTILLEPMSYHPHILYAMTALCL

SEQ ID NO: 201190 - protein, 56 aa, Zea mays
  Clone ID: MRT4577_115070C.1.pep
KCKYRHSTACKVARESGNVHTNSRDLEGAASTDIYLSTILHANRDRKRERLRTHQH

SEQ ID NO: 201191 - protein, 90 aa, Zea mays
  Clone ID: MRT4577_115071C.1.pep
SRRRLHGCRKLYRPSSFPDSPFTRMIQGRPSQYGEEDTASNHYLHQELLEPNELFPDPGRICILNHCDLLDYDYNELLHAANCGGGPCCS

SEQ ID NO: 201192 - protein, 75 aa, Zea mays
  Clone ID: MRT4577_115072C.1.pep
ILNKTPICKAALQHNNNHRAMAIVQPTKVQKVAIVHRHRAVLRITSVHQLKLLCHGTAGAGMKSHTGTCVSSQGG

SEQ ID NO: 201193 - protein, 76 aa, Zea mays
  Clone ID: MRT4577_115073C.1.pep
LQHSSEQRHGHETHCGEGALSRTTGLKTLTHEVMGMLIDKTKQMTLIWWARPLLSLVGLVHHRRLCVLRDWSAAAH

SEQ ID NO: 201194 - protein, 79 aa, Zea mays
  unsure (1)..(79): unsure at all Xaa locations
  Clone ID: MRT4577_115074C.1.pep
SPPPEQLPPPPFLKPKPPPPRVGRAARGSSPPPPLAPXVSPVPGHALLTXQAPPGPAPPALFSSLDPPLSPPGLPPCTP

SEQ ID NO: 201195 - protein, 81 aa, Zea mays
  Clone ID: MRT4577_115075C.1.pep
PPNQIKINFLWGFFKLWGGFPPQPRAPLEMGTKPGHTWANGGPPIPKIRAIIKPEGGTPGATPESRPGTRQRPNLPYKKEF

SEQ ID NO: 201196 - protein, 69 aa, Zea mays
  Clone ID: MRT4577_115076C.1.pep
PCVWNNCWNPGTFLGLKKEVLRIPPTYGFALVLMTLSLVSDPPLFFPGGHFSFQFSRGPFSWRTTLIGE

SEQ ID NO: 201197 - protein, 129 aa, Zea mays
  unsure (1)..(129): unsure at all Xaa locations
  Clone ID: MRT4577_115077C.1.pep
RILKELKDLXKEPPTTCSAXGLLPEDMIHWXSIMMSTCDMPYAVGXYIIENEFTLDLAFKXAKVSLKTSVLDLDLKNNENICFCILDEQDCPVLMISDAMICVCSVISGGNTKKSLVAEMVLMNIMDRA

SEQ ID NO: 201198 - protein, 75 aa, Zea mays
  Clone ID: MRT4577_115078C.1.pep
KSTFFFHHNLILSTHLSTNIHLRLQGSYLINNHFIHSFLQYCPIPTILYFFTIKSGFYFNNNMHLFICFTFTPLS

SEQ ID NO: 201199 - protein, 649 aa, Zea mays
  Clone ID: MRT4577_115079C.1.pep
MAERTDLIRVILPDKFKNQLSILEVQQTTRLFHQQRLSRLLLKLDITKAFDSVSWPFLIDVMQQFGFGQIWRDMVCGLLASSTTQVMLNGFPGQQIRHRRGLRQGDPLSPMLFILVMDVLGHLFIKAEEAGLLQQLAARRQLHRVSIYADDVALFLHPTVDEISITLDILQLFGSASGLKTNVQISNVYPIQCSEETLLEVQSLLPCEVAAFPCKYLGLPLSLHKLSKQQFQPYVDKFADQLPNWKADLMTRAGRRILVQHVLTGMSVYLAMAIDIPHWAVDAIDKIRKGFLWRGRKEAKGGHCLVAWGKVCRPLQLGGLGISSLPELGWALRMRWLWLQKTDSRRPWTGLPIQVPSKARAFFSKVLVSMVGNGHSTLFWSDNWLQGKSISIIAPSLFSIIPKRIAKSRTVHEALLNNRWIYDIRGGLTVGVLADYFKLWDCLSGFELHPLIEDRHIFSIAPDGKYSAKAAYKGLFLGSCTFGHYKRVWKTWAPSKCRFFLWLVAHNRCWTADRLAKRGLNHPSSCPLCDQEPETINHLLVSCVFARIFWYNLLRKFGLDNLAPQPGLTSFLDWWEMISETVQGMVKKGLNSLISLGAWMIWNHRNKCVFDGQTPCLPSILRQADDERRLWALAGAKGLSFLAASLTNG

SEQ ID NO: 201200 - protein, 169 aa, Zea mays
  Clone ID: MRT4577_11507C.1.pep
RGLLHTTRDEDRGGGAAGRGIWGEVSKRLNPLPWRLGCANLGRRWTLPFHGGWGAQIRSGIGFSFHGRRRHVDSGDLQLERADDHNSVGARLNLARDAGTRLPWMRLQWRARILRGRGTAAGATGAGRGIAGGGMQPRISPASTGWRRNRADRRWQNRASKVWTPTIKT

SEQ ID NO: 201201 - protein, 99 aa, Zea mays
  Clone ID: MRT4577_115080C.1.pep
SGSNSQSRREEPLTSAALAVPGILFAVMVPRSEVVALAHIGSSRPVRHLGASSAGQQFTALQILEHGETAACTILGFDDPSWSDREGGRSRSFPGRLEV

SEQ ID NO: 201202 - protein, 581 aa, Zea mays
  Clone ID: MRT4577_115081C.1.pep
MAKHLAAMCRCSLLVLVLLCLGSQLAQSQVLFQVPAQGPRLLPADRSKNTHQSCVLESTSLDLILMLIHICCESACRVVKSPMGSPADDKLRRRRPAGRLLMHCAKATPRGQAHPACMLDYKYPAGCTGQFHPAIDSPPVHRHSSRKRQELKNMANRGLHLALFLVLLGLSSNLAAGQILFQGFNWESWKQNGGWYNFLMGKVDDIAEAGITHVWLPPASHSLAEQGYLPGRLYDLDASKYGNEAQLKSLIEAFHSKGVKVIADIVINHRTAEHQDGRGIYCIFEGGTPDSRLDWGPHMICSDDRAYSDGTGNPDTGADFGGAPDIDHLNPRVQQELTGWLNWLKTDVGFDAWRLDFAKGYSADVAKVYIDGTQPCFAVAEIWTSLAYGGDGKPFYDQNAHRQELVSWLDRVGGKASPATTFDFTTKGILNVAVDGELWRLRGADGKAPGLIGWWPAKAVTFVDNHDTGSTQHMWPFPADKVMQGYAYILTHPGNPSIFYDHFFDWGLKNEIAHLVSIRDRHGIQADSELRIIEADADLYLAEIDGKVIVKIGSRYDCGHLIPEGFQVVAHGDGYAVWEKN

SEQ ID NO: 201203 - protein, 64 aa, Zea mays
  Clone ID: MRT4577_115082C.1.pep
PTVGPLEPILKRVFYLLFGSTVFYIVMVQHSVSIISFFLCNCLTRRSTRYRYTMIRKYYCNVNI

SEQ ID NO: 201204 - protein, 49 aa, Zea mays
  Clone ID: MRT4577_115083C.1.pep
MRTRNIITEDYKFFSIGTIELVDGRVLHLIGMLGSWWIYRVSFKCKELV

SEQ ID NO: 201205 - protein, 115 aa, Zea mays
  unsure (1)..(115): unsure at all Xaa locations
  Clone ID: MRT4577_115084C.1.pep
KKKKKENPPKNTPQKRAQAHPRNQHAGDREATGGKQKRKQRXEGPRTKTDHQPGNQPRKGASQQRETRKKGRETXKAKRKEENRTKRHLGPLRGEKGSGXRPLMKRKTAPPTVAP

SEQ ID NO: 201206 - protein, 80 aa, Zea mays
  Clone ID: MRT4577_115085C.1.pep
KEVPRLVRPKNCVRKKQTSCLCCFMLKYVKSLVLYELDTFYTHIVETEANTLVVCCYQVLVPASRPNLHPKKTRGASHKK

SEQ ID NO: 201207 - protein, 152 aa, Zea mays
  Clone ID: MRT4577_115087C.1.pep
GRISLFHMPISRTRWPPAAGAPSPPQQAAQGTVSAVAPKRRPVVGSRSRPAKEAEATARLPSADYYSELKTLEHVEKTKKYQGKLAAQLKAKYFSNKTFEKGYVFEEIVIGSKTIRLSRWPFTRLFADPAKFCQEKSSTVKDMSPSLTGEAM

SEQ ID NO: 201208 - protein, 171 aa, Zea mays
  Clone ID: MRT4577_115088C.1.pep
ARQSRCASLPGGFLCVRVLRGIDLVSCDAKGSDPYVVLSLDGQKLKTSVMKKTVNPLWNEDLTLAVMDASAPIKLEVFDKDTFSKDDMMGDAEFDVEALAQIVQMDLEDIRSGTVVRTVRPGGTGSCLADESHIIWDKGHVVQDLLLRLRNVDSGVVHLQLRWVATPPEGL

SEQ ID NO: 201209 - protein, 66 aa, Zea mays
  Clone ID: MRT4577_115089C.1.pep
KHKHILEIGLIEKQRLSRQNETRLRSILSSTSCVSPYNYCCRSSMEGLRLSKGIKVTKVLHGIPHW

SEQ ID NO: 201210 - protein, 267 aa, Zea mays
  unsure (1)..(267): unsure at all Xaa locations
  Clone ID: MRT4577_11508C.1.pep
MVPVGRRRGFVTFAAAAIALMQISYLVFPISAQQSNGSRVVPAEGYCSMYGICAQRSDGKVLNCANATKAVKPDTLFSSRIQSLCPTITGDVCCTVDQFDTLHQQVQQAVPFLVGCPACLRNFLNLFCEMSCSPNQSLFINVTSVKQINSTMTVDGIDYYVTTNYGEELYNSCKDVKFGTLNTRAMDFIGAGAKTYKDWLAFIXRQANLNEPGSPYLITFGSDFSDSSGVKPLXSTIYSCGTPFLXCSXCGDCPSSSXCAGSLLPQL

SEQ ID NO: 201211 - protein, 82 aa, Zea mays
  Clone ID: MRT4577_115090C.1.pep
APKGKGFDLKSLQNFSNLIYFGDPPPRKTRTLWGKPRHNTPGQTSIKLFNPPLDSTPRKTKASTHIGGRPPPTEKNMGHNLQ

SEQ ID NO: 201212 - protein, 53 aa, Zea mays
  Clone ID: MRT4577_115091C.1.pep
RGDIGDFPMNLLPTEQLGKIMFLLAYITGIKTPHPTMLKGLSPDPNINLPSIR

SEQ ID NO: 201213 - protein, 62 aa, Zea mays
  Clone ID: MRT4577_115092C.1.pep
ENAYYHSSYTNPSFVRDWGIKKLKAIKKKKGKIKDGHGHFQRQGKKERNREGKARTYVGCHG

SEQ ID NO: 201214 - protein, 93 aa, Zea mays
  Clone ID: MRT4577_115093C.1.pep
LRCTSLSLSLAPISLDRSPAISSDPIHLSTRSIVVVRLLGLHTTATNGDGAAAECCCYCWRRHEAGRRGDDGEEGEAGAGAGAGAGVAVSAGG

SEQ ID NO: 201215 - protein, 79 aa, Zea mays
  Clone ID: MRT4577_115094C.1.pep
VEFCRNWILSKIAGTLRMVRGPKYDGKYLHGLLRQHLGDMRLDKALTNVVIPTFDIALLQPTIFSSFEVSSERAGVVYF

SEQ ID NO: 201216 - protein, 78 aa, Zea mays
  Clone ID: MRT4577_115095C.1.pep
AGFFCTPPEPFKSLLFLIKYARVGCELHLFLHVGETKQNQRLPKSQFVSHPSPGKHSCNPLIVVIWNNFPNHKICLIP

SEQ ID NO: 201217 - protein, 126 aa, Zea mays
  Clone ID: MRT4577_115096C.1.pep
FESFDFSLPLDSSTTEEKAFGSVHDSIQFGTFNSDPANKHEMSAVSGMYQLLATMSGKATNCLFNDDERQPGESIDGSVTDIFGSSGLGHKGSFITPDFAASCSSNAANKKDNGENPLTPSVEKYC

SEQ ID NO: 201218 - protein, 85 aa, Zea mays
  unsure (1)..(85): unsure at all Xaa locations
  Clone ID: MRT4577_115097C.1.pep
MAASAAATAAASAATAASAASGSPGSGEGSAGGEKRPAASSAAAASAAASSPAGGGGEAXELLEHCGVCRERLRAERDPRVLPCV

SEQ ID NO: 201219 - protein, 49 aa, Zea mays
  Clone ID: MRT4577_115098C.1.pep
TAYHGRHPIEVASALEMSTVCYTIPQFDARTDQRLCCIDICVIHVKCMW

SEQ ID NO: 201220 - protein, 121 aa, Zea mays
  Clone ID: MRT4577_115099C.1.pep
AEKLALPEASSGVSGLPMVAVIRQVTARLYLKPIPSRVTRVIARSTGFPPSFRSGLSLCKSRSHGSISLFVLLRSHVDICSCHPVVHRRPLRKGSRPRLCSAPRDKCAWRHGFILGRGPRG

SEQ ID NO: 201221 - protein, 57 aa, Zea mays
  Clone ID: MRT4577_11509C.1.pep
VSFSFSTSPWLHQRYQLLCRSRPLVVSLLSCAASHITIQFLASQFTLPAVLEDIETN

SEQ ID NO: 201222 - protein, 41 aa, Zea mays
  Clone ID: MRT4577_1150C.1.pep
AIIMIRDVNVRCRLKSAQTRYYTVISHPTPRQSNRNFQPRK

SEQ ID NO: 201223 - protein, 55 aa, Zea mays
  unsure (1)..(55): unsure at all Xaa locations
  Clone ID: MRT4577_115100C.1.pep
MAKIKIGINGYXRILRLLAIIALQSDDVXLVTVNEPFISTDYMTYMFKYDTVHGQ

SEQ ID NO: 201224 - protein, 65 aa, Zea mays
  Clone ID: MRT4577_115101C.1.pep
GRKNGHQKNKLERLAKTGFILRYLIGYRMRGARFKWNHHMGLGQISLQRNKTKTIFRVAAKKGRC

SEQ ID NO: 201225 - protein, 78 aa, Zea mays
  unsure (1)..(78): unsure at all Xaa locations
  Clone ID: MRT4577_115102C.1.pep
QPXLGYGRKLTTGQPMGVDIDLPPPKTCSSRDGQWQAKYVACGGRHTLAIVVWAETTLWRAADRGYCGVGRDHRLITE

SEQ ID NO: 201226 - protein, 29 aa, Zea mays
  Clone ID: MRT4577_115103C.1.pep
EFNLEFFSWSHLKCTACLARRKDQVALGS

SEQ ID NO: 201227 - protein, 68 aa, Zea mays
  Clone ID: MRT4577_115104C.1.pep
ANGRTAIAKTSWPEVVRLHVYDAHNAILNDQPDADVVLLPVPSLETADYRPNRVRVFHDVHRHTPHIP

SEQ ID NO: 201228 - protein, 121 aa, Zea mays
  Clone ID: MRT4577_115105C.1.pep
VPKEGDAAPQDGRRAEPRRRATRTRGSQGQDRFPPTESTVPRHLASGQMETRTSRHLAPPSDGSPLRGVGRGGKPPPPPACGQLKVPEKQANNHNGPKTTQTRDLSCTKEGVKKNKKKKIK

SEQ ID NO: 201229 - protein, 142 aa, Zea mays
  Clone ID: MRT4577_115106C.1.pep
MSNKRISLLSQIHEKVLFWNAKVLVSRIWHFRGGTDEGNIVHTDLVVLDQEGTHMYGQIPPEPSERLKDVLVEGNVYLMKGFMCKQAKQTYRAVDSPYMMQFTRFSTAIPQPGDEENFPYRTYDLLSFTDIPMPPNTRRFSR

SEQ ID NO: 201230 - protein, 57 aa, Zea mays
  Clone ID: MRT4577_115107C.1.pep
LYVSHDTATRLDQQINNNKKSGSSKTRNQTEPFLLENVKKAINPRNYREQMKTYLGQ

SEQ ID NO: 201231 - protein, 83 aa, Zea mays
  Clone ID: MRT4577_115108C.1.pep
HAPHESLSHLVQTPPPPTNPKNPKKKEETIICALAQNPCSHGVKASHCLIATPADQNCLQLPVPYQKAIRSGRHHDGSAPLRQ

SEQ ID NO: 201232 - protein, 82 aa, Zea mays
  Clone ID: MRT4577_115109C.1.pep
KFLKRKLDRGAKFSKVVPPGVPAGLSLKSGKERRGHPLFLLFGKGGPNPPKGGKGFWSLPPGPIIYPFHKKLSQKFGGAPGP

SEQ ID NO: 201233 - protein, 73 aa, Zea mays
  unsure (1)..(73): unsure at all Xaa locations
  Clone ID: MRT4577_11510C.1.pep
AARPKIEPALSWMTKHTATEVKPKVFEXQQCVXSELVEALAILKAQNKESVKALKAQIILLSDEIVNKVLPSA

SEQ ID NO: 201234 - protein, 60 aa, Zea mays
  Clone ID: MRT4577_115110C.1.pep
LCLDRSMGSSSPLLVVAPSPIKGLRPAANGVLVSISRCDHLEDVVDDYSDHLSLTLNAIA

SEQ ID NO: 201235 - protein, 168 aa, Zea mays
  unsure (1)..(168): unsure at all Xaa locations
  Clone ID: MRT4577_115111C.1.pep
NKRKNKWIRLGSXSQDSXXSGCTGXSGGSRTVSGXPRWRWSTGSSRELDDGVRLKFTGLSVCTGLSGEPTVXRAIPRVTRGRANGLECSRTVSGAPTAPNRQRSAAPKQERNLHRTVSVGAPDCPVHQSTEGKNCLPGLLSTAPSYLGAIKGTPRRMKKQTKHSLIIS

SEQ ID NO: 201236 - protein, 56 aa, Zea mays
  Clone ID: MRT4577_115112C.1.pep
FVKLLVPFLSIETLSITKHENILDVNLYYCNAKLSQSTTTSYAMQLLITVSDTCCS

SEQ ID NO: 201237 - protein, 47 aa, Zea mays
  Clone ID: MRT4577_115113C.1.pep
LWDQKSLYLQLIHATIITSIKKKRALLRINLRPHKTRIACQKGTQFD

SEQ ID NO: 201238 - protein, 129 aa, Zea mays
  Clone ID: MRT4577_115114C.1.pep
GKAWKKKLGSKRAPGRFPPRGGFSGPGPPRPPLKIRRGFFPRAPSQCCPPPPVPRGFCPPPSSSTFFFFWGGLFNFTGPPVYFLCSPPPIIIPWFLWTPGRVVVIFLPPGVPMSFSPPPFWFYKKRFCV

SEQ ID NO: 201239 - protein, 68 aa, Zea mays
  unsure (1)..(68): unsure at all Xaa locations
  Clone ID: MRT4577_115115C.1.pep
PPGKTXXPQGKXXTPXXKKQEKQGEHXXTRKGQAHQGRGQRRKDQERXXXKXDRQGNPAXEQPKNRTG

SEQ ID NO: 201240 - protein, 886 aa, Zea mays
  Clone ID: MRT4577_115116C.1.pep
MARSKNGCLKILVCAGSSSDPSAGSDADAADHPDENKAISDKSIWSFRRRSTRHRVLKNSDISEPETVSSSKAKADIAPNNNVYTSTYSFASEKPLQHNKPNENVLHQEKPEEMPLHQDSSEKLMEKPIEKHIDKLMEEPADQIIEKSIELPTQKITETPTDEPAEKINETPTGEPAEKIIETASENTEGTIKNATEETHEMAVEELIEEPEETISVSSTVLKEEENTSLVEGSSGDPEEDHLESAATNLQPRSDTCIAREELLNQKDLVKLQAVIRGHLVRKQASESLQCLLAIIKIQGLIRAHQAQHSPGKIQETIVHSSGEKLLRNGFALKLMDNTPTSKSICIKCDPSESDVTWEWMERWTTLIPPITVVHVPEHKENSELMGETVTEQVTEHAQCDEDIVALDSDLSFPKLVADDVKQTVETSEFSALEAPASVPDESPKMEMKHDTESELIETTNVDADQVTDQKAENDVDKPFMSLDQQYTQADASRDPCPLSGKFEPSNEDSGDAYNSEHTLEMEGKRFVARKSCNPAFAAAQLKFEELSTNSTVSRSSSLSHLDGASKSRVHAPSSQEDCSSKQDGTGMPDRSVGHDTKMIIAASECGTEISISSTLDSPDRSEGDGGEIVLEIGALENRNYVTSKADNDFNTVHPEVKNAPEVEAQPQKQIEQNGHVPALEIEAQPQDELVQEPHAEPEMPGLHERLEKPVASYATPEGTPMSRTTITESQETPSSEVSVNTKKSRSKKPKPHASKRSLASPGSDSVGRSSTDNFSKESRHPKRESSSKAAKSDHVEQEPRTSNSNSNLLPSYMQFTESARAKASSSPKMSPDVQDSNPRKRHSLPMTDGKHDSSPRMQRSSSHAQQNVKSNGPAPHSASDRKWHI

SEQ ID NO: 201241 - protein, 106 aa, Zea mays
  unsure (1)..(106): unsure at all Xaa locations
  Clone ID: MRT4577_115117C.1.pep
PTHSYEQQSLAHVTIXTIATQQREHELLILLSDLAEHNPVIYLKQXLLAYDPLALANVPDYSRQQQLQHIMAKMSQLAMVNHVVXLPLVAFIQLYEGNATTHVLRQ

SEQ ID NO: 201242 - protein, 555 aa, Zea mays
  Clone ID: MRT4577_115118C.1.pep
MDNTPTSKSIRIKCDPSESDVTWGWMERWTALIPPITVVHLPEHKENSELMGETVTEQVTEHAQCDEDIVPLDSDLSFPKLVADDVKETVETSDFSALEAPASVPDESPKMEMKHDPESELIETTNADADHVTDQKAENDVDEPFMSLDQQYAQADDASRNPCPLPGKFEPSNEDSGDAYNSEQTLEMEGKRFVARKPCNPAFAAAQLKFEELSTNSTVSRSSSPPHLDGVSKSRMHTASSQEDYTPKQDGTGIQESSVGHDTKMRIAASECGTEISISSTLDSPDRSEGDGGEIVLEIGALENRNYVTGKADKDSSIVVHPGVKNAPEAEAQPQKEVEENGHVPALETEAQPQKEPHTEPEVADLHGQLEKSVTSYATPEGTPMSRTTTIPESHGTPSSEVSVNTKRSRSNKPKSHASKRALASPGSDSVGRSSTENFSKESRHAKRESSSSKAAKSDQGDQEPRVSNSNSNPLPSYMQFTESARAKASSPKMSPDVQGRNAARKRHSLPMTNGKHDSSPRMQRSSSSQAPQGVKSSGPSPHSASGGADKRWHI

SEQ ID NO: 201243 - protein, 124 aa, Zea mays
  unsure (1)..(124): unsure at all Xaa locations
  Clone ID: MRT4577_115119C.1.pep
MASQLSAAVPLSRXLRGYAAPMSAVAALPSVRAGRNMSTSHGIRCDYIGSATNLIMVTTTTLMLLAARLGLAPTANRKXTAALTLEARDSVLQTGDPAGXSLADTLACGXVGHITRRRHRARES

SEQ ID NO: 201244 - protein, 71 aa, Zea mays
  Clone ID: MRT4577_11511C.1.pep
QFQKVFVRIFNALRGFVLLCCTPDSIWQWVDKLKNLCSLKKKKKKKKKKKKKKKKKKKKKKKKKKKKKKSG

SEQ ID NO: 201245 - protein, 87 aa, Zea mays
  Clone ID: MRT4577_115120C.1.pep
QLNSSVDSLLLRCRVFSYLPSSTEASAQASSSPSPQERESQTDRVCMQGPMHVTETNHIRKPLFTPLSHLAEQTRHFSWCMCMMLRA

SEQ ID NO: 201246 - protein, 96 aa, Zea mays
  Clone ID: MRT4577_115121C.1.pep
GCGGANQGVTAGSTGLLATEGRRASPGGILVWGPRSSPFPPCLAVGNGRKREGRRFGLAGGPAPGSGGLGWPAGSLIGPKEEIQKGWKGGRKGVVR

SEQ ID NO: 201247 - protein, 40 aa, Zea mays
  Clone ID: MRT4577_115122C.1.pep
GGNRYFGAKNPTKDGLAVYQLGTGNRKTNQGGCLTTFTPR

SEQ ID NO: 201248 - protein, 110 aa, Zea mays
  Clone ID: MRT4577_115123C.1.pep
GPTTRPAKACRGLPAELAAKLVVKQALKTSGLKDDTTCVVVDIIPSDHLTSPQLSPKKNQNKLKSLFRRRSHSSVRKLGGKSASIGSVEELFEEGSAMLEESLFSASSQI

SEQ ID NO: 201249 - protein, 118 aa, Zea mays
  unsure (1)..(118): unsure at all Xaa locations
  Clone ID: MRT4577_115124C.1.pep
MCGGAILAGLIPARVHRPLTAATLWAAAXVGPVPSASGRXCSRRYRRRRXDEEFEAEFQLFDDDDECEAEFQLLDDHQPSPAASPEASGCKRKPALAPPADMASTKTQSTLARVKELI

SEQ ID NO: 201250 - protein, 81 aa, Zea mays
  unsure (1)..(81): unsure at all Xaa locations
  Clone ID: MRT4577_115125C.1.pep
NMASTKTQSTLARVKELIAQGPHDERLAARIVPXLMMHGSRDEAAALIAEFSRQMEEIAALRRDLETRERQLVQLVSLVLR

SEQ ID NO: 201251 - protein, 244 aa, Zea mays
  Clone ID: MRT4577_115126C.1.pep
MAEPAAAGRKTRVGPYEVGKTIGEGSFAKVKHAHDSRTGAVRAIKVLDRNHVLRHKMVEQIKREISTLKLIKHPNVVQLHEVMASRTKIYMVLEFVDGGELFDKIVNSGRLGEDEARIYFHQLINAVDYCHSRGVYHRDLKPENLLLDSHGTLKVSDFGLSAFAPQTKEDGLLHTTCGTPNYVAPEVLADKGYDGMAADVWSCGIILFVLMAGYLPFDDRHMWGVPRPHAPGSGDCCGVAASTP

SEQ ID NO: 201252 - protein, 52 aa, Zea mays
  Clone ID: MRT4577_115127C.1.pep
PKLNHNLPLQVGRLDRSLDAYALRAIDHSRLCLPRRVSNQIKARELFEIKKK

SEQ ID NO: 201253 - protein, 429 aa, Zea mays
  Clone ID: MRT4577_115128C.1.pep
MTTAARERRLPPTLPLATLIGRELRAGGSERPALRYGHAGFAKRGEDYFLVKPDCVRVPGDPASAFSVFAVFDGHNGVSAAVYSKEHLLEHVMSALPPDIGRDDWLQALPRALVAGFVKADIDFQRKGEVSGTTATLVVIDGFTVTVASVGDSRCILDTQGGELQLLTVDHRLEENAEERERVTASGGEVGRLNLFGGQEVGPLRCWPGGLCLSRSIGDMDVGEYIVPIPHLKQVKLSNAGGRLIIASDGIWDALSNEAAAKACRGLPAELAAKLVVKQALKTSGLKDDTTCVVVDIIPSDHLTSPQLSPKKNHNKLKSLFRRRSHSSVGKLGGKSASIGSVEELFEEGSAMLEERLGRNLSLKAVSAPFRCAICQVDQEPFEDLMRDNGGGYCSSPCAPWGGPYLCLDCRKKKDAMEGKRSSCSTACR

SEQ ID NO: 201254 - protein, 45 aa, Zea mays
  Clone ID: MRT4577_11512C.1.pep
TDTTRHDDQYVQTPRFCKRMYKPACSASATSHQLQIPLGALTVVS

SEQ ID NO: 201255 - protein, 149 aa, Zea mays
  Clone ID: MRT4577_115130C.1.pep
METKILFLLMLLALSARVANSTIIPQFSQAPIASLFPPYLASIITSVCENPPLQPYRLQQALSECNIPISSLWRQQKPPLSLVQPLVQTIKAQHLQQLLLPMINQAGVANLSSYSPQQHFLAFYQLSTLNPAAYLQQQLLPFSQLATAY

SEQ ID NO: 201256 - protein, 62 aa, Zea mays
  Clone ID: MRT4577_115131C.1.pep
TLFYNFSIPVPRATGKRPQICGNTGLGVNTVELINLGLDLKYLFCYHFYTFFIFSRHHTTLI

SEQ ID NO: 201257 - protein, 195 aa, Zea mays
  unsure (1)..(195): unsure at all Xaa locations
  Clone ID: MRT4577_115132C.1.pep
MFTKAVFTSALLSAVSAHQNLHQLWVNDVTPGYQAGIRMPPSNSPAVDLTSDDMACNDGGSKVPSGVKTIEANEGDKIKVQRDNSGHPGPITHMLYGPVDDASQATGIGAGWFKIDEMDFVDGKWASEIMQAANMTHEFPLPTGLVSGEYLLRSEMLALHSXSDKGGAQFYIGCMQLQIKGTGSDGSCTPTISLP

SEQ ID NO: 201258 - protein, 137 aa, Zea mays
  Clone ID: MRT4577_115133C.1.pep
SQILRLFSESAESITGLKGEMEEAKKLLGRKNKHLGQLWYRSLTLRHVLSLLDQVEDVAKVPARIENLMAEKQLYAAVQLQVQSVLILEREGLQAVGALQDVRSDLTKLRGVLFYKILEELHAHLYNNGEYSSAVLS

SEQ ID NO: 201259 - protein, 81 aa, Zea mays
  Clone ID: MRT4577_115134C.1.pep
RSGQFLLVGGKKINTLPTSSIKFFFHTLLTRRIFHKIRQKWKQKCKTCSYLIKTLANPHLFFGYTSSNPPLETGGKPSIGF

SEQ ID NO: 201260 - protein, 56 aa, Zea mays
  Clone ID: MRT4577_115135C.1.pep
LNTVSFTKCGPSSQRSLSEYRIGPVLGYSHPYKVRMMQIFIISDPERLYRVAVIWI

SEQ ID NO: 201261 - protein, 87 aa, Zea mays
  Clone ID: MRT4577_115136C.1.pep
SLETSSNEIEGYMCVVTISRQLRPLLDNVAHHATRQTLNLVASNIWVVLVKEVEHLVQQLQQKSSRSNFKKRTMTNIESYLNNDRLS

SEQ ID NO: 201262 - protein, 69 aa, Zea mays
  Clone ID: MRT4577_115137C.1.pep
RISNKIRNWIVQVQRIEKKSSWSPEDFSSRQNAANAVVLEYWDYYTTASGKKRKTFCRLEFDVDLSTLP

SEQ ID NO: 201263 - protein, 43 aa, Zea mays
  Clone ID: MRT4577_115138C.1.pep
SLTTDGDFISATHPRSRRKQCGRQRTSTLVDQLINYAPLPAAC

SEQ ID NO: 201264 - protein, 133 aa, Zea mays
  unsure (1)..(133): unsure at all Xaa locations
  Clone ID: MRT4577_115139C.1.pep
LLCGSHKAWAFSNKGHHCKPTKRAVDVXLELDSARLLAEHDHIGETCGKRLRRDYNLRMHMHPDGDRFKTLDESYRPGNWQNKEDGSKQRALLSALQQSXSRSYTHRTCRLIKAVAGAPHHLRRRHCPKLYAC

SEQ ID NO: 201265 - protein, 119 aa, Zea mays
  unsure (1)..(119): unsure at all Xaa locations
  Clone ID: MRT4577_11513C.1.pep
MILCYWFYGAVPSLVLRHIAAKMLFLGLDNAALTTLLHMLKDEXMMLHHPTPNATFQELTITEIKLXTFHLDGHQIARTSCEDYYAEVXDARTYLTHADDNERFAESEKELDALLPDDS

SEQ ID NO: 201266 - protein, 61 aa, Zea mays
  Clone ID: MRT4577_115140C.1.pep
SSKSERHSILILNRARDCQLRIGVNKGSLYSGALGVQTGIRTAQCAFSYFTHRCCHTGAPP

SEQ ID NO: 201267 - protein, 121 aa, Zea mays
  Clone ID: MRT4577_115141C.1.pep
MKARSQIAPKPLKAVAMAPRPSGPKRKPRPKPAGKGDPRAPKKPPTTFFYFMYHFHLGLRLLVNVIAELNIWHWCNTNVKALSVVCLCVIHQSIMKLYVVLKGGFSEDREGMRRKMEYDGI

SEQ ID NO: 201268 - protein, 199 aa, Zea mays
  Clone ID: MRT4577_115142C.1.pep
MASTRFPQIGKPAPEFGGQAVVDGQFKNINLSDYKNKYVVLFFYPLDFTFVCPTEIIAFSEAAEQFRAINTELIACSNDSHFSHLAWVNLPRKQGGLGKMEIPLLADKSGKIARDYGVYIEEEGISFRGLFIIDGNGVLRQITINDLPVGRSVEETLRLVQAFQFTDEHGEVCPANWKPGKKTIKPSVENSKDFFQDSA

SEQ ID NO: 201269 - protein, 81 aa, Zea mays
  unsure (1)..(81): unsure at all Xaa locations
  Clone ID: MRT4577_115143C.1.pep
RLHPLTIANYLASSPLIVAYALAFTLNIDSXKKPIVIFKDXKNVYFLYVLPSTLNISXVVKSSFLPYMFNITFNSITKMKF

SEQ ID NO: 201270 - protein, 50 aa, Zea mays
  Clone ID: MRT4577_115144C.1.pep
PRVRGRVGPPSGRWQSAGGYIDTTPALHYDATRGPCRNKISSDSTMMWDG

SEQ ID NO: 201271 - protein, 81 aa, Zea mays
  unsure (1)..(81): unsure at all Xaa locations
  Clone ID: MRT4577_115145C.1.pep
MNDLTPYLFGVMRGNTSSRDDDVESILESVDTEADXKXIQIRLTELTGXDITEYAAAGXEGFSXVPTGRGARDMIDPPAGT

SEQ ID NO: 201272 - protein, 175 aa, Zea mays
  unsure (1)..(175): unsure at all Xaa locations
  Clone ID: MRT4577_115146C.1.pep
TITLWAKSADTIDNTKADIQDNKAITPXEAATLFSSGISLQRTGRTIXADYNISKDTTLQLAIKLPGDVQMFLKNLIAENIALEVNTSETIDNTMDKNPYKEVIPTNTQSLIFGGNXIEDGSTIGDYTXHKESTLNLMLLLMTGMQIFVKTLTVKTITLEVESSDXIDNDNAKIQ

SEQ ID NO: 201273 - protein, 139 aa, Zea mays
  Clone ID: MRT4577_115147C.1.pep
MASTNYKEAFALFDKRGNGRVTVDSLGDLLRACGQNPTLSEIQDLEKNVGGEFDFETFQRVLNRPGGFRDPGEPEEYCRGFQVFDKDMTGFIGVGQLKYILTNLGEKMTDEEVDELLKAVDTSSGQVNYTDLVRTILAN

SEQ ID NO: 201274 - protein, 51 aa, Zea mays
  Clone ID: MRT4577_115148C.1.pep
VLERMRYRVARVRRYKSRVGIKDRVAKQHPIEWFQVQYNGVILNKVLANTC

SEQ ID NO: 201275 - protein, 55 aa, Zea mays
  unsure (1)..(55): unsure at all Xaa locations
  Clone ID: MRT4577_115149C.1.pep
MADPRVRXIKIKTGVVKRLVKEKVMYEKEAKQQEEKIEKMRAEDGENYDIKKQAE

SEQ ID NO: 201276 - protein, 64 aa, Zea mays
  Clone ID: MRT4577_11514C.1.pep
TCLSDLRVYFPPLFEFGFSLPLHSPLMTSVASDIHICASSTYAFTICISILEHIMSDYMRKTIL

SEQ ID NO: 201277 - protein, 332 aa, Zea mays
  unsure (1)..(332): unsure at all Xaa locations
  Clone ID: MRT4577_115150C.1.pep
PRVRVVPELDKRSFWADQSNFGGGFDVKHFIDSLRDEVHIIEQFPEKLGPRDSDIIVLEMSPVSWSDEKYYLHQILPLFSKYSVIHFNKTDARLANNGISTEIQLLRCRVNFHALKFTPQIEGLGNELVHKLRAKGSFVALHLRYEMDMLAFSGCNHGLSPEEAEELKKMRYAYPWWRDKEIDSQAKRLQGLCPLTPEEASLVLKALGFQKDALIYIAAGEIYGGDRRLEPLRAAFPNLVRKVMLLNSEVLRQFQNHSSQMAALDFIVSTASDVFIPTFDGNMAKLVEGHRRFLGFRRSVVLDRRKLVNFXDLYTNKTMSWDNFASSVQEAH

SEQ ID NO: 201278 - protein, 485 aa, Zea mays
  unsure (1)..(485): unsure at all Xaa locations
  Clone ID: MRT4577_115151C.1.pep
MARSRPRVWLVAGCAAVLLWASVAQLVAVGRFLLLFGLAGDADPSPPPSALPPPRIYTSNGYLKISCNGGLNQMRSEICDMVAVARLLNLTMVVPELDKRSFWADQSNFGDIFDVRHFINSLRDEVHIIEQLPEKLGPRDSNIIILEMPPVSWSDEKYYLHQILPLFNKYSIIHFNKTDARIANNGISTELQLLRCRVNFHALKFTPQIEGLGNKLVHKLRAKGSFVALHLRYEMDMLAFSGCNHGLSPEEAQELKKMXLAASASSILSGPGRSELITDPIILSKRYAYPWWRDKEIDSQAKRSQGLCPLTPEEASLVLKALGFQKDALMYIAAGETYGGDRRLEPLRSAFPNLVRKEMLLDSEVLHQFQNHSSQMAALDFIVSTASDVFIPTFDGNMAKLVEGHRRFLGFRRSVVLDRRKLVELLDLYTNKTISWDNFASSVREAHKDRVAQPSCRRKLENRPKEEDYFYANPHECLANSTLCS

SEQ ID NO: 201279 - protein, 50 aa, Zea mays
  Clone ID: MRT4577_115152C.1.pep
VTPRLLVEPHAYPASTHELDPHDMFLSYIHIYILKIKTESITFLYCSPGL

SEQ ID NO: 201280 - protein, 191 aa, Zea mays
  unsure (1)..(191): unsure at all Xaa locations
  Clone ID: MRT4577_115153C.1.pep
RXGDRSNCLPNRSSQRTPQQCAAFYARPPVNCAAFQCKPFVPPMPPPRLPSPPPPSPPPSSPPPPSPPPPLLSPPLPPPPLPSPPPPQLLPSPPPPPSPLPHSPPPPTPPPPAPVYHPPPQCPPCPVLPPPLPCTPTHPWPPPPPPPYYPGPLPPTNPVRYASPPPPQQHHPWPSVHPVQYGSPPPPPLHR

SEQ ID NO: 201281 - protein, 214 aa, Zea mays
  Clone ID: MRT4577_115154C.1.pep
MEVEIKLRLPDAAAHRRLSAFLAPRLRRTHAQRNLFFDDAARTLGAATAALRVRLYDGPDDRAPSRAVLALKRRPRIEAGVSRVEEIEEPLEPALAVACADDPARLGGLDSPIIRLVAAEYGVGGDAAPFLCLGGFGNTRAVYEYELEDGGGGLVLELDETRFDFGTRYELECETAEPDRVKEVLERLLTVAGVPYEYCRNSKFACFMTGKLLP

SEQ ID NO: 201282 - protein, 137 aa, Zea mays
  unsure (1)..(137): unsure at all Xaa locations
  Clone ID: MRT4577_115155C.1.pep
LPLWCACPLVPSAXPPLPGPCPRFRPAAVRRPCCPSWRPPPFPVLVXLFSASALXXLLSGPCXACLGXVCLLVGVPARAPVCXRRAPSCRRLPASGLPPPPLALGLFDGAACLRLVCXRSGRLFPCASRCLWLCPVR

SEQ ID NO: 201283 - protein, 147 aa, Zea mays
  unsure (1)..(147): unsure at all Xaa locations
  Clone ID: MRT4577_115156C.1.pep
NPVPPPPISXNSIHPPPVLSPXDQPRPPPPTTPPPXTRNGVIPXPSIPLAPRRSNTSPSTATPHPPIPESRRSPHLGAHETQTQIHAQPLPRQSAPLCSPPPAPTGAMXVPRARPPRRPAPPXPWPIEIPMSTGSTTLPTGPDIYRQ

SEQ ID NO: 201284 - protein, 144 aa, Zea mays
  Clone ID: MRT4577_115157C.1.pep
IEVVVRLVDSFMNPVESSKSKLKFRLTSASTTTPVTTTTSFVAKEFVNNSDGSYTGHYAAGGLGSYGICVLFEDKQLPPCPFEVTVHADEYFSDVKNDTVSVWEDESVSFDVLSNDRIARSPAAIVNSSSPLHGLSPAARTPPT

SEQ ID NO: 201285 - protein, 47 aa, Zea mays
  Clone ID: MRT4577_115158C.1.pep
LISFTNINMIFPSGGSKVQNLRYFLQHRGTIVFNQTAFFKKVLTLIL

SEQ ID NO: 201286 - protein, 169 aa, Zea mays
  Clone ID: MRT4577_115159C.1.pep
MRLAKAQPLLACLLGSTGRRSHPLRLGVTYPCTMGHSGQPVGSSPPVLGCWSIVSTLNATMRGWRPTTVTSSEVEPFGVLMGGTLLDGRSTPIKALLEINGEPLEASLRHLVLDVGKLTLAELVKGERDVISIEGPDSRACPYLAHQMLEGQILRPGGELHPHWSLEED

SEQ ID NO: 201287 - protein, 148 aa, Zea mays
  Clone ID: MRT4577_11515C.1.pep
MIALGGLDLLIGRLGAGDARESRHCIALLTTCVQADGSCRHYLADSLKKEPLVQLLAGNQRKASAASLNLMSELVCLNRTSKIVEFIKELKNSGCLNTMHVLLVYLQQAPLVQHPLAATMLLQLDLLVTSPPFSLLRSGVCFGIVLFK

SEQ ID NO: 201288 - protein, 275 aa, Zea mays
  Clone ID: MRT4577_115160C.1.pep
MKGPGLFSDIGKKAKDLLSKDYTYDQKLTISTASASGLGLTSTAVKKGGLYSLDVSSVYKYKNTTVDVKVDTESNISTTLTVLDALPCTKLVTSVKLPDYNSGKVELQYFHENATFATVVGTKPSPVIDLSGTVGAQGVAFGAEAGYDTATGKFTKYTAAIGVTKPDYHAAFILADKGDTIKVSGVYHLDEKQKASAVAELTRRLSTNQNTLTVGGLYTVDSQTAVKARLNNNGTLAALLQHELKPKSLLTISGEFDTKALDRPPKFGLALALKP

SEQ ID NO: 201289 - protein, 76 aa, Zea mays
  Clone ID: MRT4577_115161C.1.pep
TSFRRACPSTSQASFLGQGSLMFLTPRGYISFFVYQLIFGGTPSRIFKKLTTWASLTELVLNQKKNKGGGASGAST

SEQ ID NO: 201290 - protein, 98 aa, Zea mays
  Clone ID: MRT4577_115162C.1.pep
LLRSLTLSLVLLGSSWGCSIPAIKPALSFSQRIVNGENAVLGSWPWQVSLQDSSGFHFCGGSLISQSWVVTAAHCNVSPGRHFVVLGEYDRSSNAERL

SEQ ID NO: 201291 - protein, 46 aa, Zea mays
  Clone ID: MRT4577_115163C.1.pep
LRLHRMKRWHSFLPESPYLAGDNFKPKRSPQEFKKNLPLLQNWKLF

SEQ ID NO: 201292 - protein, 90 aa, Zea mays
  unsure (1)..(90): unsure at all Xaa locations
  Clone ID: MRT4577_115164C.1.pep
EHEADKKEDDLEAMNAEEDSLRNGGEEEDEDEDLEEEEEEEEEDDDQKPKRRGPKKKKMTKARLERFKLRRXIANARERNRMHGLNAALD

SEQ ID NO: 201293 - protein, 59 aa, Zea mays
  unsure (1)..(59): unsure at all Xaa locations
  Clone ID: MRT4577_115165C.1.pep
ARIGQVRQGIGVKRRGGAPLPTPGISXIPLKVVVFQLGQEDPSYHTPTQSFPTLGVELS

SEQ ID NO: 201294 - protein, 57 aa, Zea mays
  Clone ID: MRT4577_115166C.1.pep
KYPQIQRPNSELSSCMQMSAKTIAAAAAAAFLLYTHLYFPTAAHLYYSTTPLAGNPI

SEQ ID NO: 201295 - protein, 111 aa, Zea mays
  Clone ID: MRT4577_115167C.1.pep
YFFYSSTKIKLIALLLKTSYLENPCLSQIKSLSTKSPFPQLPYYQKAPNQSPFQTFPHPNCQLEPPFYRRINPAFFFFTPQLSLLICKSLIPRSFSFFPFLFSQLSPFFPL

SEQ ID NO: 201296 - protein, 55 aa, Zea mays
  Clone ID: MRT4577_115168C.1.pep
LPPTRSLVQGFPNCARHHTPAVRPHRLRPPLRTLPLHILSAPLGRPTPTPYDPMN

SEQ ID NO: 201297 - protein, 72 aa, Zea mays
  Clone ID: MRT4577_115169C.1.pep
SLGPVIKMFLALSGSLYMFKEVSGHSNGPLLSSQRLSYSEKWMHIFSSSSFPPLEQSRYTSTIVSYLAEPGR

SEQ ID NO: 201298 - protein, 92 aa, Zea mays
  Clone ID: MRT4577_11516C.1.pep
AHLRFFFSPGIMAGGGLFSTPSVCSTMIAQRAACNNLLKSTLYGYEPNTRQRSIELTDRATLTKNSAYRTGELNKTGRAQNPREDFELIFPS

SEQ ID NO: 201299 - protein, 53 aa, Zea mays
  Clone ID: MRT4577_115170C.1.pep
SAWSLIITRQMIIDRNMLTIARTSPFHQLQNNHLFYEGKEIMRGVDELSCFPH

SEQ ID NO: 201300 - protein, 77 aa, Zea mays
  Clone ID: MRT4577_115171C.1.pep
PFLPTSYFFYILTKIQFTVPRITTFFTFKTLSLPNYISLQHIPLSSTSLIFKQALTNCPFQHFSTSNSNVTPPLSAH

SEQ ID NO: 201301 - protein, 79 aa, Zea mays
  unsure (1)..(79): unsure at all Xaa locations
  Clone ID: MRT4577_115172C.1.pep
SSGVGGVACDRLYRPPSAAVLLTSGGAVCVLTELLQARLRARLVRPVVVQLVQRLLHRSPHSDVTEGRGKXHQSSLXRL

SEQ ID NO: 201302 - protein, 88 aa, Zea mays
  unsure (1)..(88): unsure at all Xaa locations
  Clone ID: MRT4577_115173C.1.pep
QQIEPALTQQTVANPEANKQQLLPFNQLAVXNMXANQQQRQQLLNPQAEPNPLVTAFQQQQQLLPNSQFSLMNRALPRQQPIVGGAIF

SEQ ID NO: 201303 - protein, 36 aa, Zea mays
  Clone ID: MRT4577_115174C.1.pep
SLSRPPAGGRPTTGSPDQSARRRGVRLFSLMPLECS

SEQ ID NO: 201304 - protein, 64 aa, Zea mays
  Clone ID: MRT4577_115175C.1.pep
LRAATQGSATDKNDSRSQHSSCHASKDECRYTEATADMASCSTTWEACTSFLITDNWSHGTVRD

SEQ ID NO: 201305 - protein, 104 aa, Zea mays
  unsure (1)..(104): unsure at all Xaa locations
  Clone ID: MRT4577_115176C.1.pep
NQNCEFIGVRFLKYFWKFRFSFFRPRXFINPNRLNQITLIDQRGRLRSPRRETQAARHQAWKWRTRSSARVPTGDTGFPFLDWRAPRLAVSRRHHGHRIPGLIM

SEQ ID NO: 201306 - protein, 86 aa, Zea mays
  Clone ID: MRT4577_115177C.1.pep
VRPSHLKRGSAPKASRRDLSGEADSEEIGAATPAKEYAPGTGHQLRTGGALRRYRGHAESDWSVTTWAPTTGEHWSPHRTVQGTDK

SEQ ID NO: 201307 - protein, 131 aa, Zea mays
  unsure (1)..(131): unsure at all Xaa locations
  Clone ID: MRT4577_115178C.1.pep
NHVSAEEMWDTMLHNGHFDRENISADTNVPSFAXETMCSCLRLXTWVEPHGKCTVVAALAWLXPKDKFQKGCTYNTXYTQLYRTYEKTAVNHIHDALTKYKLWQEDTAMRQNPILDVERLTHWDMLTLIMR

SEQ ID NO: 201308 - protein, 59 aa, Zea mays
  Clone ID: MRT4577_115179C.1.pep
PYYAQNLYSISTGHIQHCKICMTGNYTTHTELSLHMQRANLCCVFRRVSSVRISKEKIE

SEQ ID NO: 201309 - protein, 38 aa, Zea mays
  Clone ID: MRT4577_11517C.1.pep
QLDLQDLAAFPHGRRHEAAATLSGSEQWPPQGEEDEED

SEQ ID NO: 201310 - protein, 159 aa, Zea mays
  unsure (1)..(159): unsure at all Xaa locations
  Clone ID: MRT4577_115180C.1.pep
MPDATGLEMGLKGSKGAPVPGMEGGVAKAPASLEENKSSADEDLGRGPALTGKKRRDCRGSADEDRNVTKRVLRSDAMKLRAEAEAACVVAVEVSKTDSLERKRCEAIVEAEPXYSRLLMEVTXHGEEANGLVNLDSSDVSGESARCSENIWGCLVFLH

SEQ ID NO: 201311 - protein, 119 aa, Zea mays
  Clone ID: MRT4577_115181C.1.pep
KYKRDAKAKMSSQREQYGNTVHLFIGTGRSPCKITSRPFAFANNSIVIHRGLDSLFLFKSISFFLSSCRSSLAHSFGSVPSFVSLMLLHTVILTQVRRVQVRRYLLMYYTPETLLNHIF

SEQ ID NO: 201312 - protein, 390 aa, Zea mays
  Clone ID: MRT4577_115182C.1.pep
MGFMLVRKPRPGDEKPDLANWMRCFLSQRLSQPAAAAEETANAEGKAAGRREEEEGGGDDADHLVVMVNGLYGSSADWKFAAEQFVKRLPGKVYVHRSQSNYSKLTYDGVDLMGERLAEEVRQVVQRRINLRKISFVAHSLGGLVTRYAIGKLYEPAMDETSSCDIDKPSDEQNVRDVGKIAGLEPINFITSATPHLGSRLNKQLPFLFGVPLLEKTAAGTAHFIVGRTGKHLFLTDNDDGKPPLLLRMVEDCDDGKFMSALRCFKRRVAYANVTYDHIVGWRTSSLRRQHELPKLKLTANDEKYPHVINVDKGNLEDHRQEGSVEDSLADSYEEVMIRGLTQVAWERVDVCFHKSWLRYNAHNNIQVRIHPINSDGEDVIYHMIDNFVV

SEQ ID NO: 201313 - protein, 150 aa, Zea mays
  Clone ID: MRT4577_115183C.1.pep
MESGMSSARRRRFGLEASRGMLPLLALQVIIEYGHAGASRPPVTVALLAVNSLVYLRPGALGGVLPSLARVSFNPQLIIEEDVNCDNTQTVEQQQPSDDRQTVEHAPLQETDPGKETHVSEAKTLTADADGNLSSSQQTGEYNELLRQYY

SEQ ID NO: 201314 - protein, 67 aa, Zea mays
  Clone ID: MRT4577_115184C.1.pep
QQLTVTYAAPQAEAEWWVQCDKRIVWQHEICALFNRKCEGAKAEYTCALDPPFSLIFCILIILFSGR

SEQ ID NO: 201315 - protein, 169 aa, Zea mays
  Clone ID: MRT4577_115185C.1.pep
MESGMSSARRRRFGLEASRGMLPLLALQVIIEYGHAGASRPPVTVALLAVNSLVYLRPGALGGVLPSLARVSFNPQLIIEVPDLFSVLSLCSSSSLELPFLVSLYCGHMAKFSSSRRKMSTVTTHRQLSNNSPLTTDRQLSMLLFRKLIQAKRHMFQRLKRSQQMLMEI

SEQ ID NO: 201316 - protein, 57 aa, Zea mays
  Clone ID: MRT4577_115186C.1.pep
RLVVMGASNTPPGASEFHCDYAWCRRQPRWVVNNTLSMGRNTSPAVSTQHGHLIPIP

SEQ ID NO: 201317 - protein, 77 aa, Zea mays
  unsure (1)..(77): unsure at all Xaa locations
  Clone ID: MRT4577_115187C.1.pep
SLVGLHLMSNETTSCPDHHHHSSLNPPTKPPPPPPPRSRLGVNNRRNKQLTPSGRGTAPAAGGVPCRPWRXTRPPQP

SEQ ID NO: 201318 - protein, 57 aa, Zea mays
  Clone ID: MRT4577_115188C.1.pep
LSFKMHIWIDTSLMFYAQTRGAAVAKPKTWLEHFIVHMTRKKGVCGSRSRGGIKASA

SEQ ID NO: 201319 - protein, 73 aa, Zea mays
  Clone ID: MRT4577_115189C.1.pep
EEAAAEEGRCQAPDRADLEDPGHGAQQRVRLHASGPQQVLLGARLPLERTDCREFGVRWRPCVLRTPLWDSRG

SEQ ID NO: 201320 - protein, 460 aa, Zea mays
  Clone ID: MRT4577_11518C.1.pep
MSIMGKLVLGNEVIRQLVLNADPQLEVFLRLLRSSELFLKAAVVLYMMKPKAKQMLSLDWVPLVLHVLECGDEVQSLFSVRCAPKIAAFYFLDQLLMGFDVDRNVENAKQMIALGGLDLLIGRLGAGDARESRHCIALLTTCVQADGSCRHYLADSLKKEPLVQLLAGNQRKPGAASLNLMSELVCLNRTSKIVEFVKELKNSGCLNTMHVLLVYLQQAPLVQHPLAATMLLQLDLLGDPSQYSVYREEAIEAIVAALEHSSQSRKVQEQCARALLILAGRFSSSGEPVAEAWLLKRAGLDDSLSESFRRSEVFKDKSVRAEEEKLVEERQKSLALMLLKSGGRRFLTALSSCISDGTPSLSRSCLVSVAWMSSSLSPLRGCNDFQPLACSVLASKLLDSLSYDRVLEERVLASLSLLNVVRHPECMEKVFPLKKETIESLQDLAEVTWTAKELLFACCR

SEQ ID NO: 201321 - protein, 49 aa, Zea mays
  Clone ID: MRT4577_115190C.1.pep
RILPHRMYVVLCFELLILDSQSIKCKRSNPRAASKGPGGRGCVKEMDYL

SEQ ID NO: 201322 - protein, 69 aa, Zea mays
  Clone ID: MRT4577_115191C.1.pep
MNGNCWNTTVQTMGKVQCRAIGFSKPWKFDENTGRYGKFAHRKYSAHIGFIAFITFARSFLCWIGGIPL

SEQ ID NO: 201323 - protein, 80 aa, Zea mays
  Clone ID: MRT4577_115192C.1.pep
NAMGASKPGADDGHTPGINKALAYYHTMPLREAKSASVMHEIRLTEASRTRAKKNSALTLRLDDWVLCRLYNKNNQWEKM

SEQ ID NO: 201324 - protein, 110 aa, Zea mays
  unsure (1)..(110): unsure at all Xaa locations
  Clone ID: MRT4577_115193C.1.pep
YIYPLVQFAEXYARKGIVRLKEIFTPGTLQVPKTDNQLKELESVHKVLELYVWLSFRMDDSFPDREVAAFQKSICSMLIPSWRGLDGSHKTEERFWVEHKSCSKNTMYRK

SEQ ID NO: 201325 - protein, 143 aa, Zea mays
  Clone ID: MRT4577_115194C.1.pep
MASSPLAISGTQPTWVPYEPTKDCSQGLCSMYCPQWCYFIFPPPPPFDVGGPSPDDSSGPVFSPLVIAIIGVLAIAFLLVSYYTFISRYCGTFRSFRGRVFSSSSGGGGGARRRRRPCGGCGDGGTGDQLRVAAQHGGQHGRT

SEQ ID NO: 201326 - protein, 116 aa, Zea mays
  unsure (1)..(116): unsure at all Xaa locations
  Clone ID: MRT4577_115195C.1.pep
LWGCSSLDALFLNCPEFMDLNLNLCSNLHPESLVLQCPKLQLVXYASGCQGLLTGAIRKQVSENFSAGENHMPRKRLADAFKRIQALPSLYQETREDGIYAGKRRKLEKEMCTIIH

SEQ ID NO: 201327 - protein, 51 aa, Zea mays
  Clone ID: MRT4577_115196C.1.pep
LILILVSLVAHKARSSRSMTMVHGRSPTSDASTTCSPHSRSLGQVDTVVIS

SEQ ID NO: 201328 - protein, 106 aa, Zea mays
  Clone ID: MRT4577_115197C.1.pep
PGCYRCSPHIAVRCCATWPAISTASSPPADAEQALQDSAYVAWNGYGFYSLIWWQHCVERRDVVILGLSAGGYGAQHRRLAQPPLLNADVQDPKSGMFTPVRTRGS

SEQ ID NO: 201329 - protein, 189 aa, Zea mays
  Clone ID: MRT4577_115198C.1.pep
LEACREMDLPANRGRWRMRSARSHVALVVAVLVLLLPAYLLFSSAYSTTLRALFAFPFAPGGGEAPRCGGSVELEGRGGLWYAPHSGFSNQVGELRNAAVAAALLNRTLVVPPVLDHHAVVLGSCPKFRVTDPSSLRAAVWDHTMQLLLDRRYVSMGDIGDLSPIEPMGRTIDFRGFVFLWCGVYMRET

SEQ ID NO: 201330 - protein, 69 aa, Zea mays
  Clone ID: MRT4577_115199C.1.pep
ARVKFYLGHVVKRPNPLGLKYDTITSPRRLVNTFIHQMVPDLLKRDKPIKVPINFKSWFTTRETSSEWG

SEQ ID NO: 201331 - protein, 83 aa, Zea mays
  Clone ID: MRT4577_11519C.1.pep
MSAAVLSLESTHSRMKRMEYVAGPGAKVVAGPDWTKEAAVNRRRAGVGRRRWEMSRRWACRDGGIAPAGGRFSCSRRCARVLA

SEQ ID NO: 201332 - protein, 134 aa, Zea mays
  Clone ID: MRT4577_1151C.1.pep
MARWAAVLALAAATAIAVASVAGGDMSADKINATLALALPNACGATRANVSHCAQLLHIPPGSKDAAVFSPGSDKGSTAAPAKDNSTATTDSRALQATTGRGVSSSAATAGAALTVLLAGYLLLLVPELSPSSF

SEQ ID NO: 201333 - protein, 45 aa, Zea mays
  Clone ID: MRT4577_115200C.1.pep
GCDQKILATLSSGFPVRRTQGKRTKRLTGWAGPASKKEAHKRPRL

SEQ ID NO: 201334 - protein, 65 aa, Zea mays
  Clone ID: MRT4577_115201C.1.pep
FPALPTHPLVVKKSPFVSLLASTILRKVPSQLLSESHSSPNQIPYPSQPYPHQPARQLPFLTRTI

SEQ ID NO: 201335 - protein, 53 aa, Zea mays
  Clone ID: MRT4577_115202C.1.pep
RNTLLNLDHGHVSSFPTNTHEAYLTLLNRSKDLTYLKQKALVAFVFNKPMDLP

SEQ ID NO: 201336 - protein, 110 aa, Zea mays
  Clone ID: MRT4577_115203C.1.pep
FVRAGAVLGLFRYRVARAFCQGPQFSGASGVLKVLHSRCRRGRSGPRWLWARASRARSASAASAGRWRGAHACLTSCPFPFLAPSSKEEPRWWGRGVIIMRGGVTGIPAG

SEQ ID NO: 201337 - protein, 71 aa, Zea mays
  unsure (1)..(71): unsure at all Xaa locations
  Clone ID: MRT4577_115204C.1.pep
VCDFECQLSCCMKEYLDFTSLMLYRKIXHHWATRYTDQTXSMSGLVWSLARFPDYTIADFYCTSRIGMSIG

SEQ ID NO: 201338 - protein, 338 aa, Zea mays
  unsure (1)..(338): unsure at all Xaa locations
  Clone ID: MRT4577_115205C.1.pep
DGGGDGCMSRVEAAMAVRSKAKDDAGAREMLAMLGAIPPLVAMLDEGGDVGEDVTTAALYALRNLGIGNDTNKAAIVQAGAVHKMLRIAEGGALTWAAVVANFLCLSALDANKPVIGASGAAPFLVRAFQAASSTEQARHDALRALLNLSIAPANALHLLAAGLAPALVAAVGDGPVTDRALAVLCNLVAACPEGRRAVSRAPDAVPSLVDVLNWADEPGCQEKAAYVLMVLAHRSYGDRAAMAEAGASSALLELTLVGTALAQKRASRILEILRADKGKQVAEDASGVVATVSAPQERGCRGEESVDXEFADAGMSAEKRAVRQLVQQSLQSNMRRI

SEQ ID NO: 201339 - protein, 52 aa, Zea mays
  unsure (1)..(52): unsure at all Xaa locations
  Clone ID: MRT4577_115206C.1.pep
XXSTTXACTVPGVNFPPMXEXKXSXXKMFFPQPKAALPQIXFGWAHTRMPEN

SEQ ID NO: 201340 - protein, 227 aa, Zea mays
  unsure (1)..(227): unsure at all Xaa locations
  Clone ID: MRT4577_115207C.1.pep
MRLLPREADKLALHNAGFLAQKRLARGLRLNYTEAVALIAAQILELIRDGDKTVTDLMDLGKQLLGRRQVLPAVPYLLHTVQVEGTFVDGTKLVTVHDPISLDDGNLELALHGSFLPVPSPEKFSSDDVEEYPGEIHYSSCRIVLNLHRIALSLKVVNKAGGPIQVGSHYHFIEPTAXLVFDTKNSYGMKXHTCCFLCSVVEXAYAKSVILVSXRSHKVIKGGNGIA

SEQ ID NO: 201341 - protein, 79 aa, Zea mays
  unsure (1)..(79): unsure at all Xaa locations
  Clone ID: MRT4577_115208C.1.pep
MLDKLWDDVVAGPRPGTGLGKLRKASTARSLVMNKDAGXRQYKRAQSTPSMPTTPVTPSSSTTPRSXGNVWRTCLRPGS

SEQ ID NO: 201342 - protein, 93 aa, Zea mays
  Clone ID: MRT4577_115209C.1.pep
TQLQWGGIKSLQHKLETPHPPIDKNRPKHNPVGAPRGKSQDRKGPQARQPRARRAFSTYNPWGRPHPWKTQHRPPGNPFGGPPDPYEPWRTPP

SEQ ID NO: 201343 - protein, 264 aa, Zea mays
  Clone ID: MRT4577_11520C.1.pep
MERFDSKFHEKYTVLKKRKLLDEGLERKREAELKELYDAMKDWVSELKKDNAELNDKLMEKQDELEKARQEFLEDILTRDTEILRLKQLLDEKAEKNNSTASGFHCLTPEAILENSTSMSPKRKTPLSHGKEKRVQLSENAPHSSPAKESQELVCSRRRTCIRGNGTNEIRSAHMLRLLLQSLVRMKVSVNDESEIFSVSVSHEASGYSFTLTWLEKSDEWSYKLSSLGTLGRIAADWMRQDIRFSTKMCRMFVERISSIITKG

SEQ ID NO: 201344 - protein, 252 aa, Zea mays
  unsure (1)..(252): unsure at all Xaa locations
  Clone ID: MRT4577_115210C.1.pep
MASSAAARRLLLLRHRHGHLLPKRHFSSSSAPDGLDDGGGRVKIFDRDLKRRHRDRAAWAMRETDGLVDAVAENLLDRLEDCRKAFPSALCLGGSAGAVRRLLRGRGGIERLIMMDMSADMVKKWRESENATGDGPETHFVIGDEEFLPIKESSQDLIMSCLGLHWTNDLPGAMIQCRLALQPDGLFLAAILGGETLKELRIACTIAQMEREGGXISPRMSPLAQVRDAGNLLTRAGFTLPXGSDGDQYTVR

SEQ ID NO: 201345 - protein, 55 aa, Zea mays
  unsure (1)..(55): unsure at all Xaa locations
  Clone ID: MRT4577_115211C.1.pep
ALLALLAASVSATNAFIIPQGALASSAIISQFLPPVTXMRFEHASLLAYTLQLAL

SEQ ID NO: 201346 - protein, 257 aa, Zea mays
  Clone ID: MRT4577_115212C.1.pep
TTREHTHPHSHELLAALAEPAEPFVLRGRAWAAGDEHGASARLESILTDSSAPRAERMWAAGAIELGMLLRLAVPAVIMYMINFLMSMSTQIFSGHLGSLELAAASLGNTGVQMFAYGLMLGMGSAVETLCGQAYGGHKYDMLGTYLQRSAVILCCTGIPLAVIYAFSEPLLLLLGQSPEIARAASIFVYGLIPQIFAYAINFPIQKFLQAQSIVLPSAYISTAALVLHLLLSWVVVYKVGLGLLGASLVLSLSWWI

SEQ ID NO: 201347 - protein, 49 aa, Zea mays
  unsure (1)..(49): unsure at all Xaa locations
  Clone ID: MRT4577_115213C.1.pep
FITLTASPDTSSSLSLPNLAPSLFHLLFIDRSIVLREDXXGERXRSRGS

SEQ ID NO: 201348 - protein, 72 aa, Zea mays
  unsure (1)..(72): unsure at all Xaa locations
  Clone ID: MRT4577_115214C.1.pep
HGGERSSGRRLVHLGADDGGSRGRGGGXQPRPVVSMAERARLVRVPLPEPGTLRCPRCDSANTKFCYFNNYS

SEQ ID NO: 201349 - protein, 129 aa, Zea mays
  Clone ID: MRT4577_115215C.1.pep
NLFAFFQQKQFFPFNQLAALNSAFFLQQQQLPFSQFPVASPHQFFPFNQLAALNSPAFFQQQQLFPFNQLVGVSPPPFLTQPQLLPFYQPVGPNAGPLFQLQQLLPFNQLFFTNLPVFFQQPIIGAPPF

SEQ ID NO: 201350 - protein, 76 aa, Zea mays
  Clone ID: MRT4577_115216C.1.pep
SCHQVQVGKFVNLVCPMLFFLVVRCCRLSGGGRLCGWHPWPCLCVRGRACPVRLSSRWRRLFVLPVCCCKTRRCFL

SEQ ID NO: 201351 - protein, 59 aa, Zea mays
  Clone ID: MRT4577_115217C.1.pep
GIFSNGDRHFSHCGPTGVRSQCTQLLTSGRPCSYCCSYPCTKPIPCRNRAPSSSPSKKN

SEQ ID NO: 201352 - protein, 52 aa, Zea mays
  Clone ID: MRT4577_115218C.1.pep
RVDKDHFKKFWRHNTSVSKKFRKHAHGSDSNSENRPKKHKKAPNCIRKNGAH

SEQ ID NO: 201353 - protein, 278 aa, Zea mays
  Clone ID: MRT4577_115219C.1.pep
GAVSARSALPRRSCYDDVVGLVLHSSLMVPYFSWKYSHRRHHSNTGSLERDEVFVPKKKEALPWYTPYVYNNPVGRLVHIVVQLTLGWPLYLATNASGRPYPRFACHFDPYGPIYNDRERAQIFVSDAGVVAVAFGLYKLAAAFGVWWVVRVYAVPLLIVNAWLVLITYLQHTHPSLPHYDSSEWDWLRGALATMDRDYGILNRVFHNITDTHVAHHLFSTMPHYHAMEATKAIRPILGDYYHFDPTPVAKATWREARECIYVEPEDRKGVFWYNKKF

SEQ ID NO: 201354 - protein, 62 aa, Zea mays
  Clone ID: MRT4577_11521C.1.pep
ITMTSHVSHGVRSETDDTACILMASHRCACTDAHVIINSQVCPGFRERCNQSNHTSLFGGVG

SEQ ID NO: 201355 - protein, 197 aa, Zea mays
  Clone ID: MRT4577_115220C.1.pep
PPCKSCRHHRSCFSPGQEKREREVRRGVRPICHFDPYGPIYNDRERAQIFVSDAGVVAVGCGLYKLAAAFGVWWVVRVYPVPLLIVNAWLVLITYLQHTHPSLPHYDSSEWDWLRGALATMDRDYGILNRVFHNITDTHVAHHLFSTMPHYHAMEATKAIRPILGDYYHFDPTPVAKATWREARECIYVEPEDRKGV

SEQ ID NO: 201356 - protein, 437 aa, Zea mays
  unsure (1)..(437): unsure at all Xaa locations
  Clone ID: MRT4577_115221C.1.pep
MGAGGRMTEKEREKQEQLARATGGAAMQRSPVEKPPFTLGQIKKAIPPHCFERSVLKSFSYVVHDLVIAAALLYFALAIIPALPSPLRYAAWAVYWIAQGCVCTGVWVIAHECGHHAFSDYSLLDDVVGLVLHSSLMVPYFSWKYSHRRHQFQTRGSLERNKFFLAPKKKEACPCYXNFFKNPXGRVRGPYFVXKATGPVFQQGSLSETKVLGAALPPRSPWQFQPPKGPFLKKNGKPPPIFLFRXPLYLATNASGRPYPRFACALRDPYGPIYNDRERAQIFVSDAGVVAVAFGLYKLAAAFGVWWVVRVYAVPLLIVNAWLVLITYLQHTHPSLPHYDSSEWDWLRGALATMDRDYGILNRVFHNITDTHVAHHLFSTMPHYHAMEATKAIRPILGDYYHFDPTPVAKATWREARECIYVEPEDRKGVFWYNKKF

SEQ ID NO: 201357 - protein, 94 aa, Zea mays
  Clone ID: MRT4577_115222C.1.pep
SAFFLGNKGGGPPLPPGWLPALGGVMTRGWGANPEGRPPFPEILRKLGQGGKGVFSPVRKGGVPCCFAPPMTLGLVFPQNPGKNLGGRFLPWVF

SEQ ID NO: 201358 - protein, 144 aa, Zea mays
  Clone ID: MRT4577_115223C.1.pep
STSNAKWRAVASPAHLREKWMHGCASLDGKVVVVADRGGLSYDPSAPPAEAWAPVSPVLDMGWKGRAAVVEGILYSYDYLGQVKGYDPDTDSWSTVEGLERELPKFLCGATLADVGGLLYLVWEGKWKGKLKGKMEVRSMVMIE

SEQ ID NO: 201359 - protein, 387 aa, Zea mays
  Clone ID: MRT4577_115224C.1.pep
MGAGGRMTEKEREKQEQLARATGGAAMQRSPVEKPPFTLGQIKKAIPPHCFERSVLKSFSYVVHDLVIAAALLYFALAIIPALPSPLRYAAWPLYWIAQGCVCTGVWVIAHECGHHAFSDYSLLDDVVGLVLHSSLMVPYFSWKYSHRRHHSNTGSLERDEVFVPKKKEALPWYTPYVYNNPVGRVVHIVVQLTLGWPLYLATNASGRPYPRFACHFDPYGPIYNDRERAQIFVSDAGVVAVAFGLYKLAAAFGVWWVVRVYAVPLLIVNAWLVLITYLQHTHPSLPHYDSSEWDWLRGALATMDRDYGILNRVFHNITDTHVAHHLFSTMPHYHAMEATKAIRPILGDYYHFDPTPVAKATWREARECIYVEPEDRKGVFWYNKKF

SEQ ID NO: 201360 - protein, 62 aa, Zea mays
  Clone ID: MRT4577_115225C.1.pep
KGKSSLTISLELVELPRVLQAFPVLFRSAIPSSPPCYLKKKKAFERALSVVAMLLPRHPRVR

SEQ ID NO: 201361 - protein, 387 aa, Zea mays
  Clone ID: MRT4577_115226C.1.pep
MGAGGRMTEKEREKQEQLGRANGGAAYQRSPTDKPPFTLGQIKKAIPPHCFQRSIIKSFSYVVHDLVIVAALLYAALVWIPTLPTVLQLGAWPLYWIVQGCVMTGVWVIAHECGHHAFSDYSLLDDTVGLVLHSWLLVPYFSWKYSHRRHHSNTGSLERDEVFVPKQKEALAWYTPYIYNNPIGRLVHIVVQLNLGWPLYLATNASGRPYPRFACHFDPYGPIYNDRERAQIFVSDAGVVAVAFGLYKLAAAFGVWWVVRVYAVPLLIVNAWLVLITYLQHTHPSLPHYDSSEWDWLRGALATMDRDYGILNRVFHNITDTHVAHHLFSTMPHYHAMEATKAIRPILGDYYHFDPTPVAKATWREAGECIYVEPEDRKGVFWYNKKF

SEQ ID NO: 201362 - protein, 263 aa, Zea mays
  Clone ID: MRT4577_115227C.1.pep
MGAGGRMTEKEREKQEQLARATGGAAMQRSPVEKPPFTLGQIKKAIPPHCFERSVLKSFSYVVHDLVIAAALLYFALAIIPALPSPLRYAAWPLYWIAQGCVCTGVWVIAHECGHHAFSDYSLLDDVVGLVLHSSLMVPYFSWKYSHRRHHSNTGSLERDEVFVPKKKEALPWYTPYVYNNPVGRLVHIVVQLTLGWPLYLATNASGRPYPRFACHFDPYGPIYNDRERAQIFVSDAGVVAVAFGLYKLAAAFGVWWGGAPVP

SEQ ID NO: 201363 - protein, 183 aa, Zea mays
  unsure (1)..(183): unsure at all Xaa locations
  Clone ID: MRT4577_115228C.1.pep
MPINRIALGSHQEGYHPGALKVGFAEFISTLILLFAGQGSGMAFRKLTGGGPTTPGGLIAAAEAHAFALFVEETCGXTNISVGHVNPAATFGAFVGGNITLFRGLLYWGAQLLGSTGECFLLRFSTGGQATGTFWLTIVSVRKALVLNIVMTFGLMYTVYATTVDPKKVSLGTIAPIAIGFIV

SEQ ID NO: 201364 - protein, 40 aa, Zea mays
  Clone ID: MRT4577_115229C.1.pep
GNLNSINGPSIFNSWPGKPRPYPTLIALYHIPFCPAGLIS

SEQ ID NO: 201365 - protein, 72 aa, Zea mays
  Clone ID: MRT4577_11522C.1.pep
MYAEQTVRFFWVANHGLPEHLIGYMLRAVRHFNEGPVEANDALYSKYLGRNLRLASNLDLLNAGARDWHDTL

SEQ ID NO: 201366 - protein, 130 aa, Zea mays
  unsure (1)..(130): unsure at all Xaa locations
  Clone ID: MRT4577_115230C.1.pep
MAPKVALFLXLSLLLADTAHGCQPNXSGPLVPTPPDVPTPASHRHGRCPIDALNLKECDNVLDLVKDDLPQQHQCCPXAGGLXTIDTAXALCTAIXKANALCIHLNGPLILNFILNNCRRIXPEDFTCPN

SEQ ID NO: 201367 - protein, 145 aa, Zea mays
  Clone ID: MRT4577_115231C.1.pep
GRPGPGISCSSSHSISSPRALALSLACSFPIIDAPLGLHIRRHAGRQDLGHPTHSSEMDGDEMTTLILQDDHGQAYPPISGTVHPVLSTRGYCTVKQLLYLGTEEAVQATLGYKVSIKRATITPNDAPYTVMNLLRNALDPLCHC

SEQ ID NO: 201368 - protein, 134 aa, Zea mays
  Clone ID: MRT4577_115232C.1.pep
GFGQPSASPSRAASGLAKLDTGRPSLSRAASPSQATSPSRAASPSSKLRAAQCLAEPGGLTKPDARRPSLSRAASPNSKLRAAQCITQIFPTRSHTVAAQGSGSHHASPPPDQSTFMDLLMHKSGGGSNDPPTE

SEQ ID NO: 201369 - protein, 68 aa, Zea mays
  Clone ID: MRT4577_115233C.1.pep
LHIYSDIVSVVSRSLARSSCQKSGLAQLHVSATPFSLRLTSMVYVASYGSKHQRPSSVDIISWVADSM

SEQ ID NO: 201370 - protein, 59 aa, Zea mays
  Clone ID: MRT4577_115234C.1.pep
SSSSTHKADQCSSSPSYNANPLKIISIAGTLNGPQDALVHCLISGAKLGAEKRSIVVRL

SEQ ID NO: 201371 - protein, 293 aa, Zea mays
  Clone ID: MRT4577_115235C.1.pep
MQTPARLSAPSSPLVSSAPPIPVRPQRVAFPSLRRRDLLLLPAALTLPTAPAPLPASARGLFRMPPPRLVNRYFLVRAGESVYEGQGLLRTNPVAKTSVDSGLSPVGLRQTARAALELQRLGACEDDCWIWPSITQRAYQAAEIIAAANGVNRSRIVPEYSFLDARGLGAFEWKSLDTLPEVYASDNISPDLKPPPIRDGTPNESVADVFVRVTQLMSILETQYSGETVVIVSPDSDNLSILQAGLIGLDLRRHSSLFFQPGEVRPVDPSSIPEYKQPPSTVFKCANPPSCKE

SEQ ID NO: 201372 - protein, 425 aa, Zea mays
  Clone ID: MRT4577_115236C.1.pep
MALPYLEAVLCFMIFMYIFETYLDIRQHRALKLPTLPKPLLGVISDEKFERSRAYSLDKSYFHFVHEAVTILMDTTILYYRVLPWFWKKSGELVTSVGLSAENEIIHTLAFLAGSMVWSQITDLPFSLYSTFVIEARHGFNKQTIWLFIRDMIKGILLSMILGPPIVAAIIYIVQIGGPYLAIYLWGFMFVLALLMMTIYPIVIAPLFNKFTPLPEGVLREKIEKLAASLKFPLKKLFVVDGSTRSSHSNAYMYGFFKNKRIVLYDTLIQQCSNEDEIVSVIAHELGHWKLNHTVYSFVAVQLLMFLQFGGYTLVRSSKDLFGSFGFKDQPVIIGLIIFQHTIIPIQHLLSFCLNLVSRAFEFQADAFAKNLGYAPQLRAALVKLQEENLSAMNTDPWYSAYHYSHPPLVERLQALEDSDSKKED

SEQ ID NO: 201373 - protein, 102 aa, Zea mays
  Clone ID: MRT4577_115237C.1.pep
SFGFKDQPVIIGLIIFQHTIIPIQHLLSFCLNLVSRAFEFQADAFAKNLGYAPQLRAALVKLQEENLSAMNTDPWYSAYHYSHPPLVERLQALEDSDSKKED

SEQ ID NO: 201374 - protein, 138 aa, Zea mays
  Clone ID: MRT4577_115238C.1.pep
RDVSSEFGSSGSRKKSGELVTSVGLSAENEIIHTLAFLAGSMVWSQITDLPFSLYSTFVIEARHGFNKQTIWLFIRDMIKGILLSMILGPPIVAAIIYIVQIGGPYLAIYLWGFMFVLALLMMTIYPIVIAPLFNKFT

SEQ ID NO: 201375 - protein, 105 aa, Zea mays
  unsure (1)..(105): unsure at all Xaa locations
  Clone ID: MRT4577_115239C.1.pep
AFKGKSYKALLVKVNQNGFVFKNIEAVKISKRRGGGGILSHRGGGTGAPFLFFLAVGLSPGPIKMGAPPRXGFFQKHPPFLDLKKXVGGFFVFPGAKFRAPGGPP

SEQ ID NO: 201376 - protein, 47 aa, Zea mays
  Clone ID: MRT4577_11523C.1.pep
IIANWYNPYNCVQLAYILIYPPDYQNTTPYLTPTTYPPLSTDLPPIK

SEQ ID NO: 201377 - protein, 43 aa, Zea mays
  Clone ID: MRT4577_115240C.1.pep
LRDSSPRLKPGRSQVAQTPEGLVFPSIKTATGRIYTNGATSSN

SEQ ID NO: 201378 - protein, 84 aa, Zea mays
  unsure (1)..(84): unsure at all Xaa locations
  Clone ID: MRT4577_115241C.1.pep
EEGCALDSVLALGLSLRHVGHVLAPHANDGAAATELELYSRTWPWPEPTGSNRLYRIGQLVDKGTTSIXVEWGGTRVLCVGTTA

SEQ ID NO: 201379 - protein, 55 aa, Zea mays
  unsure (1)..(55): unsure at all Xaa locations
  Clone ID: MRT4577_115242C.1.pep
EVDRDVALVNKKVHASSADXQXPPAWWVKGNKGMTRADSGRWVMQDHEEGSLVRV

SEQ ID NO: 201380 - protein, 75 aa, Zea mays
  Clone ID: MRT4577_115243C.1.pep
WDYLFFLADLYELHILEKYKIFKRQKECRAFGIRDVGECPENTVFQRSKKRSFKNKKGKLVPNVKKWSKSDISII

SEQ ID NO: 201381 - protein, 108 aa, Zea mays
  unsure (1)..(108): unsure at all Xaa locations
  Clone ID: MRT4577_115244C.1.pep
MSTDEAVVAEVPKTEVPSKVPAAQVADAPKAKKAPKEKKAPNEKKLSEAKKPAAHPPYTEMIVEAIAALKERKGSSSVAISKYVXGNHGCKLPTNFLKQLTVQLMKLT

SEQ ID NO: 201382 - protein, 133 aa, Zea mays
  unsure (1)..(133): unsure at all Xaa locations
  Clone ID: MRT4577_115245C.1.pep
QHTGRGLKKHLKRLKAPKXSMLXKLGGTFASKPSSGPNKSRECLSLILIIRNRLMYALNYREVISILMQRPVLADGNVWTDKTYPAGFMDVISMHNTMDNYRLLYDTKGLFRLHPMRDEDATIKLCKVTSVQF

SEQ ID NO: 201383 - protein, 103 aa, Zea mays
  Clone ID: MRT4577_115246C.1.pep
QKNNNIFFSFTTVKYTSPCTFLLALQRVSEKIPVGGLIFFWARGYKNRGFCVNPKPLIYISSLGINVFWPFSLTKLTDPFHNHNKLSWAFTLNAILFFPFLHL

SEQ ID NO: 201384 - protein, 201 aa, Zea mays
  Clone ID: MRT4577_115247C.1.pep
MASPDISFDIRPEFNSFDHLRSTGYISTDRPWLKLYGIRVPPVSPFNSLSSTPDLALIHQCLPDELLIEIFGRMSPYTLGRAACVCRKWKYTTRNPTFWRNACLKTWQRNGIEANFRMVQSLYDSSWRKMWVQRPRIRIDGLYVSRNTYIHTGITEWQFKKTVNVVCYYRYLRFFPTGKFLYKISPQKVEDVVKCMHLRAS

SEQ ID NO: 201385 - protein, 96 aa, Zea mays
  unsure (1)..(96): unsure at all Xaa locations
  Clone ID: MRT4577_115248C.1.pep
RTAGTNINCGKXLMARAEAAILVVFQLMAAPPTAMAARSPHGARPDGSLATTPNETMLSATLCYTGETCKYIGCLTPACSHNYIERLCYIIFTTVA

SEQ ID NO: 201386 - protein, 295 aa, Zea mays
  unsure (1)..(295): unsure at all Xaa locations
  Clone ID: MRT4577_115249C.1.pep
YRAIGLLEAGRDLPFLGEGHTLPLLHFATALSAQHGRLCVTLVTTPGNVAFVRSHLPMSVGLVALLFSSFSPLPEGIESTDALPCPSLHLTFMEAMGLLRGPFTEFLASLPSLPLALVSDFFLRFTRRVAANADVHRIVFNSMSCFASVICKALAASPPASFEPETMIQVPNMPVHAAVRAEEVPNGVTKRADPDNPFMRFFMDEIGDSDVRSWGVLSNSLDVLDAAYVSALELFYEAGARAWLVGPLFMAAGDMLNGEKRSKTPEXLSWLDERAAHXGSVVYVSXGTQATSHTR

SEQ ID NO: 201387 - protein, 64 aa, Zea mays
  Clone ID: MRT4577_11524C.1.pep
SVGVVCPLRLYLWWGGSFVVVILFGPRDSRWVSCYLGCCLTLSDTVILLFGICFSKKKKKKRPL

SEQ ID NO: 201388 - protein, 57 aa, Zea mays
  Clone ID: MRT4577_115250C.1.pep
PTRPLNMLLHLIGDGGETLQVAAFRAMVNILTRVQQESSDGAERNRFLINYVDFAFD

SEQ ID NO: 201389 - protein, 102 aa, Zea mays
  Clone ID: MRT4577_115251C.1.pep
QKIRVNNNPKSPQNCEKKLNTQQVQKNPLGPQKGPKRTHKKTPLFFWFPNPVKTLKNSSPSRGLPGFKFNPKPRLPMVGPVEMKRLLLTKIFPKFKMTLLVS

SEQ ID NO: 201390 - protein, 107 aa, Zea mays
  Clone ID: MRT4577_115252C.1.pep
LPTKNRLYKPATNNFNTWSGHQMSAGTYKQKSSSKSSNPNNHQDLIKISSFQRENLLTSMDTCSEHYYTILSPTLTKCIHLNYLHNRLLTLLQNIFPPHNTLLRLHH

SEQ ID NO: 201391 - protein, 119 aa, Zea mays
  Clone ID: MRT4577_115253C.1.pep
HWVPRGRPGPRSRRAVRVRTGLSLGADYACFTGLSPGEQLQLQSSPLQSICARLESLDNADGQRGHQMRRGRRRRLVVVPPLQRWPVQVKPVDAGCECGETGAAHRRGLSCPTACAYLC

SEQ ID NO: 201392 - protein, 136 aa, Zea mays
  unsure (1)..(136): unsure at all Xaa locations
  Clone ID: MRT4577_115254C.1.pep
LLSSAGACSALASLLSSXPAXXRVVSFSLPASFVVARVVVGVLVSGSVAAGRGRVVVXGRLLAPVLRPWVGRARAPLSRPVSAPAGPVCVSFAAVGSGPPPCVRPGXRVGARLRGCSVRRRSSWVASCRGPGRARS

SEQ ID NO: 201393 - protein, 66 aa, Zea mays
  Clone ID: MRT4577_115255C.1.pep
MGTNINVGPWCPNRKTLLCLWPNVLGPKGGPKPPPGEWVIKQLVYFVFEKKQTNFFFWYANWPPFL

SEQ ID NO: 201394 - protein, 277 aa, Zea mays
  Clone ID: MRT4577_115256C.1.pep
MGHLRGLTAARLLAAAFLLSVAVPAARAQEETEHEEEFSYVVGDENGPEHWGSIKAEWGNCSAGRMQSPIDLSHERVSLVRSLGYLTHSYRPAEAAIANRGHDIMVRFKGDAGFLVINGTAYYLKQMHWHSPTEHTVDGRRYDMELHLVHESSANKAAVIGMLYEIGAEDPFLQALEPSIHRIADRQDREEAIGVVDPRRARGRASVYYRYVGSLTTPPCTEGVIWTVVKRVRTVSRHQLELLREAVHDGMEKNARPVQDVNDRDISIFRPKPHKHY

SEQ ID NO: 201395 - protein, 307 aa, Zea mays
  unsure (1)..(307): unsure at all Xaa locations
  Clone ID: MRT4577_115257C.1.pep
MGHLRGLTAARLLAAAFLLSVAVPAARAQEETEHEEEFSYVVGDENGPEHWGSIKAEWGNCSAGRMQSPIDLSHERVSLVRSLGYLTHSYRPAEAAIANRGHDIMVRFKGDAGFLVINGTAYYLKQMHWHSPTEHTVDGRRXTNEWWSAGLVVVVESQXIIKTRRAYVWTAYDMELHLVHESSANKAAVIGMLYEIGAEDPFLQALEPSIHRIADRQDREEAIGVVDPRRARGRASVYYRYVGSLTTPPCTEGVIWTVVKRVRTVSRHQLELLREAVHDGMEKNARPVQDVNDRDISIFRPKPHKHY

SEQ ID NO: 201396 - protein, 114 aa, Zea mays
  Clone ID: MRT4577_115258C.1.pep
RWRGWGQAQFTFFYGGLCRPHRPKAGFRSCIHQRHTITGVTLCLGNQGLDSSHPPYKKPCLGGENLGFPLLKRIFPAIDEWGPDLRTYIYRRPQSQNPGLCRLSGFRQRNQFPP

SEQ ID NO: 201397 - protein, 79 aa, Zea mays
  Clone ID: MRT4577_115259C.1.pep
GSQEKRTVPPQGAANSCPRGRAQSKKPHRFRPGTELLREIRKYKNSSQLVIRKLPLQRLAREIAQNFKSDLRFQSSSGS

SEQ ID NO: 201398 - protein, 83 aa, Zea mays
  Clone ID: MRT4577_11525C.1.pep
IEFHVFTRFRGLQTGQNLFRWSVKLHGALQLPGTSKVTSSQKTPEGDHIGQTANSVHRGCHTLTFYGGPPELDTYRGSHYPGF

SEQ ID NO: 201399 - protein, 80 aa, Zea mays
  Clone ID: MRT4577_115260C.1.pep
LPPTFHILSRNPPLIIPVTNQYKKHHPCVLIPPSKSTHPVIGPKPPLLNFSTTQKPAQACVPPFLEFNQGLSCQNNFYFL

SEQ ID NO: 201400 - protein, 103 aa, Zea mays
  unsure (1)..(103): unsure at all Xaa locations
  Clone ID: MRT4577_115261C.1.pep
NLGLTNQRGKTVGPFXVFLAPSILGXKKTFLVNGPQKFIFPLGEGFEFIKFYLSMGPPPLGGQKISGISMYPGQEKKFFDPLPHKKIFVYAKKPPPIGAPFTN

SEQ ID NO: 201401 - protein, 92 aa, Zea mays
  unsure (1)..(92): unsure at all Xaa locations
  Clone ID: MRT4577_115262C.1.pep
MKCLSQALHTFQNDIHVYPIWLCPFILPSQPGLVHPKGDEAELYVDIGAYGEPRVKHFEARSCMRQLEKFVRXVHGFQMLYADCYMNREEFW

SEQ ID NO: 201402 - protein, 107 aa, Zea mays
  unsure (1)..(107): unsure at all Xaa locations
  Clone ID: MRT4577_115263C.1.pep
TGQGTSGNTTAGTTNRPGNEATGDPSTQVVNXESPDSGVXADKYDYAIVVVGEPPYAETFGDNLNLTIPALAFELVGGDGRVVYPAHIAQRTLGWDVCVWVITVMHS

SEQ ID NO: 201403 - protein, 554 aa, Zea mays
  Clone ID: MRT4577_115264C.1.pep
MKYLASVLSGGGSVPAPQASAQAWAAMVTEMQKGALSTRLGIPIIYGIDAVHGQNNVYKATIFPHNVGLGATRDPDLVKRIGEATALEVRATGIPYAFAPCIAVCRDPRWGRCYESYSEDPKVVQSLTSLISGLQGDAPADSAGRPYVGGSKKVAACAKHYVGDGGTHNGINENNTIIDTHGLLSIHMPPYYNSIIRGVSTVMVSYSSWNGVKMHANHFLVTDFLKNKLKFRGFVISDWEGIDRITTPPHANYSYSIEAGVGAGINMIMVPFRYTEFIDDLTTQVQNKVIPMSRIDDAVYRILRVKFTMGLFENPYPDSSLAGELGKQEHRELAREAVRKSLVLLKNGKSSYAPLLPLPKKAGKILVAGSHANDLGNQCGGWTITWQGSSGNTTAGTTILSGIEATVDPSTQVVYSESPDSGVLADKYDYAIVVVGEPPYAETFGDNLNLTIPAPGPSVIQSVCGAAKCVVVLISGRPLVVEPYLGDMDALVAAWLPGSEGQGVADVLFGDYGFTGKLPRTWFKSVDQLPMNVGDAHYDPLFPFGFGLTTKGTK

SEQ ID NO: 201404 - protein, 248 aa, Zea mays
  Clone ID: MRT4577_115265C.1.pep
FTMGLFENPYPDTSLAGELGKQEHRELAREAVRKSLVLLKNGKSSYAPLLPLPKKAGKILVAGSHANDLGNQCGGWTITWQGSSGNTTAGTTILSGIEATVDPSTQVVYSESPDSGVLADKYDYAIVVVGEPPYAETFGDNLNLTIPAPGPSVIQSVCGAAKCVVVLISGRPLVVEPYLGDMDALVAAWLPGSEGQGVADVLFGDYGFTGKLPRTWFKSVDQLPMNVGDAHYDPLFPFGFGLTTKGTK

SEQ ID NO: 201405 - protein, 88 aa, Zea mays
  Clone ID: MRT4577_115266C.1.pep
RKDYIHNCPTLQKVLYAVHCSSIYGESYSFVRNYIYTHKDYTQDLQIIHGQHYPLLSAFRMTPLCIVSMCRYDEVSFVAPPMSVSKVP

SEQ ID NO: 201406 - protein, 85 aa, Zea mays
  unsure (1)..(85): unsure at all Xaa locations
  Clone ID: MRT4577_115267C.1.pep
RTRGSEDAGLQLNAVTALLNLSILKANKKRVMHAEGAVLRLTSVDTXRRRLGRSLSIVEKLVHLAHSGPTSSKRGAFAALLSLAG

SEQ ID NO: 201407 - protein, 91 aa, Zea mays
  Clone ID: MRT4577_115268C.1.pep
MKMVIVLVVCLALSAASASAMQMPCPCAGLQVLYGAGAGLTTMMGAGRLYPYAEYLTQSQCSPMSAEPYYADCGQPSAMLERFWRHHCHEH

SEQ ID NO: 201408 - protein, 71 aa, Zea mays
  Clone ID: MRT4577_115269C.1.pep
DPLGLADDREAFAELKVKEIKSGRLAMFSMLGFLVQPIVTGKGPVKNFADHLVDLVNNKAGAYVTNLVPGK

SEQ ID NO: 201409 - protein, 114 aa, Zea mays
  unsure (1)..(114): unsure at all Xaa locations
  Clone ID: MRT4577_11526C.1.pep
GEHSSARYSEKEQNSAIDREAETRHAEDAASASPPLRQKLSAEQADHAXSSGDTEREPTENTKNTRYEEEHRAEQPQEAEAARVADAEGTAPEANRNADSQTNPQNRNPREEPG

SEQ ID NO: 201410 - protein, 94 aa, Zea mays
  unsure (1)..(94): unsure at all Xaa locations
  Clone ID: MRT4577_115270C.1.pep
MLYILGMVMEGVDMEEGTLHMGMDVRTVSGVVAPLVITDNVXGPKYQEMENIRLVYGTTPRGQMLEVDGEKAAVHVFEGTCGIYNLYPTVHLTG

SEQ ID NO: 201411 - protein, 251 aa, Zea mays
  unsure (1)..(251): unsure at all Xaa locations
  Clone ID: MRT4577_115271C.1.pep
FGTRPRHTCANPSQSDPLSSSFPSPRRTPSFALVWKRAEAVRCPRRELGPEVWPIGGDGVSVMSGPQERNMRDLYNRTRHKDFPALEESAEGRSGGRPSGSEQRELASKMEDKAVVRKRLVSSNNTHAKVESGTCNVCYAPCSSCLHPHIRVVDSNVECASSQTCSTRSEVKNNSLVRNEKGLCSKGENDDEFSATSGHVSDSVVARASIADDSSEVNMPSKRRRLLNENTDYLEQNTLKXSTHGVLVYQQ

SEQ ID NO: 201412 - protein, 177 aa, Zea mays
  Clone ID: MRT4577_115272C.1.pep
PPFPSFFLLFFPPLEPFFGLFGPPSLGRLLLFSQLLAVKNIHLLPVLVVKFLPPFAGFFFTSFFRVLSLFFRLLARPFSLLLICSLAPPLFSPFFSSFGPGWFFFWASVFVCLWPWERFSPSFRHPPSPLFGRALGPPPGGAGGFPRWAPASFQSQNKEKNKNKKKKKKKKKKKKKK

SEQ ID NO: 201413 - protein, 159 aa, Zea mays
  Clone ID: MRT4577_115273C.1.pep
MAAAGGENSGAGEGEFYLRYYVGHKGKFGHEFLEFEFRPDGKLRYANNSNYKNDTMIRKEVFVSPSVLREARRIIQESDIMKEDDSNWPEPDRIGRQELEIVMGNEHISFTTSKIGSLVDVQSSKDPEGLRIFYYLVQDLKCFVFSLINLHFKIKPIQS

SEQ ID NO: 201414 - protein, 165 aa, Zea mays
  Clone ID: MRT4577_115274C.1.pep
MAAAAAGGENSGAGAGAGEGEFYLRYYVGHKGKFGHEFLEFEFRPDGKLRYANNSNYKNDTMIRKEVFVSPSVLREARRIIQESDIMKEDDSNWPEPDRIGRQELEIVMGNEHISFTTSKIGSLVDVQSSKDPEGLRIFYYLVQDLKCFVFSLINLHFKIKPIQS

SEQ ID NO: 201415 - protein, 161 aa, Zea mays
  Clone ID: MRT4577_115275C.1.pep
MAAAGGENSGAGEGEGEFYLRYYVGHKGKFGHEFLEFEFRPDGKLRYANNSNYKNDTMIRKEVFVSPSVLREARRIIQESDIMKEDDSNWPEPDRIGRQELEIVMGNEHISFTTSKIGSLVDVQSSKDPEGLRIFYYLVQDLKCFVFSLINLHFKIKPIQS

SEQ ID NO: 201416 - protein, 65 aa, Zea mays
  Clone ID: MRT4577_115276C.1.pep
PKARFMPILWIPICSFHSRAPLFNMLAWTRLGQMIRVSYAGQPNRDKPWKLEAPYILCSVLSSKT

SEQ ID NO: 201417 - protein, 179 aa, Zea mays
  Clone ID: MRT4577_115277C.1.pep
NDALASAASLLLPLPALPPEKAAVRALPASWYTSVEMYELEKRAIFSKKWLLTTHQARLRDAGDWLKYEIANFELVIAKDEDGNINAFHNITRFGAFPIVAPEQGDHGDASTGFDQKQNGLLPIHVKVDARGFIWINMDGARVPEVAWEDDFDNLDTHERFSYYNFEDYNFDHVWEDGG

SEQ ID NO: 201418 - protein, 50 aa, Zea mays
  Clone ID: MRT4577_115278C.1.pep
PIGGVSAGPIVFQVAGGGGVPDLQGGGGRPPHRGWRSQQWRCKNKKAGGR

SEQ ID NO: 201419 - protein, 275 aa, Zea mays
  unsure (1)..(275): unsure at all Xaa locations
  Clone ID: MRT4577_115279C.1.pep
KKTHKRKKQIKKNKRKKKKKEKKKSKKKKNKKKNKKRXKNQNKQKKIKTKKKKKKKKKNKKEKKKKKAKKKQKKKKINKKKKKKKKKKKKKKKKKKKKKKXKKKKQKKKKKKNNKIKXIKKNXKTNKNKXKNKTKXXNXKKTXKQKKKXNKKEXKNTXNKKKHNKQKKNKKNMKKXKKHXKKQKKKKKXIIRKKKKKKRYKKIKEEKKKKKEKKKKKKKKKQTKKKIKKKKKKEKKKKKKKTKTKKQKKTHNKHTKNKKHSTKNTISTVNKKQST

SEQ ID NO: 201420 - protein, 59 aa, Zea mays
  Clone ID: MRT4577_11527C.1.pep
MGNQVGGRRRRRAVVDERYTRPQGLYPYPDIDLRKLRRLILEAKLVPCHPEAEDTRADL

SEQ ID NO: 201421 - protein, 85 aa, Zea mays
  Clone ID: MRT4577_115280C.1.pep
PPPPPSPSPPPLPVPPPPPPPPPRPPPPHSPSPPALFFRSIIPLRPHFYGSFQIKSFSPLFFLNGIFPVSFSQYFILRKWGLEFN

SEQ ID NO: 201422 - protein, 73 aa, Zea mays
  Clone ID: MRT4577_115281C.1.pep
KKEKKKKKTNIRNHAKGGFFFGVGGLHFNGPGFPTPLLGKTKFFLGLIYLNRRARFSPGVIGKRPGPTALTSG

SEQ ID NO: 201423 - protein, 113 aa, Zea mays
  Clone ID: MRT4577_115282C.1.pep
YVCQPWFSSYYSRSASCSGLGIHELSTLNKLPAMISGSLLGEGIRLIVLGRPVSLVCLLTHRESGAHGLVHHLFSFVRPSEGPLASSTVQHYSRYQAHVECTAGWPTGGICLV

SEQ ID NO: 201424 - protein, 126 aa, Zea mays
  unsure (1)..(126): unsure at all Xaa locations
  Clone ID: MRT4577_115283C.1.pep
ADHRRPGPPPVNLPPHXCYYLTKPPRLRLNPKQHQGPGQQPNQSPGQLKGTCGVGRTPILGQGVRFLGHKGSRTGTPYCWLKGQSLRQQCCQQLRQVGPTNRSQAILGWVLQSILQKKPKRGQVRG

SEQ ID NO: 201425 - protein, 72 aa, Zea mays
  Clone ID: MRT4577_115284C.1.pep
VPKLHNGSRVLPEPEQMSLQGSHPVVSLKLPKAKVDPFVTGEISSPRFPFMGRMKPSYCSNKGSEFAPGLSI

SEQ ID NO: 201426 - protein, 120 aa, Zea mays
  Clone ID: MRT4577_115285C.1.pep
HPKGTGYSFTNLKLHVFKNRKRVKENIKWEGKEKTKTLNIQGGGKKKNTNGGIILPKKLEVLGKRKLQGFLRGRVLIKSTRRKITILAIRRFRNWGRGANKIPGIFWGWGPRNGGGPKKG

SEQ ID NO: 201427 - protein, 118 aa, Zea mays
  unsure (1)..(118): unsure at all Xaa locations
  Clone ID: MRT4577_115286C.1.pep
LLLCMHLTAEVPDSLSPDQCKALXETVLSTRSSSKLTDMDIDECEETTMHDVNSIWEEMRWKHAHSYYEACEEDDKMPGGAQXRVQCSQNLADSHQRCGEGRCHKSMGVISRLSVSEL

SEQ ID NO: 201428 - protein, 125 aa, Zea mays
  unsure (1)..(125): unsure at all Xaa locations
  Clone ID: MRT4577_115287C.1.pep
HSSSGTLNFYHRYQEDIQLFKELGLNCFRXSIAWTRIFPNGDEETPNEEGLRFYDALFDECLKNGIEPVVTLSHFEMPYHLVTKYGGFRNRQVIDFFVXFAEVCFTRYQKKVKYWMTFNXIXXPR

SEQ ID NO: 201429 - protein, 158 aa, Zea mays
  Clone ID: MRT4577_115288C.1.pep
QAIRHEAFTHMDGQKQYVQIDQNDLFPFLLVNVGSGVSIIKVDGHGKFQRVSGTNVGGGTYWGLGRLMTKCKSFDELLELSQRGDNSTMDMLVGDIYGGLDYSKIGLSASTIASSFGKIISENKELSDYRPEDISLSLLRMISYNIGQVCQPCQDMVW

SEQ ID NO: 201430 - protein, 52 aa, Zea mays
  unsure (1)..(52): unsure at all Xaa locations
  Clone ID: MRT4577_115289C.1.pep
FYWNFLPHMGGCCNIVCSSYGTFNNXVRQQGRIMSESLLNPDTARLCAPKPH

SEQ ID NO: 201431 - protein, 80 aa, Zea mays
  Clone ID: MRT4577_11528C.1.pep
ALWFPMYSHPAHPSLKPSLYEDPCPPRLIISVGFLFTSVELPRSVLCEANASYCGVSYTSLRRQYQAPVQSNLRPVSAYV

SEQ ID NO: 201432 - protein, 355 aa, Zea mays
  unsure (1)..(355): unsure at all Xaa locations
  Clone ID: MRT4577_115290C.1.pep
MVEVMMVPSSHGCGEGGGVGSDGKAEDGQQQGQGQGQVLALLLAALRKSVVLPCQMADADDPSGAAWGMEIGWPTDVRHVAHVTFDRLHGFLGLPVEFELEIPGQVPSASASVFGVSPESMQCGYDDKGNSVPKILLLMQERLYAQDGLKAEGIFRITPENSQEEHVREQLNSGIVPDDIDVHCLASLIKAWFRELPEGVLDRLSPEQVLHCNTEEQCIELVKLLPATQAALLHWVVELMADVVEEEESNKMNARNVAMVFAPNMTQMSDPSTALKHACQVDDLVKNLILKTXLREREDDDAGAYSSFSSSLSSPGELERNDAMTNRDVNMIVAVRKTIMAVLTEDQEILTRPLH

SEQ ID NO: 201433 - protein, 85 aa, Zea mays
  unsure (1)..(85): unsure at all Xaa locations
  Clone ID: MRT4577_115291C.1.pep
SIASQPKVEEKKLTQAPEVEAPKIEXSFXSEDRIFASPLARKLSEDNSVPLSSVKGTGPDGRIFKAXXQYSSKGGFLVPCLSGGV

SEQ ID NO: 201434 - protein, 226 aa, Zea mays
  unsure (1)..(226): unsure at all Xaa locations
  Clone ID: MRT4577_115292C.1.pep
PFSLLPAVSSVEFSSPARRXTPTTPFIPAPHPWRLGSSFLGTPFLLPVVGPGTRGFPLGSTIWPPFFFQVQVPRTSCEPLCSYSSMAPPTARALLWSSAREESPMAGACRCCVSPCELELLPPSSHGFFLLAPSPMIFACRALLWPWDHLATSPLCPQGCLPERGMAGPALARAVSSPASMARRLCSPSTTPSLPAELPQPAVFXSSASLHSPXPLDAHTSEVLDV

SEQ ID NO: 201435 - protein, 98 aa, Zea mays
  Clone ID: MRT4577_115293C.1.pep
LVCHHSCILYIGSCQVGLQEEYIVCSNYRTWQNLIITGNSCTWVGYWRRLPEETTEAKLLMRYLVQLISCILCPCRLLYLTCVSNIFVNLKQLAHQQC

SEQ ID NO: 201436 - protein, 89 aa, Zea mays
  Clone ID: MRT4577_115294C.1.pep
LLCCCSVTVGQGYDLTETCAGAAFTEWDDTTCCYVKLVSWEEGGYKISDYPMPRGEDSGSHQVTPSPHVDFADRCLNSSGRATNNNLMS

SEQ ID NO: 201437 - protein, 57 aa, Zea mays
  unsure (1)..(57): unsure at all Xaa locations
  Clone ID: MRT4577_115295C.1.pep
MGLVNEGINMEEGTLGDLMEYRTVXGVAGPLVILEYSKGPKYPEIVNIRLGDGTNRR

SEQ ID NO: 201438 - protein, 53 aa, Zea mays
  Clone ID: MRT4577_115296C.1.pep
FGSSENLQKSFHKYLEIRGIKPRTTNFLHEYMINKDSKEYLVWLNKLKSFVQA

SEQ ID NO: 201439 - protein, 280 aa, Zea mays
  Clone ID: MRT4577_115297C.1.pep
MGFERVELRCPRELDPRPSWTLGDVLAELDALDATRRAAPPTPLKQTPDWANGGGEKAFVMRVDDDDEDDTEDEDDGTSGGKSRALVAKGARFSCNDLASSDSEDELDGQVAPYHLMEKRDLAKSILLELEREHHLKVQEEVRSKLASLEVCHQNEIRRTISAFVRLQKYAESRKEIDRRLDVHFQRRIAEVLDKHLSMVQRDHEQKSQIVERRIRDDAALEEAKRKEQAVKEEKLRRERAQQEAEARQKEAAKLAAEARKTAFEAAKKEAAEKEAAEKE

SEQ ID NO: 201440 - protein, 108 aa, Zea mays
  unsure (1)..(108): unsure at all Xaa locations
  Clone ID: MRT4577_115298C.1.pep
KRTRHLLRSCAAWLPVCVKACISREAHKDEPYTAPGGRCPSHLGHLPGDRAATTXTTAMGFERVELRCPRELDPXPSWTLGDVLAELDALDATCRAXPPTPLKQPPDW

SEQ ID NO: 201441 - protein, 163 aa, Zea mays
  Clone ID: MRT4577_115299C.1.pep
QIFYSLQYYVTILFCCSAEVLDKHLSMVQRDHEQKSQIVERRIRDDAALEEAKRKEQAVKEEKLRRERAQQEAEARQKEAAKLAAEARKTAFEAAKKEAAEKEAAEKEAAKLRDAAASQPSPNSQNNTAEGIKVFGDKYALEAESRRHALVQNQVPEKIHHNK

SEQ ID NO: 201442 - protein, 345 aa, Zea mays
  unsure (1)..(345): unsure at all Xaa locations
  Clone ID: MRT4577_11529C.1.pep
MLSHAPSQIPAASKPRLSSRRRSSRLGAKHLTATAAAASTLRSVSASRRGFVLFVPSLAAASAVLRPLPSAATEADDTESPAPHPPPTEESLSPQPAADAAETKPEASESAMSRVYDATVLGEPEALAGDARGRVWEKLAAARVVYLGEAELEPDPDDRVVELEIVRGLAGRCADAGRGLALALEAFPCDLQQQLDQFMDGRIDGGILKLYTSHWSQELWQEYEPLLCYCRDTGIKLIACGTPLEVKRTVQVDGIRALKKAEREAYAPPAGSGFISSFMFGSGRSLIDKISSIDDSLFGSTSYLSETGRVVDDYTHFPXITRELSDGDGSRLLIAVTGASHVMYG

SEQ ID NO: 201443 - protein, 97 aa, Zea mays
  Clone ID: MRT4577_1152C.1.pep
PQRTEQVNGQSSYDAVSETRYLVALLILICACCRCSTCTCCGCGSAATPAAVSSPRYMIERRRRSLLLLHSIVVMVISSKRSGKEGCLPQSSGDLLS

SEQ ID NO: 201444 - protein, 128 aa, Zea mays
  unsure (1)..(128): unsure at all Xaa locations
  Clone ID: MRT4577_115300C.1.pep
MAPSVVTLKKKSVVKATPQKFFIDYSGPANDKIFDAAAYEKFLVDHIKVEGKTGQLGEDVKLSREGAGKLSVXSSVPFSKRYLKYLTKKFLKKNQMREWLRVVATSKDTYTLKFFNLQFDGANDEDAE

SEQ ID NO: 201445 - protein, 647 aa, Zea mays
  Clone ID: MRT4577_115301C.1.pep
MAHSTSSRFWPRSSRRQREATASVRSPSVRGAQTDDLRAELNRRSTGEGARVSLKRARERRQNIEGRNLDRDFAAKAPYTPVGAWSQTGVPLACVGCAALADHLRAASWPPKFWPHLLEKYDGTSNPSKFLQVYVTAITAAGGNTTVMATYFHVALFGPARTWLMNLTPRLVYSWEELCAWFVPNFASAYQQHGVEAHLHAVRISLPEAPTPVKTTRRTSGGPRFPRSTKLKHAFLRRPFRTSHGSKLQTGTCRSDHSQRQGFPCQVRIGTLGRRLAPRQVPHQEVLRNSPPAGKDPPSLSDNNFQLTHPYGFHLSDMATSELNSQACSSGPLTRKWGDSDPGEVASQGLLTTFFRNAGIQPQHIKPASQAGGQQIPLHSLTSGTLAPFPQEWTTSTPEGPRNDKPRAAHQQRQPHQHRRRRPPLHRRLASSDNHPSMCTAAGRTSPPSPYGGRQQAIKAKEPEVRQQVALTVSPAEATTSAEGSLTNGGDHLSIDDSGHLCTSAVPANGGRTSAHEEVFAPVLTMGVRTRPSKNAAPTRTAYDVLYDLLVRLVPQEKPWVWPTRVRRDRRPCGGRTATLRPSGRRRRRRRPQSRPSRGARHAAADSTTDGERPSPPNTEGRSGSLPTRRQVLTRRTLLPSTDDEHP

SEQ ID NO: 201446 - protein, 128 aa, Zea mays
  Clone ID: MRT4577_115302C.1.pep
MAPSVVSLKKKSVVKTAPQKFFIDYSGPANDKIFDAAAYEKFLVDHIKVEGKTGQLGEDVKLSREGAGKLSVTSSVPFSKRYLKYLTKKFLKKNQMREWLRVVATSKDTYTLKFFNLQFDGANDEDAE

SEQ ID NO: 201447 - protein, 126 aa, Zea mays
  Clone ID: MRT4577_115303C.1.pep
SGRSKTDLLTTLSSIPTCLFTTKIRPYIHIYAENGRTGPYTLLKHKHGEKQKLHHLGGAGRLHKSKTDEEPERLAHDTLAIVQGHSTGALHHLPYRKEMTVPGRPASQTWSSPGPVPSQESVEEPP

SEQ ID NO: 201448 - protein, 62 aa, Zea mays
  unsure (1)..(62): unsure at all Xaa locations
  Clone ID: MRT4577_115304C.1.pep
LVCCVESSNVMEYPPFFANMVIAFLSYTFCSCNSCNSPRLSDANVYTQASSERRLVMXKVNP

SEQ ID NO: 201449 - protein, 76 aa, Zea mays
  Clone ID: MRT4577_115305C.1.pep
TPGARRGGGAEEKKTGPATPQGGNETKQHGADKRAHQGAERDPADRQPSARRHPHDTNREKSPAPPRKGKSSTLRP

SEQ ID NO: 201450 - protein, 71 aa, Zea mays
  unsure (1)..(71): unsure at all Xaa locations
  Clone ID: MRT4577_115306C.1.pep
GSGPPXGFFFFFXXXXRERRXEXMHETCKXTRLIQARXSPSLXISYTCSGLTMFGFRANFLQIPNNIISDQ

SEQ ID NO: 201451 - protein, 455 aa, Zea mays
  Clone ID: MRT4577_115307C.1.pep
MSISVNGQSVVPPGFRFHPTEEELLTYYLKKKVASERIDLDVIRDVDLNKLEPWDIQEKCRIGSGPQNDWYFFSHKDKKYPTGTRTNRATAAGFWKATGRDKAIYASPGARRIGMRKTLVFYKGRAPHGQKSDWIMHEYRLEAPVDAGAGAAHHLLLPAAEHPPYYTSPPQAPSSTTTAERKLKEGAPAGLGTDEAKQVAWTIRGAAGDQAAQEQEGWVICRVFKKKNLVHHGQSSGVKQQAEGDDHAASHTAAAAAHMDESSPSQCSSVTVISDHVHANVNDKQQQAQASLLMMHTHHSASSDDDALDHILQQYMGGGRQAPAADAKPALLELDHRLHHHHLAAAPTNTRAAAGFYGKFMKLPPLEHAGLPPSPPPGAREYGAAAAAGWDDDDDALDRLAAYDHLNGLSNDASKNMAAFFDVEPSAAAAAVDGDLWSLARSVSALHADLTMNNV

SEQ ID NO: 201452 - protein, 381 aa, Zea mays
  unsure (1)..(381): unsure at all Xaa locations
  Clone ID: MRT4577_115308C.1.pep
MSISVNGQSCVPPGFRFHPTEEELLNYYLRKKVASQEIDLDVIRDVDLNKLEPWDIQEKCKIGSGPQNDWYFFSHKDKKYPTGTRTNRATAAGFWKATGRDKAIYNAVKRIGMRKTLVFYKGRAPHGQKSDWIMHEYRLDDPAAAAAAGSGDAVANDDAAATAAAAAAASSDGGQEDGWVVCRVFKKKHHHKESGGGGGNKHGSSNSEHGHGGAGKASAAAAAAAHQHQHHGGLQYSSSDEALDQILQYMGRSCKQEHELVSPAPAPPGRAAASRYLRPIETVLGGHAFMKLPALESXVPAPSPPPGAREYAAAGWDDDDALDRLAAYDHLNGLSNDDASKNMAAFFDVEPSAAAAAVDGDLWSLARSVSALHADLTMNNV

SEQ ID NO: 201453 - protein, 89 aa, Zea mays
  unsure (1)..(89): unsure at all Xaa locations
  Clone ID: MRT4577_115309C.1.pep
LLIQPLWLXLMHVRMMLLSYAXLVXGSLLSAGLLIIRFRRRLGSFPLKKNDLLNTFLFSEIVYLYAQGSAIKNTLYSXLPNYLKGEATE

SEQ ID NO: 201454 - protein, 77 aa, Zea mays
  Clone ID: MRT4577_11530C.1.pep
MGCDDKCGCAVPCPGGKDCRCTSGSGGQREHTTCGCGEHCECSPCTCGRATMPSGRENRRANCSCGASCNCASCASA

SEQ ID NO: 201455 - protein, 81 aa, Zea mays
  Clone ID: MRT4577_115310C.1.pep
VYPCPILVEQKPPRSRLLVSQSLCCTHTTFTSSPKSVFRCFAGENLESAPPPINQSSKLSYIICWEKQPNAMEEKTGVLYE

SEQ ID NO: 201456 - protein, 61 aa, Zea mays
  Clone ID: MRT4577_115311C.1.pep
LARRFSGKRHMSIVLVSPRPKQWLALSPCAACLIPRKRFPSCAPCAASFPVKFYGRARQGG

SEQ ID NO: 201457 - protein, 93 aa, Zea mays
  Clone ID: MRT4577_115312C.1.pep
LLTRRELATVQGDLIWQVVRKNNFFLVKHIGNCTAEVQFNKEPNNLYNIHCSKHLGVANKNTVTIQPAANDSARSLSTTTTKKLNAPAKLSHK

SEQ ID NO: 201458 - protein, 96 aa, Zea mays
  Clone ID: MRT4577_115313C.1.pep
SPRTSGSPSDHCAPSSTCRCPTRPPQALGPPSCPRRPPARSRRAGPEPRRSRRGGSCRGRRPGRHRRRPGRASRTRAASGRGRPGRRTVRVLDPES

SEQ ID NO: 201459 - protein, 197 aa, Zea mays
  Clone ID: MRT4577_115314C.1.pep
MVDVSRVQKELTECNRDREVSGVSIALHDGANISHLTGTIAGPADSPYEGGTFVIDIRLPGGYPFEPPKMQFITKVWHPNISSQNGAICLDILKDQWSPALTLKTALLSLQALLSSPAPDDPQDAVVAQQYLRDYPTFAATARYWTEAFAKSASTGMEEKVQKLVEMGFPEDQVRSALKSVDGDENMALEKLCSGSG

SEQ ID NO: 201460 - protein, 197 aa, Zea mays
  Clone ID: MRT4577_115315C.1.pep
DLENRYNAGFWRVWGPNSKNCLRFYQFIRESTLAELDIVADSPNYDGKLLPIQTKFELTREIYTSPVSEYYYGAINNYDQNGIQTERQIRQPHVMDFFNTMAMFTSYNRREYYWSGLEMTAYFTGFAGPQVTFPLAGTRGDAAPPFNVRSVNDGMYRILSAPFYSAPFLGTFDECYPTYLDQKIDEIKLKAFTRYQI

SEQ ID NO: 201461 - protein, 73 aa, Zea mays
  Clone ID: MRT4577_115316C.1.pep
QLAGLYNKRGELQRPGAHPVGDVWHHLLRQAYAAQDGQASPIALVPGRAAARTVATKPVVIGHGARREGVTLA

SEQ ID NO: 201462 - protein, 51 aa, Zea mays
  Clone ID: MRT4577_115317C.1.pep
GSRKLIGKKEGYFDANKGGGHPYSYPIKFLTECMDMEDFTGQASVFLDESS

SEQ ID NO: 201463 - protein, 92 aa, Zea mays
  Clone ID: MRT4577_115318C.1.pep
DGTPFMTCTAQRRKVDVRCRPRPARVAANCDVARAAMRITTLVVDKIISPAGRCAHWSRNQCTSPPSLAVSEFIRSSPRPSRCPAGWCWLWR

SEQ ID NO: 201464 - protein, 111 aa, Zea mays
  Clone ID: MRT4577_115319C.1.pep
VKHTDSDPVTKRAWPPPPAATTHQPAISWRASASCLTTHRPLRPRGLRTGATSTDKRWRGCPARVFLYGVLTTLPEIHQHAHIKCRIYICPVHTFTYQEVQILLHNQRVLG

SEQ ID NO: 201465 - protein, 77 aa, Zea mays; identical to SEQ ID NO: 201454
  Clone ID: MRT4577_11531C.1.pep

SEQ ID NO: 201466 - protein, 69 aa, Zea mays
  Clone ID: MRT4577_115320C.1.pep
DLPYAGSKCTFVLRLIDRPKAYNFWHGIYLARPNMWAVPSPQVKLMGRPGTAHLTKAHESPQNIDLVFN

SEQ ID NO: 201467 - protein, 62 aa, Zea mays
  Clone ID: MRT4577_115321C.1.pep
SWGVDASALSCTHIDEFFPPLRSLRAGMLSMSSPNNVVLLAQLLGAERVRGGCLLGSRSAYY

SEQ ID NO: 201468 - protein, 136 aa, Zea mays
  unsure (1)..(136): unsure at all Xaa locations
  Clone ID: MRT4577_115322C.1.pep
MAWRANLFWSLKKNRVLFCQSSPARAPARXFVKKKYGEIKGRNPPLPFLVPEGSGVPPQLWGRYKMGVEKRVNLDGLPEAQIYKKLEELSKAGESFKTQKFWDSIPPCLTFPKKKTQMGEPMVPQRYLELGPEISL

SEQ ID NO: 201469 - protein, 80 aa, Zea mays
  unsure (1)..(80): unsure at all Xaa locations
  Clone ID: MRT4577_115323C.1.pep
TVSYDYCCWRSLCLTGVCMGVAAGNAQMLASPVRSSSCNTTHXSVXTDRLFXRSLRAVTDSIHDGLPPSFLWENSFMGIL

SEQ ID NO: 201470 - protein, 123 aa, Zea mays
  unsure (1)..(123): unsure at all Xaa locations
  Clone ID: MRT4577_115324C.1.pep
MEAMYYVLCGAAARXKARIEIANNDKDRGNASSAATPTRDNYAVKYSLMMLGHWLQGPXVYYLYSQHDYHNVDIGHLFINDLASYMRFRMIDYSHAXDKEDRKRAWVCYCSMYILSWITKNCI

SEQ ID NO: 201471 - protein, 45 aa, Zea mays
  Clone ID: MRT4577_115325C.1.pep
RAELLSWRAFHNSFCWLQKELKNVLGHAATSVRQHAVATGQRYCS

SEQ ID NO: 201472 - protein, 79 aa, Zea mays
  unsure (1)..(79): unsure at all Xaa locations
  Clone ID: MRT4577_115326C.1.pep
DNRAAQKRTVPANASGKNKESGKSSVLLDVKPFYDDTDMAKLEEAVRSVQMERLLXGASKLVPVGYGINKLQIMMTIVD

SEQ ID NO: 201473 - protein, 76 aa, Zea mays
  Clone ID: MRT4577_115327C.1.pep
KVLKVTPYRVKWGPSGDRIGNSGGEPWVGPFKRHLGLGKSTQGPGWNNCYRAGYIRPGQKGEWAFLGRGTPVPLFP

SEQ ID NO: 201474 - protein, 122 aa, Zea mays
  unsure (1)..(122): unsure at all Xaa locations
  Clone ID: MRT4577_115328C.1.pep
PSFPPFFWGHHPPPEPISPPGPFSSPGPPPSPWASDSAPSKKFELPPXLTPKARKNSRPPPFRPIMAXPRFGRPXPAPPFYXFSGPAPLYXEFCFPPPPPPLEPAQICPVFVYSKPPPQVIN

SEQ ID NO: 201475 - protein, 53 aa, Zea mays
  unsure (1)..(53): unsure at all Xaa locations
  Clone ID: MRT4577_115329C.1.pep
LXGXLXXTDANSLPYHXNPAYHLAVXXLXQAEFXRLXDXXCXXTXGXWRXXEK

SEQ ID NO: 201476 - protein, 265 aa, Zea mays
  Clone ID: MRT4577_11532C.1.pep
MDRYQRVEKQREEAPIKENEIRITTQGRMRNYITYATGLLQDKGSDEVVFKAMGRAINKTVMVVELIKRRIVGLHQNTTTGSTDITDMWEPLEEGLLPLETTRHVSMITITLSKKELDTSSIGYQSPLPADEVKPLVKYENDEDAHSPGGRGRGRGGRGRGRGEGRGGRGNGFNDYADAGWEEDHTPAYMGNGYARGRGRSFRGRGRRGGYNNQPEYQQDGGYYEEAPVHAPALGRGRGRGRGPFRGRGRGGNANGVMHAAADSA

SEQ ID NO: 201477 - protein, 104 aa, Zea mays
  Clone ID: MRT4577_115330C.1.pep
LRVRMICVTNGLPCRLIQRFAKARRGKLYGTTWCIGPDELRRGNTSILTTTTCDALMTYALGLVHIQQDQEAENLGLDVMHAQLGTIRRSQAPKRHGPHLPYHH

SEQ ID NO: 201478 - protein, 80 aa, Zea mays
  unsure (1)..(80): unsure at all Xaa locations
  Clone ID: MRT4577_115331C.1.pep
SSSCCLXXRFSFPPXWSRGXRSLVPXXSRAXPCXCSSLXCLLXGFAXLXXXWXRFCVXFSSVCAFFSFPXXXRXVSXXXA

SEQ ID NO: 201479 - protein, 149 aa, Zea mays
  Clone ID: MRT4577_115332C.1.pep
HASGTTIPASKPASNQEPGRCGDAGDEAKKKEAALASSRLLDPAFKPSKLSQDRLDKFKELHKKRLQITEKPKYKRKLKGTAGRSTKVTSDYKFTNTDASADSSPRDVHHTSSITGIQGDPASGLSSRNKRKLHWGLDIKGRWGRKANM

SEQ ID NO: 201480 - protein, 58 aa, Zea mays
  Clone ID: MRT4577_115333C.1.pep
NLAETRAEFAERSVAKLEKTIDDLEDELYAQKLKYKAISEELDHALNDMTSIASLQPT

SEQ ID NO: 201481 - protein, 84 aa, Zea mays
  Clone ID: MRT4577_115334C.1.pep
EPGFTLEAGGGREPNFADAPRILVIDLLELLWGAVCPAVIHNCGCTPIFLCIKVGYWSATNHYCGDWGQGAPSRSSGGGILGSG

SEQ ID NO: 201482 - protein, 76 aa, Zea mays
  Clone ID: MRT4577_115335C.1.pep
AACTGSSRRSGACPSPSSPPFLKAGGMPARVLPAPGPVVIFWSSRALWNMTVKPSQVGGFFSSHSPSLGIGCPWPL

SEQ ID NO: 201483 - protein, 349 aa, Zea mays
  unsure (1)..(349): unsure at all Xaa locations
  Clone ID: MRT4577_115336C.1.pep
MRSHRLSLRSSQLRLGGRSEHNKRPQPQGGNSGTCPMHPNSRHSASECREIIKLAKRVSERCEQSSKDGSPPRRRPGKERVDGGEVAAGERELGYQSPEGVLKDIFTGDSDSGDNGDRHKKLYVMYGRSWELTSRRNVKSLRREVLSAVPRVPKAAPHQRWRSTTVSFGASDCLENMAGASVLPLITAPIIANMRLHHVLIDRGAGLNVISHAAFKQLTEENFRTENVQFDVAEVNLPFNAIIGMPTIYRFMAIAYYGYLVIKMLSLAGVLTVRGDCAAALAAVEKXTPWRQKLLARTTEGRTPRPXTKAPTKVPKVRPSGADDIPVKAVQLSAGSSQTTRIVGDLEEK

SEQ ID NO: 201484 - protein, 277 aa, Zea mays
  unsure (1)..(277): unsure at all Xaa locations
  Clone ID: MRT4577_115337C.1.pep
MHIRATRYWRRGAMPGMDAFAAVSLLATLFLVRAAAAHPPAAAADAMTPTDYWRAVLPETPMPRAILDLLTTSTGEEGSRKVTTSNGYQGHDLRTVSTSYASQDGDNSWKATMSYGFQSGEGSRKVTTSYPYRGQDLRMVSTSYVSQDEDNSWKVSMPSRFQVGEGSRKVTTSNGYQGHDLRTVSTSYASQDGDNSWKATMSYGFQSGEGSRKVTTSYPYRGQDLRMVSTSYVSQDEDNSWKVSMPSRFQVGEGXRKLTTHSNHREDSGRRIYGIQM

SEQ ID NO: 201485 - protein, 130 aa, Zea mays
  Clone ID: MRT4577_115338C.1.pep
HWDLEPAHLHVRILPPLLTLPRLLEERRATDDLLKQVDYLLRNGWIPCLEFSKVGFVYRENSTSPCYYDGRYWTMWKLPMFGCNDATQVYKELQEAIKSYPDAFHRVIGFDNIKQTQCVSFIAYKPPGSD

SEQ ID NO: 201486 - protein, 82 aa, Zea mays
  Clone ID: MRT4577_115339C.1.pep
LHAYTTLIARLPALNKTYVELSIKHINYKPFLFFPQRFYYNFFKLLLRAYRLFLSTGTLEAIGPYIFGAGACPTARSETGGV

SEQ ID NO: 201487 - protein, 141 aa, Zea mays
  Clone ID: MRT4577_11533C.1.pep
TGQRAPYPCLCFLSAQRSSHPSLGFSTPLAHASIATPARVAHRRGASATMAVIRQPDGGCTQHQCISCYAKHHPGKGASKRSQVARSSLTQATFRHASAPPLGQHSLSDLDLQASGSAAPEDSHPLPINCPHLQSTCLDAY

SEQ ID NO: 201488 - protein, 105 aa, Zea mays
  Clone ID: MRT4577_115340C.1.pep
QQGSCDTRLTLDKKPDSGVATPSSSSYGSHRASDYLVELVRVSQFVNHVSGLMNGLTRYINRDDFAVSRIAISVISSMKGIVRYTNYIGPIALVYMCRGGRYNIY

SEQ ID NO: 201489 - protein, 78 aa, Zea mays
  Clone ID: MRT4577_115341C.1.pep
PQRPEWRHLFHVLPFLSRGGLCAAFSARAHSGYRASLLRCSADVDHASLFTRLGRIINDKDHTYVQNIICHLYANGQN

SEQ ID NO: 201490 - protein, 113 aa, Zea mays
  unsure (1)..(113): unsure at all Xaa locations
  Clone ID: MRT4577_115342C.1.pep
HASDQVLLLLSFLTTLWRSIVAVEKQNPRYNPQLAWATTNNSKNNAFASYHKILHSNDITDRDTEKSRAFXLXTSYTKNSNLNHIYNKNCKELNRHNITDNHTPYKAAESTKT

SEQ ID NO: 201491 - protein, 48 aa, Zea mays
  Clone ID: MRT4577_115343C.1.pep
ALGIDPAISVQSGAMIACKLAAMAPHRLCSLALLNVTGGGFQCFPKVL

SEQ ID NO: 201492 - protein, 37 aa, Zea mays
  Clone ID: MRT4577_115344C.1.pep
LPIVTHTNLEKNYHWCSVLLLEYTAYIRCLKLNMVHV

SEQ ID NO: 201493 - protein, 135 aa, Zea mays
  unsure (1)..(135): unsure at all Xaa locations
  Clone ID: MRT4577_115345C.1.pep
QLRRQGWAAIPGVNKGQIGGDFPKGFRRNIKYNFCLNLVRQVQFFQKMDNLGFKTICNGGKSLIFPKGKTIVGKGNVVHRMLLIGRGHLHCSQLLRNGPTSSXTLGPGNLRGNKLFAGCLRRPFLERFPTLLGTL

SEQ ID NO: 201494 - protein, 109 aa, Zea mays
  Clone ID: MRT4577_115346C.1.pep
MDKGSVVVPPAPAAAAAKKAKRFEIKKWNAVSLWAWDIVVDNCAICRNHIMDLCIECQANQASATSEECTVAWGICNHAFHFHCISRWLKTRQVCPLDNSEWEFQKYGH

SEQ ID NO: 201495 - protein, 70 aa, Zea mays
  Clone ID: MRT4577_115347C.1.pep
IFAPCAKKTKKWLGYGKKGFRNSFFSFYGPSSKQLKSPQFQKKRFFGQVFLKKFCPVLKKFVFKTFVEKF

SEQ ID NO: 201496 - protein, 100 aa, Zea mays
  Clone ID: MRT4577_115348C.1.pep
GFAVNADIFHDTHVCELTATRRTRREMLEGSENQRRRSSIHELLTYRSLPLHIDRGRLRIPGKVRLPRQSFLLCDHELRVHKGAAATTLDEHIYISLHIA

SEQ ID NO: 201497 - protein, 99 aa, Zea mays
  unsure (1)..(99): unsure at all Xaa locations
  Clone ID: MRT4577_115349C.1.pep
LWGVLSPLCSALGGCGGWGGPSGLWGGPSVALLVPPGRLASWVGRPAGSVPSAVFASGLLLGXVGAVCRRRCRSLCFSPLFCGGSGPLGWAGCCLLFGL

SEQ ID NO: 201498 - protein, 112 aa, Zea mays
  Clone ID: MRT4577_11534C.1.pep
IRLLLYQRADDAVPPYQGHTVADFTRRISDWRNRMSGCGAKDEGVKVLDRRQGAERRTISNILGAGEESLGFQRTPAEVLRILYGSRNEQIPGGFLPRGANGTIARGFFQLA

SEQ ID NO: 201499 - protein, 58 aa, Zea mays
  Clone ID: MRT4577_115350C.1.pep
IYIYIYIYIYIYTLIKRQPDCTNTEKWFLFFLAESHRFQLGWHATGARNRAATHGSKH

SEQ ID NO: 201500 - protein, 155 aa, Zea mays
  Clone ID: MRT4577_115351C.1.pep
RTRGRTRGFFFFFFFFFFFFFFFFFFFFFWKPLFFWGFNRFFGLKVYRAINLPRGKGNDPHHANLLTTPNWAPPRPPPQWSGPCLPEGSRGPRTPPATNATWGSSPSQGPWRPVRPGTGGLANRQQAIGLQGQVHRQDIAERPPKLLVLVKTNNL

SEQ ID NO: 201501 - protein, 59 aa, Zea mays
  Clone ID: MRT4577_115352C.1.pep
GCLHLLDLGCYTNRQLLQQLISSAASQNELKAANKQKLLFTSLSDKLLFQQAAAVPNSP

SEQ ID NO: 201502 - protein, 147 aa, Zea mays
  Clone ID: MRT4577_115353C.1.pep
PRVRLGANHGGNSTEGGISSGDSISSSLSGISYQDVSSACAYGASSHHHHQRRRTSEEKGAEQLRPSKPGPEAEKVGLRHEAVDGRRAAEEWMVDYALRKEVKRLARAQKRKVEMLVQAFESVLPTVAIASEKKPMHHDGSRTYTGT

SEQ ID NO: 201503 - protein, 118 aa, Zea mays
  Clone ID: MRT4577_115354C.1.pep
AGTTASLPLPGLRLPRDGRHGGDDGRRSELSRAVVEQRCVVRHEDGRLAGVAFRRDGRRRVPEQREEDPQGARPDSQQACREDDDRAAPERLASRRPAGGGGGGGNRSYHCRCSSSCT

SEQ ID NO: 201504 - protein, 70 aa, Zea mays
  Clone ID: MRT4577_115355C.1.pep
SSKQESTRYHHLRTHTNPACHPSSHGAQRELSPLRCRLDFVSASHIRGHPLHLTSPIWSIGILTPRESLW

SEQ ID NO: 201505 - protein, 64 aa, Zea mays
  Clone ID: MRT4577_115356C.1.pep
FYNLKPPDHVKTEIPTRRFRLQGEALSTQTCMFSGGSGRVGGRVGGRVGGRVGGRVGGRVGGPV

SEQ ID NO: 201506 - protein, 90 aa, Zea mays
  Clone ID: MRT4577_115357C.1.pep
SSALLFFGDGTIRFPATQKNEVLSFSFILFSASLPPKIFWLNCGLGAHCYNPVKRRGEGGGISPPLFVTGQNSGLVITSPQIKNQEGLCP

SEQ ID NO: 201507 - protein, 136 aa, Zea mays
  unsure (1)..(136): unsure at all Xaa locations
  Clone ID: MRT4577_115358C.1.pep
RCCGLVASGPGAGGSAVMGAAGRLAGXGRGLMSGSRSVEAGLLFPVGRLGRWAGEGRFAPRVCGGAPVFLGAVLSSLAVGGLWLAXRCARASLWSRFVPRRVLLAFRAVVSLCGLGSVWALLPGGLLPFLPPGLLP

SEQ ID NO: 201508 - protein, 75 aa, Zea mays
  Clone ID: MRT4577_115359C.1.pep
TLCKHPDLTSFLLFQSTLSTFIKDLTFIFWTLQSFLSNWLPNIHQLLPSTHIVLTKLSKNFYNFWCYILIFFPDG

SEQ ID NO: 201509 - protein, 57 aa, Zea mays
  Clone ID: MRT4577_11535C.1.pep
QAIHKSNTTPFHQHTTITQTGRLYKKTRARKQLPQNHVNYKYIISNHQRKSILKLPS

SEQ ID NO: 201510 - protein, 59 aa, Zea mays
  Clone ID: MRT4577_115360C.1.pep
ALSDSHSSQHRPMTVQSHSHLIEEDTLSNAIYLHLYIDQPYSVGQLLRLKPNISTPKFE

SEQ ID NO: 201511 - protein, 147 aa, Zea mays
  unsure (1)..(147): unsure at all Xaa locations
  Clone ID: MRT4577_115361C.1.pep
MPLFASLQIDRYKRPMVSGSRLQCSFLPEKXNXGPTSHDGGPRPPSGAMVHRGSAYTDECERTDKWIXTPGLDGILLMDYANTTSGKLLTCIHLNTTDVKREAYRKLLLTAPDLGHNVSGAVLLDETMNEATDNALNILDILAEKAI

SEQ ID NO: 201512 - protein, 138 aa, Zea mays
  Clone ID: MRT4577_115362C.1.pep
IYVINPRPSDHDPMDLIPARSATLYSNLRRSYEINGQEHYQETFACARISVASFLIYGCPGVFNLSPPRPRHRAIPGSLFPAGQPALCPAETIQWSPSPSFVGAPAPRPLPTHAPATSNGSPMYRIKRKTDSPQMGHR

SEQ ID NO: 201513 - protein, 48 aa, Zea mays
  Clone ID: MRT4577_115363C.1.pep
IYHHCLTYSYTLIINTNFLDTYTYFLHYYFLQGAMSTHNNDCFFFSGL

SEQ ID NO: 201514 - protein, 72 aa, Zea mays
  Clone ID: MRT4577_115364C.1.pep
FGGKIGGGWSPPQRPFSQGMFPKKRPFRGGFQPRNNFGEGLGSMSWGRPPPGLVSFKNPGAPGNFKDWGGFC

SEQ ID NO: 201515 - protein, 34 aa, Zea mays
  Clone ID: MRT4577_115365C.1.pep
WGYICTLSIVLLHFANIQLLNDPLTYFTPTLICV

SEQ ID NO: 201516 - protein, 59 aa, Zea mays
  Clone ID: MRT4577_115366C.1.pep
YFQHSKTHLAIRTSNDLTPMATKYISSSCSDCPFSELNRCIHYFIVNTCLHCLFTTIYS

SEQ ID NO: 201517 - protein, 587 aa, Zea mays
  Clone ID: MRT4577_115367C.1.pep
MAMIDEPLYPIAVLIDELKNEDIQLRLNSIKKLSTIARALGEERTRKELIPFLSENNDDEDEVLLAMAEELGVFIPYVGGVEHAHVLLPPLETLCTVEETCVRDKAVESLCQIGAQMKENDIVDWFAHVVKRLAVGEWFTARVSSCGLFHIAYPSAPEQLKAELRTIYGQLCQDDMPMVRRAAASNLGKFAATVEQSHLKTEIMSMFDDLTQDDQDSVRLLAVEGCAALGKLLEPQDCAAHILPVIVNFSQDKSWRVRYMVANQLYELCEAVGTEPTRGDLVSAYVRLLCDNEAEVRIAAAGKVTKFCKILNPQIAIEHILPCIKELSSDSSQHVRSALASVIMGMAPVLGKDATLEQLLPIFLSLLKDEFPDVRLNIISKLDQVNQVIGIDLLSQSLLPAIVELSEDRHWRVRLAIIEYIPLLASQLGVGFFDDKLGALCMQWLEDKVFSIRDAGANNLKRLTEEFGPEWAMQHIIPQVLEKINNPHYLYRMTTLQAISLLAPVMGPDITCQQLLPVVIASSKDRVPNMKFNVAKVLQSLVPILDQSVVEKTVKPCLVELSEDPDVDVRYYAHQALRACDQMVISS

SEQ ID NO: 201518 - protein, 150 aa, Zea mays
  unsure (1)..(150): unsure at all Xaa locations
  Clone ID: MRT4577_115368C.1.pep
WRVGKGKKKKKNTSLSGKSRIXTYKQKKRLPPPHPRRRGKKNTTIRGGGRKRKKKKKIGGGVGKKKKILWGGGSFWGEKKKKTKNKKRGKAQKKKKGGPPFVGPKKKKKKTPGIFPPPPAGQKKKLFGFPRIKKKNFFPFLPPPSGPEAQ

SEQ ID NO: 201519 - protein, 49 aa, Zea mays
  Clone ID: MRT4577_115369C.1.pep
TYYFVFWLPRTTVAGTFIIYPLPFFHSIFFFHISHFVLLNSLKIKALFF

SEQ ID NO: 201520 - protein, 246 aa, Zea mays
  unsure (1)..(246): unsure at all Xaa locations
  Clone ID: MRT4577_11536C.1.pep
MATNGYSNGGSTKGKPIKCKAAVAWGPGEPLVMQEVEVAPPARMEVRVKVLYTSICHTDLSFWRGENERQRRFPRILGHEAAGVVESVGEGVEDLAPGDHVVPIFNGECGTCAYCHSSATNLCGTYRVDAFKSTMVSDDGTRFSVVNTSGDTVPVYHFLNTSTFAEYTVLDAACAVKINPAAPLQKMCLLSCGISTGVGAAWNTANVSKGSTVAIFGLGAXXGLAVGEGARIRGASRIIGVDITLK

SEQ ID NO: 201521 - protein, 78 aa, Zea mays
  Clone ID: MRT4577_115370C.1.pep
PTQMLPRARFLLAHTSSSGAGKEAPMSMASPGAGGMRKRGSSTALSLLLEERRSARGEQRPWIRCNKKRNYFQKPQCW

SEQ ID NO: 201522 - protein, 100 aa, Zea mays
  unsure (1)..(100): unsure at all Xaa locations
  Clone ID: MRT4577_115371C.1.pep
CMMLHLGNIHFQKVXQSIAEACSSRKITSGDSNGLLSTAYRHGVPSLRSNGQRTAGVSLGHQQRRQFCPSHHRRSDGLLVLAAAGYVLRLQCKLLLGRVS

SEQ ID NO: 201523 - protein, 44 aa, Zea mays
  Clone ID: MRT4577_115372C.1.pep
KYFVFKISILCSLGIIFTTLSVGRRVVDNTITLHLSPWLYSLLD

SEQ ID NO: 201524 - protein, 97 aa, Zea mays
  Clone ID: MRT4577_115373C.1.pep
VRTSTVCCGSRRKTFITGRVVGAGTHRRYGSGRSGAEIGHSTASPLMRRRRSNVRASCRRRSGGWAVRCTGPTMVRFPVPSPNVSFFPPGELPELDC

SEQ ID NO: 201525 - protein, 493 aa, Zea mays
  Clone ID: MRT4577_115374C.1.pep
EDTPQGKTIFTSYGTTLYQMFVLFTTSNNPDVWVPAYKSSRWNALFIVIYVLLGVYFLTNLILAVIYDSFKEQLAKQLAQIDSIRKSILQKAFDLIDTNGQGYLNKEQCISLLDELNKYRSLPKTSREDFELIFSELDRSGDFKVTSEEFADLCNTIAIKFQKEPPPSYLEKYPSFYHSPQCERLKSFVRSRLFEYIVVFVLLVNLIAVVIETTLDIENSSSQKVWQEVEFVFGWIYVVEMALKIFSLGFGAYWMEGQNKFDFVITWTIFIGETLTFAFPSTLPFLSNGEWIRYLLLGRMLRLTRILLQIRRFRAFVATFFTLMSSLLPYLGTRFCILCVYCSIGLQFFGGIVYAGNLKLEETDLFGNDYLLFNFNDYPSGMVTLFNLLVMGNWQVWMESYAHLTGSSWSLVYFISFYLISVLLLLNLIVAFVLEAFFAEMELEKAGEADTQDSTPQGRNKRRSMRARTKGTMVDILLHHMLSNELDGSQNSD

SEQ ID NO: 201526 - protein, 64 aa, Zea mays
  unsure (1)..(64): unsure at all Xaa locations
  Clone ID: MRT4577_115375C.1.pep
RANAKKKKKKKKKKKKKKKKKKKKKKKKGGEKKKXLKKKKKKKKDPKKKSFLLPLGEKIKPGSF

SEQ ID NO: 201527 - protein, 157 aa, Zea mays
  Clone ID: MRT4577_115376C.1.pep
PAGSRESSKPQALKETQESPRDPKRGGEIEMADVGSLERMGRELKCPICLSLLTSAVSITCNHIFCNACLTESKKSASCCPVCKVPFHRREIRPAPHMDNLVAVFKSMEAAAGISVVSTQLTPAPKAAECGEYTAGKPRRSNKKKLASEKKKKKRPL

SEQ ID NO: 201528 - protein, 122 aa, Zea mays
  unsure (1)..(122): unsure at all Xaa locations
  Clone ID: MRT4577_115377C.1.pep
RCFVGGLAWATSNESLENAFXASWGEILECKVITDRETGRSRGFGFATFSSENSMLDAIENMNGKELDGRYITVNQAQSRGGGGGGCGYXGAAVARGYRRGRPDRVHGSGGGYGRRHVVEGC

SEQ ID NO: 201529 - protein, 122 aa, Zea mays
  Clone ID: MRT4577_115378C.1.pep
YPLRPPLSNSYMPPSPSSRCCRCDCYCYSTRHHAGHGPATGFRCWRPPPPRPRRAQPRGAGIRHGLSSRAGPRPERRSGRAASGYRQRRERAGLGLVPVGGWGGRREGGLGDGGLRTRRAHG

SEQ ID NO: 201530 - protein, 123 aa, Zea mays
  Clone ID: MRT4577_115379C.1.pep
GHGTRETQHGNYSTPDKGQTRSGTRTDPPTGAEKGSTPKPPRGREKTRKSPGLETRTARRPRGRPPHHESAGITKPSAKKPRGGLPRGAKAQRPHGPNRQAQRAGTVPHDLNDAKPHAEPREP

SEQ ID NO: 201531 - protein, 191 aa, Zea mays
  Clone ID: MRT4577_11537C.1.pep
PVPTIPEDGYTLIALFGIKDPVRPGVRDAVMTCMAAGIKVTMVTGDNINTAKAIAKECGILTEDGIAIEGRELHDKSTDELKEILPKIQVMARSLPMDKYKLVTSLKSMYQEVVAVTGDGTNDAPALSESDIGLAMGIAGTEVAKENADVIIMDDNFSTIVNVARWGRAVYLNIQKFVQFQLTSYIVALIV

SEQ ID NO: 201532 - protein, 115 aa, Zea mays
  unsure (1)..(115): unsure at all Xaa locations
  Clone ID: MRT4577_115381C.1.pep
PPSLAHAQVKKPKGGPGATGNPVFRGNTAKAGSQWTPATAGPAPPPRKEGPGXGKRAPPPPPKAGEKKKKTPSPPSLSDCPCRKETGSQTKGKKQKKKKKKPKIMKKKTPQTRGF

SEQ ID NO: 201533 - protein, 52 aa, Zea mays
  Clone ID: MRT4577_115382C.1.pep
INGDGISRVGKCKCQVIKIHARHLDEQRKNILILLFLGMMHVIIFLLYSQHV

SEQ ID NO: 201534 - protein, 82 aa, Zea mays
  Clone ID: MRT4577_115383C.1.pep
NPSFSPPPPVPCVELAFSFLFVWVFANQKFFFPKRFRFTEQSLTKFQTFLRFFIPKGPNVSGVFSQKSQGLSFENFRAGAGP

SEQ ID NO: 201535 - protein, 88 aa, Zea mays
  Clone ID: MRT4577_115384C.1.pep
RVTFKRSSFPFFVEVKKQKRFFNQGILFSPGPVFSPYWGGGGRGLTLFNPRFCFSPGSGWNLGLIWLKTQAPPPHLSLKHFLWRKNLP

SEQ ID NO: 201536 - protein, 95 aa, Zea mays
  Clone ID: MRT4577_115385C.1.pep
TCILRTAKGVWGFQDPGPPPIKGIRLRFAAGGKYSPWITQNILPQGRNTIPRGGYTRMGLKMIHKWFSLRSFHLSEGEPNGPSPLVKEATAGKFP

SEQ ID NO: 201537 - protein, 45 aa, Zea mays
  Clone ID: MRT4577_115386C.1.pep
RSTVFKTTIPEEEEEEEEAVGVVVEEELFHQQGTLRASNRSCAIM

SEQ ID NO: 201538 - protein, 45 aa, Zea mays
  Clone ID: MRT4577_115387C.1.pep
ERIKKTKDEKKAKKAEVTKSQKSQSKGAVQKGSKGPKLGGGGGKR

SEQ ID NO: 201539 - protein, 101 aa, Zea mays
  Clone ID: MRT4577_115388C.1.pep
NMHILEFRLLCPKLWQCKFGSQLRSELKFQFQSAQTDPHQFRGPLGQVADPHPPLGAYAKADLSVSLTLLVFPLLHVGFQELEREARELVRTRVLFGSLYL

SEQ ID NO: 201540 - protein, 150 aa, Zea mays
  Clone ID: MRT4577_115389C.1.pep
MSRRKTREPKEENVTLGPTVREGEYVFGVAHIFASFNDTFIHITDLSGRETLVRITGGMKVKADRDESSPYAAMLAAQDVAQRCKELGITALHIKLRATGGNKTKTPGPGAQSALRALARSGMKIGRIEDVTPVPTDSTRRKGGRRGRRL

SEQ ID NO: 201541 - protein, 265 aa, Zea mays
  Clone ID: MRT4577_11538C.1.pep
MASRLAAALLLAVVALLTSVAPLACGQAASAPSPAPAPPKTITAILSKAGQFTKFLQLLQSTREAEQITNQLKGKPSNGGLTVFAPPDSAFSALPAGTLNSLSDQQKTSLVQFHVVSAALPAAQLETVSNPLRTQAGDTGRGKYPLNLTADGSSVNVSTGVVNATLDATPLYAGDRLVVYQVSKVLLPWALYGPPVPAPAPSPAESKKKKKATPDAVADAPAAETAAGTTTASATARAGGTPAGVRAASSCVVALAAVAALWWAI

SEQ ID NO: 201542 - protein, 140 aa, Zea mays
  unsure (1)..(140): unsure at all Xaa locations
  Clone ID: MRT4577_115390C.1.pep
MRSVMAMHKTVICWAYSARRASSDGIPASAKTASQRRANAMPSTAISFPAAYSRASISSYAPASASSMSKXSLRHCPSAALALAPSAPAPAPGEPASSASASRTAPPALLTPRLAATLARPQASAPGLSRCLLSSDTQKP

SEQ ID NO: 201543 - protein, 150 aa, Zea mays; identical to SEQ ID NO: 201540
  Clone ID: MRT4577_115391C.1.pep

SEQ ID NO: 201544 - protein, 39 aa, Zea mays
  Clone ID: MRT4577_115392C.1.pep
QPLRFMPFMSAGRCVPCVQLNGPGFVLGRYRRRGYTLVG

SEQ ID NO: 201545 - protein, 45 aa, Zea mays
  Clone ID: MRT4577_115393C.1.pep
TIPRGAGPFLFLKKKKKKKKKKKKKKKKKKKKKKKKKKKKKKKKK

SEQ ID NO: 201546 - protein, 63 aa, Zea mays
  Clone ID: MRT4577_115394C.1.pep
FFSATTNNMVTTIYIAGTKAKTTHHPTKVIRNANENQNTNNTIEVQGNKYHRARVCYKQTQCP

SEQ ID NO: 201547 - protein, 46 aa, Zea mays
  Clone ID: MRT4577_115395C.1.pep
NHFIQAFISHRGWISVGGDILHACASNRGECSYIRDSSILVETYTI

SEQ ID NO: 201548 - protein, 276 aa, Zea mays
  Clone ID: MRT4577_115396C.1.pep
LPAPAPFPTAAAWAVAALLAVGLGVGALVLAVVRSPALLVVAVLLAASVAAFLLWNAAAAASGHALRRFVDGLQASSLRVAADGQLVKITGFVSCGDISLISSYDHASDCVYTSTILRKCARWGSMTLNPWNRCSKWKLAHAERFAADFYVADAKSGRRALVKAGHHSKVVPLIDENLLVTTSRGTELSSTLEHWLEERNLSSEEAQVIRLEEGYIREGMRLSVVGVLSKNKNGDAVILPPLEPQSTGFVLLSCLLPSYFDGIVLRLAAVPNSGVS

SEQ ID NO: 201549 - protein, 82 aa, Zea mays
  Clone ID: MRT4577_115397C.1.pep
PRALYGLQKISPPPPQWHYAPFSAHVLLHLPPFLSSSWILRPSSERERGEEVGTSNPKERREQSPPRKRNAVNSKSNGRGER

SEQ ID NO: 201550 - protein, 45 aa, Zea mays
  Clone ID: MRT4577_115398C.1.pep
SLRSLISLLRVHKAYDMFRNGSFMWKRSQTDLLSLKHKGVMSMSK

SEQ ID NO: 201551 - protein, 103 aa, Zea mays
  Clone ID: MRT4577_115399C.1.pep
NFHNSNQIVIGSCMASSFKRQKSMIIHRLNHLGTTKRKYSHNQLPTIRELGLRNGTYGYVPSLCDHRILLCFLGGRLTTFSGICLGPLAFPLVDPIFPAHLFI

SEQ ID NO: 201552 - protein, 54 aa, Zea mays
  Clone ID: MRT4577_11539C.1.pep
FIFFCFFFFFFFGPIEVAQKGILKVLGRSYGSKMSDVFSWGPNTEKLIVFIRKR

SEQ ID NO: 201553 - protein, 186 aa, Zea mays
  Clone ID: MRT4577_1153C.1.pep
MSTISTSLGLLIRPPRSSAGTPSFGSLKPVVVTLPCAPAEKKRPRSICYSVDAKANDHAFNISPVALVHPNMPPTSTPRWEIKEDGKEVRLTFFNLSEGATTGDFQVAVEDDVLIIKSTKPKPPAAEEQRQKEAPVDSVSFHVRLLVPKGYDKENVRAQLQLRALVVTIPKVNPSFTKEVDIDDGK

SEQ ID NO: 201554 - protein, 106 aa, Zea mays
  Clone ID: MRT4577_115400C.1.pep
MGMATQACGFTHGLLAAHCAPAVKPRQLSSQLALPSTYYREPAPLRTSTDDALEAPKEFVAPQLDPSTPYPIFGGSTGGLLRKAHVEEFYVITWTSPKEQVFEMPT

SEQ ID NO: 201555 - protein, 67 aa, Zea mays
  Clone ID: MRT4577_115401C.1.pep
GQGFWLQNAPNFQRKKGPVSQLGGQAFFGPPFVLKKFEVFNGLVFREAPTALSPMGVWSTKKKGFVF

SEQ ID NO: 201556 - protein, 45 aa, Zea mays
  Clone ID: MRT4577_115402C.1.pep
TTPPTDISPLRSATGTAVGLPSDDALGNSEAGHNALGAGRISAQR

SEQ ID NO: 201557 - protein, 52 aa, Zea mays
  Clone ID: MRT4577_115403C.1.pep
SGRGGVTRETRTRPFKGTSFSYMESVKSLDEHAGKRGLPGKIAAPFTIPQTY

SEQ ID NO: 201558 - protein, 81 aa, Zea mays
  Clone ID: MRT4577_115404C.1.pep
GGFRNQSRCFYLHVQHFLSKQDLNGSYYPPKSNKIHTVLWENVYTITTVFHVMLYCAYSVNGLPNYRRGRFISRWRLQIVH

SEQ ID NO: 201559 - protein, 93 aa, Zea mays
  Clone ID: MRT4577_115405C.1.pep
LRSLFRGGFYWGCGHFFLFFFFFWGGESATQTFFQIYPFPEPEGRGRPHDWLASKSLTGAVLHDIPRNKPRGIFWGRKGPETPFAKGLRVFPF

SEQ ID NO: 201560 - protein, 46 aa, Zea mays
  Clone ID: MRT4577_115407C.1.pep
EKKPATFLVYEVGGNIGPHRLDPDAYLLDLYRANPHGEWVIRQSPT

SEQ ID NO: 201561 - protein, 330 aa, Zea mays
  unsure (1)..(330): unsure at all Xaa locations
  Clone ID: MRT4577_115408C.1.pep
MAKDIEASGPEAGEFSAKDYTDPPPAPLVDAEELTQWSLYRAVIAEFIATLLFLYITVATVIGYKHQTDASASGPDAACGGVGILGIAWAFGGMIFILVYCTAGISGXDVRCARWPLAAVARSVCASACLFMSCQCVSLTRRCMRVXGHINPAVTFGLFLARKVSLVRALLYIIAQCLGAIXCGVGLVKGFQSAYYVRYGGGANELSDGYSKGTGLAAEIIGXTFVLVYTVFSATDPKRSARDSHVPVLAPLPIGFAVFMVHLATIPITGTGINPARSLGAAVIYNKDKAWDDQWIFWVGPLIGAAIAAAYHQYVLRASATKLGSYRSNA

SEQ ID NO: 201562 - protein, 87 aa, Zea mays
  Clone ID: MRT4577_115409C.1.pep
ISFFFSFLFACFDTHHCCFRIGTVVLLFTNIYLYSTRAPPVLFFPGTEVQDRWLRATLRVGGGYLWNPHVTQIPNVSSPRPEEDPIH

SEQ ID NO: 201563 - protein, 73 aa, Zea mays
  Clone ID: MRT4577_11540C.1.pep
TDRQHGRIRIHRLRTRRHLPGQQPGVLHQHHAGQQGVGEEPPDEQEPEEEWQDHLHDVSPGLAAEGPERHRLR

SEQ ID NO: 201564 - protein, 90 aa, Zea mays
  Clone ID: MRT4577_115410C.1.pep
CFVLSQISSLLSLFSRLLGKIGKEEMDKVFICSIFRSHSVIFVSVQAQAAAAGGCCGFQSPESRGISMSGGGSLPALSGPACSRSLSISE

SEQ ID NO: 201565 - protein, 78 aa, Zea mays
  Clone ID: MRT4577_115411C.1.pep
REKEAREKEAREMEVTQSDDFSIKMCILVMNPIEEVTKLEKAKAYSIFAKSKENRETFICACEADQESTLIWLRNEMS

SEQ ID NO: 201566 - protein, 79 aa, Zea mays
  Clone ID: MRT4577_115412C.1.pep
DRCEGGPLLLQLLLQLPLNRRRFVLALARHRPPTGSGRRGDGRRIGSRGSFLLPVSRRERGTVSSTSTSTVTVNPPTRL

SEQ ID NO: 201567 - protein, 167 aa, Zea mays
  unsure (1)..(167): unsure at all Xaa locations
  Clone ID: MRT4577_115413C.1.pep
CTNSGKTKYKRFLMLIGIYERAXTTPINHECSQXTIAGFVNPDLXTAAIVACEKRSLQPYQIQQATATSVVPLRTXSFTYTLALLQEVPVGHLMTQNIKGQQLQQLELXNLAGYSXQHEWLPLNQLTALNYAAHLQQQKKXSQLRXAYRQQYYXFNQLGALNSGAYL

SEQ ID NO: 201568 - protein, 104 aa, Zea mays
  Clone ID: MRT4577_115414C.1.pep
AKGVPTGYLFFGSLHQLRRGTSKSNTLGLKRKKKRGKKKKKFVGRRNLKLRVLEKKMGVECFFKPKGIPICHPYMYILLVTNWKNGTVLQLNNREKLFAFKKRL

SEQ ID NO: 201569 - protein, 77 aa, Zea mays
  Clone ID: MRT4577_115415C.1.pep
ALYCTAISPLSDGGAVPDLAEAEAVPVLTPAKCLMRGLNLTHYKMCNHGYYYGPYSFTTIHSVFMLLDDAVATRLDW

SEQ ID NO: 201570 - protein, 62 aa, Zea mays
  unsure (1)..(62): unsure at all Xaa locations
  Clone ID: MRT4577_115416C.1.pep
VPFFLGSVLSCSRANSPRTWSLTVCFSTTSRAMLGAWXGFWWWKPVRTPKWCTWLLAIWSER

SEQ ID NO: 201571 - protein, 227 aa, Zea mays
  Clone ID: MRT4577_115417C.1.pep
MAAAALRSSARRLLRLAPAASSALSAGSRPTAGAAPLTRPIAALSGGNNPISWKLRRFYSSNEKHLPAISDPEIESAFKDLLAASWNELPDSLVAEAKKAASKATDDSAGQEALKNVFRAAEACEEFSGTLVTLRMALDDLCGLTGENVGPLPGYIEDAVKAAYNRYMTYLESFGPEENYLRKKVETELGTKMIHLKMRCSGIGSEWGKISLIGTSGISGSYVELRA

SEQ ID NO: 201572 - protein, 227 aa, Zea mays
  Clone ID: MRT4577_115418C.1.pep
MAAAALRSSARRLLRLTPAASSALFAASRPTARVAPLSRPIAALSGGNNPISWKLRRFFSSNEKHLPAISDPEIEAAFKDLLAASWNELPDSLVAEAKKAVSKATDDNAGQEALKNVFCAAEACEEFSGTLVTLRMALDDLCGLTGENVGPLPGYIEDAVKAAYNRYMTYLESFGPEENYLKKKVETELGTKMIHLKMRCSGIGSEWGKISLIGTSGISGSYVELRA

SEQ ID NO: 201573 - protein, 333 aa, Zea mays
  Clone ID: MRT4577_115419C.1.pep
AGNPATPATRNITVDTVAPAVTIDSISDDTGAQANDFITNDDTLVFNGTAEADSTVVVSLDGIEIGTVTANGAGEWTLDYTGTLLADGDYELSVTATNPTGNSATATQTIVVDTTAPTVTINAIAVDDIINAVEAGSPVAVSGTTTGVEDGQVVTVTIDGNTYTATVTGNAWTFNIPVADIANFEATEEVVATVSDLAGNPATPATRNITVDTTAPTVTINAIAVDDIINAVEAGSPVAVSGTTTGVEDGQVVTVTIDGNTYTATVTGNAWTFNIPVADIANFEATEEVVATVSDPGRKPLDWPPWFALPRPTLPLFLPPLRFGDGVYCDFAA

SEQ ID NO: 201574 - protein, 66 aa, Zea mays
  Clone ID: MRT4577_11541C.1.pep
MRSGRGKMATPPPPIRPAAALLLLVLAGVLASAGSADLAISKADRRVDLTSHRVRDLASLKAENVE

SEQ ID NO: 201575 - protein, 271 aa, Zea mays
  unsure (1)..(271): unsure at all Xaa locations
  Clone ID: MRT4577_115420C.1.pep
DPRGANQGDLSPLGTYATASHFEVYHFCAQLSLTPAPSSALFAASRPTARVAPLSRPIGALSGGNNPISWKLRRFFSSNEKHLPAFSDPEIEAAFKDLLAASWNELPDSLVAEAKKAVSKATDDNAGQEALKNVFCAAEACEDFSGTLVTLRMALDDLCGLTGEXVVAISDFSCIFWGAYISLIKAKLLQNVGPLPGYIEDAVKAAYNRYMTYLESFGPEENYLRKKVETELGTKMIHLXMRCSGIGSEWGKXISLIGTRGISGRTRGLRA

SEQ ID NO: 201576 - protein, 40 aa, Zea mays
  Clone ID: MRT4577_115421C.1.pep
TLAACFTHARQTGSGVSSGERVTNALEPALGRGTTTGNGC

SEQ ID NO: 201577 - protein, 551 aa, Zea mays
  Clone ID: MRT4577_115422C.1.pep
MDRLVIPEPSNEVVVRVEPGRQARGELTLRNAMHTMPVAFRLQPAVRGRFAVRPHTGILAPLAAVTVDVLYLASAPPEGPSGSGSRGEDAFLLHSVVAPGAAVKEPVTALDSVNPEWFSARSKQVFVDSGIRASFVGASVAARLVEAGAVEALREVLDRSEPEWRAADATDESGRTLLDLAVGLARADIVQVLLEYGADADKPSRGRTPLETAAAAGECLIAELLLANGATPAGSDAIHVAAAAGHNDVLKLLLARPASASPASSSSFSSSLTSIDAAGRDGKTPLRLAAEAGRRDAVKALLAAGARADARCGADGATALHAAARRGDEAVARLLLSHGVSGTASVRDVAGKTAFEIAAEEGHGGRILDFLGLGEAILAAARKGEVRSVRRAADGGASVEGRDAHGWTPLIRAAFKGRADTVRDLIDRGADIDAADADGYTALHCAAEAGRADVVDLLLKNGANVKAMTVKGRTAADAATASGKSKVVRLLDKATIMGRKQDVSEKVAPAVAKGGSMDRKRRARKGSSGAIRFGGGKEGFEAAAVTVGWSH

SEQ ID NO: 201578 - protein, 90 aa, Zea mays
  unsure (1)..(90): unsure at all Xaa locations
  Clone ID: MRT4577_115423C.1.pep
DAWVSSTPSPSXPLSPPAGRCIPTPSPPAQNPXIPPPPAWIPHPDPRPAMGVSSSRRRYPPRPSPPTPRPPHRPCPPCRTVTPXSSPKPL

SEQ ID NO: 201579 - protein, 112 aa, Zea mays
  Clone ID: MRT4577_115424C.1.pep
MSEDHKGVHNLKNKEQFEEVMAVKDSLMVVDCFATWCGPCKVIAPQVVKFSEKYPNARFYKLDVDEASDVAGDLGIRAMPTFILFKNGTKVAEVVGANPKALETAIQNNIDA

SEQ ID NO: 201580 - protein, 56 aa, Zea mays
  Clone ID: MRT4577_115425C.1.pep
GETTYDFNCNQDTAERAIITSSRETTVIKTHLEGPTTQELHCHLQQPQLAHCITRR

SEQ ID NO: 201581 - protein, 189 aa, Zea mays
  Clone ID: MRT4577_115426C.1.pep
MRSYMGQQEDGMSDGLYTYKHHRERGADIHTIFVKKSKFRILLSFIGTTFLLVSVCCALLSKDGLCLCSLWSISFASVIAKCLRCDPVKKESLVIMPTFGIQLEQHFWSGRVHRKFVPIGKILRPVLNEHVTPVSCYWSLALLVREEYELMLVFKSLNPPVKMLVPIWKALCAFVDSNTLGNSALPQPT

SEQ ID NO: 201582 - protein, 189 aa, Zea mays
  Clone ID: MRT4577_115427C.1.pep
MRSYMGQQEDGMSDGLYTYKHHRERGADIHTIFVKKSKFRILLSFIGTTFLLVSVCCALLSKDGLCLCSLWSISFASVIAKCLRCDPVKKESLVIMPTFGIQLEQHFWSGRVHRKFVPIGKILRPVLNEHVTPVSCYWSLALLVREEYELMLVFKSLNPPVKMLVPIWKALCAFVDSNTLGNSALPQST

SEQ ID NO: 201583 - protein, 81 aa, Zea mays
  Clone ID: MRT4577_115428C.1.pep
EEGNSQRRPMPLGSIVPELGTGGLPGGSGNPTPLGACSSYPWRRLSTPTDTRVAANHGLLPAPWPRPKMKRPKWRTVSRVR

SEQ ID NO: 201584 - protein, 93 aa, Zea mays
  Clone ID: MRT4577_115429C.1.pep
LLISFYEPLRPHVFGGIKPLGPKKSVFFSKIGSTFLCNSMSSMLPYMLFSHVLGQSVLTYGLCKHQDSSVFDLFVLTPLFDPKFGSWNAIPLH

SEQ ID NO: 201585 - protein, 118 aa, Zea mays
  Clone ID: MRT4577_11542C.1.pep
KHGPSGVDHLQLPVLANVSGSPPAHGVHPSSPGTRQQVARRLAGMGPGQQRSGRPGLPDAAAGLAFPASCASSPGLAEAETRHVPAFSEAVRKGHGAAAIGCFFYACTTNLTTQWATR

SEQ ID NO: 201586 - protein, 189 aa, Zea mays; identical to SEQ ID NO: 201582
  Clone ID: MRT4577_115430C.1.pep

SEQ ID NO: 201587 - protein, 134 aa, Zea mays
  Clone ID: MRT4577_115431C.1.pep
FPPIRVFVFPKINKHDCACFIASPPFKNLSFFNEKTGGFPLIPVFPVVGKFWPPPRGGWGPSWGALPAGGGGEKNKGGGGRFFVGLLNFLWLKESFYFLGGGFFFSPRNFLGSPKTCSFARNRVFSLTKNVNGP

SEQ ID NO: 201588 - protein, 152 aa, Zea mays
  Clone ID: MRT4577_115432C.1.pep
FPSVSAPAPPVPQPRPALLDRALQLGPPAPAAGHPLEASARTFSHRGSNFRKGVGLTGFRCPFGALFLGGPRFLDPPGFPFNYRGPPRDPLPRENPVGGAAKIVRFFFPPRAEEGIPKRENVNFQGRKGGKAFEIKKVFRVSTIMFLGGFDF

SEQ ID NO: 201589 - protein, 122 aa, Zea mays
  unsure (1)..(122): unsure at all Xaa locations
  Clone ID: MRT4577_115433C.1.pep
LLMLHDLSARAATANIFPQCSQAPITALLTPYLSPTVSLVXENPFXLPYXIQQAIGAGIIPLSPSFLXQSSALXQQLPLAHLLAHNIRGQQLQQLVLSNPAGYSQQQGXITFNPLAGLNFGF

SEQ ID NO: 201590 - protein, 48 aa, Zea mays
  Clone ID: MRT4577_115434C.1.pep
VECHICSVIAHGACISKCHITLLELGRELEQVGLVVLVVQDLLAVHLV

SEQ ID NO: 201591 - protein, 62 aa, Zea mays
  Clone ID: MRT4577_115436C.1.pep
RLAIYRERRSYATDIERYCHIMLVKFVRTNRTSMHPDCSIVFVICARNASLTFILIIGDCLY

SEQ ID NO: 201592 - protein, 238 aa, Zea mays
  unsure (1)..(238): unsure at all Xaa locations
  Clone ID: MRT4577_115437C.1.pep
MKKYASVIRVITHTQIRKMKGLRQKKAHLMEIQXVNGGTIXDKVDXYGYKFFEKEVPVDAXVFQKDEMIDIIGVTKGKGYEGVVTRWGVTRLHRKTHRGLRKVACIGGAWRPARVSYTFASAGQKRYHHRTEMEKKVYKIGKAGQESHDASTEFDRTEKDITPIMGGFPHYGIVKGDYXCCVGPKKRVVTLCQSLLKQTSRLALEEIKLKFIDTSSKFGHGRFQTTDEKQRLCGMLKA

SEQ ID NO: 201593 - protein, 86 aa, Zea mays
  unsure (1)..(86): unsure at all Xaa locations
  Clone ID: MRT4577_115438C.1.pep
TIVFHLSKGFNPTDPPVVAKFASSIGYVVLMQSQDKLSIQCKPIKLSWGAMWRMFAPQALXGPFSIRPNSEPGQKVPPQASCPATV

SEQ ID NO: 201594 - protein, 88 aa, Zea mays
  Clone ID: MRT4577_115439C.1.pep
HGADHMFGPPIDANRLDVFHRSHGSCCKDLAETTALYWLWMSHVARPLSSNLMEIKESFFFHSSWETQQSIWKAVKIQKNCIRMGLNH

SEQ ID NO: 201595 - protein, 61 aa, Zea mays
  Clone ID: MRT4577_11543C.1.pep
YLDFFFNIQLQLGDIFLFSFPKLLYFHLFFSLHILLHQVTLSQHPLIFICIPSFHLQLPQN

SEQ ID NO: 201596 - protein, 76 aa, Zea mays
  Clone ID: MRT4577_115440C.1.pep
LLDTTPPSLQLCSTQVTKTSWRDTSDRRRRACALIDTWAGSGWRRIPTGRAWAHWLDTDPEHQVGGGVLFILTSFC

SEQ ID NO: 201597 - protein, 194 aa, Zea mays
  Clone ID: MRT4577_115441C.1.pep
IRSARRCRLSSQSSSMMQPSIAFLLTCWVPLSLQLLDRSSAQTDVHRLARRTPAAGRQHLGTEARRSISGRQNAAETYSSAAASSSVAAFATGYGEGMSETYITASAASVPKTSAVASLAVGPAPLPVPSAPPTCDNSNAKAEINRFLVKCEAALKRSTAPIIARASTVDASNASQLATQIAAYLKDILAQLKL

SEQ ID NO: 201598 - protein, 129 aa, Zea mays
  Clone ID: MRT4577_115442C.1.pep
NPTATLLVRARTREPPGPWGGTPQGAGSTYPGLLEEQHHRGRIIGKNTEKSNHTLRRCIDRRRAPKSRRSPEPDEPRTLKTQLLMPHEEVKRGQAMPLARGKLRGRPYKEQSWAPVSKTRIDVPGHGGR

SEQ ID NO: 201599 - protein, 71 aa, Zea mays
  Clone ID: MRT4577_115443C.1.pep
MRADYNAQGQHVTSLILTQHSCWSFSIQENYLYGEFTIHMRLIPDNYGGTVSYFYLSSGDRPRHHQIDMEF

SEQ ID NO: 201600 - protein, 177 aa, Zea mays
  Clone ID: MRT4577_115444C.1.pep
GPSRPAGKEEKNGLALGNIVALPLSNLKPSLKLSSSSSSCCITKLFPISRINVSPTSVLVRASSSSSFGSRLEDTIKKTVAENPVVVYSKTWCTYSSEVKILFKKLGVDPLVFELDEMGPQGPQLQKVLERITGQHTVPNVFIGGKHIGGCTDTLKLYRKGELEPLLSEANAKKTES

SEQ ID NO: 201601 - protein, 96 aa, Zea mays
  Clone ID: MRT4577_115445C.1.pep
PPLGALLPGACRPFFARVPGPRGFGSFPRGCWLVPVWASRVGPFGCCLGPLLLGPPVPGYLWGLVVLLWWAWGGVSFVVFRPGFSWLEVGSGVFGR

SEQ ID NO: 201602 - protein, 48 aa, Zea mays
  Clone ID: MRT4577_115446C.1.pep
HSHLHDLPRDTTTRWGEELIFPSKSNLCTIITKILIPECVVAKYLFLL

SEQ ID NO: 201603 - protein, 79 aa, Zea mays
  Clone ID: MRT4577_115447C.1.pep
PSLWAVPASTSADPPLEPPPSPPSTSTRWPGRAALEASTPTTPAATPTLLPAMPPALSTLSSSPTSPLPRSTTTSSTSG

SEQ ID NO: 201604 - protein, 65 aa, Zea mays
  Clone ID: MRT4577_115448C.1.pep
RRPSIRPMGLQPGCRPGLGFSNQNFTWFGVSSATTLNGPTKRPLTGKLITNFPPKEGILYNKRPH

SEQ ID NO: 201605 - protein, 136 aa, Zea mays
  unsure (1)..(136): unsure at all Xaa locations
  Clone ID: MRT4577_115449C.1.pep
MCEILMCEIEGHHLTSAAIVDHEGAAWAQSTAFPEXRYLHANHSSAVKSDGSHVVPGHSWPTRHPPGYHNVHGCYGIDFAVTSSTQFKPEMANIMKDFDERGHXLASTGLFLGATKYTVIQGKLGAVIRGKKGSGL

SEQ ID NO: 201606 - protein, 106 aa, Zea mays
  unsure (1)..(106): unsure at all Xaa locations
  Clone ID: MRT4577_11544C.1.pep
TPPKLSATAVVSILQGAAAVXLPFSRTSEFLAGGLRSYVREEDGAVILRMVGGLGVAIFCLEWVALALAFVLRYYAYVDRECGGNPQRRSAKVGGEDGAGTWPFQV

SEQ ID NO: 201607 - protein, 124 aa, Zea mays
  unsure (1)..(124): unsure at all Xaa locations
  Clone ID: MRT4577_115450C.1.pep
LCALCRXRGCXXLXXRFGXPSASPWXPGXXCXXLLXRSCXPXLXXVLLGSXLRXXXXSXXXXLXCCXXLFXLLALLLAPFVAGGPCPCLXXWXWXFWRAVGVPVXGSAAXLSCGSPLGSXXXXK

SEQ ID NO: 201608 - protein, 25 aa, Zea mays
  Clone ID: MRT4577_115451C.1.pep
MPRFHYQFRTRHNTYVYFGFFVVCR

SEQ ID NO: 201609 - protein, 85 aa, Zea mays
  Clone ID: MRT4577_115452C.1.pep
QEHLQATTNITPYPSGLSGALVQWYRKPNMPQDQSRTKKCGEVHFSQGKPTSQCHLEVSSSKSKVQQKCCASKLSSNQRAKMSVI

SEQ ID NO: 201610 - protein, 68 aa, Zea mays
  Clone ID: MRT4577_115453C.1.pep
GKRAIISGGEWGNPFFWSFTHVRQLFWLKNVNDFKRNKFPFCQTLVNPREKCLNPKTYGFLQHLSQSN

SEQ ID NO: 201611 - protein, 162 aa, Zea mays
  Clone ID: MRT4577_115454C.1.pep
MAAARRGRADGANGVVRPRPRDRVVGVSGSMAGRVAVLAFCVAGIWSAYIYQGVLQETLSTKRFGPEARRFEHLAFLNFAQNVVCFVWSFLMTKLWSGGSGSSSDGRAPLSKYWGISVTNTIGPTMGIEALKYINYPAQTSSKTVKKLVNPNAPLGYTLCFL

SEQ ID NO: 201612 - protein, 159 aa, Zea mays
  Clone ID: MRT4577_115455C.1.pep
MRQRSTEGGGGQQIRGVTDTQEGGCCLSMLLRLKIVVGVHSVVLPVPVPGGFGHGAYYAVVEPCWHRSRRPLLAAAGGLVARRPRSTTVVMALKEEAEGSRERHFRQDKNDQKAYPYTDISSNGGVLMRLKWLKSQKVKRQRVDEASLKRLLANHGISC

SEQ ID NO: 201613 - protein, 378 aa, Zea mays
  unsure (1)..(378): unsure at all Xaa locations
  Clone ID: MRT4577_115456C.1.pep
MAAARRGRADGANGVVRPRPRDRVVGVSGSMAGRVAVLAFCVAGIWSAYIYQGVLQETLSTKRFRPEARRFEXEHLAFLNFAQNVVCFVWSFLMIKLWSSGSGSSSDGRAPLSKYWGVSVTNTIGPTMGIEALKYINYPAQVWFRLLLPSHLGCYMHCPGHCVMLMLGSCRGHMGNIVTDAYGLRCSDRVNXYIGSSLEVLPQVNIXKNIALIGLYVIWRLAIVCGIDHRQSISSYLIAESIDPSIVLAQRICFFLLTSSKICGARFLYAIPTNFCWCEQVLAKSSKMIPXMLMGTLLYSVKYTLPEYFCTFLVAGGVSSFALLKTSSNTVKKLANPNAPLGYTLCFLNLAFDGYTNSTQDLIKSRYPKTNPWDIMLG

SEQ ID NO: 201614 - protein, 84 aa, Zea mays
  Clone ID: MRT4577_115457C.1.pep
PSMAAITIHLNCLCISLLKIKYLSIQIAFRIFLLKIKLLLTSKLTFHISTITCGISLGSHRKRIEHPTLTYTKTACDTIPSHAF

SEQ ID NO: 201615 - protein, 88 aa, Zea mays
  Clone ID: MRT4577_115458C.1.pep
YAEPTKQRLGETLGRACITLNIWMVTDHTTLINLYVPCVMMDHTTRISNQVAHRAYLSDISLPDSMCFLIRVIRAASTTSKDTSLAST

SEQ ID NO: 201616 - protein, 624 aa, Zea mays
  Clone ID: MRT4577_115459C.1.pep
MQRLVGVGERLLAIGTNRRAATYSHSSHRSGYYTAVRDNGLSTRRKIPAILSRMFSHYKVISRKNRAEDHKCRTRMSRGYHTLSVPVTNSSATQQAHLAWKQLGHMYTYRGPRFPLLGRAACAVSLSFTRFHIIPGVMALAVGKMALAPPVLADSRPFMPRMDGIITKAQDTRQFLSSLFCSIWEGITLLVRAVHLAFLFFPATALAPFADKFSIAFRRRWLSLMRRTLEKAGPAFIKWGQWAATRPDLFPSDLCVELAKLHSAAPAHGFAYSKAAIEKAFGRQLSEIFESFEENPVASGSIAQIHRATLKHQHPGKHVAVKVRHPNVGESISRGFLLINLVAKASDMVPGLSWLRLDESVRQFAVFMMSQVDLSREAAHLSRFIYNFRRWRHVSFPKPLYPFVHPSVLVETFENGESVSRFMEEIEGNARMKKDLAHIGTYAFLKMLLEDNFIHADMHPGNILVRLNENKLARRRFFRAKPHIVFLDVGMTAELTRSDRDNLQQFFKAVATRDGRTAAKCTLQLSKNQSCPNPVAFTEELDKTFTFWGTPEGDVFHPVECMHELLDTVRRHKVNIDGNICTVMVTILVLEGWQRKLDPGFDIMQTLKTLLLEKDIKQPIDFFS

SEQ ID NO: 201617 - protein, 88 aa, Zea mays
  Clone ID: MRT4577_11545C.1.pep
PKVRDAAPRADGRRPDAHARIHDGGHLHPRRPGRDPPGHPLGALLPRRLIPCTCPALASGVALPAFPPPLARPVLQARVHCHPPPPSA

SEQ ID NO: 201618 - protein, 75 aa, Zea mays
  unsure (1)..(75): unsure at all Xaa locations
  Clone ID: MRT4577_115460C.1.pep
LRNKXIRPDXFFLCFGHHXHXYQPTCSSSRTSSTTRGYEGRPDKPTKDLQGTVTPTPNSCLISHQESANQDAPWC

SEQ ID NO: 201619 - protein, 65 aa, Zea mays
  Clone ID: MRT4577_115461C.1.pep
KTLLITVLRQEFYRMLSQLLICRLHAHIIETRHSIHFIYWCHLTCRTYYGTPRRNERGCKRLSGS

SEQ ID NO: 201620 - protein, 52 aa, Zea mays
  Clone ID: MRT4577_115462C.1.pep
GLEYNFPSRISEKLEFAESIVKFIGHMLGFWVLSIKHGPNHTKLYPRFLNNI

SEQ ID NO: 201621 - protein, 62 aa, Zea mays
  Clone ID: MRT4577_115463C.1.pep
QRSFLTAPFTIKEIKKVVFEMKHNSAPGPDGFPAEFFQNFWDLIQMDVWNLFKDFYVGNLDI

SEQ ID NO: 201622 - protein, 98 aa, Zea mays
  unsure (1)..(98): unsure at all Xaa locations
  Clone ID: MRT4577_115464C.1.pep
SPNVQLTIQVSPRCRRPQLLVMQEERHVVVLDEREGRASQPHHVLEPRPGLTGGLPREWSPPYRARKVYVCVTDDRYLTXAGHRACLSCYGSELGETS

SEQ ID NO: 201623 - protein, 51 aa, Zea mays
  Clone ID: MRT4577_115465C.1.pep
NATGCTHSQVNCCKCSLTRRDNPLLFPVAMESSLFDYRSSNFESSFDRSFN

SEQ ID NO: 201624 - protein, 69 aa, Zea mays
  Clone ID: MRT4577_115466C.1.pep
MADEEVTDPKAFLEERSKAKCVSQWYEYQKCVKRIENDETGHKHCTGQYFDYWKCVDKNVAEKLFEMLK

SEQ ID NO: 201625 - protein, 70 aa, Zea mays
  unsure (1)..(70): unsure at all Xaa locations
  Clone ID: MRT4577_115467C.1.pep
LIPDVLTNFSLINTPHXYDTFKSEYVSVMNTLFIIQFILFHYLLILLLQDINNPYIINQDPIFNIYSLPT

SEQ ID NO: 201626 - protein, 76 aa, Zea mays
  Clone ID: MRT4577_115468C.1.pep
QGCRQERVLEETHLHELLISCAYQNTSAILRRKNGTHMPRTTSQYKTAINRISCMLSNYNGLVQPSPITCHNETNI

SEQ ID NO: 201627 - protein, 75 aa, Zea mays
  Clone ID: MRT4577_115469C.1.pep
YFLQIKAPKNQKGAQKRKNPAPTKENTPKENKESNTNPNNYSSCPAIPLLLSFISPLLALAGCLSCLYVRHHLCY

SEQ ID NO: 201628 - protein, 193 aa, Zea mays
  Clone ID: MRT4577_11546C.1.pep
MGGLSVIAPPARDSASPQHRRARRAFLVSNYLILGCASGCGFLTLSLRLAPSVDGFLLILLHALTVAAAVAGCAVIAAPDPPRGRCYTVHMSATVVVSILQGAAAVLAFSRTSEFLSDGLKSYVREEDGAVILRMVGGLGVGIFCLEWVALALAFVLRYYVYVDRECGGNPMRRSAKVGGEDGAGTWPWPFQV

SEQ ID NO: 201629 - protein, 820 aa, Zea mays
  Clone ID: MRT4577_115470C.1.pep
MLTILRDLLPLYPHLRMVLMSATIDAERFSQYFNGCSVIQVPGFTYPVKSFYLEDVLSILQSAEQNTEVYNYQHSETGITPLMVFAMKGQLGDVCMLLSFGVDCSAQDHDGKSALDWAQQENQQEVCEVIKKHMECSSEKSTEDNELLNKYLASINPEHIDTLLIERLLRKICVDSNEGAILVFLPGWEDISQTRERLFASPFFQDSSRFLVLSLHSMIPSSEQKKVFKRPPVGVRKIILSTNIAETAVTIDDVVFVIDSGRMKEKSYDPYNNVSTLHASWVSKASARQREGRAGRCQPGTCYHLYSRFRASSLPDYQIPEIKRMPIEELCLQVKLLDSNCRIADFLKKTLDPPIPETVRNAIAVLQDLGALTQDEQLTELGEKLGSLPVHPSTTKMLLFAILMNCLDPALTLACAADYRDPFVLPVAPDERKRAAAAKVELASLYGGFSDQLAVVAAFDCWRHAKDRGQDSQFCAKYFVSSNIMNMLSSMRKQLQNELSQRGFVPADASACSLNSKDPGIMRAVLMAGAYPMVGKMLPPRKNARKSVLETASGAKVRLHPHSCNFNLSFSKSSGNPLLIYDEITRGDGGMYIKNSSVVGSYPLLLIAAEMVVAPPDDDSDEDEEDSSEDEAEESTLVQHKEEIMSSPDSIVSVVVDRWLRFDATALDVAQIYCLRERLASAILFKVKHPQDVLPPALGASMYAITCILSFDGLPSMVPPNDLSANRGSGQDLAEASKFSQGRRAGYIPPSGFLMSLLADRTHNAPSFQNSSNHPGGGSAHTRPSRAPVGRFDRSRRPFRNSGPGSSAPRSFKRQRDAPR

SEQ ID NO: 201630 - protein, 59 aa, Zea mays
  Clone ID: MRT4577_115471C.1.pep
PPSRKRYYLPFQLYADTYRLDTNTKRTCHVNPTSNKSLHDNIVFHDRHLSLSHKSKIDD

SEQ ID NO: 201631 - protein, 36 aa, Zea mays
  Clone ID: MRT4577_115472C.1.pep
TILCWVASHGRHPFNQVVKPTHIKWVAFVAYLGHWC

SEQ ID NO: 201632 - protein, 64 aa, Zea mays
  unsure (1)..(64): unsure at all Xaa locations
  Clone ID: MRT4577_115473C.1.pep
MATKILSLLALLALFASATNAFIIPHCSLAPSSIIXTQFLPPGTSMGFXEHPSVQAYLLHTSKL

SEQ ID NO: 201633 - protein, 98 aa, Zea mays
  Clone ID: MRT4577_115474C.1.pep
VEYWPVKSAILSGLTCMMGIDTPWRFEAPQESSSPLDCRISGVEMTDEGTAWRGRCSVGLHCGFCLASHLEEVPCVCVFYRANCHSKAEPLQINPCAA

SEQ ID NO: 201634 - protein, 135 aa, Zea mays
  Clone ID: MRT4577_115475C.1.pep
DCTRTRARTADSSPPGVRSGACAYIHPPPFTRSSSAGGSLHPLFCRWLRGLFWLDHSAYCSSVDWTCLAYSNSVLHISPLLIPAFRVHVSSRSDPYIWLPCFTCALLIHAYAGPVIVPELHNVDQIRLGPVMDRG

SEQ ID NO: 201635 - protein, 81 aa, Zea mays
  unsure (1)..(81): unsure at all Xaa locations
  Clone ID: MRT4577_115476C.1.pep
AIIGITSVQRENDEMVPMXATKMGWVPYVPLEDLLSTIDRTQTKMCTLXCAQPMSALKHARNERAKKVDYCMPYYMLDGSC

SEQ ID NO: 201636 - protein, 171 aa, Zea mays
  unsure (1)..(171): unsure at all Xaa locations
  Clone ID: MRT4577_115477C.1.pep
LSPVHAERSGLSLCSVAEGWASGSSVLAQEVRLFLFVVWCLHQVVAVSPAGGGGGQTTNGRSGGGRRHRLGCSGRAAFFAGAFWALCSLSSWLVLRRLLGPLCPMLSTSRVPCRASSGLFLVGPAGFCRWVRLVRVARVTRRRSSWAGAGGRGWLRXCCTPFCAGRWIPPA

SEQ ID NO: 201637 - protein, 54 aa, Zea mays
  Clone ID: MRT4577_115478C.1.pep
HSAASSSLFDAMASKTRSELSVVEKISPRKTSVCDKVRGLRRVAHCCTALQYGA

SEQ ID NO: 201638 - protein, 45 aa, Zea mays
  Clone ID: MRT4577_115479C.1.pep
TGPLINRPMQKTPQVAPKRGFLPRIFFLGHPKNFFQGGVFYPPLK

SEQ ID NO: 201639 - protein, 44 aa, Zea mays
  Clone ID: MRT4577_11547C.1.pep
TCTIAPVHGAIGSQFCKYALYEGPQLEIVWKQEKMPSVHWPRAE

SEQ ID NO: 201640 - protein, 72 aa, Zea mays
  Clone ID: MRT4577_115480C.1.pep
HGVSVQYVGTCLSRSNISLFRCIELAIRFSLPRSTLIPINPHGLGMTRSKPRWDIMSRPLFIYMVRQRLEQY

SEQ ID NO: 201641 - protein, 101 aa, Zea mays
  Clone ID: MRT4577_115481C.1.pep
PPKKGFRGLWATAFPSQFKRARLFRFPKNEARGAKGRENLLKLGETRVVTPVKVLTVPPQKGGDKTKTVVGAKAPKGAGSARFPGSGGPFAFQGAQTGPNP

SEQ ID NO: 201642 - protein, 57 aa, Zea mays
  Clone ID: MRT4577_115482C.1.pep
QHTKRSAVPTTVTTKEFPTYLCLFCALSVRVCDERNIMRAMYCTAAHIVSYLPLVPS

SEQ ID NO: 201643 - protein, 107 aa, Zea mays
  Clone ID: MRT4577_115483C.1.pep
ASSCSQKFADGRECLVPLDSHAASRSMRGPNSKGTGISSSTNDSPLFCPCAWNKFWMAIYLDQRRRHDTERRRFRRRQLALPGGKRQHPRRARPRPWRLRRYMDSDL

SEQ ID NO: 201644 - protein, 32 aa, Zea mays
  Clone ID: MRT4577_115484C.1.pep
RISQTIHIIANQYKGPSMDIQLSNIYIMDTKK

SEQ ID NO: 201645 - protein, 122 aa, Zea mays
  unsure (1)..(122): unsure at all Xaa locations
  Clone ID: MRT4577_115485C.1.pep
STLAFVSFFSIGLGPMTAVYTSEIFPLRVRALGYAVGVACNRVTSVVVSMTFLSLSSAITIGGSFFLYAGIXSLSWVFFFTCLPETRGRTLEEMGELFGTIDAGTEADRDSAARLLSSELTT

SEQ ID NO: 201646 - protein, 252 aa, Zea mays
  Clone ID: MRT4577_115486C.1.pep
MMSESEEHGSLLDKINDKINEKIHEYKHSSSSSSSSDSDDDKKPKKSKKKKLFGRKHPLHHVLGGGKAADLVLWRNKQASGSILVGVTVIWLLFEGIGYHLLTFLCHALIVFLTIWFIWSNAASFVNRSPPKFPEVILSEAQCLKVAHVARKEINEAFYTLRNVASGKDLKTYLMTVTVLWFISIIGSCFSFLTLSYTIFLMAYTLPMLYEKYEDQVDIVGEKALIEIKKQYKVIDAKFISKIPMLSEKKQH

SEQ ID NO: 201647 - protein, 83 aa, Zea mays
  Clone ID: MRT4577_115487C.1.pep
LEREREPNPRLAGERLVWLGNLAIVPNTPLYPAAFAHPDPSIKASRIIRKCMHVPTVALLPMHLAHPSRKMCMVFYITSVLAN

SEQ ID NO: 201648 - protein, 255 aa, Zea mays
  unsure (1)..(255): unsure at all Xaa locations
  Clone ID: MRT4577_115488C.1.pep
MMSESEEHGSLLDKINDKINEKIHEYKHSSSSSSSSDSDDDKKPKKSKKKKLFGRKHPLHHVLGGGKAADLVLWRNKQASGSILVGVTVIWLLFEGIGYHLLTFLCHALIVFLTVWFVWSNAASFVNRSPPKFPEVILSEAQCLKVAHIARKEINEAFYTLRNVASGKDLKTYLMSIAVLWFISIIGSCFSFLTVSYTIIXVFLMAYTLPMLYEKYEDQVDVVGEKALIEIKKQYKVIDAKLISKIPMLSEKKQH

SEQ ID NO: 201649 - protein, 48 aa, Zea mays
  Clone ID: MRT4577_115489C.1.pep
THKPKRPKNPPLKHNHPTKKMFFTGFKLSRPGHTYLGHIPKKGLLPHF

SEQ ID NO: 201650 - protein, 45 aa, Zea mays
  Clone ID: MRT4577_11548C.1.pep
FTLISNINSTREPSAKFPQPDGSNSYIPSSTTVELQLLFHLIRVN

SEQ ID NO: 201651 - protein, 293 aa, Zea mays
  Clone ID: MRT4577_115490C.1.pep
MGRRKMSAAAPPSRSWSNVGGSVIPELRAKHKTDLQNLTLTKQPLRTLHFFLLAMLQYLKRLATYILSKGGFFFLLIVLLVASGILLVVSDGLHKKHVQEFLNYAKFVLWWISLGVASSIGLGSGLHTFVLYLGPHIALFTIKAVQCGRIDLKTAPYDTIQLKVGPSWLDKKCSEFGPPVYPASAHSVRIPVFDLLPQIQLEAVLWGIGTALGELPPYFISRAARLSGSKSKAVKELDAATSKEDGTVASTLDRSKRWLLSHSQHLNFFSILILASVSALSAILLPISSVWKS

SEQ ID NO: 201652 - protein, 71 aa, Zea mays
  Clone ID: MRT4577_115491C.1.pep
SKKQIWISISHSPLVHTERRADPIPDYLSLSLFLMFPIFIFVDSESNLRPFQDTTGPYLLIFLAEVPQELG

SEQ ID NO: 201653 - protein, 451 aa, Zea mays
  unsure (1)..(451): unsure at all Xaa locations
  Clone ID: MRT4577_115492C.1.pep
MGRRKMSAAAPPSRSWSNVGGSVIPELRAKHKTDLQNLTLTKQPLRTLHFFLLAMLQYLKRLATYILSKGGFFFLLIVLLVASGILLVVSDGLHNKXVACSSLVFVLISGIHVQEFLNYAKFVSWWVSLGVASSIGLGSGLHTFVLYLGPHIALFTIKAVQCGRIDLKIAPYDTIQLKVGPSWLDKKCSEFGPPVYPASAHSVRIPVFDLLPQIQLEAVLWGIGTALGELPPYFISRAARLSGSESKAVQELDAATSKEDGPVASSLNRTKRWLLSHSQHLNFFSILILASVPNPLFDLAGIMCGQFGVPFWEFLFATLIGKAIIKTHIQTLFIVSLCNNQLLYLIEKELIWIFGHVPGFSATLPSVIARLHAAKDKYLSPPAPVSPSSQMGEKQWNFSFTSVWNSIVWLVLLNFFIKIVTSTAQDYLKKQQDTEMELISDSPIQDHSKTN

SEQ ID NO: 201654 - protein, 62 aa, Zea mays
  Clone ID: MRT4577_115493C.1.pep
LPFPLISSLWSGSGPCRPGDVHGLSLLQQTVCPSPEHECRLHGSGLFRSRSWRAFCSLGGDC

SEQ ID NO: 201655 - protein, 56 aa, Zea mays
  Clone ID: MRT4577_115494C.1.pep
GFVRFVGPKTKTKGPLFPNRNRFWYQILGRVAKNNLWVCPKSFKDSYNFPFPKKIK

SEQ ID NO: 201656 - protein, 151 aa, Zea mays
  unsure (1)..(151): unsure at all Xaa locations
  Clone ID: MRT4577_115495C.1.pep
MFYGGYAYHGNSFEQTYRCYPASFFDKPHLEGGDKVIMPPSALDRLASLHIEYPMLFELHNDATQRISHCGVLEFVAEEGMIIMPYWMMXNMLLQEGDTVHVKNATLPKGTYVKLQPHTTDFLDISKPESIFGKNLRNXSCLTXGDSIMVA

SEQ ID NO: 201657 - protein, 373 aa, Zea mays
  Clone ID: MRT4577_115496C.1.pep
MRPRHRRSNCINLRSNTSSSPATSSGKRDRHLEGAEIQDSKLFCQLREVEAKMFYGGYAYHGNSFEQTYRCYPASFFDKPHLEGGDKVIMPPSALDRLASLHIEYPMLFELHNDATQRISHCGVLEFVAEEGMIIMPYWMMQNMLLQEGDTVHVKNATLPKGTYVKLQPHTTDFLDISNPKAILEKTLRNFSCLTTGDSIMVAYNNKQYYIDIVETKPASAVSIIETDCEVDFAPPLDYKEPEKLRQPTVLASKAPAEDGNTAAEDEPKFKPFTGFGKRLDGKASKLQASEVPSTALSAPSDSNKRANQQISAPAASGASSYSRQKTGKLVFGSSASNNKEPQKAPAKEEQPAKKDDEPRFQAFSGKSYSLKR

SEQ ID NO: 201658 - protein, 74 aa, Zea mays
  unsure (1)..(74): unsure at all Xaa locations
  Clone ID: MRT4577_115497C.1.pep
WSILLIDQSNRSGSMEFVVXPPADPSSFFPISVGFSASSTFSDLKVTGILPLKEGNPPKFSQRARLLTANYQVV

SEQ ID NO: 201659 - protein, 321 aa, Zea mays
  Clone ID: MRT4577_115498C.1.pep
MFYGGYAYHGNSFEQTYRCYPASFFDKPHLEGGDKVIMPPSALDRLASLHIEYPMLFELHNDATQRISHCGVLEFVAEEGMIIMPYWMMQNMLLQEGDTVHVKNATLPKGTYVKLQPHTTDFLDISNPKAILEKTLRNFSCLTTGDSIMVAYNNKQYYIDIVETKPASAVSIIETDCEVDFAPPLDYKEPEKPRQPTVPASKAPAEDGNTAVEDEPKFKPFTGFGKRLDGKASKLQASEVPSTALSAPSDSNKRANQQISAPAASGASNYSRQKTGKLVFGSSASNNKEPQKAPAKEEQPAKKDDELRFQAFSGKSYSLKR

SEQ ID NO: 201660 - protein, 90 aa, Zea mays
  Clone ID: MRT4577_115499C.1.pep
KLDGHHSPWSYCHESCYGNFPHTKGSFRAGPTWSPTGPFFCFWEEEIMAPFPPGVNHFPLVFCFFWGIGSIFPWLHHLWPCMMKPSFAWV

SEQ ID NO: 201661 - protein, 81 aa, Zea mays
  Clone ID: MRT4577_11549C.1.pep
AGLKLAIKALRHVHKHHQVKERGIKMFSLLFCSTLILHLATGMEHVINSFFSQASKGIKHFISQPYAHQVSQCYTVILCIQ

SEQ ID NO: 201662 - protein, 192 aa, Zea mays
  Clone ID: MRT4577_1154C.1.pep
MARWAAVLALAAATAIAVASVAGGDMNADKTECADQLVGLAPCLQYVQGQARAPPPDCCGGLRQVLGKSPKCLCVLVKDKDDPNLGIKINATLALALPNACGATRANVSHCAQLLHIPPGSKDAAVFSPGSDKGSTAAPAKDNSTATTDSRALQATTGRGVSSSAATAGAALTVLLAGYLLLLVPELSPSSF

SEQ ID NO: 201663 - protein, 236 aa, Zea mays
  Clone ID: MRT4577_115500C.1.pep
MAMLVRPDHYQTEEALDSVRRLLRWGTPAFAGRIRADTTPLGDLAAGEFVPFVSYLFCGLALPISPFFLLLLLEEFGLQLQHLTPHSILQVAIFVQFCEMFVGVVACTSLFYQFFVLVRSSKGKDHLGAYYFQTRSDPTVTYIASLGGARWENWRNDWGVPRAGRAELEHEDFKEDIQKVSNREEDVTRKERSLVKKKEHLDQREEAVIVLHDKLKAYNTVLEKQRDKQATAVAKL

SEQ ID NO: 201664 - protein, 321 aa, Zea mays
  Clone ID: MRT4577_115501C.1.pep
MFYGGYAYHGNSFEQTYRCYPASFFDKPHLEGGDKVIMPPSALDRLASLHIEYPMLFELHNDATQRISHCGVLEFVAEEGMIIMPYWMMQNMLLQEGDTVHVKNATLPKGTYVKLQPHTTDFLDISNPKAILEKTLRNFSCLTTGDSIMVAYNNKQYYIDIVETKPASAVSIIETDCEVDFAPPLDYKEPEKPRQPTVLASKTPAEDGNTAAEDEPKFKPFTGFGKRLDGKASKLQASEVPSTALSAPSDSNKRANQQISAPAASGASSYSRQKTGKLVFGSSASNNKEPQKAPAKEEQPAKKDDELRFQAFSGKSYSLKR

SEQ ID NO: 201665 - protein, 49 aa, Zea mays
  Clone ID: MRT4577_115502C.1.pep
PYTATTPTQSYKWMVMRLHGRSWLNNRIKGLINHKLNIAARTYKKLGNQ

SEQ ID NO: 201666 - protein, 90 aa, Zea mays
  Clone ID: MRT4577_115503C.1.pep
MAVLIMNKNLVLPAVIMLVVVMVLSMVLGSAAARPLLGEDDRLPGEAAAAVGDSIVRLIRQLYRQQLSGPGAQVPRVRVRLRTLTTDASS

SEQ ID NO: 201667 - protein, 99 aa, Zea mays
  Clone ID: MRT4577_115504C.1.pep
PTHFTSDKKRNLSRDNIQTSSQQSAFTQDNSQGIQLHKAPSGSIASSRAPATTRASGGGLSARLLPPTRATSRTPLSAAAPTAASPPRPRTTRYSRGEK

SEQ ID NO: 201668 - protein, 98 aa, Zea mays
  Clone ID: MRT4577_115505C.1.pep
ALKSSTGVTFYLVVEGYRYLRFVLLSAPFVSTAPGDCTVLIKIPPPEMSSRTDLLAVLTSSILKLIVLVLNKSYSWCTESCTPCCSSPGSTQEILGWS

SEQ ID NO: 201669 - protein, 82 aa, Zea mays
  Clone ID: MRT4577_115506C.1.pep
PYGPPRLFLFFSGPFFCCIFSDSIFPRGPLFPLFPPTFYIPPFRKNWYPPRSRSDFSGCTPGSQKTPWPFLFFTWGLKKAFF

SEQ ID NO: 201670 - protein, 91 aa, Zea mays
  Clone ID: MRT4577_115507C.1.pep
LNMRLYVIRYTHNHTPAGLLSRQAEHSASGTTIQAQSESVPFTRIMADDEDRRRVGLCLHETRPPGRRIHHHHVVPLRFNELSSQYGITLL

SEQ ID NO: 201671 - protein, 74 aa, Zea mays
  Clone ID: MRT4577_115508C.1.pep
STTGPLKRHRYTFFYPNPHGARPNIYKFIYSGTLIPGEGKTTYFSLPPLRPLGYHKPQESTPGWGPQQTGNSKF

SEQ ID NO: 201672 - protein, 80 aa, Zea mays
  Clone ID: MRT4577_115509C.1.pep
ASSASRPPPPTRELPLRWVMPRWTGLEGRWRSSTTCPNKDTFCLIALYPLYGQDHRFVKKLMPLFRDFGLIKYRVLMKIN

SEQ ID NO: 201673 - protein, 95 aa, Zea mays
  Clone ID: MRT4577_11550C.1.pep
NKKNSSCVYLLILVLKSLCPVKKFLNDTRACFTSTVLLRNFQNYKSCALRYIGGSQRPVFFFLCSEDERFPHASSKFNRVYVLHVKVRDQSNRQL

SEQ ID NO: 201674 - protein, 196 aa, Zea mays
  unsure (1)..(196): unsure at all Xaa locations
  Clone ID: MRT4577_115510C.1.pep
QTWTRSLVCAVSGLTKAAQRNISSVNGDSYSKYSTAWNXFYEKXDPXFINIRTKAREVLQREDDLNEIVQLVGKDALAEGDKITLETAKLLREDYLAQNAXTPYDKFCPFYKSVWMMRNIIHFYNLANQAVERAAGMDGQKITYTLIKHRLGXLFYRLVSQKFEDPAEGEDTLVAKFKKLYDDLTAGFRALEDETR

SEQ ID NO: 201675 - protein, 54 aa, Zea mays
  Clone ID: MRT4577_115511C.1.pep
KTKVKPGDGCSKFEYPDYERLSKGAKGAKRKRIVSVLNRQAARMVKEDEKILKK

SEQ ID NO: 201676 - protein, 82 aa, Zea mays
  Clone ID: MRT4577_115512C.1.pep
CTSAFAHGSSIPKRGLKLRCSIKTFARVSIGQIGIVRLLGLGPGIAALALDVQLNRIKHMVFFSRRHPNLRGVSKPSKSFGS

SEQ ID NO: 201677 - protein, 77 aa, Zea mays
  Clone ID: MRT4577_115513C.1.pep
PPPHNGFKDAPGNSNSPEATLAGNAGLVPPLGALSGSGPGGGAKNPMFFAGPPMFPLPPPPRGPWKPLRPVGVWYGI

SEQ ID NO: 201678 - protein, 56 aa, Zea mays
  Clone ID: MRT4577_115514C.1.pep
VPAVRVAPTGRRVQAPAQPVAPTWCRHRSCLSTLTRAPPPSPGSPAPLLLLLLMLP

SEQ ID NO: 201679 - protein, 111 aa, Zea mays
  unsure (1)..(111): unsure at all Xaa locations
  Clone ID: MRT4577_115515C.1.pep
RPRVRTECPFXHPGEKARRRDPRKYHYSGAACPDFRKGGCKRGDTCXFLHGVFECWLHPARYRTQPCKDXTACPRRVCFFSHTPDQLRVLPPTPQQSSATPKGAGALPEYY

SEQ ID NO: 201680 - protein, 134 aa, Zea mays
  unsure (1)..(134): unsure at all Xaa locations
  Clone ID: MRT4577_115516C.1.pep
VSWVDAWILRSGLWLSPPDISQAKRFLDHMVHDXVPLVVSRQLLQTYAXDLWKLESDAHNEVAHYALXQIQPSEVXLQEQAVMLXENLAQVYEYEQHWXNAVQRLRGIDLDSGIRMLDDTYKLYKXGAIARLYL

SEQ ID NO: 201681 - protein, 117 aa, Zea mays
  Clone ID: MRT4577_115517C.1.pep
LTSLIFAFQTAISGKRRNGGRLFRAAPKPSRAPTPLETIQLEEISDLRDGQNQTSSGRKARPVRGTTSYRAATTPPAPLSTTTNRACKERLLKERGAGFRSLSWTHITAGCGSSSST

SEQ ID NO: 201682 - protein, 108 aa, Zea mays
  Clone ID: MRT4577_115518C.1.pep
SGTHSSSGSPTASARGRATRRSERRDGKRGGFENTKAPALRTLDEHEIDADGARRTRALSNADPAMVMDSGTVHAFSGFMFSVVDCSSLSATRARQLQFDRTRGRTRE

SEQ ID NO: 201683 - protein, 49 aa, Zea mays
  unsure (1)..(49): unsure at all Xaa locations
  Clone ID: MRT4577_115519C.1.pep
PQSHSASHRKLIIQXPAHXSRVKXRXCFTSXCCWXXAGXTQWQLPTSCH

SEQ ID NO: 201684 - protein, 96 aa, Zea mays
  Clone ID: MRT4577_11551C.1.pep
MAEKLAYATPKGAIDALTSTLSAEVAHLAITVNAINPGPADTGWMTEEIKQGLKPMFPFGRIGQPRDAARLIKFLVSEEAEWITGQVIHSEGGFKR

SEQ ID NO: 201685 - protein, 134 aa, Zea mays
  Clone ID: MRT4577_115520C.1.pep
ILWHRSVGGVMTHCGWNSTLEGVCAGVPMITWPHFAEQFVNERLVVDVLKTGVEVGVKGVTQWGHEQEEVTVTKDDVEAAVSRLMDEGEAAEEMRMRAREFGVKARKALVEGGSSYNNINLLIHEMGNRANVST

SEQ ID NO: 201686 - protein, 86 aa, Zea mays
  Clone ID: MRT4577_115521C.1.pep
KKHPGATYRERTPPPGWGVFYKKWGATGFSPVKPGREPPPHNCWCPPPLGPPGFTLKTLTPFVGGDFGRKIIFPCNYAWTFFWPLL

SEQ ID NO: 201687 - protein, 56 aa, Zea mays
  Clone ID: MRT4577_115522C.1.pep
LLGTSKQPFLINTPKTPHDNTQLIYYYVGSSIQHLFFVDDLIIYMIAALDKQTRPL

SEQ ID NO: 201688 - protein, 203 aa, Zea mays
  Clone ID: MRT4577_115523C.1.pep
MARKMLKDGEAPAVADGGGGEGEGSYDYDLFVIGAGSGGVRGSRTAAGFGAKVAICELPFHPISSEWLGGHGGTCVIRGCVPKKILVYGASFRGEFDDAKQFGWEINGDINYNWKKLLENKTQEIVRLNGVYKRILGGSGVTMIEGAGSIVDAHTVEVTQPDGSKQRHTTKHILIATGSRATLVDIPGKELAITSDEALSLEE

SEQ ID NO: 201689 - protein, 136 aa, Zea mays
  unsure (1)..(136): unsure at all Xaa locations
  Clone ID: MRT4577_115524C.1.pep
LGXLXGSGAFSSVGAGCPCCGXXPLFFCGCRLLLLWAGAFGXGXPXGSLCLXXXXXXAXXXXXRXGXXXXXFSXCWXLLXXAVXVXRRCAWFXVFGAXRXGVXCLACRAAGSSXCGRPGGAFHFPPCXFWXXXKXX

SEQ ID NO: 201690 - protein, 263 aa, Zea mays
  Clone ID: MRT4577_115525C.1.pep
LGTSRPARLGLYIKFSPSCEKTRAPFTWEAFQGIGSFMRLAVPSALMVCLEWWSYELLVLLSGMLPNAALETSVLSICISTVILVYNLPYGIGTAASVRVSNELGAGNPDSARLVVVVALSIIIFTAVLVSVTLLSLRHFIGIAFSNEEEVVNYVTRMVPLLSISVITDNLQGVLSGISRGCGWQHLGAYVNLGAFYLVGIPVALVAGFALHLGGAGFWIGMIAGGATQVTLLTIITAMTNWRKMADKARDRVYEGSLPIQAN

SEQ ID NO: 201691 - protein, 75 aa, Zea mays
  Clone ID: MRT4577_115526C.1.pep
CRVNLGAFYLVGIPVALVAGFALHLGGAGFWIGMIAGGATQVTLLTIITAMTNWRKMADKARDRVYEGSLPIQAN

SEQ ID NO: 201692 - protein, 142 aa, Zea mays
  Clone ID: MRT4577_115527C.1.pep
YVVALRQVHMSCILNYVGRIGLVYEGGESHELVDDAVDGARRALRGHIDELGRLGQRQFAHVGECKLIRSSREILRAPVLHISCTAAAPRCRRGVIWWLLLLDMRWRRVGEKKQTEEKDGRVGKGSPVYSSASAIPAGLEVP

SEQ ID NO: 201693 - protein, 74 aa, Zea mays
  Clone ID: MRT4577_115528C.1.pep
ELKCSKISKLPVNTEGTAIACKYSIQAGTGMWAGYINVSLVQPKRSTAKTNITLSGDSAPLKSKSGDGWVASSN

SEQ ID NO: 201694 - protein, 104 aa, Zea mays
  Clone ID: MRT4577_115529C.1.pep
QVDYLLGKQAYGGKTDSEGGFETDAVATANVLESSTPVVDGKQYYSIPVLTRTADGDKGGKHQFITATVSDGKLYICKAQAGDKRWFKGARKGVEKAAASFSVA

SEQ ID NO: 201695 - protein, 195 aa, Zea mays
  unsure (1)..(195): unsure at all Xaa locations
  Clone ID: MRT4577_11552C.1.pep
MSPTPFLSPRHRLLSVTSPRARTIGSRTLITSRCSDGPGSPATNASAGSTSGRTATDLLLRPVVAAGAGACIGSGWPLDARITMRVASKEDYICRDCGXHIYNDRTTNDKLADNYYXPVXCGAPKRRHRPYKTADSKNTKETDVTKARKENLNNEEMMRKTLTIAIDSAIIGMGDLNFYLNNGHRETTKTTAWCA

SEQ ID NO: 201696 - protein, 68 aa, Zea mays
  unsure (1)..(68): unsure at all Xaa locations
  Clone ID: MRT4577_115530C.1.pep
NIYMPDRKSFVWAIIDMGGGLHALKEKLYYDHGKNKGALGRNKTKALLRLSKKYWPPGPXTTPRANXS

SEQ ID NO: 201697 - protein, 168 aa, Zea mays
  Clone ID: MRT4577_115531C.1.pep
IAYNGDGFKLLIPSKWNPSKEREFPGQVLRYEDNFDANSNVSVIIQPTSKKTITEYGSPEEFLSQVDFLLGKQAFGGSTDSEGGFETGAVATANVLESSTPVVDGKQYYSVSVLTRTADGDEGGKHQLITATVSDGKLYICKAQAGDKRWFKGARKGVEKAAASFSVA

SEQ ID NO: 201698 - protein, 81 aa, Zea mays
  Clone ID: MRT4577_115532C.1.pep
AVAFFFFIFWKQHLNQPSFFSMTRMTRGGIKHSYNIKGGKPPILSEQWRIHPSDGQLSANHGIRAQNRPCAGSLRNFSCTG

SEQ ID NO: 201699 - protein, 54 aa, Zea mays
  Clone ID: MRT4577_115533C.1.pep
GDGPCLNLLAPLTKKKVNGPLNLDVLRCTGPCALLFNNFYQSVLCKQKKPRLKT

SEQ ID NO: 201700 - protein, 87 aa, Zea mays
  Clone ID: MRT4577_115534C.1.pep
GKINDEDKQKILDKCNEIISWLDKNQTAEKEEFEHQQKELEKVCNPIITKLYQSAGGMPGGMPGGFPGGGAPPSGGASSGPTIEEVD

SEQ ID NO: 201701 - protein, 88 aa, Zea mays
  Clone ID: MRT4577_115535C.1.pep
TNPSPSFSLSPWRTIISKNRSRVHRMIYPRPSFLRQSPFQRGPIPFVLGTNTLLGRSISKQRTRGFVPFQPFFWEFRMVSKNPVIPAL

SEQ ID NO: 201702 - protein, 78 aa, Zea mays
  Clone ID: MRT4577_115536C.1.pep
IDLHLRKSTVRLSYTHVKSVVYIFRTMARLCKKSIVVAPDAACRLLLCLDSQTRVVKEQHISSCQFRIQNARVKRRRA

SEQ ID NO: 201703 - protein, 50 aa, Zea mays
  Clone ID: MRT4577_115537C.1.pep
NNFLGPKGPFKRGQNKNKKLATHNHLNRRLDNTVLIWDQPLTKNHKGSLG

SEQ ID NO: 201704 - protein, 106 aa, Zea mays
  Clone ID: MRT4577_115538C.1.pep
TKGGTDTLKPTPPYPGVNPRAPPRGANTLTHTPPSGEPPGLSPPQKPQPFPPRVGLGAFATNPPNPPICPYYSKNPQEPVRPENPLYYETNTGPRLKALPLPRKTK

SEQ ID NO: 201705 - protein, 87 aa, Zea mays
  Clone ID: MRT4577_115539C.1.pep
GEKNRGTRNIPGPKKQKITGGRGIPHQRLGKRAKGPKSSLGEGPRGQQQPKGPTTAKLLREKQNDKRGGQNDPKSKKTPHAAPQPSG

SEQ ID NO: 201706 - protein, 163 aa, Zea mays
  Clone ID: MRT4577_11553C.1.pep
EKLLVVHSTKSECAYLCSCVCVSLFCDQQGELAGNWRLLLRRGLTTTTRAIEGGATSTAGAPRAAATRPSAASPLRSWPSPCAAARRASATTSRPGASTPPSSRFIGKVQQPVGDRPLRLVVPDLRRGQPLRRRGLQLAGVCAVRQRRHRVHDRLHGHVPGRE

SEQ ID NO: 201707 - protein, 136 aa, Zea mays
  Clone ID: MRT4577_115540C.1.pep
MIREAKPCLPCSSDSSAYSSSQVRIRRSHATTRHSPQVLFSLLPPCSSRGTRIARLTVAIACPLPPEGELVVVPTGAQNSGGGDDDKEVLVELKHFLQDNNKVNRGAYDAWQESDASPCEWHGVQCDTADRVTALD

SEQ ID NO: 201708 - protein, 60 aa, Zea mays
  Clone ID: MRT4577_115541C.1.pep
CLAPRLAEIEGVEGGKDPKLSPQAGQGRAWEIGSSSRRSAPLRLRGLDCTERDATRPCVR

SEQ ID NO: 201709 - protein, 63 aa, Zea mays
  Clone ID: MRT4577_115542C.1.pep
PLQRVGYSIELKAQPFITKKEVLSIRLFKHTLKTECLICTRDTTSSISLSNQPHPPHRMFVQV

SEQ ID NO: 201710 - protein, 79 aa, Zea mays
  unsure (1)..(79): unsure at all Xaa locations
  Clone ID: MRT4577_115543C.1.pep
XPGSISSVCLELYESDGKNSAKEETKFAQVVLQDLDKKXENGLRDILAVLTMKRDGSLHVTCTDQETGKCEAISIEIAS

SEQ ID NO: 201711 - protein, 94 aa, Zea mays
  Clone ID: MRT4577_115544C.1.pep
SWRPEDIRVVGPCISYYSQQQRRSTKAISSCCEHDIAGRIGPGTWNKKCARLDCGINCRNISFRCGVLFLGEMCKVASCDWKRWTKLSASCRRT

SEQ ID NO: 201712 - protein, 116 aa, Zea mays
  Clone ID: MRT4577_115545C.1.pep
QGNLRVCEHHEPGPVRGAAHCSVHADRYQAWLESGPVAQLEVLAVAHPGARESPGSRPATCCRSGPSPTSSRQTRGASVSSKVQIAHRLARTYSLYDSPPRPGCPDLRVPPGGLTN

SEQ ID NO: 201713 - protein, 36 aa, Zea mays
  Clone ID: MRT4577_115546C.1.pep
GKKLLVVRTRRLLISYPFLLVRVPEVNYVGLFLIVI

SEQ ID NO: 201714 - protein, 147 aa, Zea mays
  unsure (1)..(147): unsure at all Xaa locations
  Clone ID: MRT4577_115547C.1.pep
HGRSRRWWSTXVVFQPVAXPPGSDGSTITGRSERASASRSGEXFMQITGIXTHLEDADVPALSXKWRGKTAEELASETAFLSDVATGDMEKFRRVTMMLPVMGDXNAEKVTENCEAFWKVGVLYTNTEGVTREKFNMVMKPQTVMWG

SEQ ID NO: 201715 - protein, 80 aa, Zea mays
  Clone ID: MRT4577_115548C.1.pep
WYEGINLLFFICTRGDLSLHTIKHIPRVRLGIYGLIIAVIISTGINPKAKPYNLFDGYAHLSSGLACGLAGLAAGMAIGI

SEQ ID NO: 201716 - protein, 30 aa, Zea mays
  Clone ID: MRT4577_115549C.1.pep
RYWLKANLLTNYLTSQEVPGLVKEGRLLNN

SEQ ID NO: 201717 - protein, 126 aa, Zea mays
  Clone ID: MRT4577_11554C.1.pep
WVPRGRPGYHFSFRSDPLSYHGGRRLHREGQEYPGKMTVFVFLACLVASSGGLIFGYDIGISGGVTSMDPFLKRFFPSVYAKEQEVVDTNQYCKFDSVLLTLFTSSLYLAALVASLFAGYITKRCG

SEQ ID NO: 201718 - protein, 57 aa, Zea mays
  Clone ID: MRT4577_115550C.1.pep
TIFLGANNYNPAQGLIFLFADQFIGNTFANAGILDSQTDTRKARAYWTRPGISLIGN

SEQ ID NO: 201719 - protein, 178 aa, Zea mays
  unsure (1)..(178): unsure at all Xaa locations
  Clone ID: MRT4577_115551C.1.pep
MVLQLHCATPTITISPPPAXSSLPPPPLRRQRSAPXPARGLGHLPRLLLVGVRDPRADGAVCHVRRQVRYDEDDEEDDDGEEWGHNEDVARMERYSEDARDQALLVKARVDDEVEVVLVFRGFSSSLSGGTAADPARSVLPERAIIQSVDVVKGPFDPNNIEYLEKGVGWEDFRSRLR

SEQ ID NO: 201720 - protein, 120 aa, Zea mays
  Clone ID: MRT4577_115552C.1.pep
PTTAEPEETNLHPLSIHKKTKKKKKAKGKAHPARATQANTRKTPTTPQPKQQRPKTNARHHAKQRRDPHNPADPKRKQPETQTPHATKRNTKHARTERPAQQDPNTNDQRNAPCTRPLTA

SEQ ID NO: 201721 - protein, 41 aa, Zea mays
  Clone ID: MRT4577_115553C.1.pep
MDFLNDFYCVTSYLFNFSYFFYIYLFYYLFCLHFLHIQCLL

SEQ ID NO: 201722 - protein, 383 aa, Zea mays
  unsure (1)..(383): unsure at all Xaa locations
  Clone ID: MRT4577_115554C.1.pep
MGAVASTVAARFAFFPPTPPSYGVEXAVAGRXAADTEVVELSGVPVSRGRGVEARRLPTKRGTEVVSMYVRQPGARLTLLYSHGNAADLGQMYELFVELSAHLNVNLMGYDYSGYGQSSGKPSEQNTYADIEAVYRCLLESYGASEENIILYGQSVGSGPTLDLASRLPHLRAVVLHSPISSGLRVMYPVKHTYWFDIYKNIDKIPLVRCPVLVIHGTADEVVDCSHGRALWELSKVKYEPLWIKGGNHCNLELYPEYIKHLKKFVTAIEKSQPVKDESPESSGPSDPSEIGSESAENSRRSTDVRDKPRSSIDHRPSIDRREKPRGSIDKRDKNRKSIDQLDKPRASVDQPDRARKSIDRFGGMMRSVKLCNIDCFTSASGS

SEQ ID NO: 201723 - protein, 59 aa, Zea mays
  Clone ID: MRT4577_115555C.1.pep
YIHFQNFLLKLVKQWSICTQPLEPYQIDQCLTTALSQIHQPISNSENSLLNPILISHNV

SEQ ID NO: 201724 - protein, 129 aa, Zea mays
  unsure (1)..(129): unsure at all Xaa locations
  Clone ID: MRT4577_115556C.1.pep
YRPSFLLAPSVKRGIHHKAIILWKSTRSPMRHXVIGHPVYKRHATPYWELGRCGTPLEVVGIYYHGIEFLHHGGIHNTSPVAPLRSVHLFFYTPYWLYSVLIFSPGYLSACSWKGNKHTVQGLQHHIAG

SEQ ID NO: 201725 - protein, 75 aa, Zea mays
  Clone ID: MRT4577_115557C.1.pep
VAGGIKAIYYGVHLSVCVEAVGRLRQSVRPPRRCGPAPHNGCPTIAALRTGATISSFCCSHNPFHKLVSVRLHGD

SEQ ID NO: 201726 - protein, 72 aa, Zea mays
  unsure (1)..(72): unsure at all Xaa locations
  Clone ID: MRT4577_115558C.1.pep
XTRRDNATTCHRGAFLGVIERWPRGIFTERRGGELSSDDGDRPVGCRGGSPARLLLLLPFLRVTFCCCCRLG

SEQ ID NO: 201727 - protein, 83 aa, Zea mays
  Clone ID: MRT4577_115559C.1.pep
MVAAAADLAAALLLLAEVAETASEAVSCGEVTSTVAPCLGYAMGSAASPSAACCSGVRSLNSRASSAADTDATCNCLKSMTGQ

SEQ ID NO: 201728 - protein, 123 aa, Zea mays
  Clone ID: MRT4577_11555C.1.pep
LGTSRPAGTTHPPITKPGSSTVQLEVIASRERAQCEGQLTQSNPWLKRQSTRWITLHGWGLIGARRKDQAGRGTLVGVFGLCRTASHRGQGSRRSERCEVTSHLKSKLVPGISSPRSRTGTTG

SEQ ID NO: 201729 - protein, 57 aa, Zea mays
  Clone ID: MRT4577_115560C.1.pep
FQMCMPQKKNPILLPFGEHFWWHQGWCGVVERALSLESQPDETALVFTSCVTWASSC

SEQ ID NO: 201730 - protein, 108 aa, Zea mays
  Clone ID: MRT4577_115561C.1.pep
DVAVAEQEASGSKPSAVADVEATMVESHANLRVLSRRRPRQLLRLVLGLQGHRLTVLHLNMSSGAHMVLYSFSLKVEDDCQLTSVGEIAAAAHHIVEKINEEQNKAAA

SEQ ID NO: 201731 - protein, 68 aa, Zea mays
  Clone ID: MRT4577_115562C.1.pep
ERGQRLRLFVRPRVLGALAVRHAARALQVGGDVHRRHVLRGPQARQGVRAVLQADPDQPNLDVLDGVA

SEQ ID NO: 201732 - protein, 122 aa, Zea mays
  Clone ID: MRT4577_115563C.1.pep
GVEDGCGGAVRAHDDDVAASSSRPVPLRRLPLLPWRRRRAGLPRRSPDRGHLHDTQVARTLAMRSAADVSSCTVSCRELNGDVRLIVVQSLTEFTKMLQIAVSFISKMKPLPPSAPARTATP

SEQ ID NO: 201733 - protein, 162 aa, Zea mays
  Clone ID: MRT4577_115564C.1.pep
RARTRSCAWGSWDSGCWTCRRRSRPRRPTSARPGSRAPRGRWTSGRWWPWRWRRPRKPAPSRCPSSRASSPGSTPACPTSAAASATAPSPCAAPCRSSTAPPPRCTRATRRWPGRSRCALPPTSRPAPSAAGSSTATCASSSCRASPSSPRCSRSPSASSAR

SEQ ID NO: 201734 - protein, 97 aa, Zea mays
  Clone ID: MRT4577_115565C.1.pep
MTAAVLSVRTTTTSLLAAVILCLCIVSLSPRGAAAARVSPGASPIVATCMTGPYPELCVGELGQRLLDVQTSIASAAPDQRAARIAGAPVQVDVKGA

SEQ ID NO: 201735 - protein, 102 aa, Zea mays
  Clone ID: MRT4577_115566C.1.pep
MFCRREKGDMQQGFVEMLVGSQERTSDSLPCGAHTERKKKASPLCKGDGSGIDFAVQSNYYRKDVRVLWRRWIDAVSRVYFLIVRGAAVVQAKVPVPARSRS

SEQ ID NO: 201736 - protein, 73 aa, Zea mays
  Clone ID: MRT4577_115567C.1.pep
HPKGEHPSPCAPTPWWSISHGSFKLPMCLRPLVPSLHMEAVKLSAVRVMNPVNVGLHNGPCVSRVPTTQNYDK

SEQ ID NO: 201737 - protein, 373 aa, Zea mays
  Clone ID: MRT4577_115568C.1.pep
MTPARRMPAMIGRNNGVAFGSSSALSLSQVIIPADFLDSHHLQQAFEQQLFEQIPSTAVDSSDNIIHGRSDALVDEFESKSCSENPDGTASGDDGQGDEDPNQRPNKKKRYHRHTQHQIEEMEAFFKECPHPDDKQRKELSRELGLEPLQVKFCSQNKRTQMKNQHERQENAQLRAENDKLRAENMRYKEALGTASCPSCGGPAALGEMSFDEHHLRLENARLRDEIDRISGIAAKHVGKPMVSFPVLSSPLAAAAAAARSPLDLAGAYGVQSAAAGLGADHVLFGAGAGDLLRSVSAGQLDADKPMIVELAVAAMDELLRMARPDALLWGGGASAGAQQQQLDEEEYVRTFPAGLGPRQYGLRPEASRDSAV

SEQ ID NO: 201738 - protein, 97 aa, Zea mays
  Clone ID: MRT4577_115569C.1.pep
AVTVSKNFQTAVNWGGGDTDRLGATEVYDGARLRLDTRYGDHLEMASLWLDIAPNCSARSALELVCRRRLLASFARLLSAVSFALWTTHLASLNASS

SEQ ID NO: 201739 - protein, 58 aa, Zea mays
  Clone ID: MRT4577_11556C.1.pep
HSSHLTPSLSSFFLPLQPIPQTGFLLLTDSSTTTTHIFILIHNPFSQLISIINPNFSP

SEQ ID NO: 201740 - protein, 797 aa, Zea mays
  unsure (1)..(797): unsure at all Xaa locations
  Clone ID: MRT4577_115570C.1.pep
MTPARRVPPAAMIGRNGFAFGSSSALSLSQADLLDSHQLQQAFQQQLFDQIPTTTTVDDSSDNLIHGRSDTLVDEFESKSCSENPDGTSGDDGLEEDPNQRPNKKKRYHRHTQHQIQEMEAFFKECPHPDDKQRKELSRELGLEPLQVKFWFQNKRTQMKNQHERHENAQLRAENDKLRAENMRYKEALGTASCPSCGGPAALGEMSFDEHHLRLENARLRDEIDRISGIAAKHVGKPMVSFPVLWGSEDIYQWGVKNAPLDLAGAYGVQSAAAGLGADHLFGAGAGDLLRSVSAGQLDADKPMIVELAVAAMDELLRMARPDALRRVVVASAGTXQQLLVDEEEYVRTFPAGLGPRQYGLRPEASRDSAVVIMTCDSLIEILMDANRFAAVFSSIVSRASTHEVLSTGVAGSYNGALQVMSMEFQVPSPLVPTRESYFVRYCKNNPDGTWAVVDVSLDSLRPSPVIKCRRRPSGCLIQEMPNGYSKVTWVEHVEVDDRSVHNLYRPLVNSGLAFGAKRWVGTLDRQCERLASAMASNIPNGDLGVITSIEGRKSMLKLAERMVASFCGGVTASAAHQWTTLSGSGAEDVRVMTRKSVDDPGRPPGIVLNAATSFWLPVPPKRVFDFLRDETSRSEWDILSNGGAVQEMAHIANGRDHGNCVSLLRVNSANSNQSNMLILQESCTDASGSYVVYAPVDVVAMNVVLNGGDPDYVALLPSGFAILPDGPPPAGAAPSHGEGLDAGGGGSLLTVAFQILVDSVPTAKLSLGSVATVNSLIACTVERIKAAVCAEAGNPQ

SEQ ID NO: 201741 - protein, 51 aa, Zea mays
  Clone ID: MRT4577_115571C.1.pep
VPHMRPPASGVHGAQQCLSDSGRTSVGTQQRARQVVGRRRGEKVLLFLEPN

SEQ ID NO: 201742 - protein, 54 aa, Zea mays
  Clone ID: MRT4577_115572C.1.pep
MKCNWGKVWKTGENIQWKSMKFRVMNRDHRKTTSWNVIHDDWKFGVKYQASKNF

SEQ ID NO: 201743 - protein, 84 aa, Zea mays
  Clone ID: MRT4577_115573C.1.pep
QHLTTNGTHNYGHRCPPCSFIKHHYPNYHSTLHTSLPFSVHITIDWNTQLYTHTYYTTPSHMASYVLYYRPHNNHMPNHNTYSI

SEQ ID NO: 201744 - protein, 78 aa, Zea mays
  Clone ID: MRT4577_115574C.1.pep
LMSAEHGTTKPGSRGPNPTKRESIDLMDKLFWLDILIVTLHLQFDLLQTTMDSQWNMIGTHIKDPTDPHACIADTQSR

SEQ ID NO: 201745 - protein, 87 aa, Zea mays
  unsure (1)..(87): unsure at all Xaa locations
  Clone ID: MRT4577_115575C.1.pep
PRTSPPPYVPPYVPPTPGSSPPYVPAYVXPTPPATRTFPVDTLKLNACVCELSRLIHLGIDQEARXKSCPLLHWVSDLDAALCLCTT

SEQ ID NO: 201746 - protein, 55 aa, Zea mays
  unsure (1)..(55): unsure at all Xaa locations
  Clone ID: MRT4577_115576C.1.pep
VKAAAVLAGTDVKATIFFSQEGQGPTTVTVNISGLKPGLXHGFHVXHALGDTTNG

SEQ ID NO: 201747 - protein, 53 aa, Zea mays
  Clone ID: MRT4577_115577C.1.pep
CFLLKCLSLILPPFIGPLFRVQGLPPPWLVPHGLFYSFLFQSFFFPKKKKKKP

SEQ ID NO: 201748 - protein, 52 aa, Zea mays
  Clone ID: MRT4577_115578C.1.pep
FIKMQRPVLDNDLCTYRHYNQQTYNTIYCTYHIYKTYIIHIFYTHTYDINFT

SEQ ID NO: 201749 - protein, 216 aa, Zea mays
  unsure (1)..(216): unsure at all Xaa locations
  Clone ID: MRT4577_115579C.1.pep
MSCNGCRVLRKGCSEACVLRPCLQWIDAAEAQGHATVFVAKFFGRAGLLSFISAVPDAQRXPALFQSLLYEAAGRTINPVHGAVGLLGTGNWHLCQAAVDTVLRGGAIGPLPELGAGTGHLYGPPAATDKRAGGWSTFSTAKRARKAAAGAGAPPAAAAACCDLGLCLSSSPGSPPAAADRRDPLLRPGTPSMSSDESVTTTAGGDREPVLLNLFA

SEQ ID NO: 201750 - protein, 57 aa, Zea mays
  Clone ID: MRT4577_11557C.1.pep
PTKKTDRVKAHGNPNNLGPSMFFSNLSQTIKSPPCHSECKVSVFQTPFANLETLWVA

SEQ ID NO: 201751 - protein, 98 aa, Zea mays
  Clone ID: MRT4577_115580C.1.pep
TKWEAAARLPGDSTRQVVVRSGVVLGRGGGAMGHMLLPFRLGLGGPIGSGHQFFPWIHIGDLAGILTHALEANHVHGVLNGVAPSSATNAEFAQTFGA

SEQ ID NO: 201752 - protein, 85 aa, Zea mays
  unsure (1)..(85): unsure at all Xaa locations
  Clone ID: MRT4577_115581C.1.pep
GALAVLPFVPCAPPCVCCAVAVLARPWAALRPRAAPCCSSALRCFLXASSCSLFLGFLSFPVLVLPPFVALPPRFAVFAPAGGPG

SEQ ID NO: 201753 - protein, 79 aa, Zea mays
  Clone ID: MRT4577_115582C.1.pep
RKIDMPPPVKSFSGSPLGMAALQGSLGIFTLLTCVPPSLGSGPPAGGVALLSPTILLVSPFKRPSPACFKSFATAVKST

SEQ ID NO: 201754 - protein, 568 aa, Zea mays
  unsure (1)..(568): unsure at all Xaa locations
  Clone ID: MRT4577_115583C.1.pep
MVSRPPSAFLGLHLAPVVEFSWQGNSKRKRGEFWNKSVHSIESLAAGDAQHKLFQTLGPTLLISMAYIDLGKWLVAVDAGSRFGYDLVLLVLFFNFSAILFQYLSTCIGMVTGKNLAESFGDXPYSVLLXLIDLLPGIQHGXSLLTSELTMIAGMAVGFNLVFEHDNLITAICFASVVVNLLPYTLSRLVKCSDGMYKHVLLSILNECVLHVESDPTTTNLRVLNVQRRSSHTLGSLFHDHLFSILFIFTGIYLVNYILLSSAADESSETVVMNFQDATELMHQIFTNPAGPIVLLVILLFSSHIISLTCIVSGEVISENFFGVKLPLSAHHLLPKGLAMVLNIYFAKVAGPEGIYQLLIMCPVIQAMLLPSSIIPILRVSSSRLLMGRYRIALCIEIFAFLAFLLVVFTNIIFTAEIMFGTSTWTNNLKGDTGSPAILPYSVVVLISCASIGFTLLLAVTPLKSASNEAQTHLSSMHSQRGALGTTQREATSLKKFEHEEVQSCSVGAVLMGSSEDEEIKGSSVDAVPRDSLEGLQKSTFEIKYDSDASDGGAEQFVDRLKLNHHHL

SEQ ID NO: 201755 - protein, 48 aa, Zea mays
  Clone ID: MRT4577_115584C.1.pep
HASATPPQVVPIVFSAQERMLATWRTLRSFRTTTSYSYLSGKPLVSYL

SEQ ID NO: 201756 - protein, 93 aa, Zea mays
  Clone ID: MRT4577_115585C.1.pep
PPPLSVPSPLSTSPPGCYAIPCALLRPGSPRLRPRQTAPLLDTGDGHRWSLRPSLVVSPPLDAPVFSPAPVSVAPCSFHSYSTALVVVHPSAL

SEQ ID NO: 201757 - protein, 103 aa, Zea mays
  unsure (1)..(103): unsure at all Xaa locations
  Clone ID: MRT4577_115586C.1.pep
MSARHKACNCLLKCRVQREREALRDNXEGIANPDIRRLLKMGGLNLIWGLMYEENRERLMIFLLNLMRNGKTYSEHSPLKSVSAXERSYRMKRQGHTLYRFSS

SEQ ID NO: 201758 - protein, 49 aa, Zea mays
  Clone ID: MRT4577_115587C.1.pep
PRTTIASWRWTPDSGCVGCWGTFFAGRPIHSSMSVYMWYPPSARLLVGA

SEQ ID NO: 201759 - protein, 57 aa, Zea mays
  Clone ID: MRT4577_115588C.1.pep
HSGNFTRHKRYAKQAPMVGNLWANINRQYYYNMLDSGHVEIKNIWAKQRQLLVLVHL

SEQ ID NO: 201760 - protein, 82 aa, Zea mays
  Clone ID: MRT4577_115589C.1.pep
DPRVECSTVRVHTVLLVRDMRTLMQGRFWYIPAMLVQTRVPVHGSSATASHATGTPSMSSVYLIQYPRESCPLGIDSEPPDV

SEQ ID NO: 201761 - protein, 97 aa, Zea mays
  unsure (1)..(97): unsure at all Xaa locations
  Clone ID: MRT4577_11558C.1.pep
GEALQQDLGGDRGLKEGWVELVQXQDSQVGFQIIGIFIGMRLYIALQGGQVLRIVPVDTLEQLAHVGSHLLKHRHDYCRLPQPGLEANTDPARRPHG

SEQ ID NO: 201762 - protein, 68 aa, Zea mays
  Clone ID: MRT4577_115590C.1.pep
PTFSFFHYKTLDTHKGRLSHIQLRLLPTLRHKNFFFHEHTDHTMLHRSEPHIYQRIYKHYDKKAVCPY

SEQ ID NO: 201763 - protein, 68 aa, Zea mays
  Clone ID: MRT4577_115591C.1.pep
SAAALCFLFFYWKRCHGTIQTALHRLKRHVTFSRYDLWAVERKDLRHTELECVHLTFTLIWRASLHCR

SEQ ID NO: 201764 - protein, 42 aa, Zea mays
  Clone ID: MRT4577_115592C.1.pep
CSSTVNVVPIRILVLILYLRLSPPELLNQGIYSPTKTPDTIK

SEQ ID NO: 201765 - protein, 48 aa, Zea mays
  Clone ID: MRT4577_115593C.1.pep
RLITATVMGNKLHERLWPQQGERMIAVVTRQWSGNFMNWTKLTWRLEK

SEQ ID NO: 201766 - protein, 79 aa, Zea mays
  Clone ID: MRT4577_115594C.1.pep
GWSTTEHCTPVGAWPPDRCFVLPYPRMIPATVIYPKRMLFVSWRVPCIPITGPLMEKVLGSNSDRMQPRMSRPAYWSNE

SEQ ID NO: 201767 - protein, 445 aa, Zea mays
  unsure (1)..(445): unsure at all Xaa locations
  Clone ID: MRT4577_115595C.1.pep
STSTLECSLTRTVAARCGDRSLPSPAXVPIAVAFALLAAASAASPAPVNVTGVLSAFPDLNDFTRLLASSPVLXELXAGRSSLTLLAVPNGNLPQSPXSAFAXAASGADLADVLRYHVLLEYLSHADLRRLPASGKLVTTLFQTTGRATADLGAVNVTTAGASRLTVIRSPAPFPGSNATVLGAITAVPYNLSVLAVSGLIAPSGFDLAASESQPPAAVNITRVLADARAFNVAASMLEASGVAAEFEDDERGAGITVFAPTDDAFAGLPAGDRLQSLPADRKAVVLRFHVLHSYYPLGSLESIVNPVQPTLATEFSNAGRFTLNITRANGSVAIDTGVVQATITRTVFDQNPVAVFAVSKVLLPKEMFTRTAAASIVATTASASSPPPAATAPEASESARTPPTKLSSPPALRGGGQDYATAPAPARGIEWWCIALVYLLPHLV

SEQ ID NO: 201768 - protein, 58 aa, Zea mays
  Clone ID: MRT4577_115596C.1.pep
RANRAVIIGHLIRVDIDSLFDWTDFSHPLTRASFDEPNNHLFLKTMYPFKKVMNDAVL

SEQ ID NO: 201769 - protein, 263 aa, Zea mays
  Clone ID: MRT4577_115597C.1.pep
MAYRAFATLLAVLAFVGFASVPRGLATDPTQLQDFCVADNKNPVLVNGVVCKNPNMVKATDFFSTIVPVAPNGQGSAVTPVAVNEIPGLNTLGISLARIDFVPGGQNPPHTHPRGSEILTVIQGTLLVGFVTSNQLLNNTLFTMQLNMGDVFVFPQGLIHFQLNNGKTPAVAIAALSSQNPGTVTIANAVFGAKPPILDDILARAFMLEKATVDWVQQAFGAAPVAGGGGGLPGGGGYPGSGGGLPGGGGYPGSGFPGYPGRS

SEQ ID NO: 201770 - protein, 242 aa, Zea mays
  Clone ID: MRT4577_115598C.1.pep
MARRLAYTTALTTLFSYGLLFAFGQLRDLFRHLLGCFRPNKDDDVKQGYAPICVGLEDFFVRRLYLRVQDCFGRPIASAPDSWFDVVERTSDDNNKTLQRTSKTTRCLNLTSYNYLGFAAADEYCVPRVVDSLKKYSASTCSARVDGGTTKLHTELEELVARFVGKPAAVVFGMGYVTNSATIPCLIGKGGLIISDSLNHNSIVNGARGSDATVRVFQHNCPAHLEEVLREQIAGGQPLQHM

SEQ ID NO: 201771 - protein, 153 aa, Zea mays
  unsure (1)..(153): unsure at all Xaa locations
  Clone ID: MRT4577_115599C.1.pep
KKLETIRPRTSPISPILIFFLSPPPKQDLLIINNVCPXNYTTSFNFIFHFFFFSFTFTFXKYYFFTTLFYSLXSFFIFFFILNTLNLITLYTYFTSLLTHFYFFFIIFXFFILLSYYXFFFHYISIIYFFIYISYXFTSYYFFFFNISYLSFF

SEQ ID NO: 201772 - protein, 70 aa, Zea mays
  Clone ID: MRT4577_11559C.1.pep
KKKGPLFSLQKVKRKPVGLKFCPHFFYTTWLFFVTKILPGFPGVKILFFGGPSFALCNLAEQILLGHTYN

SEQ ID NO: 201773 - protein, 49 aa, Zea mays
  unsure (1)..(49): unsure at all Xaa locations
  Clone ID: MRT4577_1155C.1.pep
SYGSGVRMVSEFQLLNITSRPKTFKQSIIISLVYQVXIYHIQIYPLSDR

SEQ ID NO: 201774 - protein, 53 aa, Zea mays
  Clone ID: MRT4577_115600C.1.pep
ILDATAETAEATAAPSPGFVVTGPVYCDNCRAGYETNDNHAIEGATAEIECRH

SEQ ID NO: 201775 - protein, 182 aa, Zea mays
  unsure (1)..(182): unsure at all Xaa locations
  Clone ID: MRT4577_115601C.1.pep
MAAAPCTLNMASVLALLLVFSVHWTGRSHAFSLMNYLCNNGSSYALNSTYRSNVVALLGSLSANASSSAVGFATGTLGRGPDQTWGLALCRGDVNGSACASCLALAPDVAFGKCRGVKDASIYYDRCLLRYSDTDFLATPDDAAASVQYGANLQVNVTADPGRFAXLAADLVGALSAWAAWN

SEQ ID NO: 201776 - protein, 112 aa, Zea mays
  unsure (1)..(112): unsure at all Xaa locations
  Clone ID: MRT4577_115602C.1.pep
XXXGSVESSTPSRFASPIFFFFRRRRRSPTRRLAAIPKSIHQSSVSFHFIPVGRHSTDREQSITSHQTNLTSLVPRCVSAALSSTPVFLLLDCIAQARERTHTDRNNHELLI

SEQ ID NO: 201777 - protein, 207 aa, Zea mays
  Clone ID: MRT4577_115603C.1.pep
MNTNTNSNPTTASVVVAQMTAPSSVAISPYDASAYSATVVPDMSFAQQAAMLGLGAQQQAFTQPNAMLAMIAAMQNPAALGMSPAMLAAMNPAFAAAALGAGGQQAHTVGLTGFGAQGFATPSFGAGAAFPNAAGVQAAAAAYQGSGAPPGFQGPPGFQVGQATTQTSTAAAAAAAAATAAGYQAGASGQGQVPGSQVGGTGFQGGY

SEQ ID NO: 201778 - protein, 76 aa, Zea mays
  unsure (1)..(76): unsure at all Xaa locations
  Clone ID: MRT4577_115604C.1.pep
ENCAGESERREGDEGLGNSSTRLGRERVESSVGREAHNTFDVRLSFRVYVVIRSDYTRPCKRAFRSXTADXXMVMQ

SEQ ID NO: 201779 - protein, 122 aa, Zea mays
  Clone ID: MRT4577_115605C.1.pep
MLAAMNPAFAAAALGAGGQQAHTVGLTGFGAQGFATPSFGAGAAFPNAAGVQAAAAAYQGSGAPPGFQGPPGFQVGQATTQTSTAAAAAAAAATAAGYQAGASGQGQVPGSQVGGTGFQGGY

SEQ ID NO: 201780 - protein, 515 aa, Zea mays
  unsure (1)..(515): unsure at all Xaa locations
  Clone ID: MRT4577_115606C.1.pep
MAPKKRKADPAESPAAVEAATTNHRHEPASSEPKPRGSIYFPITDDPPEPNAAEEDEDEGAGDDEDDAEDIVKLLEPLSREQLVALLRTAAEASPATMAAVRRAVEADPASRKLFVHGLGWGAGAEDLRSAFSRFGELEDCRVISDKQSGRSKGYGFVLFRSRRSALRALNRPQLQIGGRLAFCHLAASGPAPPASQSQNPXPTPTPMLTLTPRATLLDPXSQTDNIQRKIFVGNVHADVDVDRLYDYFAQFGEIEEGPLGFDKNTGRPKGFALFVYKSVESARRALEEPIKNFDGKTLNVQKAIDGRTKGSSGMNTNTNSNPTTASVVVAQMTAPSSVAISPYDASAYSATVVPDMSFAQQAAMLGLGAQQQAFAQPNAMLAMIAAMQNPAALGMTPAMFAAMNPAFAAAALGAGGQQAQTAGLTGFGAQGFGTQAFGAGGAAFPNAAGVQAATAAYQGGGAPPGFQGPPGFQVGQATTQTSTAVAAAGYQAGAAGQGQVPGAQIGGTGFQGGY

SEQ ID NO: 201781 - protein, 216 aa, Zea mays
  Clone ID: MRT4577_115607C.1.pep
MKVLIVLAACVVAALAGVPSESEIKAHWESFKATHGKTYANAVEEAYRAKVFKENAIRISKHNDRFASGEVTFKVGYNQYADMHTHEVTEKMNGFRMEMKKPSAFVHSASNDSWPWSKKVDWRSKGYVTPIKDQGQCGSCWSFSATGSLEGQLFKKTGKLVALSEQNLVDCSWDYDNQGCNGGLMDSAFQYVQANGGIDTEESYPYTGEDGSACAY

SEQ ID NO: 201782 - protein, 56 aa, Zea mays
  Clone ID: MRT4577_115608C.1.pep
GSTNDNRTNMRPTYHIPLYFTVEYVSLCLVTKTLKRGTESISLYGNFLKKKKKKSR

SEQ ID NO: 201783 - protein, 84 aa, Zea mays
  unsure (1)..(84): unsure at all Xaa locations
  Clone ID: MRT4577_115609C.1.pep
IVDAASPSQFSISPSPPRHILSIPLPNIYPFPPSDHQSLPPXHHPSPKXPTKKPTPSTNAKATSTPTPQPSPPSRPSPPSPPPT

SEQ ID NO: 201784 - protein, 85 aa, Zea mays
  Clone ID: MRT4577_115610C.1.pep
MAAHNTSMTCEGDYETEQKKQAAADVLFHYSQFIMVCIGEGVRPTDLRLHLMKEVSGMATSLTKEPQQAAASPDSSEPSSSGTTK

SEQ ID NO: 201785 - protein, 113 aa, Zea mays
  unsure (1)..(113): unsure at all Xaa locations
  Clone ID: MRT4577_115611C.1.pep
MLKRGKGGSAGNKVRMVLGLPGAGTVNWADNTGAKNLFIIFVKGIKGRLKRLPXACVGDMGMGTVKKGKPDLKKKVMPAVIVRQSKPWRFKGRVYMYXKIMRGVIVNSKGEMK

SEQ ID NO: 201786 - protein, 102 aa, Zea mays
  Clone ID: MRT4577_115612C.1.pep
TIRGRPSNFVDSNEVVLTDHVRFFKVSRGREAGRCFRTKVDVEKSVKPVSEGEGVTAVNNWNRGGFGSLYTVPSSLVWSKVLNRPSKWKGIHSDDRTLFRPR

SEQ ID NO: 201787 - protein, 85 aa, Zea mays
  unsure (1)..(85): unsure at all Xaa locations
  Clone ID: MRT4577_115613C.1.pep
PFGSVSILSLNDQLLHTNIIDMQLTHMPCNFPSLTITFLFQHSSNPMYLLVLIXHNNNDCYLVHAYIMHNNSLHCEPIHESWGSI

SEQ ID NO: 201788 - protein, 41 aa, Zea mays
  Clone ID: MRT4577_115614C.1.pep
FNKTLVPEPIRLYKRVDLEHPEWFPQGAIDVQAFYIMPVLF

SEQ ID NO: 201789 - protein, 87 aa, Zea mays
  Clone ID: MRT4577_115615C.1.pep
TQGVLPSFSKGCEVWLLSPINICEVSGSDVTPDLLRKEIGKVVTVFYWAVTRRRGVLMWPIMEDFVLDEDLGEYFAFVLCVNSEPTK

SEQ ID NO: 201790 - protein, 514 aa, Zea mays
  Clone ID: MRT4577_115616C.1.pep
MEADIAFRYEIPRTAQFLRDGAYTRVALQFPDEMLKDAAAVARALRRELASGGADSGVRVFVMADTAYNSCCVDEVGASHIDAQCVVHYGHACMSPTSNLPAFFVFGKAPLDVHACAGTLLECSRKSNKRILVLYGLEYAYALDDLRQTFMESCKSNSGNHEVQYAEVLCSVMSPSSSTTEENKIPQSSGPSCNGDISRNSESATFLNNRNGMECSSSTQKYSLAGMTWNISVEEKMEDYFIFWIGQDSSAFANIVLTFNKCEIVRYDAIENQLTADVSHLMKILRRRYYLVEKAKDANIIGILVGTLGVAGYLHIIEQMKDLIKAAGKKSYTLVMGRPNSAKLANFPECEVFIYVSCAQTALLDSKDFLAPVITPFEAVLAFGRGREWTGEYLLDFKDLITSEKQEAASTTGEARFSFIKGVYVEDNCPQENEEQSETSLALAEVTEKALSIQNQHNDAVLYQGRAMSSIDYLKARSYRGLTGEYEGPVPDSVLVGRMGRAAGYSDEKTESAQ

SEQ ID NO: 201791 - protein, 33 aa, Zea mays
  Clone ID: MRT4577_115617C.1.pep
WSGGRAYTNPLLWSSDRTPRKNIQLEEQRARYR

SEQ ID NO: 201792 - protein, 73 aa, Zea mays
  Clone ID: MRT4577_115618C.1.pep
RRRVSPFSFSPVSPCQRRRQREGKMAAAVSRDDELVIKSPNDKRSYRLLRLGNSLRALPCHDPEIYADGYPPQ

SEQ ID NO: 201793 - protein, 175 aa, Zea mays
  unsure (1)..(175): unsure at all Xaa locations
  Clone ID: MRT4577_115619C.1.pep
KKSKKPRRSSPDCAHQYLYAXTAASMEYPCIQLYGVQKSITATILQXLELTDKQPYALLQQPALEHIYIQRISVDQLPQEXLPTINEXVKRNLXLYIQQQQLLPFNXIGXLNLAAYLAXAKQILPFNQIXRSPAAXFLREKQLLTCNLQGXANIXAASLQQQQLAAFYPKVGGNI

SEQ ID NO: 201794 - protein, 88 aa, Zea mays
  Clone ID: MRT4577_11561C.1.pep
SRHGTGSEVVPNRSPFQRRRWAQYRRWAGHLSFRVRAFPGTEGLLLEQRQGPLSLLRGFGSAEVQCSSALGWRGEWQPFCCSPSPRAH

SEQ ID NO: 201795 - protein, 119 aa, Zea mays
  Clone ID: MRT4577_115620C.1.pep
LLRCAIPNMWVHDAFRVVQGERGGGSLCVHAARGFSCSMLSRIAVFGDSASCSWVDGINSVRGDRRAIRDRVLDQWRISNLCRRVHVRGMQPLALHFALSCLLAPSAVACHVQEDVNAI

SEQ ID NO: 201796 - protein, 54 aa, Zea mays
  Clone ID: MRT4577_115621C.1.pep
DKTAPNGFVPPKQTFVRAWGVPRPVIACPIPGNEGTHLKLQIQGLKGSIEKLFI

SEQ ID NO: 201797 - protein, 117 aa, Zea mays
  Clone ID: MRT4577_115622C.1.pep
PRVRPRVRPRVRPRVRGRVGSKRECRSTSQQSPHAPSPPISRNSRRTCHPALAPTASAPRCCGRRRPRRSRATAAAHASLGLAPTTSAPGCCGRRRPRRPLRYKVTLVFFKTTRSDS

SEQ ID NO: 201798 - protein, 210 aa, Zea mays
  Clone ID: MRT4577_115623C.1.pep
MAGGVIVPSDGPAADHGGSLTLSVFMTCLVAASGGLIFGYDIGISGGVSEMEPFLRRFFPRVLERMASARGNEYCLYDSQTLTAFTSSLYVAGLLASLVASRVTRAMGRQAVMLMGGALFFAGGAVTGAAVNIAMLVVGRMLLGFGVGFTNQVSLSPLSRTIRSSAPAASCAFFFFFSATRHAHGMCSLESLDLAVDIFPYSESTIECRH

SEQ ID NO: 201799 - protein, 75 aa, Zea mays
  Clone ID: MRT4577_115624C.1.pep
DPTTTSNSTVPTSLLGQGKCKPILRGAQLQGYLDGMAVAPGRPMRICLRLSLCIWHLLTMGWGCIIRTFGNLGFL

SEQ ID NO: 201800 - protein, 113 aa, Zea mays
  Clone ID: MRT4577_115625C.1.pep
ERKKGRKGKAFCLLSKVKKGERAANQKRKETAKSTQSPGRKTENQRKVNQQNERKKGGPWTKKAPNGQAGGKRKKEKPTTKDGSEVKNNFFFFFFFFFFFFFFFFFFFFFFFF

SEQ ID NO: 201801 - protein, 113 aa, Zea mays
  unsure (1)..(113): unsure at all Xaa locations
  Clone ID: MRT4577_115626C.1.pep
QXNNNNRDAVKCLGKLEMKYNTKYPVTRYSIGRAMSGRHAAARQDCLGYXRRTPTSLNGXPSNAAMVANTPRRPTRIRLLQTILCTCLVVRLRKTTLDCXQPRHHFNGLINEA

SEQ ID NO: 201802 - protein, 307 aa, Zea mays
  Clone ID: MRT4577_115627C.1.pep
MVTTSSMVGRSKSGCGLCPALSFKDLHHLCWGGGRAKPELYFSYGPAGHLFLQHSGERALTGLAEGADFDNAGPIGLKRRQLQHAWLVGSAGPGVASGATSQRWGGVWLSARRTGDCCAVRTGGPPKTSHAARAAFVFLGCPALAPARCLHAEVVAVVGAEVVAAEEGFSADETVGATRGQTSGSLALIACPRPSSGYMGEGLVTAASALRSSLLLFSHPEWRSLSLLMERSPLNRLPCVSCPMRKVTSEVSVSRRRMSPSARSALPPKASLARLKNPRLLCDEPEPEAAVSAWTEAESAREEASSA

SEQ ID NO: 201803 - protein, 108 aa, Zea mays
  unsure (1)..(108): unsure at all Xaa locations
  Clone ID: MRT4577_115628C.1.pep
PQPKLGLFVGIHKGFVVPQGEVPSRPCPPKGESTKRVFFVRGLIKKVSGFAPFXKRGSXLFKVGKGKRALKLFXKKLGTPQRAKKKKKGMAGVLRKIRSGGSPPSQKK

SEQ ID NO: 201804 - protein, 23 aa, Zea mays
  Clone ID: MRT4577_115629C.1.pep
KILVELLPYCRFKATQTPLIHMD

SEQ ID NO: 201805 - protein, 74 aa, Zea mays
  Clone ID: MRT4577_11562C.1.pep
FIQIVMFYRGEATLGREGHTYPTPRRGMAPPLTTGVLPGRGDRAPPHYRPAPPLGICLPNDTAREPFIMGRPPP

SEQ ID NO: 201806 - protein, 373 aa, Zea mays
  Clone ID: MRT4577_115630C.1.pep
MALDTADADAPRLRLDASAAVHPLLSDDGSTAAGETAEQLDARYAPYARRDAYGTMGRGPLPAAQAVRLALAAAVLLPLRFVAGMLVLLLYYLVCRACTLFVDADGGRPRLAGWRRKAVLRSGCALSRAMLFVFGFYWIRETRRRSTNAKGLNQDQFEESQRPGAIVSNHVSYVDILYHMSASFPSFVAKESVSRLPLIGLISNCLGCIFVQRESKSSEAKGVSGAVAERIQEVCQDKNTPMMLLFPEGTTTNGDYLLPFKTGAFLAGAPVQPVILKYPYRRFSPAWDSMDGARHVLLLLCQFINHIEVVRLPVYYPSQLEKEDPKLYANNVRKLIAMEGNLVLSNIGLAEKRVYHAALTGSSLPGARHEKDD

SEQ ID NO: 201807 - protein, 41 aa, Zea mays
  Clone ID: MRT4577_115631C.1.pep
DSSTLSRHHPVAARWRLYIVQVAYELYDITTVVTHLTSPRG

SEQ ID NO: 201808 - protein, 98 aa, Zea mays
  Clone ID: MRT4577_115632C.1.pep
KELNCPAERERYLYGGIKTILIYILKKVIGDCRAYYWRKDPKLERSPRRKTLSKGPKNLFYDFYFLKKRTVLPFAFLLPSPRWIHILRRSCLTFAWLF

SEQ ID NO: 201809 - protein, 90 aa, Zea mays
  Clone ID: MRT4577_115633C.1.pep
TNGDYLLPFKTGAFLAGAPVQPVILKYPYRRFSPAWDSMDGARHVLLLLCQFINHMEVVRLPVYYPSQLEKEDPKLYANNVRKLIAMEVG

SEQ ID NO: 201810 - protein, 202 aa, Zea mays
  Clone ID: MRT4577_115634C.1.pep
MGLSSAVAWWEEWQLRILVLISLFIQYILFFSDYVRRVPVLRRLRVLVWIAYVSSDAVAIFALATLFNRHRHTCDEEGSNLEVLWVPVLLIHLGGQSMISAYSLEDNELWKRHIVTLVSQVTVALYVFCRWWSGEKTQLAAGVVLFIFGVLRFAQKPWALRIASFNSLQSSTVAPEKGAKRIYAYGICRSSKEVRTGHEGKY

SEQ ID NO: 201811 - protein, 73 aa, Zea mays
  Clone ID: MRT4577_115635C.1.pep
DQLIHSLPHGRGTVVGKERVHGGAGIKAQARRVGVGGVKGHCTRRGAERRAGSARRDGWGACSVTRTLFGRRR

SEQ ID NO: 201812 - protein, 44 aa, Zea mays
  unsure (1)..(44): unsure at all Xaa locations
  Clone ID: MRT4577_115636C.1.pep
FRLSHLRGDXYLTPASREPQETSSAGTVCSGFEPHLLNCSESEA

SEQ ID NO: 201813 - protein, 107 aa, Zea mays
  Clone ID: MRT4577_115637C.1.pep
AFAKPEHSMSGKQLVSKVRSRSRRITGSDMQLLVHPLDIEKLERASRPSSAPHQSVDAFDTDSKMTDSDTFHRDVTLDGLSDKCPEWIQDVLNVIIHKHQSSKISIA

SEQ ID NO: 201814 - protein, 445 aa, Zea mays
  unsure (1)..(445): unsure at all Xaa locations
  Clone ID: MRT4577_115638C.1.pep
GRGETLLLPRFPTSSRLKPQASRVAADRRNHALRPRWLTSSSSSHTRGGTRSATACSHSSTSPPTPSPAPPRRRLLXIKPVSYAPKPQQQAPPEESAAPTTPDVAPRDQSPLPRRPQQPMPPREWTRQDMRYVKDAAPAISPVSYPSRVAPLPEDRPVGGEVEEVQDGGLQGESERIQMNAVRPTRSVFGMHEEDRLPYPTVIPVVKRPQKVAIDLIDAIRLVKTSANEKKRNFVETVEAHVILGVDPRRGDQMVRGALTLPHGTGKTVRVAVFAEGPGADEARAAGADVVGGDELIEEIRTGGGKLSFDKCIATPMFMPRLSKVARILGPRGLMPNPKLGSVTNDVSGAVKAAKSGRVDFKIDKTAIVHVGLGKVNFTEESLRENIGAFVHALLLAKPVGLKKTSKYVGYVKKFTLSSTMGPGLPVTIPSLSVAADHYNKVQVS

SEQ ID NO: 201815 - protein, 70 aa, Zea mays
  Clone ID: MRT4577_115639C.1.pep
SYFFYDYNFFRANSHNHAGGERLPQQERPNQKRLWIITCSGLTIMIGMKMRTAPPPETPGGQPMPGHVFT

SEQ ID NO: 201816 - protein, 119 aa, Zea mays
  unsure (1)..(119): unsure at all Xaa locations
  Clone ID: MRT4577_11563C.1.pep
AGKKQKPRGGPSGIGGATKPGEPKRGFKTSPGLERDLDLKLPSIFKKGGVAKKNHPYGAPLGTGVFFFFFFFFQPFWGPGPFPNGALLGSEKKLGSWAFFFFFXFTPPFWAPGETSSLP

SEQ ID NO: 201817 - protein, 130 aa, Zea mays
  unsure (1)..(130): unsure at all Xaa locations
  Clone ID: MRT4577_115640C.1.pep
PLALLRFCTVVACVQVDDSGLLVLADLVGLARPRRVVLSSFSSTDFASVAIVGARXPPPARALLPLQALCVPRSPLVGRALSWSCRACCSCLLPFIPRAPPLVSFVGGGGAAAAAHPCCPLSVLLRVRVG

SEQ ID NO: 201818 - protein, 128 aa, Zea mays
  unsure (1)..(128): unsure at all Xaa locations
  Clone ID: MRT4577_115641C.1.pep
GTSRTAGKLGALRCAVTSPRVDENQTGLMIANACNWTPTITCAXLKHMSDELWQTAPHYGXYIELXDVLRVAAQSDLAPAQTIXDGLXIIEMNLNMSLCYEMRYSVDRMKHEVAMYVLXETTNLIRNC

SEQ ID NO: 201819 - protein, 197 aa, Zea mays
  unsure (1)..(197): unsure at all Xaa locations
  Clone ID: MRT4577_115642C.1.pep
LGTSRPAGGLYNHDLEWAGIRDPSFLSSDRFCRRHSELPXGLPRVYTIAHENSNNNVAIARMPLLKKCDHQCRPLHPXKIGIPLASLLVXCMXLELEHRHSHICNPLTKSLKDNPPGSLHGCTRSCLGMVPNERQYSEAYHHLRQGXTNTPQILCTLQQNGGPCPXTFPPNLQLPLALDLXAQPMSRGHMIYXFMCT

SEQ ID NO: 201820 - protein, 61 aa, Zea mays
  Clone ID: MRT4577_115643C.1.pep
IFILRSKDQDFLITVVIKCVQYVLISTFSLQCFNFLKSYMKLTFQGSGKKPIMYSHKNYNL

SEQ ID NO: 201821 - protein, 78 aa, Zea mays
  unsure (1)..(78): unsure at all Xaa locations
  Clone ID: MRT4577_115644C.1.pep
ACPGIMLEPLYHPMPIQEKKEPCLFPSYLHQEAPIILPSQSPPEIEERIVKDNVNAISTYIQRTRGSPRELRKRYXQA

SEQ ID NO: 201822 - protein, 85 aa, Zea mays
  Clone ID: MRT4577_115645C.1.pep
HLPKSKPSPSHVAWTSVSTPRTGAVQQADALVSLTSCPVHPVVCCCCAWSMAPPRASPRHDPLLDGRRPAASVPVRSPSRAPRRV

SEQ ID NO: 201823 - protein, 87 aa, Zea mays
  Clone ID: MRT4577_115646C.1.pep
LYFLFFFFYNFFFVPPCGKCKHAPKTDLHTPNGGGGGAHKHKNRGAEPTGGNKMKDTTRTLNHFNLGKSSRAHRLHHCGPGLFTARI

SEQ ID NO: 201824 - protein, 42 aa, Zea mays
  unsure (1)..(42): unsure at all Xaa locations
  Clone ID: MRT4577_115647C.1.pep
IILCTWPVPPNXXTVLLLTVDVTFDQLPFRSPATVLIYTFTL

SEQ ID NO: 201825 - protein, 96 aa, Zea mays
  unsure (1)..(96): unsure at all Xaa locations
  Clone ID: MRT4577_115648C.1.pep
LEDPVDCGDGMEPCHSVCKTVDASPLSPKSATFLIVNSFSNGSIIFCSVVVILNTGCVSSLFRWHLLTKQFSLNNNIKQPTRQVXGFVRKKKKTPH

SEQ ID NO: 201826 - protein, 403 aa, Zea mays
  Clone ID: MRT4577_115649C.1.pep
MSHCCPCASASSSTAPFFLPSIPDSSSCRSGSGGAFSAAVGRSKLRCGGGPRRGQATVAAGSKDGGSGGTAGGEKGEDDAPAFNPFGFVTDNPSSRSAIQLPAVPAEDGNVGQMLYRIEDKGREYGSYVRAGEFRWFVRETGSPDARRGTIVFLHGAPTQSFSYRVVMAQMADAGYHCFAPDWIGFGFSEMPQPGYGFDFKEDEFHKAFDDLLGTLNITEPFFLVVQGFLVGSYGLTWALNNSSKVLKLAILNSPLTVSSPVPGLFQQLKWPLFGEFTCQNAVLAERFIEAGSAYMLKLEKADVYRLPYLSSGAPGFALLEAARKINFQDVLSRISAGFSSNGWEKPILLAWGISDKYLPLSIAEEFKQANPGVVKLEAIEGAGHMPQEDWPEKVVKALTSFL

SEQ ID NO: 201827 - protein, 125 aa, Zea mays
  unsure (1)..(125): unsure at all Xaa locations
  Clone ID: MRT4577_11564C.1.pep
MSAYXXKQTFTPPPQLQQQQVKQPSQPPPHEPFVPITKEPCHPKVPQPGNTKIPEPDCTKVPKPGYTNDPEPGSTKVPDKGCTKVPEPGSTKVPDKGCTKVPEPSSTNVPEPSSTKVPDKSCINF

SEQ ID NO: 201828 - protein, 356 aa, Zea mays
  Clone ID: MRT4577_115650C.1.pep
MDTFSHVPPGFRFHPTDEELVDYYLRNKVASNKIDLDVIKDVDLYKIEPWDLQEKCKIGTEEQNEWYFFSHKDKKYPTGTRTNRATTAGFWKATGRDKPIYTKSCLVGMRKTLVFYRGRAPNGHKSDWIMHEYRLETTENVTAAPEEGWVVCRVFIKKRVEAVRRMADGAPPWFDGHVPGGFMAPAGLGSPRQLMHHHPNPAAAAPLLYSGQQLYHCKPELEYHHLLQPSQEALLQQLPQLVESPKPPPPAFIDQGSCSLQSPDEASGYNTTPQQPPPMTTEAAYMDDDSVTDWRVLDKFVASQLFSHGDGMAKEDGYPNPGQALFQAENKQPEEALDYASTSASGGGGGEANMWK

SEQ ID NO: 201829 - protein, 79 aa, Zea mays
  Clone ID: MRT4577_115651C.1.pep
SRMLSQQISDHYCLPQQRLFLPILTHAASMEVHTLPQIIIWYQSLPLSTAQNNRHDEPVTSGLLSSALGHPVTEKLTKT

SEQ ID NO: 201830 - protein, 80 aa, Zea mays
  Clone ID: MRT4577_115652C.1.pep
FSSFFGGGTTKKNPDLRFTIFSTFKTTIGSYLTWPHTVFLYIYYKHRPTQRPDQKHRPSTQPLNHIGTYLNICCSSTTIT

SEQ ID NO: 201831 - protein, 48 aa, Zea mays
  Clone ID: MRT4577_115653C.1.pep
VPLIPCTHPFASGLITSSLQSSHFTLYLTTFYDSSGLFKMEHSHSVHI

SEQ ID NO: 201832 - protein, 43 aa, Zea mays
  Clone ID: MRT4577_115654C.1.pep
LKQTMGSEQPIELMLQMISQVTLANLSPYFEQQQFVAFNQLGL

SEQ ID NO: 201833 - protein, 42 aa, Zea mays
  Clone ID: MRT4577_115655C.1.pep
APQTTSDNLGIRNRRGNTNQLPAEASHTRTSQQACVLQRANR

SEQ ID NO: 201834 - protein, 112 aa, Zea mays
  unsure (1)..(112): unsure at all Xaa locations
  Clone ID: MRT4577_115656C.1.pep
MKMXSSXXLLVXXLXXVXXTAPQVAEAKKKRAVESGEAVEVKKIQDDFCSTMCEGKKGTDLVVCKESCALSQQSNLVLYGRIQCKGKCTEQKGITETAMKSLPGGVRQGVPW

SEQ ID NO: 201835 - protein, 115 aa, Zea mays
  Clone ID: MRT4577_115657C.1.pep
LVAPGSQVIPSQPSPVIYKGILIFIVNLKGLSHPWPQEQKEGPRLILPPMEFRGKQGGVPQKGSWGRLGVAFYAYPEPQMLGGGCLPWPWPHQGLLFRCKHSPQFSPSINSLLGV

SEQ ID NO: 201836 - protein, 47 aa, Zea mays
  unsure (1)..(47): unsure at all Xaa locations
  Clone ID: MRT4577_115658C.1.pep
WDSCLNKVKILLHKIDGVYQSTVNAAEGKVTVXYRWPIVQLSVSRTY

SEQ ID NO: 201837 - protein, 136 aa, Zea mays
  unsure (1)..(136): unsure at all Xaa locations
  Clone ID: MRT4577_115659C.1.pep
MMDKTDVMGCALNLNTHRKNLRRLVELYIKRHLRERGTRNPIDASSHAKRIVLQKIRIDGNQPXNSAMHDRAPGLLEQNDIKIAHFAPNDRWSHYVEENHDVVIAALHREAQALRHMPGVPLQGVKDSLVSLVRLF

SEQ ID NO: 201838 - protein, 47 aa, Zea mays
  Clone ID: MRT4577_11565C.1.pep
MDSDKGSSMQFQDFLPLMARKLGVEGLIQELCKGFQLLMEPRAGTGR

SEQ ID NO: 201839 - protein, 52 aa, Zea mays
  Clone ID: MRT4577_115660C.1.pep
YKVFFQNIKSLFHVNVYSFFLTLNFFPHFSIRYTEYIFLNVFSLEIKVFLFA

SEQ ID NO: 201840 - protein, 107 aa, Zea mays
  Clone ID: MRT4577_115661C.1.pep
VSSVLPVHFRTLSAVPKTARRLWLSRFAGIRWRRRLALMVSVQTRYCCFLGWSLRTVDDGAGDSDGHDDQQGHRRPGIATRRELLHGVGIDSYREVPGRPRASSPFI

SEQ ID NO: 201841 - protein, 124 aa, Zea mays
  Clone ID: MRT4577_115662C.1.pep
TWTVRFQTPSTWVRAPEAAWPAPEAAPAAMAPAPATAAAPVERARRNHDDFSETAGLATTPVSFFSVTMTSLTASSCSSVSSTTTVSLVTCSRVTSSLVTVVVVSSVILVSSTLTRVSVEAWST

SEQ ID NO: 201842 - protein, 141 aa, Zea mays
  unsure (1)..(141): unsure at all Xaa locations
  Clone ID: MRT4577_115663C.1.pep
GGGVPLIQVWGAFCNTQFVTLSCLPPLATVDLLKXVVYLSVNCWVPCLGWGGGGFSFRXENSTCPCYYYLRFWPLWELSVSGCYDSSQLCMELREAILXYPDSFHSVMGLVXVCATQCDGFIILHAPGHLLVRATRTPPFG

SEQ ID NO: 201843 - protein, 97 aa, Zea mays
  unsure (1)..(97): unsure at all Xaa locations
  Clone ID: MRT4577_115664C.1.pep
IPSLXYVWLKRHRWVLPXXXSPIPKPPLPTSPFSGPTSSPSCCCVQPIPLPPSSSLQQPYHCCSPSSIVTSPHPQHLTFXLPHVHLLHPPDSLPSLT

SEQ ID NO: 201844 - protein, 150 aa, Zea mays
  unsure (1)..(150): unsure at all Xaa locations
  Clone ID: MRT4577_115665C.1.pep
XGREFLGAGLDAGLRAGGFSSPPSAXXFAXVVEPKNVPAVFRGVVNVWAASSLLGSVLGAXIPAGKVGPXVAVEALMSXTGPVFYGDLTIHERVSVSFSPFIPSCPSSLGLVNAARASSLEPGLLGAPSRSWTCSVFSWLLGRVCLALGS

SEQ ID NO: 201845 - protein, 82 aa, Zea mays
  unsure (1)..(82): unsure at all Xaa locations
  Clone ID: MRT4577_115666C.1.pep
CDWLELIEACLCXSQHDASEKWTLEPNDXVLLSDPPIGLFDPIXISPYDLAHNTNPDEPLSPMYANYTFYDPVLTGKCHVDF

SEQ ID NO: 201846 - protein, 56 aa, Zea mays
  Clone ID: MRT4577_115667C.1.pep
QRRDFFFFFFFFFFIFLSKMRNRLKSYRRDILTRSYSWSRIIMGGHMKKGIIGNVC

SEQ ID NO: 201847 - protein, 205 aa, Zea mays
  unsure (1)..(205): unsure at all Xaa locations
  Clone ID: MRT4577_115668C.1.pep
EARPGPQEIARSIRTPSLPSTPRPAPRHTLAGDGEVEPNQEQVLQIALEICKEGVLSLFVQNLPSLGWXRKDLVHCWCILLRQKVDESYCCVQYIENHFDLLDFLVVCYKNLEVALNCGNMLRECIKYPTLAKXYILESSSFELFFQYVELSNFDIASDALNTFKDLLTKHEDAVSEFLSSHYEQXFGLYTKLLSSTNYVTRRHQ

SEQ ID NO: 201848 - protein, 336 aa, Zea mays
  Clone ID: MRT4577_115669C.1.pep
MSFFFRAASRQRPLPQEIARSLKDSLVALDTKTGAKALEDAEKNILTLRHTLAGDGEVEPNQEQVLQIALEICKEGVLSLFVQNLPSLGWEARKDLVHCWCILLRQKVDESYCCVQYIENHFDLLDFLVVCYKNLEVALNCGNMLRECIKYPTLAKYILESSSFELFFQYVELSNFDIASDALNTFKDLLTKHEDAVSEFLSSHYEQFFGLYTKLLSSTNYVTRRQSVKFLSEFLLEAPNAQIMKRYILEVHYLNIMMGLLKDSSKNIRICAFHIFKVFVANPNKPREIIQVLVENHREVLKLLHNLPTSKGEDEQLDEERDLIIKEIEKLVRLSV

SEQ ID NO: 201849 - protein, 81 aa, Zea mays
  unsure (1)..(81): unsure at all Xaa locations
  Clone ID: MRT4577_11566C.1.pep
SGFHFFSRFVCPKFRIDYDPVCGSAHFDLTPYCCGKLGKHKLISFQAYNNIGILFLELEATRMIMRIYGXAVSVMTGTLLA

SEQ ID NO: 201850 - protein, 351 aa, Zea mays
  unsure (1)..(351): unsure at all Xaa locations
  Clone ID: MRT4577_115670C.1.pep
IGYLEAGRAFFFRAASRQRPLPQEIARPLKDSLVALDTKTGAKAXEXLNRKRLSRXAEKNILTLRHTLAGDGEVEPNQEQVLQIALEICKEGVLSLFVQNLPSLGWEARKDLVHCWCILLRQKVDESYCCVQYIENHFDLLDFLVVCYKNLEVALNCGNMLRECIKYPTLAXSFRYILESSSFELFFQYVGFAQSYARFAGYTLTVRIRAVFLVSNTKXFKYTHLQETSATHFLLLGQLGXKQHRLVIXFVSLFITSAHLLMPXASYVNAYTXMSFVGFKQKYQDMCLXIFKVFVANPNKPREIIQVLVENHREVLKLLHNLPTSKGEDEQLDEERDLIIKEIEKLVRLSV

SEQ ID NO: 201851 - protein, 63 aa, Zea mays
  Clone ID: MRT4577_115671C.1.pep
TRANFSYVIWNLNFSLNVIGMWVCSPHTIDTLRACLVACLRCQKLSHLTKVRRSNSVPHLRHV

SEQ ID NO: 201852 - protein, 94 aa, Zea mays
  Clone ID: MRT4577_115672C.1.pep
HMLLLYLHRHISGQAPALPPSSHFRPFRRRLRRHAAMQPSLARGSSSSRRLHTAASTCPRMVARPVKLSAFRQQWHNGGGAAWVLRVGPANPGN

SEQ ID NO: 201853 - protein, 82 aa, Zea mays
  Clone ID: MRT4577_115673C.1.pep
YFFFFNQLLLAFLTLPGGWGAKRKWTISNFAPGLNKGSPPGGLFWAPQCLYVSFPPPGPPFFKGKCCFFSRAPSFAVFLFGP

SEQ ID NO: 201854 - protein, 68 aa, Zea mays
  unsure (1)..(68): unsure at all Xaa locations
  Clone ID: MRT4577_115674C.1.pep
KSQAAIYSKXYLQPIYANXFTHHEPNHLHLCTLYCSLRPFGCSVILTGYHMDRPQLYIIEPSRLSYKY

SEQ ID NO: 201855 - protein, 106 aa, Zea mays
  Clone ID: MRT4577_115675C.1.pep
RALVSSCAFPKYASSHSWCSPFMSSPVVQLCFVLLPVHWILSYSCSVEFVIERSALLSPAQKRPLLAVASAASHVVIASCLLLHPLSSRPPSVSSFSTNSRGDIPW

SEQ ID NO: 201856 - protein, 37 aa, Zea mays
  Clone ID: MRT4577_115676C.1.pep
TSYTEDSKAGIHHTLKLENILIQTGVIEPERFSGKVP

SEQ ID NO: 201857 - protein, 108 aa, Zea mays
  Clone ID: MRT4577_115677C.1.pep
GTKKLVKFGFIVDHKKPQFFVLRIFNTGSVFGSLHTSLFIIRYASLHLLQAEYSAWLAGPVVLASKSDCKWRLRSLRSPPCICCRAQPKGCNLNPGRVGVRVGRAGFS

SEQ ID NO: 201858 - protein, 63 aa, Zea mays
  Clone ID: MRT4577_115678C.1.pep
LLLPLLFGSDHMRWGGATFHCQPDSHSCNCCFNLFCSMMTCLIHPLKVHSKTPLTLSDITSRP

SEQ ID NO: 201859 - protein, 98 aa, Zea mays
  Clone ID: MRT4577_115679C.1.pep
AWLYLGLQVLVGARLLIGFFQRTTQESDIAVLLIGYLAQSSSYPVGAIGSFVVALERDSSCRRCRTSSRNSLGRRSLAGLVFRSIPRTCHRDTCRSCR

SEQ ID NO: 201860 - protein, 126 aa, Zea mays
  unsure (1)..(126): unsure at all Xaa locations
  Clone ID: MRT4577_11567C.1.pep
MDKIYLQTWLRDKEFTXNAYNKGKTLVFSKVPLPDYRADLDDRHGSTQKEIKMSNQTEARVEDLLSRSKWNNNSASTSTVSTRQIFPGASSSVVEPAAPIDKEKLSSQLRELQNSRKTTASARSMQ

SEQ ID NO: 201861 - protein, 94 aa, Zea mays
  unsure (1)..(94): unsure at all Xaa locations
  Clone ID: MRT4577_115680C.1.pep
KTISLTTSFTVTNPLVNIKSLISSTKTSPHKKGANNTKNRPDSSSQQHLIKIYLDXQFLTPSYYCIATSDLXLHSDQNVVINKQHTILSIIDRL

SEQ ID NO: 201862 - protein, 43 aa, Zea mays
  unsure (1)..(43): unsure at all Xaa locations
  Clone ID: MRT4577_115681C.1.pep
SYSHNPAHGTFAPLAFEPNARTNCVNQRILXYYVELLYFRGHD

SEQ ID NO: 201863 - protein, 72 aa, Zea mays
  Clone ID: MRT4577_115682C.1.pep
GAKCGREHKVQETYPSRYYMIMSVLGLGDQTMHTEDITVHTKCLVDGVKGCSMSQIEKQDYVVNDETDKQVR

SEQ ID NO: 201864 - protein, 71 aa, Zea mays
  unsure (1)..(71): unsure at all Xaa locations
  Clone ID: MRT4577_115683C.1.pep
ILCPPWDLLCLASPACTALPITQCQLATSAIIPQFLPXVCSMGFXEIEXVQAYRLYLVLEAIALQEIIVSL

SEQ ID NO: 201865 - protein, 76 aa, Zea mays
  Clone ID: MRT4577_115684C.1.pep
CFIRDYLTNGGDQAVLFDPLQSPESLEYSSPAQRGLFPSLQKGEGDTNGTKGQGHEAVHAGTSQDTGGHVRQQGVR

SEQ ID NO: 201866 - protein, 107 aa, Zea mays
  Clone ID: MRT4577_115685C.1.pep
PGFWPPPEGRDPPGAPKKMFLWGPKNVSFCRKGATLKQGGPPLFLAPGPSVAVWGPLFKLSFWGAQNSKISPEKKGLPLGPPPEKQKKQQKKEKERKNRGIEKTREK

SEQ ID NO: 201867 - protein, 52 aa, Zea mays
  Clone ID: MRT4577_115686C.1.pep
RRVWNLHCYFNVHISGRMVRFILPNDPFKKRCIIVLCRKRMGKPRLVLISPL

SEQ ID NO: 201868 - protein, 55 aa, Zea mays
  Clone ID: MRT4577_115687C.1.pep
RTRPRSSRTLGMLVHRLLLVVAVSAASCTAIGEAVVYEPLSDEHFPPGILPNDVV

SEQ ID NO: 201869 - protein, 35 aa, Zea mays
  Clone ID: MRT4577_115688C.1.pep
FLPGSTSRVLITSADSRIRVVDGLNLVHKYKGIKF

SEQ ID NO: 201870 - protein, 67 aa, Zea mays
  Clone ID: MRT4577_115689C.1.pep
DKSGVYRRETSRRRRSCAKPQWVSHATRCTSAVPPVFSIRPGGRSESMISVCIRPILIVAPFHNLPP

SEQ ID NO: 201871 - protein, 130 aa, Zea mays
  unsure (1)..(130): unsure at all Xaa locations
  Clone ID: MRT4577_11568C.1.pep
GTLKVADISVKEECKTRPSGLNTVNMLKVASSALGIGPQTAMHLAERLYTQGFISYPRTESTAYPSSFDFRGALAALLNNPLWSNDVRKLLDAGFVXPRQGHDAGDHPXITPMRSATEASLGTDAWRLYQ

SEQ ID NO: 201872 - protein, 134 aa, Zea mays
  Clone ID: MRT4577_115690C.1.pep
MADSQVTLRTRKFIRNPLLGRRQMVVDVLHPNRANVSKDELRGKLGELYKAKKEDVSVFGFKTHFGGGKSTGFALIYDSAEAMKKFEPRYRLVRYGMATKVEKASRQQRKQRKNRMKTFRGTAKAKGGAKKEKK

SEQ ID NO: 201873 - protein, 43 aa, Zea mays
  Clone ID: MRT4577_115691C.1.pep
SSDSARGHPARTYYIVCTTEAGRAKFTRHGGEIHATRTLKSGP

SEQ ID NO: 201874 - protein, 209 aa, Zea mays
  Clone ID: MRT4577_115692C.1.pep
MGGLRAASPSGAGSGAVAGAGSDSTGRRLAMACVLASEAATVLAVMRRNVRWADVRYGGAGDDEHLDHPLVAGLKALRRRAAAWGHGRWTGVEPLLYLRPFLDVVRSDETGAPITGAALSSLHKILTLDLVGPGAPGAAEAMAAVVDAVTACRFEVIDPASEEAVLARVLQVLLACVRSRAALALANRHVCTTRKHVLSVVHQAGTKGE

SEQ ID NO: 201875 - protein, 132 aa, Zea mays
  Clone ID: MRT4577_115693C.1.pep
AQSASSRRIFVPGIGTPSTSSHGCGASSPFLFNNGVASMAGAPTWPLIRASSTPKARCGCDSTPALDPTGGGTSASSRRILVAGTATPPSSHASGASSPFRFSTAAASMGTSDARRPLRYSPLVDDRTRGRT

SEQ ID NO: 201876 - protein, 39 aa, Zea mays
  Clone ID: MRT4577_115694C.1.pep
AGYVRAGCPARPAAPGSRRPSPCTPRTAKVTIECMQSLA

SEQ ID NO: 201877 - protein, 38 aa, Zea mays
  Clone ID: MRT4577_115695C.1.pep
VYSSHREVNPWEKQGKKKKGGGLHPLGTAASKPNETPG

SEQ ID NO: 201878 - protein, 84 aa, Zea mays
  Clone ID: MRT4577_115696C.1.pep
FREGNNRFFGEKLFHTCKLFKQRRTGGILQDTKKMFTKTKILTQTCPLWGWEGLENCPLGKWKKCQVKKSMFRQSSLKKSKPLF

SEQ ID NO: 201879 - protein, 122 aa, Zea mays
  Clone ID: MRT4577_115697C.1.pep
PSPKEGGLLIGFDRLGGKKFPRGGPAPGVFKKQGGFRGAPPRSPGVGKPLLEELPKFFKGREAGPGFFLGPSPVKTKPGWLILKRGAVGGGYNFFGGNSPGPDGVLGGPPGSLLKGGMGYVL

SEQ ID NO: 201880 - protein, 49 aa, Zea mays
  Clone ID: MRT4577_115698C.1.pep
ASSYSSAALVIFLCAAIEMFSDADGGNLRGCEKIFKTKCAQCHKDEKAA

SEQ ID NO: 201881 - protein, 122 aa, Zea mays
  unsure (1)..(122): unsure at all Xaa locations
  Clone ID: MRT4577_115699C.1.pep
EHYTRCCSLASRCWTPAPTCNMLXHHKLRDHTAXRKRSHDIMCMVCLKTNPDGDSANPMLHILCMESTXLNICXIFNDERXCDHCPXCNLCRIRKWLGVDFFHCMKCNCCLGMKLTEHTCRE

SEQ ID NO: 201882 - protein, 63 aa, Zea mays
  Clone ID: MRT4577_11569C.1.pep
VIGYINVSGLWCLESVSSSIQYKTSVGLLGYGVKHCGLDQGPYPASMDVVDLDDGLIGGERPG

SEQ ID NO: 201883 - protein, 54 aa, Zea mays
  Clone ID: MRT4577_1156C.1.pep
FFSFLFFFSLLFFKKRAGANKHCTLLYGDITSPIPPLELSGQCLIHIVPSHWKD

SEQ ID NO: 201884 - protein, 405 aa, Zea mays
  Clone ID: MRT4577_115700C.1.pep
AGGASGGDEGDGQLHGLKFGKKIYFEDAGGSSSSGGSGSASATAPPATQQPSPPAASPRAAPGGGRRGRAAAGGAGPSLPPAPPRCLVDGCNADLTDAKPAYYCRHKVCEMHSKEPRVLVNGLELRFCQQCSRFHQLPEFDQLKKSCRKRLAGHNERRRRPPPGPLASRYGRHAASLGEPGRLRSFMLDFSYPRVSSAMRGGFPAVRPGGERVPGGIQWQAGLDPRHHQGAVAGYGAHYGSEGGSSSSARPPVFPGPELPPGGCLAGVPADSSCALSLLSTQPWDAAHSHSHSHAAPTAGFDGGSPVAPSLMAASSYIAPSPWTETDSWGHEGGRSVPQLPPDDVPLGEVHSGSSSHHGQFSGELELALQGNRPAPGSAAPPAPRNNQGSAGTFDQAGNTMDWSL

SEQ ID NO: 201885 - protein, 188 aa, Zea mays
  unsure (1)..(188): unsure at all Xaa locations
  Clone ID: MRT4577_115701C.1.pep
MSEDEANAAAAPAEGKNWRRKGKHDKPKPWDEDPNIDRWKIDKFDPAWNEGGMLEVSSFSTLFPQYREKYLQEAWPVVKGALKEYGISCELNLVLXVINLFLLLLTGDIVMWXKCSEASLSVCVGXGSMTVSTTRKTRDPFAIIKARELIKLLSRSVPAPQAIKILDDEMNCDIIKNGGLVRNKERVW

SEQ ID NO: 201886 - protein, 391 aa, Zea mays
  Clone ID: MRT4577_115702C.1.pep
MSEDEANAAAAPAEGKNWRRKGKHDKPKPWDEDPNIDRWKIDKFDPAWNEGGMLEVSSFSTLFPQYREKYLQEAWPVVKGALKEYGISCELNLVEGSMTVSTTRKTRDPFAIIKARELIKLLSRSVPAPQAIKILDDEMNCDIIKIGGLVRNKERFVKRRERLLGPNLSTLKAIEILTGCYILVQGNTVAAMGNYRGRGLKQVRRIVEDCMKNVKHPVYHIKELLIKRELAKNPALANENWDRFLPKFKKKNVKQKKPQTKEKKPYTPFPPPQQPSKIDLELENGEYFMSDKKKSAKKWQEKLDKQSGRAEENKRKREAAFVPPKENTAGPSKSDKNASDNSEIADIAKSLKRKAKEFRKNEAQESVIAESYIASNDELRQKKKKKSTKSK

SEQ ID NO: 201887 - protein, 93 aa, Zea mays
  Clone ID: MRT4577_115703C.1.pep
GGGLTVRQRRHLPGGRLGPPHLEHLVNDPLRDRQPNRWRCFFRWTCYALPQGLEVVDWYSDGGMLAVDVSARFASRLDNVARLKRRNCKHAIS

SEQ ID NO: 201888 - protein, 37 aa, Zea mays
  Clone ID: MRT4577_115704C.1.pep
SLSYSDTSNMISHSKLVKRSSKAISILSYLLIKKKNK

SEQ ID NO: 201889 - protein, 195 aa, Zea mays
  Clone ID: MRT4577_115705C.1.pep
MASACSLSPVAVLTAPAMAAAPSPIGLIASTPLPKRKKMLAHQVAIPEDLQLVAPPPPPPPVPALPLADAVVSDCISGSGSGSGIGMVVEQQQARSLAKKAAWAARRRPSTLVIPVADDAGEVAAGWAAAAAPVKEADVEVVGDGFWLASRAGPRHAMEDAYAVLTDKNHADSQLAFYGVFDGHGGRAAVDFVSE

SEQ ID NO: 201890 - protein, 80 aa, Zea mays
  unsure (1)..(80): unsure at all Xaa locations
  Clone ID: MRT4577_115706C.1.pep
GRGGLRCAHSLIDDTPTRXHWPRVILFGGATVIETGASSGLPDIRLAGVTNSAHSYDVETRTXTRLHPAGXPASNRAAHA

SEQ ID NO: 201891 - protein, 114 aa, Zea mays
  Clone ID: MRT4577_115707C.1.pep
GEHPFPHCKISLGAWGIPLLKIRGPLLALPPPPWGTNPALLAPSFWARGGVFLFSPPKTGEKKFCSPWLPRGFPLRVPPFLWGTFFSPCFLLPLLRGCLLIPCVSPLNPQCFST

SEQ ID NO: 201892 - protein, 94 aa, Zea mays
  Clone ID: MRT4577_115708C.1.pep
KVERRVQISKLPQGNLPDCRDPSHPQWDIQLGNLQGHGIIPWSAALTLGLTRSVTHSMNLDKYIMTSIPHHSVIQNSFTALKSLCLPHINQSNR

SEQ ID NO: 201893 - protein, 129 aa, Zea mays
  Clone ID: MRT4577_115709C.1.pep
GAKFRPPAAVPSAPSQSCPQAPVSHRNSNPQAARPKRPAVAAPRLGEGDRWLGPSDSGRINYDYDQSIGSSNVEEIYSYTSALCSFLHDFCEISVFQIGLELVAATSLRSNPKTVMPACKLNLMWNSFS

SEQ ID NO: 201894 - protein, 158 aa, Zea mays
  unsure (1)..(158): unsure at all Xaa locations
  Clone ID: MRT4577_11570C.1.pep
MYQAIPYSSARPWLMPAGEAAAVVAVKPEPEPAAAAXRGGXARADAAGGTDDDGDGGRAEVGRAVAESPVLVVGRRGCCLSHVVKRLLQGLGVNPAVHEVADEAALAGVVPAGAEAAAEQRRVRGVGGKLLGGLDRLMAVHISGELVPILKKAGALWL

SEQ ID NO: 201895 - protein, 114 aa, Zea mays
  Clone ID: MRT4577_115710C.1.pep
SANSDKPGKTHRNTGSTKARLRRTISGQRPDAGPDPGNPDRNRHAPHLAPKGAEIELGKNMAKPGARGKSVSNHNPTQNPNRKQKGQSRGSPRGAQTNSNGVALTARLPNRKPA

SEQ ID NO: 201896 - protein, 108 aa, Zea mays
  Clone ID: MRT4577_115711C.1.pep
GHDNYCDKDGHVGGFFYKKEHKAQARRSLKSASSASTRGSRGSYVNSVTQVMLFLLHHHAASSPQGVASHATSSSTLPGFAAASRSFLPSSFTSTSLVDPLSLFLVHI

SEQ ID NO: 201897 - protein, 51 aa, Zea mays
  Clone ID: MRT4577_115712C.1.pep
MLMLQKKKPHQKKYKRKKKKKKKKKKKKKKKKKKKQGKKKKGGARFKGPKY

SEQ ID NO: 201898 - protein, 132 aa, Zea mays
  unsure (1)..(132): unsure at all Xaa locations
  Clone ID: MRT4577_115713C.1.pep
PASTPRPPLCRLXHPQHLLLKIPSFVFLSRLPSLWAFPVACCGRSEQGLLVAVLHRHRSRAATGGQGTVEASSSSGGGRDAEYGARRFRRLAPSTGLGAAGDAPLGPHPTTLTPVTRIRLSPSARPRRCEWW

SEQ ID NO: 201899 - protein, 107 aa, Zea mays
  Clone ID: MRT4577_115714C.1.pep
PRGRPGTLGKTSGLRYIQIGGKMLCNAARRLVSRAVAPPHREPQRSPRMKFPLRPTSTPRHLGLAKRLPQHRGPTTPLSLMQARPPHASYHPYRKLTVYLLPCPYHC

SEQ ID NO: 201900 - protein, 59 aa, Zea mays
  Clone ID: MRT4577_115715C.1.pep
YILLGMKDEGRLLELVKDDQADGISNSLPIDLAAKIGDASLITEATKKEEEQLENTRIK

SEQ ID NO: 201901 - protein, 200 aa, Zea mays
  Clone ID: MRT4577_115716C.1.pep
MGLNFSVLNTFGVPGLRGATTKQVYERHFANKETKEFKDFHIAYVEFCKYFNTVMPGQDFDTPSTTVIQKFFEDEWKPEKNEEERKRKFLEFMRKKVREAKVDDSFFIAAGLAVPVAAVIGKRASGQIPYVKSVRLDLVPNVVFVPFVTLLGIMGATAWQMGNKSAVAQEDEDANEEEKKKETMKRAAGQQQQEEQNRSP

SEQ ID NO: 201902 - protein, 32 aa, Zea mays
  Clone ID: MRT4577_115717C.1.pep
KKSIQVQITHLIQAIPSCRSNKQQSSTGGCAN

SEQ ID NO: 201903 - protein, 110 aa, Zea mays
  unsure (1)..(110): unsure at all Xaa locations
  Clone ID: MRT4577_115718C.1.pep
QFHTEESHPGRANDPQGRETKRQAAPXAHAXKDPNTNGAGKGRTHHGGRKATGXSHTHDNPEAAKKPEPKHRHSRNGRATKAEKPRKQTKQRKNRAKKTRGAKKTKAGDA

SEQ ID NO: 201904 - protein, 56 aa, Zea mays
  Clone ID: MRT4577_115719C.1.pep
ITYEVSIHDLFELHDYNPQGGPSYRHNVQAVGPTKALTHIEETDTHAVIHESLHMI

SEQ ID NO: 201905 - protein, 107 aa, Zea mays
  Clone ID: MRT4577_11571C.1.pep
ARQNRHSSAERRVGRGTCAQARTALRTANSASRVHASESSPLLATRAETKSRLVIPHPSAGRSNNQRVLIGNIEEETGTYGASNDRSTSKQRSMHQTHRGSDYRSRP

SEQ ID NO: 201906 - protein, 82 aa, Zea mays
  unsure (1)..(82): unsure at all Xaa locations
  Clone ID: MRT4577_115720C.1.pep
LAIIKGILTDVLQLTPSQITVKGAYISGLSXKXQHPLNVXLSLSEGPDKRHDEFYSLLHQLDSIYNSLINSQFRLSASQHPF

SEQ ID NO: 201907 - protein, 65 aa, Zea mays
  Clone ID: MRT4577_115721C.1.pep
NQASPSLKQLSHMPHYHTWGTLHTIPCLTNRIIFFWQYAGDSHGRRNVLAQFSLRENLLCFKSLF

SEQ ID NO: 201908 - protein, 67 aa, Zea mays
  Clone ID: MRT4577_115722C.1.pep
RSALFFLFSFFLFFLFFWVLGFLKPQKVPKTWHLVITPRYYHLVKCYRNPTFPKPPSWVNGNWLVDL

SEQ ID NO: 201909 - protein, 94 aa, Zea mays
  Clone ID: MRT4577_115723C.1.pep
FPGPKFNPLNSKLYLQKDALTRGFGLHKHNEGWSPKYNAHHWGAARLFFFKPKLNRFWGESLPFLTPQKKSPMVDYASLALKGLPLACTGGGAP

SEQ ID NO: 201910 - protein, 95 aa, Zea mays
  Clone ID: MRT4577_115724C.1.pep
VAEAEAEHHPRHADRTLAAAWRLGAGATAAAAAWAWSCRRSRSEWHWRRSLSRSAATDDTSAESRAASDYTPRSSALCDARDVCRLASGGNRARL

SEQ ID NO: 201911 - protein, 110 aa, Zea mays
  Clone ID: MRT4577_115725C.1.pep
GFVFGRVGGRVGGRVGGRVGEHGMVVAAAESHCTVEWRCSARRTPGLLGSDPIPVPFLLASVAGSHRMPSCLGWQHLLFIRGVGGGVGGNRQHSSTLHFLFVRALLSYSF

SEQ ID NO: 201912 - protein, 55 aa, Zea mays
  Clone ID: MRT4577_115726C.1.pep
HASSQASGRAPSDLSPQESRTSLTHQHLPPNLNRPSSSTCALTISVRLATSIDPH

SEQ ID NO: 201913 - protein, 48 aa, Zea mays
  Clone ID: MRT4577_115727C.1.pep
STLPQPELQCDALFITTLSATTTFITLIATAILAISLSLAPFAVFPPL

SEQ ID NO: 201914 - protein, 52 aa, Zea mays
  Clone ID: MRT4577_115728C.1.pep
SYEHIYLIATLQIIKLSTVTSIYVLPFIHLIPSTFMQLLNKYLIGYSTNNSY

SEQ ID NO: 201915 - protein, 86 aa, Zea mays
  Clone ID: MRT4577_115729C.1.pep
TLFSPARCPWRPARASCARACGRARTPTPTRGSLCGIGGTRRAGTTAGRSTQPDRYATPHRLYIIRCPACTVGLIWTPRLVRNHEF

SEQ ID NO: 201916 - protein, 234 aa, Zea mays
  Clone ID: MRT4577_11572C.1.pep
ARRDSLGISLQNCCQHYWYVHVPIMENNYVPYGRSARFAKNQTNDDHFRREVYIGVIDQISQELDSRFDEVNMELLSCMSAFNPKDSFASFDAQKLRRLADFYPKDIFGTDLLKLELHLGNFIADIKKDVLFEGLENLVDLSLKLVQTKRHKVYDLVYTLLKLVLLLPVATAGVDRAFSAMTFIKSKLRNKMGDSLLDDCLLTYIERDVFFQLDEEDVIKTFFTIRNRGPKKNK

SEQ ID NO: 201917 - protein, 116 aa, Zea mays
  Clone ID: MRT4577_115730C.1.pep
KDPKMGRGTIRPGQKKKKRWAAPESQGQKQTTHRLTTKHHRAHLEGVSFGKPKGGNRSPAHYGGPGGGIPLDFQSPFLKGGPETHKGGDIYNPGGGGLRNKSKVGRDRSKLCFSPN

SEQ ID NO: 201918 - protein, 75 aa, Zea mays
  Clone ID: MRT4577_115731C.1.pep
CPICVFSARHYHLLMQILMRVQEGSLWTLSVRSPRLRSNQRSLTVVVFTVKYLFCSIPSNNPSGTAATMNDPCAI

SEQ ID NO: 201919 - protein, 155 aa, Zea mays
  Clone ID: MRT4577_115732C.1.pep
MATFASPLLCNFMAIEQKNAPQLTNSRKPSLRLSFPTTRSMPTLPLPCFRARPDWRVAAVYKVKLIGPEGQESVIQVPEDSYILDAAEEAGIDLPYSCRAGACSTCAGKVLEGSVDQADQSFLDDAQVGAGYALTCVAYPTSDCVIQTHREADLY

SEQ ID NO: 201920 - protein, 154 aa, Zea mays
  Clone ID: MRT4577_115733C.1.pep
MAMATFTSSPVLCSFRTIEQKKAPLLNNSTKRPLHLGFPRSVPTSPSFRARLDLRVAAVYKVKLIGPEGQESVLDVPEDSYILDAAEEAGLDLPYSCRAGACSTCAGKLLEGSVDQADQSFLDEAQVGAGYALTCVAYPTSDCVIQTHREEDLY

SEQ ID NO: 201921 - protein, 159 aa, Zea mays
  unsure (1)..(159): unsure at all Xaa locations
  Clone ID: MRT4577_115734C.1.pep
IRWGFFFFGGPGGFFFFFFLWVFFSFFFFCGGKKRPPPLRGGYKKQKNKNPGGLPPSPPPGGGGEPFFFSPPXPTPXPPPAPHKNPPPPPSGEASPPPRIAMALPGEAPPXPSERREGPQDPPPERPGPSAPXPNPNPGKGPLPXPGQAAPSPPALSLP

SEQ ID NO: 201922 - protein, 95 aa, Zea mays
  Clone ID: MRT4577_115735C.1.pep
DPVAALNEALKSELQRLKVATGQMGSQMMASPAAAPVRWREPAGLPPPQPSSAAVPGDAAAAAAPAPSAATLCNQPQGAQPQHERPASGSSCWQV

SEQ ID NO: 201923 - protein, 167 aa, Zea mays
  Clone ID: MRT4577_115736C.1.pep
MEASNKLAVLLLWLVMAAATAVHPSYSENSPQDYLTPQNSARAAVGVGPVTWSTKLQQFAEKYAAQRAGDCRLQHSGGPYGENIFWGSAGFDWKAVDAVRSWVDEKQWYNYATNSCAAGKVCGHYTQVVWRATTSIGCARVVCRDNRGVFIICNYEPRGNIAGMKPY

SEQ ID NO: 201924 - protein, 86 aa, Zea mays
  Clone ID: MRT4577_115737C.1.pep
DRRLTFMVAYARAPAYVVDPVLVLVLRVSVRQQPITVVSDLWRSFGWLGSTPSRSVLAAAPDRTSCLRCSHATSSQVPPKRPPMSL

SEQ ID NO: 201925 - protein, 91 aa, Zea mays
  unsure (1)..(91): unsure at all Xaa locations
  Clone ID: MRT4577_115739C.1.pep
MRSTAGDVAAVEDEDACMYAMQLAAXSILPMTVKNGIXRXPLEVVQKEDRGGDEDVATVQGEDRMPERGTKVDGAAHMADPMIHLLRCWYQ

SEQ ID NO: 201926 - protein, 105 aa, Zea mays
  Clone ID: MRT4577_11573C.1.pep
QHTSRAISARLLCATTLCASGDHGDMRRLELHYTSFRKNAPSCYTRRVPDTRWVRARVQNFTREYSHGRIWIIPMGMIAGEYLLYLIQTRPVVTPTSNRYFTSIN

SEQ ID NO: 201927 - protein, 103 aa, Zea mays
  Clone ID: MRT4577_115740C.1.pep
MVYVDSWDEFVERSVQLFRADPNTTRYVMKYRHCEGKLVLKVTDDRECLKFKTDQAQDAKKMEKLNNIFFALMTRGPDADISEVSEKGQAEQQQPKKGRGRRQ

SEQ ID NO: 201928 - protein, 192 aa, Zea mays
  unsure (1)..(192): unsure at all Xaa locations
  Clone ID: MRT4577_115741C.1.pep
TESTCISQISHRRYQRCACAPRWMTTTWLLNQRNPPXAAAAWSSLANEAXPCPCPSSTIANRRGPSHRPCPADHGVGSAATSEVGDPLRGLDHSLLGEDRSQTGGGQLDHGDAMSRKGGRSKTATAVPKVWKVSCTLTGVEVDFAACSAPVGASRLASHRENLASHFAFCSSKSLPISSRRNFMSVDMVPQH

SEQ ID NO: 201929 - protein, 102 aa, Zea mays
  Clone ID: MRT4577_115742C.1.pep
DNACPYSRSSSQAIDFHEKRLQNGVDRHERRLQIALTHRKEVNLQRGRGHPRRHQPALLLEHKSASQQDQPWPRVGSRNAHRGQGTRQDPRHRMRRRRRSTR

SEQ ID NO: 201930 - protein, 182 aa, Zea mays
  Clone ID: MRT4577_115743C.1.pep
GGRPFFLAAGGFLPCLLTETGFVGANPRGRVGVLPTVQVEFISSSVPALHLLGGPVPALQELPPGFVFFRRHQGLLMGLPLPLFVSASSRWFGRVSSNNTGGGGAVPGSLSFSLGIRGSVAAPVPPSWCSCKRTRKIRTGGGRWGPRPYSWPCCCCRIVRKKNKKKKKKKKKKKKKKKKKSG

SEQ ID NO: 201931 - protein, 63 aa, Zea mays
  unsure (1)..(63): unsure at all Xaa locations
  Clone ID: MRT4577_115744C.1.pep
LAPSKLSPSSSSDGRXHRHVHVLQYQRTPYRLLVLLGSGAREITPAFYNECFLPRLPLLVGAS

SEQ ID NO: 201932 - protein, 126 aa, Zea mays
  Clone ID: MRT4577_115745C.1.pep
RWFGLQVSPLLIKKFSHEEQANLVWQFLCSIPVNMMAKFLPWISASVSTDENQDILDCLSKIVPEEKLLQEVVFTWFGGKSESSSTCESSSGQCDVFCYSGIMVKQSFVCMYQQLKCKYCYIIAEV

SEQ ID NO: 201933 - protein, 77 aa, Zea mays
  Clone ID: MRT4577_115746C.1.pep
KPKGKNCQVYIHGVTLEIEQKWTKKAFRTNIFGNKSSPAWYHKRPTIFRWGEGIRLTVGGKELPGCHPPTQRILLLL

SEQ ID NO: 201934 - protein, 73 aa, Zea mays
  Clone ID: MRT4577_115747C.1.pep
MGNGAKAQQKRERAAKDKNTAKSQLKVNEKACDIQCQICKSTFLKTTKAPALKEHAENKHSKTIADCFPTYQE

SEQ ID NO: 201935 - protein, 46 aa, Zea mays
  Clone ID: MRT4577_115748C.1.pep
FGMKHWHALRPKLEAWRGTIAKAITPIQANKVPEKGAQGIQGLAIH

SEQ ID NO: 201936 - protein, 69 aa, Zea mays
  unsure (1)..(69): unsure at all Xaa locations
  Clone ID: MRT4577_115749C.1.pep
MREEQMGEAWGSHGGSGGSHKSGSPRGGGGGGSRREHDRNLPIGNMRRIMKKAMPYNGTIAXDAKETVL

SEQ ID NO: 201937 - protein, 669 aa, Zea mays
  unsure (1)..(669): unsure at all Xaa locations
  Clone ID: MRT4577_11574C.1.pep
MKYMKLGSKPDVLQTEGSNIRFVATDLATDVVILIGDVKFYLHKFPLLSKSSRLQRXVASINEEKNDEVDISDIPGGPSAFEICAKFCYGMIVTLNAYNVLAARCAAEYLEMFETIDKGNLIYKIDVFLTSSVFRTWKDSIIVLQSTRSLVPWCEDLKVISHCIXSIASKASIDPSEVEWSYTYNRKKLPSENGIDSHWNGVRMQPMVPTDWWVEDLCELEVDSYKRVIMSIKAKGSTPAVVVGEALRAYAYRRLLGSLEDAVSNGVDCAKPRAVLDAIVSLLPAEEGSVSCGFLLKLLGAACLLESGESHRVNLIKRIGTQLDGASVPDLLIPLNTNEDNISSIDLIMAIVEEFMSRNGDSGTEKFQDDEGIVDIEKATSVSSASKLAVAKLIDGYLAEIAKDPNLPLPKLIALAEMVSSLPRPTHDGLYRAIDMYLKVSLCVSTECSRCRAFEYTXTVPSMLTQEHPSLSKSEKKKLCGLMDCKQLSQDACMHAVQNERLPLRVVVQVLFFEQVRASSVASARSDANSTSGLPSAVRSLLPRENGNSIGSSRSAATTMTTEEEESGVPTSSDINSLRSMRLANNSGGSERSSGSSDVNNKSSDDRSAAAAGKAKGTMLMPKKMLSKLWSGKTNAGESSSSDTSDSPGSANPEEAKSTQSRITWRSVS

SEQ ID NO: 201938 - protein, 139 aa, Zea mays
  unsure (1)..(139): unsure at all Xaa locations
  Clone ID: MRT4577_115750C.1.pep
PVGRVETGVIKPGMVVTFGPTGLTTDAMSADMHHEALEEASPGXDNVGLNVRNGVVKDLMRGLVVSIYKDDPAKEAASFTSQVIIMNHPGHIGNVYAPGLDCHTSHIVVKFAELITKIDRRSGTELAKESKLLNNVDAD

SEQ ID NO: 201939 - protein, 54 aa, Zea mays
  Clone ID: MRT4577_115751C.1.pep
SLCKGYDEKLHCQTPGVWCIYTLASGSSGYKENVTGNKFIDRDGERETRESANS

SEQ ID NO: 201940 - protein, 42 aa, Zea mays
  Clone ID: MRT4577_115752C.1.pep
FSSNRKRTRSMNPNLCSHTKDAYYINRSGCVTQLAQATTRAV

SEQ ID NO: 201941 - protein, 57 aa, Zea mays
  Clone ID: MRT4577_115753C.1.pep
AHFTFSRPFLFFLGILQNTPGGGYIRGRLHGAVLDLILFRYQDAYLIILDRLKQGAH

SEQ ID NO: 201942 - protein, 78 aa, Zea mays
  Clone ID: MRT4577_115754C.1.pep
QQVGASPQNLFNMPQLLAVSQRCLKKALTFLKKRLFGGAPFLRKANRCSSQKGNFWSQGKGLPKKQRLFFRKKKIKKK

SEQ ID NO: 201943 - protein, 104 aa, Zea mays
  Clone ID: MRT4577_115755C.1.pep
RTSCMKIIKQWLPTNLDKLHLSLSILQLSLMAPPMRQTSALSAGRSYITSTGPTSFQRAGSSTISAKLTSNISPTWSSFRSFTFSKTDIWYFIGNHKNVLCQNL

SEQ ID NO: 201944 - protein, 60 aa, Zea mays
  Clone ID: MRT4577_115756C.1.pep
CRPACVSSEFGSSWLLMLVSPHHRWVLRDRFPRRIVAYNAPTPVRDGGAAAVVWFKHDLR

SEQ ID NO: 201945 - protein, 36 aa, Zea mays
  unsure (1)..(36): unsure at all Xaa locations
  Clone ID: MRT4577_115757C.1.pep
KKKRLFFFKKKKKKKKKKKKKKKKKKKKKKKKKKKX

SEQ ID NO: 201946 - protein, 78 aa, Zea mays
  Clone ID: MRT4577_115758C.1.pep
MGIDLVAGGRNKKTKRTAPKSDDVYLKLLVKLYRFLVRRTKSNFNAGVLMRLFMYLSSLTCICTGRRKGANPVPEAPT

SEQ ID NO: 201947 - protein, 147 aa, Zea mays
  Clone ID: MRT4577_115759C.1.pep
SSALRHPCPHPPPPSLPSYAQVLDAPSPANVVSQAPVVSAQGPVVSQRRPFPYSRRLRTILGSGDPGSQDRGYSGGVSHALRTGLLVAGATLLLIATTITFFVACDIRKQHRVAARGDWKMMPFVVDLGFGEESILQGLTEANIVGH

SEQ ID NO: 201948 - protein, 53 aa, Zea mays
  Clone ID: MRT4577_11575C.1.pep
TQLTVGPTTQREWLGVTSRLLTYLTRMTRWPRTLLKETTHHLGPRMGGTACQH

SEQ ID NO: 201949 - protein, 329 aa, Zea mays
  Clone ID: MRT4577_115760C.1.pep
LIEVLKKENGNYIVAPYEADAQMTFLSVNKLVDAVITEDSDLIPFGCSRIIFKMDKFGQGVEFQITRLERNRELDFNGFTRQMLLEMCILSGCDYLPSLPGMGVKRAHALIQKLKCHEKVIKHLRYGAVSVPPQYEEDFKKAIWAFKFQRVYDPATEDIIHLSSVPQSLIEDLEFLGPWLPQNIAKGIALGNIDPLTKEPFEINPECSAPSVHKVCPTREPIAPSNGRKKLDLPVQKNILTNYFCLASLEAKRKFRAPKVTHKQQILNEALPSPQAQGSATSDSVEDTRLPTDRIQASQCSSEHLSSEPPQNDPISVGSQCSSERFSCE

SEQ ID NO: 201950 - protein, 420 aa, Zea mays
  Clone ID: MRT4577_115761C.1.pep
MMREGDACVTLLRSKLHGLVERNRALEEENKQLRHQVSRLKGQISSLEGQDTDKRMLWKKLLESSATSISYSKEKQFVQSNDDAKEATDLSSSLCHRRQQQFSRVALVRSRAPRVPNPPPNPTCTQPKTTVRKEGCMAPPPPPPPPLPSKLQRSAKAIQRVPEVVELYRSLVRPEGKNDAKSGSVGIPAATSSREMIGEIENRSAYVLAIKSDVENQGNFVNFLASEVQNAAYREIADVEEFVKWLDGELSYLVDERAVLKHFPNWPEKKADAMREAAFNYRDLKNLESEASSFHDDRRVATPMALKRMQALQDKIEQGIHNTERVRDSAGGRYKDLKIPWEWMLDSGVISQLKMASLKLAKEYMNRIASTLKSDPFANDEELLLQGVRFAFRVHQLAGGFDEGCRKAFQELKTYASKSE

SEQ ID NO: 201951 - protein, 58 aa, Zea mays
  Clone ID: MRT4577_115762C.1.pep
NKKTVISGLLVSRANLNHFQGGGGGVFPHGWEIRPPLGIVSGTKLCLLNFQNMNGFVA

SEQ ID NO: 201952 - protein, 43 aa, Zea mays
  unsure (1)..(43): unsure at all Xaa locations
  Clone ID: MRT4577_115763C.1.pep
WTNELGSMDCGSMDDVXPTILSCKLILRVKWCFLVSHNGCVFF

SEQ ID NO: 201953 - protein, 276 aa, Zea mays
  unsure (1)..(276): unsure at all Xaa locations
  Clone ID: MRT4577_115764C.1.pep
MRKKLGTRFPAARIKKIMQADEDVGKIALAVPVLVSRSLELFLQDLIDRTYEITLQSGAKTLNSFHLKQCVKRYSSFDFLTEVVSKVPDLGGADSCGDERGLPRRXKVICNQHFMIQLSHVSEIHFFRKSNGSDPENDESRSSKMAIRNANISPRGRGRGRGRGRGRPPTKRKEVGYVQFEDESSMFAEQGEPLPGEETVQEINGNETMPQSTQPPVEAPPTALAQATTSSKAEEANSDHQSDWPMPDAIGSIGVVPSGFGHLTVQVEDEDYDNED

SEQ ID NO: 201954 - protein, 81 aa, Zea mays
  unsure (1)..(81): unsure at all Xaa locations
  Clone ID: MRT4577_115765C.1.pep
MMEAKVERMEMALAPTLPSKKVQTADKNPKAQSRTRQGKHLRHLLQPADASSMPPDRPKYMKIQAPPCIPPXSRYCDLTGR

SEQ ID NO: 201955 - protein, 251 aa, Zea mays
  Clone ID: MRT4577_115766C.1.pep
MRKKLGTRFPAARIKKIMQADEDVGKIALAVPVLVSRALELFLQDLIDRTYEITLQSGAKTLNSFHLKQCVKRYSSFDFLTEVVSKVPDLGGADSCGDERVLPRRRKSNGSDPENDESRSSKMAIRNANTSPRGRGRGRGRGRGRPPTKRKEVGYVQFEDESSMFAEQGETLPGEGTVPEINSGNEITPQSTQPPPTAPAQATNSKVEEASTDHQSDWPMPDATGNIGVGPSGFGHLTVQVDEDEDYDNED

SEQ ID NO: 201956 - protein, 171 aa, Zea mays
  Clone ID: MRT4577_115767C.1.pep
GRVGVGDLELFRTVADKFASTFSADRTRNLIVRLRHNVIRTGLRNISISYSRISLADIAKKLRLDSENPVADAESIVAKAIRDGAIDATIDHANGWMVSKETGDVYSTNEPQIAFNSRIAFCLNMHNEAVKAMRFPPNSHKEKESAEKRRERLQQEEELAKHMAEEEDDDF

SEQ ID NO: 201957 - protein, 85 aa, Zea mays
  Clone ID: MRT4577_115768C.1.pep
TQSGILYIISIVMTQYKRPALCRLKQAGTLSSCHIIIYIERERNVAPSLWPPVWYVRSSVWLYSGQRPRCYPWWSPQFWSSCRGY

SEQ ID NO: 201958 - protein, 67 aa, Zea mays
  unsure (1)..(67): unsure at all Xaa locations
  Clone ID: MRT4577_115769C.1.pep
EQDNTKNAGQPSRQQHRNETRHGPRQQRPXQXHRSHGVTDPTSPLLSSPLPLPVCLLGXLCARLSTR

SEQ ID NO: 201959 - protein, 79 aa, Zea mays
  Clone ID: MRT4577_11576C.1.pep
KPGPGATPLPPPPSWMDLSHRTRLAGGAAAPSSPASGTGSRSSRGTADGGRLASGSGAGNDRIALSVLAAAHQSCACVL

SEQ ID NO: 201960 - protein, 173 aa, Zea mays
  unsure (1)..(173): unsure at all Xaa locations
  Clone ID: MRT4577_115770C.1.pep
LTNAVRVGTFELFRTVADXFASTFSADRTRNLIVRLRHNVIRTGLRNISISYSRISLADIAKKLRLDSENPVADAESIVAKAIRDGAIDATIDHANGWMVSKETGDVYSTNEPQIAFNSRIAFCLNMHNEAVKAMRFPPNSHKEKESAEKRRERLQQEEELAKHMAEEEDDDF

SEQ ID NO: 201961 - protein, 120 aa, Zea mays
  unsure (1)..(120): unsure at all Xaa locations
  Clone ID: MRT4577_115771C.1.pep
LTPQNLCSDAWTEAAKKAALVXQLKIRPKKIRGHDQIFMVHLKNXECTKGAIPGXKPNDTISXFTDNDFLGIAIVKTNPHIAFIRGVSNIKXRISVAHKFTPDIFPKPVKMHKVKMDYLV

SEQ ID NO: 201962 - protein, 69 aa, Zea mays
  Clone ID: MRT4577_115772C.1.pep
MWLQFYRYLFYLGKIRTIQLEYTDAKESLLQVARKAPTTAHGFRIQCNKWVIIERLLLGWNRTRHCDFL

SEQ ID NO: 201963 - protein, 491 aa, Zea mays
  Clone ID: MRT4577_115773C.1.pep
MPEDVQMNDSEPQPAASAPAVGAPALSTLHHLKEIASVIEAGSLSKEVRRISRAFRLTVALRRRLAARDVSAFLAFALPASSEAYGRLTALVPKEDDTEMDVDAAAPATQISIKHGLPEIEIYCYLLVLIFLIDHKKYDEAKACASVSIARLKNLNRRTVDVLASRLYFYYSYVYELTNSLAEIRGNLLALHRMATLHRDELGQETLLNLLLRNYLHYNLYDQAEKLRSKAPRFEAHSNQQFCRYLFYLGKIRTIQLEYTDAKESLLQAARKAPITACGFRIQCNKWAIIVRLLLGEIPERTVFMQKGMKKALIPYFELTNAVRVGDLELFRAVADKFASTFSADRTRNLIVRLRHNVIRTGLRNISISYSRISLADIAKKLRLDSENPIADAESIVAKAIRDGAIDATIDHANGWMVSKETGDVYSTNEPQIAFNSRIAFCLNMHNEAVKAMRFPPNSHKEKESAEKRRERLQQEEELAKHMAEDDDDDF

SEQ ID NO: 201964 - protein, 260 aa, Zea mays
  unsure (1)..(260): unsure at all Xaa locations
  Clone ID: MRT4577_115774C.1.pep
MPEDVQMNDSEPQSAAPAPAAAAAPALSTLHHLKEIASVIEAGSLSKEVRRISRAFRLTVALRRRLAARDVSAFLAFALPASSEAYGRLIALVPKEDDTEMDVDAAAPATQISIKHGLPEIEIYCYLLALIFLIDQKKYDEAKVCASVSIARLKNLNRRTVDVLASRLYFYYSYVYELTNSLAEIRGNLLALHRMATLHRDELGQETLLNLLLRNYLHYNLYDQAEKLRSKAPRFEAHSNQQFCRYLVYLXKLXTFXWSH

SEQ ID NO: 201965 - protein, 175 aa, Zea mays
  unsure (1)..(175): unsure at all Xaa locations
  Clone ID: MRT4577_115775C.1.pep
PVGDPGFSGPLGPGGGGQRPXRAXXEXPGRGGRXPXGGGGGPAXPSXPGGPPPAXXGARGPGPRGPPRPGAGTSPPXXGAARPXRGPPXPPRAGGPRGTADGPSQGPPPGRPXTSGQPPQWAGSWGCLGGWGGPFPGGREKNKPPGAKKKKKKKKKKKKKKKKEGGADKAYGTAC

SEQ ID NO: 201966 - protein, 228 aa, Zea mays
  unsure (1)..(228): unsure at all Xaa locations
  Clone ID: MRT4577_115776C.1.pep
VKEEKGFSGNMPNESNELDYFQSLEXLSGHSNPRVPSASNYMHSGAPPTVCIQEGVTSSLQPSDSVKSLETCTMPRARSTTQGSDISEDDRHSGGAFASGCSDFQADMVDHSYKNQSPHPGRVFHSEWIPREQAGFLNRLSKSEDSLNPELLIRQSQSGVASEHIAENIDSAFAGTEKPNLAAQAINLNDPAVDDSLIQFEKGFTNTVQQASPFSEHLLGEKRPSDDT

SEQ ID NO: 201967 - protein, 72 aa, Zea mays
  Clone ID: MRT4577_115777C.1.pep
LGLKTWDNALNLGRLTKKRVLIRTHISGARHILGMFLVAGPEPNYLCRAEKRHPNLAPSRTGRNTRAPCPRG

SEQ ID NO: 201968 - protein, 293 aa, Zea mays
  Clone ID: MRT4577_115778C.1.pep
MGRHQAGRRAILFEETLYQSAVDGRKIVDILAEQGIVPGIKVDKGLVPLAGSNNESWCQGLDGLASREAAYYQQGARFAKWRTVVSIPNGPSELAVKEAAWGLARYAAISQDNGLVPIVEPEILLDGEHGIERTFEVAQKVWAETFYAMAENNVMFEGILLKPSMVTPGAEAKDRATPEQVAAYTLKLLHRRIPPSVPGIMFLSGGQSEVEATQNLNAMNQGPNPWHVSFSYARALQNTCLKTWGGQPDKVKAAQDALLLRAKANSLAQLGKYTSDGEAAEAKEGMFVKNYSY

SEQ ID NO: 201969 - protein, 153 aa, Zea mays
  Clone ID: MRT4577_115779C.1.pep
HRIWFWCASSMNAVASIFLVMKLKRDLICRARDALDCTRREEGDTDDRSSSRARCLPRTPMILASFLHPRGDPLKSPVSDCRRSSSARQQDCDAASGDGDSRRFAADASVVASAVAQTYCELCQCWVCALDRFFLSFLFFLPHRRCRRLGAVD

SEQ ID NO: 201970 - protein, 114 aa, Zea mays
  unsure (1)..(114): unsure at all Xaa locations
  Clone ID: MRT4577_11577C.1.pep
GDSLACWIFIASCWSCPFRWAGTHSHASGCRFGTYSTDWLSAVCGVVVLLLLSSYFVVIGGRGGRARKIISLILLXVIFRVRQMKYMKLWDQSLMSFQTEGSISRXWCNRTGTD

SEQ ID NO: 201971 - protein, 105 aa, Zea mays
  Clone ID: MRT4577_115780C.1.pep
GWKGLGSREAAYYQQGAGFAKWRTVVSIPNGPSELAVKEAAWGLARYAAISQDNGLVPIVEPEILLDGEHGIERTFEVAQKVWAETFYAMAENNVMLWSIPYVCP

SEQ ID NO: 201972 - protein, 256 aa, Zea mays
  unsure (1)..(256): unsure at all Xaa locations
  Clone ID: MRT4577_115782C.1.pep
MDDGSSNKVVEDVAEEDPGRRGGPWRTDEADANEKAPRPSRRVASLDVFRGLTVALMILVDGAGGEWPVIGHAPWNGCNLADLVMPFFLFIVGMAVPLALKGIPDRGRAVRRVVVRTLKLLFWGILXKVTYSVRHPPFDFGKSLLFYLXRAAKLISXGKSGXMCPGGYSHAPDELAYGVDMKHVRWGGILQRIALAYLVVAVLEMVTKDGAKVHQDQPPGSSGRFSRVFRMYLSQWIVACCILVVYLSLXLXVYVP

SEQ ID NO: 201973 - protein, 63 aa, Zea mays
  Clone ID: MRT4577_115784C.1.pep
GLGICRRGEGSALRVREAKMIEVVLNDRLGKKVRLQSDEVYPIYVPDPLITSSYLTYLYKYYT

SEQ ID NO: 201974 - protein, 233 aa, Zea mays
  Clone ID: MRT4577_115785C.1.pep
MDDGSSNKVVEDVAEEDPGRRGGPWRTDEADANEKAPRPSRRVASLDVFRGLTVALMILVDGAGGEWPVIGHAPWNGCNLADFVMPFFLFIVGMAVPLALKRIPDRGRAVRRVVVRTLKLLFWGILLQGGYSHAPDELAYGVDMRHVRWGGILQRIALAYLVVAVLEMVTKDGAKVHQDQPPSSSGRFSRVFRMYLSQWIVACCILVVYLSLAYGVYVPDWEFRVRNADSPDY

SEQ ID NO: 201975 - protein, 95 aa, Zea mays
  Clone ID: MRT4577_115787C.1.pep
AGHYRWSPSCYLAPDQLIIKQTRREHSCISPDGYFHLGNSQAPFPRAGAITFDKHAVHHQQQAVRSSYMAGRRPLTPPGYGWSPCPRPRRGSLSR

SEQ ID NO: 201976 - protein, 259 aa, Zea mays
  unsure (1)..(259): unsure at all Xaa locations
  Clone ID: MRT4577_115788C.1.pep
MDDGSSNKVVEDVAEEDPGRRGGPWRTDEADANEKAPRPSRRVASLDVFRGLTVALMILVDGAGGEWPVIGHAPWNGCNLAGLVMPFFLFIVGMAVPLALKRIPDRGRAVRRVVVRTLKLLFWGILLQGGYSHAPDELAYGVDMKHVRWGGILQRIALAYLVVAVLEMVTKDGAKVHQDQPPGSSGRFSRVFRMYLSQWIVACCILVVYLSLAYGVYVPDWEFRVRNAYSPDYGKVLTVRCGTKGXLDPPLHXVGYIDR

SEQ ID NO: 201977 - protein, 264 aa, Zea mays
  unsure (1)..(264): unsure at all Xaa locations
  Clone ID: MRT4577_115790C.1.pep
LGPSRPAGDPVRRGGPWRTDEADANEKAPRPSRRVASLDVFRGLTVALMILVDGAGGEWPVIGHAPWNGCNLADFVMPFFLFIVGMAVPLALKRIPDRGRAVRRVVVRTLKLLFWGILLQGYLLCTLLDTGPPFDFGKSILSTSCSCGKLKLISEFGKWNEXCVXGYSHAPDELAYGVDMRHVRWGGILQRIALAYLVVAVLEMVTKDGAKVHQDQPPSSSGRLLPCIQNVSLPVVRNAKKRSGFSPFPDSQRVRNPDGPDYGK

SEQ ID NO: 201978 - protein, 589 aa, Zea mays
  unsure (1)..(589): unsure at all Xaa locations
  Clone ID: MRT4577_115792C.1.pep
ERPAGPASAARWPAGCSPATVPATLAPPFLRAAASFVSVGFVCFSTPPVSSPLPDALVSPSAPSLCLFLAILPALLFLGRRIGQYSNQYFGSAAVCSIFCGPLPAALALFFGLFESRLLLETGPARPTTRGLRFHLDVFRVAXTVALMVIPADGRXCGEWPVIGHAPWNGCNLXADFVMPFFLFIVGYGRYAPGASRVGLVPDAXARLVRRVGRKXTCKSXLFCGHSIVCKAGYSHAPDEXLAYGVDMRHVRWGGILQRIALAYLVVAVLEMVTKDGAKVHQDQPPGSSGRFSRVFRMYLSQWIVACCILVVYLSLAYGVYVPDWEFRVRNADSRLDYGKVLTVRCGTRGALDPPCNAVGYIDRRVLGINHMYQKPAWRRHRACTDDSPHEGPFREDAPAWCVAPFEPEGILSSLSAVLSTVVGVHYGHVLVHMKSHTDRLRQWVTMGVALLVLGIILHFSHAIPLNKQLYTFSYICVTAGAAGVVFSALYFLVDVVSLRYAFAPLRWVGMNAMLVYVMAAEGVFEGFLNGWYYESTNNTLVYWVRKHVFVKVWHSTRVGILLYVLFAQILFWALVSGVLHRARLYWKL

SEQ ID NO: 201979 - protein, 273 aa, Zea mays
  unsure (1)..(273): unsure at all Xaa locations
  Clone ID: MRT4577_115793C.1.pep
MFGGVGYSSHASATLSYPNAPVPRLRRVGFWQLARTRASMDDGSSNKVVEDVAEEDPGRRGGPWRTDEADANEKAPRPSRRVASLDVFRGLTVALMILVDGAGGEWPVIGHAPWNGCNLADFVMPFFLFIVGMAVPLALKRIPDRGRAVRRVVVRTLKLXLGHPVASGMNVSXGYSHAPDELAYGVDMRHVRWGGILQRIALAYLVVAVLEMVTKDGAKVHQDQPPGSSGRFSRVFRMYLSQWYARKARVFPFQFRKGSFHSISTTHCIYLYV

SEQ ID NO: 201980 - protein, 109 aa, Zea mays
  unsure (1)..(109): unsure at all Xaa locations
  Clone ID: MRT4577_115794C.1.pep
VSCWFVPFLCSFFLGCRLFPXGCSPVCCFLPLLVAAFWVFLLGFPPLLXXLLFGLGAVWXALGCLCALWVXCRVCFSAVVLVLWWALSWSXLLLSCCSWXPLSLLLVGL

SEQ ID NO: 201981 - protein, 109 aa, Zea mays
  Clone ID: MRT4577_115795C.1.pep
MPTVRRRNPDVHVKALEGIVSANTFLTVAVFIGITGTITASSTVPPNCVAGDDIARNFFLFEILSFGFYLLSSLVAQGMKLSVTLLAAGDDFYGDGEQKPVMTDDCEEM

SEQ ID NO: 201982 - protein, 56 aa, Zea mays
  Clone ID: MRT4577_115796C.1.pep
LRVNLPHVSMGAVLIYSTSKRTTKARSYSAVYSSDVFSIQFNNHVNKNMTLHNFIL

SEQ ID NO: 201983 - protein, 106 aa, Zea mays
  unsure (1)..(106): unsure at all Xaa locations
  Clone ID: MRT4577_115797C.1.pep
LGLDQLLDTLATTGNNPXXRRPASWRSGQEGGSGCRRRTATTRSQTAASSAGTAPGFTLSIGXXYRRLAINRIIGFIGFLSAISKXXRHKVXXXXPVYLEYHVDYI

SEQ ID NO: 201984 - protein, 312 aa, Zea mays
  Clone ID: MRT4577_115798C.1.pep
MDGVLQRFDVDLLLDGHGHGDDSLCGSERRSASGGGAQDKAGIDGAVKERIARALRIYKDAAGLDGGALVQVWAPARDGGRRVLATRGQPFVLPPPRCHRLFQYRTVSLAHAFPVGGAAVPGERGLPGRVFDAGEPEWTPNVQYYGTGEYARISYALIYDIQAALALPILDPATGACLAVLELVTTSPRLHFAAEVDRLSEALQAVALRGSEICRRPAPEACNDDGAAAQVAMSEVADILNQVGEAHKLPLAQAWTRCRRCSTGTEHASLTAAGAPFYLTGADPNPNLLGFHEACVEHHLRLRSGRGGLVEE

SEQ ID NO: 201985 - protein, 95 aa, Zea mays
  Clone ID: MRT4577_115799C.1.pep
RKRGATSKPGRDAPASNHTLRGRPLNAPSTTTRPTTGPTTRPATPTSAHTAAGGRRTGQRRGGEEQAGRKRAPCRRPGGRRPRRGPRARRRGPRR

SEQ ID NO: 201986 - protein, 131 aa, Zea mays
  Clone ID: MRT4577_11579C.1.pep
DTRPATRTKICPILKGSVPSASRGQNACSCQSDGEGARSGHPIPCRGEHAAHRQAPADARPRRRVAQRRIGTPTVRDPLTPAPELIALLRCSRRRPSPPGSVSTVTLTHPRSPSVISEMPCRLRLPRRRCT

SEQ ID NO: 201987 - protein, 134 aa, Zea mays
  Clone ID: MRT4577_1157C.1.pep
MESASNEETLPPALPLATLIGRELRGGGSERPLVRYGHSGFAKRGEDYFLVKPDCLRVPGDPSSAFSVFAVFDGHNGVSAAVFSKEHLLDDVMSAVPQGISREDWLQVLPRALVAGFVKTDIDFQRKGEMSGTT

SEQ ID NO: 201988 - protein, 74 aa, Zea mays
  Clone ID: MRT4577_115800C.1.pep
DCGGQQKLRLRRNCHGNMSTPMAHILSPVLLNMELTMPAGELTGPPTVLSRLSLAWAQRPLLRRLQMIIPVFLP

SEQ ID NO: 201989 - protein, 112 aa, Zea mays
  Clone ID: MRT4577_115801C.1.pep
KTLASFFANKPKGSAFFSFKAYSFFTSSSNLVLVDSSRLRKSPSKSSPFKPFCKIKNGSVLVFNLPKTSTSWSSYSHSDSGPPELVKVASVNLLPPTHNYFQEAPGPVAEDG

SEQ ID NO: 201990 - protein, 84 aa, Zea mays
  unsure (1)..(84): unsure at all Xaa locations
  Clone ID: MRT4577_115802C.1.pep
RAKIQDKDGIPPDQQRLISADEQLDDGRAVWDYIIHNASTLNHDIRLRIGMQIIAKTLTGITIALEDVSSDTIYNVXADIHDKD

SEQ ID NO: 201991 - protein, 202 aa, Zea mays
  unsure (1)..(202): unsure at all Xaa locations
  Clone ID: MRT4577_115803C.1.pep
GEXRXPXXPESDGTXXRPGXGEXQGHDRXTPXSXKAAXEAXGKPEGGNAXPGDXGSXKDGPEDTGXXRREGGXSTEXGEGXXSXXPAEXXEHGERXXXAATGXXTXXPGXKNXXKGAGXHXHXGTRXHAAEXTAGXHNTRXHDGXAPXARXXARHGAXPNXTXXEKRDHEQPQDAQXRPEAXXQQGAAAARKAGXGPAGENA

SEQ ID NO: 201992 - protein, 84 aa, Zea mays
  Clone ID: MRT4577_115804C.1.pep
LYNVAGRAEMAPPLLPDIHGAGVTDGAPRSESTFTLYKWNVTQERRQGRDGHGKWPRSQSEGQGRSRWCTLGVLQNLRKLLKTG

SEQ ID NO: 201993 - protein, 110 aa, Zea mays
  Clone ID: MRT4577_115805C.1.pep
ISGETYALDTYICKQSYLQAIGMHTEGGDHATKGKTLSENTSTKTILIPYLLSKHDTVRDIYTKDSDIFYQKDTGTCVASKAGAGTPKDEAMIDYINKVKAPPGGRCQLL

SEQ ID NO: 201994 - protein, 75 aa, Zea mays
  Clone ID: MRT4577_115806C.1.pep
AAALYQGAGTHGTGHRALRAGPHPSIQRAYSDHPRTVARNIVRYHQEDLCARCQHIRHLLARPEILTMLRCYCST

SEQ ID NO: 201995 - protein, 491 aa, Zea mays
  Clone ID: MRT4577_115807C.1.pep
MKISDGEDENITCHLSKSLGDKNLYVGMNGHTHLSNYFPGVRNTALSTGLSTRASHFVHNAPKLHSSFCHDNSHGDSEKCYLNHGMEQVSHYTAKAFCIDDKTTIQSQVFVSNPSLLSTSAAVTASELATKQKKWSTAYVEKQHFSPSPSRIRHEAGDLDSQFRCLRQVQYHLEYLFDGFLQSVQGASSADKFHKDPFHISACSILLDRDTGSPRLQLLSPARSNGRDPSPVSCSQSTECVSQHSQNGSPWDMASQRSVSVPSGIDIPPNGVSPCSSCADSEVSSVSWFHGSGDSAMMHGSGKDTYFTRKSCYTRWERLASSRKNGKILPNQSVKYKSNQKSAPGARFVSHKEQAAIDSRTKEITIDQALKIHEYIESDMKIVEKLSCHNQKEVRHDNEARQLPNNNQDVCLNKNFLQNRYHVESTRAPRATHQIPIYQPFKIQNTTECDRASLSKNMPRKHSCGTWKEYEILDRPTKQRPICGPLKLENR

SEQ ID NO: 201996 - protein, 48 aa, Zea mays
  Clone ID: MRT4577_115808C.1.pep
INYRKGCFGNILWLLGSNLWFKKTAPGCGLKVDYKKLCWRKREGWKGV

SEQ ID NO: 201997 - protein, 127 aa, Zea mays
  Clone ID: MRT4577_115809C.1.pep
NPGPLNCPFLSPRPPSPVLPPPQSGVHQQRHQSRRWEASSTFSSPYVDEVVCRGDSLTDFLPVRRSLPSAWLVIAVSKERRSAPLRPSARRCALRRRVEFLPLLQANSVFPSHPVSFLFVGIFGSLL

SEQ ID NO: 201998 - protein, 59 aa, Zea mays
  Clone ID: MRT4577_11580C.1.pep
CLQCIIASPLSVCHLVHVCRSAGQRPMSSSGTAEAALHPGMQIRRLSPLQNMRFCSSQK

SEQ ID NO: 201999 - protein, 78 aa, Zea mays
  unsure (1)..(78): unsure at all Xaa locations
  Clone ID: MRT4577_115810C.1.pep
MGGCVKTHKTNAYFKRFQVKFXKKRSLGRTTYRSRXRLINQDKNKYNTPKFRFGGRFTNQDLTGQIIFGRLAGELGLG

SEQ ID NO: 202000 - protein, 687 aa, Zea mays
  unsure (1)..(687): unsure at all Xaa locations
  Clone ID: MRT4577_115811C.1.pep
MMFGLKNTGATYQRAIQTCLVDQWGKRVEAYVDDMVIKTENSENFIEDLQLVFNSLRRYRWKLNPEKGTGSSRGTKNVLTTPPVLKPPRRATPNQSVEDLLLYISFTTHMVSTALVVERAEEGHAYLVQHPVYFISEVLGPSKIKYPQVQKLXTRYSYPLXLCHYFDDHKVIVVTGFPIGDILHNKEAIGRIAKWACELGAHDIEFWPRMIIKTQALVDFXQSGLSTRFQTTQRLPRRGECTLXSLKLQGAGAGILFIAPGVVISQINKDWDCSTDSMGKYCGVVRKLVDKFEGLEFHHVERYLNAAADALSKLGSSRAPAPPGIFVQEISQPSIISDQVEECNTLSQPESDPNDWREPIIRYIKNEEELDDKAAAERITRQSAHYTIIGGLLYRRGAAGVLMKCIHSATGKQLLDEIHVGQCGVHVASRTLVGKAFRSGFYWPTAKSNAVELVQKSKAVEFIKGIIFRFGIPNSIITDLGSNFTSFEFFDLCEQRSIQIKYASVAHPRANGQVERANGMILEALRKKVFDKSEKLAGKWIRELPYVVWSLRTQPNRALHGNTLFFMVYGSEAVLPADLIFGAPRLTFESIAKAEATRLEDIDVLEEERLNTVIQSARYQQTLRRYHDKAMQHRSFAVGDLVLRRVLTGEGQHKLSPLWEGPFIISEVTRPGSYRLTQMDVIEVGNS

SEQ ID NO: 202001 - protein, 169 aa, Zea mays
  unsure (1)..(169): unsure at all Xaa locations
  Clone ID: MRT4577_115812C.1.pep
THQAEGTSSDQTTRATKRPTHRAPRAPASATKAHKTPQGAQAPRAKXPQARPPGTGXGHKHPAGQANRRQQAHAASDQQQPSAQXQQQPGAQRTTQTXATQQQQQTAPAPSQRAAENPXAHRQHKRQAPNPRARANTGADQQQQQXQQXXPAPRQQAKENPAAHPQQQQ

SEQ ID NO: 202002 - protein, 110 aa, Zea mays
  Clone ID: MRT4577_115813C.1.pep
DLVASAGFLRLVQVRIREYEDVSELLASVRRTVGRWLGMQLSRRQCSQWPAHCRLDGPWLCGASWCSLAVFMVVCTPLLGSVDIFFLGVGEIGSGFRCNYKIRMVRPARG

SEQ ID NO: 202003 - protein, 139 aa, Zea mays
  unsure (1)..(139): unsure at all Xaa locations
  Clone ID: MRT4577_115814C.1.pep
MNTERFRPLAHALKGALSVGVLAEFLNLRDVLFSSHLQPESEDKHIWRLVASSDDTAKSAYEXFFKGAILFSSWEPIWRTXAPNKYCFFMWLTMHDKCWTADCLAQRHHQKCLLCDQEEETMKHLFHMVWAAEPCSPAS

SEQ ID NO: 202004 - protein, 88 aa, Zea mays
  Clone ID: MRT4577_115815C.1.pep
GDANPLSTAGEDGALTPAETLGERPIRIATFANKRTSTSVEDLGHHAGDYRLRSTHDPRTGYVHLQRRGHKDDPETIWLTGGPSRSSE

SEQ ID NO: 202005 - protein, 141 aa, Zea mays
  unsure (1)..(141): unsure at all Xaa locations
  Clone ID: MRT4577_115816C.1.pep
INILNEKKKYCSKKKKKKIIKKNFFFFFYFFFFFFFFYFFILDGHFSFPFERPINPCGRGGYIQFDLYTHLRRYEKTSFSPFSYFFATFPLFPLXAVSKGLPPGPLSTVLPXLXPKVPPCGRVLTPALGAFPPGGPFLSGP

SEQ ID NO: 202006 - protein, 99 aa, Zea mays
  unsure (1)..(99): unsure at all Xaa locations
  Clone ID: MRT4577_115817C.1.pep
HASENCGWENYLDINLNWKEALXNRTRPLXKRGAVINRIKLTCLTTVKPKLSSLIDAHTVEDRQTDGSKQRDTPKHIVKGTGSRTHRVNKPGKDRGITS

SEQ ID NO: 202007 - protein, 113 aa, Zea mays
  Clone ID: MRT4577_115818C.1.pep
ILFTGMYLPSFTHINILQYLIYFLSPFTSTFLILILYSNTTIITNPSHTTLKPFNYKDIPSYIHHSVRGFKIIRYTTLAVNLIPVIHPLTIPCSKSPTFFDTILLIQCVTNHT

SEQ ID NO: 202008 - protein, 57 aa, Zea mays
  Clone ID: MRT4577_115819C.1.pep
QSLVLSCSHVEPSPSNLGLGLYDPQLLPPHRTLRATFISYSKRHTHHSFLSMSYIIF

SEQ ID NO: 202009 - protein, 66 aa, Zea mays
  Clone ID: MRT4577_11581C.1.pep
SARVRIDFFYAKFFVIKSIGEADVHKSIKYGVWSSSSSGNSKLDSAFRDADRISRRHSTKCPVFLF

SEQ ID NO: 202010 - protein, 123 aa, Zea mays
  Clone ID: MRT4577_115820C.1.pep
TAPAGHSRGPHHPRPRHYPAGLLHPLAACSISHRPRCQDECVVLFDAPATPSTSAHWKRESWAPDRLLLSPFSPQISNANVNSRGCRLLPSGGRPRPERKNARESMRNGRGRSVTASGCAGGE

SEQ ID NO: 202011 - protein, 49 aa, Zea mays
  unsure (1)..(49): unsure at all Xaa locations
  Clone ID: MRT4577_115821C.1.pep
KGTQRSSRAAFFFFKWGGGXDFFFFFFFFFFFFHRTQFLLNQTLPKLTF

SEQ ID NO: 202012 - protein, 158 aa, Zea mays
  unsure (1)..(158): unsure at all Xaa locations
  Clone ID: MRT4577_115822C.1.pep
SAXSRXTPXEPSPAAAASPPAQPLAVTERPLPFLMDSRAFFLSGRGRPPEGSSRQPRLLTFALELYVQKSNFAVRRLSCYPSLGRHQTSEVATEYLFPEPRLQIWGEKGESNSRSGAQDSRFQWALVEGVAGASKSTTHSSWQQYIFGPELASHIWRI

SEQ ID NO: 202013 - protein, 162 aa, Zea mays
  Clone ID: MRT4577_115823C.1.pep
RRPPRPHSNSARGAQPLAVTERPLQFLMDSRAFLAGRGRPPEGSNRQPRLSFDTRDCHLIPLTFALELYVQKSNFAVRRLSCYPSLGRHQTSEVATEYLFPEPRSGGKKGESNSRSGAQDSRFQWALVEGVAGASKSTTHSSWQRGLWLIEQAASGWRRPAG

SEQ ID NO: 202014 - protein, 57 aa, Zea mays
  Clone ID: MRT4577_115824C.1.pep
LHASAHASGIAEHRISLQSRHRHMLSFTLEVMLDWMPGFTMVAVLLQAMTMSRNRGL

SEQ ID NO: 202015 - protein, 154 aa, Zea mays
  unsure (1)..(154): unsure at all Xaa locations
  Clone ID: MRT4577_115825C.1.pep
MALGGCGNEADGARANHGGSSTGQRQQHGGRPLVWEGNGTANRSGSGDQDANGSGSQRPWKGLKDNNLYDPWNHAWPYYGGFDCTYCSLKHKGGGATRVAEHLGGIVGNVRSCPNVPRNVRDAMRECRDXIKEEEKRKQNSRLRIERKYYGRVV

SEQ ID NO: 202016 - protein, 130 aa, Zea mays
  Clone ID: MRT4577_115826C.1.pep
ALYYSEYTFCNITASLQDFISLDIKQREDKKALLISSRWSNLEMATGLDPRFPATLENRDAEVSSPQGCKQGKLFLQRGRESILHSVLGSVKLAHDNVFVYWVMIKETMVNDKRNNYLLRKKKKKTRGPR

SEQ ID NO: 202017 - protein, 79 aa, Zea mays
  Clone ID: MRT4577_115827C.1.pep
YKGLGENPNCYRGIYVKRSSDLEPIEHSVIPRMIGISSIKPVHCWSLHHRYSTELEHSRSLPMLTGYPALNDADVETTS

SEQ ID NO: 202018 - protein, 180 aa, Zea mays
  unsure (1)..(180): unsure at all Xaa locations
  Clone ID: MRT4577_115828C.1.pep
MAPLGDGGAADAEAVXNLMATVRXMLIRLXPDVYGLXMDNSDGFHMVLDGSPVNVVCADNKFGESFAFCGKVRYVEYWHMLTNMLKRNNENGVGCLYDKHTRTVLALRTLMHHRLRELMVYRYHSAYMLLTEAXECTVGLLQSDMVFHYGLIXLMSEPSRSVHMADMRANKAAGELSSYD

SEQ ID NO: 202019 - protein, 482 aa, Zea mays
  Clone ID: MRT4577_115829C.1.pep
MTPPCNSVSSVVDFVPNYIKAKIERHKLAKKIKELKERVKDVGERRERYGVTVPPTQAKKRSEAGTSAGDNLETKRKERQEFDQALREEEAFFDEKKDEAAGLSSPSTYISNMVRRWWISRPPFDQAIRKLAPELAPYARKIRGALLKHKAGGMRKNHDGRRFHVHDDTVVAICMEMVLRALHAFPQSRVGKEKEEELNKLMEALHVADLPNRVMTFCYSELTTEEKSCLQYLAAFRLETSISRTSLVRRIAAERLVKEDKEHQLSMEQSAERCFEELLFRGFISADATGAAGKVKCCRFRSESVKQFIVDMCKAENFVGGGLPVHLRIQNDIRSAALEGKQQHDDPVNKMLRELDLLPKSYRLNVMDLGGSMGILKKSHLANICKLRTLKYLSLRYTDVRSLPSQLQELRLLETLDIRHTNIPRGSRNTQALLPPSLKHLLAGNVDSQGDAPNATVRMPDSIQEMPCLEVRNRTFYYIPSS

SEQ ID NO: 202020 - protein, 64 aa, Zea mays
  Clone ID: MRT4577_11582C.1.pep
FIQLLNKSSITNLFYIMTSAYKGSSSHTNKFGMQQALTVDTIFLAGQHLVFRYTIIDLSFGRQM

SEQ ID NO: 202021 - protein, 51 aa, Zea mays
  Clone ID: MRT4577_115830C.1.pep
IGYLEAGRVEVLQSHTPLDYLQQLTHPHTCIQTLLCEQCSLQCKAMHVGKF

SEQ ID NO: 202022 - protein, 78 aa, Zea mays
  unsure (1)..(78): unsure at all Xaa locations
  Clone ID: MRT4577_115831C.1.pep
MMPCPLSTIHRMTTTKRTSPMCEHMYXPRSKDQDNICRAYYWTXWPXLWLVTYEXVKLQLAKPRXYVPLVCGQKLDMS

SEQ ID NO: 202023 - protein, 57 aa, Zea mays
  Clone ID: MRT4577_115832C.1.pep
RPVRLESLMCGPLWDTTKISNQFIVSCTRSLQSHCKRPYYLCIRYWYPCCPLCLHPE

SEQ ID NO: 202024 - protein, 139 aa, Zea mays
  Clone ID: MRT4577_115833C.1.pep
LGCFWDPPYQGPPPLRFTAWCSSLPGPSGSGFPLPRMWSDHHGASPRAGSSFYMFGFAPPSFSFLSPFLLVSVPIIEAVVLFLFSGLWVLLNPLLCLFFFFPPLLRSVLSVCRLPLKDLGLGGLLVRWCVGSVSLNHAT

SEQ ID NO: 202025 - protein, 102 aa, Zea mays
  Clone ID: MRT4577_115834C.1.pep
MEEYAREPCPWRIVDDCGGAYTMGVIGGGVFQAVKGFRNAPVGIRHRFRGRINAVRIRAPQIGGSFAVWGGLISTIDCGLVRLRGKEDPWNSITSGALTGAV

SEQ ID NO: 202026 - protein, 80 aa, Zea mays
  unsure (1)..(80): unsure at all Xaa locations
  Clone ID: MRT4577_115835C.1.pep
QQRLREYYFLLALFALLVSATNAFIIPQSSLAPSAIISQLLPPVTLMGLEHTTVQSYXLLIALADCVIEQPLAQLHHQSR

SEQ ID NO: 202027 - protein, 59 aa, Zea mays
  Clone ID: MRT4577_115836C.1.pep
NHTMSVVSHTITRLHLYILLPCKGNLLEKLYLLGGMVPETVVGITIVHMALEFNTVAPC

SEQ ID NO: 202028 - protein, 57 aa, Zea mays
  Clone ID: MRT4577_115837C.1.pep
PQPRPGHVDRGQEKGRRNPYPWKDPWDSDVKDRLTILVSPSGQEGKVGPYVCVGVRT

SEQ ID NO: 202029 - protein, 98 aa, Zea mays
  unsure (1)..(98): unsure at all Xaa locations
  Clone ID: MRT4577_115838C.1.pep
PGLDSTPISRSIPSPGTXWKKVVWWRSYRTAGSSGAVRPNSCRYRXVSASFISFXVHSASRKELRRGVREGEGPRRPAMGRRTCTALELRXASLCDKL

SEQ ID NO: 202030 - protein, 110 aa, Zea mays
  Clone ID: MRT4577_115839C.1.pep
GALPNAIVPSLMSPNGWALPPSQAVLRKGSKVHRVRTLRLRFCQRSPIQAIEGDWSLLLAMLHLISLFPIMVQRRTLSVEGSHYFVPFLPAFDSVTGTFSPLIISFIHTD

SEQ ID NO: 202031 - protein, 93 aa, Zea mays
  Clone ID: MRT4577_11583C.1.pep
ALCNPFPFLRRWVWSPPLVVWNLAGMLLFLRWPFVVCGRPLPVSAVGVHCWRVPLVGSRGLCGAGLFKEAVFPLSVVPLFSPGCVRSMLSACS

SEQ ID NO: 202032 - protein, 72 aa, Zea mays
  Clone ID: MRT4577_115840C.1.pep
VGLTPPRKGVRDRGPPPVKVSLKSLYYVLLPKVQKGPKNGGVMVWIRFPATRPETSGPVKGWRACSYAGCFN

SEQ ID NO: 202033 - protein, 109 aa, Zea mays
  Clone ID: MRT4577_115841C.1.pep
FIFFWRLLKELDRIFLKLIQTSRKYKIIANKVDALMYKTHTNATPNAPTDINNAAKQVLLAATTVEGRDLGICRRQAREPNRNYADPNLSVHKRGWQHLNDASAALLFV

SEQ ID NO: 202034 - protein, 85 aa, Zea mays
  Clone ID: MRT4577_115842C.1.pep
RTKSCFGICRLKFHLATSNKSFNLHGYIGAYEGFSNITFLGHDINRTRKDLLRQIMDLLECTYMSPGETYTEPFVLQAFRGKKNM

SEQ ID NO: 202035 - protein, 138 aa, Zea mays
  unsure (1)..(138): unsure at all Xaa locations
  Clone ID: MRT4577_115843C.1.pep
NCVKNKQRDQSXTMCMHDPTVTLDPLANRPAVIXGTYTLHPSTHPEVSGCXRTVCLHAPXTPTEXLQALVHGGFFYLDLNEEAEQGVLVCGSPHGWPMHGRCLGCGCTMQSHWSVHQVASEDCSRLQEKNIIYSNPHK

SEQ ID NO: 202036 - protein, 84 aa, Zea mays
  unsure (1)..(84): unsure at all Xaa locations
  Clone ID: MRT4577_115844C.1.pep
GPAGGLLPLGAVGPXVCFSRRAPSPRGGGGXSVPAGAGWLSGRRVPGRLRPFVWWSAPPVSRGLLASPSFCVSPPGGVGVVGRE

SEQ ID NO: 202037 - protein, 197 aa, Zea mays
  unsure (1)..(197): unsure at all Xaa locations
  Clone ID: MRT4577_115845C.1.pep
MDVPLPLLLGSVAVSLVVWCLLLRRGGAGKGKRPLPPGPRGWPVLGNLPQAGAKPHHTMRALAREYGPLFRIQLLSADVVAKTPLRMKDKEFFXSPPPPSDDLIEGIIDEAMKKKKYQKGFILDVFPRTETQAHKLDEMLEKKGANDDKILNFTIDDXIXKERITENKIHSSKGKTYQXKFAPPKAPQNNDETAKTL

SEQ ID NO: 202038 - protein, 155 aa, Zea mays
  unsure (1)..(155): unsure at all Xaa locations
  Clone ID: MRT4577_115846C.1.pep
MAPIKEIMAGDHGGGEGKEVVVLVGDYDYELEEEDEDMLPGFRFHPTDEELVTFYLRRKVAGKRLTIEIIKDLNIYKHDPWDLPKSSSTISGETKEWYFFCLRXRKYRNSIRPNRVTGSGFWEATGFDRPIHSAASGRAGDPIGFKKSLVFYPRQ

SEQ ID NO: 202039 - protein, 258 aa, Zea mays
  Clone ID: MRT4577_115847C.1.pep
MAPRLLLFLLLLLPLLAAGHQHPSSYGSSALSEWRPAKASYYAADPEDAIGGACGFGDLGKHGYGMATVGLSTALFERGAACGGCYEVKCVEDLKYCLPGTSIVVTATNFCAPNYGLPADAGGHCNPPNHHFLLPIQSFEKIALWKAGIMPIQYRRVKCLREGGVRFSVNGRHFFFTVLISNVGGAGDVRSVKIKGTELGWLPMGRNWGQVWHINCDMRGQPLSFELSSSDGKTLTSFNVVPKDWEYGKTYTGKQFLL

SEQ ID NO: 202040 - protein, 104 aa, Zea mays
  Clone ID: MRT4577_115848C.1.pep
APFVAEFPPPPILMPVPGAGPLGPFVPAPPEIAMHMLREQGPPPPFEPNGAPHGSTGMLGPMLGGSAPIIAMPPNFRHDPRGLRSYNDLDAPDEEVTVLDYRSL

SEQ ID NO: 202041 - protein, 429 aa, Zea mays
  Clone ID: MRT4577_115849C.1.pep
MAPPLLLFFLLLLPLLTALADGHQHLSSYGSSALSDWRPAKASYYAADPEDAIGGACGFGDLGKHGYGMATVGLSTALFERGAACGGCYEVKCVEDLKYCLPGTSIVITATNFCAPNYGLPADAGGHCNPPNHHFLLPIQSFEKIALWKAGIMPIQYRRGGVTLLQSHYVEKVLSRFGFSDCDPAPTPYDPSVLLRKNRRIARDQSTYSQIIGSLMYLASAATPDIPYPLIHLSRFVSNPGDDHRRAPDGVLGYSEGTMTYGIHYTGNPKVLEGYCDANWISDADELYATSGYVFLFGGGAVSWKSCKQTILTKSTMEAELAALDTAGAEAEWLRDFLLDLPVVEKPIPAISMNCDNQTVITKVNSSRNNMKSTRHVKRRLKSVRKLKNSGVITVDYVHTSNNLADQFTKGLSRNVIESASREMGMRPM

SEQ ID NO: 202042 - protein, 54 aa, Zea mays
  unsure (1)..(54): unsure at all Xaa locations
  Clone ID: MRT4577_11584C.1.pep
EAGVLXFFPRVLDTRVNITFWKMLLNRSGGPLNPLLHVSQPPYFNDPSKNNLTT

SEQ ID NO: 202043 - protein, 43 aa, Zea mays
  Clone ID: MRT4577_115850C.1.pep
RVNLNVRIRRDSHDFLHSLPSHALSVTTMLNLSRSSPPGCSSS

SEQ ID NO: 202044 - protein, 71 aa, Zea mays
  Clone ID: MRT4577_115851C.1.pep
TPLSSLGTGLVQPGSSGRLFKLTHSSRQFLLSRASPFIFILCERGMDCSFPILRLLLPMNVGPKKFQKNHP

SEQ ID NO: 202045 - protein, 54 aa, Zea mays
  Clone ID: MRT4577_115852C.1.pep
FLGREGGNESGGDDKEKGGRQTIYNELLAAPEEHPELHTEAPLNPKANTEKTTP

SEQ ID NO: 202046 - protein, 351 aa, Zea mays
  unsure (1)..(351): unsure at all Xaa locations
  Clone ID: MRT4577_115853C.1.pep
IAAGHQSSSIRHQQLLKGQLQPGSDTRQADYFAGRSAPVHQASQEIGVYGRVDADNHNMSILGTTPYGRQQSASLLEGAPRTNIDSLYGQGSSGTGFGAGLPPGRDYASVKGLPHPSSDPDHRDSILPRVHPAVSMVDDRRVDRIGYRRELDLRDEERRRDLILEREKELERERERERERELRDFRDRERERERERERDHERLLRERERERERERERERERERERLRERREKERERDRKHRTDPRREHTPPRGPGDRRRSSSVRSEKPVRRISPRRDAVHRHRSPVKEIKREYICKVFPFRFVDDERDYLCLTKRYPRLAVTPEFXSKIVLNWAXEKLNLPLDTPVSLEHD

SEQ ID NO: 202047 - protein, 92 aa, Zea mays
  Clone ID: MRT4577_115854C.1.pep
ILYSSSPVLPTQYLPQHATARRRSASKIHPNPKSSEFGRRSPHADGCPPLDSPALSIRTRFPPPRLIPALKDSAPRFRPPELGNGGVLARRT

SEQ ID NO: 202048 - protein, 184 aa, Zea mays
  Clone ID: MRT4577_115855C.1.pep
MARAVSRRRDGVTLRRASHFPSLFHPSRMGLGAAGAADSSPASGGRRLAAEGCTSTGATMSVAAHSAPAVSSGCRCSSSCGGGGHRHCCCVNVYVNNNVQGVTNSVLVGSKVVVRMRDAGTRVARRQRQPRRDGRREGKPSSRQQRKAKTTEVWIIVAVVSSLFVAAAATAAAVLCTRTQMTLD

SEQ ID NO: 202049 - protein, 139 aa, Zea mays
  Clone ID: MRT4577_115856C.1.pep
MTNLNATVATVLVMLAFLAGQSVAGRYYYDKVQDKVRKEVEKAMAKNPSVGPALVRLVFHDCWVYGCDGSVLLDSTPTDGTNTEKKAANNIGLAGFEVIDATKQKVGTDASCADIVAFAARDAADILSGGKIFYTIPGG

SEQ ID NO: 202050 - protein, 168 aa, Zea mays
  Clone ID: MRT4577_115858C.1.pep
MSSWLRSAVSRAVEAGGRSGVARAVKGYADTVAHHAGQAVADILHDRMGVQNYKSFKKTVARLEEAAVSCRGGERVELLKRWLGALQDVDAENGSSDLKVSEANDPSGEMDTLKAQTALFYDADIDGAPMNFCDVFLYSQALEGITLSMLLPYWRERSEHGSSEGCTR

SEQ ID NO: 202051 - protein, 56 aa, Zea mays
  Clone ID: MRT4577_115859C.1.pep
PTVLLVSRIKLVLGYQVLAWKSCSWSLGGGSTKTESTNFFVLSLLQMIQLFSLREI

SEQ ID NO: 202052 - protein, 67 aa, Zea mays
  Clone ID: MRT4577_11585C.1.pep
ERKKKRRHCSETRSNHHHHTLRCSLFVRLSWTWIPLGDLHHQQQQVASVTNRQICHCMITSFSLSVM

SEQ ID NO: 202053 - protein, 95 aa, Zea mays
  Clone ID: MRT4577_115860C.1.pep
VLSTDTLKTEVRAPNILPTILAEKKNFKNGVLSFYPSLTHMKSPHVTGFSTIGTSVSSTWSPFGIKPPIMTTATILYTKLKTIFWDPKTEAATPK

SEQ ID NO: 202054 - protein, 74 aa, Zea mays
  Clone ID: MRT4577_115861C.1.pep
MQRGSCVHSKFFYELTWFNSGNVSHASFTRSTEMQGSWSSLGMTHLARCGRALPGKEAEGAVPRVLELTVRHPA

SEQ ID NO: 202055 - protein, 158 aa, Zea mays
  Clone ID: MRT4577_115862C.1.pep
MDPTLLRSNGRLLSLFLLLLAASDFTAVQGQGQQPGPAGGAYYSQSFSPSMAIVIVVLIAAFFFLGFFSIYVRRLRRQVSGTGRPRVRSWTTCLTGSLCPGQSVAARKLLVLSSPSWWKKFWHLNLGENVLGRGPRLLLQSFWKRAVFICYYYTKNVS

SEQ ID NO: 202056 - protein, 61 aa, Zea mays
  unsure (1)..(61): unsure at all Xaa locations
  Clone ID: MRT4577_115863C.1.pep
STTAANSXPAVQNQHRGGYFFHHFCPFFSINYLIKFYNFFIYLTLLYSLLHSYHHQFYNNF

SEQ ID NO: 202057 - protein, 77 aa, Zea mays
  unsure (1)..(77): unsure at all Xaa locations
  Clone ID: MRT4577_115864C.1.pep
WQLPEMCHRHLIQPVAAQCMAESGGTVEDXRLGRETRTGIRARRRPRPPRRCGALGTAVSPPRHRASGATRAGRLEV

SEQ ID NO: 202058 - protein, 110 aa, Zea mays
  Clone ID: MRT4577_115865C.1.pep
PRVRRQMNIVDQTNGRGHVAVSQGSVAETESAKASRNKSSENADGKPFLQIGSNIVPVIAGNETRETSQPVQQFVVYIGFEHECPYGHRFLLSEKHMKEIESSCLQYQRP

SEQ ID NO: 202059 - protein, 444 aa, Zea mays
  Clone ID: MRT4577_115866C.1.pep
REFESPNTGAQTVKLEGTTRSAPQGSPGASSGILANNICSGAKTAPQSAINESEKIWLYMDPSNKIQGPFSIIQLRKWNSNGYFPPSLKIWKASEKQDDSILLTDALAGKFEKDLPPWEPPHVSLFQINKTPLEQSTIAGEQTPKSVVAKSFSSSNQRHGYSSTNLGTTMIHSGTQGYYGMQNSHAAYTSQHSLTGSWNATSSQFGVAVNPVTPTQPAMGSFSGQNIVSAENMGHLTPGTAPAAANAEMVNSDLTSQKQISYLPQTDGILADDIESKSGEDVSHGKVSSSAKAIGPLGAQLGQGQLNTQQHEADTKNQMSSTDVSNSTMPSQMMSAPSAASVQPSLTTIARSDNQSSGWAVPAQMVNTPGQSQITGNLTWGNTPQGDASLGWGMVGQSNMNMPWVASAQGASGYNMGVAMPTQPNAVPNMGWLPSCAGKSRKGK

SEQ ID NO: 202060 - protein, 71 aa, Zea mays
  Clone ID: MRT4577_115867C.1.pep
CLTVACTPKGNGSIYAGHDDPGCGGSPTESQSSSSSCRLSCYVFGGLMGPSLMHLIRSLMPLLALALINWA

SEQ ID NO: 202061 - protein, 64 aa, Zea mays
  unsure (1)..(64): unsure at all Xaa locations
  Clone ID: MRT4577_115868C.1.pep
PVAYFKKQIXLPLSQLVEGSRASFLTKQQLVPFDQQFSXNPAALLQRQQLLPFVQLTLANPTAS

SEQ ID NO: 202062 - protein, 84 aa, Zea mays
  Clone ID: MRT4577_115869C.1.pep
SIKCTFSALLFHKKVCVVDRYDPTFSRLSLYKNLSKLLGSYLTMSGCHSVGSHVSAMPRSMKYIIICVNKCVCTQKDAVCFLFP

SEQ ID NO: 202063 - protein, 102 aa, Zea mays
  Clone ID: MRT4577_11586C.1.pep
KSLGPPFINGVAGKTLLVPLFNPFEGLPLLPFLTFSQKGLANAPSPKGGHYGGGMGGSLSGGLIPWGGGFSPLFTLFFFHFLNARSFFFFPFFFGAFLGVSP

SEQ ID NO: 202064 - protein, 93 aa, Zea mays
  Clone ID: MRT4577_115870C.1.pep
QASPWEWTLTCRRPRPAATGTASGRRSTWLEAGGTPWLLWCGQRPQTDHVVINFLNPNLGANLSLTILLDNYSVSEISISYATLGIIKFYVCA

SEQ ID NO: 202065 - protein, 222 aa, Zea mays
  Clone ID: MRT4577_115871C.1.pep
NLRIKVALGAAKGLAFLHSDKARVIYRDFKTSNVLLDSNYNAKLSDFGLAKDGPTGDQSHVSTRVMGTYGYAAPEYLATGHLTPKSDVYSFGVVLLEMLSGRRAMDKNRPATEHNLVDWARPYLSSKRRVSRILDDRLAGHYPLPAVQRAAALALQCLSEDSRKRPTMDQVVASLQQLTAAQDHDDAHRSSRRYPKDHRQAAALNNRNLNAHRRLSALPLPE

SEQ ID NO: 202066 - protein, 58 aa, Zea mays
  unsure (1)..(58): unsure at all Xaa locations
  Clone ID: MRT4577_115872C.1.pep
PRRAAARARTAARSGGRKEXGEPPPPPESEGNQQSGAADQGRVPTLLIAVNEKLRVGS

SEQ ID NO: 202067 - protein, 98 aa, Zea mays
  Clone ID: MRT4577_115873C.1.pep
KKKKPPTLKKNKTWPAPFKKLRGFRFTCFHLHTFSLGPLNFFLVAPNLHRPAWETPGVPQLTPLGPIPFSPAAFSFKRLAPFPFANSCPSLIAIGPPL

SEQ ID NO: 202068 - protein, 77 aa, Zea mays
  Clone ID: MRT4577_115874C.1.pep
PGAHRRSGPGIAPDPGPPGGPTELPPAIPLAAAVRGLAPRPRLRPSRPGQICTDLHVHSRLPQLPVVLRGGRRVARP

SEQ ID NO: 202069 - protein, 293 aa, Zea mays
  Clone ID: MRT4577_115875C.1.pep
MAASAPIHLLLSPSRSTWPPQDPSLRPIPPLHAWPARQRHLRAARCALSPPTPSLDLPLLPFQPAEVLIPSESKTLHLYEARYIALLEEALYKREKSFVHFVLDPVVDSSTKASFAVRYGCLVHIESVQKLEIGALLSIRGVCRVNISNLLDMEPYFRGTVSPMMDGPYDAIELETRISKLKESMCNLHSLQMKLKVPEDEPLQTNIRASLLWSEKESFEEYNESFIPGRPERLSFAAYQTVSGMSDEELLTVQNYKIQAMDSTDTLERLNTGIKFVEHNIGMIAARLAIQNI

SEQ ID NO: 202070 - protein, 155 aa, Zea mays
  unsure (1)..(155): unsure at all Xaa locations
  Clone ID: MRT4577_115876C.1.pep
AGHGRGIIVVAAEVHEEFFLPGEVIMEQGXMADQLYFVCHGKVEEVRKPEENETEESLLDLHTYNSVGEISVLCNIPVPYTVQVYELSRLLRIDKQALVEILGIYFSDGRVIINNLLEGRESSLRSKILDSDITLNIAKHESELTMRLNCAAHDG

SEQ ID NO: 202071 - protein, 75 aa, Zea mays
  unsure (1)..(75): unsure at all Xaa locations
  Clone ID: MRT4577_115877C.1.pep
VQPLVGAQRGVKIHIGGDHDMKERLCLEAERLGLSVMIMGSRXFGASRRDGKGRLVSVSDYCVHHCVCPVVVVRY

SEQ ID NO: 202072 - protein, 127 aa, Zea mays
  Clone ID: MRT4577_115878C.1.pep
SPGPPRPFFCFLPGSGPFFFGWPPLFPWAFLGRFVFRVPPVLPFLPQVRFICPCRGVFSVLRPSAHLAFFFFPRLPFFRLESSSALLACAFFYFSVCYKQIKIKDQTQIKKKPTPYVIYKKKKKGRA

SEQ ID NO: 202073 - protein, 124 aa, Zea mays
  Clone ID: MRT4577_115879C.1.pep
KKRQLRDFRRMNGLCFGCGEKYEPGHQAKCSKRTGPQLHSLTVEDMGQMLSDEVLYDLDQEDQNREESHNLSLNAISGTDHECCMRVRALIQNQVMLILVDYGTSPTFVSQTMVEKLGLKTEQC

SEQ ID NO: 202074 - protein, 29 aa, Zea mays
  Clone ID: MRT4577_11587C.1.pep
QHTLTESRFTLTPTAIVGNHSREQSDPDR

SEQ ID NO: 202075 - protein, 71 aa, Zea mays
  Clone ID: MRT4577_115880C.1.pep
FPRSRLALLVFASRRAPKLCGSPEEPKASARSGFGAVPDRAERGRPRADRCRGRRGRLQGTNSGRVGGRVG

SEQ ID NO: 202076 - protein, 13 aa, Zea mays
  Clone ID: MRT4577_115881C.1.pep
CNYLFILYRTPIM

SEQ ID NO: 202077 - protein, 70 aa, Zea mays
  Clone ID: MRT4577_115882C.1.pep
KREGPNFGFSFRGNNLKRGPPSLFSQSPNFKGGPIGRDPPCPSKPVFKPPLVFPRPLGGPLGGPLGSPRN

SEQ ID NO: 202078 - protein, 117 aa, Zea mays
  unsure (1)..(117): unsure at all Xaa locations
  Clone ID: MRT4577_115883C.1.pep
RRFRPHVLGATGXGPPGLQACLAGLILRLPFGIQDQDASPAPGTRLLAPFARRIXLAFNAPVRLXPKRRCAVYGNPIRMSILKCRASKTEALARFFPRAXLLGEHEAQVVLVLGGAG

SEQ ID NO: 202079 - protein, 675 aa, Zea mays
  Clone ID: MRT4577_115884C.1.pep
GSKWAWSVKERPCLTTREGQTLPMEKMDRQQNGKVDCRARPGKQISINKSASRRSSRDNSAWSSASVPFGMPHGIDIQDGSSNKLCDEMPQEVPLSRLASLNKPEIPVLILGSIASVISGVIFPIFAILLSNVIKAFYEPPHLLRRDSQFWASMFLVFGAVYFLSLPVSSYLFSIAGCRLIRRIRLMTFEKVVNMEVEWFDHPENSSGAIGARLSADAAKVRGLVGDALQLVVQNSSTLVAGLVIAFVSNWELSLIILALIPLIGLNGWIQMKFIHGFSADAKMMYEEASQVANDAVGSIRTVASFSAEEKVMDLYKKKCEGPLRTGIRTGIISGIGFGVSFFLLFGVYAASFYAGARLVEDRKTTFPKVFRVFLALAMAAIGVSQSSTLTSDSSKAKSAASSIFAIVDRKSRIDPSEDAGVTVEALQGNIVFQHVSFKYPTRPDVQIFRDLCLTIHAGKTVALVGESGSGKSTAISLLQRFYDPDVGHILLDGVDIQKFQLRWLRQQMGLVSQEPALFNDTIRANIAYGKDGQATESEIISAAELANAHKFISSALQGYDTVVGERGAQLSGGQKQRVAIARAIVKDPRILLLDEATSALDAESERIVQDALDRVMVNRTTVIVAHRLSTIQNADLIAVVRNGVIIEKGKHDALINIKDGAYASLVALHSAASS

SEQ ID NO: 202080 - protein, 321 aa, Zea mays
  unsure (1)..(321): unsure at all Xaa locations
  Clone ID: MRT4577_115885C.1.pep
QLMTFEKVVNMEVEWFDHPXNSSGAIGARLSADAAKVRGLVGDALQLVVQNSSTLVAGLVIAFVSNWELSLIILALIPLIGLNGWIQMKFIHGFSADAKVCSLVLNCLSLNLLSIASDFIQLFVNXMMYEEASQVANDAVXSIRTVASFSAEEKVMDLYKKKCEGPLRTGIRTGIISGIGFGVSFFLLFGVYAASFYAGARLVEDRKTTFPKVFRVFLALAMAAIGVSQSSTLTSDSSKAKSAASSIFAIVDRKXRIDPSEDAGVTAETLRGNIEFQHVSFRYPTRPDVQIFRDLCLTIHAXKTVALVWESGSGKXTAISL

SEQ ID NO: 202081 - protein, 226 aa, Zea mays
  Clone ID: MRT4577_115886C.1.pep
MACHLRSISLPSRPQSGEAAVQQELCILDAIISSPSTCIVTMCDGLRRLGDIYNSVVEMTHLPSNQVCSSQQRKMLDGEIESSLELLDLCNTMQEIFVELKAIIQELQVALRKGDGATVQAKIQSYSRLVKKAKQSFKKSSKKATSDKTDCAMVRLLTKAREIAISLLESTVQLLSKQIEVPKQSLVSKAFSKRKAVVCEEDQLQALECSIGDLESGAGHLFRILV

SEQ ID NO: 202082 - protein, 72 aa, Zea mays
  Clone ID: MRT4577_115887C.1.pep
GKDMVEKTPLPRKNFPSFFGALDSKLNFWRLGYNLKGKLILPKLNGTAFFGSETLKTNLGPILKMDFYRKTP

SEQ ID NO: 202083 - protein, 128 aa, Zea mays
  unsure (1)..(128): unsure at all Xaa locations
  Clone ID: MRT4577_115888C.1.pep
RVSSRVRQEIRCCRLKEAVVFVVPWFHPMVQRSFNDDSFVFVRLSAHIGHIHPQFLPWKGSVLQAIWKKVLLLALGXAGPAPRGLXLCAQRDSSILSCVSCRSGPDGKDRPVEQLPGGGCGRETQSYR

SEQ ID NO: 202084 - protein, 91 aa, Zea mays
  Clone ID: MRT4577_115889C.1.pep
ICTYAQAMVFTTVLAKILTFPALPCGCWRTGRWLASSGVLYLLLHLVAFSTDVQSALCEYPSVEKVDALRSLSSWTWCADLFYSMALDPRL

SEQ ID NO: 202085 - protein, 38 aa, Zea mays
  Clone ID: MRT4577_11588C.1.pep
SCDCLCDDRVWIIVACVIHGTRPGRRVWAHKLDSNSAP

SEQ ID NO: 202086 - protein, 74 aa, Zea mays
  Clone ID: MRT4577_115890C.1.pep
YRHLQPVEAAVAYSVKRHFLSVGLVILIGIIGLQLSLHDQIKLERVPNQKRRCISIIRIYTYICLREPDDFRHE

SEQ ID NO: 202087 - protein, 99 aa, Zea mays
  Clone ID: MRT4577_115891C.1.pep
NGPCLFFGKGVNYIFKNGGFLSKYSILPVVLEVGGRAISKIKFCLGIGGHAFQWGSLLGHPFNVIPPYQGYFFLLSKNVKFFPVLGVPPHSYPPISCRV

SEQ ID NO: 202088 - protein, 64 aa, Zea mays
  unsure (1)..(64): unsure at all Xaa locations
  Clone ID: MRT4577_115892C.1.pep
GVGGRSAYARRSRGNAGPPGSRLAVPSPVPAWASVPAGGGRRLLDXGACEDENKQRLREPVFTV

SEQ ID NO: 202089 - protein, 65 aa, Zea mays
  Clone ID: MRT4577_115893C.1.pep
NNDPVGGPKAPAQYRHLPIKAIPPKFGFSSGTQEGPHKEEVHFGKWNKELRSKTSPWPCLDFFPI

SEQ ID NO: 202090 - protein, 168 aa, Zea mays
  unsure (1)..(168): unsure at all Xaa locations
  Clone ID: MRT4577_115894C.1.pep
MRRAWTPADERAATTTSEHRRRRRMGKYEMGRTLGEGHFGKVRLARDAGTGRSFAIKILDRQRILAMKIDEQVCARCACLPSESFSXVRRTYSGADRLXPGHRAQIKREIATLKLLKHPNVVRLYEVSASKTKIYMVLEYVNGGELFDKIALKGKLTEKGGRKLFQQL

SEQ ID NO: 202091 - protein, 280 aa, Zea mays
  Clone ID: MRT4577_115895C.1.pep
FIRHHRTATEEGGMAAAGGGPRRTTRVGPYELGKTVGEGSFAKVKIAKDTRNAATCAIKVLDRNHVLRHKMVEQIKREIATMKLIRHPNVVQLHEVMASKSKIYMVLEFVEGGELFDKIVNSGKLGEDEARIYFHQLINAVDYCHSRGVYHRDLKPENLLLDSYGALKVSDFGLSAFAPQTNEDGLLHTACGTPNYVAPEVLADKGYDGMAADVWSCGIILFVLMAGYLPFDDAYLMSLYKLICQAKKKRTVPRGITQVIYLNGAIGLFFLPTMVFFWSK

SEQ ID NO: 202092 - protein, 235 aa, Zea mays
  Clone ID: MRT4577_115896C.1.pep
MAEPKAAAAARKTRVGPYEVGKTIGEGSFAKVKHARDSRTGAVRAIKVLDRNHVLRHRMVEQIKREISTMKLIKHPNVVQLHEVMASKTKIYMVLEFVDGGELFDKIVNSGRLGEDEARIYFHQLINAVDYCHSRGVYHRDLKPENLLLDSNGALKVSDFGLSAFAPQTNEDRLLHTTCGTPNYVAPEVLADKGYDGMAADVWSCGIILFGPMAGYLPFDDANLMRLYKLICQAY

SEQ ID NO: 202093 - protein, 385 aa, Zea mays
  Clone ID: MRT4577_115897C.1.pep
IKREISTLKLIKHPNVVQLHEVMASRTKIYMVLEFVDGGELFDKIVNSGRLGEDEARIYFHQLINAVDYCHSRGVYHRDLKPENLLLDSNGALKVSDFGLSAFAPQTNEDGLLHTTCGTPNYVAPEVLADKGYDGMAADVWSCGIILFVLMAGYLPFDDANLMRLYKLICQAYFSCPPWFSSGAKKFIKRILDPNPDTRITIAEILEDEWFKKGYKPPRFEQGEDVSLDDIDAAFNDSEDRLVAEKREKPESMNAFALISRSQGFNLGNLFEKEMMGMVKRETSFTSQCTAQEIMSKIEDACGPLGFNVRKQNYKMKLKGDKSGRKGHLSVATEVFEVAPSLHMVELRKTGGDTLEFHNFYKNFSSELKDIVWKAESDASMKQTK

SEQ ID NO: 202094 - protein, 135 aa, Zea mays
  unsure (1)..(135): unsure at all Xaa locations
  Clone ID: MRT4577_115898C.1.pep
GKYIVREAKRVFHADDAEFCGLKDMVHARIMSTNSHLVAFGKLVQVAVRWVNEVATARRSMSXVVKEIEIMLQSEGFSSASTFASTPAAEFVVTKXLLATGTTXPLPKKIKDVSADXAFEFSGGYSFQSKVEPKR

SEQ ID NO: 202095 - protein, 53 aa, Zea mays
  Clone ID: MRT4577_115899C.1.pep
SATVLLLPLVNTVILCWCRPCRCTSQAVKTRNCVANVHRWFCKKTGKLGFYFC

SEQ ID NO: 202096 - protein, 177 aa, Zea mays
  Clone ID: MRT4577_11589C.1.pep
MARVRSTARVSREGYEAEATETAPISEVMRQSGLVVLEGPVAEGTLTAELKQIAIEGSHNKDVEDYTILSPVKPSHIEFGKSNVTEDDMVMMKKLGYFGEAESKLIRFASEEVIPEPKDDEVVVFKSFFKAELRFPLYDIIGEVLKNFEIYLHQLTPNAIVGLNVYIWALRSQGHNL

SEQ ID NO: 202097 - protein, 61 aa, Zea mays
  Clone ID: MRT4577_1158C.1.pep
IMRSLWMFGLLIDLYFYPPNIFKCAVLLRVFFKKIIRSDLNHTVPLVAVACVHNLRQCAIK

SEQ ID NO: 202098 - protein, 193 aa, Zea mays
  Clone ID: MRT4577_115900C.1.pep
MIQRLENNPYSQLPPGHIRLLRISRNASDKNVGYLEVVPLEEAPPFYALSHTWGTHTCKQDVQIHGHILNITAELACGIRNFQQLAINGSALDPPLLYMWIDNLCVDQNNIPERSTQVGLMRKIYSRSVRTLIWWSGPWFPLHMGLGRSNLCPNSGLCTLLSVTPAKFQSKPIPTHHMLCPNCPRGIMKPGGR

SEQ ID NO: 202099 - protein, 69 aa, Zea mays
  Clone ID: MRT4577_115901C.1.pep
NIPFWTMPCIKFQRFKRFKASPKNQKQGLQPLFFYFYPPNYPHIRNYFFPRWETSLPGAMFYRGRRLKT

SEQ ID NO: 202100 - protein, 169 aa, Zea mays
  unsure (1)..(169): unsure at all Xaa locations
  Clone ID: MRT4577_115902C.1.pep
MLATLRPGLPQQTKIGADIAGSPTLARTEDLKVRLVSFXERRRARSRIPRLAESDLGPTMWKQMVKAAITYIPRSPLSHYXQSVDATVMLGXAIPENYSGTAGQTVSITYSSMARANVTVTAMQMTXGLIQXHFIAPTLTPSTKLTYSTYKVASTHTEAKALSFAYSPS

SEQ ID NO: 202101 - protein, 162 aa, Zea mays
  Clone ID: MRT4577_115903C.1.pep
RARHGTPSALTAGPCHHGHPTHSLFSCRHSQPAPNRYTEQSVLGTVAGTVRCTRQHTQIVGSNGSVITSIIPCHSSMYARDRLHSHARTAIPWGLGPGCHRGVGSASRTGLYRAAAGAAASALAAGYGGPARSRSSSSGLSAASSSEAAAVPGHRSYRGGLP

SEQ ID NO: 202102 - protein, 84 aa, Zea mays
  Clone ID: MRT4577_115904C.1.pep
MSTVLQRPTSCTFHCFHLKNTSAPNPYTYQRHQLIIANCVQIELIRPHILHLNDFELILLPEHSTFKDIYMMIRLRRHFKTYQI

SEQ ID NO: 202103 - protein, 145 aa, Zea mays
  unsure (1)..(145): unsure at all Xaa locations
  Clone ID: MRT4577_115905C.1.pep
EKIADAIDNMQDKIQVQEDIPPVLFRVIFVEEELKDGRYLIDYDIHNELTLHLRVGLRSGAKKSXNKTYTMPNKIKNEHINVMLVXLEFYNADDATGLVNQLRKECRNTECVVGDFLDNHYCRHYCLKCGLNYNYYLNAQFHVML

SEQ ID NO: 202104 - protein, 79 aa, Zea mays
  Clone ID: MRT4577_115906C.1.pep
RATNIYGMAEKAVGVHCSSTYACDIVNHLEVVQMEVEDPTDTLARRTICPVEKHHHSGGSQEQRLGRCQLPQTRLLDNG

SEQ ID NO: 202105 - protein, 52 aa, Zea mays
  Clone ID: MRT4577_115907C.1.pep
CFVPNSTSSHTRPSTLPHRCRGPSLIPAITSRNRSWGPCTCADAGRTLGRPG

SEQ ID NO: 202106 - protein, 54 aa, Zea mays
  Clone ID: MRT4577_115908C.1.pep
KFLVISGTTNSIKGCQTQNFQFVPCKPISNFFKPGGAQKTFPLNNMENLWELGA

SEQ ID NO: 202107 - protein, 115 aa, Zea mays
  unsure (1)..(115): unsure at all Xaa locations
  Clone ID: MRT4577_115909C.1.pep
AYPLVTLEARLERSSNSQLGCDTGTQCRSGTYHYSPEQDMASCEYLLNHSRLGSRMTTTEIXMKTXRSSSTEKYHTKYLQKGGRIXLGLDAAIGWTDRLRCLRRATWTMRAWCES

SEQ ID NO: 202108 - protein, 110 aa, Zea mays
  unsure (1)..(110): unsure at all Xaa locations
  Clone ID: MRT4577_11590C.1.pep
SIIIGTASGVGDRVAILKAFHMSGAQLLRLTTILGNWTAHDAPHNGLILCERHDIYXVQVPVGRHEPVTEGKPLVADYALGPRGLXSQTFADPTVQNVEESATDSLGDKV

SEQ ID NO: 202109 - protein, 92 aa, Zea mays
  Clone ID: MRT4577_115910C.1.pep
MAPFEPLASGILLLLWLIAPSRACTCVPPHPQTAFCNSDLVIRAKFVGTPEVNQTTLYQRYEIKMTKMYKGFQALGDAADIRFVYTPAMESV

SEQ ID NO: 202110 - protein, 73 aa, Zea mays
  Clone ID: MRT4577_115911C.1.pep
SEAMDRVKLLLDVGPMIRQSRTSKRSRTMDAANIAWAYIYAGMSVSSTTALPTNMMARSVVHARLSRCALLTG

SEQ ID NO: 202111 - protein, 55 aa, Zea mays
  unsure (1)..(55): unsure at all Xaa locations
  Clone ID: MRT4577_115912C.1.pep
MALRALLMSLVLVVGKDLGMVYRECIMLLNGXLFLCVACKPIKFLDVRVGXGENS

SEQ ID NO: 202112 - protein, 1005 aa, Zea mays
  Clone ID: MRT4577_115913C.1.pep
MEAAMQGILDALACTEARLTEALAGRCGEQSACERNSSFDGFAPPSSVVNAQYRDEQTATVLAFLGSDEMSSSTTLLAGSVSDRYIPPLYDDDRYTTPQPFVDTLANPDDDLLQELAACEKRLIACIEGVPAKCSVNCQNAFGGFTAPTTEHIIVDKMSSTKPSLTTSTTIYGAPVFDQYCDADLGDNAMELVQRGPVDIERIDLLSGTLAGCYGEQSARGHTPSSFNDDLGASLDSVANSSVHGGHGSVLPHLTPICAGTSRIPVPDDRRLDCAEDFDTNHLDKGFESDPVPLPVVYDRYDEPNHNEIVEVLALLEYNEEARITDAIEGLIREATSRTAALESVEHRRRQVLTAAGEVEQEPTEGIINEVEAEEACEHSEVPPTSPPSRPSPTRSSTATSSTTHRSPRRKSSFHARCTSHPTTTARLLHSLPSPNQAEVVESFELESARPPVVYNSHVELGLYSFTPTIFSVEQVIEEEVPVAMPTRCSRMDLNRDAYSVLDLPVVCIVGGPNSNEYGTNRVLHHTISLPDFSQELRGFQAITYYQAIINNLDDAQEQMDMAIATALRKSKQVYVSVSCNMADLFHSHSCSCRWDSALHKPPWPPPVQPVQFVIPGDGAQDWIPPWPSFSGEIEQLELMVLIELGSSPTFFSDRLSPQLLGVQIVGLMVKVANVVELRLLSVTSQQYAYATLPPSCTEEFDATHLNKAKILLNIMGVIIQLNYRRIFVHDGQPLESKPKEPLRIQKMMTGDSVMMDETDDSWFNCHKIKLPADCGYEFQMKYGLIGWLMGALLGYAQGANHKLFSPLTALHPLVVACCDHGSIMDALTTNFMSNNLVQLCGCLLSVAANKGNFSAFPWDPGDDGAVILGVLGCSSYPIKTKWLNYHQKCYRLLSKVAPPPLGSRHTGCVVNAQRGGDQVWMQPLVHDLGQLNGHQQREIQVSSIISDSISATLWKTVEQTNPSHSFTTGLAQSVGFKQPWPPPMEFECLDCACPPATWRIWSAA

SEQ ID NO: 202113 - protein, 72 aa, Zea mays
  Clone ID: MRT4577_115914C.1.pep
YRCNRPEAQGVAPSPEAEAFQMHVQPSGSLLAEHKSCPEPYPLVVKVPCFQLAPVSSRMKLAKSSFTWWILT

SEQ ID NO: 202114 - protein, 52 aa, Zea mays
  Clone ID: MRT4577_115915C.1.pep
KKKKKKKKKKKKKKKKKKKKKKKKKKKKKPKKKKKKGRPFKKTKFNYPVLPT

SEQ ID NO: 202115 - protein, 145 aa, Zea mays
  unsure (1)..(145): unsure at all Xaa locations
  Clone ID: MRT4577_115916C.1.pep
MGGALMMAILHVSAAAAPQARGADNGDNHRRTIQEDIMATGNNHPSAERTATPNPYFPNXYTMAQFKHILGVKPPAQTALRNAPVKXIKXSLELPKELDARCARARGSTIGNILDQGHXGSCGAFGAAECLKDRFCIHLNMTTLL

SEQ ID NO: 202116 - protein, 148 aa, Zea mays
  Clone ID: MRT4577_115918C.1.pep
MEGAADHKRQVDDKPPYAAVDDTMTTTTKKMVEEQLSDDAVPSLHPAANSSTTGGPSSLQMAVLLASFALLAVGAGGIRPCNLAFGADQFDPRTPAGRRGINSFFNWYYFTFTIAMMVSATVIIYLQSDVSWALGLAVPATLMGLSCA

SEQ ID NO: 202117 - protein, 181 aa, Zea mays
  Clone ID: MRT4577_115919C.1.pep
MEGAADHKRQVDDKPPYAAVDDTMTTTTKKMVEEQLSDDAGGGGELPEQNYRGWKAMPYVIGNETCEKLGTIGTTANLLVYLTTVYGMSGASAATLLSLWSGTVNLAPLLGAFLSDTYMGRYATIAFASMASFLGMIVLTLTAAVPSLHPAANSSTTGGPSSLQMAVLLASFALLAVGAGG

SEQ ID NO: 202118 - protein, 69 aa, Zea mays
  Clone ID: MRT4577_11591C.1.pep
PSIILLLLLIVTTDVAQAVMECNMDTERFLGAFMVSANCPNVCLGEGFSCGMCITFHSSCICTKPCYIN

SEQ ID NO: 202119 - protein, 95 aa, Zea mays
  Clone ID: MRT4577_115920C.1.pep
FAYGGPKKQGVRPPGGLQAWPPWGPKPRIGGAIQLGFGRSQKNGAGLVKYPAGGIYLSQRLGLGLIGKEPRHWGALGKGGAVNPMDYWGGGPYGL

SEQ ID NO: 202120 - protein, 80 aa, Zea mays
  Clone ID: MRT4577_115922C.1.pep
PRVRPFFPGGGDADYWASSAAIPSSSGPSTFVGNELPPGQDQVPQDKEHEGCRDEFVRSRLSSPSQLWLRGSLSSYDVII

SEQ ID NO: 202121 - protein, 101 aa, Zea mays
  Clone ID: MRT4577_115923C.1.pep
LLGGGKRIRRRIGCRGRGERFVRLACLGASGAVELGINVGAIIAVPSQTGGLGNGGSPRYRFRSMRLLVPLINQTEYTLLHLQDPMGEDTNPKTASKPPGS

SEQ ID NO: 202122 - protein, 317 aa, Zea mays
  Clone ID: MRT4577_115924C.1.pep
MDPTRSQMGKVSEVENPTHHSNGSLPGTRDSVVLRAAAEMFAFFQAGAIKKKRSARLRRNSPFYTMDLKNNTLQASTRLPQPCMDALHRSSCIKFLTKKRSEKARPHCSSVIQPSDELKDRLSAGSTFYGATNGCKISEESSPNFSSQTMDNKRINVDTHCEVAEGRSTNTSTGPYMDYVQGVASKLKHLDLNTEQVQRTEMHLSLTTPAVISFEGTSGPSNALVPYGGVVMVPNERPLQLVKKQRPRAKVDLDFETTRVWNLLMGKSAESYGTDVEKERWWQQEREVFQSRANSFIARMRLVQGTAVNNLNIFSIC

SEQ ID NO: 202123 - protein, 127 aa, Zea mays
  unsure (1)..(127): unsure at all Xaa locations
  Clone ID: MRT4577_115925C.1.pep
XXGVFCLINQRRASGYCGCANMAGEQAPEGSGTRRRMDLNLYLGLPPLPRPPVWLGTAMIAPTLMPNSTAPEAPRTGEPDESLAPAAAAYSPSNALSTPEEQPMLDPIVYSCLDGNQTDGEKHTDAS

SEQ ID NO: 202124 - protein, 57 aa, Zea mays
  unsure (1)..(57): unsure at all Xaa locations
  Clone ID: MRT4577_115926C.1.pep
SXRXRXXFXXLLGXLVXWXLSXAACGPXSSXXCAXSXFAAXFAXXCPXSCXVVPLRA

SEQ ID NO: 202125 - protein, 76 aa, Zea mays
  Clone ID: MRT4577_115928C.1.pep
RLSFTSHSMFWTDPSAKCWYLNGASGLNMKLDVGLSHGLMYMSLDSASSGMSLGHAYHQESFVSNPIVWAPHGWCG

SEQ ID NO: 202126 - protein, 103 aa, Zea mays
  Clone ID: MRT4577_115929C.1.pep
GIESGRKEANKSNPPAGMQIFVNAITGTITLDAKSSDTIANIKAVVQDREGIPLDWQRLIFAGMQLEDDRTLADYCIQKESTLHLLPRLRGGGRGGYPLTSVP

SEQ ID NO: 202127 - protein, 38 aa, Zea mays
  Clone ID: MRT4577_11592C.1.pep
MDLSRPVSSDLLVGLHSHAHAHARVHAATAPLRLFYDT

SEQ ID NO: 202128 - protein, 138 aa, Zea mays
  unsure (1)..(138): unsure at all Xaa locations
  Clone ID: MRT4577_115930C.1.pep
ARNSARAAEVLGCANTTQLEILGVMKSGMVSIVTGQGLCCTSELDEMFLMTXCRNLNCKSALPVDHCECXICSTKKGFCTAFMCPTSHKLDCASNTCSCTGRDCCSYCYHATCALEKNLIRPGXHMKGAMGTTDMQLQ

SEQ ID NO: 202129 - protein, 210 aa, Zea mays
  Clone ID: MRT4577_115931C.1.pep
MGLDVGEIGMPLDLGLDLKLFVAKTAGRLAKEAPAVDACIRGLEEERRKIEVFRRELPLCARLLADVIEFMKEEAAKRSERRDADDNDKRKWMSTAQLWVDTRATDAADPVKEQMKESSLSKPMLLGGAIGAPMAVSCRAMPPPAAPQYFGRDDKIVGSQGLLALPMISPAANRQFSPPADDRHQAFAAKFAAPMPPPGPGLQTHEQQSR

SEQ ID NO: 202130 - protein, 64 aa, Zea mays
  Clone ID: MRT4577_115932C.1.pep
KMFFPQNFWEKKKNPPNMSIFKPNNAGLKPNFLYFSPQKTHRLWCLKHPLFPFGGIGLNTTPPT

SEQ ID NO: 202131 - protein, 79 aa, Zea mays
  Clone ID: MRT4577_115933C.1.pep
FYVGVNVNGLAFVKPARERVNSLFPGGGGEKWFCPPIYSFWPGGRSGFEKFWWAGGKWRPFPPVLAGPEGGRLKRVLAM

SEQ ID NO: 202132 - protein, 162 aa, Zea mays
  Clone ID: MRT4577_115934C.1.pep
FLPLGVMSFGLPYVLAVGVLFPSPRCVCSVSRVFAGPSCVLVVRALVALLFARGRVVVVGRALRLCLRVLLFGSGAVLAGPLRLVRFGRSLWSRAGVRPRLCRVSRPWFFPGVSARLGLLAVASPPWCVLPLACFCVLSCGLACACPSGVERGVIALEYGRS

SEQ ID NO: 202133 - protein, 40 aa, Zea mays
  Clone ID: MRT4577_115935C.1.pep
NFACQSVDSNASALPGMAPPFGAKYTPHSFELGPPLLGCA

SEQ ID NO: 202134 - protein, 64 aa, Zea mays
  Clone ID: MRT4577_115936C.1.pep
KRGLWFWINNVPRVMPQGFGPPIRAIKGALECKGNTPPQIKGGVGYYKKYCQKLGVAPGPTLPC

SEQ ID NO: 202135 - protein, 60 aa, Zea mays
  Clone ID: MRT4577_115937C.1.pep
YFLAPLPTRTRYRGYNWMIAVDSYDSTHYHVFSVDSTSYRRKCFSYYSARTIMSAISSAT

SEQ ID NO: 202136 - protein, 83 aa, Zea mays
  Clone ID: MRT4577_115938C.1.pep
EHAWRCCFSQHETYPRKLHNGGAFILHTIGWKHHRRLTPSCSKSKANIRLPIHCSTATSTVKNYNKLDGSRTGTFKCKTVNLP

SEQ ID NO: 202137 - protein, 131 aa, Zea mays
  unsure (1)..(131): unsure at all Xaa locations
  Clone ID: MRT4577_115939C.1.pep
LLRVPAMPCWPGLPRVPFCFRGVSGLRAVPSLAWLLGFLLPFSLGFVLACRLGFLRWCLGWWLWSPLVLSPCFFFFPGGFCACLLFPGRAFCCVPLAWSPFPLSVVPLVXFLLGCLLGVKRRRSGSXLVGA

SEQ ID NO: 202138 - protein, 158 aa, Zea mays
  unsure (1)..(158): unsure at all Xaa locations
  Clone ID: MRT4577_11593C.1.pep
TGGFLNFGGQTRVFKPPKKNQPGKKQLFLGSKSPTRVYFFPTGPERGPGGPKTKKGAGXAPSGGPFGPPPGPPGGGPLTQPGGGPXKRPPLWPVSWGGGGRPPGAXNPKXFGPPPPGQRIKRGGVFSPPGPGQPGGXKKPPEPFAPALFFGGNFNREG

SEQ ID NO: 202139 - protein, 40 aa, Zea mays
  Clone ID: MRT4577_115940C.1.pep
RNIIFVGMNCAACVSRCHPVFQREFYDTLSGRARWMSLCF

SEQ ID NO: 202140 - protein, 116 aa, Zea mays
  unsure (1)..(116): unsure at all Xaa locations
  Clone ID: MRT4577_115941C.1.pep
GRNTLEGLIRFIYKAIKERRARSYGYYYSRCNSXARRXGRLGARVEDSSWDLQQKQWESAVGGKAPAVAAAEREIAQAHRRHRSLDELACGGGRLAPVHPARLLRVPHVPVGDTGP

SEQ ID NO: 202141 - protein, 86 aa, Zea mays
  Clone ID: MRT4577_115942C.1.pep
PQIFFFFLCERTWFDSHVTESSSRIHEFLFHLVIVIQIRNESISKNKRTCSQDWGRPIYRPQERVTSRFTSSSALQNVVKKIPPPW

SEQ ID NO: 202142 - protein, 105 aa, Zea mays
  unsure (1)..(105): unsure at all Xaa locations
  Clone ID: MRT4577_115943C.1.pep
PQKQISFGGPPQMGPPGAGGLARPINQAPXPGPHPPQKGPKNPGPWGKNPWFPPGXLKPPKEPLPPLFSPXGPRPPPHNPXVRAKPPKKACPXSPGGNPPPGPPG

SEQ ID NO: 202143 - protein, 112 aa, Zea mays
  unsure (1)..(112): unsure at all Xaa locations
  Clone ID: MRT4577_115944C.1.pep
LLVIPLVXCLALSAASAFCMXMPCPCAELQGLIGAGAGLXTMMAPRGLCPYLDVSEXVEFNPXAVVPSYSWCWQPRPLAAQRSXQCCLKXMSIMVVLAVAPHLNLIIQFRWC

SEQ ID NO: 202144 - protein, 115 aa, Zea mays
  unsure (1)..(115): unsure at all Xaa locations
  Clone ID: MRT4577_115945C.1.pep
AGXNSVSRSQKKGANFSRKERKKNERGCRNQQRQEAGTPTYVQWRSPPVDDNAXPSRGERRRRRDGGQEPGGEEPHXWPPPGDXAXGEGXXRRVARGRRGERAAXEGXWKAGXED

SEQ ID NO: 202145 - protein, 81 aa, Zea mays
  unsure (1)..(81): unsure at all Xaa locations
  Clone ID: MRT4577_115946C.1.pep
VICRAGIVKVKSSAFSRCGSPLVVLASCHAFLXDISQKYWLRIADDCFPASNFASTFSFPXXGELGKLQIDISKFMARKPG

SEQ ID NO: 202146 - protein, 69 aa, Zea mays
  Clone ID: MRT4577_115947C.1.pep
AFCPRQGFNVLPVPKNDQCFEMFSRPLLLQFISPLWRAGCGASVVPSLLRRMGNCSTFVWTWYWLVGVF

SEQ ID NO: 202147 - protein, 62 aa, Zea mays
  unsure (1)..(62): unsure at all Xaa locations
  Clone ID: MRT4577_115948C.1.pep
MHTAFYAFSTLLTKTCFLQGLEKTYTEAELTMGDNSCIDRCVSKYXHVTNLCCQMLVNRPQM

SEQ ID NO: 202148 - protein, 74 aa, Zea mays
  Clone ID: MRT4577_115949C.1.pep
GTRKWCYHRHPKTYVAHGIKTQDSAQGMAPCGCPESLDHDVTALTRGRHPPSAGGGLWSDLTSAGEAAASTHRM

SEQ ID NO: 202149 - protein, 139 aa, Zea mays
  unsure (1)..(139): unsure at all Xaa locations
  Clone ID: MRT4577_11594C.1.pep
AKPSSSLCITPGYINTLSPTISINFKLKMVSIXPKKLQLSILDTTEQKRFRTLTNSYYKRAQGIIMVYNVTPPNTFTNLFDIWAKEINLYSTNQDSVKILVGNKINKKRKKMPKKKKKKKKKSTLRCYHCLRTNTSTLA

SEQ ID NO: 202150 - protein, 100 aa, Zea mays
  Clone ID: MRT4577_115950C.1.pep
SPDPLSTTAVCVRRTASLVDLIGHLSGRFGLLGLLKSRLSRRGLLSSSSSLGLSGCWFCFCLGSGCYRFLLLLLSRRRILAPTPLPLPSLQTLASLPDAW

SEQ ID NO: 202151 - protein, 56 aa, Zea mays
  Clone ID: MRT4577_115951C.1.pep
VYNNNFVRRRIRNKRSDNQKSYMYAQYHIALPYHLKLYIKIVRWAGTAYRRDYIAN

SEQ ID NO: 202152 - protein, 123 aa, Zea mays
  unsure (1)..(123): unsure at all Xaa locations
  Clone ID: MRT4577_115952C.1.pep
LPFXRLAALNAPASLHRPLPFSQLADGHPQQFLPFNQLAAFNYGAYSQQQQLLPFSQLTDVSPAAFLTQQQLLPFYLHDMPNGGPILQLQQLRPGKPPTIAKPDVQNLHAVRGGAQGSSTTAL

SEQ ID NO: 202153 - protein, 205 aa, Zea mays
  unsure (1)..(205): unsure at all Xaa locations
  Clone ID: MRT4577_115953C.1.pep
MTLATCAFQQVAGNEVLLSRSSTTKEPEKAARKRYLYLMGRNPVMAAAASNKTSSKPGLNYPGLEEQALQFILDCCESNIEKYTKYLEWLNNLPLCIRVSITTFLPESDVKEKGVNQAQKHQLMLMWYFKPCLYMDAGLASAVTALRTCSDVAHLAHVLEQFRLAWCGKLVRDARTXRSVKDLCFDLFIIRGGNRAFNACWRCTM

SEQ ID NO: 202154 - protein, 100 aa, Zea mays
  unsure (1)..(100): unsure at all Xaa locations
  Clone ID: MRT4577_115954C.1.pep
QDKISWRRVANITLYCQIEMCLGIFFSGFLSWRNSTHAPRRLVDIKVYTFSFLIVCPQLNLVLSLDLFLTINYNKLPCSIXKKKKKKKKKKKEKKKKKSG

SEQ ID NO: 202155 - protein, 39 aa, Zea mays
  Clone ID: MRT4577_115955C.1.pep
MATVWACGGEEADDQVWRRRATVPNHREGRSGGSMGAGE

SEQ ID NO: 202156 - protein, 125 aa, Zea mays
  unsure (1)..(125): unsure at all Xaa locations
  Clone ID: MRT4577_115956C.1.pep
KDGLFKEPKSVPRAKQAWCPFWARPFSPQEGSVERGRKSVDGRNFFAPLLCVRPSPPVSCGIRGFCPLPLAWFTVAAIAPGCAKKKKKECKKXKKTNKKKKKKNKKKKKRKKKKKKKRKKKKKKR

SEQ ID NO: 202157 - protein, 38 aa, Zea mays
  Clone ID: MRT4577_115957C.1.pep
PHPSRLSNYLPKRSPYPRGLVVRSTIKTTVMADLEPNS

SEQ ID NO: 202158 - protein, 58 aa, Zea mays
  unsure (1)..(58): unsure at all Xaa locations
  Clone ID: MRT4577_115958C.1.pep
LXXIETMFFIPSYDLKWNSTSTFLYEDRYDXLGDNPSIKTSSDETTWVRTRRIPRPST

SEQ ID NO: 202159 - protein, 6 aa, Zea mays
  Clone ID: MRT4577_115959C.1.pep
KKVKAI

SEQ ID NO: 202160 - protein, 457 aa, Zea mays
  Clone ID: MRT4577_11595C.1.pep
WPGNGGRVSSWACINFSRNVQDGAARSFCHDLALMCQVSGMDFALEPVLPPVYARPEHVERALKRLYQDAMSILRPQGRELDLLMVILPDNNGSLYGDLKRICETDLGLVSQCCLTKHVFKANKQQYLANVALKINVKVGGRNTVLVDALARRIPLVSDVATIIFGADVTHPHPGEDSSPSIAAVVASQDWPEVTKYAGLVSAQTHRQELIQDLFNVRQDPQRGAVSGGMIRELLISFWRATGQKPKRIIFYRDGVSEGQFYQVLLYELDAIRKACASLESDYQPPVTFVVVQKRHHTRLFVNNHNDQRAADRSGNILPGTVVDSKICHPTEFDFYLCSHAGIQGTSRPAHYHVLWDENKFTADGLQTLTNNLCYTYARCTRSVSIVPPAYYAHLAAFRARFYMEPDTSDSGSVASGATTSRGPPPGARNTRAGAANVAVRPLPALKENVKRVMFYC

SEQ ID NO: 202161 - protein, 88 aa, Zea mays
  Clone ID: MRT4577_115960C.1.pep
ALLSVRTRVATTVSVATSGSSTEAKDGKKTVRQGVVLITGASSALGLAAAIALAATVKWYVEMACRDFLKAANVCMGARMSDCSYTIM

SEQ ID NO: 202162 - protein, 103 aa, Zea mays
  unsure (1)..(103): unsure at all Xaa locations
  Clone ID: MRT4577_115961C.1.pep
LASNRPGRRRRCTPSMENARTSQSGSTARTSGACQXSTXEWTAPSLRLDGRSINCAITACAPAAARPCTLPALRDHIXACKAYTVLALGSTCSPESSLYRTKG

SEQ ID NO: 202163 - protein, 77 aa, Zea mays
  Clone ID: MRT4577_115962C.1.pep
RVSKRFFWQTASSAGYGHHSAFHRIVNTAGHFTAAKFAKSTTSLLRMAATAINVVTHGSAAVHIETYKMHASISAAT

SEQ ID NO: 202164 - protein, 70 aa, Zea mays
  Clone ID: MRT4577_115963C.1.pep
TPKQREIPNISPKAISPNGMGKKGNNYLTLRRKAINRDGIFPKYKIENKRKKKSGDLFKKGKSGGRGPQI

SEQ ID NO: 202165 - protein, 824 aa, Zea mays
  unsure (1)..(824): unsure at all Xaa locations
  Clone ID: MRT4577_115964C.1.pep
MRTAPPPPPHMTLASLARALGRSARSSRPRQGFQLGGXAAARATAXPPVHGGEGGAAGFVRSYLTAASSAALGKPSAGKTVDWRYVLASPHFRRLFSDGSKKNYENYYPKGKKEVPKGDGTNKSESKQESNTDEGWNFQDNAMKHMQNFLAPLLILGLMLSSMSSSSADQKEISFQEFKNKLLEPGLVDRIVVSNKSVAKVYIRSSPHPKSQGQDSDIHITTTDAPGKPAPSRCKYYFNIGSVDLFEEKLEEAQEALGIDPHDFVPVTYVAEVNWFQEVMRFAPTALIVGLLYFTGKRMQSGFNIGGGAGKGRGGIFNIGKATVMKMDKNSKNKVFFKDVAGCDEAKQEIMEFVHFLKNPKKYEDLGAKIPKGALLVGPPGTGKTLLAKATAGESGVPFLSISGSDFMEMFVGVGPSRVRNLFQEARQCAPSIVFIDEIDAIGRARGRGGFSGSNDERESTLNQLLVEMDGFGTTSGVVVLAGTNRPDILDKALLRPGRFDRQIAIDKPDIKGRDQIFRIYLKKLKLDNKPSFYSQRLAALTPGFAGADIANVCNEAALIAARSEETQITMQHFESAIDRIIGGLEKKNRVISKLERRTVAYHESGHAVAGWFLEHAEPLLKVTIVPRGTAALGFAQYVPNENLLMTKEQLFDMTCMTLGGRAAEEVLIGKISTGAQNDLEKVTKMTYAQVAVYGFSEKVGLLSFPQKDGGFEMSKPYSNQTASIIDDEVREWVGKAYKKTVELITEHKEQVAQIAELLLEKEVLHQDDLTRVLGERPFKALEPTNYDLFKKGFEDGGDNSQAPAENAELPDDSSPPVGDVVPT

SEQ ID NO: 202166 - protein, 129 aa, Zea mays
  Clone ID: MRT4577_115965C.1.pep
GSMDLDDLRQDSACFTDQVRSSSALVDCTSLFMAHLGYSGEMLGAQLVLANRSSLWSAHVTQGVDVLGVFCLCGGAARSDSLRRLDLLHVVCEGSSLHVFRRINFGYMPRRRGTLFSTTLSAGSRPPAG

SEQ ID NO: 202167 - protein, 101 aa, Zea mays
  Clone ID: MRT4577_115966C.1.pep
NPSFVGGGGGLFPTKGLFGGRPPTPQFFCKALKTPRPPSFFWPVYLKTKNKYLPPQFFLVGPVFYQGFGHICMFLYLFIALTWAGTFIPNPWWVSFFFWTG

SEQ ID NO: 202168 - protein, 63 aa, Zea mays
  Clone ID: MRT4577_115967C.1.pep
LPSPLSLSFWVGLVSASTLTNPSPWFVAYRLEIYLQQKEVLLRIICETFSYASGIVLQKHIYS

SEQ ID NO: 202169 - protein, 296 aa, Zea mays
  Clone ID: MRT4577_115968C.1.pep
MPLILISGFPSAGKTTRARQLEQFFESKIASAPPDARTSRLKVHLINDQTLGVPRSVYRTARAEKDARAEEYSAVKRVLSRDDIVIADGLNYIKGFRYQLYCEAKALQTPSCVLHVGTPPDRCRENNKKLLADEGTDGGYEEDVFENLIFRYEEPNGMTRWDSPLFIVVEEDETPPCDQIWEAMIGSDGKLKTVKPNLATVLKPATEQNYLYELDKTTSDILTQIMVYQKDHAGEGGGQIAVADVEKPIELPATPMTLPQLQRIRRQFITLNRQHSFSKARIKEVFVDYLNAEFLR

SEQ ID NO: 202170 - protein, 117 aa, Zea mays
  Clone ID: MRT4577_11596C.1.pep
VCVISFFSQICPLLHLLSPSLRLIGLQTLTNNLCYTYARCTRSVSIVPPAYYAHLAAFRARYYMEPDTSDSGSVASGATTSRGPPPGARNTRAGAANVAVRPLPALKENVKRVMFYC

SEQ ID NO: 202171 - protein, 115 aa, Zea mays
  unsure (1)..(115): unsure at all Xaa locations
  Clone ID: MRT4577_115971C.1.pep
HPCVHSYPLAARLAPSLQCSTPPVMRXGRGSQNKDADRLPHQEAAAARRSAPDEGQGLYRQPAPAXLVSGAIACALCRTFMAPLETNRTHLIVRFIGVNSMAPVFQLIMHNQRWT

SEQ ID NO: 202172 - protein, 84 aa, Zea mays
  Clone ID: MRT4577_115972C.1.pep
EVLEDVTRHSCSSSRDSTAGSFFMQCWVMEVYLMMTVGVCASDIGRVVVRYRRRSSASIPTRSARLALRTRPLLGYSSLSTGHR

SEQ ID NO: 202173 - protein, 114 aa, Zea mays
  unsure (1)..(114): unsure at all Xaa locations
  Clone ID: MRT4577_115973C.1.pep
PGXXRSGPXLPVRRGPARXXLARXAXPAAVPGGXFGVPRSGRXGCXSSPSLSVGFAFAGLAGSAXPCSXXXPPPPPCFFFXXPALGFPXXLAPLAPLRXALPXARVLGPFAPAA

SEQ ID NO: 202174 - protein, 90 aa, Zea mays
  unsure (1)..(90): unsure at all Xaa locations
  Clone ID: MRT4577_115974C.1.pep
CVLAQHIAKGNEDGLIISSVASRANLWAMVMAAGTGYTLHAPELTAYLFDKEWILEHGEKNFYITCLAGADNGSXSLLVTTRGETMVPRI

SEQ ID NO: 202175 - protein, 131 aa, Zea mays
  unsure (1)..(131): unsure at all Xaa locations
  Clone ID: MRT4577_115975C.1.pep
PPIIFFHPHPIHGFSCTTLLGRGIVXVLGEFTXVSGNAGAVARRILEKLPPDAEFRLRLRQDRYIFHVLRSYAVGITCLWMANDTFRRRIPFFYLEDIPMGFMXNYGXRVSHSALAYSMNDEFSSMLHLSM

SEQ ID NO: 202176 - protein, 65 aa, Zea mays
  Clone ID: MRT4577_115976C.1.pep
TTVSSVSYSHHFVWLHHRSSAMNCIHVLSLPCSFEPDDCPASLILVNCSWFSLDCDELHSPCFCF

SEQ ID NO: 202177 - protein, 70 aa, Zea mays
  Clone ID: MRT4577_115977C.1.pep
RPGLFPGHTALTTLQETTTNRHVDRLPAKATEGCPAARVVRQRRLRTFHCCRRRTVVQLSPLLSPLTGGS

SEQ ID NO: 202178 - protein, 223 aa, Zea mays
  Clone ID: MRT4577_115978C.1.pep
SYDDESFNMEAGLDRCILRLISSCCSGDKLVRASELARLLKLEKSMKGALSLVTRLKLPMLQEKFSSIIEERVLNDKIIAGAGGFCSNATIMTNTPVLTTQATLPSMFMQDGNRSLESSLPKLNIVNQQCNSTEPKKPAGERGIEIKDRTQKDSSASVPFAKVPKNSENQNQEGGIDHTGAKKESTKYCNRAEPQRPVNPFAKSSSSKEQSSFFLDSIKKMKV

SEQ ID NO: 202179 - protein, 159 aa, Zea mays
  Clone ID: MRT4577_115979C.1.pep
GGGPGSRPSSKGPLKEALGVDPPGGFLFPPFSPPDSENGGFFFPPGGGGLFKPWGVGGGPPPWGKPGGFFPERFFQEPGPLGVPLKGKGPRFFPFGPGRGVFPRGNFGFSPPGVILGPFLGPFFWGGPGFSPGGALGESFWGALSPKGKIFPVSRDGSL

SEQ ID NO: 202180 - protein, 83 aa, Zea mays
  unsure (1)..(83): unsure at all Xaa locations
  Clone ID: MRT4577_11597C.1.pep
WLQHACPSDAPTPADYTIATGDEAPQTSITDTAAGKQGPPAVYGDPELSVXDEXTTGTYRKNVLADDVISGKDDEVDKVAGDD

SEQ ID NO: 202181 - protein, 66 aa, Zea mays
  Clone ID: MRT4577_115980C.1.pep
INNYIVTNQRSNNPKLIGRRRPRPLSNTSQHSSMRLILWYMFLTFNEHLLSSLHLLNPWILCGWLV

SEQ ID NO: 202182 - protein, 140 aa, Zea mays
  unsure (1)..(140): unsure at all Xaa locations
  Clone ID: MRT4577_115981C.1.pep
RPNGFDPLGLAEDFXHFELVNARGAMGGVVGMLIPDLLTKAGRTNPPQWDHPAKSEQFPSACTLFVVEHILFHYVETRPLQDNTNPGRHNQHPILKSYTLPPHQRRYPGRVLNPVNCAHTLEVKDNDLGHGKLAMLPYLG

SEQ ID NO: 202183 - protein, 213 aa, Zea mays
  Clone ID: MRT4577_115982C.1.pep
KKKNLTKKKKKKKKKKKKKKKFRYGGFSPCPFVPRSHGQRKGGAECVGDWRRFRCCRPRPGSPRIGARTSNGRASTMRIGAQRRPDAPRRKWRPLRRARRDRRAVGAAALREATGRGCSCSAAAAGRGSFFAGHPDSVSPLPALARTNGCTCGPVNGDSICPRTLVRTHHATNASTAHTFYCPKGSECLLSQHMARAGFPMYFYLHDCHSARM

SEQ ID NO: 202184 - protein, 97 aa, Zea mays
  Clone ID: MRT4577_115983C.1.pep
RSNLNMLNQTMSEYNNPNIPGTSRNWWCHLHLSPLSRHSYISNLIMKWEALCRHQFQFQRPKEEGLEKMFILYTGKEQKHLSTSYYGQKYIFTFNLE

SEQ ID NO: 202185 - protein, 53 aa, Zea mays
  Clone ID: MRT4577_115984C.1.pep
HPHFYLSVCFWVMLILCCMLVLLVLSLNDLSSFSPFPLLCWVLLLSASNSLHT

SEQ ID NO: 202186 - protein, 60 aa, Zea mays
  Clone ID: MRT4577_115985C.1.pep
WRHALWEPCSAPFEHAPYDLFPVTVNPATADYFKEVSFVKPLDRPPMFLHLACSFSGLLW

SEQ ID NO: 202187 - protein, 73 aa, Zea mays
  Clone ID: MRT4577_115986C.1.pep
VCKCLIFINIVATTRHSLHSAGKSLLSCMLSQFEAGKRSLTASIESEDLITLSYEHHAPTLRDIARVPLELSF

SEQ ID NO: 202188 - protein, 41 aa, Zea mays
  Clone ID: MRT4577_115987C.1.pep
TMDDNMNRLMTITPKPLYTLLSTYLNTNYSKDTTELLHLTS

SEQ ID NO: 202189 - protein, 129 aa, Zea mays
  unsure (1)..(129): unsure at all Xaa locations
  Clone ID: MRT4577_115988C.1.pep
MVFSESGDGFVVNERILPXACSHDEMQRFFSYCRIQNAIQGIHIIYNTXGRPRDDTFXINLNXENQVQLFLNNDRETMRXTYDXIFKPNNFXMNWLLNNTGPNSPDTANDGFVRLKGLPFECKKEKIAQ

SEQ ID NO: 202190 - protein, 69 aa, Zea mays
  Clone ID: MRT4577_115989C.1.pep
QPFWIALPRILVSHYQGQVIINKLFFNVEHNLSGILGWRGNVPWRIKPRPGAVNNDPKIFPGRLQPDHQ

SEQ ID NO: 202191 - protein, 889 aa, Zea mays
  unsure (1)..(889): unsure at all Xaa locations
  Clone ID: MRT4577_11598C.1.pep
QANTTLYQRVFRVTIKFAARADLHHLAMFLAGRQPDAPQEALQVLDIVLREMPTAKYCPVGRSFYSPKLGRPQQLGEGLETWRGFYQSIRPTQMGLSLNIDMSSTAFFEALPVIDFVSQLLNRDISVRPLSDSDRVKIKKALRGVKVEVTHRGNMRRKYRISGLTPQATRELSFPIDDRGTVKTVVQYFLETYGFSIQHTTLPCLQVGNQQRPNYLPMEVCKIVEGQRYSKRLNDKQITALLKVTCQRPQAREXHLGGDCDHISWSLLLTRDLVXSETSLTTAPGLPFFCKXIFVIIDAYIMTKXGIFCFSCLINXFCLHKNKPINXDSKSLVCLTYLIRLXHNAYSKDPYAQEFGITIDERLASVEARVLPPPRLKYHDSGRERDVLPKVGQWNMMNKKMVNGGRVSSWACINFSRNVQDGAAGSFCHELALMCRVSGMDFVLEPVLSPCYARPELVERALKGRYQDAMNILGPQGRELDLLIVILPDNNGSLYGDVKRICETNLGLVSQCCLTKHVFKVNKQQYLANVALKINVKVGGRNTVLVDALARRIPLVSDIATIIFGADVTHPHPGEDSSPSIAAVXRPILTKKCYLSVEALLFFSHCFSPXVASQDWPEVTKYAGLVSAQAHRQELIQDLFNPXQDPXGGAVSGGMIRELLISFWRATGQKPKRIIFYRDGVSEGQFYQVLLYELDAIRKPCQAMDXACASLESDYQPPVTFVVVQKRHHTRLFVNNHNDQRAADRSGNILPGTVVDSKICHPTEFDFYLCSHAGIQGTSRPAHYHVLWDENKFTADGLQTLTNNLCYTYARCTRSVSIVPPAYYAHLAAFRARFYMEPDTSDSGSVASGATTSRGPPPGARNTRAGAANVAVRPLPALKENVKRVMFYC

SEQ ID NO: 202192 - protein, 310 aa, Zea mays
  Clone ID: MRT4577_115990C.1.pep
MGCSISGLNALYDAATGGGDVWINERRFRVLRQIGEGGFAFVYLVREHQPASDAAFARRDPAHVSEDGTYAMKKVLIQSKEQLDLSQQGDWSHEAYLLFPVHLDGTLFDNANIMLSRREFYSTADVLQIFQQMCEGLKHMHSFDPPYAHNDVKPGNVLITWRKGQAPVATLMDFGSARPARKEIRSRSEALQLQEWAAEHCSAPYRAPELWDCPSHADIDERTDIWSLGCTLFAIMYNVSPFEYALGESGGSLQLAIVNGQLKWPAGPKPPYPDELRHFVIWMLQPEAVMRPHISDVVLHVDKLIAKYLP

SEQ ID NO: 202193 - protein, 338 aa, Zea mays
  Clone ID: MRT4577_115991C.1.pep
MGCSISGLNALYDAATGGGDVWINERRFRVLRQIGEGGFAFVYLVREHQPASDAAFARRDPAHVSEDGTYAMKKVLIQSKEQLDLVREEIRVSSLFNHPNLLPLLDHAIIAVKSQQGDWSHEAYLLFPVHLDGTLFDNANIMLSRREFYSTADVLQIFQQMCEGLKHMHSFDPPYAHNDVKPGNVLITWRKGQAPVATLMDFGSARPARKEIRSRSEALQLQEWAAEHCSAPYRAPELWDCPSHADIDERTDIWSLGCTLFAIMYNVSPFEYALGESGGSLQLAIVNGQLKWPAGPKPPYPDELRHFVIWMLQPEAVMRPHISDVVLHVDKLIAKYLP

SEQ ID NO: 202194 - protein, 52 aa, Zea mays
  unsure (1)..(52): unsure at all Xaa locations
  Clone ID: MRT4577_115992C.1.pep
FFSFSSTSSLPVGFFINKKKSXSSFIFPYINSYSTSLAYNHYIILITMFQLL

SEQ ID NO: 202195 - protein, 81 aa, Zea mays
  Clone ID: MRT4577_115993C.1.pep
GWIKPFTKAYLRLVGRTLLFRTAPENNQPGWCLILNAIPTAMFDGLPTGHTGNLQPNLHCRFEMVFLHCRTSDHHLLMATA

SEQ ID NO: 202196 - protein, 74 aa, Zea mays
  Clone ID: MRT4577_115994C.1.pep
ARVFSIGVLFKINADTHISLVRHDSRSIAGLHKNHRNRDGSILRQPAYIRFALGIMCNAKSSTCALDVGVLVNQ

SEQ ID NO: 202197 - protein, 59 aa, Zea mays
  Clone ID: MRT4577_115995C.1.pep
LDLHYHLPTPQPDRQNVYGTWPRRLSQKSALVNQSLLYHPRNIRGHHQGEFRGHLLACH

SEQ ID NO: 202198 - protein, 80 aa, Zea mays
  Clone ID: MRT4577_115996C.1.pep
MPSASSSSACAAAAAVGDAAVSYDHKAVVINGQRRTTPRPSPLHISRSTLAHLCCITLAGRCLARHPLPWLVFPHPFPYS

SEQ ID NO: 202199 - protein, 114 aa, Zea mays
  Clone ID: MRT4577_115997C.1.pep
VVTLILAGESMEGSKISASATVTGGTEGSSRVQWYKASSSEFKNEHELEALTPSRVSKTFRIPLGAVGYYIVAKFTPVAPDGEVCEPAYATLDGLVETLPPSLNFLTVTGEFFV

SEQ ID NO: 202200 - protein, 307 aa, Zea mays
  Clone ID: MRT4577_115999C.1.pep
MAFSPPLIDWEAESYPAYPDFAAIPLFVVFFLVVRFFLDRFVFEWLARKLIFKEEDEKKLGPTTYAGKRKIRKFKESAWKCMYFLSGELLALSVTYNEPWFTTTRNFWVGPGDQIWPDQKIKLKLKTVYMYVAGFYTYSIFALLFWEIRRSDFGISMTHHVATVCLIALSYIFRFARVGSVVLAIHDATDVFLELGKISKYSGHELFADVSFLVFVSSWVLLRLIYYPFWILWSTSYEVVLTLDKEKHKVDGPIYYYVFNSLLFSLLVLHIYWWVLMYRMLVKQIQSRGHVGDDIRSDSEGEEEHED

SEQ ID NO: 202201 - protein, 64 aa, Zea mays
  Clone ID: MRT4577_11599C.1.pep
ESVQVSVGRQLASDDVMIGPKVMDSVYHCIRRLMERECLARKVVRENFTGHNDGICSIILQTSR

SEQ ID NO: 202202 - protein, 511 aa, Zea mays
  Clone ID: MRT4577_1159C.1.pep
MAAAAAAAVAHLSIHGRLRRSPEHRPSITTTTTSSSSSSAHRPSLLRCRAFKQEAGDGDPAEADARKRRKGPLYKLKAAIQGLAGSRSAAAEVYGGEYQYQRAVEKAEEIFFSVTTQLGRYVITMMSSGVVLGVGFQLSGGDSQMNELIWYSWLGGVIIGTMIGANSVLEEHCKAGPRNVVITGSTRGLGKALAREFLLSGDRVVITSRSPESVLQTIKELEENIQEGLSVAKKKQRNILSHAKVVGTACDVCKPEDVKELVNFAINELGSVDIWINNAGTNKGFRPLVTFSDDDITQIVSTNLVGSLLCTREAMNVMQYQEKGGHIFNMDGAGSGGSSTPLTAVYGSTKCGLKQFQGSLLNESRRSKVGVHTASPGMVLTDLLLSGSSLRNKQMFNLICELPETVARTLVPRMRVVKGSGKAINYLTPPRILLALVTAWVRRGRWFDDEGRAVYAAEADRIRNWAESRARFSFTDAMEMYTENTWVSVFSLSVVCAFIILSSSGGPLPGT

SEQ ID NO: 202203 - protein, 148 aa, Zea mays
  Clone ID: MRT4577_115C.1.pep
NSARGASRCLCQRLRGTRGGGGRGYQFTACRGGWQTEDDGGGKEDEHAAAVSLGVEERMSLLTSQISSKLDSIHNTGAAVAAKRRLLAGRPRKVAQEASSVASCHKDLERYLKEACDAEDFDRSKRISDCLATLDKEKDRLLTALRDA

SEQ ID NO: 202204 - protein, 63 aa, Zea mays
  Clone ID: MRT4577_116000C.1.pep
HPLVLHVGAAISGCCGQRLADHQHRLLPCPHAGRDRRLVGAGAHAPLTQLLLEAAEPEEPDLP

SEQ ID NO: 202205 - protein, 102 aa, Zea mays
  Clone ID: MRT4577_116001C.1.pep
KQQRTHKGKKHHAPAHNMIDTNLNTPASQTRQGSKLSRVLPLLEPARYVSALGNSHIVLHLMRIFLELPVGKTRGVSYFNPFAVYPPFGNFCWRCQAPPFCP

SEQ ID NO: 202206 - protein, 66 aa, Zea mays
  Clone ID: MRT4577_116002C.1.pep
MELKFVAAWVPNGETVVEQLFFRDPDGNVVEVCDCEKLPVIPLADAGSTGLLPNTLLLPVETNLHG

SEQ ID NO: 202207 - protein, 36 aa, Zea mays
  Clone ID: MRT4577_116003C.1.pep
FQDAMASCIPMAARLEPYEVEMQFLIAYGLLLQINL

SEQ ID NO: 202208 - protein, 105 aa, Zea mays
  Clone ID: MRT4577_116004C.1.pep
VSHQVPAVRAHDSVRSVCQGGALVIMDCCRIRILVHRPPQLDTVGQQDVRHAVAWCSVHGALLAVYDQTMPTVLVSFGRVGVTNEIYVCRLVKAGAIDLVGILPH

SEQ ID NO: 202209 - protein, 208 aa, Zea mays
  unsure (1)..(208): unsure at all Xaa locations
  Clone ID: MRT4577_116005C.1.pep
ARYHACCRRVTYRIQNSCLFSSNLVDSKEYNGLVDKVNDFHSEAFDVTKVPLSIIHFYENTVEYELQSNIKWARWFRPFALCYEKMSKRVEQIHLGMGGNWETMHGSIISVIDEKDGRENVRAWLRKNEAGKSIFVALYSKHTNKSETYMNIALPLPYSNMTGILKLYNDSHDLIITSKLRENGQGDEGIYLHTRVXTIRLPLAETFI

SEQ ID NO: 202210 - protein, 129 aa, Zea mays
  Clone ID: MRT4577_116006C.1.pep
MALQWMILACVVAVEAAVAALVTLPVPRAVRGQIVALTSLFLQPLSSVIPFAAFQILDLYWKKEHRLMCTSEICTAEERIRFEKSMFKAQRNVILCVSACLLYWCIYRIVKLNKDIKALEETEKRLKEE

SEQ ID NO: 202211 - protein, 72 aa, Zea mays
  Clone ID: MRT4577_116007C.1.pep
KMQCERAVHVVPPTLFHFSSTNRSIDPYGVCSLLARVVRMLVKSSRQEWILICHAAGAFGTLPPRPSRTHAS

SEQ ID NO: 202212 - protein, 56 aa, Zea mays
  Clone ID: MRT4577_116008C.1.pep
RHLRALRKLGSCIAGALHAFEENGGGTSSHEGNRKKMGTGKAPAPESRAAIDANAL

SEQ ID NO: 202213 - protein, 39 aa, Zea mays
  Clone ID: MRT4577_116009C.1.pep
SSGTTQSTREAVVKRRVRGQVGICLVSCHQRFKHHSQTE

SEQ ID NO: 202214 - protein, 45 aa, Zea mays
  Clone ID: MRT4577_11600C.1.pep
NVVLREGSMEVASCYCSVEDMVGIIWISFKDSVFSLEGLVSLFVH

SEQ ID NO: 202215 - protein, 99 aa, Zea mays
  unsure (1)..(99): unsure at all Xaa locations
  Clone ID: MRT4577_116010C.1.pep
HRYTFIPTMHRRRRPINIHDADAXLPCRAPPPRPRPAPPPPPGPEHAAAGAHVFFLXXXFFGGGVPHFFFLRXVXYRARVPGRGGALPXPPGXGLVAFR

SEQ ID NO: 202216 - protein, 187 aa, Zea mays
  Clone ID: MRT4577_116011C.1.pep
HWVPRGRPGAIHIPASYCVTMTHTNITGYRTPSMVIASTSLLLSLAFIMFDWKDHHFFRSPQECPGATSTLQHRHSADDVEIHATGRGLPPEDTTTKDGITRTTINFVRPKPLLLLPWHSTTNTTPLHTPQHPHMTRIPQKLTAATTRPFSRRYSIAPSTTNNTNDHSRTPEDVDADTSNYPPPSSV

SEQ ID NO: 202217 - protein, 130 aa, Zea mays
  unsure (1)..(130): unsure at all Xaa locations
  Clone ID: MRT4577_116012C.1.pep
LRVTFXLLFSSIKVGAKHPAISEHIILPCLRIISQACTPPKSDCGDKESGLGVSSLTLHSKNDDTTGNTASNNPNTKIQSDISGKIYDGSRRDQDIPLLSYSEWEGGASYLDFVRRQYKVSQAVKGSAQK

SEQ ID NO: 202218 - protein, 107 aa, Zea mays
  unsure (1)..(107): unsure at all Xaa locations
  Clone ID: MRT4577_116013C.1.pep
GKGGSLVLPLSAFMVECGVQVVNXSEAGVIHLSKEMGXSHFHEXGFGKVKYXSNVXQVVDSTTSLKPLRGVGTFMEQYICYLVKGDRNPGWGSXLDYAGGGKNSNCQ

SEQ ID NO: 202219 - protein, 166 aa, Zea mays
  Clone ID: MRT4577_116014C.1.pep
MAPPSQAATGKREKQHKPAKSLAVKSTNPVSKKTHKQKKPRPPAEQDQTNDAAAAAGEPAGGGVLLSAALPPARQLEFLLRSFERAAKMRLSPLELGAYSEGCMVQLAEGASQDVESFGDHVKGAFGATWKGELCEGKLVEGSIDAGSPALLVISLGALRSLELLR

SEQ ID NO: 202220 - protein, 106 aa, Zea mays
  unsure (1)..(106): unsure at all Xaa locations
  Clone ID: MRT4577_116015C.1.pep
VXWVFFFFFFIFFFFFFFFFFFFFSLFFTPKFPTRPYRPPTFTYTNSPKNLGGGGGDKPPTKNSHPLTIPHTHNPKTQNQKPKTPKPGAKKKKPSRPKSPLTNQKT

SEQ ID NO: 202221 - protein, 47 aa, Zea mays
  Clone ID: MRT4577_116016C.1.pep
LSQPPKKGSGLFFSLRLGRLTKRRHYNSTPSVPPSSERNARRAFEQE

SEQ ID NO: 202222 - protein, 59 aa, Zea mays
  Clone ID: MRT4577_116017C.1.pep
NWLVDPRLRSNACGLTLLIRLLYLFILLIEDGLLRVAYILNLHFCNHSDDNNAQFLLLE

SEQ ID NO: 202223 - protein, 95 aa, Zea mays
  Clone ID: MRT4577_116018C.1.pep
SCCGRRGSRKATKSLKKQRCAPRLATEKSRNSSTHDECMGTTSEERAHGKSAMILVPATKLRPRRRHGRDLGRQLRHDRDKDPAPRVGSTRGINA

SEQ ID NO: 202224 - protein, 123 aa, Zea mays
  unsure (1)..(123): unsure at all Xaa locations
  Clone ID: MRT4577_116019C.1.pep
ITGGLTWAGLWPCSPIIGRGWGLQGGSSSSSTTTCSSILQTPFLAVAFAALLVSFAGFVAACFXVAWALRLYLAXVALLVAFLLGLTAFGFRVTAGGGGAQVYXRPYPEYRVTDLLAWLQKRM

SEQ ID NO: 202225 - protein, 77 aa, Zea mays
  Clone ID: MRT4577_11601C.1.pep
IECPPCSTLLLHAQCTTPHLDPSTVAQEFGISPKSVDVAAVRHRAAANHSQVMKLLSSVVSTPRLFQSRRKKTKNYL

SEQ ID NO: 202226 - protein, 156 aa, Zea mays
  unsure (1)..(156): unsure at all Xaa locations
  Clone ID: MRT4577_116020C.1.pep
MRGNLRGGAGLLLLAAAGGLLLLPGSLAWQSSNCAPGAPGSGSPTWPSPGSGSGVRPGKXANHFFFKPPKXPPSTXPXXXPTPPPPPPXXPPXGPPTXRPXPPPNXPPXXPDPPTPRPSPPXXPPDGPGPPTPRPXPPXXPPTPRTPXPPDGPPTP

SEQ ID NO: 202227 - protein, 60 aa, Zea mays
  Clone ID: MRT4577_116021C.1.pep
CCPSLSRGYAKADRCFNSAAEAMDALSGHYRVWGTHGRHCRLRRLCFLLLQSRFPSLIGF

SEQ ID NO: 202228 - protein, 42 aa, Zea mays
  Clone ID: MRT4577_116022C.1.pep
IDFKWCQLRHETTPSATKEWIETDNHGLIYNICYLAFLHQYF

SEQ ID NO: 202229 - protein, 255 aa, Zea mays
  Clone ID: MRT4577_116023C.1.pep
MTLYISYDDGLPCWVRKKRMRRKSTGPDSIAETIKWWKEQNQKLQDESGSRKAPAKGSKKGCMMGKGGPENVNCVYRGVRQRTWGKWVAEIREPNRGRRLWLGSFPTAVEAAHAYDEAAKAMYGPKARVNFSESSADANSGCTSALSLLASSVPAAALQRSDEKVETEVESVETEEVVHEVKTEAKNGDLGSVKVTCVIQSAEETVLHKEGDVSYDYFNVEDVVEMIIVELNADKKFEAHEEYLDGDDGFSLFAY

SEQ ID NO: 202230 - protein, 245 aa, Zea mays
  unsure (1)..(245): unsure at all Xaa locations
  Clone ID: MRT4577_116024C.1.pep
MEELGDAGQGPQGDASGALVRKKRMRRKSTGPDSIAETIRWWKEQNQRLQDESGSRKAPAKGSKKGCMMGKGGPENVNCVYRGVRQRTWGKWVAEIREPNRGRRLWLGSFPTAVEAAHAYDEAAKAMHGPLPRVNFSAGSADAGCRVATVLLESGXTEVESVETEEVVHXVKTEAKNGALGSVKVTWVIQSAEETVLPKEGDVSYDYFNVENPVEMIIVELNADKKFEAPEESLDGDDGFSLFAY

SEQ ID NO: 202231 - protein, 71 aa, Zea mays
  Clone ID: MRT4577_116025C.1.pep
KPEITPFFLKNLGVTPCSLVLVLGYPPLGGKPRYKICFKFGGCVFLWAMFLGGCFCYGFKQKLNTPFSLCL

SEQ ID NO: 202232 - protein, 97 aa, Zea mays
  unsure (1)..(97): unsure at all Xaa locations
  Clone ID: MRT4577_116026C.1.pep
FWTRXSPVIPSSEHISLEVAGQTRNGPVMRVFLALMLLPVFVVERARNRXRALQTVLSEVFGRRADRLLFLEKVICASTEQCLTDSNMLMAPWRKHK

SEQ ID NO: 202233 - protein, 81 aa, Zea mays
  Clone ID: MRT4577_116027C.1.pep
GLYLVAVISYRPPVLPWGWYAVNVSSVLGLFGIILTRSVVLLFTLLGSLIRSVLVCLYDRGDPRAVRSRVGSCVSPGRGCC

SEQ ID NO: 202234 - protein, 62 aa, Zea mays
  Clone ID: MRT4577_116028C.1.pep
PLPSATNPYIWFLVCHSYSMGYTAQLAVQSISYLGSFDAPRLLALAAHIGSFLLSSSLCSLG

SEQ ID NO: 202235 - protein, 63 aa, Zea mays
  Clone ID: MRT4577_116029C.1.pep
RRTATVILLAYHRLEINFLTPPCKLLDVIDAVSVFTTQWTSDLPVVALDMHHRLDTFMNRILL

SEQ ID NO: 202236 - protein, 80 aa, Zea mays
  unsure (1)..(80): unsure at all Xaa locations
  Clone ID: MRT4577_11602C.1.pep
PQLSGHKPPSEGGTKPGPGGPPPPPGSGSGAGAPXFQFDGMGCPCPGTPPGXGHWSSAPGPPQKSAGPFPRLGGGAPSTG

SEQ ID NO: 202237 - protein, 37 aa, Zea mays
  Clone ID: MRT4577_116030C.1.pep
CYSCFGRQLHGLDTRPPRQGSTHNPGYGSLKNIGRCR

SEQ ID NO: 202238 - protein, 203 aa, Zea mays
  unsure (1)..(203): unsure at all Xaa locations
  Clone ID: MRT4577_116031C.1.pep
RTAAKPPPSAPPRRTSLXETTXSAEKKPAVAVSASLVKQLRDETGAGMMDCKKALAESDGDLQKAQEFLRKKGLSSADKKSSRLAAEGLVGSYIHDSRIGCMIEVVACPQVDYVSVDDIPESVVGKEKEIEMQREDLQSKPESIREKIVEGRIAKRLGVMALLEQPYIKDDSKTVKDLVKETGASLGENIKVRRFVRYTLGED

SEQ ID NO: 202239 - protein, 120 aa, Zea mays
  Clone ID: MRT4577_116032C.1.pep
ETDFVARNDKFRELVNDLAMQVVACPQVDYVSVDDIPESVVGKEKEIEMQREDLQSKPESIREKIVEGRIAKRLGVMALLEQPYIKDDSKTVKDLVKETVASLGENIKVRRFVRYTLGED

SEQ ID NO: 202240 - protein, 978 aa, Zea mays
  unsure (1)..(978): unsure at all Xaa locations
  Clone ID: MRT4577_116033C.1.pep
MTPLSHCSVGNVSLFHIGSYRTTREIQIRRFQGSARYSRVASPSPRRLLQPQTAFHLISLYKRRSWSSPQRPRTLSAATVGTDVTVEDLNPSPSEEASDGNSEAAPDAIDASEQAEASTGQASSARKLGRNIRKSEMPPLNEEDLVPGASFTGKVMSIKPFGVFVDIGAFTEGLVHISRVSDGFVKDISSLFTVGQEVSVRLLEANKETKRISLTMREGDDYVKPQKETPKAANGGRSXPQLLKARQGKQGKGRNSXETLESKYVPGQSLNGTVKSTTRAGTFVTLPDGSEGFLPREEEALALFTLIGQSAMEIGKQIRVKVLNVAQGQATLTMKGVEDDEDDLKTLNMELKRDWSRGTNAFELAFRRNKEISAFLDQRERTKVPADTSVSAPEAESYQEEAAPEDEGSSEELSSVSEVATDVSPPVSDASSQVGIQDSTSVANAAEDQTVGSESSPTISVELSSNGTPDSSIVSSVSETADKPTEPEESSAVEEVLVTASSEAGKEPAADTEAVPALTEKTGAEVAAAAGVAQASTTTATISPTLVKQLREATGAGMMDCKKALAETGGDIDKAQEFLRKKGLAAADKRAGRATAEGRVGSYIHDSRIGVLIEVNCETDFVSRGDIFKELVDDLAMQIAACPQVQYISIDDVPEEVVKKETELEMQREDLLSKPEQIRAKIVEGRVKKRLGEFALFEQPFIKNDKVTISEWLKQTIATTGENMKVRRFARYNLGEGLEKKSQDFAAEVAAQTAAKPPPSAPPKDDKPAETTESAEKKPAVAVSASLVKQLRDETGAGMMDCKKALAESDGDLQKAQEFLRKKGLSSADKKSSRLAAEGLVGSYIHDSRIGCMIEVNSETDFVARNDKFRELVNDLAMQVVACPQVDYVSVDDIPESVVGKEKEIEMQREDLQSKPESIREKIVEGRIAKRLGVMALLEQPYIKDDSKTVKDLVKETVASLGENIKVRRFVRYTLGED

SEQ ID NO: 202241 - protein, 81 aa, Zea mays
  Clone ID: MRT4577_116034C.1.pep
CMGAGICGAQSLPTAPQETCHCCVCCNFWINGRTASCSVRACHQDSCRFSAKGNLAAGEQSMELNPPVQKNLEALDAYIFI

SEQ ID NO: 202242 - protein, 120 aa, Zea mays
  Clone ID: MRT4577_116035C.1.pep
TVGFIGQSQGRLHCITRLVECNRFSDPGLSIWVLEDYDTEEWVLKHSLSLCQLVEATKLKYNSYYSIVGIHTDRNLIFFVHRLYQKLISYDMDSRQVQVLCSLGHGCPYVTPYVPSFKSL

SEQ ID NO: 202243 - protein, 104 aa, Zea mays
  Clone ID: MRT4577_116036C.1.pep
VGGVFFLLFFFSFYFFTVLCSVPAARIDRGIRARRQQGHKFFLWGSRNTARGGGGKRPVRIRNRSPGQTNEQDNCHEQKGENRGGPRGETTQTNCIKQTANFRG

SEQ ID NO: 202244 - protein, 118 aa, Zea mays
  Clone ID: MRT4577_116037C.1.pep
KLQLDPTVEEVKKLCNTCRKYARSERVLFHYNGHGVPKPTSNGEIWVLNKSYTQYIPLPITDLDSWLKTPSIYVFDCSASGIIVKAFLERLDWSSSSSASSRKDCILLAACEAHQTLP

SEQ ID NO: 202245 - protein, 72 aa, Zea mays
  Clone ID: MRT4577_116038C.1.pep
GVKALQVNPFQVFKNVGLNNKKPFEEPGSQFKPPVLALEGEKSPLEVLVSSQGREPSLKPFFKQNGLLPVAP

SEQ ID NO: 202246 - protein, 169 aa, Zea mays
  Clone ID: MRT4577_116039C.1.pep
MHGTMERDANRRIKYGHSYQERAHRTCPGCKLCGQNYNYPNGEEFSAISGCQEAYYQTDHDLIPSTSQVASHCEGSCCKGQQLKPKSYSVMRDYDYINQESTPSSSDHARTRSNLPAPPHHWHVKHSNEHRRHVTDAHSAFEVRESRSWYLSSKDAPSTHSRKHHRPAR

SEQ ID NO: 202247 - protein, 28 aa, Zea mays
  Clone ID: MRT4577_11603C.1.pep
NQQALTLGADARIHSASKCIAWTQRCHP

SEQ ID NO: 202248 - protein, 242 aa, Zea mays
  Clone ID: MRT4577_116040C.1.pep
MRLRACLLPRGLMQKLCAVDPSLMTNKQKLAFWINVYNFCVMHAFLQHGLPPSPEKLLALLNQASVNVGGTVLNVVSIEHLILRHSPDAKQGIMGDDGQTDLLHSYGLGYPEPNVVFALCRGSRSSPALRVYTAEDVSNELERAKVEYLESSVRVAGRKQRAVVVPKLLHWHMRDFADDAASLLEWVHSQLPRASGPLRRAIREVLGANMGSGSRAPTPAPAAKMLEVEPYDADFCYLLPVW

SEQ ID NO: 202249 - protein, 164 aa, Zea mays
  Clone ID: MRT4577_116041C.1.pep
MVTGEKPGSSGKKNEERTPSNEADDKHKEHKEVSVGSIKSHRKGKPPYFDGEDYCMRSDKMRHHLTSLHESIWDIVEFGAQAPQVGNEDYDSDEATQIRNFNSQATSILLASLCREEYNKVQGLTSVKETWDILKTAHEGDEVTKITKRETIKGDLGDIPSALP

SEQ ID NO: 202250 - protein, 94 aa, Zea mays
  Clone ID: MRT4577_116042C.1.pep
MVECHHDRSKQAPPQCRRDALDPQASGAYIFRPDGNTPTIASSSVTLKVIRGPLFDEVHQQFSSWIYQITRLYKNKEHAEVEYTIGPIPVDDDV

SEQ ID NO: 202251 - protein, 230 aa, Zea mays
  unsure (1)..(230): unsure at all Xaa locations
  Clone ID: MRT4577_116043C.1.pep
MASPFGATSTVGLMAAPTGLVSDKKPFSLSSISLADRPRHVRLQRKCNFRVKAAKELYFNKDGSATKKLQVGVNKLADLVGVTLGPKGRNVVLESKYGSPKIVNDGVTVAREVELEDPVENIGAKLVRQAAAKTNDLAGDGTTTSVVLAQGLIAEGVKVIAAGANPVQITRGIEKTAKALVLELKKMSKEVEDSELADVAAVSAGNNYEIGNMIAEAMSKVGRXKGVVTL

SEQ ID NO: 202252 - protein, 177 aa, Zea mays
  unsure (1)..(177): unsure at all Xaa locations
  Clone ID: MRT4577_116044C.1.pep
PPISLPRPRPSALHLAPSCSRLPTSHGVSTWSSGRVPCRLFPCCRGPVICQRPSLSLHGVAVELSCAPISCCSSSRAPSALLPHARARRRCSPSSSADRAAPCVPGLKFLCVRSTTPMARSSLPRLSGVWPCRPRSAQSPSSASALSLLLRACSSVFPAHPAGVFLCAPXSPARIPP

SEQ ID NO: 202253 - protein, 131 aa, Zea mays
  unsure (1)..(131): unsure at all Xaa locations
  Clone ID: MRT4577_116045C.1.pep
MWLPWVKTRPSSATSTSPTSTALVAAAAAASPRLSFSSPSLKDLQALLLSDAATPSPQPAAPCSPSSRVRVFHRVRVAASALRALRTLQAPAPAGAATSEAERRVVLYFTSLHVVRGTYEDCXAVRAMLRG

SEQ ID NO: 202254 - protein, 115 aa, Zea mays
  unsure (1)..(115): unsure at all Xaa locations
  Clone ID: MRT4577_116046C.1.pep
GVELWRCCSAQASSDVLALHAIGSCATVPQPAWLVPKACDNVARKEKHEMVMSCSCPFLLYLXLVSSQGKAVXVRSISKPLKPLGXHSVSLHPGAPIEHWISDLKKKKKKKKKKK

SEQ ID NO: 202255 - protein, 25 aa, Zea mays
  Clone ID: MRT4577_116047C.1.pep
IPCNLTANISVLHAQKYERKVTLFT

SEQ ID NO: 202256 - protein, 96 aa, Zea mays
  Clone ID: MRT4577_116048C.1.pep
MAKASATAGVVVTLLCVVLLLLLSSAVTTTEAGRHLGTRGRRDDGAAVTAGAGRPLGNKVIREEEMEASTTDGTTGAAGVGESKRRSPGGPDPQHH

SEQ ID NO: 202257 - protein, 52 aa, Zea mays
  Clone ID: MRT4577_116049C.1.pep
VAISAPSKVSSMFDVTLNQDGYTFDVHILSNASCTTNCLAPLAKVIHDNFTI

SEQ ID NO: 202258 - protein, 73 aa, Zea mays
  Clone ID: MRT4577_11604C.1.pep
PNKNYGYPQHMDLLTDIRYLSIVFKGKLDYSLLLECNTMVPRVSKRIREGNVEQIPCNREMTWNIYGRLEVPM

SEQ ID NO: 202259 - protein, 54 aa, Zea mays
  unsure (1)..(54): unsure at all Xaa locations
  Clone ID: MRT4577_116050C.1.pep
YFFLNFLIWVFILFIYFFLFSXIFGFKRFYGKILVFDIGGKKKVGTTKTGDLNP

SEQ ID NO: 202260 - protein, 58 aa, Zea mays
  Clone ID: MRT4577_116051C.1.pep
LNSPAPKIKGVQQKGGNGGGAHPKTGNFVKGGDQKLGFKENFRLTRAEKITLKPYPSG

SEQ ID NO: 202261 - protein, 78 aa, Zea mays
  Clone ID: MRT4577_116052C.1.pep
QKKTNTLQARGRKPGSPKTAPPFFFFFFFFFFFFFFFFFFFFFFENTSYFNNPADSGIHPIPFQTPPKRWPNGALRMA

SEQ ID NO: 202262 - protein, 201 aa, Zea mays
  Clone ID: MRT4577_116053C.1.pep
MEGGDSSGAGAGSGGAVAAAAKWRSDASRSFQYYLDRSTPHATGRWLGTLAAAAIYALRVYMAQGFYIVTYGLGIYLLNLLIGFLSPMVDPELDPSAAAEGPALPTRGSDEFKPFIRRLPEFKFWYAITKAFVVAFVMTFFSVFDVPVFWPILLCYWVVLFVLTMKRQIVHMIKYKYVPFSIGKQKYGVKKSVASTSSSKD

SEQ ID NO: 202263 - protein, 201 aa, Zea mays
  unsure (1)..(201): unsure at all Xaa locations
  Clone ID: MRT4577_116054C.1.pep
MEGGDSSGAGAGSGGAVAAAAKWRSDASRSFQYYLDRSTPHATGRWLGTLAAAAIYALRVYMAQGFYIVTYGLGIYLLNLLIGFLSPMVDPELDPSAAAEGPALPTRGSDEFKPFIRRLPEFKFWYAITKAFVVAFVMTFFSVFDVPVFWPILXCYWVVLFVLTMKRQIVHMIKYKYVPFSIGKQKYGGKKSAVSPSSSKD

SEQ ID NO: 202264 - protein, 53 aa, Zea mays
  Clone ID: MRT4577_116055C.1.pep
ILKKIKKKKNKKKKKKKKKKIKKKKKKKKKKKAKKKKKKKKSLYLPGRPLERA

SEQ ID NO: 202265 - protein, 88 aa, Zea mays
  Clone ID: MRT4577_116056C.1.pep
PFIRRLPEFKFWYAITKAFVVAFGRTLVSVFDVPVFWPILLCYWVVLFVLTMKRQIVHMIKYKYVPFSIGKQKYGVKKSVASTSSSKD

SEQ ID NO: 202266 - protein, 199 aa, Zea mays
  Clone ID: MRT4577_116057C.1.pep
MEGGDSSGAGAGGAVAAAAKWRSDASRAFQYYLDRSTPHATGRWLGTLAAAAIYALRVYMVQGFYIVTYGLGIYLLNLLIGFLSPMVDPELDPSAASEGPALPTRGSDEFKPFIRRLPEFKFWYAITKAFVVAFVMTFFSVFDVPVFWPILLCYWVVLFVLTMKRQIVHMIKYKYVPFSIGKQKYGGKKSVASTSSSKD

SEQ ID NO: 202267 - protein, 85 aa, Zea mays
  unsure (1)..(85): unsure at all Xaa locations
  Clone ID: MRT4577_116058C.1.pep
SRTYFQFSYQYALTVLNSAHPKGIELFNLSGKDSARSSTLPPWGCLTLHTNRGRYPMVMCQAVDVTELLRECNKCXSPAQPYRFH

SEQ ID NO: 202268 - protein, 57 aa, Zea mays
  Clone ID: MRT4577_116059C.1.pep
IIQLSHQYVPTACHLYQCNAGVFMLISYCFLYIGHSRSIPIFNVGFGRDVVWCSSIS

SEQ ID NO: 202269 - protein, 89 aa, Zea mays
  Clone ID: MRT4577_11605C.1.pep
FYAGVTFQTLGSRLGALVQEVQSYPYERLSFLCWHFARNTINNRQPSRDEVYVILYLIVHLIPPKEFKSKGNWTRDLLPFILREHARIE

SEQ ID NO: 202270 - protein, 207 aa, Zea mays
  unsure (1)..(207): unsure at all Xaa locations
  Clone ID: MRT4577_116060C.1.pep
MADKGLEDVPEGQIESNYDEVTDSFDNMNLKPELLRGVYAYGFERPSAIQQRAIMPVIKGNDVIAQAQSGTGKTATFSISTLQKIDSSVKACQALILAPTRELAQQIQKVVVAIGDFMEIQCHACIGGTSVRDDMKALQDGPQVVVGTPGRVHDMIQRRVLKTDHMKMFVLDEADERLSRXFTEQIYDIFQLLPXVHQVGLLSAHAP

SEQ ID NO: 202271 - protein, 72 aa, Zea mays
  Clone ID: MRT4577_116061C.1.pep
EHKLHESRSTFAARRTFRYFSYKDCFPLMSTSCTIKWTKERVQQPESAQTRTARTHAMFEEFNAYFLPGPSL

SEQ ID NO: 202272 - protein, 38 aa, Zea mays
  Clone ID: MRT4577_116062C.1.pep
MHAVQVMNLLKTLILKTLREREDDDAGAYSSFSSSLSS

SEQ ID NO: 202273 - protein, 95 aa, Zea mays
  unsure (1)..(95): unsure at all Xaa locations
  Clone ID: MRT4577_116063C.1.pep
VHVGHFSYLEQHAKYEHFAPLFEQIAKLDEALYNIQFEDPWVEARTDGXAIFNEHMSRRAVYKALLEXQDLIAARVIGVDVLHXLFQRKLGTSGV

SEQ ID NO: 202274 - protein, 63 aa, Zea mays
  Clone ID: MRT4577_116064C.1.pep
FIQLSTPNHSVPSHKNKKSSPKASKNRPVTYSAYLPITLSKTHNIYQIVFNRSSHNYTQNFFS

SEQ ID NO: 202275 - protein, 66 aa, Zea mays
  Clone ID: MRT4577_116065C.1.pep
PLAIVQLVVSPLADAAGSSVGAWSGLLQPAHGCQFVGAVRCRSAPRAARFATDATACAVGPIVRLS

SEQ ID NO: 202276 - protein, 195 aa, Zea mays
  unsure (1)..(195): unsure at all Xaa locations
  Clone ID: MRT4577_116066C.1.pep
MAATATKLSSGHEMPAVGLGVWRMDSAAVRGLIHSALRAGYRHFDCAADYKNEAEVGDALAEAFKTGLVKREDLFITTKXWNSDHGHVVEACKDSLKKLRLDYLDLYLIHFPVATKHTGVGTTDRALGDDGVLDIDTTITLANNXHAMSRSCFPWQLAHNIVISNYYIFXLTLDCLTXPNTKTDENQLHIQPYFP

SEQ ID NO: 202277 - protein, 139 aa, Zea mays
  Clone ID: MRT4577_116067C.1.pep
MAKVKVVWARVDVLGAVKDECCVLADGSEQTGDQLWWLTPGTHTRVRWQSGSCCRRSRGLTGHISRTWWTRTQYDTHGGLVVEPQNHPALRMVGFAEFGPQNSVAAVSKGIDGDTWHHNEGCVKAKQLRVERVGVRSKT

SEQ ID NO: 202278 - protein, 117 aa, Zea mays
  unsure (1)..(117): unsure at all Xaa locations
  Clone ID: MRT4577_116068C.1.pep
MPVFGEEDKKPAEGTAHINLQVKGQDGNEVFFRIMRSTQLNKLXMNAYCDRQSVDMNAIAFMIDGRRLHGEQTPDELQVQDRDEIDSMLHQTGCSAPSITYTTRFALRPAYYARKGV

SEQ ID NO: 202279 - protein, 144 aa, Zea mays
  unsure (1)..(144): unsure at all Xaa locations
  Clone ID: MRT4577_116069C.1.pep
TRPFFVSNRGTVRSGANRSNVLGLPGGGHANARTYQGVKNLYISSLKGIKXPLDRLPSACGSDMTVSNVRELKLVLRKIAFPGVIGRHRKAFRTEDGVYMYFEDNAGXIVNAKAEMEGSGITAPIAXECADLYPEIGSAAYAID

SEQ ID NO: 202280 - protein, 41 aa, Zea mays
  unsure (1)..(41): unsure at all Xaa locations
  Clone ID: MRT4577_11606C.1.pep
GPLASFIESTKYGSDCVRAGSRIEGQSXIVSMIVACLSSYH

SEQ ID NO: 202281 - protein, 80 aa, Zea mays
  Clone ID: MRT4577_116070C.1.pep
RTIPDHSNWPYLKAYLKARLPKGLQEAKSFLIFNLESHEDFSPCNSFGWELSKHVLRGMICHQTGGPGKPTQILDVRTTQ

SEQ ID NO: 202282 - protein, 368 aa, Zea mays
  Clone ID: MRT4577_116071C.1.pep
MESSMSMLPLSPSFTRPGLRTTGRGFRCRCSSATKDSAVVYSRLLDDALFRSAEVIQRESGKSMNAIATAHGIQIRWRCRTRYPFERTASGAVPRNILEQIIWDKEVEVAQRKARTPLCEVKASAALAPPPRDFVGALRAACRRNAVPALVAEVKKASPSKGLLRDHFDPVEIARTYEKNGAACLSILTDEKHFQGSFENLEAVRSSGVNCPLLCKEFVIDAWQIYYARSKGADAVLLIAAVLPDIDITYFLRVCKSLGMTALVEVHDERELDRVLKIDGVELIGINNRSLGTFEVDTANTNMLLEKRGDIINEKRIQVVSESGLFTPDDVAYVQKAGVFAVLVGESLLTQEDPGRAIAGLFGKELLP

SEQ ID NO: 202283 - protein, 125 aa, Zea mays
  Clone ID: MRT4577_116072C.1.pep
MTIRRVPTVVSNYQEDADKPRAGCGRNCLGDCCLPASKLPLYASKLSPAKGSQEDAASTKLLVDILLSEWEDRMTRGLFRYDVTACETKVIPGNLGFVAQLNEGRHLKKRPTEFRVDRVLQPFDP

SEQ ID NO: 202284 - protein, 340 aa, Zea mays
  unsure (1)..(340): unsure at all Xaa locations
  Clone ID: MRT4577_116073C.1.pep
MSSESDSLASRRSKKPKYSKFTQQELPACKPMLTPGIVIGAFSLIGVFFVPIGLASLSASHNIVEVIDRYDAECVSANDKVGFIQDTKTDKACTRKITVPKPMKGPIHIYYQLENFYQNHRRYVKSRNDMQLRNKGDASTIANCEPEATSEDGGKPIVPCGLIAWSLFNDTYSFSLNSKAVQVNKKNIAWDSDKIKKFGSDVYPSNFQKGGLIGGAKLDEKIPLSEQEDLIVWMRTGALPTFRKXLYGRIEADAMASDEITVVIQNNYNTYSFGGTKALVLSTTSWIGGRNNFIGVAYVAIGGVCLFLALAFVILYVIKPRALGDPSYLSWNRENPDHPN

SEQ ID NO: 202285 - protein, 51 aa, Zea mays
  Clone ID: MRT4577_116074C.1.pep
PTPHLGVAGRGVVVDAALPQGHRSVFAPRRGHGPSLELCEVTRIKVVPAPQ

SEQ ID NO: 202286 - protein, 60 aa, Zea mays
  unsure (1)..(60): unsure at all Xaa locations
  Clone ID: MRT4577_116075C.1.pep
GRLRCGINGFGKNRRVVCSVDLQNEDVXLDADNDPFITTDYMNYMDKDDTGHGHWKNSNI

SEQ ID NO: 202287 - protein, 75 aa, Zea mays
  Clone ID: MRT4577_116076C.1.pep
VGTTLNTTEIIQLPTSHQGIGRTIRHTCPYIKKPTDMIHGCKYLMSTISLTLSLKKHWITLTTMICQNPLIQYTF

SEQ ID NO: 202288 - protein, 57 aa, Zea mays
  Clone ID: MRT4577_116077C.1.pep
QILIFGIMATPSNDTSRIQQVIGTVTLELKNKGIDIKNSKILVIFFAAREAQVKDSY

SEQ ID NO: 202289 - protein, 143 aa, Zea mays
  Clone ID: MRT4577_116078C.1.pep
MGKCRGLRTARKLRSHRRDQKWHDKQYKKAHLGTALKANPFGGASHAKGIVLEKVGVEAKQPNSAIRKCVRVQLIKNGKKITAFVPNDGCLNFIEENDEVLVAGVGRKGHAVGDIPGVRFKVVKVANVSLLALYKGKKVSPRS

SEQ ID NO: 202290 - protein, 57 aa, Zea mays
  Clone ID: MRT4577_116079C.1.pep
PRVRPRVRPRVRKEREIQDGVHTFLSAMTNGYLYLEFIGTLYTGVMFFYLHIIAFVS

SEQ ID NO: 202291 - protein, 199 aa, Zea mays
  Clone ID: MRT4577_11607C.1.pep
MDDESEARAMPRRPTPPSPPPWEALHLVAPFLDAASLAAASCVSTSWHTAFAADDLWARLCAQHFPSALGLLPDTDSDRRCSSSPHRRLFKLFRSASVRCRALPAPRLALADVSFAVDVVTAGGDSTLSFLVAADKAAHVKNSAGLFLFGVDLSGRNGAIGPGEWRRRWTAVRTAARRGEEPAAVLMKDAQVPAGRAEG

SEQ ID NO: 202292 - protein, 223 aa, Zea mays
  unsure (1)..(223): unsure at all Xaa locations
  Clone ID: MRT4577_116080C.1.pep
GYLEAGRVGYLEAGRVAYSATAALPFGXICVIVLIWTLVTFPLLVLGGIAGKNSKSEFQAPCRTTKYPREIPPLPWYRRTIPQMAMAGFLPFSAIYIELYYIFASVWGHRIYTIYSILFTVFIILLIVTAFITVALTYFQLAAEDHEWWWRSFLCGGSTGFFVYGYCLYYYYARSDMSGFMQTSFFFGYMACICYAFFLMLGMVGFRASLFFVRHIYKSIKCE

SEQ ID NO: 202293 - protein, 692 aa, Zea mays
  Clone ID: MRT4577_116081C.1.pep
MCTCIHKAKRLEAVRCVHSVAPSTPNLRTPFEEFRSPSQTRPRPSDLPSLPFLFLSIKQQAKRHSQSTSQASLRSLRPGPSSHPKPSSRLSRQRRPTRGMAALRAPAATLLVLLALAAAGGVAADGSDHRYKIREPVPLYANKVGPFHNPSETYRYFDLPFCSPDKVKEKSEALGEVLNGDRLVDAPYKLDFRDEVESKAVCSKKLTTEDVVKFRNAVAKDYYFQMYYDDLPLWGFIGKVEKGGKDDPSEWKYYLYRHIIFDILYNNDRVIEINVHTDQSALVDLTEDKETNVEFLYSVKWKETPTPFEKRMEKYSSSSNMPHHLEVHWFSIINSCVTVLLLTGFLATILMRVLKNDFVKYAHDEEAADDQEESGWKYIHGDVFRFPKNKSLFSAALGTGTQLFALTTFIFLLALVGVFYPYNRGALFTALVVIYALTSGIAGYVATSFYSQLEGTNWVRNLLLTGCLFCGPLLLTFCFLNTVAIAYSATAALPFGTICVIVLIWTLVTFPLLVLGGIAGKNSKSEFQAPCRTTKYPREIPPLPWYRRTIPQMAMAGFLPFSAIYIELYYIFASVWGHRIYTIYSILFIVFIILLIVTAFITVALTYFQLAAEDHEWWWRSFLCGGSTGFFVYGYCLYYYYARSDMSGFMQTSFFFGYMACICYAFFLMLGMVGFRASLFFVRHIYKSIKCE

SEQ ID NO: 202294 - protein, 287 aa, Zea mays
  unsure (1)..(287): unsure at all Xaa locations
  Clone ID: MRT4577_116082C.1.pep
KKKKKKKKKKKKLKKKKKKKKFTALVVIYALTSGIAGYVATSFYSQLEGTNWVRNLLLTGCLFCGPLLLTFCFLNTVAIAYRATAALPFGTICVIGLIWTLVTFPLLVLGGIAGKNSKSEFQAPCRTTKYPREIPPLPWYRRTIPQMAMAGFLPFSAIYIELYYIFASVWGHRIYTIYSILFIVFIILLIVTAFITVALTYFQLAAEDHEWWWRSFLCGGSTGFFXVYGYCLYYYYARSDMSGFMQTPFFFGYMACICYAFFLMLGMVGFRAALFFVRHIYKSIKCE

SEQ ID NO: 202295 - protein, 54 aa, Zea mays
  Clone ID: MRT4577_116083C.1.pep
LGHFSNVLIQFVTVQSHRIRHDKGLIPQVFIARIRVRQLLPLNKSSLTKVDQMP

SEQ ID NO: 202296 - protein, 55 aa, Zea mays
  Clone ID: MRT4577_116084C.1.pep
VEKSEHCPDDYNLEMKRKRNDGTKGTIVPNNGSKVEGMLSPLGQANHSGKAPVPN

SEQ ID NO: 202297 - protein, 155 aa, Zea mays
  unsure (1)..(155): unsure at all Xaa locations
  Clone ID: MRT4577_116085C.1.pep
RAARCPVKASARTVGPTPGCPCTXRWRGPRPRCREKGRPRPRTRTFGTALTRSLRWMTAAFGPCRDPVTSAVHFRIFLLLLWVYFYDDQILRFFLGEKNLTFSSDDCKFNFGAMWPPAHWLCCKFVTRQSAMAFVRVLHPRHPSIPFNTNGKFWI

SEQ ID NO: 202298 - protein, 120 aa, Zea mays
  Clone ID: MRT4577_116086C.1.pep
FPDPKYLISSYFKTKSSSHTLSTKKKQSAEIITKGNKGKEKVVTMALSTHAMSHIRRYSTRMPRDPHYRLKASLATSYVVTACALPFVPPLLETRRAKADGSWMTKENMHCSSQFLGCPR

SEQ ID NO: 202299 - protein, 61 aa, Zea mays
  Clone ID: MRT4577_116087C.1.pep
NSTKNTHPFFFNWKLSDSVIIQPPHKLFNCTSLRKRSFSPSKLFSFKAFSFGVSCPYHPIQ

SEQ ID NO: 202300 - protein, 68 aa, Zea mays
  Clone ID: MRT4577_116088C.1.pep
LNQLEEEVALDVLLEFFRSLIISISLLSMSTISKQHYSIQCLTYILNIVDFIVQTTKFSINILRLTQQ

SEQ ID NO: 202301 - protein, 263 aa, Zea mays
  Clone ID: MRT4577_116089C.1.pep
MTADAALLAIIVAFLLPLRLVSLGLSLASGRHGTSSRRVRRSCAALAVAAALLAVIFALPRDHVRECAAPIASVSSAGDDDGGFREELRLEVEQLKQQLARLESLWDSKSKAVDDKLDSLEEDNGRVMRAMALDVQSLINERENIKIQESLCSSYFGNSIKEMENEVQILKDGSRKMNSDISSVAKDTAEKVEVLHSAIEKVQVIADEWVKMNYTINRIWSFTKETEKRVEGLYSDLMKNLCTGLQADEEKSAVLERLMMLWT

SEQ ID NO: 202302 - protein, 109 aa, Zea mays
  unsure (1)..(109): unsure at all Xaa locations
  Clone ID: MRT4577_11608C.1.pep
APPPTPPPPVTAPPRAPPTPTPQKAPLQGPTXPPSGASNRREPTTQSGPXAQPPAPQSXPAPRRPRRGPPNRNPGPQEAKRPPPTPKPPSPRQRPGSPPKARPKPPSRP

SEQ ID NO: 202303 - protein, 119 aa, Zea mays
  Clone ID: MRT4577_116091C.1.pep
VASSFGVSIPSGSSMTVVKHQVHSIISLSRTALFSSSVPSILRAWTLVLPLFWVCSVEQVCVEPGTFAICLLESLVCPSCFHEQTEAWSTVRCRSLVVSCSAFFGIVLWSILDSFLLLI

SEQ ID NO: 202304 - protein, 184 aa, Zea mays
  Clone ID: MRT4577_116092C.1.pep
MGDHMTVFRSLRELFPQVDPRMLKAVAIEHHKDADSAVVAVLDEVMPSMIGSVEVSSLHQEAAVSKDDFFRSLSANLDAPETGSSSAGPVGISGAHHEPAEFTKDLFRNLSANHTVGETGTSSSAGSDIHVDEANGNVDSAITTDMQENVVGELDVTSSLPLMNGQLDFPSCSVPALNDKQCDL

SEQ ID NO: 202305 - protein, 47 aa, Zea mays
  unsure (1)..(47): unsure at all Xaa locations
  Clone ID: MRT4577_116093C.1.pep
LLLRPPAPQPNPTTNLSSHPETGEGARTAACQILILDTSQXYDHQGL

SEQ ID NO: 202306 - protein, 55 aa, Zea mays
  Clone ID: MRT4577_116094C.1.pep
CPWCCAVIFYLFFMLAMILLFSYKVGSCIYSQTCGLFILVQHVDDSLTDGGCCCL

SEQ ID NO: 202307 - protein, 42 aa, Zea mays
  Clone ID: MRT4577_116095C.1.pep
DFKKPSSKNKRDQISKILLQIYTGEDAIAAQSLIKIVKKISL

SEQ ID NO: 202308 - protein, 85 aa, Zea mays
  unsure (1)..(85): unsure at all Xaa locations
  Clone ID: MRT4577_116096C.1.pep
LPKGRNRPKGENSKALKFSILAINAXCXEVLSPKQEDSTTILNFQKLKEKIISIGISVSIIISICIISFCIYFKKGNHFKNPLES

SEQ ID NO: 202309 - protein, 68 aa, Zea mays
  Clone ID: MRT4577_116097C.1.pep
SRVRALVGTYDQQQLVHRLLDRGRGAGRYPLRYLVGRSALVVRLELVENSSSDDVDDDVDEEVKSNLT

SEQ ID NO: 202310 - protein, 84 aa, Zea mays
  Clone ID: MRT4577_116098C.1.pep
SRAGATQGFSVGCSNFWQGFPAPKGGGVDFGAPFHVTLNQSQLETWAPVKKGFFVQKVKGTSPFVTHKGPPGPPPFLKPKIFFV

SEQ ID NO: 202311 - protein, 131 aa, Zea mays
  Clone ID: MRT4577_116099C.1.pep
EAPIRSSFRHIARLCAPLVRGHVGRVSLRLLVRGAPARLHLGDDSALASRVGAEASVDTRETTQDVAGSREGTTSGSARWQLSKMSTSCRTGSARGFSGPCCASRSTFCAPPYRRRPTRDPRLTPRCSECL

SEQ ID NO: 202312 - protein, 120 aa, Zea mays
  unsure (1)..(120): unsure at all Xaa locations
  Clone ID: MRT4577_11609C.1.pep
VFYSSKRTSMARPFFFIPYGIHSPLLAALPTLSLGSNSSYPSSRCLLPPPPTPPFSSFYYGDPTHSVRSAPSSPWPPARAPKHSPPPASKPPRGGSXHTTPPAAXKVHNQLARLHSDNTR

SEQ ID NO: 202313 - protein, 61 aa, Zea mays
  Clone ID: MRT4577_1160C.1.pep
KIIFFIGKLNFSKNPNQPPHYKTQTTNSNQNHPQTYHQLTPQPTTQKNSLHSTPGIFPSLS

SEQ ID NO: 202314 - protein, 93 aa, Zea mays
  Clone ID: MRT4577_116100C.1.pep
KKKFWHPPPIYGFQKTLFPSKTPHFFLGKKGAKNPQKICCFGGCLNKKISSSTLGLGPLPTPQTLKIFSPPPLKKTGMGNPPTVGTMDPHPSG

SEQ ID NO: 202315 - protein, 130 aa, Zea mays
  Clone ID: MRT4577_116101C.1.pep
ERPTRPTRTRERQGQGFERPAPRTRSRPLVTDVWALAGCRPPSNAAAVAVAAHQLHAHHASAPVLGRRKAHKRALPLSFKGVNTNCCQDHQLKAPDLLIRRRRGLPYRALNLVLTSVSVRADRLWPSLVL

SEQ ID NO: 202316 - protein, 321 aa, Zea mays
  unsure (1)..(321): unsure at all Xaa locations
  Clone ID: MRT4577_116102C.1.pep
PPPPPPPRPPPAAHPRPXPXRPPXNXTPPRPPPAPPPPARRPPTPPPPPPPPPPAPPARPPPAPAPPPPRPPPPPPXPPPPPRPPPPPPPPPPRPPPPPPXPPTAPPPPPPPPRAPPRPDPAPAXSARARPAPPPXPAPPRRRGPAPAPRRAPAAPAAPRRRGAGEGARAPAAPPPPPPPXPPPPPPPPPPRPPPXSPPXSGGGXRAAAPAGGARARRGRPPRRRGPTPXPGPPRGPPPGGRPPPXPAGPPALAPGGPPPRRGRAPGPAPLLVCLSVGGPGLLFLVRSRAPFSRPGPSSGPASVCPGPPPGRSPPGIAPER

SEQ ID NO: 202317 - protein, 63 aa, Zea mays
  Clone ID: MRT4577_116103C.1.pep
LERERDRIDRETVMSFWLFGLFISQLLSVYKIIYVANLKDCKAIHAEKKKPCGVRIFTVLMFV

SEQ ID NO: 202318 - protein, 151 aa, Zea mays
  Clone ID: MRT4577_116104C.1.pep
TSIADESDSVDKDAEDLPDFSDDEKEAEYKRSLRQAKRQTDRQHEPMKTSCYMKGSQPRGGGIRKPMPPRNLDTSTRGHQPQPHFRRSDMAPAGTENTARSLGPQNAPMIAPTMLQPGPMNPAVPPPVPLANQMGWLLHEPGTAAALTAAA

SEQ ID NO: 202319 - protein, 51 aa, Zea mays
  Clone ID: MRT4577_116105C.1.pep
NSHHDSVEIGLLSSKREQCEQNRSNEARFEGGTRRHQIPKSPWISPAWTMI

SEQ ID NO: 202320 - protein, 125 aa, Zea mays
  Clone ID: MRT4577_116106C.1.pep
KQAGREKRIALARQGRRLRRGISGGWRWAGLRGDGRPQRQRRRRRRRMCLRCFCSPRYSWAGRRQHVGAPRPPLYKHATLFDRNADGVFSFSETYCGEMLVPAPPPHIFYSDLAAMDCPPPHVMM

SEQ ID NO: 202321 - protein, 57 aa, Zea mays
  Clone ID: MRT4577_116107C.1.pep
VNLLLEATSLNTAQCNGVKIWWLWLLWACVVSPTRVAQMAGLKPIGLGFVFYKQNKV

SEQ ID NO: 202322 - protein, 209 aa, Zea mays
  Clone ID: MRT4577_116108C.1.pep
MAAQAPSIVVPTDAELLQAQADLWQNSLCYLKSMALKCAAELGIPTAIYSLGGAASLPDLIASLSLPQAKLPFLGRLMRLLSSSGVFAVVESPEAVYSLTPLSYLLVDGIAADNNHMDHAPFLLTVTSAHYIDLAIDLADWFKKEAKTPPFDHKHAASLFEESMERKAPGFHKMSILGLLVHDNFATSIAVREYQDVFQGVKSVTDCCY

SEQ ID NO: 202323 - protein, 26 aa, Zea mays
  Clone ID: MRT4577_116109C.1.pep
SLGFPIFYHQVSIGQPKYNWKAILAR

SEQ ID NO: 202324 - protein, 50 aa, Zea mays
  Clone ID: MRT4577_11610C.1.pep
RLSTAMNGVSSRHWYAPSQIGVRVLSVGSTALVKHVPLAAGPHPFIYSVV

SEQ ID NO: 202325 - protein, 365 aa, Zea mays
  unsure (1)..(365): unsure at all Xaa locations
  Clone ID: MRT4577_116110C.1.pep
MAALAPSIVVPTDAELLQAQADLWRNSLCYLKSMALKCATELGIPTAIYSLGGAASLPDLIASLSLPQAKLPFLGRLMRLLSSSGVFAVVESPEAVYSLTPDAYXKGGRQRDVNDWRDLIQKAGFSDYKLLKKFGARGVLEXLSLRHLLHRSAPTLYCGLVLRRNLHYKNKGIGVCHSYFLNXFHGTTECIASCDXLVCLNDLFNFRLEKXSRHIMRCYIYRTSLIKITVLDLPQEIRMIPDDGVVNYVGGDMFKSIPRAQMVLLKMVLHHWSDEDCVKILANCRKAIPSREEGGKVVIADIILDPASGPVMFQTQLLMDVCMMLMKGGRQRDVNDWRDLIQKAGFSDYKLLKKFGARGVLEIYP

SEQ ID NO: 202326 - protein, 88 aa, Zea mays
  Clone ID: MRT4577_116111C.1.pep
IHICQATIHVSNACCELYCLKHSIHADGHMPRDNTIEAGHDAFNTFFSDTDAGKHVTRTVFVDLEPTVIDYVRTVTYRQLFHPEHFIN

SEQ ID NO: 202327 - protein, 102 aa, Zea mays
  Clone ID: MRT4577_116112C.1.pep
PHTHKHFQHTYYYTHCAIPPDVGIPNPKNHLHSHNHSIAITDHSTHSIIHYPTQHPYPNIIPFRPPTNYHHHQDPPPHHTLTQPSPSITKTANQQLLKPLTP

SEQ ID NO: 202328 - protein, 54 aa, Zea mays
  Clone ID: MRT4577_116113C.1.pep
TWIESSVPLVNSHCPIQVSRNHSEHHKIYHHWKRCCSNNPIATDIQKDFLKTNK

SEQ ID NO: 202329 - protein, 78 aa, Zea mays
  Clone ID: MRT4577_116114C.1.pep
GFSNPRFTIFFFFFRGPFIPPKGIFFLNFWEVNKTVFFIFELKLPMFPLYIKKLSFENVFFEFNPRFFCLCDGGVLSL

SEQ ID NO: 202330 - protein, 76 aa, Zea mays
  Clone ID: MRT4577_116115C.1.pep
IYLYVCKYSELRLALSAPAGAQALDQFTRLYSVMKSNSMTVRMAGLSSDSVSILLCLIFPTMSAAATIGGIHQIDR

SEQ ID NO: 202331 - protein, 414 aa, Zea mays
  Clone ID: MRT4577_116116C.1.pep
MAMGCCYGDFFDKAKPYLAMISLQFGYAGMNVITKVSLNHGMSHYVLVVYRHAFATVSIAPFALILERKVRPNMTWSVFLQIFVLALLGPVIDQNFYYAGLKFTGPTFACAMSNILPAMTFVMAVIFRMEKVDLKKVRCQAKVAGTLVTVAGAMMMTLYKGPLMKMAWTSSGHGHAHGGGGAEAAVIDPSGREWFLGSLFVIVATLAWASLFILQAHTLKQYAAPLSLTTLICFVGTLQAIVVTFAMEHRPSVWTIGFDMNLLAAAYAGIVTSSIAYYVQGLVIQKTGPVFASAFSPLMMIIVAVMGSFILAEKIFLGGVLGAVLIVIGLYSVLWGKHKETQDKEADETTELPVVAIMASKTNGVVYDDDDDVVFVKEIAAAGAGAVGGDDSECRKATGVVKSSSRGHGAAGAV

SEQ ID NO: 202332 - protein, 253 aa, Zea mays
  Clone ID: MRT4577_116117C.1.pep
GSDDEPAVRKGPWTLEEDLILVSYISQHGEGSWDNLARAAGLNRNGKSCRLRWLNYLRPGVRRGSITAGEDTVIRELHARWGNKWSKISKHLPGRTDNEIKNYWRTRIQQKKQQGAKTTQQREPSTTASSGAGDDYWCTKPDPNQQAHYCLQKAAMAAATATTSAVVVSSEDDAPSAALTSQDSSAAAGGDWYMHQQQQMCYPYCSELSFVAAGHDETVGLDAVTMQFLSSHFTASFWTNGVDDFWESKPIDY

SEQ ID NO: 202333 - protein, 563 aa, Zea mays
  Clone ID: MRT4577_116118C.1.pep
MAEPALLAPDPFADLPFPEFQAPIDGDSFALEDFDLEDLDLDVDFDLDLFASDGQPSQPPPLATSSSSAGSPVGGSSSSGAVGDGGGLRNEESSESSSRSASGTDGSGKGKGEEDEAKRRARQVRNRESAHLSRQRKKQYVEELEGKVKAMQATIADLSARISCVTAENAALKQQLGGAAGAAPPPMPMYPTMYSLPMPWMHPSYPMRGSQVPLVPIPRLKPPQPASAVAEPPAKKARKTKKVASVSLLGLICVAMLCGCLIPAVNRMYDSVDAGEGAAYGPSHRGRVLAVEGPHDNVSDGVDPKPPQRASETLPALLYLPKNGKHVKINGNLVIKSIVASEKASLQMSGNDGKRPQNQEEETRLAIPGYVTPLKAGEVMESTEGMMNNELLALAPADGSMYREEDGLLPQWFSEAMSGPLLSSGMCTEVFQFDVSPSSAHPNGIIPVYSNAMSNSSQNFTQDLPPARVRTVKNRRISYSEAIPLRGSTSNDTEHLKSFGSTKPVSSVVVSVLADPREAGDGDGEGRISSKSLSRILVVVLIDSVKYVTYSCVLPFKSHSPHL

SEQ ID NO: 202334 - protein, 149 aa, Zea mays
  unsure (1)..(149): unsure at all Xaa locations
  Clone ID: MRT4577_116119C.1.pep
GVSMGGMDYAPGGQNPRQRHRGAPEIILVLKGPFEVGFFPPAKGFFSKTVPKGEVFFFPGGLVPFQKKRGGGPPPVVSPFKSQFQGTRAFPISXFGAVPPVPSEILAKAFRISRGGVGPIRANLGPQQRSKVGIPFYFSKINPPGGRFV

SEQ ID NO: 202335 - protein, 222 aa, Zea mays
  Clone ID: MRT4577_11611C.1.pep
MELAEAPAPVPDEDGLDERGVALHLPRLLAGVVSGALTGIFALAGALTGAVTGAVAGRASDSGGVLRGAGLGAVAGAVLSIEVLEASRAYWCSSDRLGSHGGASSMADFIEQLLRARFVQEQLTASGYASYRWQDDLYDIFGDISSEGLSQESLKKLPHHVVSDHQTRDLLGEILCCPICLQDIVAGETARRLPGCSHAFHQPCVDRWLVGHGSCPVCRQRV

SEQ ID NO: 202336 - protein, 87 aa, Zea mays
  Clone ID: MRT4577_116120C.1.pep
LQAYRLTRKPYRSTRRKTIAGLQEQHAALAHTTSRGKRVGTTKLLLILHMRSGGTERGATKLSFSQLQIGHDHETRQVKKLQSVLWQ

SEQ ID NO: 202337 - protein, 105 aa, Zea mays
  Clone ID: MRT4577_116121C.1.pep
NNQNSDDFTEGFASLKMHLIYRQAPFYAVLCDMLKQMCPHWSLILPLYTCYMPLNKGHYSFKFIISSVIQKEQNINLMIWPWTLTVIDAWRAASAQEQSPAPELN

SEQ ID NO: 202338 - protein, 72 aa, Zea mays
  unsure (1)..(72): unsure at all Xaa locations
  Clone ID: MRT4577_116122C.1.pep
IYINEDHIENRHFFIXEDVKKIMNTRYCISTITQPERRASAIYIHIKTQALHYHNISPGERCTVAYPTNMYS

SEQ ID NO: 202339 - protein, 44 aa, Zea mays
  Clone ID: MRT4577_116123C.1.pep
LQLLARQPELSIFLSPSIGSFVLTGNTVTSHPGLFYRGAGSIKL

SEQ ID NO: 202340 - protein, 73 aa, Zea mays
  Clone ID: MRT4577_116124C.1.pep
GRRVVTRHTDNGPNARFDGSPCKVPTRNPALLPTGGFSAPAFKQVPLAHGGSGGPNLIVNANRTSWRTPVGGP

SEQ ID NO: 202341 - protein, 75 aa, Zea mays
  Clone ID: MRT4577_116125C.1.pep
PPQGPAPNSRGAPPPRRTHYVVSLPVGMGTASTAIYCSRNDTAGCICHDGPAHCGWLALHEHKTRGSSCYPSMSS

SEQ ID NO: 202342 - protein, 118 aa, Zea mays
  Clone ID: MRT4577_116126C.1.pep
PLFFFFFSFFFFFFFFFFFFFLISNFTYFYCRKTNLAPILFAREKRGPALEATNGGQFFEIALPPHQAKNMGLTPPRAKINLGPHPKNAFPPAPSRKNALPPPKGGANEFQFGGAQTK

SEQ ID NO: 202343 - protein, 248 aa, Zea mays
  unsure (1)..(248): unsure at all Xaa locations
  Clone ID: MRT4577_116127C.1.pep
FFGHPEVYILILPGFGIISHVVTYYSGKKEPFGYIGMVXAIISIGFLGFIVXAHHIFTVGLDVDTRAYFTSATIIIAIPTGVKVFSXLATLHGGNIKXSPAILXALGFIFLFTVGGLTGIVLSNSSLDIVLHDTYYVVAHFHYVLSXGAVFAIIAGFVHXFPLFSGYTLNDTXAKAHLAIIFVGVTITFVPQHFLGLAGIPRRYSDYPDAYTTXXTVSSIXSFISLXAVLVMIXMIXEAFASXREVLS

SEQ ID NO: 202344 - protein, 238 aa, Zea mays
  Clone ID: MRT4577_116128C.1.pep
KFGFLGDQKLVLYEYMEKGDLHRWLHELPVGSMDTEDICIDAMEAMTEDSRKPAGDWPTRYRIILGVARGLAFLHQGWAGAGGGRRPIVHGRLVPTNVLLGDDMEPRISDFLPHPGGGGGAETAEGDVYRFGALVFEVVTGQARWGDAATTSWARGVVRNRKGLNLVDERLRDETAGTGAERELLECLQVGFLCTAAAPEKRPTMQQVVGLLKDVRPAATAGGGVPPPPLRSLADVGG

SEQ ID NO: 202345 - protein, 109 aa, Zea mays
  Clone ID: MRT4577_116129C.1.pep
NYSPVFSTLPVSVDLSKYELVPLEIVDRRLVKKGNRAIPQVLVRWSSVPKEATTWEDYHVLRQRFPDAIAWGQANSAGGADVTHAAGASTDDGVEMAGEEDVQELADVE

SEQ ID NO: 202346 - protein, 312 aa, Zea mays
  Clone ID: MRT4577_11612C.1.pep
LGIRLEVDYAEIYCNSSLYRENRGLIDELEQPEPNTDALYFPQGYWQNFTIQCVACLWKQSCAYWKNSEHNVVRFINTFAVSIMFGIVFWKIGSSIKDEQDVLNILGIVYGSALFLGFMNCSILQPVVAMERVVLYREKAAGMYSTMAYAIAQVSVELPYMLVQVMIFSSIVYPMIGFQVTASKFFWFFLYQVMSFMYYTLYGMMTVALTPNIEIAMGLSFLIFIFWNVFSGFIIVREMMPVWWRWVYWADPAAWTVYGLMFSQLADRTEQILVPGLGEQTVREFLEGYLGLQDRYFVLVTCLHLAIIGLFV

SEQ ID NO: 202347 - protein, 48 aa, Zea mays
  Clone ID: MRT4577_116130C.1.pep
ALQVIVRGVVVYECILVQMTSADVNGRELLPVSVASCVVKLHVECPGS

SEQ ID NO: 202348 - protein, 31 aa, Zea mays
  Clone ID: MRT4577_116131C.1.pep
IPSRRTLPSHSPLLSHCFNSTLHSTLICYNL

SEQ ID NO: 202349 - protein, 65 aa, Zea mays
  unsure (1)..(65): unsure at all Xaa locations
  Clone ID: MRT4577_116132C.1.pep
RLFGASKPLIGSIHLFQAPLGRSQCVRLHTVVLRLAAHLSENRRRVIYXLCIPAAVYVKVFPIVG

SEQ ID NO: 202350 - protein, 94 aa, Zea mays
  Clone ID: MRT4577_116133C.1.pep
RGSPPQLFKNLLRFLVRRLILWSFGFSFPKFGPWKGKRKRGGFYPELGAFFLNPPPFFQMWGWAPPPAQSWACLWGPPGKRLTYLKKFCPPGPF

SEQ ID NO: 202351 - protein, 92 aa, Zea mays
  Clone ID: MRT4577_116134C.1.pep
GLGLLAFPLRARVRVAARRPPWSRSRPARRCGSRGRVSSARPWSCRGCGVPRARQASGAWRGRRCRLRRPPLARRPSATPREAVAPASAYQP

SEQ ID NO: 202352 - protein, 117 aa, Zea mays
  unsure (1)..(117): unsure at all Xaa locations
  Clone ID: MRT4577_116135C.1.pep
MYTLHVHATTSSIVXPAHHHRAVLLLQLRXAVPIPGSSRTPXLVHPDTIYGMDPTDXRLKSGFQKFKTEVYDKKPELYEPLKYSQSPMYMVFRCSDYSVCHYVTLSLQPREAFTRRN

SEQ ID NO: 202353 - protein, 81 aa, Zea mays
  Clone ID: MRT4577_116136C.1.pep
GGTLGVKFPKTAEQKKGGVPSGGLLGGAPGLLGGGRVGLKRGVSPGGAGKRVCACKLPGKILEAPTWGNLSFPRGSYAFFF

SEQ ID NO: 202354 - protein, 38 aa, Zea mays
  Clone ID: MRT4577_116137C.1.pep
LLRFRFLQNKRRFSYDWIITFFVCSSIDPLLIFIPSEL

SEQ ID NO: 202355 - protein, 65 aa, Zea mays
  Clone ID: MRT4577_116138C.1.pep
STSIIAGYTQTSGRLLAWCAVRTMISGVQRPSQRTILSLRGILSRQPCKMLHDVRFRSTARCLAE

SEQ ID NO: 202356 - protein, 51 aa, Zea mays
  Clone ID: MRT4577_116139C.1.pep
RAAARAGEKKKKKKKKKKKKKKKKKKKKKKKPKKKKKKKKKKGWSLGRGPP

SEQ ID NO: 202357 - protein, 230 aa, Zea mays
  Clone ID: MRT4577_11613C.1.pep
MELAEAPAPVPDEDGLDERGVALHLPRLLAGVVSGALTGLFALAGALTGAVTGAVAGRASDSGGVLRGAGLGAVAGAVLSIEVLEASRAYWCSSDRLGSHGGASSMADFIEQLLRARFVQEQFTASGYASYRWQLSISYFGQDDLYDIFGDISSEGLSQESLKKLPHHVVSDHQTRDLLGEILCCPICLQDIVAGETARRLPGCSHAFHQPCVDRWLVGHGSCPVCRQRV

SEQ ID NO: 202358 - protein, 72 aa, Zea mays
  Clone ID: MRT4577_116140C.1.pep
MVSGLCRGDPHRARDCEDQGSLGLALCALSLIFVMGQSMGFMDLCRATTWVLDFTNFALCSGYEPLPDSIKD

SEQ ID NO: 202359 - protein, 92 aa, Zea mays
  Clone ID: MRT4577_116141C.1.pep
ERRRSYLHWGQKARSSYHIVILLLRLTKVTINHIKVALQQALLTRGVIRAVMRPALPLVQGDTQRKGYCEMNLNLVGLKKLSMLSSTQSCGS

SEQ ID NO: 202360 - protein, 36 aa, Zea mays
  Clone ID: MRT4577_116142C.1.pep
TFFADAVVMISIALLVVLFSVQRYATSKVGFAIGPS

SEQ ID NO: 202361 - protein, 93 aa, Zea mays
  Clone ID: MRT4577_116143C.1.pep
TPAIPKAIKTKGIYGSPCSVKVYGGECTVDEYRRPALILSSQPCGIDAINQKWSTIAILCMGVTVVMSHKFVFGGAVTQSRRYVNVESDSMAP

SEQ ID NO: 202362 - protein, 37 aa, Zea mays
  Clone ID: MRT4577_116144C.1.pep
YTSLSMRKPQSFYTFKIQPVEELEEMDHPVLVAKIMK

SEQ ID NO: 202363 - protein, 180 aa, Zea mays
  Clone ID: MRT4577_116145C.1.pep
RWKVSKADHSSANITIYYKPAAKSQQRTTKLQPHINKQDRAKDFLSTHDPSGHRSPSFRARKELIYRPSNSQASFQQHLSCCLALGHLLDLSQGIASSGGLFTAIAGRFMVGPFNTVGFFFFCAIALGLYLSMVVTVGAVSRPHAKCLAIVVVVLVVLTPAGACILFVGVSGLLSRSAVT

SEQ ID NO: 202364 - protein, 53 aa, Zea mays
  Clone ID: MRT4577_116146C.1.pep
EMARYYQVVYALYEVLQDVANKNIDDQVLRCADMVEENGRHFKNYKYNIIPLN

SEQ ID NO: 202365 - protein, 61 aa, Zea mays
  Clone ID: MRT4577_116147C.1.pep
KKRFFYSCLMHWNNKLYVPLPATGLPPLKRIAPEPSLRFDRGRPIHHVLPGFQFFWPPVLV

SEQ ID NO: 202366 - protein, 77 aa, Zea mays
  Clone ID: MRT4577_116148C.1.pep
CVLDRVLLVVLGSTAWHQVRSSTLEVVTNRDGSLLVHPPACQPLHLCCAVLMLTASIAGVTFPYLPPEVFYFCHENG

SEQ ID NO: 202367 - protein, 246 aa, Zea mays
  Clone ID: MRT4577_116149C.1.pep
VGAHACAHASCHDGDSAAELREEGEKARVELAEAEQKMQLALKEAEEAKAAEARALDQIKQLSDRASAARSSTSESGAIITISKEEFVSLSRKVEESEKLSDMKVAAAMAQVEAIRASENEAIKKLETARKEMEDMELATEEALKRAEMAEAAKKAVEGELKRWREKEKKTAEAQPSAGAEELGSGSPPVPQTSAGKASEKNDGHRNSRTLLRRSFMLPNITSMFHKKKNQPGSSSPSYLPGEKSV

SEQ ID NO: 202368 - protein, 74 aa, Zea mays
  unsure (1)..(74): unsure at all Xaa locations
  Clone ID: MRT4577_11614C.1.pep
MGNSNLPRPIIKETHRLLTEPKPGNNPSPPEENMQNSNDMILGPAQTPYEGXISKPELFLPEKKQRHVPKSKES

SEQ ID NO: 202369 - protein, 140 aa, Zea mays
  Clone ID: MRT4577_116150C.1.pep
PRVRLKNNRISQVETLDSSGKQASVFQQLGKNTKDALNSTEDAPGDGKAVSKSEHSSRSEESKVQLQSEDKARVPGTDAPSLETGHPSNGGLQANSYQDNSSQSQEEASNKSVEQSSGIRNKDNDSSRLDDSTGSTKTES

SEQ ID NO: 202370 - protein, 80 aa, Zea mays
  Clone ID: MRT4577_116151C.1.pep
GRVGERRERESASFATVPMATCCSIFLPPSPWLLLMAVLIIGNPAAVMAVHPTMDGPAHLHILNGRHPVLLAALIRYPLP

SEQ ID NO: 202371 - protein, 379 aa, Zea mays
  unsure (1)..(379): unsure at all Xaa locations
  Clone ID: MRT4577_116152C.1.pep
MGCCFMFGKKAKQAVEGDEDLHSVKVFSYNDLRKATQDFSDANKIGEGGFGSVFRGVLKDGTLVAVKVLSATSRQGVREFLTELTAISDIKHANLVTLIGCCAEGSHRILVYNYLENNSLAQTLLGSRYSNIRFNWRARVKIAVGIACGLAFLHEEIRPHIIHRDIKASNILLDKDLTPKISDFGLARLLPPNATHVSTRVAGTLGYLAPEYAIRGQVTKKSDIYSYGVLLLEIVSGRCNTNTRLPSEDQFLLERXLLLQTWALYEEGRLEDIIDIDIGDDLDVDEACRFMKIGLLCTQDAMARRPSMTNVVRMLSGEKRINVDQITRPAMITDFADLKISNKEQRPGETRSPTTTPTTKSFTTTEPFSSSETPTQSSM

SEQ ID NO: 202372 - protein, 92 aa, Zea mays
  Clone ID: MRT4577_116153C.1.pep
MVALTFLFYFMSRGYLAPEYAIRGQVTKKSDIYSYGVLLLEIVSGRCNTNTRLPSEDQFLLERVSPCYHIYPAKKQAWTILSKFARISAAGN

SEQ ID NO: 202373 - protein, 264 aa, Zea mays
  Clone ID: MRT4577_116154C.1.pep
FQNRRQHRAGVGRIASHRTRVVGWSGAAPPRSPAPSAPPLRLPTVRLSSAPVDARPRPPGLLASSRRPAGASDGIVALGKFDALHIGHRELAMHASKSGNPFLLSFVGMAEVLGWEYRPPIVAHCDRKRVLSSWAPYCRNVVPLEYQVEFSKVRYLTPRQFVERLSTDLRIKGVVAGENYRLGYKASGDAAELVKLCEEFGLSAFIVRSVMDTAKGSYNGAIPTVNSSDKGQVSSSRVRQALSAGDIEYVSQLLERKHRLALTV

SEQ ID NO: 202374 - protein, 101 aa, Zea mays
  Clone ID: MRT4577_116155C.1.pep
VLIRGVFLLYWNRFFFYSFHLEKHPFLSIINRSLGCFIRQGAPRQNGLSSSLPPKWTFYLLPQKKIPHGINKRVLIPKRGFIPYHHNGAKKKNCKKRTLKV

SEQ ID NO: 202375 - protein, 58 aa, Zea mays
  Clone ID: MRT4577_116156C.1.pep
IQSLLFKKKKKKKKKKKKKKKKKKKKKKKKKWGFLQLYMKTKTKESSIPKKKKKKRPL

SEQ ID NO: 202376 - protein, 64 aa, Zea mays
  Clone ID: MRT4577_116157C.1.pep
KFSCSPIWIPHMPTEEHMPKQDLYYDAINASGNWCRAFTREAASGKHFLGLDRSVALIALNSCL

SEQ ID NO: 202377 - protein, 71 aa, Zea mays
  Clone ID: MRT4577_116158C.1.pep
SLFGYLKYLVFECIRIHFTKRFSCMLLLKFAFLFFSRGLRAIGITLLMHNGVPLLSLEFCSQTASYLFVRM

SEQ ID NO: 202378 - protein, 97 aa, Zea mays
  Clone ID: MRT4577_116159C.1.pep
MDDLELFNDADIGISSPQGPAMSSPPSSSSLPLVPLGGQTANKDNDWKSFVLSDFWNEEGRRDVPSEMQMYSQLGLNEEDKAQENIRDETILGGTRN

SEQ ID NO: 202379 - protein, 200 aa, Zea mays
  unsure (1)..(200): unsure at all Xaa locations
  Clone ID: MRT4577_11615C.1.pep
MISNHGCAGDIGRPRSPYMLVQVMIFSSIVYPMIGFQVTASKFFWFFLYQVMSFMYYTLYGMMTVALTPNIEIAMGLSFLIFIFWNVFSGFIIXRGNPPSESADELXNLLQMMPVWWRWVYWADPAAWTVYGLMFSQLADRTEQILVPGLGEQTVREFLEGYLGLQDRYFVLVTCLHLAIIGLFVFLFFLAIKHLNFQRR

SEQ ID NO: 202380 - protein, 252 aa, Zea mays
  Clone ID: MRT4577_116160C.1.pep
IRHEAQRPQVLLVEKSVPLHAQQLLAKDISLVLNVKRSLLERISRCTGAQIASSVENITSTGRHEGQTFWIERVTECSAPKVSNKNTVKTLMFFDGCPRRLGCTVLLRGKSYEELKKVKLAVQYALFAAYHLSLETSYLADEGATLPKVPSDLQLEKPNSSSRYYQQNLNEFQTIEGETYGAGCITPCLNGSANQSHSRDGIIHEEHAHCHSRSDLSWEEYTGGTIDVYPYSTEASMYGRMYATCMHDCSDT

SEQ ID NO: 202381 - protein, 57 aa, Zea mays
  Clone ID: MRT4577_116161C.1.pep
ACRPVYMSSKPAAIHAYIDSSLNSSVSVCLHTHTTQSLCMTDSSASLIIVQPSPQAR

SEQ ID NO: 202382 - protein, 89 aa, Zea mays
  Clone ID: MRT4577_116162C.1.pep
SVRWPVKEPGRAKSGPQPKDGGSQPPSAAARGFKEVGNKKPPPGHGTCLKKLLVRVLLYYGLPGEEKMSSSGKSPGCEGLLFFKRVLLP

SEQ ID NO: 202383 - protein, 112 aa, Zea mays
  Clone ID: MRT4577_116163C.1.pep
RKLGIRLEVPLCRSLMTGRKGLTNLGKTGIGPGLHIVRMGAAAISGKKRLAVADTSGVTRHGSLPMNVIMLTPQLLLVCAGKAWIHTVEVDFLITRSAKSMKTMITGLCLTT

SEQ ID NO: 202384 - protein, 331 aa, Zea mays
  unsure (1)..(331): unsure at all Xaa locations
  Clone ID: MRT4577_116164C.1.pep
MSDTELSQSTVVFGLRMWVLVGIGVGAAFVLLLVLISVLCLLAFRRRRRRRQRAXANPAQQLPTTAPPKNPTNAKAPKDIQEVPSHAAAAAPAKTPLALAQVLQLPTPPVSEQLVTGKEHHVTHPEQQQHPSHRSDGPSPHGNGESRGGAAERAPPAVPEVSHLGWGHWYTLKELETATGMFADGNVIGEGGYGIVYRGVLENGTQVAVKNLLNNRGQAEKEFKVEVEAIGRVRHKNLVRLLGYCAEGNQRMLVYEYVDNGNLEQWLHGXDVGPRSPLAWDDRMKIILGTXKGLMYLHEGLEPKVVHXRDVKSSNILLDXAWDXXLSDFGL

SEQ ID NO: 202385 - protein, 70 aa, Zea mays
  Clone ID: MRT4577_116165C.1.pep
GAGGNQQLLTKYGAKILFSQRQKQNSFPAFARGNNKGPLPQKNHWKKPGLIFQAFKPLKTPIPKSRNYWS

SEQ ID NO: 202386 - protein, 29 aa, Zea mays
  Clone ID: MRT4577_116166C.1.pep
MNKKKKKKKKKKKKKKKKKKKRKKKKKKR

SEQ ID NO: 202387 - protein, 86 aa, Zea mays
  Clone ID: MRT4577_116167C.1.pep
YGVGLPVPRWIVNFGGGTVLLLAPPEIMMSCVEIHNALLFIDCGAIISSKGSTVLFPTKASSEQKLLTKPTAVIIVSSDSSGAIPS

SEQ ID NO: 202388 - protein, 80 aa, Zea mays
  Clone ID: MRT4577_116168C.1.pep
KSSMLSSSSPKHLLQWRQPVRSREQAQHGRNTSRRSLATVRWKDGCFGHQIMEWHLMNWRELTWWLGRRALACNTDHRDT

SEQ ID NO: 202389 - protein, 106 aa, Zea mays
  unsure (1)..(106): unsure at all Xaa locations
  Clone ID: MRT4577_116169C.1.pep
VHLNAVKGSXKYEIDGQVLGSAQSLTIGRRTNLDHSHTPGGGPNNALPAYGGGSYMAHPYKTYGGRNPGYNQPXIYXGLRPGPRXMLIVPRVITESLLTYVREQPP

SEQ ID NO: 202390 - protein, 260 aa, Zea mays
  unsure (1)..(260): unsure at all Xaa locations
  Clone ID: MRT4577_11616C.1.pep
MELAEAPAPVPDEDGLDERGVALHLPRLLAGVVSGALTGLFALAGALTGAVTGAVAGRASDSGGVLRGAGLGAVAGAVLSIEVLEASRAYWCSSDRLGSHGGASSMADFIEQLLRARFVQEQFTASGYASYRWQLSISYFGQDDLYNIFGDISSEALSQESLKXTTSYECMVGVQXDFIPKFVCYXAASGLGWHLFSSSSSNNYKQRRRPTXASVLRXPQDIVAGETARRLPGCSHAFHQPCVDRWLVGHGSCPVCRQRV

SEQ ID NO: 202391 - protein, 60 aa, Zea mays
  Clone ID: MRT4577_116170C.1.pep
SRSTYNKRFMRVISFKPPELVQVCTWKLYNSGAFLFHERQGKLLLNDSNTLPKAWRGQSA

SEQ ID NO: 202392 - protein, 78 aa, Zea mays
  unsure (1)..(78): unsure at all Xaa locations
  Clone ID: MRT4577_116171C.1.pep
RQKKGNRKAHRSRRQRFFAGNFVNNPEQYGGVSESHPGTSGGHFXGSTPDNYRYERSKLSPYSHGIATGSSPVASVPK

SEQ ID NO: 202393 - protein, 73 aa, Zea mays
  Clone ID: MRT4577_116172C.1.pep
NAWFYRDQHTRTEATLTPAYQPPRHAIKKTTQSTTAPETETNHMRLHARSARILCTPTKWHTYTPTEPTTTIH

SEQ ID NO: 202394 - protein, 76 aa, Zea mays
  Clone ID: MRT4577_116173C.1.pep
GQFRLQSMEPVGSWARRLRASPWPPIQAQVGLVKRGGEELDGDRGGEEADGVASLPGGRDLRHRVRKETMRGGRKR

SEQ ID NO: 202395 - protein, 129 aa, Zea mays
  Clone ID: MRT4577_116174C.1.pep
DRHTISFIYSRAQNNPIDTTRLLLVSLALLALVASATSTHTIRGCGCHPPPPGHLPSPVHLTSPVQLTRPVHIISPVQLTSPVQLTSQVHVPSPVHLMSRPCHYTTQLNRPELNPIPNQSQCHQTNPSQ

SEQ ID NO: 202396 - protein, 103 aa, Zea mays
  Clone ID: MRT4577_116176C.1.pep
IRIGQNIVHVYIACQTFRRSGIRRPRFPCQAMDAVRSMQQLHKHDRGRRLTSRRPLLSSSSLHVFPLGHAARLFALLGLRRRDDFFCSAGGGSDGDDGEAVEL

SEQ ID NO: 202397 - protein, 134 aa, Zea mays
  unsure (1)..(134): unsure at all Xaa locations
  Clone ID: MRT4577_116177C.1.pep
GAPAYIVSYRHQLPLRRLIPTLXDLSMANPDAYLRQQQLTPSIPLAVVDAPTYLLHQXLLQIGPALTHLAEGNPADYLQQLLAFNQLSVSNSAAYLQERPQHLDPLXAEANPLCVALLQQHQLLPYEQFFLMNP

SEQ ID NO: 202398 - protein, 47 aa, Zea mays
  Clone ID: MRT4577_116178C.1.pep
RGLLKGKGQKPTPCCVQAEFSVAHLILACIGCGAISLVFLDAGSFSY

SEQ ID NO: 202399 - protein, 184 aa, Zea mays
  unsure (1)..(184): unsure at all Xaa locations
  Clone ID: MRT4577_116179C.1.pep
MPPLLVADMNHAALHXPGLRNHLVGPKNERFSRNHLPXSSPQRSERTSKLRFTPRSARVGTQNGAQMLSPSEISXRKWFPSDFTFSASTSSYLIEGAWNEDVKAHMNXDLFCRDHSKRILDPRNSHIEVNSNHMNKTNVRLLKEMLMDAYRCSISWTIILPKGTKERGINPHAIXYYRKLINLL

SEQ ID NO: 202400 - protein, 44 aa, Zea mays
  Clone ID: MRT4577_11617C.1.pep
AGTQTTTLSETQDFYIVFAASGETRLLELSKRGGKLTSHNRGET

SEQ ID NO: 202401 - protein, 61 aa, Zea mays
  Clone ID: MRT4577_116180C.1.pep
LIFHQKEGSVIGSKAIRNTSPKAKVHQRVYGWVVMHWQEWRPMVVRLPCRCEWLRNTTSGT

SEQ ID NO: 202402 - protein, 156 aa, Zea mays
  unsure (1)..(156): unsure at all Xaa locations
  Clone ID: MRT4577_116181C.1.pep
CVRPAATGGSRGGAVXGSITSRPCLQSVLSHCVDRGCAGQXVYAYYPIIKVASXLPGFGTTGDEHTPRGXLAAFFGLTSHEAAGGWSNAHGGPLACRYCREIGTKPYXDPPYYGQRPIQLTHEYHYKLGGLVLNLNLVGNPXLVASDPVVDLKTFI

SEQ ID NO: 202403 - protein, 175 aa, Zea mays
  unsure (1)..(175): unsure at all Xaa locations
  Clone ID: MRT4577_116182C.1.pep
WXQANEPPSFYEILTPPSARRHHRWSLLQPRIGRDPLAASPAASSSSAQTRRGRVISRRYRTHRGKNKVFGMPGAGVEPPSPPAEAAAWLPPRRLRPGRVSAKRCWPPGCGRFPSPPPAPASAAEAGPEVKGVDGASTSSSAEPMKSPPPPSFRLRLRMDAQIRWEAPRPRFTCA

SEQ ID NO: 202404 - protein, 42 aa, Zea mays
  Clone ID: MRT4577_116183C.1.pep
YYCRCAIPVYWNYNHKTAGDRIKADLLHHTKYLEQNATLAFM

SEQ ID NO: 202405 - protein, 89 aa, Zea mays
  Clone ID: MRT4577_116184C.1.pep
RQHLQSTPAPPQEEKKLLYSKLRNIPVNERATTVEKPSVDKKDASTVTEDLDTGEISSSETLTSTVDILEDAGTSVLRSNIVSDFPSSE

SEQ ID NO: 202406 - protein, 812 aa, Zea mays
  unsure (1)..(812): unsure at all Xaa locations
  Clone ID: MRT4577_116185C.1.pep
MPTISLLMAHTYISSSICNLSFNHTTVVVSLLQQLGMAPKLPVLRRARSLPLLFLANFVVLQLQCSYGLPLQNEPRQIYIIYLGGRQSDDADLVTASHHDLLASVVGSKQEAVESIIYSYRHGFSGFGFAALLTKSQSTKIAGLPGVVSVTKNRVHQTRTTRSWDFVGLHYNDQPNGLLAKAAKYGDDVIVGVIDSGFWPESPSYADHGYGPPPSRWKGVCQGGDDGSFGPNNCNRKVIGARXWYAAGVSDKETLNGKYLSTRDAGGHATHTSFTADGKVVGNIGFHGLAAWAAXGGAPRGRLVIYKACWGAHPVSGSCGDADVMKAMDDAVHDGVDVLSVSIGGPSETPGTLHVVASGVTVVYAAGNDGPVSQMVENSSPWLFTVAATTVDRMFPTAITLGNNQIVHGQSLYVGTQGREDHFHEVVPMVNSGCDPEYVNSSDVKGKIVFCITEDSLNPSATVTAVGQLVLDNGGKGFIFTGYNRDNIVRWEPVTSKMIPFILIDLEVAYHILQYCISTDGTPRAKISLAQTTFGTGVPAPKVAVFSSRGPSAVYPGVLKPDIAAPGVNILAAAPQIPYYKEQLGGVLYHFESGTSMATPHVSGIVALLKSLHPDWSPSALKSALMTTALTTDNNGIPIQADGNPVKIADAFDYGAGFVNPTKADDPGLIYDIQPSDYLRFFDCTGGLGTNDSCTTPRASVVDLNLPSIAIPSLKAPQTVTRTVTNVGRQTNAVYRAVLQPPPGVEMSVEPSVLVFDAKRKAQSFKVAFMATRRFQGDYTFGSLAWHDGGSHWVRIPIAVRIVIQDLYSTVS

SEQ ID NO: 202407 - protein, 92 aa, Zea mays
  unsure (1)..(92): unsure at all Xaa locations
  Clone ID: MRT4577_116186C.1.pep
VEFRLPVLEDRTQIFKIHTRTMSCEPDIRFKLWPRXLCPNSAGADIRSVGTEAGMYAIRARRKPVTGRILLDAVIEVIQGHHQCSAAPRTRV

SEQ ID NO: 202408 - protein, 164 aa, Zea mays
  Clone ID: MRT4577_116187C.1.pep
MALRMWASSAANALKLSAGGAGARAAAFSISRFFSTVHDGLKYTQSHEWVKTTGDVATVGITDHAQGHLGEVVFVELPEPGTKVAAGGPFGNVESVKATSDVNSPISGEVVEVNAKLSETPGLINTSPYEDGWMIKVKPSSPGEADALLDAAKYTKHCEEEDAH

SEQ ID NO: 202409 - protein, 73 aa, Zea mays
  Clone ID: MRT4577_116188C.1.pep
HEQYGVTVHLFIDTGRSLGKITFMSLTFTISQKVSCRGLSSLFPFRSVSFSITILVLSRSFSIHSFGTGSSFL

SEQ ID NO: 202410 - protein, 44 aa, Zea mays
  Clone ID: MRT4577_116189C.1.pep
MYRCVCVCVAHAVHDGLKYTQSHEWVKTTGDVATVGITDHAQAE

SEQ ID NO: 202411 - protein, 245 aa, Zea mays
  unsure (1)..(245): unsure at all Xaa locations
  Clone ID: MRT4577_11618C.1.pep
RSLECVGIVYGSALFLGFMNCSILXQPVVAMERVVLYREKAAGMYSTMXYAIAQVTTHIXMINMLVQVLIFSSIVYPMIGFQLSTAKFFWFFLYLVMSFMYYTLYGMMTVALTPNIEIAMGLSFLIFIFWNVFSGFIIAREVLXTHPSDELSNLLQLMPVWWRWVYWADPAAWTVYGLMFSQLADRTEQILVPGLGVQTVREFLEGYLGLQDRYFELVTCLHLAIIGLFAFLFFLAIKHLNFQRR

SEQ ID NO: 202412 - protein, 164 aa, Zea mays
  Clone ID: MRT4577_116190C.1.pep
MALRMWASSAANALKLSAGGAGARAAAFSISRFFSTVHDGLKYTQSHEWVKTTGDVATVGITDHAQGHLGEVVFVELPEPGTKVAAGGSFGNVESVKATSDVNSPISGEVVEVNAKLSETPGLINTSPYEDGWMIKVKPSSPGEADALLDAAKYTKHCEEEDAH

SEQ ID NO: 202413 - protein, 148 aa, Zea mays
  unsure (1)..(148): unsure at all Xaa locations
  Clone ID: MRT4577_116191C.1.pep
LVWSLYFCCYVVSVCVAHAVHDGLKYTQSHEWVKTTGDVATVGITDHAQGHLGEVVFVELPEPGTNVXREDPFAXVESVKATSDVNSPISGEVVEVNAKLSETPGLINTSPYEDGWMIKVKPSSPGERRTPLLDAAKYTKHCEEEDAH

SEQ ID NO: 202414 - protein, 50 aa, Zea mays
  Clone ID: MRT4577_116193C.1.pep
TALVPAMQKGDETARSLHIALNAVNVMLFVWQIPPGLEIVGKVFEFAPWP

SEQ ID NO: 202415 - protein, 97 aa, Zea mays
  Clone ID: MRT4577_116194C.1.pep
VKNPRPAGPFVNFGGSSLRRVWPWHHCTFCFFNKPPGASRSVPGKNGFVNVLHCLVHHLRLIDCLHGGAGISLAYLKHAFFLKPVCWLMFSTTLFKG

SEQ ID NO: 202416 - protein, 69 aa, Zea mays
  Clone ID: MRT4577_116195C.1.pep
MHREAVKRFNDTKGLGFIYPEDGSEDVLVHQALIKSEGFRSLAEGEEVELLLLNGDPGLIQAVDFTTPH

SEQ ID NO: 202417 - protein, 152 aa, Zea mays
  unsure (1)..(152): unsure at all Xaa locations
  Clone ID: MRT4577_116196C.1.pep
SSQIQHAMGTAIFTFSPLXLLGLSNLLQXMPLVHLLAQXLQAQQLRPLVIAXLAVYSQXQQVLTFYLLAWLNSAFYLQQQQLPFSQLFAGYQQLFVAFKQLTALNSSAYLQQQQLLPFSQLAGVSPATFLXQPQLLPLYQHAAPNAGTLLQL

SEQ ID NO: 202418 - protein, 231 aa, Zea mays
  Clone ID: MRT4577_116197C.1.pep
MACPAQSMLSASGCIFLRSKPQAASQVRGGIIGGGRSSRPFLLTCNASSSPSPSSPAPAQEDPDCNEEECAPEKEVGSLSAEWLAEERTQVVGTFPPKKKGWTGLVEKDTAGQTNIYSVEPMVYVAESAISSGTAGTSAEGAENTAAIAAGLVLITVAAASSILIQVNKSQVPQVPEAAYSGPPLSYYVTKFQPAVAAPAQTLEAPAPDEAQDGAAATVAAPEVPAPQLSS

SEQ ID NO: 202419 - protein, 296 aa, Zea mays
  unsure (1)..(296): unsure at all Xaa locations
  Clone ID: MRT4577_116198C.1.pep
LLWGLYRAHSNAEDEIVFPALESRETLHNVSHSYTLDHKQEEQLFEDISDVLFQLSQLHDSQGHAQTKVNEVKQSCFHSSNDVDFTRKYNELATKLQAMCKSIRVALTNHVHREELELWPLFDKHFSVEEQDKLVGRIIGSTGAEVLQSMVPWVTSALTQEEQNKMLDTWKQATKNTMFGEWLNEWWKGAGTSDSSAEAPSAPEDSHLQDKLEQNDQMFKPGWKDIFRMNQSELEAEVRKVSRDPTLDPRRXXXYLIQNLMTSRWIAAQHKLPEPNSEECSHDASIPGCAPSYRDQ

SEQ ID NO: 202420 - protein, 45 aa, Zea mays
  Clone ID: MRT4577_116199C.1.pep
YLLRGPHCLRVGVLASAGACSRRTRRAGRTTRETAAMHVHAGRGS

SEQ ID NO: 202421 - protein, 680 aa, Zea mays
  Clone ID: MRT4577_11619C.1.pep
MPRTKNASASGGGDDEDPRRPFRQVKGKTVYLEQQEGRKKRRTDREARAAAAAAAVAAQAALGDQPHVPSDQIAFRARRLVSRPRSSTHTSASTPPPTLPAPVTPIAPSTSTAIPTTSSTPASTASPAPAPASAPPVPPPRFRERDETEVRPLVSDPRLFDLQRATAARVRRFRYVPVESWLPAQRDPAAGVLFSTRIQESFFRAQMSAQIALRVHRLLDLPAFLLAAGAESEAHLTYLPGLLTLLTISDRYVEEWVRVFYASVWIDPDHQWMRFRFEREDVTITARTAHVAALFRPPFTDGSRRSPADFTTAAKYLYELVRRTLLPRMGYREATTHIQLWLLGALVSHSQFDVVDFLICEIEDTVLDGIRARRQLPYAHYLCHIFAQLIQPPRFQSTLEASRLVFGSYRPAPEIPVPASASVFDSQVEDAALRQFDSQGTAADDDDDDDDDFGVPPPPPPPPPMPPRSHDHEAGSSSAAPATPQAMDPALASILQTLSQQQAHLAAEQARLSERMLSMFQNMQDRQDAFQQQLLQDRAESRAFMALMLQQSGVSVPPVLSAPPPPLHAPVVPSILSGPPVDTSPLRPVTLAFTSPVLSSVCPQPPVPPASAVTTTAVAVSVTASVPVAPAAQPPSESVPAPASTADPGSETDSDPPPAFALLPRPRPDAPPPPPPASGV

SEQ ID NO: 202422 - protein, 97 aa, Zea mays
  Clone ID: MRT4577_1161C.1.pep
LLSIRLLLPLSLFILQLQLHYPSIHPSIHHRFLILIYYCCCYSFSLATATTKERLLVRIRMLERSPSVLAGTIASIHVHVHVHVHACTHAPPTHHQR

SEQ ID NO: 202423 - protein, 60 aa, Zea mays
  Clone ID: MRT4577_116200C.1.pep
GEAIGDNTYMCLVIRDTWMGVFGSKGGGPNGASYCGLTSFCSAQHGPNLPPICPAGYDGG

SEQ ID NO: 202424 - protein, 180 aa, Zea mays
  unsure (1)..(180): unsure at all Xaa locations
  Clone ID: MRT4577_116201C.1.pep
MSCFACCGDEDTQVPDTRTQYPGHHPARADAYRPADQPPKGSQPVKMQPIAVPAIPVDELREVTKGFGDEALIGEGSFGRVYLGVLRNGRSAAGQKLDSNKQPDQRFFGAGCLWVSRLKHENVVELLGYCADXTLRVLAYEFATMGSLHDMLHGRKGVKXAQPAPXLSWVQRVKIAVGAA

SEQ ID NO: 202425 - protein, 229 aa, Zea mays
  unsure (1)..(229): unsure at all Xaa locations
  Clone ID: MRT4577_116202C.1.pep
MSCFACCGDEDTQVPDTRTQYPGHHPARADAYRPADQPPKGSQPVKMQPIAVPAIPVDELREVTKGFGDEALIGEGSFGRVYLGVLRNGRSAAVKKLDSNKQPDQEFLAQVSMVSRLKHENVVELLGYCADGTLRVLAYEFATMGSLHDMLHGRKGVKGAQPGPVLSWLQRVKIAVGAAKGLEYLHEKAQPHIMHRDIKSSNVLLFDDDVAKIADFDLXNQAPDMAARL

SEQ ID NO: 202426 - protein, 61 aa, Zea mays
  Clone ID: MRT4577_116203C.1.pep
GSSFYNLVICLHVSVSLVFFFFVFLFFFFFFFFFFFFVKILTIPFFSHNFLYINNLIGKNY

SEQ ID NO: 202427 - protein, 48 aa, Zea mays
  unsure (1)..(48): unsure at all Xaa locations
  Clone ID: MRT4577_116204C.1.pep
XFPSCGVIFGALEGEFXRVVPCMPLLMESHGAALMIYPAHGGLTRDRV

SEQ ID NO: 202428 - protein, 127 aa, Zea mays
  unsure (1)..(127): unsure at all Xaa locations
  Clone ID: MRT4577_116205C.1.pep
GWACGXXGSLSWPAASRSPSXXSGGAGRSRSPALGGSCGRFWGSVSSWGRRPGRSLVWPRLXXPCRWPGSCSVLCLXRSSLGPARFGVRVVFVRRFGGLSXSVVXRGWPXPPXXPPXXFFXXXXEXX

SEQ ID NO: 202429 - protein, 64 aa, Zea mays
  Clone ID: MRT4577_116206C.1.pep
IDESYIQLVTRAKTPSSYTPVSDATSMAQSTRMVALALVVLLVAETAFVFNVTEYSCFHNCYKR

SEQ ID NO: 202430 - protein, 59 aa, Zea mays
  Clone ID: MRT4577_116207C.1.pep
MYVPYVGSEFVRVMTKHWPACTLHSNSGTGSWAVVTTTHIIVAQEQTTCQSGGSRWWCQ

SEQ ID NO: 202431 - protein, 437 aa, Zea mays
  Clone ID: MRT4577_116208C.1.pep
MSFRSIVRDVRDGFGSLSRRGFEVKFLGHRRGRSHGAVHELRDPAPVIQSSCWANLPPELLRDVIERLEASEATWPNRKSVVSCAAVCRTWREICKEIVKNPEFSGKITFPVSLKQPGPRDVTIQCFIKRDKSTQTYYLYLCLSTAVLVESGKFLLCAKRTSRPTCTEYTIFMNSENLSRSSKMYIGKLRSNLLGTKFAIYDTQPPCNAAEPGKTSRRFYSRKVSPKVSSSTYNIAQVSHELNVLGTRGPRRMNCVMHSIPTSCLEAGGSVPSQLDSILARSTDESFGSISFSKSSVVDRSMRFSSSRFSDISMSSSRRIGDTASGDNDECKERPLILRNKAPRWHEQLQCWCLNFRGRVTVASVKNFQLVAATQPAAGAPTPSQATPVPPPEHEKVILQFGKVAKDMFTMDYRYPLSAFQAFAICLSSFDTKLACE

SEQ ID NO: 202432 - protein, 61 aa, Zea mays
  Clone ID: MRT4577_116209C.1.pep
VLGLEAEGRGGPVIVHLNAVVIRLVHVSYNKCELCMSIFVLPHLACLSRCGFSAVRGPRVD

SEQ ID NO: 202433 - protein, 119 aa, Zea mays
  unsure (1)..(119): unsure at all Xaa locations
  Clone ID: MRT4577_11620C.1.pep
DKILFPRFLEIIKARNQQGKWRAGPTTATGQPMNLHRIRTRPQAQPERRVVSPRPPLPSTRFPRGARPSPAVAVHKTTTMERAGAPPARRPDVYRSFAAPPRRHGRPSNPRPTDVWXQD

SEQ ID NO: 202434 - protein, 94 aa, Zea mays
  Clone ID: MRT4577_116210C.1.pep
GKITSTIPTAGEKVLHFGTPLETDKKIEPDPPLLYSQIQNHKHIVQTLELQPNETTKEHFKTHAHTHNLLKPPVPVPIQTRILPNMPIHLLKIQ

SEQ ID NO: 202435 - protein, 97 aa, Zea mays
  Clone ID: MRT4577_116211C.1.pep
KTKGAKTSFPGAFSLVKKNPYQEKPTVCRDLPFSGGEFYIGWPPGHIVGEPINIIGAPPVPFKPQFTGTPLGAPTCQKTSRGPLFWEKPPPPLLFWG

SEQ ID NO: 202436 - protein, 163 aa, Zea mays
  Clone ID: MRT4577_116212C.1.pep
NTLDMAMATRPRPPRPRTKFPRGPSAFSNGKPALPCLVVPCVPLTSRLGRAGHAHGIAMAARGHCTRTRRRPARRFPQAQGIHEERTSARRGRAVETPAEVDFLVRWTRHGVDDDTVLTWPAPLTRCGCAEERDRALASSEKSLAFRSTRQVLFFYTHNPTLD

SEQ ID NO: 202437 - protein, 97 aa, Zea mays
  unsure (1)..(97): unsure at all Xaa locations
  Clone ID: MRT4577_116213C.1.pep
HYRQHQKGKATSNNPXASIYAWTRGLAHRAKLDNTPELERFALALEKACVDTVEAGLMTKDLAGCIHGLPNVTESMYLNTEEFLDAIADQLSRSVDI

SEQ ID NO: 202438 - protein, 95 aa, Zea mays
  Clone ID: MRT4577_116214C.1.pep
GRFSCSSTYLRRSALDRLCLPSHSPRLLFPSAMAQPAFLSSLRSRLGSAPPPPPNHRLQPRRGYHVELGAREKALLEEDVALKSYELAVLATSTK

SEQ ID NO: 202439 - protein, 90 aa, Zea mays
  unsure (1)..(90): unsure at all Xaa locations
  Clone ID: MRT4577_116215C.1.pep
LWIYGLIIVRSVVGAGTKPKDNEYYVIDSYSHLSAGLTXTCLPCFIASSIGIGADAGARTNAQQPTWRVVLMLMLIFDDTLALYELIGSI

SEQ ID NO: 202440 - protein, 102 aa, Zea mays
  Clone ID: MRT4577_116216C.1.pep
KKKKKKRPKKTTGLSKIKEMILEPPSFMKRTMEKIIEFILTNGKEFEKKLIEQDRTTGRFPFLLSSNPYHSYYLKFLQETEESNSHGRSPNNKDRRGSSDRR

SEQ ID NO: 202441 - protein, 90 aa, Zea mays
  Clone ID: MRT4577_116217C.1.pep
MAQSAFLSSLRSRLCSAPPPPPNHRLQPRRGYHVELGAREKALLEEDVALKRFKSYKNSVKQASKIGNALTLAVVLACSYELAVLATSTK

SEQ ID NO: 202442 - protein, 90 aa, Zea mays
  Clone ID: MRT4577_116218C.1.pep
MAQPAFLSSLRSRLCSAPPPPPNHRLQPRRGYHVELGAREKALLEEDVALKRFKSYKNSVKQVSKIGNALTLAVVLACSYELAVLATSTK

SEQ ID NO: 202443 - protein, 80 aa, Zea mays
  Clone ID: MRT4577_116219C.1.pep
KSPTDRGEIVYITSRGSTNMPPKKKTRRKSPFFLTPPLFFFPLGPEKTRRWRHVSPRFSSHVYPATAVHTLDANSSSLTG

SEQ ID NO: 202444 - protein, 65 aa, Zea mays
  unsure (1)..(65): unsure at all Xaa locations
  Clone ID: MRT4577_11621C.1.pep
LGPRAGREKIQKARETVAGAYRSRRRCLPFPSPPVLSTEISLGIGELYGSERFYLSFLVFDQXCV

SEQ ID NO: 202445 - protein, 41 aa, Zea mays
  Clone ID: MRT4577_116220C.1.pep
EKRGRPTRSLTIHTVSYFFFTSHPNNISGLQMLQLLYLSQP

SEQ ID NO: 202446 - protein, 90 aa, Zea mays
  Clone ID: MRT4577_116221C.1.pep
MAQPAFLSSLRSRLGSAPPPPPNHRLLPRRGYHVGLGAREKALLEEDVALKRFKSYKNSVKQVSKIGNALTLAVVLACSYELAVLATSTK

SEQ ID NO: 202447 - protein, 323 aa, Zea mays
  Clone ID: MRT4577_116222C.1.pep
CESLDSFVTAIEDAKAVFEMGKNLGFDMHILDLGGGYPGTSDAKIPFEPIAEIIQETLDRCFPPVDGLEIIAEPGRYFAASAFTLVTQVIAKREIQYDDNAAAEAIEFAENNNVVRCYPHVLRSASPDVPQTESLHCQDLDMSREIMYYLNDGVYGSFNCTIFDHWTVYPCPWLEANRSVQSYIRTVLWGPTCDSMDMIRRDIYMPELIIGDWVVFDEMGAYTIAAASPFNGFKLPKLKYQISGRVMAVLKATKDWPALKKLLVSPESSAEHQQMGCSSSSLSYSGSFGNSENHLHPTPPDTEPGDRIEPCMKNGKISYIQVH

SEQ ID NO: 202448 - protein, 439 aa, Zea mays
  unsure (1)..(439): unsure at all Xaa locations
  Clone ID: MRT4577_116223C.1.pep
MAVAAAARLLLLRLVVLALLAAAQQVVGKSAVLSLRELDGRRRSAATTDTRSSRYYVDAMLAETLGEHKKAGAATSVLELKRHSLTAIPEDPVARDRYLRRLLAADESRANSFQPRRNKDRASASTQSASAEVPLTSGIRLQTLNYVTTISLGGSSGSPAANFTVIVDTGSDLTWVQCKPCSACYAQRDPLFDPAGSATYAAVRCNASACADSLRAATGTPGSCGSTGAGNEKCYYALAYGDGSFSRGVLATDTVALGGASLGGFVFGCGLSNRGLFGGTAGLMGLGRTELSLVSQTASRYGGVGAYCLPAATSGDASGSLSLGGGDDAASSYRNTTPVAYTRMIADPAQPPFYFLNVTGAAVGGTALAAQGLGASNVLIDSGTVITRLAPSVYRAVRAEFMRQFGAAGYPAAPGFSILDTCYDLTXHDEGEVPXLXLR

SEQ ID NO: 202449 - protein, 101 aa, Zea mays
  unsure (1)..(101): unsure at all Xaa locations
  Clone ID: MRT4577_116224C.1.pep
LPSSSQVFHFPVSGGYVVVFGTDGLFDNLYNNEISGVIVXSLMVGLEPXVASQKIADLARQRATDKNRQSPFASAVQEAVYRYYCGKLDYITXVVSYVKTA

SEQ ID NO: 202450 - protein, 124 aa, Zea mays
  unsure (1)..(124): unsure at all Xaa locations
  Clone ID: MRT4577_116225C.1.pep
GPTDHLTHLLPHLSXVPAAITAAIAGGIVRAVADAPGTFPVXVXLGGELGEGTGAWTRAXLRPRLKPRVAARLAANQEDTEALTLASALITGVRRVDGRLLVVDVDLDVSQLESSLHNLPRDQA

SEQ ID NO: 202451 - protein, 92 aa, Zea mays
  Clone ID: MRT4577_116226C.1.pep
AKKSFGRGKTCKRILHISGRGRAITPLNQEERGGKTGGRVASGHVETPEGLQIHHGKGAKKKIYPGAKTGEKPLQGGGGGNLKQGFKKPEPG

SEQ ID NO: 202452 - protein, 74 aa, Zea mays
  unsure (1)..(74): unsure at all Xaa locations
  Clone ID: MRT4577_116227C.1.pep
VYNGKTXNQVEXKXEMXGNXLXEFSFSXKPVKXGRPXIGXTHXSRFXPLKXAGTRLFXIPXHFVLFHSXSRIQS

SEQ ID NO: 202453 - protein, 103 aa, Zea mays
  Clone ID: MRT4577_116228C.1.pep
CSSSSSSAPEATNALCCICWCLLSTCYRRIHVICQDKPPWPCYSSAVLCGWRQRYMLVPVPMVATKSHMFGLLVALVVACCLQLFSHAPLSCAWATVSADAFG

SEQ ID NO: 202454 - protein, 88 aa, Zea mays
  Clone ID: MRT4577_116229C.1.pep
PAEFPFAHRPRSFYPNPPTWRADLKVCRERTQRYRKDVADNNITNDVNRGHSRYVLQNTHSVTGSRNMIQCPTHEHSVARTLWQAEDA

SEQ ID NO: 202455 - protein, 197 aa, Zea mays
  unsure (1)..(197): unsure at all Xaa locations
  Clone ID: MRT4577_11622C.1.pep
EQDERRLTLDELLSYMLVQVMIFSSIVYPMIGFQVTASKFFWFFLYQVMSFMYYTLYGMMTVALTPNIEIAMGLSFLIFIFWNVFSGFIIVRXNPPSESADELSKFAXMMPVWWRWVYWADPAAWTVYGLMFSQLADRTEQILVPGLGEQTVREFLEGYLGLQDRYFVLVTCLHLAIIGLFVFLFFLAIKHLNFQRR

SEQ ID NO: 202456 - protein, 98 aa, Zea mays
  Clone ID: MRT4577_116230C.1.pep
FFFFLLFYAHKLGRALFLYKKIVTNIHQQINGELRHKLSRQKWNKLLGNTSMYDQFAGVTSLAQDDQCMIHNPPIMNQLGKIHSGPRVLFRSPSVPLP

SEQ ID NO: 202457 - protein, 207 aa, Zea mays
  unsure (1)..(207): unsure at all Xaa locations
  Clone ID: MRT4577_116231C.1.pep
NRGRALYHDLNAYRALFDDXRDGKSYSTNLAFTPPEYMRTGRITPESVIYSFGTLLIDVLSGKHIPPSHALDLIRDRNFNMLLDSCLEGQFSNEEGTEMVRLASRCLHYEPRERPNVRSLVQVLTPLQRDVETPSYVLMGIPRGGASSTEPLNLSPLAEACSRKDLTAIHEILEKTGYKDDEGTANELSFQMWTNHMQDTLNSKKKG

SEQ ID NO: 202458 - protein, 106 aa, Zea mays
  Clone ID: MRT4577_116232C.1.pep
ANKRTVKEALVNRKWISDIKGALTVRVLVDYLNLWESLSGIELQPNIRDKHVFSLAADGKYTAKAAYNGLFLGSASFDHYKRIWRSWAPSKCRFFMWLVAHNRCWT

SEQ ID NO: 202459 - protein, 329 aa, Zea mays
  Clone ID: MRT4577_116233C.1.pep
MGACVSKAACCCRQPHNGVTNERTDTVTEDEEAYDLPAFQEFTFEQLRLATSGFAVENIVSEQGEKAPNVVYKGKLDAQRRIAVKRFNRSAWPDPRQFLEEARSVGLLRSKRLANLLGCCCEGDERLLVAEYMPNDTLAKHLFHWESQSMKWTMRLRVVLCLAEALEYCTNRGRALYHDLNAYRALFDDDCNPRLSCFGLMKNSRDGKSYSTNLAFTPPEYMRTGRITPESVIYSFGTLLIDVLSGKHIPPSHALDLIRDRNFNMLLDSCLEGQFSNEEGTEMVRLASRCLHYEPRERPNVRSLVQVLTPLQRDVETPSYVLMGIPRGG

SEQ ID NO: 202460 - protein, 264 aa, Zea mays
  Clone ID: MRT4577_116234C.1.pep
MLRETNLSPPSHRAVLALAAAPLPRLPPAPAALSPAPPAMGLLTSAELNYLVFRYLQESGFIHAAFTLGYEAGIHKCGIDGNAVPPGALITIVQKGLQYIELEASSDENYDEVERDFALLEPLEIITKDVEELQQIVKRRKIERSQTELEKDKGKEKERNEEHERRPCGEREREQHEKEKEQVRDKDKSEKDRDHDKEKEKERERQHAERTDKVKHEDDSLVGAGPTPMDVSTTVQEISNTDVTVLERHSSEVFACPWSQTSLF

SEQ ID NO: 202461 - protein, 451 aa, Zea mays
  Clone ID: MRT4577_116235C.1.pep
MGVCVSKAASSSCCCCCCREPHNGVTNDRTDAVTDDEEAYALPAFQEFTFEQLRLATSGFAVENIVSEQGEKAPNVVYKGKLHAQRRVAVKRFNRSAWPDPRQFLEEARSVGLLRSKRLANLLGCCCEGDERLLVAEYMPNDTLAKHLFHWESQSMKWTMRLRVVLCLAEALEYCTNRGRALYHDLNAYRALFDDDCNPRLSCFGLMKNSRDGKSYSTNLAFTPPEYMRTGRITPESVIHSFGTLLIDVLSGKHIPPSHALDLIRDRNFNMLLDSCLEGQFSNEEGAEMVRLASRCLHYEPRERPNVRSLVQVLTPLQRDVETPSYVLMGVPRGGASSIQPLHLSPLAEACSRKDLTAIHEILEKTGYKDDEGTANELSFQMWTNQMQDTLNSKKKGDNAFRQKDFTTAIDCYSQFIEVGTMVSPTIYARRCLSYLMNDMPQEALNDAVHA

SEQ ID NO: 202462 - protein, 88 aa, Zea mays
  Clone ID: MRT4577_116236C.1.pep
FRMSVRVCRGAVSRTSSRVVRECCACCSHALSCAVRVCRAPCRVPFARIARYPRAKSFVSARCAHRVCTSCVLNSSRLESLIFIKLLA

SEQ ID NO: 202463 - protein, 107 aa, Zea mays
  Clone ID: MRT4577_116237C.1.pep
SRHRGPHVTSYPTLHQTTRCKKGRLAHTRDGMDLEWRPPACLCRLACGQSRHGMAWGSEPAFSPSPISDETALCRHAASHQPRRRRRWEQSRAEEKNIGGWVGAAFR

SEQ ID NO: 202464 - protein, 68 aa, Zea mays
  Clone ID: MRT4577_116238C.1.pep
TSRRGVYGKDGVWTPRRSVRTSLLPGKKLDRAPPTERSLVLKGSSGDDLCTRQEERCNLQCHPLYGEA

SEQ ID NO: 202465 - protein, 43 aa, Zea mays
  Clone ID: MRT4577_116239C.1.pep
IYKVIDHLLIEKILYGLANKKKSVNGFVNLNVNMGGVLCYLLL

SEQ ID NO: 202466 - protein, 712 aa, Zea mays
  Clone ID: MRT4577_11623C.1.pep
MPRTKNASASGGGDDEDPRRPFRQVKGKTVYLEQQEGRKKRRTDREARAAAAAAAAAAQAALGDQPHVPSDQIAFRARRLTSRSRSSTHTSASTPPPTLSAPVTPISPSTSTAIPTTSTTPASTASPAPAPASAPPVPPPRFRERDETEVRPLVSDPRLFDLQRATAARVRRFRYVPVESWLPAQRDPAAGVLFSTRIQESFFRAQMSAQIALRVHRLLDLPAFLLAAGAESEAHLTYLPGLLSLLTISGRYVEEWVRVFYASVWIDPDHHWMRFRFEREDVTITASQIRQLFGFPESTTRLHSLCYGTSDPPRRPHGGVAPGTAHVAALFRPPFTDGSRRSPADFTTAAKYLYELVRRTLLPRMGYREATTHIQLWLLGALVSHSEFDVVDFLICEIEDTVLDGIRARRQLPYAHYLCHIFAQLIQPPRFQSTLEASRLVFGSYRPAPEIPVPASASVFDSQAEDAALRQLDTQGTAADDDDDDDFGVPPPPPPPMPPRSHDHEAGSSSAAPATPQAMDPALASILQTLTQQQAHLAAEQARLSDRMLSMFQSMQDRQDALQQQLIQDRAENRAFMALMLQHSGISAPPVQSAPPPPLHAPVVPSILSGPPTGTSPLRPVTLAFTSPALSSICPQPSVPPASVVTTTAVAVSVTAFVPVAPAARPPSESVPAPASTADPGSETDSDPPSAFALLPRPRPDAPPPPPPASDV

SEQ ID NO: 202467 - protein, 81 aa, Zea mays
  Clone ID: MRT4577_116240C.1.pep
FTGVAAPTRSDTERCSSAITVLLHRYLRIRQDYPRISVLPTPHERCSSNGLECQCWRMPRYILTSAYFRCGELGEYLVVYD

SEQ ID NO: 202468 - protein, 118 aa, Zea mays
  Clone ID: MRT4577_116241C.1.pep
MLEYTGIILMLFMARFEHMDLPSLPLRDSLMSCFSWHELNDCVTKKKKKKKKKKKKKKKKKKKKKKKKKKKKKKKTKKKKKKKKKKIFFSPPGGPPFFFFFFRGGPPPQKKKPPPPFK

SEQ ID NO: 202469 - protein, 677 aa, Zea mays
  unsure (1)..(677): unsure at all Xaa locations
  Clone ID: MRT4577_116242C.1.pep
MRPERPLPPLPPSQETEEGVGAPGMDVPTRLPDPVASPILRHSSANSMRRTRSLRSLMADSPSVTFAANLRSGSKAESTASSLESFRFQRDGSASGTPAVFSRVSTRRSASERAGSQRDLRDEDARFVYINDADRTNAPPAGLPDNSIHTTKYSVVTFLPRNLYEQFHRVAYLYFLVLVALNMVPQLGVFTPAASVLPLAFVLGVTAVKDAYEDWRRHRSDRNENNRTASVLVGGVFVPKRWKEVQVGEVLRVVANETLPCDMVLLSTSDPTGVAYVQTINLDGESNLKTRYAKQETMPTPPEALAGVIKCEKPNRNIYGFLATVDLDGRRAVSLGPSNIVLRGCELKNTTWAIGVAVYTGRDTKVMLNSSGAPSKRSRLETRMNRETIIFFFFLKKLXSIHSSLGMKQIHEDNTQGLYYEYXDQKNNXGFKKYXWIKLMCLINHRIRCDIWIHPIQIQIKFXGIYFLVTEXKAALSARYSLLSCRLPTCHEETILFFIFKNKXNKNTXREKQLQCRCXGAKFSEREVLXCVAPSGEDGVALRPKTAVKTDPELVALLKECGGGGASADRARDFLLTLATCNTIVPIVVDDDDDDDSAAKAVVPIVVDDEGEDSAAAAGRLLEYQGESPDEQALVYAAAAYGYTLVERTSGHVTVDVLGSRQREGNPASTVLYIIIG

SEQ ID NO: 202470 - protein, 286 aa, Zea mays
  unsure (1)..(286): unsure at all Xaa locations
  Clone ID: MRT4577_116243C.1.pep
SRPASAANTERFENRLKKPTTFLCKHKFRNELPDPSAQLKWLPLNKDKDRYTKYRISSLEKNYLPKMIVPEDLGIPLDLLDMTVYNPPAAQLPLAPEDEELLRDDEVLTPVKPEGIRKKERPTDKGMSWLVKTQYISPLSTDAAKMSITEKQAKERRESGEGRDNVLENLNDRQKRIKAIAESFKAAKSRPVHQTKRGMEPEFVLPLVPDFDRYNDPFVMVNFDGDPTADSEQYNKLERSVRDECESQAXDESFXVSGSDPAKXREILAYMXSSPHELVKDLDDEN

SEQ ID NO: 202471 - protein, 45 aa, Zea mays
  Clone ID: MRT4577_116244C.1.pep
KKFRFLSLINHSLYSSSLFFFLASILGSINHTYNFFKKDVCYGWK

SEQ ID NO: 202472 - protein, 176 aa, Zea mays
  Clone ID: MRT4577_116245C.1.pep
SWPAIIDALSCTLMTYTILQRCRSLQLTLKLLTSQLTMQRPKKPTHTAVTQFLSTLLSLKENDVPRLYHVPRNPRYDADTAVIEQIVLSVTPTAGVYSLIGYSIENAPPSSTLDSRPPRTLCFLHRPFTLDRRSVRRGTLILSSHTSFDENLTVGWNTVLDERLQMGMDDSVCLPG

SEQ ID NO: 202473 - protein, 87 aa, Zea mays
  unsure (1)..(87): unsure at all Xaa locations
  Clone ID: MRT4577_116246C.1.pep
PXKRGGASVIKCGRAKXXLDPNESSDISMANSRQNIRKLGKDGFIIRKPTKIHSRSRARKMKIAKMKGRHSGNGKRKGTREARLPTK

SEQ ID NO: 202474 - protein, 78 aa, Zea mays
  unsure (1)..(78): unsure at all Xaa locations
  Clone ID: MRT4577_116247C.1.pep
MSSLKERQCKHPLGVTXPGEVSRAKKNGLDYLFHLYEQCRIFLLQVQYLAKLNGHKSPTKVTNQVFLFAKTCCASYIN

SEQ ID NO: 202475 - protein, 143 aa, Zea mays
  unsure (1)..(143): unsure at all Xaa locations
  Clone ID: MRT4577_116248C.1.pep
SVPVTIDVEAPFDLHRYVIGQNGSGIRKMMDEFEVIIXVPAPELLSVFIAITGLAANLDRAKAGLLERVKELQAEQEDRALRSFKLTVTVDPKYHPKIIGRKGAGITHIRLVHDVNIQVPDKDDGNQPQDHITITGYEKNTEA

SEQ ID NO: 202476 - protein, 76 aa, Zea mays
  Clone ID: MRT4577_116249C.1.pep
STGLYVDLLGLCFFYTGMAILLVFVNCGLYDCPAANHVWAVVVHLGFPKSNKYCLVRAAWTQAYTLYSIFVSRPFP

SEQ ID NO: 202477 - protein, 669 aa, Zea mays
  Clone ID: MRT4577_11624C.1.pep
MPRTKNASASGGGDDEDPRRPFRQVKGKTVFLEQQEGRKKRRSDREARAAAAAAAAAAQAALGDQPDVPSDQIAFRARRLASRSRSSTHTSASTPPPTLPAPVTPIAPSTSTSTAIPTTSTTPASTATPAPAPASAPPVPPPRFRERDETEVRPLVSDPRLFDLQRATAARVRRFRYVPVESWLPAQRDPAAGVLFSTRIQESFFRAQMSAQIALRVHRLLDLPAFLLAAGAESEAHLTYLPGLLSFLSISGRYVEEWVRVFYASVWIDPDHHWMRFRFEREDVTITASQIRQLFGFPESTTRLHSLCYGTSDPPRRPHGGIAPGTAHVAALFRPPFTDGSRRSPADFTTAAKYLYELVRRTLLPWMGYREATTHIQLWLLGALVSHSEFDVVDFLICEIEDTVLDGIRARRQLPYAHYLCHIFAQLIQPPRFQSILEASRLVFGSYRPAPEIPVPAYAPVFDSQAEDAALRQFDSQGTAADDDDDDDDFGVPPPPPMPPRSHDHEAGSSRAAPAPPPALDPALASILQTLTQQQQTLTQQQQTLTQQQALLAAEQARLSDRMLSMFQSMQDRQDALQQQLIQDRAENRAFMALMLQHSGISASPVQSAPPSSLHAPSSAFDLVCTPLLLPLRSGRSPWRSLLRSSALSARSRQCHQHLLLPLPLWQYL

SEQ ID NO: 202478 - protein, 102 aa, Zea mays
  Clone ID: MRT4577_116250C.1.pep
KNKKTCFLSKARSPLSRFPPPFFWGAKGMSFPERVCFSPPPPQERHPMGFWPPLWANHAFLFRRHFQDPLYGGQIPPLFRGFSLGGLMGVINAFSTWGRWAL

SEQ ID NO: 202479 - protein, 82 aa, Zea mays
  unsure (1)..(82): unsure at all Xaa locations
  Clone ID: MRT4577_116251C.1.pep
PXRPXXLXXXXXXSXXXXGVVPCVFXVVPPXXLGFXLSXXSFSPWXCCXFXVWXWXXLLALXLLAPXSLALXLCLLXXPPPP

SEQ ID NO: 202480 - protein, 80 aa, Zea mays
  Clone ID: MRT4577_116252C.1.pep
KGLIIENHKITHACNTELNKSMVVCTGSSYVSRAPKATTDKSKGGVASSSLWPTWGPCRPFFSCETMIITFLLLLLSSRL

SEQ ID NO: 202481 - protein, 94 aa, Zea mays
  unsure (1)..(94): unsure at all Xaa locations
  Clone ID: MRT4577_116253C.1.pep
MNRSGVSYAAMGFDLVAGGRNMNTKRTAPNSDDVYLKLLVKLYRFLVRRTKSNFNAVILNTLFMSKTNLPPIFMRRLXKFLERIEKNIAVIVGT

SEQ ID NO: 202482 - protein, 78 aa, Zea mays
  unsure (1)..(78): unsure at all Xaa locations
  Clone ID: MRT4577_116254C.1.pep
IEAFFSIENPPTFKRSPLPYRTEQVPSLRGXCERALARSPEEPLAARHTRIALGLQSAVGAEPGGSGAGYGSQKKTLG

SEQ ID NO: 202483 - protein, 123 aa, Zea mays
  Clone ID: MRT4577_116255C.1.pep
IEHALNSARYSSTQRPHSCLNSSTRELRFGISPKSIKNNVRCELTVVSSLQVGKQQTFVAFALRWCRRKNLKSEASGGCCSPFKKLYICMREEFLPPEFVIIILLHSYNRWSVITTLFLYFNV

SEQ ID NO: 202484 - protein, 77 aa, Zea mays
  Clone ID: MRT4577_116256C.1.pep
MASSRCFENPPVLEPASGGGEVVDDFGGQKAYVSGSAGSKAAVVLISDAFGKYSVPRPPRSWFEAPNLRYAASLTLS

SEQ ID NO: 202485 - protein, 94 aa, Zea mays
  Clone ID: MRT4577_116257C.1.pep
KTRPGPPALHDHPRKLPNFSIHLRTLNLFCKFDKLSLLKKINIRTHFLLIYRPQSLFDNPRLSNNLPIQQEFTLPFISNCKAIKPYDSPLYTLI

SEQ ID NO: 202486 - protein, 46 aa, Zea mays
  Clone ID: MRT4577_116258C.1.pep
SCNYCLFNIFLDIVITTGKHLILVGLKPTGISLALVRVRRQLGETA

SEQ ID NO: 202487 - protein, 85 aa, Zea mays
  Clone ID: MRT4577_116259C.1.pep
RERPPSRYYIKKRLKHGPGSWLRKSLNPGPPSLAGCHRPLCNGSARGRRARCNPGAGSAQRGNFFNQARNLPPTGIEPRTWVDAA

SEQ ID NO: 202488 - protein, 55 aa, Zea mays
  Clone ID: MRT4577_11625C.1.pep
RSSSPPPPHTEKCYLQFPIMTAFRIYHLVIIVFFEGLISPQVYYRLKPFLAQLYF

SEQ ID NO: 202489 - protein, 59 aa, Zea mays
  Clone ID: MRT4577_116260C.1.pep
VGGIKAEGGERVYKNGGRIFIGLLRENKIGGQFKLLTKRCLWYDPNNENSSQKNVSTVS

SEQ ID NO: 202490 - protein, 271 aa, Zea mays
  Clone ID: MRT4577_116261C.1.pep
MAHRTLNSACPVQHWTVPVPQKTEAPTAEPPLIWRDRLGWVLFSSGVTPDITTPISVKLRLALWGLLPLHGGLIVGDGVVVYPYVHEKDVRVVEGRLYLHWIHDRAHGSSYRGISRSRSSSPKNNEHLGPFFLQLIQVQPRVGEVDNGSYCIGTAMTVGRGGGIGATTRLGGAAAAGHDTQMSRAPKCRCGPHEAQFVTEGGLDMTVSRAALDLNKGFFSVGAMVWDNGASFPTLATWCRAPLWSMMRERHPKWKTSPMMKLKTVLKTMAM

SEQ ID NO: 202491 - protein, 59 aa, Zea mays
  Clone ID: MRT4577_116262C.1.pep
QILLFNQLFTLNTANYLQLQQSPCNQITTVYSITLQLLTSNQLITLNRFAAFADQILLA

SEQ ID NO: 202492 - protein, 103 aa, Zea mays
  Clone ID: MRT4577_116263C.1.pep
ATWQPAAEKQLRSVAPRHQQKQPCRHRPLLRRQLHQPRRRRPLPPHLLPVAALIRTLVATQPRRKCGTWPRKRRSRRPFDFPRFLGLNERPPSGPSPLTAPPR

SEQ ID NO: 202493 - protein, 43 aa, Zea mays
  Clone ID: MRT4577_116264C.1.pep
HEKQTRYFTKSEVPELFSLPRQGLDVSLTCKPLQEEHGQQVVM

SEQ ID NO: 202494 - protein, 144 aa, Zea mays
  Clone ID: MRT4577_116265C.1.pep
PRVRRRIEEVVVAQSAVHRSAASVDFSAGGSPLLPPTVNAAPLHAHFEAVAADTVGVGAVRGAMEPCMGSEDFASFSAAVPASHFYFVGIGNEAIGAVHAAHSPHFLVDDGALPYGAAMHANLAIEYLRNHAIANRSVGPHDEL

SEQ ID NO: 202495 - protein, 50 aa, Zea mays
  Clone ID: MRT4577_116266C.1.pep
RRRWAPTSSPGSPRCYDVVLYEFLLLLLLSIIHLAAREPNSITWEKVKRR

SEQ ID NO: 202496 - protein, 46 aa, Zea mays
  Clone ID: MRT4577_116267C.1.pep
QGTGSSDPGAGAGASASSGAGPSPGDNAFACSGSSAGTHASASASA

SEQ ID NO: 202497 - protein, 156 aa, Zea mays
  Clone ID: MRT4577_116268C.1.pep
AHPREEGGRTFRLLSDLREVRRGFHGDVGGCKAGAPDRGGGRGTDKGLTTRTRTAGMDELALSNRPNALVPPRRRLAPSPCLAHADAPREQGRPRRATAQPGDGARRAMARRVQNARLGGGAAVRRRGWAAVAENGERKNEEERERSLCMTRGSRS

SEQ ID NO: 202498 - protein, 379 aa, Zea mays
  Clone ID: MRT4577_116269C.1.pep
TFGSNLKLLDLTGNLFSQWQDIFSLCQALASLEVLNLTNNTMENDVVETPMLENIRILVLNNCGVTWELVEKIKVSFSCISELHLMSNRLNMIMTLDGKFVQGFNTLRLLNLEDNHIDSWDEIVKLSYLRSLEQLHLNKNRLKHVKYPSNLSPDGPIDDAAAVPFENLQVLLLGSNDIDDFSSVDSLNLFPSLRDVRLSDNPVADPAKGGAPRFVLVARLGKVGILNGSEISPRERRESEIRYVRLVMGKIESNDQEEIRRLHPRFAELKSFHGIEDEKPTSSISGPQKMASGLISITLKCVGPSMGEKQPLTKKLPATTTVGKLKSLCESFFKLKDIKVKLFVEEEGCPLPQPVEEDTASLMELGIGSGATIVVDEES

SEQ ID NO: 202499 - protein, 53 aa, Zea mays
  unsure (1)..(53): unsure at all Xaa locations
  Clone ID: MRT4577_11626C.1.pep
HSGAEANNWEGQIGAETYSNITTSMAKRGIVLTRAIKFWGNAQRFIPKSXXGL

SEQ ID NO: 202500 - protein, 158 aa, Zea mays
  Clone ID: MRT4577_116270C.1.pep
PRGRPGLGIQHFLCQSYARTITTTVLDAVFPPACSGRNPHSLWSFPNERTRAGERSRKSPQDPPYKAMPRSSTGELPPPRWIRIGHPSYKTGKNAQRECFVALVYFTDLMDNLDADDLDLNDNASRDNNKTLHPTTQIQIGDGNDEAALPIAEDRDHH

SEQ ID NO: 202501 - protein, 196 aa, Zea mays
  Clone ID: MRT4577_116271C.1.pep
IALHRAWRRPGGTPLLRAITPLDRPPPCPCPTAGHERPPNHGGGGARARLGGGAGAGAGVRAAPAAAVRRRGAARPAVAGDGGVVGRRQAQVRGRRQERPRVPRRRRARPGQPGGGGLQRHHRRARRRARRRRPRRRQRLQRPRRAQQRPARRRRPLKAAARARAPTRGPCVHEEECRGWAWACNLLMDRILGANS

SEQ ID NO: 202502 - protein, 69 aa, Zea mays
  Clone ID: MRT4577_116272C.1.pep
PPRGQHFFLNSSIFPNKAFQSRKGTSPPNQVNGPPNPNFFLFGKNLTAGGGKLTKREKQEFPKDLPLFV

SEQ ID NO: 202503 - protein, 99 aa, Zea mays
  Clone ID: MRT4577_116273C.1.pep
KSTGVYICGYKRNLNSAVAPTKKKVGSLAWMKKAVVSHCSGRVPTPSQCTRGSGNCNASFVLSIQSQGCMRSEHLPSNSLTATPYIGVRCVLKVLPTRA

SEQ ID NO: 202504 - protein, 51 aa, Zea mays
  Clone ID: MRT4577_116274C.1.pep
MRRGRAGGCLISWQIQRKLKQGSTYISTDNDQSNHGKEGIILPTSGPRRTQ

SEQ ID NO: 202505 - protein, 275 aa, Zea mays
  Clone ID: MRT4577_116275C.1.pep
MALEVLPEESNRCVRGCCRSATIPLDLRSASFSLLAPIARGSESTVYEALLGGERAAAKKPVLSTAEDLDKFHYQLQLLCKLDHPGLAKLIAAHAHPPAYLMFFDFFEPPNLAEKIHVEEWIPSIQQVVTMASDLAKALQYLQILGVVHRDIKPANILLDKDLHPYLADFGLAMFQKDIKRVSVENWKSSGKPTGGFHKKNMVGTLIYMAPEILRKDIHTEKSDVYSFAISINELLTGVVPYTDLRAEAQVTRSIGDDDPQAVTAQPEGIELLIS

SEQ ID NO: 202506 - protein, 631 aa, Zea mays
  unsure (1)..(631): unsure at all Xaa locations
  Clone ID: MRT4577_116276C.1.pep
MALEVLPEESNRCVRGCCRSATIPLDLRSASFSLLAPIARGSESTVYEALLGGERAAAKKPVLSTAEDLDKFHYQLQLLCKLDHPGLAKLIAAHAHPPAYLMFFDFFEPPNLAEKIHVEEWIPSIQQVVTMASDLAKALQYLQILGVVHRDIKPANILLDKDLHPYLADFGLAMFQKDIKRVSVENWKSSGKPTGGFHKKNMVGTLIYMAPEILRKDIHTEKSDVYSFAISINELLTGVVPYTDLRAEAXGLRPALALPESGAPPTLLSLIQRCWDPDPEKRPSFEDIIDELNIVQKHIVSNASVPSSPVSKSQNGTIEVHHYQEALNWFNQGELFVKGSSRSDLKNLWSDCFDQSSEYHPTLSWGSFATCGRRETMEDTHFVLPHVSEENDVFAFGIFDGHRGSAAAEFSVRAVPGFLKQFGQGASPTDALSEAFVRTDIAFREELILHRKSKRIIQKDWHPGCTAITALIVRNKLFVANAGDCRAILSRKGKPFLLTKDHVASCPNERERVTKAGTEVKWQIDTWRVGSAALQVTRSIGDDDLKPAVTAQPEVIETALSADDEFLVMASDGLWDVVSNQDVLSIIKDTVKEPGMCSKRLATEAAERGSKDNITVIVVFLRPVSTAERIY

SEQ ID NO: 202507 - protein, 54 aa, Zea mays
  Clone ID: MRT4577_116277C.1.pep
TNPPSAYILLSCIINETTQHHIHRPDAYSLPLLQQQLAFISPIALSHRLRFHRF

SEQ ID NO: 202508 - protein, 142 aa, Zea mays
  unsure (1)..(142): unsure at all Xaa locations
  Clone ID: MRT4577_116278C.1.pep
GVFTASVRMRALTMGLLMDCRRAVSPGLPGTTCRRKMKSIHRPGHAPKCAETSRSSGEPGSPSTPTTTSPGRQEVPRLSHQRSTSTSEKRKLAVFFGHTNTKRPPYGSVLRMDRLSGGYWTDERTESDDTQPYYRTXGHHTA

SEQ ID NO: 202509 - protein, 42 aa, Zea mays
  Clone ID: MRT4577_116279C.1.pep
RKQYVKMSNRICKGYLQVGMAKSIVRWMHYLYISPSSNTLNG

SEQ ID NO: 202510 - protein, 82 aa, Zea mays
  Clone ID: MRT4577_11627C.1.pep
MHSLASSPLLVFCGNRFPQSVILHVSSIQMLLQLLFSTVTVTCITARSPFAECVTSFSKGTVVTIVLRVVAEKRCIFPEEIF

SEQ ID NO: 202511 - protein, 410 aa, Zea mays
  Clone ID: MRT4577_116280C.1.pep
GSTRRRPAGFAPLRPVLANLQEVFLGTKLAVLFPAVPLAIAAQCAHFGQVWVFTLSLLGLIPLAERVSFLTEQIAIYTGPTVGGLLNATCGNATELIIALFALMGGQIEVVKCSLLGSVLSNLLLVLGTSLFCGGVVNLGSDQPYDRTQADVSTGLLILGVLCQSLPLLLRYAVGAGEHSVAAPTTVLDLSRACSVVMLLAYVAYLFFQLKTHAQLFEPQEVDDGCEAEEDEQAVIGFASGLFWLAFNTVLIAILSEYVVGTIEPTSKSWGLSVSFISIILLPIVGNAAEHAGAIIFALKNKLDITLGVALGSATQISMFVVPLSVIVAWIAGIQMDLDFKLIETGSLFVSVIVTAFTLQDGSSHYLKGILLLLCYIVIGACFFVTRQPASNNNGAGLSLPTGTLSAQAA

SEQ ID NO: 202512 - protein, 53 aa, Zea mays
  Clone ID: MRT4577_116281C.1.pep
GKGLVLSLAPNRQPELHFVRENKINPGKPPGKSDYLLGPIISKGDGTCGTPSL

SEQ ID NO: 202513 - protein, 462 aa, Zea mays
  Clone ID: MRT4577_116282C.1.pep
MDRLPESTRSMRKYASEAGGLRAARQGPHGRSLTARTAHSMSTTALRTKSKSAASLLRRVPFAPLRPVLANLQEVFLGTKLAVLFPAVPLAIAAQCAHFGQVWVFTLSLLGLIPLAERVSFLTEQIAIYTGPTVGGLLNATCGNATELIIALFALMGGQIEVVKCSLLGSVLSNLLLVLGTSLFCGGVVNLGSDQPYDRTQADVSTGLLILGVLCQSLPLMLRYAVGAGEHSVAAATTVLDLSRACSVVMLLAYVAYLFFQLKTHAQLFEPQEVDDGCEAEEDEQAVIGFASGFFWLAFNTVLIAILSEYVVGTIEPTSKSWGLSVSFISIILLPIVGNAAEHAGAIIFALKNKLDITLGVALGSATQISMFVVPLSVIVAWIAGIQMDLDFKLIETGSLFVSVIVTAFTLQDGSSHYLKGILLLLCYIVIGACFFVTRQPASNNNGAGLSLPTGTLSAQAA

SEQ ID NO: 202514 - protein, 69 aa, Zea mays
  Clone ID: MRT4577_116283C.1.pep
RVRPRRGPRRRAVLPDRARLQRHFRPRQQGQPLPLARLRRLPAQVHLRARCRPVYHHRDAFRHRQERMG

SEQ ID NO: 202515 - protein, 82 aa, Zea mays
  Clone ID: MRT4577_116284C.1.pep
LSPLLVMKQLSVCQPLYTMGEWVLFLRFRRFFHSSPRLLYSLPLSSFGALFVLGDLGSFFCFLSPAFFCPQSVLLTDSPYIR

SEQ ID NO: 202516 - protein, 73 aa, Zea mays
  Clone ID: MRT4577_116285C.1.pep
VAHMPSLCRCQCSGSTVVFIRGGVIIQCTAPKEHKLDPLAIGIIDSQGSTTAKGPRHVLSHSPGPCGSRSWAL

SEQ ID NO: 202517 - protein, 63 aa, Zea mays
  Clone ID: MRT4577_116286C.1.pep
AVRGRLYNAAFYFINGSMPDAGGRAVTVEGMTDTGEQVGHKPGCECHWSSGVVKQREAVGFTA

SEQ ID NO: 202518 - protein, 105 aa, Zea mays
  unsure (1)..(105): unsure at all Xaa locations
  Clone ID: MRT4577_116287C.1.pep
ACLGSNPTEGVVLFAATISTGESESVKDAISQIAGDAQEHNWTVTATXDLRLXLANHDPQKDKRNTGSDTWPHIPSAKMKVXILGDAHHLPDAERMGLDYTDVAA

SEQ ID NO: 202519 - protein, 71 aa, Zea mays
  Clone ID: MRT4577_116288C.1.pep
NVSLKVAYYIAEALQYCNTEGRPLYHDLNSYRALFDEVIVALVFTFPYNLRIMWLCLKTYTSTVLGSSYHS

SEQ ID NO: 202520 - protein, 113 aa, Zea mays
  Clone ID: MRT4577_116289C.1.pep
IPGRRRIRSRQPLQTLRLSIIEGNGMAERLFLISCEEHYETFSPILEKGASVLTVELLLNRISIYKLEFEMQPLFIDRVKQTRSSRLLNDTVHGRFVHVPNRTSAYSVQDQCI

SEQ ID NO: 202521 - protein, 101 aa, Zea mays
  unsure (1)..(101): unsure at all Xaa locations
  Clone ID: MRT4577_11628C.1.pep
PFVRPRVHPRERKHVQTGLAYIWHITASNPFVDLKNEYKGIFXQEDIILFLQNGIILXDCDTSQNCYIYLYGQGQEKLSTTEPYFDKLGDAMVSWIEAWDE

SEQ ID NO: 202522 - protein, 119 aa, Zea mays
  unsure (1)..(119): unsure at all Xaa locations
  Clone ID: MRT4577_116290C.1.pep
LRTRQGRHRPSGRLAFQSFDRLCYPARPRPSPPTRAHSNSSPIXHAACGWQAKRLRHSASAAGAGAARVRWGFTALSLMHLSGRFCAAARGHLAVHHSPHARRASRRMAAPAPACGGKA

SEQ ID NO: 202523 - protein, 157 aa, Zea mays
  unsure (1)..(157): unsure at all Xaa locations
  Clone ID: MRT4577_116291C.1.pep
PPPGPPXNPPLAAGWPFPXAPGPPGFPSGLRPVGPPPXCELAPSLGPPALPSPLPAPPPXAPRPAPPFPPPAPRALPPPRSPPPPSGGGXRPPXPAPPFPRPPPRPVFRPAWXPPAPSFPSRPPVVQPXPPRPPRPFPFFSLPGPPSPPPSVLLRSD

SEQ ID NO: 202524 - protein, 57 aa, Zea mays
  Clone ID: MRT4577_116292C.1.pep
GVAPGPGPGGWRLAPCRSAAEGFRSEKVCFHRGHFLAYLGRGVRKTLLAARAHAAVN

SEQ ID NO: 202525 - protein, 43 aa, Zea mays
  Clone ID: MRT4577_116293C.1.pep
AAQSTLLSRPTFYILVPASSPIAPWSSRNRLPAPLRWFFFFLP

SEQ ID NO: 202526 - protein, 197 aa, Zea mays
  unsure (1)..(197): unsure at all Xaa locations
  Clone ID: MRT4577_116294C.1.pep
GKQLEKGPPPPGYNIQKKRPPPLFSPPRGGNKIFFKTLPGKTKTLEVXSSAPLPNFKAKIPAKEGIPPDQKGFIFPGKQLEEGRPLTDFNIPKESPPPPLPRSRGGQKIKGRLNPPRARVVWGPPPKEGGKKTPVRVINRGKVGLKKDPFFCVCGPPPTMAKPEKVCCFKKKKKKKKKKKKKKKKKKKKKKKKKKKK

SEQ ID NO: 202527 - protein, 335 aa, Zea mays
  unsure (1)..(335): unsure at all Xaa locations
  Clone ID: MRT4577_116295C.1.pep
LGTSRPAGQIPASFRKLMHLQVLDLRXTCVEELPFEITTLTNLRHLHVAAVHDLQERSLNCFSATKIPGNICGLKNLQSLHTVSANEDLVSQLGNLTLMRSLTIMNVRQSYIAELWNSLTKMPNLSVLIIFASDMDEILDLRMLRPLPNLKLFWLAGKMKGGVLPSIFNKFEKLTQLKMDWSGLNKDPISSFSYMLTLVDVWFFGAYCGEYLSFCAGWFPNLKSLHIADMEHLTRIEIEDGTMMGLHHLELVGLRNMRLVPKGIKYIRTLRQMILTDMPKELVESLRGSDAHIVQHVPNIHIFDSSDPEAVNNFIFWPHLAKKYGSGVTKYDPRK

SEQ ID NO: 202528 - protein, 170 aa, Zea mays
  unsure (1)..(170): unsure at all Xaa locations
  Clone ID: MRT4577_116296C.1.pep
MFMASIPETTFAAILFVLFCAPTATADNNDLPXYVIFLRAYYDTWRAXSVTTVTXLSPTANMRLSCQHFSTAKIKRSIYSMTDWNATYTIDLKDSHQEDICEVFLSESPRKDCXDQMQAHRDRAGVLLTRNVGISDNLRPANPLGYLKDVTLPICASLLKQLDSXDDDDQ

SEQ ID NO: 202529 - protein, 68 aa, Zea mays
  Clone ID: MRT4577_116297C.1.pep
KKKKKKKKKIILKNKKKKKIEGCSFSKVRSFLSHTYNLITQFYWATYINFTTRQTTTSSLVIPFLYIT

SEQ ID NO: 202530 - protein, 90 aa, Zea mays
  unsure (1)..(90): unsure at all Xaa locations
  Clone ID: MRT4577_116298C.1.pep
PTKPXPWGGAGGQEQGIFRLRLIPSIALPSSNRLNCIVYSPAKLAADSTSPRVYALWGGGRRLKESRSAFSPSQLESLSLSAAVPWSYPR

SEQ ID NO: 202531 - protein, 598 aa, Zea mays
  unsure (1)..(598): unsure at all Xaa locations
  Clone ID: MRT4577_116299C.1.pep
MSIVILDCQSGKFFLLSKGADEAMLPCAYSGQKTKTFVDAVDKYAQLGLRTLCLGWRELEPEEYTKWSQSFKEANSSLNDREWKVAEVCQKLEHSLEILGVSAIEDRLQDGVPETIEILRQSGINFWMLTGDKQSTAIQIALLCNLISSEPKGQLLHINGKTQDEVARSLERVLLTMRXVTSSEPKELAFVVDGWALXLFVHAILKLLLPMQFFRKLAPACSVTPSQPAHLRTSHPRCDXPIMAFDQQLTRNSMAYQNDXKKKMSVELDMLHISVNDXRYCPKRYNEKSYLILYSCXKMGSXFMFSMGNKLISPIHQMQKNKLMSQSXKKKKKTVSLMAYNVFYTSIPVLTTVLDKDLSEKTVMQNPEILLYCQAGRLLNPSTFAGWFGRSLYHAIIIFLITIHAYANEKSEMEELSMVALSGSIWLQAFVVTLEMNSFTSVQLLAIWGNLIAFYVLNFFISSIPTSGMYTIMFGLCRQPSYWITLVLISGVGMGPVLALKYFRYTYRPSVINILQKAERSRGPMYTLLNLESQLRSDKDSMMVAGSTAPAKNKSSVYEPLLSDSPMASRRSLAPASSFDIFQPAHSRTSHPRNIKAN

SEQ ID NO: 202532 - protein, 67 aa, Zea mays
  Clone ID: MRT4577_11629C.1.pep
MDKEPQLFYVITWRIYKPFLVLQKKKKKKKKKKKKKKKKKKKKKKKKKKKKKKKKKKKKKKGGPLPN

SEQ ID NO: 202533 - protein, 76 aa, Zea mays
  Clone ID: MRT4577_1162C.1.pep
PKRPKVSSPSQPPDSHKPKHTEKDLVSELSSSRNPLGPSHGTANPDPPAPRLDEPTKVKPQNKAGSLLGLAYKSSD

SEQ ID NO: 202534 - protein, 73 aa, Zea mays
  Clone ID: MRT4577_116300C.1.pep
GILTSIDILMPVIAQNIPPDSTTFYKVMTQCPGCGSVYTPILDARHTMHYGKFLHFPVLDMDGNLVTVFDVLH

SEQ ID NO: 202535 - protein, 51 aa, Zea mays
  Clone ID: MRT4577_116301C.1.pep
PAALTGQSRSDASLKASAHMSMIWLLVAGGPQQESFHSLFLDLDYFSIHVS

SEQ ID NO: 202536 - protein, 64 aa, Zea mays
  unsure (1)..(64): unsure at all Xaa locations
  Clone ID: MRT4577_116303C.1.pep
LQCNFKPLQNFPQISFHCPSFXNFLTGKTLALPNLTPLQKIPFSQIGLIPKRPPPFPFPKICPP

SEQ ID NO: 202537 - protein, 75 aa, Zea mays
  Clone ID: MRT4577_116304C.1.pep
LRGERLQHFISRPSRVSPCSPLLRALLLFLQPRPSPLLPQLAQQPRSFPWRRPLPCSHDWLPSMVAMRRSFSLLH

SEQ ID NO: 202538 - protein, 56 aa, Zea mays
  unsure (1)..(56): unsure at all Xaa locations
  Clone ID: MRT4577_116305C.1.pep
FLPGSVTIKGRILEISLTLNSTTICVYSTQFDLCAKLLQIMGICFSLXKLLNLYFS

SEQ ID NO: 202539 - protein, 98 aa, Zea mays
  Clone ID: MRT4577_116306C.1.pep
GPQNTRWGGVHFSDKKTRTCPPLGWPRRTPGPQVGFTHPGANSGARGAPGGPLQHKTLKPSSFFLLGDTGSMPGWPLPPYLGAFFGGQPPVKELCLFN

SEQ ID NO: 202540 - protein, 122 aa, Zea mays
  unsure (1)..(122): unsure at all Xaa locations
  Clone ID: MRT4577_116307C.1.pep
RPFFPTSXTLLRXTEINNFTVDGRSSQPQYRDTKTTQVNNFTVDTPVARPSNKKDVRFTEEIVETTKVDNNKSKMGYYDDDAGQYNSFRAGAHKLGDRIAHGGRRDIEIDIHEGSCPSADCL

SEQ ID NO: 202541 - protein, 84 aa, Zea mays
  Clone ID: MRT4577_116308C.1.pep
NKIPFDPIVITLKNNLNFFKKQIFTKNKLFIIFIKWYLLKLPGSFHNPPLFPKIFIKNLQKLFTKKPFNPTPFQKKKILSPLIY

SEQ ID NO: 202542 - protein, 86 aa, Zea mays
  Clone ID: MRT4577_116309C.1.pep
EDGNFGCIFMNELLHCSASSRALVHRRRCLVLAGFTLKPAPATAAGLYCTVVDCFCTKMQDQILHPKKKKKKKEGRREEREKKKGG

SEQ ID NO: 202543 - protein, 72 aa, Zea mays
  Clone ID: MRT4577_11630C.1.pep
IGVPKKSGGVKNLTYSNQNNQKKNFFTPPTQQNQPKHFNPHHTKKKLFHNTYILKHILIIPSKKNHFFRPYK

SEQ ID NO: 202544 - protein, 98 aa, Zea mays
  Clone ID: MRT4577_116310C.1.pep
TGKHYWPSDQDPTSTMKTKSYTPLAVDLPPTDTISRLNRSRPNLIAAAHTPSNGLHGFPQRSTPARRRRPARSAEHAGEATNRPLPSAKPRFTFPTRN

SEQ ID NO: 202545 - protein, 194 aa, Zea mays
  unsure (1)..(194): unsure at all Xaa locations
  Clone ID: MRT4577_116311C.1.pep
MASTSCCLLHQSTARLGASPRLAAAPPRSAQLLVCKARKQEAAADQSDVSRRAALALLAGVTAAAGAKVGPAAAAYGEAVYVFGKPKASTEYIAYSGDGFKLLIPSKWNPSKEREFPGQVLRYEDNFDANSNVSVIIQPTSKKTIADYGSPEEFLSQVDYLLGRQAYRRKTDXSEGGFQTDAVGPANVLESSPP

SEQ ID NO: 202546 - protein, 113 aa, Zea mays
  Clone ID: MRT4577_116312C.1.pep
MDVSVACRKAKKGAVSRKAGWPTKKSVSRSYRAGLQFPVSRVWRYLKKGRYAQRVRTGAPVYLVDVLEYLADEVLVLDGYSARDNMKTRMIPRHVLLVIRNDEELSKLLAGVT

SEQ ID NO: 202547 - protein, 93 aa, Zea mays
  Clone ID: MRT4577_116313C.1.pep
REWWHPRTLFSPTSPDPGGAKPWRPPPAASSTSQPPASARRRAWPPPRRAAPSCSSTVSDGKLYICKAQAGDKRWFKGARKGAEKAASSFSVA

SEQ ID NO: 202548 - protein, 75 aa, Zea mays
  Clone ID: MRT4577_116314C.1.pep
CHPHSCLLPGRTGVRQPKQEKQAALEVGIHGVHQLITATVSDGKLYICKAQAGDKRWFKGARKGVEKAAASFSVA

SEQ ID NO: 202549 - protein, 149 aa, Zea mays
  Clone ID: MRT4577_116315C.1.pep
MASTSCFLHQSTARVAAPSPRLAAPPRSAQLFVCKAQKQQAAAAESDVSRRAALALLAGVAAVGAKASPAAAAYGEAANVFGKTKKNTDFISYVGDGFKLLIPSKWNPSKEREFPGQVLRYEDNFDANSNVSVIIQPTSKKAAASFSVA

SEQ ID NO: 202550 - protein, 98 aa, Zea mays
  Clone ID: MRT4577_116316C.1.pep
RTRGGEAANVFGKPKASTECIAYSGDGFKLLIPSKWNPSKEREFPGQVLRYEDNFDANSNVSVIIQPTSKKTIADYGSPEEFLSQVDYLLGRQAYGYK

SEQ ID NO: 202551 - protein, 128 aa, Zea mays
  unsure (1)..(128): unsure at all Xaa locations
  Clone ID: MRT4577_116317C.1.pep
DWCPTGFKCGINYQPPSVVPGGVLAKVQRAVCMISNSTSVVEVFSRIDHKFHLMYAKRAFVQWYVGEGMEEGVFSEXRKYLPALKKDSKKVGSKFNKGKAATKGAKYYPLSWPGVVGLVSPCYPCYLP

SEQ ID NO: 202552 - protein, 262 aa, Zea mays
  unsure (1)..(262): unsure at all Xaa locations
  Clone ID: MRT4577_116318C.1.pep
VPLLRRRPRLGHGRPLLHQSTARLGASPRLAAAPPRSAQLLVCKARKQEAAADQSDVSRRAALALLAGVTAAAGAKVGPAAAAYGEAANVFGKPKASTEYIAYSGDGFKLLIPSKWNPSKEREFPGQVLRYEDNFDANSNVSVIIQPTSKKTIADYGSPEEFLXQVDYLLGRQAYGGKTDSEXVATANVLESSTPVVDGKQYYSITVLTRTADGDEGGKHQLITATVSDGKLYICKAQAGDKWWFKGARKGVEKAAASFSVA

SEQ ID NO: 202553 - protein, 282 aa, Zea mays
  Clone ID: MRT4577_116319C.1.pep
ARVVAPTHTLLPPSPDPGGAKPWRPPSCCLLHQSTARLGASPRLAAAPPRSAQLLVCKARKQEAAADQSDVSRRAALALLAGVTAAAGAKVGPAAAAYGEAANVFGKPKASTEYIAYSGDGFKLLIPSKWNPSKEREFPGQVLRYEDNFDANSNVSVIIQPTSKKTIADYGSPEEFLSQVDYLLGRQAYGGKTDSEGGFETGAVATANVLESSTPVIDGKQYYAVSVLTRTADGDEGGKHQLIADTVSDGKLYICKAQAGDKRWFKGARKGVEKAAFLLSVA

SEQ ID NO: 202554 - protein, 73 aa, Zea mays
  Clone ID: MRT4577_11631C.1.pep
CGTRAGRGNGSLNRLAAAVSSLRENRDLISPSMGEKTAITRPFTLCAFVSRAQAALQPTSRVQTERRRFPCII

SEQ ID NO: 202555 - protein, 260 aa, Zea mays
  Clone ID: MRT4577_116320C.1.pep
MASTSCCLLHQSTARLGASPRLAAAPPRSAQLLVCKARKQDAAADQSDVSRRAALALLAGVTAAAGAKVGPAAAAYGEAANVFGKPKASTEYIAYSGDGFKLLIPSKWNPSKEREFPGQVLRYEDNFDANSNVSVIIQPTSKKTIADYGSPEEFLSQVDYLLGRQAYGGKTDSEGGFETGAVATANVLESSTPVIDGKQYYAVSVLTRTADGDEGGKHQLIAATVSDGKLYICKAQAGDKRWFKGARKGVEKAAASFSVA

SEQ ID NO: 202556 - protein, 261 aa, Zea mays
  unsure (1)..(261): unsure at all Xaa locations
  Clone ID: MRT4577_116321C.1.pep
MASTSCFLHQSTARVAAXRRASPXPPRSAQLFVCKAQKQQAAAAESDVSRRAALALLAGVAAVGAKASPAAAAYGEAANVFGKTKKNTDFISYVGDGFKLLIPSKWNPSKEREFPGQVLRYEDNFDANSNVSVIIQPTSKKAITEYGSPEEFLSQVDYLLGKQAYGGKTDSEGGFETDAVATANVLESSTPVVDGKQYYSITVLTRTADGDEGGKHQLITATVSDGKLYICKAQAGDKRWFKGARKGVETAAASFSVARPT

SEQ ID NO: 202557 - protein, 136 aa, Zea mays
  unsure (1)..(136): unsure at all Xaa locations
  Clone ID: MRT4577_116322C.1.pep
AKCSQASIASLISPHLSPSGAWACEYLSLXRYRIQQAITRGILSVSPSLLQQSSALLXSLTLXVHLLAQQIWAHQRHQLVLENVAAYYQQQKPFQFYQLAALNYAYYLRQHQLXFSQLYAGYPHQXLTFNQLSSLN

SEQ ID NO: 202558 - protein, 134 aa, Zea mays
  Clone ID: MRT4577_116323C.1.pep
FPATDLAADAAGSGGKIRVYGKLQLRKGMKAVNQVWQVGASSTGGAPDKHAFQADNLSAKSKLVLAGKAAAAEAPSPASPAPEAGGPSASGAGSDSGAASSMSPSKSPNAAVPAAGVSAPALLVLALVGFLVTV

SEQ ID NO: 202559 - protein, 98 aa, Zea mays
  Clone ID: MRT4577_116324C.1.pep
FQSKGCGEPAPAKLFSRGQGALPAKVILGGSPSLKKPPVLKSLKRGPRVLGSRFLGGVPPVFIWADEKPGKPPLFYGQPCPLDAPNLLFFLATARFAR

SEQ ID NO: 202560 - protein, 130 aa, Zea mays
  unsure (1)..(130): unsure at all Xaa locations
  Clone ID: MRT4577_116325C.1.pep
MLAVFIGQVVEVPPELVAEDTRTPLSNTNAWXLVARFLYYSDPGAXSALLSDHRLLAYLHAVQELLRPMSVAVNDKELLLCRGHLPTLGRLMHDCRLAXGGHXALTVFYAYLTLSCLPPYPARFVLGPLT

SEQ ID NO: 202561 - protein, 105 aa, Zea mays
  Clone ID: MRT4577_116326C.1.pep
GIDSILGIDKKGLFQNTQNFFLGAKKSHLFLAPKQIIHQLPGWHFLPRGLTKGMGIIISPKFIIGERLGHHKSRHFVHTYIGGGGSQNMKTTLSWTPDFWFLATH

SEQ ID NO: 202562 - protein, 96 aa, Zea mays
  unsure (1)..(96): unsure at all Xaa locations
  Clone ID: MRT4577_116327C.1.pep
SYRATSISSIPSGRPARSAGGDLESSRPWWRAGRAGQGGGGGRGSLGELEGCVDRLRVQXFCFFFFFSDLIYFFILSYLLFFFNMLLSFLFLLLSI

SEQ ID NO: 202563 - protein, 118 aa, Zea mays
  Clone ID: MRT4577_116328C.1.pep
FQHLSPRRSGRYVLAARLSSDKDGLCRAVSRAPIRPNVTYRVAGWVGLGAAVEGSHAVHVEVRVDGGGRPVGGGVAVVESGKWGQIKGSFRVDGDEPPRHAKVYLHGPAAGVDLKGTG

SEQ ID NO: 202564 - protein, 46 aa, Zea mays
  Clone ID: MRT4577_116329C.1.pep
YKLFFFFCILLEVPFCSIMSCFTIDWWLFYISMTGKVLKGGGGVSL

SEQ ID NO: 202565 - protein, 70 aa, Zea mays
  Clone ID: MRT4577_11632C.1.pep
EGEVPKRAVNAATILSIKEKPCNRNFMMGHRANTTDCIDTGPYTSMQELSSDQTIHGLFGALHAIALDLR

SEQ ID NO: 202566 - protein, 96 aa, Zea mays
  unsure (1)..(96): unsure at all Xaa locations
  Clone ID: MRT4577_116330C.1.pep
AYLPXDADRDHPACNPFGPNGRRLAGLPFPRSLIIVSGLDLTCDRQLAYADGLREDGHHVKLVYREKATVGFYLLPNTNHYHEVMEEIADFLRANL

SEQ ID NO: 202567 - protein, 35 aa, Zea mays
  Clone ID: MRT4577_116331C.1.pep
LLADHPGCYYIQAGNTCIWGSYFCYGGPGSNAQCP

SEQ ID NO: 202568 - protein, 203 aa, Zea mays
  unsure (1)..(203): unsure at all Xaa locations
  Clone ID: MRT4577_116332C.1.pep
MEAAAASSLWGGLNSGIMLSLLAVVWAMLWQALQGLQLQQYFGRHSRRLSRRLAAILDPDLTVTVSEYHSGGMPRSYTFKESKVNLNRAARDDSTEELHPYVHNDNDNDQNXLMMKNGDNKEYHPIEGLPAFNKATAELLLGADNPVINQGLVATLQSLSGTGSLRLAAAFIQRYFPEAKVLISSPTWGNHKNIFNNARVPCP

SEQ ID NO: 202569 - protein, 121 aa, Zea mays
  unsure (1)..(121): unsure at all Xaa locations
  Clone ID: MRT4577_116333C.1.pep
THASPTHSSQHLQQLVLGNLASDFQHHXXLSFNQLAVLNSAAYLXQPLPFFQLAAAYPQXFFPFNQLAVLNFAVYLQQEQLPPFNQLAYLSPIALLTQQQLVPFXYLHTSPKAXPLLQLQQ

SEQ ID NO: 202570 - protein, 80 aa, Zea mays
  Clone ID: MRT4577_116334C.1.pep
ERVDVRALELPLSDGRSDLVEVKLDARVAVVVHHNVYAVLADRAHQRRCDGHLHSADGPPGETDYPHGDHGDGGAGDHHG

SEQ ID NO: 202571 - protein, 94 aa, Zea mays
  Clone ID: MRT4577_116336C.1.pep
KTVLKTLRNSKGKLIIIANNCPPLRKSEIEYYAMLAKVSVHHFHGNNVDLGTACGKYYRVCCLSIIDPLQLLRLSQDEMRCSAPALCPFPFFIF

SEQ ID NO: 202572 - protein, 106 aa, Zea mays
  unsure (1)..(106): unsure at all Xaa locations
  Clone ID: MRT4577_116337C.1.pep
MTRSWVLXFVLMFXVXTSQFEWNEQVENESETSSRPLILSDKEQQHIPQGKESVQVKKILFQEKKIQKLNELVRDLRRQLLQCRNENQVELTELETELDQLLVTGV

SEQ ID NO: 202573 - protein, 80 aa, Zea mays
  unsure (1)..(80): unsure at all Xaa locations
  Clone ID: MRT4577_116338C.1.pep
MAPTKKSKKSTESINNKLQLVMKSGKYTLGYKTVLKTLRNSKXGNNVDLGTACGKYYRVCCLSIIDPGDSDIISTTPGTQ

SEQ ID NO: 202574 - protein, 73 aa, Zea mays
  unsure (1)..(73): unsure at all Xaa locations
  Clone ID: MRT4577_116339C.1.pep
TLTYLLYHLISLLEDPTITAVLFTHYLPLPPPPPTTXFLLHPHPNLPSSIPPLPLLLYLFPHSLQIHNLTYII

SEQ ID NO: 202575 - protein, 1178 aa, Zea mays
  unsure (1)..(1178): unsure at all Xaa locations
  Clone ID: MRT4577_11633C.1.pep
MEDYPEELRTPPVSLVSIVGCPELHPSISTALSSQQPPMNTLALPDFAKASILARSVKPRDPLAPPQPPAGILKKDWLLKHRTRVPAAVAALFRADQVSGDPAQWLQACSDLENLKSAIQGKNTKSVVVLVQAQANDELSEDVIVALRKRAEIDSKHLVVLVEHDEAEWNRSLNKLKNVFVELCAAFYKEEGRRIKARIEKKNFASVELSIRYCFKVAIYAEFRRDWPEALKFYEEGVRVLREMIGTSTRLPPTQRLVEIKAVAEQFHFKISTLLLHAGKAVEAITWFRKHIRSYARVLGTPEVAFLHWEWFSRQFLVFGELIETTSTTIPDTLSPRFGTADYTLTEWEFQPAYYYQLAATYLREKRYAIECSSSMANLTTEVNGVPESVMPSVYVGQYVRLFEQGDTVSLLPLSDTEYTSYALSEAERFQDSYEIIALFRKAYESFQSLGATRMASACSSGMAIEYYAAGDFSNAKQLFDSVAGLYRQEGWTSLLWENLGYLRECSMKLNSPKDFISYSLEMAALPLFSGSGEENRVKQNXSGPAGSPTISRRDNIQQEVINVLERNQSSKGTYDGFNNAIEEVTHLDIDQISPLRMVLTASVAFHDQSVKPGSPLLVSVSLLSHLPSPVVVDQLEVQFNQSDSNFSMHSAQEDSLPSYSNLHGQVIQDTSSLTLFTNRWMRLTHEVKSGKSGKLECLSVKATISKHLVICCHAESPASMEDFPLWKFENQVETLPTKDTTLAFSGQKLIQVDEPDAQVDLVLNSAGPALVGELFTLPVIIESKGHAVHSGELKINLIDARGGGLLLSPREAEDSESHHVELLGVSTVSEDKESKEEADSIRKIQYSFGVVSVPTLSVGDSWSCKLEIKWHRAKSVMLYVSLGYSLGSSEEEALHRLNVHRSLQIEGQIPLLVSHQFLRSFRREPLLLSGIRSLGSDDKKCSLAMNESNMLIVTARNCTEVPLCLHSMTIQPDGDSEQLCSVQQISGISNRHAIVAPREEYKGIFSVNPRAISTNFRLGEICLNWSRDSSLGEDQDRLIIMKVQLPEVNIEEPPLVVGMECPPYAILGIPFTIYVKIHNSTSLLQEIKYSLVDSQNFVFSGAHNHAAFILPKSEHTVSHKFVPLGSGSQQLPRITVTSVRYSAALTPSASAATVFVYPSEPKFNLETSHSTSDEIVS

SEQ ID NO: 202576 - protein, 124 aa, Zea mays
  Clone ID: MRT4577_116340C.1.pep
PWKKKQRAETPLRRGRRSASSFVVAQSSSSHLELDQSGAERCRPAGRPLFVAAAAPALNCSSKPIKAASSLSHSHTQAEPNRPMYSSSPAWEKRVSSQEQEPLFCNCSCGRRFHRPAVICRTPH

SEQ ID NO: 202577 - protein, 107 aa, Zea mays
  Clone ID: MRT4577_116341C.1.pep
MQKKSTESINNKLQLVMKSGKYTLGYKTVLKTLRNSKGKLIIIANNCPPLRKSEIEYYAMLAKVSVHHFHGNNVDLGTACGKYYRVCCPSIIDPGDSDIISTTPGPQ

SEQ ID NO: 202578 - protein, 76 aa, Zea mays
  unsure (1)..(76): unsure at all Xaa locations
  Clone ID: MRT4577_116342C.1.pep
CLCSGKLIIIANNCPXPLRKFEIEYYAMPAGXSVHHXFHGNNVDLGTACGKYYRVCCLSIIDPGDSDIISTTPGTQ

SEQ ID NO: 202579 - protein, 85 aa, Zea mays
  Clone ID: MRT4577_116343C.1.pep
NYQQRLRVRGNGFPCLVAHLDVRNLGSFNHQERRSTLCFDYLADSSGPSSIITWVARNLFWRRASLLGWFPRTFFQYPPVGSRMR

SEQ ID NO: 202580 - protein, 152 aa, Zea mays
  Clone ID: MRT4577_116344C.1.pep
VWPVSITLGGVLDVVEVAMLVLVHEAGADIVGAAGASTRAIGVGPVDAVIVEMMHDVRIVGSLHLRVPLLVCNHLHDVGGMRVAALPSWCRYGPMMHILSRRQGHELGLLPRLRSYVGEKKKGGGRGLPRSVAIVSSSRGEVVWRSGAVRQL

SEQ ID NO: 202581 - protein, 112 aa, Zea mays
  Clone ID: MRT4577_116345C.1.pep
MAPTKKSKKSTESINNKLQLVMKSGKYTLGYKTVLKTLRNSKGKLIIIANNCPPLRKSEIEYYAMLAKVSVHHFHGNNVDLGTACGKYYRVCCLSIIDPGDSDIISTTPGTQ

SEQ ID NO: 202582 - protein, 126 aa, Zea mays
  unsure (1)..(126): unsure at all Xaa locations
  Clone ID: MRT4577_116346C.1.pep
XXKKKKKKKKKKKKKKKKKKKKKKKKKKKKKKTPAHPKKNKRFHPPPPGKAVGGGGGNFPSFLGPARPGPGKNNFSKLLLELLVSKAGKNKRVSVSKGGKRGGKTQRGEKGRATREWPSWKEPKKT

SEQ ID NO: 202583 - protein, 137 aa, Zea mays
  unsure (1)..(137): unsure at all Xaa locations
  Clone ID: MRT4577_116347C.1.pep
MCQSILGQSMGLQSGREDLVNILLASSYSMSFMSRIGKQGKAVVKVGANPHLXVLRHNIQGIMNPAIRRLTRRGGMKDISGFIYEETRGVIXKIFLENVILKAVTYTEXHAGNKTVCAMAVVYAFKRQECFLFGFGG

SEQ ID NO: 202584 - protein, 259 aa, Zea mays
  unsure (1)..(259): unsure at all Xaa locations
  Clone ID: MRT4577_116348C.1.pep
DYSYDDPPXTGLGAARMSALLTYRSRDSFESRFGRNTPDLSKKQNINNVARPTTPSNPSYEHWAIHNDGHKNAGSPRSLSRTNSSTAILGTAQAHTDLEFHDASNAAAQSPQRPDSTNSNQRFPRSSKSVAPHYFSAQSYLRYQGEKFIKRFDANCYIAITRKLDTHDISRYRYPDGETPETMDPASALHHALSLIEQPTLVLGIQSDGLFTFAEQQELAAYIPNASLKTIDSPDGHDAFLLEFEQVNNHLLGFLNAEL

SEQ ID NO: 202585 - protein, 111 aa, Zea mays
  Clone ID: MRT4577_116349C.1.pep
MWSHRRLTEGAKPLSIHHKHSNKMVKFLKPNKAAIVLYGRYARRKAVILRTFHHGTRERPYGHCLIAGIKKYPSKVIMKDSAKNTAKKSRVKAFVKLVNYQHLMPTRYTLD

SEQ ID NO: 202586 - protein, 618 aa, Zea mays
  unsure (1)..(618): unsure at all Xaa locations
  Clone ID: MRT4577_11634C.1.pep
MIGTSTRLPPTQRLVEIKAVAEQFHFKISTLLLHAGKAVEAITWFRKHIRSYARVLGTPEVAFLHWEWFSRQFLVFGELIETTSTTIPDTLSPRFGTADYGLTEWEFQPAYYYQLAATYLREKRYAIECSSSMANLTTEVNGVPESVMPSVYVGQYVRLFEQGDTVSILPLSDTEYTSYALSEAERFQDSYEIIALFRKAYESFQSLGATRIASVCSGGMAMEYYAAGDFSNAKQLFDNVAGLYRKEGWTTLLWENLGYLRECSMKLNSPKDFISYSLEMAALPLFSRSEEENRENKIKSGPAGSPTISRRENIQQEVINVLERNQSSEGTDDGFNNAMEEVTHLDIDQISSLRMLWLISWRARVEVQFNQSDCNFVIHSRQGRFSSFLFKFXDQVVQDTSLTLFTNRWMRLTHEAKSGQSGKLECLSVKATIKKMXVICCHAESPASMEDFPLWKFENQVETLPTRDPLLLPFXGQKLIQVEEPDAQVDLVLNSAGPALVGELFTVPVSIESKEHAVHSGELKINLVDARGGGMLLSPREAEDSESHHVELLGVSTVSEDKESKEEADSIRNIQYSFGVISVPTLGVGEXSGSCKLGIKRHRXKSVILYVSLIVCLV

SEQ ID NO: 202587 - protein, 143 aa, Zea mays
  Clone ID: MRT4577_116350C.1.pep
PRRSTSARQSHGVPLGSCSEEASPECLHCFCAGCCPAMTRSWERHGRGQRAVLAAANIVMAAVHLARPPRTSSALVLGIWAGLFGLARARPENKSPKHGPTRNNMGRAVTARRRALDRASNSNPSGPRHGPHRWAGLGPARPN

SEQ ID NO: 202588 - protein, 54 aa, Zea mays
  Clone ID: MRT4577_116351C.1.pep
AQLYLFKLCIIPILIKIISILHQQKGDKVYTTKRVPLGSNASAHPLVLPDDKYS

SEQ ID NO: 202589 - protein, 736 aa, Zea mays
  Clone ID: MRT4577_116352C.1.pep
MSRRNTADDVLQLETEGNSFDKIEETASNEETETSTAATEAVTFNEDITDKVSGADGAPSNGSLKTFTDTGRDIDVPLVITTSKEESVNDTMENLNLDLPGHQAQDGNTAEKVLSLEEREREMPSSEKLLQTEPGENQIPNEQDEKDIRDENQTLKEKDEDDMQDTEFGEAKKEVQQELPVSHFLMNLILGKESSDANEDSESEAARKQGEATEDDSCTFISEQEESLGSLPTENKVDDNPTFVEQEKHEVKCSEETQEMVEEQSDDQLHTERSIEIDEDIKKNTRALEIPAYQDNPQDGISGELQTEEAAGVSTKMVTRDIDISSVVLDNRTVGTVCQEKMEVSTKNENGSLRSSLNDSTNTMAPQDDTLGEGQSRLVLEPLPEDKSVDVVSEQAPLLTESGMTDANDLSSDTTSAQNPVSTKPTESARVEATYSTDIQLENEEVDKKEEDQHANTTKDEVSKEIVESSHINLQKITRPEEKSNELETQITEPVCDSQAILAHEKEISEENFPTAVEIQADGPNMQINQDKQDEAADIETEMKPEKLGESNFQEHQDNGTEQKSPKETDEGDQQLVAKKEILTQEMDVHETVERPQQAVESPQQTVSITSNEDQELFDSKVQERDLNVVSPREASEAEENFVDVTKPEFSTDEEQSPKADAEEKIYDEKIKDIEGTKNLTDEAAIKTEAPGAAQKTRKKYSLLSGVGSKVKHQLAKVKKAIVGKPGHTKPVSPTA

SEQ ID NO: 202590 - protein, 110 aa, Zea mays
  Clone ID: MRT4577_116353C.1.pep
AGSTSLCVARGCGWQHLGAYVNLGSFYLVGIPTALVLGFVLKMEGKGLWMGISCGSIVQFLLLAVITFFSNWEKMSEKARERVFSDDEPSDKGTSDSNGPRFVLVLARAI

SEQ ID NO: 202591 - protein, 270 aa, Zea mays
  unsure (1)..(270): unsure at all Xaa locations
  Clone ID: MRT4577_116354C.1.pep
TSSSSPIPTPTLPLSFASAARQPASSPGWLLRPGRSLALAQPLLLRSRLQLSLSPSPGTSSAARQPASSPARRPASSTTRRPTAAYRADGSTDERISGAWQIFGARPTGCGRISAAWCPPGCPAGQTRQRLLQAGGSPALLELEQAGVPVFSRRVDLHRRGGLPGGRIRSISSCSVPLLLRGLSSGRTDPRPSDSAASAALCLQRIHASAARRPELRPSRAVACSLNPHTCDWSNKFSLSEHMSLTYGAVDCVSGKVFGVLXSILLGSIF

SEQ ID NO: 202592 - protein, 77 aa, Zea mays
  unsure (1)..(77): unsure at all Xaa locations
  Clone ID: MRT4577_116355C.1.pep
MTRTHNSLVPYNQLVGSSAVILLQRQVLTFELPCDANIAXYLXQQQLLSFYPQVVGNINAFLQQQQLLPFYPQDVAN

SEQ ID NO: 202593 - protein, 150 aa, Zea mays
  Clone ID: MRT4577_116356C.1.pep
VTYVLTKKIYLTNHMCADSRSKQQREMTGAQDAEQQRHGSAGDTEQQKQRSRWTADPSEKTQAAPPLEIDRGSVRPVGRHAGEEEATGPVKIHPPGEDRHACLLQLEERWRSTPVKKQAAAPVKKQAAAPPRMCQAKARGRVGVGIGEEE

SEQ ID NO: 202594 - protein, 50 aa, Zea mays
  Clone ID: MRT4577_116357C.1.pep
EGESAARGGPRGTTRRRERAGMHGNAAQTGRQTPAKATPRRGAESAPAPA

SEQ ID NO: 202595 - protein, 208 aa, Zea mays
  Clone ID: MRT4577_116358C.1.pep
WTHSNFHSLLRLRSLFFSDPDSNSPSLLRLAHPRRRGSLLLRRRGDLRRPTKRTDPRTNGSPAPGRSSARGLPVVDGSPLPGALVYPRRRSLLLHWRRGLILRKHGGLILRRHGGLPVLFNQADAAAYRSSPGGWISSAPRAGAGRRAGLSPGGWIFTGAAAYRADGSGRSPAAPRPELRADGSAVQRLRCLCCSMSPADPCLRCSAS

SEQ ID NO: 202596 - protein, 104 aa, Zea mays
  unsure (1)..(104): unsure at all Xaa locations
  Clone ID: MRT4577_116359C.1.pep
RSKPRRRGYTRAPGSGDPSTTGRPRAEDLPGAGDPFVRGSVRSVGRRRPPRRRRSRPPXPXRSRLPRRRGLCQAKERGRVGVGIGEEEAAQAQERPKVCSGSIM

SEQ ID NO: 202597 - protein, 109 aa, Zea mays
  Clone ID: MRT4577_11635C.1.pep
NSFIVHKVLEKNKSCHYYIVMENQMIANCLSTHEKCQDFVCSSRSPYLQQGRQPHHRMSTVSHGARSTCPTSTLATILKFFNLPHIPCNLLYLSNFNIGFDPQICHLLI

SEQ ID NO: 202598 - protein, 207 aa, Zea mays
  Clone ID: MRT4577_116360C.1.pep
GRDSGLRLRSLFFSDPDSNSPSLLRLAHPRRRGSLLLHRRGGLLLRRRGGLRRPTERTGPRTNGSPAPGRSSARGLPVVDGSPLPGALVYPRRRGLLLHWRRGLILRKHGGLPVLSRQADAAASSPGGWISSAPRAGAGRRAGLLQAGGSSPARRPTGRTDPVDLQLLRASAAPRPELRADGSAAQRLRCLCCSVSPADPCLCCSAS

SEQ ID NO: 202599 - protein, 224 aa, Zea mays
  Clone ID: MRT4577_116361C.1.pep
PRVRPRVRADLVWPDDGNAAFCQTIGAFAKGMLELDHAVQKMVLESLGVRKERVDSHLASLVYDVRLSRYGALAPVTAGDDDEATTYMVAHRDCSMVTTITQHEVEGLQVRGRDGAWISVAPEPGTFAVVAGEMLTVVTNGRVPACVHRVRTPSNRERLSVLFGSSLKHGAVVSALEELVDHGRHPLRFRPCDFDEYVKFRFGQERPGLNSALQEFCGIGTGTK

SEQ ID NO: 202600 - protein, 202 aa, Zea mays
  Clone ID: MRT4577_116362C.1.pep
VTYVLAKKIYFDQSHVCGFKEQAPARDGRSSGCRAAEARIRWRHGAAEAAESLDRGSVRPELRPRSSRGTEQLEIDRRSVRPVGRRAGEEEAIEPVKIHPPGEDRHACLLQLEERWRSTRLEKTGRLPRLPAWTKPAGRRAVEEPGRRAFEESGHGAGEEASRDAEDIPGHQAAEIRPQPVGRAPKICQAPEIRSSADLSAR

SEQ ID NO: 202601 - protein, 84 aa, Zea mays
  unsure (1)..(84): unsure at all Xaa locations
  Clone ID: MRT4577_116363C.1.pep
GVCLLERGGEALRTGGTCQQMRSTKVDHNNRNREKXDAEASHQQQVLNPAAVVSRENQFRDTXHWEVEMQTIQAAIIPKNNHAC

SEQ ID NO: 202602 - protein, 211 aa, Zea mays
  Clone ID: MRT4577_116364C.1.pep
RSAGLLLRSRLNSPSLLRLAHSSAAWQPASSPARRPASSTTRRPAAAYRADGSADERISGAWQIFGARPTGCGRISAAWCPGISSVSRLASSPAPRPDSSKAQRPDSSTERPARFCPGRQTRQPTGLLQAGGSPALLELEQAGVPVFPRRVDLHRRGGLPGGRSRGSISGCSVPLLLRGLSSGRTDPRSSDSAASAAPCLQRDPCLCCSTS

SEQ ID NO: 202603 - protein, 68 aa, Zea mays
  unsure (1)..(68): unsure at all Xaa locations
  Clone ID: MRT4577_116365C.1.pep
PVLSLEENVYLAKLAAQAKRFEEKLEFMVNATKPVDSKDLTVQERNLLYDAYTNVIGARPAXWRIISS

SEQ ID NO: 202604 - protein, 32 aa, Zea mays
  Clone ID: MRT4577_116366C.1.pep
GTGKCSGRAAGNRHPGEQLVISYRECDICHSG

SEQ ID NO: 202605 - protein, 79 aa, Zea mays
  unsure (1)..(79): unsure at all Xaa locations
  Clone ID: MRT4577_116367C.1.pep
LNICENDDSLRLKSSIKHQKSIELSFTFSSIHNSWNLSIVLELRKNDDDPVQAFAEHWGHRPGACPRXKGRWVDRGFWT

SEQ ID NO: 202606 - protein, 62 aa, Zea mays
  Clone ID: MRT4577_116368C.1.pep
DDSTDHVSDVGDGATNQERDLRNMDNRHGAVIENSQIDSLPEPKCQTAWMKSELGRLIQERG

SEQ ID NO: 202607 - protein, 144 aa, Zea mays
  Clone ID: MRT4577_116369C.1.pep
TTSATTTKLNLISNSITTIRLLTIRTLSNIPRHLLHKRNSRTRTTKPLHLPVRSSLKLRSLTMNTRNIIRKIIIHNPNRTTSRTTMLGVQHHRLSPLARRPRPQEASQAQAQAKKKKRTGPNPKIQPKGHPHIHKHINQPKGPD

SEQ ID NO: 202608 - protein, 76 aa, Zea mays
  Clone ID: MRT4577_11636C.1.pep
SASRIRRVRLRRRSRSCTRASTSAIAHRAAPRRTTALITRAERLLSAQFKESSAPRRSRSALRAAASLEHVAVDIS

SEQ ID NO: 202609 - protein, 72 aa, Zea mays
  Clone ID: MRT4577_116370C.1.pep
SIRHMYFSLVLLEIGKSVLDTSEIILDEITSALLFFQTSEWCLMAATCVCNNSHVILFDLSCKHSIYILSQL

SEQ ID NO: 202610 - protein, 120 aa, Zea mays
  Clone ID: MRT4577_116371C.1.pep
ISVEQSLFVPPVRLHIRRWSRQALASVGAACLCLCISSWKGSLLTSGGLQLLSSCCMVCAWFRDFTQIQYTVWICLFSSSECGVSLRIACQRYKIYMFRNLLLLGRMDPLSLAHWLIPFL

SEQ ID NO: 202611 - protein, 69 aa, Zea mays
  unsure (1)..(69): unsure at all Xaa locations
  Clone ID: MRT4577_116372C.1.pep
ARARTQTRNTPREXQFFSSKIKTTLFILQVFWNXLXLTFHPMNYQGPCNCATNHTKYIYQTFCKGFENE

SEQ ID NO: 202612 - protein, 74 aa, Zea mays
  Clone ID: MRT4577_116373C.1.pep
VFPRPKEFQCSFKKNPPHVSPPPPKKSPSVVSTLKKKKKKKQKKKKKKKTKKKKKKKKKKINKNKYKKKKKTPP

SEQ ID NO: 202613 - protein, 35 aa, Zea mays
  Clone ID: MRT4577_116374C.1.pep
ILFKKKKKKKKKKKKKKKKRKKKKKKKKKKRGGGS

SEQ ID NO: 202614 - protein, 91 aa, Zea mays
  unsure (1)..(91): unsure at all Xaa locations
  Clone ID: MRT4577_116375C.1.pep
GPLVYPVEKLCDPYCXFPARCRSVSGSSVRDLIWYLGVSMPAGPWSGFSIVMAPAXFQFQVVLGGNFVLLKQPGLSNARGFSAQFPRVSFV

SEQ ID NO: 202615 - protein, 36 aa, Zea mays
  Clone ID: MRT4577_116376C.1.pep
ERFIMYTSSTIADVGAEHSFGAGYQSSPRSQTTEAI

SEQ ID NO: 202616 - protein, 87 aa, Zea mays
  Clone ID: MRT4577_116377C.1.pep
VSTWPCACEAFGRALNSGHGTLFSFASITSVLVSDGHSSFLMVHSSLLGIVLLPGLSESLHFCSILCRPYLCSRLHQSFGMPLMTLV

SEQ ID NO: 202617 - protein, 66 aa, Zea mays
  Clone ID: MRT4577_116378C.1.pep
TKSARTTSLSSITIVLVVSSSSPRLMGRYVARALIHLDCLNVVSDQLYKPVHYYAIFLNAHLVPVH

SEQ ID NO: 202618 - protein, 44 aa, Zea mays
  Clone ID: MRT4577_116379C.1.pep
SFYLFGSKCMDIQLVGSATTTASIQTTPYQIVYRTGTEHVPSSN

SEQ ID NO: 202619 - protein, 33 aa, Zea mays
  Clone ID: MRT4577_11637C.1.pep
RRHRQEGQTLLYGFRLDFFGSSCMFYIQTTPSS

SEQ ID NO: 202620 - protein, 49 aa, Zea mays
  Clone ID: MRT4577_116380C.1.pep
IHCYSCVHHLLPHTHVSTSMNFRSMETVTPVRVCFKFILCKKPCILVFP

SEQ ID NO: 202621 - protein, 94 aa, Zea mays
  Clone ID: MRT4577_116381C.1.pep
AALDTDSDGKLDDGPCDGRRQQLPMHLGVRVHVCVCALDHLMDNGQVLSGPARAPPAGEHLKMPRRRRRTTCCNAALMEIIIGLVSRVMRAQHG

SEQ ID NO: 202622 - protein, 124 aa, Zea mays
  Clone ID: MRT4577_116382C.1.pep
MGKRGQRGGGDGEPAAEGGAGGGHSPSTVFVSNLPYTFKSSDLEAVFSEVGPVRRCFMVAEKGSEKSRGFGFVQFATVQDADRALQQKNGSPVAGRKIRVKLAMNRAPLKERLQKVNMQVKDSD

SEQ ID NO: 202623 - protein, 84 aa, Zea mays
  Clone ID: MRT4577_116383C.1.pep
RLEARARRGCLHPSPPPLLPPPLSSKMSGLAAKVWSTIVHWQTGRDATDGYTRSNYENHINKVNSHFDRNLTKSKGDKYDEQRD

SEQ ID NO: 202624 - protein, 47 aa, Zea mays
  Clone ID: MRT4577_116384C.1.pep
MALYVVSGIFFMMLGIVMFIPGFYYTRIAYYAYKGYKGLSFSNIPPI

SEQ ID NO: 202625 - protein, 66 aa, Zea mays
  unsure (1)..(66): unsure at all Xaa locations
  Clone ID: MRT4577_116385C.1.pep
YRILYLPYIXGTLIRQDTNIMTXRSTQMSLALMALFLQLSTAETVHAGDAIDLYERVVLIVTSIRA

SEQ ID NO: 202626 - protein, 140 aa, Zea mays
  unsure (1)..(140): unsure at all Xaa locations
  Clone ID: MRT4577_116386C.1.pep
MWRMHPAGXGISSWTLPYXRSPPMWIKTATTDAEDMITNGCVRILRCTTQIAALLRDQHGMPLVKSVDXDXMLRILWVRGVRPDIPEDFYFRIINRLLITWHLYIIRKDKDSRNSSLILVESTIHRLVRYYKRTLKLPPT

SEQ ID NO: 202627 - protein, 51 aa, Zea mays
  unsure (1)..(51): unsure at all Xaa locations
  Clone ID: MRT4577_116387C.1.pep
QDSLLXVXGNHNVFSTTXPNTYDKRAPGVICDAQLRINQEPIIHKLQKRTN

SEQ ID NO: 202628 - protein, 217 aa, Zea mays
  Clone ID: MRT4577_116388C.1.pep
MRVQRLLRLRMASRSCSRCAALAPHAALPLSSLLAPSPSAARPRSAPLSCAARPCRGHAAASALHGAAGRRPPSVAAMSSSTPPPGSVQKSEEEWEAILTPEQFNILRLKGTEYPGTGEYDKFFEEGIYKCAGCGTPLYKSSTKFNSGCGWPAFYEGLPGAIRQTPDPDGRRTEITCTACGGHLGHIFKGEGFKTPTNERHCVNSISLKFNPSPEEA

SEQ ID NO: 202629 - protein, 101 aa, Zea mays
  unsure (1)..(101): unsure at all Xaa locations
  Clone ID: MRT4577_116389C.1.pep
RNSAKTYCKNKDCEQYTLQRVTQYREGSGXLAGHGERRDDRKHSGYGGQTKRVFHKKAKTTKKIVLKLQCQSCKHYSQHAISRCKHFEIGGEQKGKGTSLV

SEQ ID NO: 202630 - protein, 60 aa, Zea mays
  Clone ID: MRT4577_11638C.1.pep
GQKPQKRKPPPNPRKPTRKKSRHNGFPSGKQARERKPKKIRKPPLENPQTSQKRIPRQTI

SEQ ID NO: 202631 - protein, 600 aa, Zea mays
  unsure (1)..(600): unsure at all Xaa locations
  Clone ID: MRT4577_116390C.1.pep
MSVSHADEHEISLCDPSSEDDRRRRKIGSLPLKAIHALRKKRARRRVTDFRFPAAISIEDVRDAEEERAVAAFRDRLAAHRLLPDKHDDYHMMLRFLKARKFDSDKAMQMWSEMLRWRKEFGTDTILEDFEFDELNDVLHYYPQGYHGVDRXGRPVYIERLGKVDPNKLMQITSVDRYIKYHVQEFERAFRERFPACTLSAKRHIDSTTTILDVHGVGFKNFSKTARELVQRMQRIDSDYYPETLHQMYVVNAGSGFKLIWNSVKGFLDPKTSSKIHXVLGSNYQSRLIEVIDSSELPKFLGGSCTCSEKGGCLRSNRGPWNDPVIMKLIHSMEGGSTREIKQVSDGDERSGSSLRAENLKGMLSDISNAESESDVDDVGLTVVQKSTDHSLLTPVHEEVKGSDTSIFCSSSSKHLLDTTPGSPQATPQMEMPIQLTCRKYFPTFGWLNNLGNAYISLHGTSAGRTLENLATGLITLLIRISSFFHLSVYRQERYLETVQPCAAAQEPEPQREEDMSACLRRLKKLESLCDHLMSKPPDMPKEKELVLMQSFDRIKSLEAELEATKNALQAAVEKQMELVETVESLQHQTSSVRRRFCCS

SEQ ID NO: 202632 - protein, 488 aa, Zea mays
  Clone ID: MRT4577_116391C.1.pep
RLAYTTALTTLFSYGLLFAFGQLRDLFRHLLGCFRPNKDDDVKQGYAPICVGLEDFFVRRLYLRVQDCFGRPIASAPDSWFDVVERTSDDNNKTLQRTSKTTRCLNLTSYNYLGFAAADEYCVPRVVDSLKKYSASTCSARVDGGTTKLHTELEELVARFVGKPAAVVFGMGYVTNSATIPCLIGKGGLIISDSLNHNSIVNGARGSDATVRVFRHNCPAHLEKVLREQVAGGQPRTHRAWKKIVVVVEGIYSMEGELCKLPEIIAVCKKYKAYTYLDEAHSIGAVGRSGRGVCELLGVDPADVDVMMGTFTKSFGSCGGYIAASEEIVQHLKHTCPGHLYATSMSPPAVQQVISAIRVVLGEDGSSRGAQKLARIRENSNFFRSELKKMGFEVLGDNDSPVMPIMLYNPAKIPAFSRECFRQKVAVITVAFPVTPLLLARARFCISASHTREDLTKALDVISRVGDLVGIKYFPAQRPKIAEAGHGN

SEQ ID NO: 202633 - protein, 119 aa, Zea mays
  Clone ID: MRT4577_116392C.1.pep
RTRGNAKARLIPLRNTPDLNFSFRTSHLVCGSSILTMGGAHPDADHNYTSRLFIGFSACTTLLPDVHLLALMNTTCVLLNIKADSNMHKLNVGNEATHDHMHNHIQLFCDFCTDTPTLV

SEQ ID NO: 202634 - protein, 64 aa, Zea mays
  unsure (1)..(64): unsure at all Xaa locations
  Clone ID: MRT4577_116393C.1.pep
PPPPPXFXXPPSIFFFFKGFFLPPXPPQMNFMCIRXFLCFFKICFCALDKSFGHIYCEPCVSLP

SEQ ID NO: 202635 - protein, 28 aa, Zea mays
  Clone ID: MRT4577_116394C.1.pep
RTSHQLQQGSFYIHMRSHPSLINNAQLK

SEQ ID NO: 202636 - protein, 89 aa, Zea mays
  Clone ID: MRT4577_116395C.1.pep
PNLNEDSRFDILKIHSRKMNLMRGIDLKKIAEKMNGASGAELKAVCTEAGMFALRERRVHVTQEDFEMAVAKVMKKDSEKNMSLRKLWK

SEQ ID NO: 202637 - protein, 218 aa, Zea mays
  unsure (1)..(218): unsure at all Xaa locations
  Clone ID: MRT4577_116396C.1.pep
MLSVSGERSKRIVENARAHVLVRLSSIIDNELLNGQNVVDPRCEEICMXGGLLRHKMKYLRFLRKRMNTKTSHGSIDFRDPAKILWRTIRTMIPHKTKRWXASLARLXTYEGGPPTYHKTKRMVFPDAXKVLMLQSAHEYCLLGEISKEVLRNYHXPIRQLEEKRNEKRKVAYDRKKXVVKLRDKADKAAYDKLXSXLEILAPISTEELCYVNHVWGN

SEQ ID NO: 202638 - protein, 328 aa, Zea mays
  Clone ID: MRT4577_116397C.1.pep
GLTTRISSGGLLKKTLFNIAYKMKLGNMRKGIKHEKAAPFFDKLVFSKVKERLGGKLRVIVSGGAPLAVPVEEFLRVVTCAYVVQGYGLTETCAGSIVSIPNEHSMLGTVGPPVQHIDVRLESVPEMGYDALSSVPRGEICIRGSVLFSGYYKREDLEQEVMIDGWFHTGDIGEWQPDGSLKVIDRKKNIFKLSQGEYVAVENLENVYGVLQDIDSIWVYGNSFESSLVAVANPNQQALERWAEQNGVTGSFAELCEHPRAREHILAELTKIAKDKKLKGFEVIKAVHLDPLPFDIERDLITPTYKKKRPQMLKHYQGVIDALYKGMK

SEQ ID NO: 202639 - protein, 45 aa, Zea mays
  Clone ID: MRT4577_116398C.1.pep
SEGIPLLCTTRNMTYHLNWLVSMTGSGALSFNIVWGKKRGLTSTG

SEQ ID NO: 202640 - protein, 67 aa, Zea mays
  Clone ID: MRT4577_116399C.1.pep
MASLTFFTQILFPVQCSPSNGKDETTLSKKISSKNVFSITFICAPFHKVFFHQVPLKKFFSFLKFRL

SEQ ID NO: 202641 - protein, 80 aa, Zea mays
  Clone ID: MRT4577_11639C.1.pep
SCARNEPHSGPMGVGAALSSGAPRALMLPQQARRRLLPRSCRQGLGFAKPGAVGGSTAVLLLADDALEVRKHDVVSMTAI

SEQ ID NO: 202642 - protein, 28 aa, Zea mays
  Clone ID: MRT4577_1163C.1.pep
PITVIFTSKAEVSLRPRGTNQVMFQNPL

SEQ ID NO: 202643 - protein, 117 aa, Zea mays
  unsure (1)..(117): unsure at all Xaa locations
  Clone ID: MRT4577_116400C.1.pep
VLGPRNQAPHTNERATKGGEGKKPTHLGIGSAPRKRXGEAHQSAEKKPAPKKRQAPREGKRKKVGQRPKSISTQGGGTPPPEKMEKKKXXNKRSKNKTQIFFPSGTSGGKGTPPRPG

SEQ ID NO: 202644 - protein, 88 aa, Zea mays
  Clone ID: MRT4577_116401C.1.pep
FSVPICSFFLFFFSMPCAFFLYVSYVLSCEAWRQFFICLSSASVPSSPLGSLLSHVFLDSPPLLLRIFSLFCFLKKKKQTKNIIITLF

SEQ ID NO: 202645 - protein, 72 aa, Zea mays
  Clone ID: MRT4577_116402C.1.pep
TPLAGPPDNVLVELLLLRVGSILLYVRGCKHSGLQQCCTKFFSVGLGLSASSAPMPASLVASNHECSLGIQV

SEQ ID NO: 202646 - protein, 60 aa, Zea mays
  Clone ID: MRT4577_116403C.1.pep
RRSAQAPVKKATYRNSKAGLQFPVGRIVRFLKAGKYAERSGARAPGYLDAVLEYLAAEVL

SEQ ID NO: 202647 - protein, 49 aa, Zea mays
  unsure (1)..(49): unsure at all Xaa locations
  Clone ID: MRT4577_116404C.1.pep
PGDRAAXAAPRAPQALAPAGARGLSTEKAVGAAAVAVVGSHTAKWMQVL

SEQ ID NO: 202648 - protein, 84 aa, Zea mays
  Clone ID: MRT4577_116405C.1.pep
RPFFFFIYLPFGGEGANQKHVIFFKNEPSHCSLWGNTSHHFRALTNLLLASISYRMAHQSYFHALDPGLPSFLLITLSRLFFFW

SEQ ID NO: 202649 - protein, 80 aa, Zea mays
  unsure (1)..(80): unsure at all Xaa locations
  Clone ID: MRT4577_116406C.1.pep
RNGXLKEMLSFKVQFPHKLSCWLNAALSIHPTPLPSCSCRCKTAPAQGGLCSHESCLTPLQLLEAVAVFGPDSTPCGLLF

SEQ ID NO: 202650 - protein, 50 aa, Zea mays
  Clone ID: MRT4577_116407C.1.pep
RRHTILRAHARFGNKWATIARLLSGRTDNAIKNHWNSTLKRKLRRQRRCC

SEQ ID NO: 202651 - protein, 50 aa, Zea mays
  Clone ID: MRT4577_116408C.1.pep
VLLASHPIPCGWQHRSPITVMVIHSASLLSVGLLSCMQLLGFSKKKGKRA

SEQ ID NO: 202652 - protein, 176 aa, Zea mays
  Clone ID: MRT4577_116409C.1.pep
YVCQALTALKGLVAAADCAGALDVIDNLQNLLDTDELAGLYCFRHIRDQLGTSLYSVNRGVSAEFVHAAVPDGKAVDAMILSTVKRKASSPLNGTDHEGNIDEEESFILRDRLLPLIICLLRTDKFPAVLRIYRDTLITGMKASIKATVAELIPVLTARPIDSDSVTGGRATDADA

SEQ ID NO: 202653 - protein, 148 aa, Zea mays
  Clone ID: MRT4577_11640C.1.pep
MPRPADRSGSVGLGSPKPPWRYKSSPASLAPGFASYPNAERHTTVEHTRRREKLVGATGCMGQRNPPAFPTAPGTRLVIAEVREVFGGAEGHHDSGNCSSEYFNHTGPPSAMVDLLRPHLRTWAPPPRFVIGVGCAVSGVDSPMDGWD

SEQ ID NO: 202654 - protein, 70 aa, Zea mays
  Clone ID: MRT4577_116410C.1.pep
QVSRPHTAQSAHPHQRQPPPSLGTPDSTLYAYGSYAACNRHRTPTSHSPHLCPSLRQAWSPARIPQQRPP

SEQ ID NO: 202655 - protein, 139 aa, Zea mays
  Clone ID: MRT4577_116411C.1.pep
IVAINFGAASRKLKRVASCAPVGLPAVGACCSWTVILHRVSRPPLDARFVVVPPTLALPGVFVILVPARVKRGQVKIQSPPPVTVGTGLATVDAWILVVINLSSHTTKRKKQKNKKKKKKKKKKKKKKKKKKKKRKIRG

SEQ ID NO: 202656 - protein, 61 aa, Zea mays
  Clone ID: MRT4577_116412C.1.pep
FGCTKSISFLKALYRHPHQGIIKHSAHLTEHWPKTNRAPGLLAQRSLTLASRRHHGPMYGP

SEQ ID NO: 202657 - protein, 185 aa, Zea mays
  Clone ID: MRT4577_116413C.1.pep
MQQAMPMPPAAAAPGMPPSAGLSTEQIQKYLDENKQLILAILENQNLGKLAECAQYQAQLQKNLLYLAAIADTQPQTTVSRPQMAPPSASPGAGHYMSQVPMFPPRTPLTPQQMQEQQLQQQQAQMLPFAGQMVARPGAVNGMPQAPQVEPAYAAGGASSEPSGTESHRSTGADNDGGSGLADQS

SEQ ID NO: 202658 - protein, 64 aa, Zea mays
  Clone ID: MRT4577_116414C.1.pep
RYIKKKKKKKKKKKKKKKRKKKKIKKKKKKKKTKKKKKGAAVLGVQSFLPLPCNVLVFFWGPQI

SEQ ID NO: 202659 - protein, 40 aa, Zea mays
  Clone ID: MRT4577_116415C.1.pep
FGGLINRPMACIEDIGQLTAGRHPSPQIQTYERRTCIGHA

SEQ ID NO: 202660 - protein, 211 aa, Zea mays
  unsure (1)..(211): unsure at all Xaa locations
  Clone ID: MRT4577_116416C.1.pep
MSKSGALDLASGLGGKIDKEQVKSAVDEYEKYHGYYGGKEESRKSNYTDMVNKYYDLATSFYEYGWGESFHFAHRWNGESLRESIKRHEHFLALQLELKPGMKVLDVGCGIGGPLREIARFSSTSVTGLNNNDYQITRGKALNRSVGLGATCDFVKADFMKMPFSDNTFDAVYAIEATCHAPXDPVGCYKEIYRVLXPGQCFAVYEWCITD

SEQ ID NO: 202661 - protein, 103 aa, Zea mays
  Clone ID: MRT4577_116417C.1.pep
SGGVRCSSGGRPRLFQSSDLRVVYLGVDLTRVGVTPRAGCCSFLLKTKVFLVHLFHVKLDSIFSIPFQECGRCRGKERPVLFFQSAHLNQRSHTGFYLLEPNS

SEQ ID NO: 202662 - protein, 127 aa, Zea mays
  Clone ID: MRT4577_116418C.1.pep
MRGGGGGVMDDGGVEHAQIPNSFGHELRACLRCRLVKTYDQFRENGCENCPFLDMDKDRDNVVSCTTANFTGIISLMDPNRSWAARWLRIGRFIPGCYTLAVSEELPEEYQGMCQDNNVQYFPPKRP

SEQ ID NO: 202663 - protein, 72 aa, Zea mays
  Clone ID: MRT4577_116419C.1.pep
FDLQHNMTPHSLISTSTQCKYSLLHLSHDTSILKPSLDTNALLIHSSISDQIQSSIILFCSCKTNHLYETFA

SEQ ID NO: 202664 - protein, 102 aa, Zea mays
  Clone ID: MRT4577_11641C.1.pep
MSYYGQQQPPVSAPPAQGYPGKDAYPPPGYPPAGYPPPAQGYPPQGYPPQGYPPQQGYPQQGYPPQYSQPPPPPRQQQSSGPSFMEGCLAALCCCCLLEACF

SEQ ID NO: 202665 - protein, 39 aa, Zea mays
  Clone ID: MRT4577_116420C.1.pep
HDTSMEVMFLVLPASVQLSLNVYIINCYHLQYLKYPPHR

SEQ ID NO: 202666 - protein, 105 aa, Zea mays
  Clone ID: MRT4577_116421C.1.pep
WTDSWSSRGAFFFYFFPNQRMVHQVVKQAPEPASPYGRSVCVVRRGSSRVSAARQGGAGAGAPRRSFLSVRCTLLSWSGGRCPDDHAERPSSRWWRLPKREGPLS

SEQ ID NO: 202667 - protein, 116 aa, Zea mays
  Clone ID: MRT4577_116422C.1.pep
GSASSLTLALARRAASATVPARRAGARTADYPCQALDHLPSSKPTPPARSASSRGSADWTRYRLDIRSARPATAAAARNAGVLQLFDVEGILTAARKEETPDELEVMKDLRQHMTG

SEQ ID NO: 202668 - protein, 110 aa, Zea mays
  Clone ID: MRT4577_116423C.1.pep
TKPFPGPPSRTFGTWSKGVHPVASLGFLRKKCPPRGVPPGFLGPSSWGPPPPGLALAPAGLGSRVPRECGERPPPYKAHPLGVGRGLLLALPHNATGPFKLTGGQGCFPP

SEQ ID NO: 202669 - protein, 283 aa, Zea mays
  Clone ID: MRT4577_116424C.1.pep
MAAAATATTTSPARASWRPTVPPASSKDQDHILPLAMAAAAATATTTSPARASWRPTVPATSASAAGVCFRVGAKRFSPGLRTASTCRHRHRGRTRLTTAHVKSGEAEGRPSTEESATGIGGPDEDSLRRELETAIEEEDYARAAALRDELRVLQEDCRAAVLAANARFYAAFKDGDLAAMRRAWARGDHVYVVHPSAGRISGYEMVMQSWEMVCDAGYEFPLQVDLQDVEVRVRGGVGYVTCLEMVRTKGSSSWGKQLATNVFEEVDGEWLMCVHHASHFDE

SEQ ID NO: 202670 - protein, 64 aa, Zea mays
  Clone ID: MRT4577_116425C.1.pep
LGVYKKRPPHIVLGSKQIFWERGTFHLSLTNRQGPGSSFSRGVTTKQNPKRSQFSRKNRFCSTT

SEQ ID NO: 202671 - protein, 69 aa, Zea mays
  unsure (1)..(69): unsure at all Xaa locations
  Clone ID: MRT4577_116426C.1.pep
QTLHQMHRILTVRQAARCFLAIGEYHNRXXRALSSLWASRPREILVNDEGNCEEISIXHNHSQSQFSAF

SEQ ID NO: 202672 - protein, 115 aa, Zea mays
  Clone ID: MRT4577_116427C.1.pep
PGFPGVLDRFPPSIRVGGLRARTMGGFGVFVPPKNILVLGIVKKRGVFFSPPPVAPNTVVLPRALLVGVPLVPRPRCYILGGAKINRGGSFLHLGPRFRGCFSFCTPDPGGGVFF

SEQ ID NO: 202673 - protein, 64 aa, Zea mays
  Clone ID: MRT4577_116428C.1.pep
QMRIQLGSQLEHCLSSHLFLSSFASNDYSCSCPDCFHLAVIRPSQLRSSPCLFSQRLNAERLAF

SEQ ID NO: 202674 - protein, 35 aa, Zea mays
  unsure (1)..(35): unsure at all Xaa locations
  Clone ID: MRT4577_116429C.1.pep
LLSSXXXWGGGSTSVRSGVTGEREGSAVGPGEESR

SEQ ID NO: 202675 - protein, 126 aa, Zea mays
  unsure (1)..(126): unsure at all Xaa locations
  Clone ID: MRT4577_11642C.1.pep
ESSERRALFXSFFVFFFFFFGVSRHMRGLETNTSSIHRMGRNIFNKKAGKARFFPQIYLGQGGKTNSGCILGGTDYINTPISSRAALSDNHGRGSTGPSGGLIIGAGLSELGLWLDARARAESRTL

SEQ ID NO: 202676 - protein, 79 aa, Zea mays
  Clone ID: MRT4577_116430C.1.pep
NCPTSTRVNSQFLCHSSNIACKSKNCFDHPLVKNIKDYYSGTAKDQNSELNNQACEYVTTNDIGQFEHFQVRTMCCKYQ

SEQ ID NO: 202677 - protein, 68 aa, Zea mays
  Clone ID: MRT4577_116431C.1.pep
KARIVKKSILHRTGAIHSFFYLFHSFISPMTNIILFYFPQHLLDIVMMFKLEEWLTLGNAFVFVSCNP

SEQ ID NO: 202678 - protein, 67 aa, Zea mays
  Clone ID: MRT4577_116432C.1.pep
LPVENMEKRPNNGFTQFSECTGSHLADEQIAVHCIGVHLPPQKSPSLKVLSCRIPAGEHTNWFSVRQ

SEQ ID NO: 202679 - protein, 86 aa, Zea mays
  Clone ID: MRT4577_116433C.1.pep
NPPVYLKTVKRLFFVRGQFFKVFGSPGGSFFYGFFFFFFFTVPVLCPLKITSGFSPPFFNCYLLAKGPPCLVYIYLIKPGRFFLSL

SEQ ID NO: 202680 - protein, 56 aa, Zea mays
  Clone ID: MRT4577_116434C.1.pep
CNLAGICSFLVFAVFLHEVREIFLVDVLLHSMWYPFISFYILLVCKRSSSIRRSYL

SEQ ID NO: 202681 - protein, 79 aa, Zea mays
  Clone ID: MRT4577_116435C.1.pep
PALPRAAASPPVPFPVLQKASSPGLWQDGGGSGGAALGHHAHARLQALDAAMATAQELLQLPRPPPSYGGSSSHYDLMR

SEQ ID NO: 202682 - protein, 75 aa, Zea mays
  Clone ID: MRT4577_116436C.1.pep
CRAIRRHARQCARVTGECRVQYRVQCRAEYRAGCTAPRLYGEWRFTRAESEGTSNTLMVSIGSSGSGVDKLWSKT

SEQ ID NO: 202683 - protein, 247 aa, Zea mays
  unsure (1)..(247): unsure at all Xaa locations
  Clone ID: MRT4577_116437C.1.pep
DLGPLIPPPXPMLSTLLRHXHRRRLLLVADPQHASPSAXLAAAMSSSASAPHGGRKPNRLAAEHSPYLLQHAHNPVDWYPWGEEAFQKARAKDVPIFLSIGYSTCHWCHVMEVESFENEEVAKLLNDWFVSIKVDREERPDVDKVYMTYVSALHGGGGWPLSVFLSPDLKPLMGGTYFPPDDNYGRPGFKTVLRKVKEAWETKREALERTGNPVIEQLRDALSAKASSQDVPNDLAVVSVDQCVEKV

SEQ ID NO: 202684 - protein, 108 aa, Zea mays
  unsure (1)..(108): unsure at all Xaa locations
  Clone ID: MRT4577_116438C.1.pep
PGGFFLRFLVAFGVLAGGLPRLRFGFLVRVVFVSPLVVRFLAVWRVRVLLFPLGVVAVVLVAVVGFPAWGGWGVFPLEVPLCGGPFGWRNXWVVPGFPARCLLAGLFP

SEQ ID NO: 202685 - protein, 113 aa, Zea mays
  Clone ID: MRT4577_116439C.1.pep
GRMVAPCGVERELRCCYCIPHGGERYRAPPGIPSWLKILRSELNLSQGNYCRHGQHRERRRGSIGTPLGAAGSAGIVIGARLLPQIPVASCSGDLRKGTTEVQMRFRIFSVSL

SEQ ID NO: 202686 - protein, 33 aa, Zea mays
  Clone ID: MRT4577_11643C.1.pep
YDKSAVLSQIMRCYWPRSKFHISRESDPVDSCA

SEQ ID NO: 202687 - protein, 103 aa, Zea mays
  Clone ID: MRT4577_116440C.1.pep
DQYANIGRASVPYDISSFCIQGRDLEKKSSLFHSKKKKNPCSRQHVVCILLKEVAMSTVEIFIFMIISGISLCLYVNLWISFGTRCQCLLMFDTSYLMNSVFL

SEQ ID NO: 202688 - protein, 100 aa, Zea mays
  Clone ID: MRT4577_116441C.1.pep
RANGDNNLPLEVACYLARYHIALVSVVHGVSVVLQIVLESHLPFALLAPEFVIFCVLPSRCGIIVAQGTRVVDEGILGFPENIIVQSRLIQYDFALHVES

SEQ ID NO: 202689 - protein, 138 aa, Zea mays
  unsure (1)..(138): unsure at all Xaa locations
  Clone ID: MRT4577_116442C.1.pep
LWISLGGRGGGLGGLPLKSDQTPQKPPHAGGAQGGGXKPRPPPKGPGGPPSQGGGPAAGKPTGRGPPPERGRGGRGEKRGQRGPQHPPPTHQNPPPGHPDXKPPDTTTNPHAPEGEKKPSPAPPQETQADHGYPRQEP

SEQ ID NO: 202690 - protein, 75 aa, Zea mays
  Clone ID: MRT4577_116443C.1.pep
IYSIFPIHKAHDVPYINGDPYDVLLGTIRKPTEFKMGFLWRIVNEIINRNTVAKVCIYEFQLCVLLLIISSIQKE

SEQ ID NO: 202691 - protein, 91 aa, Zea mays
  Clone ID: MRT4577_116444C.1.pep
GHLHPPLTPAPTSMSLVIECCILMSDRCRRTVRELVFPRRRRMSWESHRKSSGVPKAQHPSTPLTLHSRALRLTKSPHQVSQPKLLQMTTA

SEQ ID NO: 202692 - protein, 81 aa, Zea mays
  Clone ID: MRT4577_116445C.1.pep
RTRGRTRGFQAICKATHSQYTQTCAELTETWRTRAYSCSGRWTRCSTRTTLRLPAPPPSTALQRGYFPLAQSAPRGLACSR

SEQ ID NO: 202693 - protein, 53 aa, Zea mays
  Clone ID: MRT4577_116446C.1.pep
LWVRDSEIFENRDIADEISEQKGDILQVEEGFRGTLLSSSVSAQLCQGITFSE

SEQ ID NO: 202694 - protein, 154 aa, Zea mays
  unsure (1)..(154): unsure at all Xaa locations
  Clone ID: MRT4577_116447C.1.pep
STFHRHHAIASVPSPKPLLLASQPRLFNSLTMAKKAAAADVSKKSCACGRHSMGDKEPCRFCPRVVCDSCREEYCCGPICEPCNADREHLMQCDKCEAPVCEKCIVITKGAREGNSCKSCKKNAHAAAADAQPAAISVXXRGHXRNVHHVRQPD

SEQ ID NO: 202695 - protein, 57 aa, Zea mays
  Clone ID: MRT4577_116448C.1.pep
LLVWYAMLLVLCAVFSCFYFTLDPKGVQCHLISLYDHSGLPQKKKKKKKKKKKKKNN

SEQ ID NO: 202696 - protein, 90 aa, Zea mays
  unsure (1)..(90): unsure at all Xaa locations
  Clone ID: MRT4577_116449C.1.pep
YPTTHFKKDWPIYVKTWVTQPGREQRHPIARQNKAVXKICPRPTAVPVRAIAECHTLKCNMKPRAVRGSTLEEGKAACIPQRLAPTHWHP

SEQ ID NO: 202697 - protein, 70 aa, Zea mays
  Clone ID: MRT4577_11644C.1.pep
GLPNRLVESSDDCETASVTGQYVGPVHRIGSSATVKDGDVYVNHIVGFGLGRKKTHVLARAVFSPLAVTS

SEQ ID NO: 202698 - protein, 74 aa, Zea mays
  Clone ID: MRT4577_116450C.1.pep
NNQAFCNSNEIVWAIADWPDCQNLFLGVLFSSGAELSQACTIATRAVKPCSTTYMADILNSVVGISSRNKIHQE

SEQ ID NO: 202699 - protein, 58 aa, Zea mays
  Clone ID: MRT4577_116451C.1.pep
LEQGMLASNGSSASSDVKTWQAVPDTQTQARPKVHHGTNGSQNITKNTTISAFPEPWG

SEQ ID NO: 202700 - protein, 206 aa, Zea mays
  unsure (1)..(206): unsure at all Xaa locations
  Clone ID: MRT4577_116452C.1.pep
KTPFSPSLPALPRRVASGRPSGPDGSXFSYRXVVASRSLWVSFFFSRLARLFFFRXXFFLSXGLLLLLSLSSGAAAAMFXVLSLAAGFLSFVVGVLGXLPPLPLLLRLXXGLSFLXVAFSVSCLLRPXLFFLACCFSLCLPPLLVAPCFFCFSLSPAFLFLFSSLPSPRPFVSFLPPSSLLPFFFSPLPPLASPPLFLLFPPLFSA

SEQ ID NO: 202701 - protein, 75 aa, Zea mays
  Clone ID: MRT4577_116453C.1.pep
KSHVTSVGYSIRHADKNGFSFKDLDNGTLCSKDEIQDHGDIHSNDDVKKNVCGKQDLDQDCSMDISNARKMNIQY

SEQ ID NO: 202702 - protein, 430 aa, Zea mays
  unsure (1)..(430): unsure at all Xaa locations
  Clone ID: MRT4577_116454C.1.pep
MAASDLESKAKEAFVDDDFELATELYSQAIDAGPATADLYADRAQAHIKLGNYTEAVADANKAIELDPMMHKAYYRKGAACIKLEEYQTAKAALELGSSYASGDSRFARLLKECDERIAXEKLXQQCVCIWWWCWGLGYAMWCMLFSDDMSPXLPFLRNVCSSLVDWGMIMFQLNHLILPVMLXFMFPEESSQAPVKNVEATVAATIEDKEDFTNMENTPPVIEPPSKPKYRHDYYNSATEVVLTIFAKGVPADSVVIDFGEQMLSVSIEVPGEEPYHFQPRLFSKIIPEKCKYQVLSTKVEIRLAKAEQVTWTTLDYSGRPKTVPQKISTPAETAPRPSYPSSKAKKDWDKLEAEVKKEEKEEKLDGDAALNKFFRDIYKDADEDMRRAMMKSFVESNGTVLSTNWKDVGAKKVEGSPPDGMELKKWEY

SEQ ID NO: 202703 - protein, 444 aa, Zea mays
  Clone ID: MRT4577_116455C.1.pep
HSKAAPLTPSLRLPCPRGHVRVTSSLSLCLYSSFLGAHAQPRSRRGGREISRPEDSIILFALAQVIVWSSPAEAQTPKAGRGAMAASDLESKAKEAFVDDDFELATELYSQAIDAGPATADLYADRAQAHIKLGNYTEAVADANKAIELDPMMHKAYYRKGAACIKLEEYQTAKAALELGSSYASGDSRFARLLKECDERIAEESSQAPVKNVEATVAATIEDKEDFTNMENTPPVIEPPSKPKYRHDYYNSATEVVLTIFAKGVPADSVVIDFGEQMLSVSIEVPGEEPYHFQPRLFSKIIPEKCKYQVLSTKVEIRLAKAEQVTWTTLDYSGRPKTVPQKISTPAETAPRPSYPSSKAKKDWDKLEAEVKKEEKEEKLDGDAALNKFFRDIYKDADEDMRRAMMKSFVESNGTVLSTNWKDVGAKKVEGSPPDGMELKKWEY

SEQ ID NO: 202704 - protein, 361 aa, Zea mays
  Clone ID: MRT4577_116456C.1.pep
MAASDLESKAKEAFVDDDFELAAELYTQAIDAGPATADLYADRAQAHIKLGNYTEAVADANKAIGLDPTMHKAYYRKGAACIKLEEYQTAKAALELGSSYAPGDSRFTRLLKECDECIAEESSQAPAKNVEAPVAATVEDKEDVANMDNTPPVVEPPSKPKYRHDYYNSATEVVLTIYAKGVPADSVVIDFGDQMLSVSIEVPGEEPYHFQPRLFSKIIPEKCKYQVLSTKVEIRLAKAEQVTWTTLDYSGRPKAIPQKISTPAETAPRPSYPSSKSKKDWDKLEAEVKKEEKEEKLEGDAALNKFFRDIYKDADEDMRRAMDKSFRESNGTVLSTNWKDVGSKTVEASPPDGMELKKWEI

SEQ ID NO: 202705 - protein, 85 aa, Zea mays
  Clone ID: MRT4577_116457C.1.pep
NLSIHRTIFVRGVKEIASSAVHKTRSSSIRISALCTGSEHSTSLSRRRRWRRVRHISMALMFMALDVTLVITAYVYNYDVAYNNR

SEQ ID NO: 202706 - protein, 50 aa, Zea mays
  Clone ID: MRT4577_116458C.1.pep
QTENNFFTFMTGKHLQREFFYTGRFIYKSQYHSYSNQILVHFSYITSPLN

SEQ ID NO: 202707 - protein, 50 aa, Zea mays
  Clone ID: MRT4577_116459C.1.pep
SSSNAGLLLYVKLHDGDRLCACTGHGQILSDGLKVHYTTYTPSPVVAAQR

SEQ ID NO: 202708 - protein, 91 aa, Zea mays
  Clone ID: MRT4577_11645C.1.pep
GTSSRPGYLSVWTRVLLAAARCRLPRPSRGPHYRPPPSGFQVHVALSSPSLSAYGPLSLHRCNKRLAPCHAIGRPHHYASALIAPAAKLPP

SEQ ID NO: 202709 - protein, 61 aa, Zea mays
  unsure (1)..(61): unsure at all Xaa locations
  Clone ID: MRT4577_116460C.1.pep
KXXAXXPVDGFYRPGLXDEQXTYLRVAVTIIRNRPXHPIXWRLLQCNNEPYPQXYTQQPAI

SEQ ID NO: 202710 - protein, 60 aa, Zea mays
  Clone ID: MRT4577_116461C.1.pep
LVVSPMGFLPLPEQCVSFMEGPCHVPLVLPPGLCSHALCASSIQYQALAFCPGGLMSFGH

SEQ ID NO: 202711 - protein, 145 aa, Zea mays
  unsure (1)..(145): unsure at all Xaa locations
  Clone ID: MRT4577_116462C.1.pep
IFQKKGPKFEKAFLAVPNLLLKKRGVREFFFQKVGDPSPGVDKKNGGAGKKFVITPGPPESFFFFGATFFLENRREFFLFFARTSYFPPGPTCFFYSTRVYVRTARFFFFPXGFDWGAAHFWCCAREQPGLPSFPCINQAWTVDR

SEQ ID NO: 202712 - protein, 108 aa, Zea mays
  Clone ID: MRT4577_116463C.1.pep
PARADPAICGSARTSPRRAAEWSHQKPRPRGAGKVRHGDNRDLQSNKHPQLGRSLRPRSLGATRYAALKGPSFGSELSFLGRNASLRAAWTKRSAPRAKSGYQISPQA

SEQ ID NO: 202713 - protein, 78 aa, Zea mays
  unsure (1)..(78): unsure at all Xaa locations
  Clone ID: MRT4577_116464C.1.pep
GTCRAKFKLPEVQNPCQPKNWGFPKVGLPQVLQCQIHGGLVSGGDCSKRCGXKEVCNRGLLERLAPGQAFQAAVPLER

SEQ ID NO: 202714 - protein, 63 aa, Zea mays
  unsure (1)..(63): unsure at all Xaa locations
  Clone ID: MRT4577_116465C.1.pep
LVALLWAVLLPARVSVLVSGLAVVVRFALPLGVVGLGCCLLRRRFPLXGVFRVFLLLSQFACL

SEQ ID NO: 202715 - protein, 93 aa, Zea mays
  Clone ID: MRT4577_116466C.1.pep
CLQDGSTTNFHSLLNNSVFGPDSSFNSPSLFRLADPRRRGSLLLHRRGGLLLRPPRGLRRTPHGNLPGEPIRGPTDLRRLIDLLRAAYPVDRS

SEQ ID NO: 202716 - protein, 47 aa, Zea mays
  unsure (1)..(47): unsure at all Xaa locations
  Clone ID: MRT4577_116467C.1.pep
YRVNNGCISYKYVMTMVDXCFTALRCDVYVLDDHGWYSCCHLFCLCG

SEQ ID NO: 202717 - protein, 126 aa, Zea mays
  Clone ID: MRT4577_116468C.1.pep
VAPGNFAFGTSSSPRQGKVHPHVVYGRLSWQWKVCPFIVGFPFAIFTGLWFALSVVCFLGPGIEGGRGWPLKVLAFRVGSRSYKGVLNQVLILWQGPRLCPSFSAAVQEVNLPFVFGSWFFFRICG

SEQ ID NO: 202718 - protein, 55 aa, Zea mays
  Clone ID: MRT4577_116469C.1.pep
LTRCPLLACPAYVERPISCQPIPALPAAHLATLDVRALRALRRATAVGQDDADVR

SEQ ID NO: 202719 - protein, 108 aa, Zea mays
  unsure (1)..(108): unsure at all Xaa locations
  Clone ID: MRT4577_11646C.1.pep
TXRDXGXYPASFMLXQLTGFXASXXFDSXPISLLXAXDXEXXXXLXWGSPXXXXXXFFDDIDMLKGXCXKSLXVPQXXFYXXAXXGQCYEXPKHRSXXVPXREXXGCI

SEQ ID NO: 202720 - protein, 50 aa, Zea mays
  unsure (1)..(50): unsure at all Xaa locations
  Clone ID: MRT4577_116470C.1.pep
ACTAPDGXRGTRGSIGRRPRAPRSPQRQRACPARAAPPXIVSLERTQWAA

SEQ ID NO: 202721 - protein, 48 aa, Zea mays
  Clone ID: MRT4577_116471C.1.pep
EGRAMAWISRPDLSPPRSDLSLPSFDGGREEERKVRYAYVLCWRARAV

SEQ ID NO: 202722 - protein, 56 aa, Zea mays
  Clone ID: MRT4577_116472C.1.pep
MSWQTYVDEHLMCEIEEQLLTSAAIVGNDGATWAQSYAFIEFKHEEMAAIMKDLDE

SEQ ID NO: 202723 - protein, 164 aa, Zea mays
  Clone ID: MRT4577_116473C.1.pep
RVTTHEHSKARSLAHTKQAGRSPQASHRLSAVPQRAFPGAMARLALVLLLLLAVAASAWAGAGASHLDLGLGFLSSGDRRRECRGTVAECLDEEEGLDLGAGPASVESHRRALYGGGGGYISYGALRRDNVPCSRRGASYYNCRPGGQANPYHRGCSRITRCRG

SEQ ID NO: 202724 - protein, 60 aa, Zea mays
  Clone ID: MRT4577_116474C.1.pep
SIHLHDDRLSRMSSYIKRNCIGSACTYDLSLRLCRSGLPAVVSPASWIVRLKVRSHHLGW

SEQ ID NO: 202725 - protein, 39 aa, Zea mays
  Clone ID: MRT4577_116475C.1.pep
AVSMWEMVAEQHCRRQELEAKFWRHVDIWLLVQWRRWAT

SEQ ID NO: 202726 - protein, 124 aa, Zea mays
  unsure (1)..(124): unsure at all Xaa locations
  Clone ID: MRT4577_116476C.1.pep
MSPISLTLRWLYFFLPGDFPFYPIGLDKDPAFLKWYPQAELIHGRXAIXAVLGIFTQHALSGIPWIQAGSDPIAIPPFFFKTLLGTXLLLILYLKSKRGVDFFNPNFXAVERATPWSRTDQNYF

SEQ ID NO: 202727 - protein, 91 aa, Zea mays
  Clone ID: MRT4577_116477C.1.pep
LNSPHMVIFLISEHILTQGVPKRKILLFPYKGKGWFDVLNPQHTLQSWIHCPDRLIKTTFLSTLESTSGAINHPFNHFSIQKGCFCHCPHG

SEQ ID NO: 202728 - protein, 113 aa, Zea mays
  Clone ID: MRT4577_116478C.1.pep
MATKILSLLARLALFASATNALIIPQCSLAANSIISQFLPPDTSMALEHQSVQAYMLQHAIAASVLQQPIDQFQHQSLAHLTIHNIISHQQLQLLPTLSHLTMVNPVSYSQQH

SEQ ID NO: 202729 - protein, 69 aa, Zea mays
  unsure (1)..(69): unsure at all Xaa locations
  Clone ID: MRT4577_116479C.1.pep
PPLLPPPPPPSATTNPGGPSTHVPRPNPSGTPSPPPPLPRESTLPVPSTPSGPAPXPDIPSPPQPVPKV

SEQ ID NO: 202730 - protein, 48 aa, Zea mays
  Clone ID: MRT4577_11647C.1.pep
GIKKMTIMLTIVEDFVSIHPLIEAPFTKKPINEYVKSCKIVALKKIKS

SEQ ID NO: 202731 - protein, 42 aa, Zea mays
  Clone ID: MRT4577_116480C.1.pep
RPFHYQQKNKGMKRVLRLRGSDNIQLSTTCNCSFIWYHNLHS

SEQ ID NO: 202732 - protein, 49 aa, Zea mays
  Clone ID: MRT4577_116481C.1.pep
FPGQFESPALRAELSQCKPLGARNLKVNHRVGSVGKSVPNLGAVPYARA

SEQ ID NO: 202733 - protein, 91 aa, Zea mays
  Clone ID: MRT4577_116482C.1.pep
YRCGVVGHQDALYARSFRQFYRECAVSGTVDVVFGDAAAVLQGCALLARAPVPGQSVVLTGHGRADPNEDTGMALHHCTGSSFVSAADPEP

SEQ ID NO: 202734 - protein, 102 aa, Zea mays
  Clone ID: MRT4577_116483C.1.pep
SSTLHGLSAGAVVSSSMCSSDSSMSWIANGSLLHQLAEFQPQVQMLQLTNFARGDCFQNDQVLFSSDAFSDEFRLRAVLLPLFTGMLDPKLAAVMAKAGGCS

SEQ ID NO: 202735 - protein, 72 aa, Zea mays
  Clone ID: MRT4577_116484C.1.pep
RELFHTFGARSLPTSPAPHVYLLTHMNFHNRILLSHFSNLAKKINLNYLASSPMRPGYTILHLHPLLIRYVY

SEQ ID NO: 202736 - protein, 58 aa, Zea mays
  Clone ID: MRT4577_116485C.1.pep
TSLIMCPFPSAVRLSECTLQAPCTSCHEIPAHHGLIMLVKAQVGRPPAISISKKPHVL

SEQ ID NO: 202737 - protein, 292 aa, Zea mays
  Clone ID: MRT4577_116486C.1.pep
RVASQVAMGNGPRVHTEFDGEEDESVLGIVDRVHVNPAKSRALGDGNSSTVSQVTKDSDSVAVPWRSMKSLVEIVKEIDEYFLKAAASGNDVVILLDSAGGRPDALEMEANKGAGKKSKSAKVFSTLSWSWSFKSQQANSESTVLNSSASGYGYHGKTLEKLYEEEQKLYKLIKDEEFARLQYKKHVSVLQKLESGEHDRLHAERVRDAIEELQTRIISLEEAVSLACFSISNLRDEELYPQIIELSAGLVHMWENMHECHQVQNHIAQQLSLIGNRPGSEPTGDIHYQATS

SEQ ID NO: 202738 - protein, 702 aa, Zea mays
  unsure (1)..(702): unsure at all Xaa locations
  Clone ID: MRT4577_116487C.1.pep
MGCSNSKVDNEEPVRRSKDRRQLMKQLVRRRPELAAVHIAYLHALRNTGATLRQFVELESALSQQPPVDLVVPPSPTPQPPPPPPPELSVTSSLPPSPCPPPPVPFSPVTTIRKMEKRDGELPPPPPPLVLSPIRLRKMEDEIHVGDFTDDDXDTDSCSTPLPPPLPPGIDWEDLDPYNVCPLSFPSPFADRNDKEVASHVAMDNDPEVDTEFYGEEDESMLGNNDVIVDRVHVNPAKGRALGDGNSSTVSWVTKDSDSMAVPWRSKKSLVEIVKEIDEYFLKAAASGNDVVIFLDSAGGRPDALEVEAKKGARKNSKSADAFSTLLFSRSLHSPAXARDIATMAVIIHXSRRSINWFHVNTLXLIFRTLNSFRRILXEVNIGIIVLNRSQCLNSQFEKXDVKYHKTYVALNXTRIISLEEAVSLACFSISNLRDEELYPQIIELSAGLVHMWKNMHECHQVQNHIAQQLSLIGNRPGSEPTSDIHRQATSQLEIEVSGWHTAFCNLITSQREYVSILSQWIGLTDCLPDDGGLMRSSSGILSLSEELQRALDRLPEKVAAEAIKTFMSVIHSIVVQQSEERQLKKKSDNMDSKFQTQLEKHSENSMQNSAQPPNKNNYSVSKNGTKLDAFRKQVEEEKARYLTSVRVSRAMTLNSLQTSLRNVFHALEGFSGVCVQAFEGISRCSEVAVIHSGAASPAISS

SEQ ID NO: 202739 - protein, 165 aa, Zea mays
  Clone ID: MRT4577_116488C.1.pep
MRDDTVCYTLQFISELHEHFMLGDRCAEYEMDIQTILTETEMTPKVMSILKKYENSWKAMKVANPISSGEGCQTMNIKRKKLKEAILLRNRCQELDDICRESNWILPRYRVLPSVTGDMYQASVHLMGPDFNLSVDGDVKVTPHEARDSAASNMLSQLQQKAREG

SEQ ID NO: 202740 - protein, 175 aa, Zea mays
  Clone ID: MRT4577_116489C.1.pep
MDKSRTEKNTKSRNVPQNIFLTPDVGPVNNDHALKSQKEKVTDKSGGITGNMNVQKYATLQLLWKMRDDTLHEHFMLGDRCAEYEMDIQTILTETEMTPKVMSILKKYENSWKAMKVANPISSGEGCQTMNIKRKKLKEAILLRNRCQELDDICRESNWIFPRYRVLSSVTRDMY

SEQ ID NO: 202741 - protein, 74 aa, Zea mays
  unsure (1)..(74): unsure at all Xaa locations
  Clone ID: MRT4577_11648C.1.pep
XYLXHNKKNTFFPPPQFNYYFFFFFFFFILKQIHPAIHIQWEELNYKRKNIFKGHQNSCNFTNPRYSALLPLLK

SEQ ID NO: 202742 - protein, 45 aa, Zea mays
  Clone ID: MRT4577_116490C.1.pep
MIFPPLVVVESKDGTISVASAFAGHQEAVQDRDHKFLSKAMEEAY

SEQ ID NO: 202743 - protein, 49 aa, Zea mays
  Clone ID: MRT4577_116491C.1.pep
ISKKKKKKKKKKKKKKKKKKKKKKKKKKKKKKKKKKKKKKIFDLPGGPF

SEQ ID NO: 202744 - protein, 119 aa, Zea mays
  unsure (1)..(119): unsure at all Xaa locations
  Clone ID: MRT4577_116492C.1.pep
VLALLVVDAAMVGTTSAGSIAAYCGQNGNEGNLADACNCGLYTYVNIVYITTLGNGQTAVLNLGGHCDPGYGCCTGQSRDIQTCQSLRIKVLLSIGGASSSYGXXCTDDANSVADYLWD

SEQ ID NO: 202745 - protein, 262 aa, Zea mays
  Clone ID: MRT4577_116493C.1.pep
SDLPGHHFSYSYEREVVRSPMVEAQCFVQLAFPVVLKNTMMTEEIHYVGFLSKLLETKIMQVLRFKYGQIYSVNVAVFLGGNKPSRTGDVRGDISVNFSCDPDISSKLVDFVLEEISCLQTEGPSEEDVLSILEIEQRAHENGLQENYFWLDRILRSYQSRLFSGDIGSTFAFQEEGRIKVRDALTPQSMQSALQRVIPFPCRKQYTVVILMPKSSCWASVKSMLSWSSNGVSRDAKILAGMAGALVLAVSLWRNSRSSLNP

SEQ ID NO: 202746 - protein, 215 aa, Zea mays
  Clone ID: MRT4577_116494C.1.pep
MGRIPSLKNFNAFPHAEDHLLKKTYSGAIVTILGLIVMVTLFAHELTFYLTTYTMHQMSVDLKRGETLPIHINVSFPSLPCEVLSVDAIDMSGKHEVDLHTNIWKLRLDKYGHIIGTEYLSDLVEKEHGTHDHDHGHEHDVEKKPEHTFNEDADKMIKSVKLAMENGEGCRVYGALDVQRVAGNFHISVHGLNIFVANQIFDGSSHVNVSHVIHR

SEQ ID NO: 202747 - protein, 36 aa, Zea mays
  Clone ID: MRT4577_116495C.1.pep
KSMYLHRKILGYLKCTKRSKLNMLIIEVLHIFLKCY

SEQ ID NO: 202748 - protein, 101 aa, Zea mays
  unsure (1)..(101): unsure at all Xaa locations
  Clone ID: MRT4577_116496C.1.pep
FGGVSVPILVLCQCVVFLRYRSSPTXXPRASPXCLELQCWCCLRIGQVVPRYRSPSGVGVVSHSFLQQQPQLELLMLMPVQEQLQLMCVFGLQLQGPGPCP

SEQ ID NO: 202749 - protein, 58 aa, Zea mays
  Clone ID: MRT4577_116497C.1.pep
ALQFYQQPFPSILCPQLCQSRHALLCPVTYLLGISIAFTVLGIVEGYKTKQKQRSERT

SEQ ID NO: 202750 - protein, 51 aa, Zea mays
  Clone ID: MRT4577_116498C.1.pep
WVVKVWLKFGPLGKLIGGGAVRCPCVVAKFGGYLLFTPRLGKKKKKKKPQP

SEQ ID NO: 202751 - protein, 47 aa, Zea mays
  Clone ID: MRT4577_116499C.1.pep
MTPPVGNNTPSSSTIKLAKLMSTTRAPSTHKTNSVFIYMLSDPDVSK

SEQ ID NO: 202752 - protein, 134 aa, Zea mays
  unsure (1)..(134): unsure at all Xaa locations
  Clone ID: MRT4577_11649C.1.pep
MLYFPTIISVLEVLAVTVPVLLTVAFVTIAERKTMASMQRRLGPNAVGXYGLLQAFADALKLLLKEYVSPTQANIVLFFLGPIITLIFSLLGYAVIPYGPGLVLLDYNLGILYMLAMSSLATYGILLAGWSANS

SEQ ID NO: 202753 - protein, 55 aa, Zea mays
  Clone ID: MRT4577_1164C.1.pep
MGNPFPGFFKRFKKKGAPSKKKKKKKKKKKKKKKKKKKKKKKKKKKKKTRGGGPG

SEQ ID NO: 202754 - protein, 130 aa, Zea mays
  Clone ID: MRT4577_116500C.1.pep
GTTNGQNRKAEGKKKNQDKKTSKATVLKHRRPKWKKKEGKKRTSFNGKSPRGLRGGLRGGKPLLKTQPLTKWAGPASGASYWGPRHSQGPKKGISPRPRGQTAGVKNRPPVHLQKKNAAGITASVSGRSS

SEQ ID NO: 202755 - protein, 62 aa, Zea mays
  Clone ID: MRT4577_116501C.1.pep
PYTVVQAIQGLRMKCPWFILKDNKAQPSGLKICMANMDLARVIHFKCSLLLKEKIDIYIDRK

SEQ ID NO: 202756 - protein, 73 aa, Zea mays
  Clone ID: MRT4577_116502C.1.pep
QDSRVSRMYGRPYADSLACTAHACHNEIDNLTLEVSIEVEAETKGDSGSSEQEYVSRIYVGMRRVEPSTQTSH

SEQ ID NO: 202757 - protein, 55 aa, Zea mays
  unsure (1)..(55): unsure at all Xaa locations
  Clone ID: MRT4577_116503C.1.pep
GGRSGMLCAIGIVVXMVKRRNVVHVFHAVKTLRNSKPNMVEAPEQYRLCYDVALE

SEQ ID NO: 202758 - protein, 103 aa, Zea mays
  Clone ID: MRT4577_116504C.1.pep
ERDAAPAESATHAPTWHRGTSHVARPWGVPCRVSCSMVHGTRGRGRDATWARQLRRIARDARPPDSSPAGTPTRTLGGRRYTRPSTRGASLGASPGPAICSET

SEQ ID NO: 202759 - protein, 59 aa, Zea mays
  Clone ID: MRT4577_116505C.1.pep
VSSLPPFSPQPGSVLGTFLFLSMFYLSYVVGSCSVPTNVLLVITKQKEKIKKKEKKQAW

SEQ ID NO: 202760 - protein, 81 aa, Zea mays
  Clone ID: MRT4577_116506C.1.pep
MTTLMNLKIMTSTCKRIVKELLSYDKDVYKDAFKTDDMKDNGSDPYDLKHHENVLPESRMIVPDCHKRLETALSYSKATLA

SEQ ID NO: 202761 - protein, 93 aa, Zea mays
  unsure (1)..(93): unsure at all Xaa locations
  Clone ID: MRT4577_116507C.1.pep
HAYAELLIYWTIFFNTAAAIITVVFIRGLKVAIGILPHFYNFVHIGXFATYFLSGFALLTWPQFSCLARHSLTHTNXPTKCKAYTNTMQDFPL

SEQ ID NO: 202762 - protein, 41 aa, Zea mays
  Clone ID: MRT4577_116508C.1.pep
WWLTRALFCHWYAFAPVWTREMRRGCGAVREIPPKNSNNPP

SEQ ID NO: 202763 - protein, 214 aa, Zea mays
  Clone ID: MRT4577_116509C.1.pep
MAAGPAMDAGAGVNSPTAAADGAYGLARIVAGCSSSPLFFWLLTVVLVAAIHIASGSRPSGSRTYGKEREKQEEEEKARRDRFAAAEEREVSGRRDDRVLEMMRSFSFMKATEEDFMEGMTAYECNGRGVDADSAHGLVALPSRLRRHRRWRRRASASSFTTRYPKFQRRRRWFREDSQQQEKSTDKNERKRRNHMFPWNHWFRCNLQTSKNTD

SEQ ID NO: 202764 - protein, 78 aa, Zea mays
  Clone ID: MRT4577_11650C.1.pep
MAGGHENSTPVPELRRTGNKYEGCDWVHEFTASAPQPKSRYAPTTAQGSDAQEPTPTRNSGLPRDSIPILIANSQCYH

SEQ ID NO: 202765 - protein, 40 aa, Zea mays
  Clone ID: MRT4577_116510C.1.pep
AQNPLLVSNCVELDFFLRFFSIVMAQPLLFNKKKTTTSWT

SEQ ID NO: 202766 - protein, 94 aa, Zea mays
  Clone ID: MRT4577_116511C.1.pep
FFPGRFLEQGPPPRVAMYGKDLRFVPFGAGGGICGGAPFPFAPVGIKLANLFSHFDWGMPPQMGGPGAKVAMSAPFGMTVSRAQKLFLVSRIPQ

SEQ ID NO: 202767 - protein, 97 aa, Zea mays
  unsure (1)..(97): unsure at all Xaa locations
  Clone ID: MRT4577_116512C.1.pep
MKMVNVHVVCLALSAANASAMQMLCPCAELQGLYGAGASLTTIIGALGLXPEAEXLRHPQCTPLAEVPYYAGCXHPSAMFHPLRQQCCQQQMRITDV

SEQ ID NO: 202768 - protein, 40 aa, Zea mays
  Clone ID: MRT4577_116513C.1.pep
IGSNWINITKGRIIFALSLCILIRHMCTLNSLGYAARYSY

SEQ ID NO: 202769 - protein, 33 aa, Zea mays
  Clone ID: MRT4577_116514C.1.pep
SEKCIWGSSYWCQATETAAQCNAVEHCKRHVWN

SEQ ID NO: 202770 - protein, 88 aa, Zea mays
  unsure (1)..(88): unsure at all Xaa locations
  Clone ID: MRT4577_116515C.1.pep
CTNNGRQKFCFLMLLGLSASAATATIXPQCXQAAITNFLAPYLXPAEFLVCENPILEPYRIQQAVAVGILPXDPRXLQQPKDVLQEEP

SEQ ID NO: 202771 - protein, 119 aa, Zea mays
  unsure (1)..(119): unsure at all Xaa locations
  Clone ID: MRT4577_116516C.1.pep
AGTHSNVYRSNCTSFPSNHFQRLSVVIRSYLNAEILSTDDTHTILDHDLLYMNDDLTNMLXGTSQISPSXKLLDNISKAPEQTSADXYFRTQHSLHKDDXDLAPESLXQPKSYSDYASS

SEQ ID NO: 202772 - protein, 46 aa, Zea mays
  Clone ID: MRT4577_116517C.1.pep
DQGFMKLGQSKEDKLRRVTLQIDSSDITFAFKGNRFFQKCLEQPRC

SEQ ID NO: 202773 - protein, 54 aa, Zea mays
  unsure (1)..(54): unsure at all Xaa locations
  Clone ID: MRT4577_116518C.1.pep
MAVKGDGTVIGIDLGTTYSXVCVRQHERVEIIANDHCNRTTPSYVIFTESECLF

SEQ ID NO: 202774 - protein, 113 aa, Zea mays
  Clone ID: MRT4577_116519C.1.pep
RVFGVPQPGWYRVYYIINNIQELVTALTQEHPVVLMFWADWNQPSKATYWDLAIAKKDEAVFCQLDFDKFKDVVEKFRVKALPTFLLIKEGEEQRRVVGAKVEELNMALSDIG

SEQ ID NO: 202775 - protein, 74 aa, Zea mays
  unsure (1)..(74): unsure at all Xaa locations
  Clone ID: MRT4577_11651C.1.pep
KKKXVPPPPTHHPSAPNLPRCPHHSFLSHTRPQSSRRGDAVPPTEWCLGPVAPVPNLGKSETRRLYKVRTRSST

SEQ ID NO: 202776 - protein, 118 aa, Zea mays
  Clone ID: MRT4577_116520C.1.pep
FLCCGVVFGVPQPGWYRVYYIINNIQELVTALTQEHPVVLMFWADWNQPSKATYWDLAIAKKDEAVFCQLDFDKFKDVVEKFRVKALPTFLLIKEGEEQRRVVGAKVEELNMALSDIG

SEQ ID NO: 202777 - protein, 114 aa, Zea mays
  unsure (1)..(114): unsure at all Xaa locations
  Clone ID: MRT4577_116521C.1.pep
AYVNASXDMNEPEKFFRRIKEDGLKPNAVXYGTLTKGYSKIDSVEKVMRVYERMRIXGVEPNQTIYTTIXMDAHGRNSGFGDAVIWFEEMEARGYPPDQKAKNILLSLAETPEE

SEQ ID NO: 202778 - protein, 128 aa, Zea mays
  Clone ID: MRT4577_116522C.1.pep
PRVRVPVPRVYHAPRPSERGPLHLAPQPMHASGLTPRQARGEADLAHRPQISFQTRRQQPGKGRPCMVGGPFPQRTQFHPLPYLAVMACTTPPSSPSFQIQPSTVHAPTSIDCYCLNRQCYWSGWLGL

SEQ ID NO: 202779 - protein, 71 aa, Zea mays
  Clone ID: MRT4577_116523C.1.pep
PPDKGEIFKIPFDRYFPPRRGNVIPAKLEINPPRIGGMSLSVNPKGGGSGAKNGAGDFRVEVAWNKTFKTL

SEQ ID NO: 202780 - protein, 63 aa, Zea mays
  Clone ID: MRT4577_116524C.1.pep
KGPHLDQRTPERQAVEGIARHAQPKGQRTGPSLLNLALMGGLTSYTTGCGTNACICEPFCLIL

SEQ ID NO: 202781 - protein, 110 aa, Zea mays
  Clone ID: MRT4577_116525C.1.pep
RVERQRANRKMVKTPPGGGAGSINKGIQETHISRKSLEEKHRGGGGQNHMTGWVKGQEGRSIMEGGFLVLIGKGAGSRKGFGGSGSFSGGSGTLGGSSGSGIGTSGSGTG

SEQ ID NO: 202782 - protein, 68 aa, Zea mays
  Clone ID: MRT4577_116526C.1.pep
RTYEDYLEGFRVFDNEGNGKVMGAELRHVLTTHGEKMTEEEVETVLAGHEDSNGCINYEAFLKHILSV

SEQ ID NO: 202783 - protein, 166 aa, Zea mays
  Clone ID: MRT4577_116527C.1.pep
MARGGSGCRLLALLLVLTAFNGSFAARHLLDTAAAPEATPAQPSIPAVPTKLPPVPTIPAVPTTLTLPPMPSIPAVPKMTIPPIPSIPIPKLALPPTAAGAIPSLPNPVIPTTVPAISAVPVTLPPMPSIPTTMPSIPTTIPTTIPTIPGLQVPPFTAPSPQTTSP

SEQ ID NO: 202784 - protein, 122 aa, Zea mays
  unsure (1)..(122): unsure at all Xaa locations
  Clone ID: MRT4577_116528C.1.pep
LEGSYNTVGRMRQXLDNRFGPRKGHMPKLTDNHQIAPEPTRANINPGQARLVKDPRPGNLLLVHYSGHGTRPPNETWPADDXTSKASAVVPCNTNLMTDDDFKQHVQKDPVGCLFTIVTDSC

SEQ ID NO: 202785 - protein, 73 aa, Zea mays
  unsure (1)..(73): unsure at all Xaa locations
  Clone ID: MRT4577_116529C.1.pep
SLWLPGLLTTSXXKSVQFSYXDIPLTYFNVYHWSYRYYLLPFYVAASAGPLLSHALSPPPPPRDKKRESGLRS

SEQ ID NO: 202786 - protein, 91 aa, Zea mays
  unsure (1)..(91): unsure at all Xaa locations
  Clone ID: MRT4577_11652C.1.pep
PLDIYSACCATIVSIASFHNXRMWSFLGLLMTTYTAWYLNIAGIERCQLEGVTHSGASKIXVLYFIGATIILYTLGGHAVTVDIMHAMSKP

SEQ ID NO: 202787 - protein, 76 aa, Zea mays
  Clone ID: MRT4577_116530C.1.pep
RTTALMRKTRIQMGVHSAQDHHAGWGGAHSTRAFTTQEQLQMKHTMLAAYDPAIQRHLILMCAQNIRDSIREHGLS

SEQ ID NO: 202788 - protein, 85 aa, Zea mays
  unsure (1)..(85): unsure at all Xaa locations
  Clone ID: MRT4577_116531C.1.pep
LPNFKVSNVDNYEPKQDPGGWLAVYTTAARAATAMEDVLIAYIPIVLWQDTLQWLRHLPRHCIDDXDDISRWFVANFQSLSDKPT

SEQ ID NO: 202789 - protein, 85 aa, Zea mays
  Clone ID: MRT4577_116532C.1.pep
PKPPLSIRITSPETVGYLSCCHVFLKVSRNLLRKHASLNLLVLGLHTLLVHKRHHLLSSSSKTVSCRSHLNLNLCRLSFVICPRV

SEQ ID NO: 202790 - protein, 176 aa, Zea mays
  unsure (1)..(176): unsure at all Xaa locations
  Clone ID: MRT4577_116533C.1.pep
MAAXARRLSEFADSLGLPFQYGSLRVRSDEDLHGFATSCCSCSVVVSCDTTDIRSYSSLTKLLAGVVRILRPKLVVTAEEELLRAGRNHPGAAAITFAGFFREALQHFGAVLESLASCFRDAGYGACLGLVEREALGPRIQDAVGQYQCAGSVTGGASLELEGFRAREMSSFSVPG

SEQ ID NO: 202791 - protein, 30 aa, Zea mays
  Clone ID: MRT4577_116534C.1.pep
LVLIMFIADTFFKLISSHNFSQHTILYHKV

SEQ ID NO: 202792 - protein, 75 aa, Zea mays
  Clone ID: MRT4577_116535C.1.pep
MSCNCGSGCSCGSDCKCGKMYPDLTEQGSAAAQVAAVVVLGVAPENKAGQFEVAAGQSGEGCSCGDNCKCNPCNC

SEQ ID NO: 202793 - protein, 102 aa, Zea mays
  Clone ID: MRT4577_116536C.1.pep
PSSSLYRSCPTLSVRLTNNSSIHLFIISLFLFIYLLSYFFFLFFIFFYLIFFFILFFYLFFFFYFIFFFLFLFYFFFYFFYFFIFFFYFFFYFIFFFLYFFY

SEQ ID NO: 202794 - protein, 106 aa, Zea mays
  Clone ID: MRT4577_116537C.1.pep
MADADADYRRCVERLACATSDKSAWRIALNYYGEILDFKDISDRKTERYSDSRLITFSFENCLLVAFANMYGKDLDRRDLTANHAQIRGEDEIHAGYGKSQLQQML

SEQ ID NO: 202795 - protein, 119 aa, Zea mays
  unsure (1)..(119): unsure at all Xaa locations
  Clone ID: MRT4577_116538C.1.pep
TRPLCLWGDQNAIYGSPSDQHQGLNGRHNPXSWLNHAFPHVEHPPVVTPHASVAPFDLHKTRQGIAFKIFXGSLVDTTSPSPVQLSFPLPAIHEHVLQTRPSSPVNELLPVHIECLLEG

SEQ ID NO: 202796 - protein, 89 aa, Zea mays
  Clone ID: MRT4577_116539C.1.pep
LEPHHPVSLTPQVLAMIAYQALHTISAPTRSRIWISVMMTQRRVWTVLRRCPSTGTFRSQRTDTLFSHALEPPSVAPISTAVRVAHRVG

SEQ ID NO: 202797 - protein, 69 aa, Zea mays
  Clone ID: MRT4577_11653C.1.pep
LSGGRFSREFTFQSLPRENRRVLAAPLASGSRRRPTRSTMGDGDNDDCDDRDHAALLRAEPAAGGRSTS

SEQ ID NO: 202798 - protein, 208 aa, Zea mays
  Clone ID: MRT4577_116540C.1.pep
MDEDALTEILARLPCRSLARFQCVSTSWRRIISSDYPRRRLPLITSGVLYHDDTRRGGADGGRRQQVYTYACAFASGGGATATATAEAPDMGFFPRHDTSTIIDGCNGLLLYYASRPTAAFHVVNPTTRRWAELPAPRARTLLSVLAFDPCASPRYRVVCFTGWLPRGATLEVFDSERGAWTDHEVDFGLDTDAMSATMHYLRRRSTC

SEQ ID NO: 202799 - protein, 57 aa, Zea mays
  Clone ID: MRT4577_116541C.1.pep
LAMIGRLSARILKRNITFTRLLLLLKQSYGDQDHDHVLVGGVHEGVIGEPNGDSGGV

SEQ ID NO: 202800 - protein, 62 aa, Zea mays
  unsure (1)..(62): unsure at all Xaa locations
  Clone ID: MRT4577_116542C.1.pep
MSXQGGXGKPLKAPKADXKEYDDTDLXYLQXKKDAXXXLXDXKXXXQXGAIGGSGXXXXGXX

SEQ ID NO: 202801 - protein, 94 aa, Zea mays
  unsure (1)..(94): unsure at all Xaa locations
  Clone ID: MRT4577_116543C.1.pep
KVGFVPGKIPPPLSGLGSFKLKGSLGGVNXPPEQQLVSSLFKTVKDRLCHRQVDPPDFRFFLPPLIGGPSKKPPFWTSQGEGPFFFQWTSLFPF

SEQ ID NO: 202802 - protein, 51 aa, Zea mays
  unsure (1)..(51): unsure at all Xaa locations
  Clone ID: MRT4577_116544C.1.pep
FLHACCALRSCIAAPRAWRIAXSSLATLHVAAPDGDQPMVELAERAPRVSR

SEQ ID NO: 202803 - protein, 56 aa, Zea mays
  Clone ID: MRT4577_116545C.1.pep
NHWNSFDVDWIRLGMVCILRRHRVYGGIQVYPWDYCLSIKHKVKKSIYSSYRKERL

SEQ ID NO: 202804 - protein, 71 aa, Zea mays
  Clone ID: MRT4577_116546C.1.pep
QVWRLVPPPLRSEWAEGSTGGASPPAVRALVNNWTTRWPPNPTRPQRRVKKPHRFLPESLPLHTTSPRTIS

SEQ ID NO: 202805 - protein, 39 aa, Zea mays
  Clone ID: MRT4577_116547C.1.pep
LCAWALDYTCPDWAIVHLQHLTTSAFTRAVVSGATDVRI

SEQ ID NO: 202806 - protein, 36 aa, Zea mays
  Clone ID: MRT4577_116548C.1.pep
CIAGPQGGSGRVAVSCPRLTADLWLRDKVADVLEPN

SEQ ID NO: 202807 - protein, 146 aa, Zea mays
  Clone ID: MRT4577_116549C.1.pep
MSEHLFEDTFVVTRLDPDGKKFDRVSRVEARSEQLDMYMQLDVATDVYPTHAGEKFNMVIAPTLNLDGTPDTGYYTQAGRKTLADNYEYVMQGKLYKISEDTSSSQNAKVEMYASFGGLLMLLRGDPSTAASFELDQRLFLLIRKV

SEQ ID NO: 202808 - protein, 341 aa, Zea mays
  Clone ID: MRT4577_11654C.1.pep
MSGRYFRDMSIVRVGGDSTAPAPEENEVVVYRSFLKDMPKETTAESNEGSLVRLKYTFRYREKFDEPNDDWLKCIEATSDELLGTYSKAEDDALSAAFRGRGKKRLNRVFDAIGFIYANYCYPLRKGKKRKTAASATTAVPKGKKMKVLTHRPRYIETVVVPEFDESTSSTAEAEQAAPAARSAEGSIVVSKVPTVGPTEAKGDAAKEPKLEKTVIMPEIMSPPVETELSKVLKAPAATPKRRRMASVLDAVMETTKALTPAPTKKVVEAVKVQAEVEAGPSMPIETKATVCADKAEQQTPDTAMAAGQDMIEKAKSPAPEAPTEDVDYIIRHASGKLSKE

SEQ ID NO: 202809 - protein, 112 aa, Zea mays
  unsure (1)..(112): unsure at all Xaa locations
  Clone ID: MRT4577_116550C.1.pep
SLVERPRGIIDGLTGANMHARLTGTAWLMRKNVLDLNDFGATVVDSISEFLGKGVTCQLISCTLVDANIGNRGQLRAEANXEQRLTSLPSLTTVESKLGVTFDXEVEKPYRD

SEQ ID NO: 202810 - protein, 146 aa, Zea mays
  Clone ID: MRT4577_116551C.1.pep
MSEHLFEDTFVVTRLDPDGKKFDRVSRVEARSEQLDMYMQLDVATDVYPMHAGEKFNMVIAPTLNLDGTPDTGYYTQAGRKTLADNYEYVMQGKLYKISEDTSSSQNAKVEMYASFGGLLMLLRGDPSTAASFELDQRLFLLIRKV

SEQ ID NO: 202811 - protein, 146 aa, Zea mays; identical to SEQ ID NO: 202810
  Clone ID: MRT4577_116552C.1.pep

SEQ ID NO: 202812 - protein, 146 aa, Zea mays; identical to SEQ ID NO: 202810
  Clone ID: MRT4577_116553C.1.pep

SEQ ID NO: 202813 - protein, 192 aa, Zea mays
  Clone ID: MRT4577_116554C.1.pep
MAGGDLTPPPPPPPPPEETPPAAAAEDLIEIVEEGSGRLDIARYVDHVRDLSAGAIATFEGTTRDHFAGRRVVELRYEAYAAMARRRLAAILREARSRHALRRLAVAHRLGAVPAGEASVFVAASATHRADAMEACRYVIDELKASVPIWKKEVYDDGEVWKENREFLDRHSADGDATAGGCCGSKVRVQEA

SEQ ID NO: 202814 - protein, 78 aa, Zea mays
  Clone ID: MRT4577_116555C.1.pep
MSSPGGADGAKKFWPEVVGLTLEKAKRVILWAKPDPDIFVLPVGPPVPMDFRPTRVRIFVAPVAGAPPIGWGLNFQNE

SEQ ID NO: 202815 - protein, 246 aa, Zea mays
  Clone ID: MRT4577_116556C.1.pep
VRSSLTDPLPSPSFLSDSDPPPLRLRSRVRPPLRLHRLCLGGTRTLPFRQAVHAQGGGGRHARLHRGARRRRHGLQGASSAALSPPSSGSAATTTTATEREEGPRTPFYLELQLLARLNHRHVVRLRGFALAHHVLAIYPNRWAACTWARAISTGKQNHSDNIFGWLHAGRYHRHEDVPPPDHGMRRKIWHPNPLPISPERSCRGSGGGYERRPDRWQGGGFGGVGSLLSRPLESLGGRRKRISCH

SEQ ID NO: 202816 - protein, 100 aa, Zea mays
  Clone ID: MRT4577_116557C.1.pep
ALLRSYDDACARSEAWKRAGGRPFFFFLTNRNPGVKRIFLGHQKQGRAPKGKDQFFEPAPGGLPDPGGPLRPPFNPIWSPEHVSGFPANRRGGAIQFEWE

SEQ ID NO: 202817 - protein, 127 aa, Zea mays
  Clone ID: MRT4577_116558C.1.pep
MDPKVKGMVVNDKEKESLFNEPRDDKPTDSGLSHKKRDGKKKRHIKKIIYYDSDASSSSPRDNDDDDSSKKRTVNQNYSFDYSRMPYNSNAHLLSIPLGKPPHFDGEDYSFWSHKMRSHLFSLHPSI

SEQ ID NO: 202818 - protein, 103 aa, Zea mays
  unsure (1)..(103): unsure at all Xaa locations
  Clone ID: MRT4577_116559C.1.pep
LRHLTRTGNMHSCTVAREAADTRCKALSPDLXPLMLTIQASRQSYXYCLIVYDXIPYESLMHYKFTTWLFTKCYSFEMKLCXQHVQNKILPQQQKIAALRQEV

SEQ ID NO: 202819 - protein, 91 aa, Zea mays
  Clone ID: MRT4577_11655C.1.pep
AVVTTQSTFFFFFFFFFLTCAFITVTVAPFYKLHGDRDPSTSSLLKSYIIDRLIYPIYKLHDQIKADRSTRNCRNTSNVQNHSIVSIYLTA

SEQ ID NO: 202820 - protein, 84 aa, Zea mays
  Clone ID: MRT4577_116560C.1.pep
FRQSLFGFSSSIYKEKKESAGYPAFLSRNAHIQPSLEKFVLCYSIECASPLKVNMKTRWFHLPFHEWHGYGYVLYLEFGMYMII

SEQ ID NO: 202821 - protein, 171 aa, Zea mays
  Clone ID: MRT4577_116561C.1.pep
GEDGTGCSGSGRCRGRRRRRRRRRSSDTCALVSVLFSSLGMAFRFAEMEYVTKVNDLIGAGKSYRTLSDILDKDIQNDCVKKQGSHSRNLRRVRLGLGLIKALFEQFLATEGSLYDAATTAYGQVCAPFHSWAIRKAVGAGMYTLPTREQLVVRLNETDLSGEKQMRRYID

SEQ ID NO: 202822 - protein, 85 aa, Zea mays
  Clone ID: MRT4577_116562C.1.pep
AAVLTTASEKATQDRHSVDETLARPLQRPERGTFWSPKYCTRPSCEGCSSSETSSSPAAEVTRLLSVWCCSSRAYHPELHGYISR

SEQ ID NO: 202823 - protein, 155 aa, Zea mays
  Clone ID: MRT4577_116563C.1.pep
MTRGRLRADSFSISMVNDLIGAGKSYRTLSDILDKDIQNDCVKKQGSHSRNLRRVRLGLGLIKALFEQFLATEGSLYDAATTAYGQVCAPFHSWAIRKAVGAGMYTLPTREQLVVRLNETDLSVQKQMRRYIDASSPIIEYIDNLFLSRNISLDW

SEQ ID NO: 202824 - protein, 234 aa, Zea mays
  unsure (1)..(234): unsure at all Xaa locations
  Clone ID: MRT4577_116564C.1.pep
MLGFRQMPWSXAGAGAXPSEQLCEGVSAVVAARQGMEKPLTAVAEAFEELARGMEADGGELRLAPFSDSCALVSVLFSSLGMAFRFAEIEYVTKVNDLIGAGKSYRTLSDILDKDIQNDCVKKQGSHSRNLRRVRLGLGLIKALFEQFLDTEGTLYDAATIAYGQVCAPFHSWAIRKAVGAGMYTLPTREQLIVRLNETDFSVQKEMRRYIDASSPIIEYIDNLFLSRNISLDW

SEQ ID NO: 202825 - protein, 233 aa, Zea mays
  Clone ID: MRT4577_116565C.1.pep
MLGFRQMSWSSAEAQAPSEQLCEGVAAVVAARQGMETPLTAVAEAFEELVRGMDADGGELRVAPFSDTCALVSVLFSSLGMAFRFAEMEYVTKVNDLIGAGKSYRTLSDILDKDIQNDCVKKQGSHSRNLRRVRLGLGLIKALFEQFLATEGSLYDAATTAYGQVCAPFHSWAIRKAVGAGMYTLPTREQLVVRLNETDLSVQKQMRRYIDASSPIIEYIDNLFLSRNISLDW

SEQ ID NO: 202826 - protein, 649 aa, Zea mays
  unsure (1)..(649): unsure at all Xaa locations
  Clone ID: MRT4577_116566C.1.pep
MGGDGTRALDQTPTWAVAAVCAVIVAASILLEGFLHHLGQLLNKKRKKALFDALEKVKSELMTLGFISLLLTVTGRYIARICIPEGAANTMLPCRLSGHSVAEEPKGHGRRHLSEDPTNLFSCRKGMVSLVSADGMHQLHIFVFFLAVFHVTFSFFTMSLGRAKTRIWKVWEKETCSPQYNYLNDPSKFRLTHQTSFVRQHASCWSKSTITLYFVSFFRQFFRSVRKTDYFTLRHGFISAHLSPGTRFNFRKYIKRSLEDDFKTVVGISPPLWASALAVMLFNVHGWHNLFWFSAIPLVVILAVGTKLQAIIAMMAIEIAERHTVIQGMPVVKLSDDHFWFGKPRLVLHLIHFASFQNAFEITYFFWIWYEFGLRSCFHDNFEFIIARVCLGAIVQFMCSYITLPLYALVSQMGSEMKRTIFDEQTAKALKKWHKAVVKKKHHKDSSHNSSETPSTDTTGPAGEAGEWQRLHEVPVRHLHRYKTIAHVGGVRSPLSDXSEMKRTIFDEQTAKALKKWHKAVVKKKHHKDSSHNSSETPSTDTTGPAGEAGEWQRLHEVPVRHLHRYKTIAHVGGVRSPLSDPDYSDTDDTEPLSLQTRHLIPPAKQRSLDTERAEVRVDVVKTAAAPSDVLQXSFSFPRLLPPRHVPDK

SEQ ID NO: 202827 - protein, 113 aa, Zea mays
  unsure (1)..(113): unsure at all Xaa locations
  Clone ID: MRT4577_116567C.1.pep
GSRRGGTGXTHAPGKTTHQRAAPGGQKRGKALGADEGTGGRPQNGERRDLQTNEGAARARTGTQGRHSITGAPRPGARRRPRDTGSCASKTRIPDPARWGPQHRARERGPTSS

SEQ ID NO: 202828 - protein, 84 aa, Zea mays
  Clone ID: MRT4577_116568C.1.pep
GIKVHLKVHAVVGVAVRRLCRGEEVGDGVIVHLGDVEMGHVGVVPLDAGTKLKGCRHRKRFVVVDSHTDEKEVAGLAGSRNQAL

SEQ ID NO: 202829 - protein, 72 aa, Zea mays
  Clone ID: MRT4577_116569C.1.pep
LPTLRPFQNLVAYWRSASGASKSTGRAVESIGAVDQIYCRRSGGGPLEAVSVCVDLGASVCWWCFAWRLMFW

SEQ ID NO: 202830 - protein, 63 aa, Zea mays
  unsure (1)..(63): unsure at all Xaa locations
  Clone ID: MRT4577_11656C.1.pep
VLAPSTKGEKKVRSILEDLCGNVHRXLQCLDCIYWKGEDDVAVAGLGGESEVHPYVSFTINFV

SEQ ID NO: 202831 - protein, 68 aa, Zea mays
  Clone ID: MRT4577_116570C.1.pep
LSFTRDAHSTRVVRMLEDVEPVKLDDRAYYALPLGPLAGRGTQTEIMFSIWLCNSYCLAVGCGIYSIV

SEQ ID NO: 202832 - protein, 160 aa, Zea mays
  Clone ID: MRT4577_116571C.1.pep
RPKTEPSRGLGTINGTRAQNLTCYLTGRPRPPTRPLCRPRLHSTYSSSSQTPRIRHGMTDACCVTTPTGSSSENKAFDCRSQNPPLNKCLEAQAVVFSYALDTHTDAVTVPGRSCSIENDDEDKCWYTSDIATRQPRKKSVRARRYLNTKECDDYHDISH

SEQ ID NO: 202833 - protein, 126 aa, Zea mays
  unsure (1)..(126): unsure at all Xaa locations
  Clone ID: MRT4577_116572C.1.pep
MEGRASSRRGVLLFLLVGVASANPDGLLPNGNFEQGPDKYQMNGTRVIGRKSIPCWEISGFVEYIVSGQQQDNGMVVAVPEGARAVRLGNDASIRQRLTAMTRGTXYSVTFSASRTCAQAEQLNVS

SEQ ID NO: 202834 - protein, 38 aa, Zea mays
  Clone ID: MRT4577_116573C.1.pep
FAAPVTRGKSCVSYLSPPSYVICLDSAGSQERAGVPPR

SEQ ID NO: 202835 - protein, 191 aa, Zea mays
  unsure (1)..(191): unsure at all Xaa locations
  Clone ID: MRT4577_116574C.1.pep
NADDSPHFSPFPKLLPIPPPPPACRPQLDPRQAVEVFVPQTGGEVGAASALLPNIGPLDLFPSKIDQDIGKVTDKDCDVLRATDKLTAXNRHAKVSDVPSRPALDIKALKEPDRDRXKKVKNMKHRGYMGLNDVVXIARTMRNRSIXAKELAATVKEILKPXISVGSTVVSNDPNVPQQEIDDWEVEIPIV

SEQ ID NO: 202836 - protein, 76 aa, Zea mays
  Clone ID: MRT4577_116575C.1.pep
PSVRAHPARIGCDQGFAYLHSAAPDANVLVGAVVGGPDARDGFVDDRDSYGQTEPATYINAPLVGVLAYFAGTAKY

SEQ ID NO: 202837 - protein, 120 aa, Zea mays
  unsure (1)..(120): unsure at all Xaa locations
  Clone ID: MRT4577_116576C.1.pep
PLSVFPNQSNRDALKSXGRIPVVNRGGDHALALGREGREAWMRARGVCQAPFFGRVEAAPKEGAMVVVEEKANLETGTTKAVEELKSVFESQGKGAQNRRTEGLRALRRWWSQSEVPPVD

SEQ ID NO: 202838 - protein, 220 aa, Zea mays
  unsure (1)..(220): unsure at all Xaa locations
  Clone ID: MRT4577_116577C.1.pep
MASDRGEVDTSRAFRSVKEAVAVFGERILVREAQLRANGGAYGGRRVGKEVNSRVNAVAIAASDVKLPNRSDGVMESHSHSKPSVVNVTCNAKEEQSSSSSKPAAPSLPPVPVPRPPVAEDVPMYLVPSSPPFFASSPSLANDDGDDEEQERKAADLVVMSSIRRLEDEAARTRQEVARLKRRLAEMELSMATLNAKLHRALSKVAHMEGDXAAAARASI

SEQ ID NO: 202839 - protein, 70 aa, Zea mays
  unsure (1)..(70): unsure at all Xaa locations
  Clone ID: MRT4577_116578C.1.pep
MAVLRRGSAVALAAAAMFAGMASAVVYEVDDKVGWTIMGNPNYGAWAVSKKVXWGNTLVFTYIKQFHNVI

SEQ ID NO: 202840 - protein, 91 aa, Zea mays
  unsure (1)..(91): unsure at all Xaa locations
  Clone ID: MRT4577_116579C.1.pep
GKRCELICKRLLERILQVEEXAANEMEIHTLPYIVALQAFCIVDPTLCIPVTDPSKFVVTLQPYLNIQGDHKSXAQLLERNNFVIEXVLPP

SEQ ID NO: 202841 - protein, 377 aa, Zea mays
  Clone ID: MRT4577_11657C.1.pep
MATRYWIVSLPVQSPGATATSLWSRLQDGISRHSFDTPLYRFNVPDLRVGTLDSLLALSDDLVKSNVFVEGVSHKIRRQIEDLERAGGVDSGALTVDGVPVDTYLTRFVWDEGKYPTMSSLKEIVGSIQSQVAKIEDDMKVRAAEYNNVRSQLTAINRKQSGSLAVRDLSNLVKPEDMVCSEHLVTLLAIVPKYSQKDWLSSYESLDTFVVPRSSKQLYEDNEYALYTITLFAKVVDNFKVRAREKGFQIRDFEYSPEAQESRKQEMEKLLLEQEVMRTSLLQWCYASYSEVFSSWMHFCAVRIFVESILRYGLPPSFLSAVLAPSTKGEKKVRSILEDLCGNVHSIYWKGEDDVAVAGLGGESEVHPYVSFTINFV

SEQ ID NO: 202842 - protein, 102 aa, Zea mays
  Clone ID: MRT4577_116580C.1.pep
LFPFTRIVFAFFLKKKFFPFNHLAALNPAVYLHQQNFPPFSQLGAANGASFLTQQQLLPFYQQVGGNPPPLFQLHQLLPFGHLALKNPAPPSQQQICGGAPF

SEQ ID NO: 202843 - protein, 92 aa, Zea mays
  Clone ID: MRT4577_116581C.1.pep
NFSPISTVLGPPFRPSGPPTPKFYNNGLGRQTFLFKTTFKVFMVWYFFLSGLFLWVFKKKKSSIRGVSFPGWGHAKVQAFFFLYACFPSPPN

SEQ ID NO: 202844 - protein, 141 aa, Zea mays
  Clone ID: MRT4577_116582C.1.pep
ADRGLCLGGLSGRANLWGGCTPKAIPKQPSHESPNPGIHDRPILEENGSTRRPEQRYGPGLHPRQKTSSLNNNIKCAVNYKGKWVVVKLLNEPPVLILPLAHINKLVDNNAALDNDLQLPANNNDALLNLLQALTSTIFSQ

SEQ ID NO: 202845 - protein, 99 aa, Zea mays
  Clone ID: MRT4577_116583C.1.pep
GRGPLVQIFIFTKWLLVWGLGQGHQVTFKTLGPKKPFQFFQNRGGRGLLNIWHPVRGGEDLRTVWGPALMVGGGTGPKTRYGNRNGWFNHFFPKGGPKR

SEQ ID NO: 202846 - protein, 362 aa, Zea mays
  unsure (1)..(362): unsure at all Xaa locations
  Clone ID: MRT4577_116584C.1.pep
MPLRPLPVCTASINQQARSISHLTPPLPLQNLSIPRLAIHPSRIYTTGKSLLQKSLGQPGPPFSRHFHNTTSLQTAKTMTDTNVEAAKRAAAQQAVADHFDPAATHVGIGSGTTIVYVVEAIKQRSTNPNILFVPTGFQSRQLVVNAGLTAISFDSLPDXSYADVAFDGADEVDAELNCIKGGGACLFQEKLVAERARKFVCVADYRKRQNRLXTNWPTIPIEVAPLSQLKVAGALRMLGSTGPKLRTTLLEKSGPLKTDQDFYIIDAPFPPLLTSADVAAGKGKGDGTDGTWEVNTLSRAIKGLTGVLEVGIFSGLNGIDAQALREQDQSMKTVRGGQKPVAVYFGMQDGSIKVRTIEGET

SEQ ID NO: 202847 - protein, 108 aa, Zea mays
  unsure (1)..(108): unsure at all Xaa locations
  Clone ID: MRT4577_116585C.1.pep
HPXXQAXRRQQAXAASXXQQPXXQXQQQXXAXXTXQTXATQQQQQXXPARSHXAXGNXAAXPQQQXXAXNPXXXANXXANQPQQQXQQXXPAXXQXAKXNXAAXXQQQ

SEQ ID NO: 202848 - protein, 147 aa, Zea mays
  unsure (1)..(147): unsure at all Xaa locations
  Clone ID: MRT4577_116586C.1.pep
MLTMFSVQVEQVPHHLXVLADSRTPSPKTNASHLLRRLLAASDPVESVQLVDHSHLAYSHSKQSILRPRTFGCKDKVFCLVKAVMDNLCRLTQQHALSRXAPHEVLIIIEAYNTLSNSSLYTASFMLAQYCGYYDFFLFNKYTNSLL

SEQ ID NO: 202849 - protein, 49 aa, Zea mays
  Clone ID: MRT4577_116587C.1.pep
VITWKPFCVAMGKVLFTMISRPSAYVTVCNVMPFIPMNNDKNKLKEYNS

SEQ ID NO: 202850 - protein, 146 aa, Zea mays
  Clone ID: MRT4577_116588C.1.pep
MGRLLLVSLPATGAVIYRCKHCDTHLAYDTDIIARIGCMEIDQTFRCKNGKAYLFNRIVNVNVGTKEEDRMMTTGLHTVCDIFCVACGAILGWKYLVAFDKSQRYKEGKFILDRSTALAAAPGDAAADHHHHHARVASSDDEDDHM

SEQ ID NO: 202851 - protein, 88 aa, Zea mays
  unsure (1)..(88): unsure at all Xaa locations
  Clone ID: MRT4577_116589C.1.pep
AVWKKLSLSLSLSLSPXAGLPHRLKGGSFLISPPGRPYGGGGHVKQAPPLAAQVGALASQVMQFVVRIFQHEKKTHPGLLPGTRPPVF

SEQ ID NO: 202852 - protein, 97 aa, Zea mays
  Clone ID: MRT4577_11658C.1.pep
ATFWFIGRCKYCMAWTMYVSLSLEFVLIEIMLWLNYVKHGQDKLLIPWLMIKFLHLLLHLYNLSNLKNPNLYSLLCLKVFVLFFYHSSIYSFFRFFF

SEQ ID NO: 202853 - protein, 79 aa, Zea mays
  Clone ID: MRT4577_116590C.1.pep
PLVRARMRRLSTAPFACDPANQPGCPTQGRGMHLERHSTRTSYLSSCHEEWTQTVRAWRGRCWGSTSSCTYSTKRSRAL

SEQ ID NO: 202854 - protein, 57 aa, Zea mays
  Clone ID: MRT4577_116591C.1.pep
THVCSLSSGVQLDHAWRSLGRHPEVLGRPPTHQTLHTIRLSLSCSFKGDHINCQTSH

SEQ ID NO: 202855 - protein, 112 aa, Zea mays
  unsure (1)..(112): unsure at all Xaa locations
  Clone ID: MRT4577_116592C.1.pep
MRALYGGSANHNLDWPSLCWRGGPHEERATYKKXERLYLSEQTGGRLTNTVNMASCXEVKPTVAGAXHILQVNEEARLPSDKNYTSIGHPGEGNRVTRLSQSTTIVDTHTDR

SEQ ID NO: 202856 - protein, 96 aa, Zea mays
  Clone ID: MRT4577_116593C.1.pep
SPIPFVISAARTYFSSLPTCLSSARSRSNTLNMVLENHASTGRGSTRVGLLHSTVSDETAALAILDDAYGSKDIQECVDITTSEMLTTSTGVPSCL

SEQ ID NO: 202857 - protein, 74 aa, Zea mays
  unsure (1)..(74): unsure at all Xaa locations
  Clone ID: MRT4577_116594C.1.pep
MGTCMQCENSCETGACSKLANAYCLVATEGSYNXHSAFEARLADAIPVGKTSFGSTRIICRLCGGNKNGVILPH

SEQ ID NO: 202858 - protein, 143 aa, Zea mays
  Clone ID: MRT4577_116595C.1.pep
YVFHSAQIVFLNGRPQARPGKGVTNTCQICCRSLPDSFRFCSLGCKLGGMQWDPSLTFAIRPKRGQGSGDDGGSGSDDSFSPKKPRRMAGFDLGRFERPGGIRWSDDEGSRSNNGLITPGTPPINRCRPSRRKGIPHRAPFYG

SEQ ID NO: 202859 - protein, 74 aa, Zea mays
  Clone ID: MRT4577_116596C.1.pep
LFFFFFFFFFFFFFIFFFYFFFKKGTPKTKILFPLLPKKALPGQSNYISPRPKQSQKTGFSLTSKTRKPKKRGF

SEQ ID NO: 202860 - protein, 170 aa, Zea mays
  unsure (1)..(170): unsure at all Xaa locations
  Clone ID: MRT4577_116597C.1.pep
HASAEPPRRLQSLTVRAGVAVDSIEFTYSTDTGGQTRTAGRWGGLGGXSGSRDDDRELLXTYIYMSTNMRACVQLDLGDAEYVKEVSGTYGAFEGATTLTSFRIVTSTASDWGPWGIESGTRFCITAPIGSSIVGFYGRATTMLVAAIGVFLRLGVSGFSSSTGSTDMLG

SEQ ID NO: 202861 - protein, 97 aa, Zea mays
  unsure (1)..(97): unsure at all Xaa locations
  Clone ID: MRT4577_116598C.1.pep
RTCSSTRSCLLTLWTVTGVSCFLAAHKDSLQAVVRNAFAGADAMLIEALPKLEIVASFSVGLDKIDLTKCQEKGIRFTNTPXDVMTDDVADFVDLFD

SEQ ID NO: 202862 - protein, 182 aa, Zea mays
  unsure (1)..(182): unsure at all Xaa locations
  Clone ID: MRT4577_116599C.1.pep
MENPPSILVTPMAPAMSAQFTRITFSNLFVRRAGPGSTELTVEGRPSDQLGRRNLTDSPVFDGRGPDASLVARVQGVATQMGDVRQLYTVVFQERPLKGSTLVTEGAMTEGSDEWAIYGGTGAFAMARGVIRRTFXPTRAXGTPTNLAVEVLCPVXXXRRLAHRRHSQQQRTSAPPSSSQGR

SEQ ID NO: 202863 - protein, 377 aa, Zea mays
  Clone ID: MRT4577_11659C.1.pep
MATRYWIVSLPVQSPGAIASSLWSRLQDAISRHSFDTPLYRFNVPDLRVGTLDSLLALSDDLVKSNVFVEGVSHKIRRQIEDLERAGGVDSGALTVDGVPVDTYLTRFVWDEGKYPTMSSLKEIVGSIQSQVAKIEDDMKVRAAEYNNVRSQLTAINRKQSGSLAVRDLSNLVKPEDMVCSEHLVTLLAIVPKYSQKDWLSSYESLDTFVVPRSSKQLYEDNEYALYTITLFAKVVDNFKVRAREKGFQIRDFEYSPEAQESRKQEMEKLLLEQEVMRTSLLQWCYASYSEVFSSWMHFCAVRIFVESILRYGLPPSFLSAVLAPSTKGEKKVRSILEDLCGNVHSIYWKGEDDVAVAGLGGESEVHPYVSFTINFV

SEQ ID NO: 202864 - protein, 59 aa, Zea mays
  unsure (1)..(59): unsure at all Xaa locations
  Clone ID: MRT4577_1165C.1.pep
FAAKHGKIFFPAAKKIIDKGFCFPKKEAXRFPRMLEKSISPSKVDEFFVKKNIFLIFFL

SEQ ID NO: 202865 - protein, 132 aa, Zea mays
  unsure (1)..(132): unsure at all Xaa locations
  Clone ID: MRT4577_116600C.1.pep
LIRHEALGGGGALFPTAPGTRHAHSLMTHGLLSRLLSHLSACPLALCAPPVFFSTPHNLWFWGGXXLTXTATGITYGGRRSPGSGAAGAADGSAAALATEDLAPLPAAACAFASXWAPSPAARATSTGLETC

SEQ ID NO: 202866 - protein, 201 aa, Zea mays
  unsure (1)..(201): unsure at all Xaa locations
  Clone ID: MRT4577_116601C.1.pep
MENPPSILVTPMAPAMSAQFTRITFSNLFVRRAGPGSTELTVEGRPSDQLGRRNLTDSPVFDGRGPDASLVARVQGVAXRWATCASWTPSCRRGRRSSQGAMTEGSDEWSIYGGTGAFAMARGVIRRTFLADTSGGNSDELAVEVLCPVFRPAAFGSSSSQSASKVRASERARNRFSFLLIISSDEQHWDGLMDGWMDGCM

SEQ ID NO: 202867 - protein, 199 aa, Zea mays
  unsure (1)..(199): unsure at all Xaa locations
  Clone ID: MRT4577_116602C.1.pep
VHASADIDLLQPSSSAASTFASSQSHLKAITASKRMRSAPNQVWMNIPINTFQPRARPLFQYRYYSEQQPLRLNPAEISEVIAEVCSEATSNANQLIVPSRLSTQSRQPSADVAFSVLIKLVIDMYMMDSETAAPLTLYMLEGMLSSQKSSARTKALDLILNLXVHAHLLQPMVIGDAPLIDKSESVNRSYLNNEYGSR

SEQ ID NO: 202868 - protein, 326 aa, Zea mays
  Clone ID: MRT4577_116603C.1.pep
MENPPSILVTPMAPAMSAQFTRITFSNLFVRRAGPGSTELTVEGRPSDQLGRRNLTDSPVFDGRGPDASLVARVQGVATQMGDVRQLYTVVFQERPLKGSTLVTEGAMTEGSDEWAIYGGTGVFAMARGVIRRTFLADTSGGNSDELAVEVLCPVFRPAAFGSSSSQPAAKDISSTVVVTKVGVWGGEGGSAQDIATTEPPRRLQSLTVRAGVAVDSIEFTYSTDTGGQTRTAGRWGGLGGNVRKLDLGDAEYVKEVSGTYGAFEGATTLTSFRIVTSTARAWGPWGIESGTRFCITAPIGSSIVGFYGRATTRLVAAIGVYLRQL

SEQ ID NO: 202869 - protein, 70 aa, Zea mays
  Clone ID: MRT4577_116604C.1.pep
VAITYIRTKHVGLLLHPSTTTDAALPRRTAFLTRHLRGVPDCSHGGGDETACTSELRPQRFGPPKKENRM

SEQ ID NO: 202870 - protein, 98 aa, Zea mays
  unsure (1)..(98): unsure at all Xaa locations
  Clone ID: MRT4577_116605C.1.pep
MAPRADNKPAAKKPAEEEPAAPAEKAPAGKNPKAEKRFPAGKSAGMEGGVDMKGRXKAKKSVETYNIYIFNVLKQVHPDIVISFKAMSIINFINNDIF

SEQ ID NO: 202871 - protein, 44 aa, Zea mays
  Clone ID: MRT4577_116606C.1.pep
KQFTTRVKSYFFLPTIHRGETRIWEFFKKKSSLKSAPTETQAQG

SEQ ID NO: 202872 - protein, 70 aa, Zea mays
  Clone ID: MRT4577_116607C.1.pep
FESGGEGAKLIQTQKGSPPTNKGNTGENAPDPEKKSTVGGWNPKISGTGKPGGSDGLSLGALPGPGTQRV

SEQ ID NO: 202873 - protein, 56 aa, Zea mays
  Clone ID: MRT4577_116608C.1.pep
NNFIPKLMVFPAVGPSTYGNLTNGKGSHNFKPLTLSANYSQCNTFAGEIPEFFNMG

SEQ ID NO: 202874 - protein, 36 aa, Zea mays
  Clone ID: MRT4577_116609C.1.pep
FFFFFFFWVSGFFFFLFLKIKNISIDWKYLFKIIPS

SEQ ID NO: 202875 - protein, 180 aa, Zea mays
  unsure (1)..(180): unsure at all Xaa locations
  Clone ID: MRT4577_11660C.1.pep
AQRLAPAQLTPSSAPPPGGAMPRKRFRTKFTAEQKQRMQELSERLGWRLQKRDEAVVDEWCRDMGVGKGVFKVWMHNNKHXSWADTAPAAASLPPQALLRSSKPHAPTPALLHRHSTRPGSPLPLPSSHRPRPASTSTAPPPPRRPPSPPTTRTTPTELHRRTPLKLERRGKREWRDKHA

SEQ ID NO: 202876 - protein, 64 aa, Zea mays
  unsure (1)..(64): unsure at all Xaa locations
  Clone ID: MRT4577_116610C.1.pep
PSRRAXLFFFFCLNNKLLFQTGNRAKQQQHDIIVAVRTPASNIPLYDKEQTRYTSHTGTVSIGT

SEQ ID NO: 202877 - protein, 232 aa, Zea mays
  Clone ID: MRT4577_116611C.1.pep
NSARGQDWLLFADIFFFLMKSGCIDFLDFVDKLASRVTNSDQQILRSNHVTWLLAQIIRIEIVMNTLSSDPRKVDTTRKIISFHKEDKSLDANNIGPQSILLDFISSSQTLRIWSFNTSIREHLNSDQLQKGKQIDEWWKQMMKASGERMIDFTNLDERATGMFWVLSFTMAQPACEAVMNWFTSAGMADLIQGPNMQPSERIMMMRETYPLSMSLLSGLTINLCLKLAYQL

SEQ ID NO: 202878 - protein, 55 aa, Zea mays
  Clone ID: MRT4577_116612C.1.pep
SPRFPCGSCAVRLSALLTGVGRGLQQSICVDRLLVGPFHADGAEIITRSFKSRLG

SEQ ID NO: 202879 - protein, 78 aa, Zea mays
  Clone ID: MRT4577_116613C.1.pep
IASGPVGGLLNWGGTQPRKTGLENGTGWWFGLGNGTIFLGGLRGTLTIMGFWGPFPFLLGPPLLPKPGLHPMEMVKPC

SEQ ID NO: 202880 - protein, 145 aa, Zea mays
  unsure (1)..(145): unsure at all Xaa locations
  Clone ID: MRT4577_116614C.1.pep
MPIFSAHLSLSRTPLSLSRSLSPLWAVKAPGKGGAKRDRKALRENTQGITKPASRRRRKEGXGAKRTERLIDEETRGELKNWLENAKPDAVTYTEHTRRKTVAVMDVGYGLKSQGAXTYTGFGGVRRASVHTGGGSWGWGRLLLG

SEQ ID NO: 202881 - protein, 99 aa, Zea mays
  unsure (1)..(99): unsure at all Xaa locations
  Clone ID: MRT4577_116615C.1.pep
LNNEYRYLVLVLEAYVFINLWMGFHVSIVCRINKVFYATMYAIDSDNSDIKLFNXHQKGHQNSLHWIPVFIVILQLVGLQHLTIDIGQAVIYIVTRFVY

SEQ ID NO: 202882 - protein, 89 aa, Zea mays
  unsure (1)..(89): unsure at all Xaa locations
  Clone ID: MRT4577_116616C.1.pep
MISASXXXXXXXXXXXLLLVIFPPLALASCTAFNGPSAGTGVAPNLDSERWKKWWLTTPXXYRALQARXXXXXXXXXXXXLYYHVLSDG

SEQ ID NO: 202883 - protein, 139 aa, Zea mays
  unsure (1)..(139): unsure at all Xaa locations
  Clone ID: MRT4577_116617C.1.pep
YTNQNLELPTETKXPRICFRGRFKLDSKDSDHRKFIILEETEIPFLKREKKAERLQSPALSIPYWDATILGRRQTLGRRGEGLVIQEVEDLEAQLSGQPIHVSSRLSQFSGPIVALTEKLWMRLETTKDCSAFQIRSWR

SEQ ID NO: 202884 - protein, 71 aa, Zea mays
  Clone ID: MRT4577_116618C.1.pep
TSPNSLSTHSFDETYHFLPINSLSRSFYISQDTSKYSLYSSQKTKQSFYLPTSSISLLKHIFNLYYLSLLI

SEQ ID NO: 202885 - protein, 109 aa, Zea mays
  Clone ID: MRT4577_116619C.1.pep
KKKKKKKKKKKKKKIKPKNKKKLRGGLRPIPLTRGGRSTIHHTGRQVALYMRGGPNSTVPVSLQHTFTGKTLDITQLRDLAGLPHFNSLGINQHSPTGRPSKKARTLNG

SEQ ID NO: 202886 - protein, 261 aa, Zea mays
  Clone ID: MRT4577_11661C.1.pep
MEMSAMEEALPKAMERRKGGLRTIPFIILNEIFEKVATFGLSANMILYLTERYLMTNAFATVVLYFWHAFSNFLPILGAVLADARLGRFRVITLGSCVSLFGMCLLWLTAILPVYKNTPECAPGRPVGCAVLPWQLPLLFTSFAFMSLGSGGIRPCTLAFGADQLDKRDNSANNVRTLQTFFNWYYTVLGLSIVFASTVIVYIQQARGWVVGFAVPVVLMVTALTLFLLGSPFYIKAAANSSVVIGFVQVLVASYNTRHEP

SEQ ID NO: 202887 - protein, 68 aa, Zea mays
  Clone ID: MRT4577_116620C.1.pep
FFFFFFFFFFFFFFLHQKKPGGILFFLNSFFPRRGRGTILETRVYIINFGPGDNWLRQTGTGALFTYG

SEQ ID NO: 202888 - protein, 109 aa, Zea mays
  Clone ID: MRT4577_116621C.1.pep
DDIRSSSCYHTLTTDHGDVAFHAPYVVHVELTVVGYCFRDTLRERALSLSCDNHIPISFGIPFYLRSTRSPLSWRSPRRSGNLSLWSPEVDADRMSGLFGHKSTSPFAG

SEQ ID NO: 202889 - protein, 267 aa, Zea mays
  Clone ID: MRT4577_116622C.1.pep
IRGREGGGEGRRGVEAESAGEKGSDGEFVRQLLRRSDGGRVVATCRTPGSAAELQKLREEHAPGRLTVLPLDVTDESTIEAAAASITETHGSLDLLINSAGILSIPNVIQPETTLSKVQKSSLMLAYEVNAVGPILVIKHMWPLLKIGGRSETRRGFALVANMSARVSSIGDNALGGWHAYRASKTALNQLTKTVSVEFGRKDNIACVLLHPGTVDTDLSRPFQRNVPEGKLFTREFSVQRLLSVIDSVKKGDNGKFFAWDGQEIPW

SEQ ID NO: 202890 - protein, 99 aa, Zea mays
  Clone ID: MRT4577_116623C.1.pep
PKTPRSPNGSPSRVGEKSFSSRSLSFLPFGPTFSTFLGRFFLNKPFRRPRPPFKRALGSFPPNLNGLFGGSKLFGETPPPKRVFFFFFPQGFRLFQFRF

SEQ ID NO: 202891 - protein, 341 aa, Zea mays
  Clone ID: MRT4577_116624C.1.pep
PAGGHEHGRAPPLLPGPSIQLHCTTHLFNPILPHCIIRIEDRCESVEGRAEEEEEEGSRPNPPVRRGAMARLAVAARAFSAAASGGGVSLVQGASRGIGLEFVRQLLRRSDGGRVVATCRTPGSAAELQKLREEHAPGRLTVLPLDVTDESTIEAAAASITETHGSLDLLINSAGILSIPNVIQPETTLSKVQKSSLMLAYEVNAVGPILVIKHMWPLLKIGGRSETGRGFALVANMSARVSSIGDNALGGWHAYRASKTALNQLTKTVSVEFGRKDNIACVLLHPGTVDTDLSRPFQRNVPEGKLFTREFSVQRLLSVIDSVKKGDNGKFFAWDGQEIPW

SEQ ID NO: 202892 - protein, 40 aa, Zea mays
  Clone ID: MRT4577_116625C.1.pep
CVTTTQSFHLQVYYYVANDISGSCTALGSGTSTQVPRGAF

SEQ ID NO: 202893 - protein, 99 aa, Zea mays
  Clone ID: MRT4577_116626C.1.pep
SFFARFLPKGRFPWGQKGLSWALLEEPTFCGRCSPRRPVLPPGGGEKPPSFFNWPPAGFSKTPLFVFFYLLKENPPFGPFLTPFFFVARPVPVPFFFFG

SEQ ID NO: 202894 - protein, 95 aa, Zea mays
  Clone ID: MRT4577_116627C.1.pep
NAPRLLRSAATAPLAHERQSSHGGGALRTGQKLGGMEEALAIAADLGFPASTTQEDQTRCDKSEDWVKDLRELTVVHRNIANLQAELHGRKDDKN

SEQ ID NO: 202895 - protein, 43 aa, Zea mays
  Clone ID: MRT4577_116628C.1.pep
VTRLLTWLSQSFCCSPRCSHLASEFTIGDPIHRPQACMSVYVR

SEQ ID NO: 202896 - protein, 62 aa, Zea mays
  Clone ID: MRT4577_116629C.1.pep
CRLEGREYFRAAINAPQDAHKAMIPPTEGTKPHLFVIFSWIFVVFFFFFFFFLKDVFKRNRT

SEQ ID NO: 202897 - protein, 94 aa, Zea mays
  Clone ID: MRT4577_11662C.1.pep
TYILGGAFFFIFDTRKKKLQSEFALSIPIPLHFLPFFSKGFPGSKTLSQNQNGLGTPLSLNHKCFLLGGHKPLLAYPLFDLSLPKLPGPKIKTM

SEQ ID NO: 202898 - protein, 96 aa, Zea mays
  Clone ID: MRT4577_116630C.1.pep
CTGCNPRCAGRQGSCGDICICISHLVSLAHLPCLDPAASHLREPRSMSPSGELLASISSALAVAFVFLACVELGDASPPSASTVSSSTTYAGAALG

SEQ ID NO: 202899 - protein, 75 aa, Zea mays
  Clone ID: MRT4577_116631C.1.pep
MSCCGGNCGCGSGCKCGSGCGGCKMYPDMAEQVTTTTTIMGVAPSKGGFEAAAGAENGGCKCGAASCTCDPCTCK

SEQ ID NO: 202900 - protein, 79 aa, Zea mays
  Clone ID: MRT4577_116632C.1.pep
MSCCGGNCGCGSGCKCGSGCGGCKMYPDMAEQVTTTTTTQTLIMGVAPSTGGFEAAAGVENGGCKCGAASCTCDPCTCK

SEQ ID NO: 202901 - protein, 94 aa, Zea mays
  Clone ID: MRT4577_116633C.1.pep
CRRRPEPVVPFPTGTFGEQEEEEEVVEEGIPPTSDPQADNCFYFDICGSEQDTSDNKGRYQFFNCMHSNLFEEYKFFPKYPDKQLKIAAILFAD

SEQ ID NO: 202902 - protein, 72 aa, Zea mays
  Clone ID: MRT4577_116634C.1.pep
AVPNTILCSAQISFLLMMATKVALLQGGRITFDHLFGLLLIVVVLLSGSLLLLLLRAAGYETPAASASCPGT

SEQ ID NO: 202903 - protein, 762 aa, Zea mays
  Clone ID: MRT4577_116635C.1.pep
ADGNSKLLNFNGGASQTRSIVQLNGERSSRILFVGNIDSNVEDSELKFQFEQYADRQTLNASCKHHGFVMVSYYDIRSAENAMRALQSKPLRCRKLDIRYSSPKDYPLDKDINLSMVIVNLEASITNDDLHQIFGVFGEIKEIHPTSDNDHYKSIEFFDVRAAEAAQYALNRSEISGNKNKLEPSCLGGTERLMQQMSRALEHEQFGACKLGSPNSPSTFGTSVNMAPIRSTSTESGTVQVLRSRVQTPINQFQEGRNFLDLPSTTISRSSPVGITPAGSQSGHHALDEHIHSLGKMNVQNKGRMDCGFQESTAFHPHSLPDFNDRLRNGISYNCSIPPIGVKSNARAAEAMDVRHIYKGGCGHLSNQSSAHTEALGFSRTGSCPLYGHQLAWSNSNNLHQQPSSPMIWPSMGPFTNNMPSRQLMQVHGISRAPLRMLENNIPMNHQHVGSAPAVNPSIWDRRHGYAGEMMETPGFHPGSAGSMGFPGSTHLHQLETNGMFPHNGGTFMDPAMSPVHMSARSPQQRGHIFHRRSHVAPIPSSFDSAGERMRSRRNDSNVNQSDNKRLFELDIERIVRGEDSRTTLMIKNIPNKYTSKMLLAAIDESHRGTYDFIYLPIDFKNKCNVGYAFINMINPDNIVPFYKTFHGKRWEKFNSEKVASLAYARIQGKSALVAHFQNSSLMNEDKRCRPILFHSDGPNAGDQEPFPVGSNVRSRPGRSRILSWEQNHQDIVSDHTKGGTPSRAGGTPGYIATDTDHTAVD

SEQ ID NO: 202904 - protein, 62 aa, Zea mays
  Clone ID: MRT4577_116636C.1.pep
KAIIHENKNNGGQTIFQEPPFFRRGGFKFLKIFFSTPLILLGPVKTNIFSNLWDSQIGAPTF

SEQ ID NO: 202905 - protein, 68 aa, Zea mays
  Clone ID: MRT4577_116637C.1.pep
TMFRATHMIILRLLRSFFNIPVTMFSLSREEHKTGSFPQRGGGATPSKKHQTTRSAQQKRGHKGRTPP

SEQ ID NO: 202906 - protein, 84 aa, Zea mays
  Clone ID: MRT4577_116638C.1.pep
SHFDRMQTVIVKAKDMVSSANVMLKEMTATMHYKTADATALTHGYKNMAKEADRALNDQSNADKHQEKDDHRVDAVTGHHETRV

SEQ ID NO: 202907 - protein, 120 aa, Zea mays
  unsure (1)..(120): unsure at all Xaa locations
  Clone ID: MRT4577_116639C.1.pep
TRAQLTTIFAGAQHQTTTFLGQTQKYRAAGIDAGSSITMRRTVKSVPQSIWYSPXDRPKYIGPFSKQTPSYLTRELPHNYTWDTAGLSPDPETFARNRELXVIHSRWAMLDALGCMFPEI

SEQ ID NO: 202908 - protein, 74 aa, Zea mays
  Clone ID: MRT4577_11663C.1.pep
SVYCASQITLVTYEPIGRFSISIEEGKSCGPFYPCVPVNVKKHPQNCFLPTRVCIKACHINQPQLLFDVSDYMY

SEQ ID NO: 202909 - protein, 198 aa, Zea mays
  unsure (1)..(198): unsure at all Xaa locations
  Clone ID: MRT4577_116640C.1.pep
HMPLLKSIPPVTRMAMGRGTWVTVLCRKLKDWWHWVAEGDLPIVASHGTEIETYKTLEPAIRLLILKAICDIRVEQEDIRNFIDSSLKHGHDLSTFRKERIGGDSLGISYWYYFIYLECKEFPLFHFHARPCKTXEDDEILGHRLYREIRRVEQVKKEPGKRSRGKGGSSAISVVSYQWETVASTFDEFDDVAVSFAI

SEQ ID NO: 202910 - protein, 92 aa, Zea mays
  Clone ID: MRT4577_116641C.1.pep
WETSRRIQNPIETKFLLRPEPQPQNHSLTHFTGIFLFDSCCWSLTLEALPHPSHHQSHSQKNLPFSFVQQPQMFSLVGQQVSASTRTSTSES

SEQ ID NO: 202911 - protein, 83 aa, Zea mays
  Clone ID: MRT4577_116642C.1.pep
RLRCEAVEDPNTSCLIKEEMRNCRQRFLLSAPATSSVFITASNSFSGLGGFMYPASRVVEPLCRACFRKSFASKTSALVFQFH

SEQ ID NO: 202912 - protein, 55 aa, Zea mays
  unsure (1)..(55): unsure at all Xaa locations
  Clone ID: MRT4577_116643C.1.pep
KSTKSGTLQFCFQLSFLRTFGVWGFLRLTIPHLIIGHLESYRXRCLKCHLVNSKI

SEQ ID NO: 202913 - protein, 104 aa, Zea mays
  unsure (1)..(104): unsure at all Xaa locations
  Clone ID: MRT4577_116644C.1.pep
PQARFQPHVGQQEATGAEDVVSICDIPTHGRKYTLQGHNTDDHSVCCGNSVEYMGSVRHDLLXWSVNVKSXGIYELRCNGHTLHSCLYQPRYSNLFAIGSYQHL

SEQ ID NO: 202914 - protein, 69 aa, Zea mays
  Clone ID: MRT4577_116645C.1.pep
RQFTKKKKKKRKKKKKKKKKKKKKKKKKKKKKKKKKKKKKKKKGAPFLKNQSLLTRACKVIIFFLCNLN

SEQ ID NO: 202915 - protein, 63 aa, Zea mays
  Clone ID: MRT4577_116646C.1.pep
VFTKIMFVKLIRPFTQMELMYQAAEVLHMAWLNSNSIYNYAYKKCCTPNFSIRMMICLSRKDH

SEQ ID NO: 202916 - protein, 97 aa, Zea mays
  unsure (1)..(97): unsure at all Xaa locations
  Clone ID: MRT4577_116647C.1.pep
EKDGLTRLGQRNIRGXPLPKRGEKKKKANGKTKEGKKKSPPEXGGPPRIPPLGPPPPPKGKERPEEGPHHPXGLPKGPPPAGGPRPEPPPGGPTGGR

SEQ ID NO: 202917 - protein, 81 aa, Zea mays
  unsure (1)..(81): unsure at all Xaa locations
  Clone ID: MRT4577_116648C.1.pep
TSAVKKEKVILAXHQEYVXRGGWDLSPRSPEAFKGLKQLVVISWGAHVLAHAKNLRDSPDDVQSRIDANMVLPEGCKCNEE

SEQ ID NO: 202918 - protein, 74 aa, Zea mays
  Clone ID: MRT4577_116649C.1.pep
KNRGGMLFARNKDSLQCMGKNPLKQFFWDWVIRGGRKPPYLVYAQTLFNFNTFGQFVARKKGQNHCLQRGFFFF

SEQ ID NO: 202919 - protein, 368 aa, Zea mays
  unsure (1)..(368): unsure at all Xaa locations
  Clone ID: MRT4577_11664C.1.pep
MEAMDVKYKPVMFPNGAGLKKAKPAAAVALAGEPLYRECLKNHAASLGGHAVDGCGEFMPSPGANPADPTSLKCAACGCHRNFHRRTLEGSPPPPAPAPLALPPPPSVMHGQPHRXGRRRPXPPPXSSTPTTPIPTRKARXDEERSVSPPPPPHHLLPAPVAQQPPPPSYFPTAPHMVLSLGSGVPGPAVAVSPAQRLAPTQLTPSSAPPHAGGAMPMPRKRFRTKFTAEQKQRMQELSERLGWRLQKRDEAIVDEWCRDIGVGKGVFKVWMHNNKHNFLGGHSARRSASSPAPAAASLQTPAAGAGSGAAAAPSFNPSRITPPPPVLTSSPTAATGFNINGAASSAPTVATDYTTDNANGASSPHSA

SEQ ID NO: 202920 - protein, 184 aa, Zea mays
  Clone ID: MRT4577_116650C.1.pep
AWANALSNDHVVCDVIYRTAEQVGKRGPAPGERFFVMPWQKSPALSKGLYKELTVEEVVRRGRSAVDMDGVHVMGRDTFYQMLMHCLPSGEVGSGERQGEQSALPFRVLPWEAEVHAALFVHRVSGLHRGIYFLVRNEEHFDALQRAMRQDFEWVQPEGCPDGLPLYRLMKGDCQKFAMQISCF

SEQ ID NO: 202921 - protein, 88 aa, Zea mays
  Clone ID: MRT4577_116651C.1.pep
DLTSSCLSRSGTIHIHILLIQYIWHSNVHNEITLMDGEGSKSHPERKRSVRRKLHNTKENPLKSNTFLDSQNYFAHNLKRGKFFLAFF

SEQ ID NO: 202922 - protein, 103 aa, Zea mays
  Clone ID: MRT4577_116652C.1.pep
RGFGAPPPQKKKISQIKRFPRAIPFFFLKRGEGLQKIWLKQIILGVKIKIRVFPTLSPSLYPLIYLPPCGIKMFFKWRACKKKNSCKKKNPPFVFFFGVLVQK

SEQ ID NO: 202923 - protein, 48 aa, Zea mays
  Clone ID: MRT4577_116653C.1.pep
HFPPFQHETGHSLGGLQERPNWNKNIRDRATSFFEPLPKPLVRSLAGP

SEQ ID NO: 202924 - protein, 58 aa, Zea mays
  unsure (1)..(58): unsure at all Xaa locations
  Clone ID: MRT4577_116654C.1.pep
VHIAIFVFNTXGACDNAKNYREADASHHAMTLGPNGSDCHKAALILDTIVDPLKDTSG

SEQ ID NO: 202925 - protein, 137 aa, Zea mays
  Clone ID: MRT4577_116655C.1.pep
NIAGPHVCRVQGPGEHFFKNPNSAPKYYLEEKNEPRALKRPKGASHKPHCYKIPHNPKYSEQPMGQNRTPPGAANTTPNINVLSGDRPPHAGGSRPSRANTKAKRGNPMGTQERSQNKNIWVRPQEARSFGQYPLGW

SEQ ID NO: 202926 - protein, 217 aa, Zea mays
  Clone ID: MRT4577_116656C.1.pep
APHGQKTDWIMHEYRLEDADDDDAQGGTSEDGWVVCRVFKKKCFFKIGGGEGSTTSSQGADAGGHLATMSPPLGGHHDLAYMHPHPYYHHAASYYSQMQAPGPHATAYSHHVQVQDLLTNHRPTDDDGAGTGYDFSGLPVENQPGGGLDVGSSDGVATDDGGQLAGERRDQTTGTAADHQWQAMDGFSNGGSAEVQQMTGAQRGGGDGFVGLRKVKT

SEQ ID NO: 202927 - protein, 47 aa, Zea mays
  Clone ID: MRT4577_116657C.1.pep
CTMTEGSRGESPVVRRGYREKEIRSCWPPTQRVPPLASRPTRLRTRG

SEQ ID NO: 202928 - protein, 65 aa, Zea mays
  Clone ID: MRT4577_116658C.1.pep
CNRTPGHAPRERGDENGVSKPPTGNKRDRQTRAKEDANVDAASPAGTDATPAQAARDAEQPWRAT

SEQ ID NO: 202929 - protein, 131 aa, Zea mays
  Clone ID: MRT4577_116659C.1.pep
TEAGQRNQFLRGLLISVLCSDKALGAPARNLRRSPSTKTPPPVAGKNRVLPLSLSLSFLFMLFFSAPISCSGASFVLVLCVFLDTETLSRMGPAVSLPAASASDLYHFKHRFHGAGISLPRYHPNDKIGGA

SEQ ID NO: 202930 - protein, 117 aa, Zea mays
  Clone ID: MRT4577_11665C.1.pep
PQKGAFQKILGGPKSKILVPQGGGAPFPKGKDKEKLGAPPFFFCIFMFFLFLYQRCPLFFLSFCILLFFFFFFFFFFFFFAFALIINSISQLHICIKSHLDTFKMEYMPNDIPSLDI

SEQ ID NO: 202931 - protein, 66 aa, Zea mays
  Clone ID: MRT4577_116660C.1.pep
HLDGLDAESERIVQDALDRVMVNRTTVIVAHRLSTIQNADLIAVVRNGVIIEKGKHDALINIKDGA

SEQ ID NO: 202932 - protein, 193 aa, Zea mays
  Clone ID: MRT4577_116661C.1.pep
MGDWVPRGRPGSFRALKSRPRCGRPHPFLSSSPAQPDCSSTKRKKGRKGPEASAMSNSASGMAVCDECKLKFQELKAKRSFRFIVFKINENVQQVVVDRLGGPGESYDAFTACFPANECRYAVFDFDFVTDENCQKSKIFFISWAPDTSRVRSKMLYASSKDRFKRELDGIQVELQATDPSEMSMDIVKSRAL

SEQ ID NO: 202933 - protein, 94 aa, Zea mays
  Clone ID: MRT4577_116662C.1.pep
IFFIVNNVVNAKGCKIKNGNLAGGGSERGNPPNWGALLGEPGWGPNLAKSWAWLFPGGKCFPLTMPHNIQAGRVKRLNLGGLMREITQKKRGGV

SEQ ID NO: 202934 - protein, 73 aa, Zea mays
  Clone ID: MRT4577_116663C.1.pep
VSPCSRRHGDVLTWRLRSGILRSGRARHNSLERAEEPMSAVRELMLYVIRAWASNLYVCSLYNFDHCCVEHLI

SEQ ID NO: 202935 - protein, 74 aa, Zea mays
  Clone ID: MRT4577_116664C.1.pep
FPFSRLYFITIPHIWGETSFYAPLTTSAHFQKTDSYGSLKKNNFYPFPVFASVHILVHNDLETEQPTFKLLTKK

SEQ ID NO: 202936 - protein, 57 aa, Zea mays
  Clone ID: MRT4577_116665C.1.pep
VGGIRTLSNEASLSNTYVYCADYRQNMLLSFTHLFSLSHRHTLASNSLINLIWFSIT

SEQ ID NO: 202937 - protein, 55 aa, Zea mays
  Clone ID: MRT4577_116666C.1.pep
RGDGSLAYYFSNLYLTNLFRLRGLTLEETCIHNKQVKNPSLALPMNSNCLKLPLP

SEQ ID NO: 202938 - protein, 47 aa, Zea mays
  Clone ID: MRT4577_116667C.1.pep
KAAKGDYSEYRKPSPGIMHGGTPRPGAPLVGQKVIELLRYEDHHLGF

SEQ ID NO: 202939 - protein, 107 aa, Zea mays
  Clone ID: MRT4577_116668C.1.pep
MALRLRSKKPCLVVVVVVRDRQLAPVTTRTSLVPSIMSGPVSMSGHIAYSGNVSLRSDSSTTSTQSFAFPVLQREWTSSPVRMAKAERRRSGGRHRVWRKGIICCKF

SEQ ID NO: 202940 - protein, 63 aa, Zea mays
  Clone ID: MRT4577_116669C.1.pep
TTPIVPPLYLGSSSSSFFLLTLLGTCAILRLLLFYCLKLICQVVAFSLKLLNSDGCIVVSLTR

SEQ ID NO: 202941 - protein, 237 aa, Zea mays
  Clone ID: MRT4577_11666C.1.pep
TAPAYEVASGPQPRRPIRSSHLAYEVAASAASYVHARARGLLSFGAPTRQQQQAAGQGRLYNSGVAAYMAASTVTAVVAAEDEARQEAARDLRSPLSSPCEWFVCDEADARTRCLVIQGSDSLASWQANLLFEPTEFEGTGVLVHRGIYEAAKGIYEQVVPEVEAHLRRARAGRAPRLRLTGHSLGGSLAVLVSLMLLARGVVTPEALHPVVTFGAPSVFCGGTRVLEALGVVDVAR

SEQ ID NO: 202942 - protein, 541 aa, Zea mays
  unsure (1)..(541): unsure at all Xaa locations
  Clone ID: MRT4577_116670C.1.pep
DDPFLLDKGGTSFGMIVAYGEVAGNYXEASMDVDGMYKEPKFGHLRDLHNVIRSYQKAFLLGKHSSEILGHGYEAHIFELPEENLCLSFLSNNNTGEDGTVIFRGDKHYVPSRSVSILAGCKNVVYNTKRVFVQHSERSFHTSDVTSKNNQWEMFSETIPKYRDTKVRTKEPLEQYNQTKDDTDYLWYTTSFRLESDDLPFRNDIRPVLQVKSSAHAMMGFANDAFVGCARGSKQVKGFMFEKPVDLKVGVNHVVLLSSTMGMKDSGGELAEVKGGIQECLIQGLNTGTLDLQVNGWGHKAALEGEDKEIYSEKGVGKVQWKPAENGRAATWYKRYFDEPDGDDPVVLDMSSMDKGMIFVNGEGVGRYWVSYRTLAGTPSQALYHIPRPFLKSKDNLLVVFEEEMGKPDGILVQTVTRDDICLFISEHNPGQIKTWDTDGDKIKLIAEDHSRRGTLMCPPEKTIQEVVFASFGNPEGMCGNFTVGTCHTPNAKQIVEKECLGKPSCMLPVDHTVYGADINCQSTTATLGVQVRCGGGKKGA

SEQ ID NO: 202943 - protein, 126 aa, Zea mays
  Clone ID: MRT4577_116671C.1.pep
QESVHFHRKKYSKRNNPRIPKGATYIYCDGYLQQHDMEGKRGEHTYFSDQHLPFTHFMLVPDQARSNHISIAMADQWVISISAKPKGRTNKRAETSISSIRLVLRHPSCRLRISPAPLAWQSLIGS

SEQ ID NO: 202944 - protein, 739 aa, Zea mays
  unsure (1)..(739): unsure at all Xaa locations
  Clone ID: MRT4577_116672C.1.pep
AQMALSTQTGVPWIMCKQSSAPGEVIPTCNGRHCGDTWTLRDKNKPMLWTENWTQQFRAYGDQVAMRSAEDIAYAVLRFFAKGGSLVNYYXNYYMYHGGTNFGRTGASYVLTGYYDEAPMDEXVRPIQLTIIFLYYFYLHHVVLLDIRSTSCSPXFXGMYKEPKFGHLRDLHNVIRSYQKAFLLGKHSSEXIGSWAHIFELPEENLCLSFLSNNNTGEDGTVIFRGEKHYVPSRSVSILAGCKNVVYNTKRVFVQHNERSYHTSEVTSKNNQWEMYSEKVPKYRDTKVRMKEPLEQFNQTKDASDYLWYTTSFRLESDDLPFRNDIRPVLQVKSSAHSMMGFANDAFVGCARGSKQVKGFMFEKPVDLKVGVNHVVLLSSTMGMKVKIRRNCGMCLECKMTDYTVLADIQAKKXGCIDASYKHFILERWTYINIINRXWPMRSANAIILPISSKFAXHYLLQDSGGELAEVKSGIQECLIQGLNTGTLDLQVNGWGHKAALEGEDKEIYSEKGVGKVQWKPAENGRAATWYKRYFDEPDGDDPVVLDMSSMDKGMIFVNGEGVGRYWVSYRTLAGTPSQALYHIPRPFLKSKDNLLVVFEEEMGKPDGILVQTVTRDDICLFISEHNPGQIKTWDTDGDKIKLIAEDHSRRGTLMCPPEKTIQEVVFASFGNPEGMCGNFTVGTCHTPNAKQIVEKECLGKPSCMLPVDHTVYGADINCQSTTATLGVQVRCGGGKKGA

SEQ ID NO: 202945 - protein, 126 aa, Zea mays
  unsure (1)..(126): unsure at all Xaa locations
  Clone ID: MRT4577_116673C.1.pep
MGALSYRTLAGTPSQAVYHIPRPFLKSKDNLLVIFEEEMGKPDGILVQTVTRDDICLFISEHNPGQIKTWDTDGDKIKLIAEDHSRRGTLTCPPEKTIQXVVFASFGNPDGMCGNFTVGTCHAPNA

SEQ ID NO: 202946 - protein, 111 aa, Zea mays
  unsure (1)..(111): unsure at all Xaa locations
  Clone ID: MRT4577_116674C.1.pep
ISFNHLLYSTKKIDSGGQFYDKLLVNQQNENYLIFDDRSHNLKDNCVYNTMTPSGRIXQDEINLLTAFTIITKSAWIFTSKLVTSFEDHSLWHNYCCTTDSYIMSDQYLSI

SEQ ID NO: 202947 - protein, 98 aa, Zea mays
  unsure (1)..(98): unsure at all Xaa locations
  Clone ID: MRT4577_116675C.1.pep
MFLTMTXYDXRGGNTFXSPEGXRLFHMXYTLXASHLGSTANGLKTKDXTSVAVEKRVTSPLLEPSSGEQIREIDEHIVWAMRALIGDARTVVQPASGE

SEQ ID NO: 202948 - protein, 73 aa, Zea mays
  Clone ID: MRT4577_116676C.1.pep
MKTICYTYVHSEVDKNGWIRVFRRGTAPWRRRTWKGASQNLRIRLLHASPGKTASGLFLFLGSFSLFFFIYVF

SEQ ID NO: 202949 - protein, 99 aa, Zea mays
  Clone ID: MRT4577_116677C.1.pep
FFFFTDYLFLCSGSSLRNKQMFNLICELPETVARTLVPRMRVVKGSGKAINYLTPPRILLALVTAWVRRGRWFDDEVHRSTYFILNTNVHVGMQYCQLS

SEQ ID NO: 202950 - protein, 91 aa, Zea mays
  Clone ID: MRT4577_116678C.1.pep
KKEGGLWAPLRWQGNKETRIPGFKCFNHVMDRLKSNLFKEKKDPLQLSLLLKSNPAPRLLVKKSFFFIIGVKRPNGVFTPYRGIGKKVFFF

SEQ ID NO: 202951 - protein, 259 aa, Zea mays
  Clone ID: MRT4577_116679C.1.pep
MPPLLTSPASLPSASPLLASCIGALHRPGPFLHHRAAASVHFLAPHRKTRPPPAMSWLGKLGLSGLGGSPRASEASAALAQGPDEDQPAPGNEFAQFGAGCFWGVELAFQRVPGVTRTEVGYSQGNIHDPTYEDVCTGTTNHNEVVRVQYDPAACKYDDLLDTFWARHDPTTPNRQGNDVGTQYRSGIYYYNPEQEKAARESLEKQQKLLNRKIVTEIVPAKRFYRAEEYHQQYLEKGGRFGFGQSAAKGCNDPIRCYG

SEQ ID NO: 202952 - protein, 75 aa, Zea mays
  unsure (1)..(75): unsure at all Xaa locations
  Clone ID: MRT4577_11667C.1.pep
VREDLPFFIELLVEYAKAMEELGXILLELISRSLKLRPDRLHSFFKDHTTFIRLNHYPSCPSPYLALGVWRHIGL

SEQ ID NO: 202953 - protein, 46 aa, Zea mays
  Clone ID: MRT4577_116681C.1.pep
KLVTLILDQHEKGTTGTVLYHQRATREIRTLQFLMIIIVVGTLDLL

SEQ ID NO: 202954 - protein, 88 aa, Zea mays
  Clone ID: MRT4577_116682C.1.pep
CGGGHISPHSNDGPGLTSASDDCIITISSSEGQSPEVYLPGLVVHVVPVKKGASPLQNTIVTRQKNKSYKALIARRRDFMDLVVKHHM

SEQ ID NO: 202955 - protein, 83 aa, Zea mays
  Clone ID: MRT4577_116683C.1.pep
CTYRQLFKWPRYKDYTCPQDHFQRGISLVWFYLQSTFKPTLTLQRHFILSEIQVKKTMQTHRVYTSKYISSERKKGRCVTGRK

SEQ ID NO: 202956 - protein, 53 aa, Zea mays
  Clone ID: MRT4577_116684C.1.pep
SPHPAAVLLPWKGGQCGNNPDCERLRAELRRMPPPNGRAVLLFRNPVWLLCTS

SEQ ID NO: 202957 - protein, 313 aa, Zea mays
  Clone ID: MRT4577_116685C.1.pep
MAALLELFLGSSSAPVDWEAEAYPAYGDFAVLPLLVAFFPAVRFLLDRLVFEVLARKLIFGKEHDKLAETDDSRKKINKFKESAWKFVYFLSGELLSLSVTYNEPWFKNTRYFWIGPGDQIWPDQMIKLKLKAVYMYAAGFYTYSIFALLFWETRRSDFGVSMSHHIATVVLIVLSYIFRFARVGSVVLALHDASNIFLEIGKMAKYSSCEWLAVVAFLLFVASWILLRLVIFPFWILRSTSYEVLLTLDKEKHQFYGPIYYYVFNCLLFSLLVLHIYWWVLIWRMLVKQIQSKGHVGDDVRSDSEGEEEHED

SEQ ID NO: 202958 - protein, 187 aa, Zea mays
  Clone ID: MRT4577_116686C.1.pep
IKLKLKAVYMYAAGFYTYSIFALLFWETRRSDFGVSMSHHIATVVLIILSYIFRFARVGTVVLALHDASDIFLEIGKMAKYSSCEWLAVMAFLLFVASWILLRLVMFPFWILRSTSYEVLLTLDREKHRFYGPIYYYVFNCLLFSLLVLHIYWWVLIWRMLVKQIQSKGRVGDDVRSDSEGEDEHED

SEQ ID NO: 202959 - protein, 131 aa, Zea mays
  Clone ID: MRT4577_116687C.1.pep
GEVAPCGRGRSDGCRAAPAVGSRRGQRHRRVEIYRHVQHATTGHSGCRAVYTYTLSSRSKSRFGTTGDSRPQRELAAFRQTPRNHRWMGDCPGDRLPGDTAGEGTEPDGPTLLWTGPIQLTMSQLRLAGKR

SEQ ID NO: 202960 - protein, 80 aa, Zea mays
  Clone ID: MRT4577_116688C.1.pep
LSRLPRKLSGVPQTRAEEAMSGRGKGGMGLGKGGAKRYRKVLRDNIYGFIKPSILLLSMRCGVKRISVLIYEETRGVLKI

SEQ ID NO: 202961 - protein, 84 aa, Zea mays
  unsure (1)..(84): unsure at all Xaa locations
  Clone ID: MRT4577_116689C.1.pep
MHEQTIRETIRYPVKFYTKXYNWDVICNMLGIFFILYCIQYGVVIHALMHKLKPNVQEYLQEYXVAVRLPXSLHKSLFIFYDLF

SEQ ID NO: 202962 - protein, 68 aa, Zea mays
  Clone ID: MRT4577_11668C.1.pep
GRVGGRVVSLRPFFFLISRVKINQHVLIYALHCCRTSSVLMFTTLLYIQNSCVLAYRSCVIKLAKEND

SEQ ID NO: 202963 - protein, 55 aa, Zea mays
  unsure (1)..(55): unsure at all Xaa locations
  Clone ID: MRT4577_116690C.1.pep
PPPHIFKREIKESRKSXXRRTXGHSSMTGCLTSSRPSVREVSQFPLLWEVRDHQV

SEQ ID NO: 202964 - protein, 109 aa, Zea mays
  Clone ID: MRT4577_116691C.1.pep
VCAHSAEQDSLHAMLYIFRDLWQVHSHRRGPNRSNSLVLHSATIICADISHPVERISCQSMNVCHRGVRGRHMQIKEERCCSVEDCSASGIFLLGLCSSGKKASKALTI

SEQ ID NO: 202965 - protein, 71 aa, Zea mays
  unsure (1)..(71): unsure at all Xaa locations
  Clone ID: MRT4577_116692C.1.pep
MQTVTDAANYVGDKVQELTSGASKXSHKEVAKDSNASLSTRASAAKDALGDKLDESKHSASAEVNKEKAKN

SEQ ID NO: 202966 - protein, 149 aa, Zea mays
  unsure (1)..(149): unsure at all Xaa locations
  Clone ID: MRT4577_116693C.1.pep
LVSSVSDIENTSVPTSLKDSNLDSSSAVVIESGRGGDEKMSMWERLQAFDKWIWTSFYSILTAVKSGKKSFKESLLRCGSCHDLYWRDEKHCRICHSTFEVGFDLEEKYAVHVATCMEPEXLHEVPNHKFLPSQLQALIAAIHAIEASM

SEQ ID NO: 202967 - protein, 76 aa, Zea mays
  unsure (1)..(76): unsure at all Xaa locations
  Clone ID: MRT4577_116694C.1.pep
KKKPTVSTRRTQTWPLRPTGXDTTRPASTPPSGEPAAAPAPDQKGASSSSAPQPDTGAPPAVPAPGARKRKLEEAG

SEQ ID NO: 202968 - protein, 112 aa, Zea mays
  unsure (1)..(112): unsure at all Xaa locations
  Clone ID: MRT4577_116695C.1.pep
XGTRNRKNANSGEVSAFSXHGAAXQATGSQLGTILPSAIHCEPFDRDLTDQDGWYPFTRTFAKESLEALQTNPQCKVHRRNTLFRLENVTQFGLFQNTFSVITKLPLDLFYS

SEQ ID NO: 202969 - protein, 153 aa, Zea mays
  Clone ID: MRT4577_116696C.1.pep
LISDVHAAFSVKPMSYNAFDLISSLSQGFDLSGLFEKEERSESKFTTKKDAKEIVSKFEEIATSSERFNLTKSDVGVKMEDKREGRKGHLAIDVEIFEVTNSFHMVEFKKSGGDTMEYKQFCDRELRPSLKDIVWKWQGNNNNSNNEKIEVIH

SEQ ID NO: 202970 - protein, 99 aa, Zea mays
  Clone ID: MRT4577_116697C.1.pep
NLTLQKIYECYVPLVYDISYQSVAWSINHTQHIKPHSRLGRWKTEAGQHYNRLLIAYMAIPCCLQGRVTALMTLNAYGRWLSSILSKALKDLLLSAPGQ

SEQ ID NO: 202971 - protein, 129 aa, Zea mays
  Clone ID: MRT4577_116698C.1.pep
LNASRKPAQEARDRSRATAQTAADKARETASTHDTDREQGQGLLGALGNVTGAIKEKLTLGQGQHVDVRLGGEDERAAKERAAEKAASVYFEEKDRLMQQRAAERVDQCVEKCVEGCAGSSCVHRQGKM

SEQ ID NO: 202972 - protein, 354 aa, Zea mays
  Clone ID: MRT4577_116699C.1.pep
MASRQNTREARAEADARRAVEELARARDEHLEKAEVNARSAADEIARSRADRGAAGGGGILESVQEGARSLASAVGRTFGGAKDATVDKTSQTAHTAGDKLGEYRDYTADKAREANDSVSRKTGETAEATRNKLGEYKDSAVEKARETKDAVAQKTSETAEATKNKLGEYKDAAAGKAREAADTTAGKAREAKDATMQKAQETRDATADKAREARDVTRQKAGEYTDASREAAQEARDRSRATAQTAADKARETASTHDTDREQGQGLLGALGNVTGAIKEKLTLGQGQHVDVRLGGEDERAAKERAAEKAASVYFEEKDRLMQQRAAERVDQCVEKCVEGCAGSSCVHRQGKM

SEQ ID NO: 202973 - protein, 80 aa, Zea mays
  Clone ID: MRT4577_11669C.1.pep
LSLGRPLTRRHAQSDRGFLDPAHDQDADHGYKEKLLNKGWPVQQKAVSGDARLGKGLREQAGLQDDLLLEVVIFINGKPS

SEQ ID NO: 202974 - protein, 57 aa, Zea mays
  Clone ID: MRT4577_1166C.1.pep
FNPSVTKYAFMFIWRSPYLTFCLLMISASDVIFPAGQMFLGCVRCTSIEQKELFPVN

SEQ ID NO: 202975 - protein, 76 aa, Zea mays
  Clone ID: MRT4577_116700C.1.pep
QHHQLRLPNHVLLKRQNADQNQLVMLTRKRRNALGLGELIPPEHKPDHSSESYPYDVPDGNHYPLTTAHIIHAPNY

SEQ ID NO: 202976 - protein, 85 aa, Zea mays
  Clone ID: MRT4577_116701C.1.pep
MQEASSAAAAGAGAEPGRRAAQHQFAGVDLRRPKGYAPPAPAVGEGDPCPRCASRDTKFCSALRLMMSARKWSALILLLLVASAN

SEQ ID NO: 202977 - protein, 203 aa, Zea mays
  Clone ID: MRT4577_116702C.1.pep
MYHHHFHGEVASLRFLSPPNASTSFAAHHHMNMALPPPSYFQDDDATLAAIDGGGDAACFDELDTIVVVREADAAAAARCHLTGSNNGGLSGSDQLLDAAVIMAADEERRRRRMVSNRESARRSRMRKQRQLSELWAQVSHLRGANRRLLDDLNRALRSCADARRESARLREEKAELTKKLEQLLQAEKGSLSEAAEPCKSYC

SEQ ID NO: 202978 - protein, 125 aa, Zea mays
  Clone ID: MRT4577_116703C.1.pep
RPGKKPASKKRRVVAPAPELAAAADPGKTAPTTTTTTTTTSEITTETGALEDSDSLAHLLLQPGTEDAEAVALGLGLSDFPSAGKAVLDDEDSFVWPAASFDMGACWAGAGFADPDPACIFLNLP

SEQ ID NO: 202979 - protein, 170 aa, Zea mays
  Clone ID: MRT4577_116704C.1.pep
MQSLARTVCRAGTRGNPLKLMDCAAPSVEQSFAEPLRSCSWIRQIVSPIIPRDGVQAYGFCTRALAVRGFSTVGTAEVSVEDEDSSSPMVEHPPRIKFKRPDKTARHIMNILNKEAVDKVRTERTIPDVQPGCIVQMRVQVPENKRRESTLKGIVIARRNAGIATTFRLR

SEQ ID NO: 202980 - protein, 59 aa, Zea mays
  Clone ID: MRT4577_116705C.1.pep
GAEAVALGLGLSDFPSAGKAVLDDEDSFVWPAASFDMGACWAGAGFADPDPACIFLNLP

SEQ ID NO: 202981 - protein, 72 aa, Zea mays
  Clone ID: MRT4577_116706C.1.pep
EPHVSFRPSPTMPLPPGGTDGSHWLATTTARFGSYSRSLRPQSRSSPAGTTPPALAFCLPRFRPGILAMQKK

SEQ ID NO: 202982 - protein, 238 aa, Zea mays
  Clone ID: MRT4577_116707C.1.pep
MQEASSAAAAGAEPGRRAAQHQFAGVDLRRPKGYAAPAPAPAVGEGDPCPRCASRDTKFCYYNNYNTSQPRHFCKGCRRYWTKGGTLRNVPVGGGTRKKPSSSSSSSSYVAAADADRQPKKKPASKKRRVVAPAPELATAADPGKTATTTTTTSEITTETGALEDSDSLAHLLLQPGTEDAEAVALGLGLSDFPSAGKAVLDDEDSFVWPAASFDMGACWAGAGFADPDPACIFLNLP

SEQ ID NO: 202983 - protein, 63 aa, Zea mays
  Clone ID: MRT4577_116708C.1.pep
MGGVFSDGAALAVYAGIGAGVIFADTISRKSSQDSFWPTVHVDLYQGTQILNYIRDLRKPTVR

SEQ ID NO: 202984 - protein, 76 aa, Zea mays
  Clone ID: MRT4577_116709C.1.pep
SQQASPSTSFLTSLTVPRILPSLHASLFFPVSRSATPCQNMSALHFSHSSRSQERGSWVVRWALQCSLRPLTRRQM

SEQ ID NO: 202985 - protein, 85 aa, Zea mays
  Clone ID: MRT4577_11670C.1.pep
RPTLAPRRGEGRWQQACCRRRAPRPRARRRGRTPSRSTAPCPWRNKITLHCTYISILNSLNLILVPVPLLMPPWYALANFEWFIY

SEQ ID NO: 202986 - protein, 74 aa, Zea mays
  Clone ID: MRT4577_116710C.1.pep
YVICLHGIYIKIERSCKNLGKYATHSQAHAWDRNRMQFQKINDLASISFSHTLFGKSHLDFTCSNFNQDPKMMA

SEQ ID NO: 202987 - protein, 117 aa, Zea mays
  Clone ID: MRT4577_116711C.1.pep
GGFGGGGYVGGPPSRGYGGGSGYPGRPEGGGGGFGGGGGFPGWPKGGGGGFGGGGGGWRDLFLAPSWVWAGFFFFLKNRGPVRFCPRVRGRFPLGLGGGPPFVPFGCPPFETTPKKN

SEQ ID NO: 202988 - protein, 116 aa, Zea mays
  Clone ID: MRT4577_116712C.1.pep
YKTESMARFLGTRENGATWSVPTPQPSVRTGHAPTHNGRIIRAFSIPHPQQSARFYAPRNKPQKKNHLIIMHEPIQQYSMITMRSRRRRCGSLRWGRTRASGASSGRRRRCGTRWS

SEQ ID NO: 202989 - protein, 56 aa, Zea mays
  Clone ID: MRT4577_116713C.1.pep
RPRVRSTSHCFTDSSTTITQSVVATQSWRCPSSQSSVPELTFTVSMSSSSNLIPLP

SEQ ID NO: 202990 - protein, 202 aa, Zea mays
  unsure (1)..(202): unsure at all Xaa locations
  Clone ID: MRT4577_116714C.1.pep
MTGRPWAGAPPLPLAVAVAVAVAALLSWCCCCQGASAAAAASFGDNFEITGAEDHVKTSADGQTWYLYLDNKTGVGFQTKQRYLFGWSSMKLKLVGNDSAGXVVTAYYMCSDLDAAPLRDELDFEFLGNRSGEPYIIQTNVYHSGVGGREMRHSLWFDPTADFHTYAILWNPXQIVYNGNGLGVAAPCLHPSGGRAWCGRRI

SEQ ID NO: 202991 - protein, 99 aa, Zea mays
  Clone ID: MRT4577_116715C.1.pep
KRLRPPPKTAPPPPFFSFPPRGAPPPPKKPSSPPGLPKPGYLAGPPKAPNPGGGGVLKNPNRGKGNGVPPKPGLGMAPRPPKRWPVSPPPLEGKPLASF

SEQ ID NO: 202992 - protein, 334 aa, Zea mays
  unsure (1)..(334): unsure at all Xaa locations
  Clone ID: MRT4577_116716C.1.pep
MTGRPWAGAPPPPLPLAVAVGVAALLSCCCCCCCQGASATAAASFGDNFEITGAEDHVKTSADGQTWYLYLDNKTGVGFQTKQRYLFGWFSMKLKLVGNDSAGVVTAYYXEAAMCSDLDAAPLRDELDFEFLGNRSGEPYIIQTNVYHSGVGGREMRHSLWFDPTADFHTYAILWNPKQIVFFVDKVAIRVYPNDASKPPGGGGGGDGFFPIAKPMYIFSSIWNADDWATRGGLEKTDWAKAPFVSSYRDFAADACAWPPPAAGVAPSPPTPACAAATGDSWWDQPPAWALDAGQRLDNAWVARNLLVYDYCDDRKRFPTPPEECKLRPAATAS

SEQ ID NO: 202993 - protein, 37 aa, Zea mays
  Clone ID: MRT4577_116717C.1.pep
IYHNQIQGQALIFIVYTSHLDNINGPYNAPPPNRKQG

SEQ ID NO: 202994 - protein, 88 aa, Zea mays
  Clone ID: MRT4577_116718C.1.pep
QAQKSTFHFAAISYMSFATILSFCTPKGTITMSRSATGSRGRYLKVICRRCPCPISARRSADRDLPQIGASGTGAPSRYAPPPSLLPA

SEQ ID NO: 202995 - protein, 53 aa, Zea mays
  Clone ID: MRT4577_116719C.1.pep
SSRSRACVLLSALASRIGPGQTIVPYEKNVCPIKVLGLGKESAFLSVLVICPG

SEQ ID NO: 202996 - protein, 60 aa, Zea mays
  Clone ID: MRT4577_11671C.1.pep
MDITKTTNQAKDGGKESFEVPSAREKVKETRNPKPGVKKKTCKVKVDRVKKSYSASRITT

SEQ ID NO: 202997 - protein, 84 aa, Zea mays
  Clone ID: MRT4577_116720C.1.pep
RTRVRTRVWLSSIDRLRLTRSSHTMTVMHEDKILVAQKQQHGWRPELHLLLLQPPCRRCRCRQRRPLQHHQDCPIPSRQVTATH

SEQ ID NO: 202998 - protein, 42 aa, Zea mays
  Clone ID: MRT4577_116721C.1.pep
PRLCQRKQVLSFYTLTDISEHGIFLFRSAAHRAYITSKKPIP

SEQ ID NO: 202999 - protein, 67 aa, Zea mays
  Clone ID: MRT4577_116722C.1.pep
PGATRSGVDRLIHSAHPSVHLVGPSRESLSCSCPHRAGASIFGIPTLAGPSFVFVAAQEVRAVFGGH

SEQ ID NO: 203000 - protein, 156 aa, Zea mays
  Clone ID: MRT4577_116723C.1.pep
AGGTVFLFGMRAVWATPLMCVGSLLWPPGLFSFCFRLVCCLVLWGDIFFALVAVLLLVVRGCFRVLFGERWCAFWLRSGFPRAWSFCYFILFVVAAAWFRPFNGGLSPPCFLWLFVVACWVVFLSGVLNSASRCATPVAFVTLIEQLSHEMKYQNT

SEQ ID NO: 203001 - protein, 54 aa, Zea mays
  Clone ID: MRT4577_116724C.1.pep
FLIIIGEQSIHQKTKQIARKTEKTKKMDSANRKNHARRGTTITKRKEEESVHPD

SEQ ID NO: 203002 - protein, 454 aa, Zea mays
  Clone ID: MRT4577_116725C.1.pep
MDPWSESEGKRAHDPIFKCFSQNQGHHHFMERSTDAAVALSERCRCIWVSGPIIVGAGPSGLAAAACLKEKGISSLILERSRCLASLWQLKTYDRLSLHLPRQFCELPLMPFPADYPIYPSKQQFVAYLESYAASFGICPTYNRTVVCAEYDEQLLLWRVRTQTSDTTGEEVEYVSRWLIVATGENAEAVQPDIGGLQEFPGTIMHTSAYKSGSAFTGKRVLVVGCGNSGMEVCLDLCNHSAEPHIVVRDAVHILPREMLGHSTFGLSMWLLKWLPVHVVDRVLLCIARAMLGDTARLGLKRPASGPLQLKSLSGKTPVLDVGTFAKIKSGDIKVRPAVRQVSGRAVEFADGELEEFDAIVLATGYKSNVPFWLKDRVLFSEKDGLPRKAFPNGWKGEKGLYSVGFTRRGLMGTSVDARRVAHDVEQQWRKAKGTHRDGVPLPLVAVVYHGDGL

SEQ ID NO: 203003 - protein, 73 aa, Zea mays
  Clone ID: MRT4577_116726C.1.pep
AGLPASRPFRGFWPVFVRVVSCSLLRSRRLLSFPVGAPLIVCWLLSFSPSLVLRASFLLNPSLCLFSKGWLMS

SEQ ID NO: 203004 - protein, 56 aa, Zea mays
  Clone ID: MRT4577_116727C.1.pep
FELNESFKFYIYPPPHELQQSEHLLKKWTRNFGWLFISCFSVKLLTRRTRNKESNF

SEQ ID NO: 203005 - protein, 340 aa, Zea mays
  Clone ID: MRT4577_116728C.1.pep
MTVAIKVLKSDGLQGQSQFEQEVAILSRVRHPHLVTLLGACSEVSTLVYEFLSNGSLEDFLMCAEKRQTLPWQIRVRIISEICSALTFLHKNKPHPVVHGDLKPANILLDVNLVSKLSGFGISRHLIQSSSNNTTMYHTMHPMGTFQYMDPEFFATGELTCQSDIYSFGIVVLRLLTGRPPDGIKKIVEDAMEKGDLNSVVDTLAGDWPALHVQQLALLALSCTEMSRRHRPDLSAVVWAVDEAMKDATTVPSASSSRPVSDENNTPSYFICPISQDVMSDPRIAADGFTYEAEAIRSWLDSGHDTSPMTNMPLEHDELVPNRALRSAIQEWLQRQKTAL

SEQ ID NO: 203006 - protein, 63 aa, Zea mays
  Clone ID: MRT4577_116729C.1.pep
DGQRPPHAKAAAQVPDCRGGGYFQLFSEGRFLVPCIGGWVFVALGVDILKNRKHPNEPTKMIL

SEQ ID NO: 203007 - protein, 112 aa, Zea mays
  Clone ID: MRT4577_11672C.1.pep
FSQDKSIYEAVESAFITLYTRKSPLETAKSLLDLAIDCSIGDLAALESLISSLVSKADISSSMVPAPGPSFCAFVNGVRPVQSRGALSILCMAAKSSPSILGNHLQDIIDIG

SEQ ID NO: 203008 - protein, 50 aa, Zea mays
  Clone ID: MRT4577_116730C.1.pep
NVHVTTPLTNPSKVVETTFATSNSITYVRHPFLRFQTGSERCQQPARLVS

SEQ ID NO: 203009 - protein, 78 aa, Zea mays
  Clone ID: MRT4577_116731C.1.pep
MFSCRILNWTFFVMFESYLLFFQFCLILLYVNMGGGGYNERLTCAGSGFIPTRRRGCFKRLRGTGTFVLNALTLFVFP

SEQ ID NO: 203010 - protein, 156 aa, Zea mays
  Clone ID: MRT4577_116732C.1.pep
HRREDPQILNNEECFILKLEAGAATLRARSAPAFDIIHHTVWGYFSQRTGLLIQLEDSHLLRMKSGKGARRSENIFWETSMESVISDYRYIDGINIAHGGHTNVTLFRYGEGSVNHKRKLEETWTLEEADFNVHGLTTDYFLPPADLKEDDEDQNK

SEQ ID NO: 203011 - protein, 132 aa, Zea mays
  unsure (1)..(132): unsure at all Xaa locations
  Clone ID: MRT4577_116733C.1.pep
SRVAQLVREHLETHHANCTSNNLTTSAAKILSLXLALLALLASATHAYIIAQCSLAPSSIXISQFLPPCSVMAFEHPIVQAYTLQQAICCSDLQQPIAHSPQQSLAHLTIHTIATQQLQQHLPTLSHLAMVN

SEQ ID NO: 203012 - protein, 39 aa, Zea mays
  Clone ID: MRT4577_116734C.1.pep
RESYYSASYSEERTRIMASGTSSRVACSTACLASAVTGD

SEQ ID NO: 203013 - protein, 198 aa, Zea mays
  unsure (1)..(198): unsure at all Xaa locations
  Clone ID: MRT4577_116735C.1.pep
TPSRLLHLVATVRSSIVVHQLSKILRREEQEFCSKTLTEAVYFNLRFTFVLVGWEETTHDALVLHDALERENGIRVPEGKFYLVDAGYGAKLGFMPXFRGVQYHLNERGNNPVQNEKKLFNHRHSSLRVSVEXAFGSLKRRFKILDDATPFFPFSTQVEIVVACCIIHNWVIQDGRDDFIIPAQKKKGTAHFPKTCHA

SEQ ID NO: 203014 - protein, 263 aa, Zea mays
  Clone ID: MRT4577_116736C.1.pep
MAAASSMALSSPSLAGKAVKLGPSAPEVGRVSMRKTVTKQVSSGSPWYGPDRVKYLGPFSGEPPSYLTGEFPGDYGWDTAGLSADPETFAKNRELEVIHSRWAMLGALGCVFPELLSRNGVKFGEAVWFKAGSQIFSEGGLDYLGNPSLVHAQSILAIWATQVILMGAVEGYRIAGGPLGEVTDPIYPGGSFDPLGLADDPEAFAELKVKELKNGRLAMFSMFGFFVQAIVTGKGPLENLADHLADPVNNNAWAYATNFVPGK

SEQ ID NO: 203015 - protein, 98 aa, Zea mays
  Clone ID: MRT4577_116737C.1.pep
RRRRLRRSYRRSRYPLLGELLRYSRFRRLKRRSSTRAFLQTPFKICVRRWLYYKRRSLRLRSRRRCSRKCTVVNLPRVLRTYWCSCYRYGVWLPPSPS

SEQ ID NO: 203016 - protein, 90 aa, Zea mays
  unsure (1)..(90): unsure at all Xaa locations
  Clone ID: MRT4577_116738C.1.pep
YIPLHSLAIVARRYASQTDAYPKLLYLSHPYFIVIKGVTYXXSSATSKMTMENVPCHSDLKEFSNVVSSKSIGVYXLSCDHAHSCCVLLA

SEQ ID NO: 203017 - protein, 90 aa, Zea mays
  Clone ID: MRT4577_116739C.1.pep
VGASGEWGRGCRGLLFCGDQPVDVPRVPPVVCISVVCFGVPVRLVWGVGACCFFLGLFCDGGSLLGGVHAFADFVPLCWYCSFTVVGVGL

SEQ ID NO: 203018 - protein, 332 aa, Zea mays
  Clone ID: MRT4577_11673C.1.pep
VPSEVSARAGGVWSQGLKRRGSARESAPSLFRRVFSRFPLPTRSITPNLCKLPLTSSSSSMESKDGTHDPATTAAPPAGAPQPAMPSAETARWGTRQMGPPAAPGAHPENQEAARWTAARGDQELPPYVIIGEPVAAPPPPQHRGKGDSPMEHILDFFNTWSRKAEELASNIWFNLKAAPSMSDAAMGKLSLGAKALSEGGFEKLYKQTFSSSPDEHLKKTFACYLSTATGPVAGTLYLTNLNVAFCSDRPLSFAAPSGQTAWSYYKVMIPLGKIATVEPVTMKESPPEKYVHVVTVDSHDFWFMGFVSYDKAVHNLVEAVSQHGVATAGGK

SEQ ID NO: 203019 - protein, 121 aa, Zea mays
  unsure (1)..(121): unsure at all Xaa locations
  Clone ID: MRT4577_116740C.1.pep
GGWGSAWFLSRFGTLSPLGPHGGRKXAPPGKKRPRTGPARRAKGGPGGPRRAGQPPPSRGQRPPPGGSRAPSTKASTPPAQGATSPPPERPXGWPRPGTPPWGGAKGTRGGTKTPGGPWSP

SEQ ID NO: 203020 - protein, 69 aa, Zea mays
  Clone ID: MRT4577_116741C.1.pep
VNTAWALGLIVGPALGGYLSQPAEKYPHVFSKDSVFGRFPYLLPCLSVSAFATLVLISCEWLPVCINTL

SEQ ID NO: 203021 - protein, 101 aa, Zea mays
  Clone ID: MRT4577_116742C.1.pep
EAGAAAKASGCMAPFMPPLPPASNRAAVKREQQRRPAGGGDRGGDRFETVSEQGGRGHDNTGNSGADGARPQPGDRSGRSALQDDGSESEEETAPRRSRKR

SEQ ID NO: 203022 - protein, 133 aa, Zea mays
  unsure (1)..(133): unsure at all Xaa locations
  Clone ID: MRT4577_116743C.1.pep
MSKRPRGKRLSGISETVAPGKGKHARPKAGTKKKAEAASVAAAAAAAGHNTDYIDVRARRGQATISHSLFERLRRERISXRMPHLQELLPGFRKVTVKACMLDEIINYMQSLQKQAEFLSMKIDAFNPVVSFH

SEQ ID NO: 203023 - protein, 292 aa, Zea mays
  Clone ID: MRT4577_116744C.1.pep
MATAIVPTDAELLQAQADLWRHSLYYLTSMALKCAVELHIPTAIHNLGGSATLPDLVAALSLPAAKLPFLGRVMRLLVTSGVFASSDDVQYRLNPLSWLLVEGVESEDHTYQKYFVLGTVSRHYVEAGMSLADVFSGLRSLTYCCGRQGNASAAAIVKAFPDIKCTVLNLPRVVEETTTKTITIPPAQAVMLKLVLHFWSDDDCVKILELCRKAIPSRQEGGKVIIIEILLGPYMGPVMYEAQLLMDMLMMVNTKGRQRGEDDWRHIFTKAGFSDYKVVKKIGARGVIEVYP

SEQ ID NO: 203024 - protein, 360 aa, Zea mays
  Clone ID: MRT4577_116745C.1.pep
MATAIVPTDAELLQAQADLWRHSLYYLTSMALKCAVELHIPTAIHNLGGSATLPDLVAALSLPAAKLPFLGRVMRLLVTSGVFASSSESDDVQVQYRLNPLSWLLVEGVESEDHTYQKYFVLGTVSRHYVEAGMSLADWFKKEEDEDRQLPSPFEALHGVPLVHESTKLLDEELDRVVEEGVAAHDNLAIGTVIRECGADVFSGLRSLTYCCGRQGNASAALIVKAFPDIKCTVLNLPRVVEEKETTKTITIPPAQAVMLKLVLHFWSDDDCVKILELCRKAIPSREEGGKVIIIEILLGPYMGPVMYEAQLLMDMLMMVNTRGRQRGEDDWRHIFTKAGFSDYKVVKKIGARGVIEVYP

SEQ ID NO: 203025 - protein, 206 aa, Zea mays
  Clone ID: MRT4577_116746C.1.pep
MSLSKLFSNLTIQTRSISSYRHMHPTKFVSILQNVPMKPRSAWQVYIREHLKGTKTTQEGLTKSSTELSAKWKALSEHEKQKYYTIYESEKDAYEKAFAVAVNNASPKQFYQENLLRKKYKLPLLVDPKKPKRPLNAYLSYYQALRDSKHASMEGQPVAEQAKIVGRLYKELPESEKKIYKDKANQAMEQYKKQVAEYNREAGIHA

SEQ ID NO: 203026 - protein, 57 aa, Zea mays
  Clone ID: MRT4577_116747C.1.pep
ASLLNIVPRSHIWVEDKDLSWVDGEVFRIDGQNAHVRTTKGKAVCVALLLKSVTNPF

SEQ ID NO: 203027 - protein, 356 aa, Zea mays
  unsure (1)..(356): unsure at all Xaa locations
  Clone ID: MRT4577_116748C.1.pep
MATAIVPTDAELLQAQADLWRHSLYYLTSMALKCAVELHIPTAIHNLGGSATLPDLVAALSLPAAKLPFLGRVMRLLVTSGVFASSDDVQYRLNPLSWLLVEGVESEDHTYQKYFVLGTVSRHYVEAGMSLADWFKKEEDEDRQLPSPFEALHGVPLVHESTKLLDEELDRVVEEGVAAHDNLAIGTVIRECGADVFSGLRSLTYCCGRAGERQXAAAIVKAFPDIKCTVLNLPRXVVEETTTKTITIPPAQAVMLKLVLHFWSDDDCVKILELCRKAIPSRQEGGKVIIIEILLGPYMGPVMYEAQLLMDMLMMVNTKGRQRGEDDWRHIFTKAGFSDYKVVKKIGARGVIEVYP

SEQ ID NO: 203028 - protein, 155 aa, Zea mays
  unsure (1)..(155): unsure at all Xaa locations
  Clone ID: MRT4577_116749C.1.pep
GGLNQTQLRKILAYSSITHIGXIIAVLPYNPNITILNLTIYIILTTTAFLLLNLNSSTTTLLLSRTXNKLTXLTPLIPSTLLSLGGLPPLTGFLPKWAIIEEFTKNXCLIIPXIIATITLXNLXFYLRLXYSXSITLLPXXNNVKXRXQFEXXDP

SEQ ID NO: 203029 - protein, 112 aa, Zea mays
  Clone ID: MRT4577_11674C.1.pep
MESKDGTHDPATTAAPPAGAPQPAMPSAETARWGTRQMGPPAAPGAHPENQEAARWTAARGDQELPPYVIVGEPVGVTSTNTSRISLLCCMQRMLMFSKRWTRVEPDLSLTI

SEQ ID NO: 203030 - protein, 268 aa, Zea mays
  Clone ID: MRT4577_116750C.1.pep
MVVEAAVAAVLVEEMWWRQLDSIVSAVSFGLMSMFLAIAILEHFLRPLAHTLEHAPPRGIRHRLLLFLSRGGAAMPFHGVPHQLSEVHKKRTLYHPELPSASRCPPKTYHQENIAHIILPSKSHQSTDRTEPLFDGADDTMAIFLALRSPKLEVLGLTTTFGNVHTALATRNALHLKATKLRIASFVHGSDGLRIASFVHGSDGHCGSRLMPPMLGQKQASMLNIVTGSHIWVEDKDLSWVDGEVFRIDGQNAHVRTTKGKAARGYLY

SEQ ID NO: 203031 - protein, 159 aa, Zea mays
  unsure (1)..(159): unsure at all Xaa locations
  Clone ID: MRT4577_116751C.1.pep
MVLLLVVVFGSQSTDRTEPLFDGADDTMAIFLALRSPKLEVLGLTTTFGNVHTALATRNALHLXAAYLPSSLSPTLLVCSTHSDRGSHLLLMCVLELEAVGRTDIPMAEGSHPTIKKATKLRIASFVHGSDGLRIASFVHGSDGHCGSRCGRSGRRRGL

SEQ ID NO: 203032 - protein, 88 aa, Zea mays
  Clone ID: MRT4577_116752C.1.pep
GSQASSTVQTATVDRGAAGRGAAADCRLGRDYFVTNVLVCSHIWVEDKDLSRVDGEVFRIDGQNAHVRTTKGKAVCVALLLKSVTNPF

SEQ ID NO: 203033 - protein, 132 aa, Zea mays
  Clone ID: MRT4577_116753C.1.pep
SPPTLQTSDSLYRSFRYSAPFAAPFMRDDHRSLEPRWKGARAPCPRLTPSSTSPTPAIALSCACMTSGCSTPFSLNYKTRLCLTHRISTSMYDFVLYSPLISSTDGDLRKTYATLAVSMTLHTVKRHIWMGY

SEQ ID NO: 203034 - protein, 92 aa, Zea mays
  Clone ID: MRT4577_116754C.1.pep
KLFFSELVVLKRARMKRMKALEKMMNSKSASSIANLVALIIFVIFCFFVLWQGRAYCGGYEGPMFLCGDDNDTVEPRQCQQAIFQIGIYGSF

SEQ ID NO: 203035 - protein, 133 aa, Zea mays
  unsure (1)..(133): unsure at all Xaa locations
  Clone ID: MRT4577_116755C.1.pep
GLNDLRTNVYILTNLFKMLEHIRSLKKHRFQSEKSACRHCLGSTGFVVTATQENRSLVATPPQCALPCQSMKKQKMTEMIKATRFAMEMLIWNSSSSPMPYTLHPSPLYTDELVXECSEIQLMKDSPPLRNDE

SEQ ID NO: 203036 - protein, 98 aa, Zea mays
  unsure (1)..(98): unsure at all Xaa locations
  Clone ID: MRT4577_116756C.1.pep
MHSSAHDXLVKELREADKAIYKHARHFCVLTDDCDQPYDHKLAMALCAEHNAHLVTVPGAKTLGEQSGLCQIDSDGKARKDVSCSCVRAKDYGEQSDG

SEQ ID NO: 203037 - protein, 155 aa, Zea mays
  Clone ID: MRT4577_116757C.1.pep
RCPNPSRRRGVRVRAASALRTTRTRTTSRRARSRSAAFPRRPRCARPARRPRPRERSTASRPPGSGSRARRHLPALLCRRLSLPTSNPMLGSTHQSASVSSRRMRARSLGASCVPNRGLLRLSPGRRSCLVPLQVPLQLPPPQLQQKRWLFFKVW

SEQ ID NO: 203038 - protein, 55 aa, Zea mays
  unsure (1)..(55): unsure at all Xaa locations
  Clone ID: MRT4577_116758C.1.pep
PPPQLGXFXNTTSXXRLHATRPARPKKAATAAPAPHAITEAILNSDFGLNRRPGR

SEQ ID NO: 203039 - protein, 185 aa, Zea mays
  Clone ID: MRT4577_116759C.1.pep
RLFLSENLLFGDIPPAIGNLAALEELEIYSNNLTGRIPASMSALQRLRVVRAGLNQLSGPIPVDLAECASLEVLGLAQNNLAGELPRELSRLKNLTTLILWQNSLSGEVPPELGDCTSLQMLALNDNAFTGGVPRELAALPSLAKLYIYRNQLDGTIPPELGNLQSVLEIDLSENKLTGVIPAEL

SEQ ID NO: 203040 - protein, 71 aa, Zea mays
  Clone ID: MRT4577_11675C.1.pep
AWSYYKVMIPLGKIATVEPVTMKESPPEKYVHVVTVDSHDFWFMGFVSYDKAVHNLVEAVSQHGVATAGGK

SEQ ID NO: 203041 - protein, 66 aa, Zea mays
  unsure (1)..(66): unsure at all Xaa locations
  Clone ID: MRT4577_116760C.1.pep
KLILCRTAPLARCKRTAGHRQRPPAASAADAEMQRVFCRIDADGDGRISSSELAAVXRAISPLTSS

SEQ ID NO: 203042 - protein, 216 aa, Zea mays
  Clone ID: MRT4577_116761C.1.pep
IGYLEAGREPCFPYPKSAAVRRGAGDTRWHWRPRLRRLAQAPVITRLASASPRASSAHRRVRHVLFVLPLPVPAPPAEVEVEGICRLQPPCLTPKPPRRCSSPPPGQSAPPASCFAPPRPAPPRSSKEEREEQVEGEECPDCGGTGLCGRCKGEGFVFKQLSEETATRARKAAKNMATRYTSGLPTKWTYCNKCSSTRSCTTCGGSGRIVTAPPVT

SEQ ID NO: 203043 - protein, 117 aa, Zea mays
  unsure (1)..(117): unsure at all Xaa locations
  Clone ID: MRT4577_116762C.1.pep
LPXPXSCXLVSXCXASGSXVXCPSVGGXXGXWXXXGAAWRXXXXPPPLXXXXVPLSXXXGXXRAXGPPGFSXXXXXXRXVVLLACXRPCXVVSFVAPAVSSSXVAGKSAVAXGGARV

SEQ ID NO: 203044 - protein, 51 aa, Zea mays
  Clone ID: MRT4577_116763C.1.pep
PSQTEGSELQIRPKAKHLRTCFHNRPAPISNSFITSPDSTTNSNNSPTHHH

SEQ ID NO: 203045 - protein, 48 aa, Zea mays
  Clone ID: MRT4577_116764C.1.pep
GIPEVDLYKCEPWELAEKSFLPGRDSEWYFFGPRDRKYPNGCRTNRAT

SEQ ID NO: 203046 - protein, 88 aa, Zea mays
  Clone ID: MRT4577_116765C.1.pep
VNNQVNLNWTLVWLYRREMGNQGFFYRGGFLILETRILGKEAFLIWEVVSNSGWLKGTNNGFQGMVKPNLESLSWNKDLLPKPVEKIK

SEQ ID NO: 203047 - protein, 90 aa, Zea mays
  Clone ID: MRT4577_116766C.1.pep
DRVGYAIGTMVVVKYTPLSAMYVGIYVWGHTGYDGVILPIKRIVVTVGFCPGVSDRSTFALGVGTPVVPFVCSRYETGPHKNKQGFCFPF

SEQ ID NO: 203048 - protein, 46 aa, Zea mays
  Clone ID: MRT4577_116767C.1.pep
SWWSFNNISFLIPARSALLPCCFEHLIVSLQLTFFILNLSLCKGYI

SEQ ID NO: 203049 - protein, 82 aa, Zea mays
  Clone ID: MRT4577_116768C.1.pep
VLIGEKTPGGGWGHFSKRDNTCAREFVVFYVGTLFFYPWGQRFYALGVSPFIEELSFVRIPEVGVEYARGKKAPGRCFLYIL

SEQ ID NO: 203050 - protein, 88 aa, Zea mays
  unsure (1)..(88): unsure at all Xaa locations
  Clone ID: MRT4577_116769C.1.pep
KEKVKKALKKALKWLYHNQSAEKEGFQEKLKKVEAVCNPIVLAVYQRWGGAPGGDPYGGVFPAPPQLXMVLNGXGGGYVECREPNQIL

SEQ ID NO: 203051 - protein, 117 aa, Zea mays
  Clone ID: MRT4577_11676C.1.pep
QGHVFTSLYTEVDDPPPVVMQGIHSNSDLLERGQERKHPRPPYRRCRAECPFTSYGRSRNPWSGADQPCAQSGEIGDRFAAHVAHQGVLRGRHTQAPGWPGRGGGTGRSDFLLRPGR

SEQ ID NO: 203052 - protein, 92 aa, Zea mays
  Clone ID: MRT4577_116770C.1.pep
LQDPYHVPRARRPTGQSLHNHVGWCQDYSIYALKLTRIANTEDTSLPHRNSIHSTTIGQTRKTIMCTYRVITSLQQPNTFAVGKLLPQTVVQ

SEQ ID NO: 203053 - protein, 109 aa, Zea mays
  Clone ID: MRT4577_116771C.1.pep
RMSWNESWKAWRRKRGQKKGWMKYWVNNIMLFLIFVVLSLYLSLSLYGAVGHWNVLETILLSEALFFYALGCSFIWFVCSRPVDGVSLARFLPSQNLLDAAIQRPPAHN

SEQ ID NO: 203054 - protein, 149 aa, Zea mays
  unsure (1)..(149): unsure at all Xaa locations
  Clone ID: MRT4577_116772C.1.pep
CKTAGKAKPXQQGPGDPDYGNDRDLHLXPMAAHIPKXLMRDCPAYTHCDTAXMTADPKTISKNRVAGGDQCRWDMLVAIDCESPXLIARNGDKISEDEWIKAGLQIFIEVALDYLNYPSLIHAESILFMCESHMRFMSAQHTNRIDEVR

SEQ ID NO: 203055 - protein, 107 aa, Zea mays
  Clone ID: MRT4577_116773C.1.pep
PQIPHPPLFKKTIKQHFFSPAQKKKRPPSPPLEPSQIAFWEASFFKPQKKTLFKTRKYIILSYSQKNSNPQPKHYTFLQLKPLLNPLQNTSLQIKPPPNPWVTPKIP

SEQ ID NO: 203056 - protein, 126 aa, Zea mays
  Clone ID: MRT4577_116774C.1.pep
AYGETPEIDVHALLPLTISSWWPRSLSTASHSSECTLDQCVKDPAARRTWGISAHQSVPVSQVSGCRLVSIGQGFWLRLAVVAGQHIVGEAGATSRADRVPRMTGGEEIPPASVTMSPPAGLEVPN

SEQ ID NO: 203057 - protein, 33 aa, Zea mays
  Clone ID: MRT4577_116775C.1.pep
MQDQSRYCRVCQPSASTYFLFPSIPPELIVAPM

SEQ ID NO: 203058 - protein, 56 aa, Zea mays
  Clone ID: MRT4577_116776C.1.pep
MDARFPYSPAEVAKVEFVQFGILSPDEIVIPLASLPSPRCYCHSSGSRVELSERAA

SEQ ID NO: 203059 - protein, 376 aa, Zea mays
  Clone ID: MRT4577_116777C.1.pep
MDDPTPETRESAITQRSSNSSVGDMIEEFRDLDKLGQGFRSVDPLEEIDIGDGKTPRPTFVNKTLETDPRDEMIGLLKEYLDCFAWNYTEMSGLSREIVVHRLPIKSGFRPFKQKARTFRPDLLPRIKDEIHRLLEANFIRPCRYAEWVSNIVPVKESVKLAEFSSHIADSRKAFDKMRRYGLKMNPRKCVFGVSAEQQEAFDLIRKYLSSALVLKAPQVGVSFRLYIVAEDKVIGAVLTQVTGGKEHVVTYLSRRPVDAETSQTDVIKYMLQNPIMSGTIGKWAYALIEYDLAFEPLKSMKGQVVADFIVEHRINDTHKLDISYLTVTPSTLYFDGSVCNEGKGMVIVTPGFKGQSRVHLIHAPKKTTYIIIECI

SEQ ID NO: 203060 - protein, 57 aa, Zea mays
  Clone ID: MRT4577_116778C.1.pep
YICKKKKKKKKKKKKKKKKKKKKKKKKKKKKKKKKKKKKKKKKKKKKKKKKKKGGPL

SEQ ID NO: 203061 - protein, 95 aa, Zea mays
  Clone ID: MRT4577_116779C.1.pep
GRVFWCPRRRGTHQSIPNLVVKLYCGDDTVGEVLRQNSSMPEYTSHTSLIRSSFLTLSPLTLSISIWILDEVRTSIFSSTCSTSNLYNIPTPLPL

SEQ ID NO: 203062 - protein, 162 aa, Zea mays
  Clone ID: MRT4577_11677C.1.pep
MRLEKCWFCSSTVYPGHGIQFVRNDAKIFRFCRSKCHKNFKMKRNPRKVKWTKAYRRLRGKDMTQDATFEFERKRNRPERYDRNVTEQTLKAIPLITKIRHERQKKHITERQKGGKSMVRKSDAKELDQFIDMVPKQETENYVAKQKVLVSQLKTEENLMEE

SEQ ID NO: 203063 - protein, 161 aa, Zea mays
  Clone ID: MRT4577_116780C.1.pep
STVSLSPSSRRLALHPPNAVGANEATKNNGAGNADTTTEVEIIDRTPIGADSDEESDFGGFDEEEDQKYIEKAQAKSMRKKGKDPRAIVPKAEKSTNGASKEKNGHVSAKEKASRKEKKGGGVEVATDVATKEKPNGVKAKETKVESKKGRRKSGEKKGKA

SEQ ID NO: 203064 - protein, 112 aa, Zea mays
  Clone ID: MRT4577_116781C.1.pep
QSFPLTLDRVRARLPTPDRSYPMGAYDFPALLLLISALLLLPVTDAPSLELSPSDTNFLSDQIHPNVLLHPDYAIIYDSHPTYHPTLRLQVIHLPYCHILCTHIINTLHQSC

SEQ ID NO: 203065 - protein, 85 aa, Zea mays
  unsure (1)..(85): unsure at all Xaa locations
  Clone ID: MRT4577_116782C.1.pep
MAIKRTKAGKKNGSTRNCSTLLDXVHKVANXLADNVGSKQLQDIRRGLKGDSVVLMGKNTLIRRWIKVYAEKTGNHTFDPLMDLL

SEQ ID NO: 203066 - protein, 75 aa, Zea mays
  Clone ID: MRT4577_116783C.1.pep
VAPGMAFGIFGYAGVRANSPHPGLFLGMIFLLIFGKGGVLGGFIVGITLFSRGGQFRADLVPPPFGVSGFFFLVF

SEQ ID NO: 203067 - protein, 311 aa, Zea mays
  Clone ID: MRT4577_116784C.1.pep
MASETETFAFQAEINQLLSLIINTFSKNLKLGIHEDSTNRTKIAELLRYHSTKSGDELTSLKDYVTRMKEGQNDIFYITGESKKAVENSPFLEKLKKRGYEVLFMVDAIDEYSIGQLKEFEGKKLVSATKEGLKLDESEDEKKRKEELKEKFEGLCKVIKEVLGDKVEKVVVSDRVVDSPCCLVTGEYGWTANMERIMKAQALRDSSMSGYMSSKKTMEINPENAIMEELRKRAEADKNDKSVKDLVMLLFETALLTSGFSLDDPNTFGSRIHRMLKLGLSIDEDEEAPEADTDMPPLEDDAGESKMEEVD

SEQ ID NO: 203068 - protein, 47 aa, Zea mays
  Clone ID: MRT4577_116785C.1.pep
QIVTPQSLGSQSIVRSPISSLVRDLKRKDVWNRCLSTGSTSFGRLLV

SEQ ID NO: 203069 - protein, 277 aa, Zea mays
  unsure (1)..(277): unsure at all Xaa locations
  Clone ID: MRT4577_116786C.1.pep
GQEVVNAISAAALGLSSGCVSSQVKQEQPHDGSPPLREDDRDGHYVFAVGDNLTSRYKINAKMGEGTFGQVLECWDKERKEMVAIKIIRGIKKYRDAAMIEIGMLEQLGKYDESRSSYRSFPIALVREIAKQLLECIAFMHELCLIHTDLKPENILLVSPEYIKVPEYKVSSRSPKEGSYYKRVPKSSAIKVIDXGSTTYDQHDQSYIVSTRHYRTPDITWVTPSKSQYNFWSPIMPRRHNITLILLIIGSATKINHLDSTRLGHPLVIGSLLWGSG

SEQ ID NO: 203070 - protein, 57 aa, Zea mays
  Clone ID: MRT4577_116787C.1.pep
HTFHNSFFTGHNLTNYILNIPPTDSYKCFCQFNNQSNLFGAQEKTFCIAFINNTVIF

SEQ ID NO: 203071 - protein, 144 aa, Zea mays
  unsure (1)..(144): unsure at all Xaa locations
  Clone ID: MRT4577_116789C.1.pep
LVAAGAVDILLKQIYLLXRGIADQEVLMQVFLTLRNIARYSNLRQVLASTAESVEIIFQELLRNKADGFFIASDILKSLCESKEGRETVQALSHLIKRLRNLVHDLEKKVELDKRNGRTGAVKATNLRRLREAATLYHILTSGT

SEQ ID NO: 203072 - protein, 93 aa, Zea mays
  unsure (1)..(93): unsure at all Xaa locations
  Clone ID: MRT4577_11678C.1.pep
XGSLRMSXSVXXWXXRXXRTPRCXAGXXAXSSXXRSQGPTCRAALAPSXFXGXLPXXGPARRLLRAXXSCGDLXWXRXESVGAXVFRMEXNEA

SEQ ID NO: 203073 - protein, 115 aa, Zea mays
  Clone ID: MRT4577_116790C.1.pep
DSLSNNQDEPRQVAAAGGQRSMSYLWGSGEPAKPAEGPDWKSSTCCCGCYNCVRNHVLQKVKDPQTLVLGLPAKPIATTRPAEKTPETSLPTDLETKYTLLLHRSYYLEYLIDSN

SEQ ID NO: 203074 - protein, 63 aa, Zea mays
  Clone ID: MRT4577_116791C.1.pep
LNMYIKLMLLTATLTLLFLMPLLSTAFPHDLPIHVCAAWTSPIALLLQYLSLTSCHMICLVCS

SEQ ID NO: 203075 - protein, 79 aa, Zea mays
  Clone ID: MRT4577_116792C.1.pep
PPPPPFFPQGVCFKTLITGFLSPAPPLYYPPPGALRSFFFLGLLLQNFWAGQIHVWDITPALNSLPLFWFWSREVSPPS

SEQ ID NO: 203076 - protein, 128 aa, Zea mays
  unsure (1)..(128): unsure at all Xaa locations
  Clone ID: MRT4577_116793C.1.pep
ADGLPAIPASVALILARTVRSFLCPTINISHGGSARRCQSSLGYLFGSGEXPPNTSVAPADSAPPAAAGAPLAEKPPAAKPDGTSQIAAGATSSTNYYHRAYSXNTGNFLTDRTSTKVHADPGRGYFL

SEQ ID NO: 203077 - protein, 65 aa, Zea mays
  Clone ID: MRT4577_116794C.1.pep
RPSQSCQRIQPYPCHSRLLFARATLLQKLTCPRSPSRARSRCRPGHGDQGEARRASVGAPSAGVS

SEQ ID NO: 203078 - protein, 162 aa, Zea mays
  Clone ID: MRT4577_116795C.1.pep
VPVSTGLPVLTLIPAWILLVGYSIYYGLKGCYRLEGQVFIRKTQTFDLRSPFLSLSLCVCVCVSGSQQRAGRISLECLGSESCNCNKATGVHGGEGKGRGRSQGPGQRARAAAAAGRSSGGREGRERRRRAGGGGSRRRNRGVVRDTARHRGAVPSGPSQAR

SEQ ID NO: 203079 - protein, 68 aa, Zea mays
  Clone ID: MRT4577_116796C.1.pep
MDASKQPVKLVKVTRVLGRTGSRGGVTQVRVEFMDDQTRSIIRNVKGPVREDDILCLLESEREARRLR

SEQ ID NO: 203080 - protein, 142 aa, Zea mays
  Clone ID: MRT4577_116797C.1.pep
PGPPRFGPQRGRSGSSHPGSVRNPPGRFTSFSPGLGPPPPKPKGAPPGIAETSVPKRRGPGQGGPPPRESQPRPPKAIPPPPPDSLLGVCSKGFELGFWLNFFFGSPVFICCGPLFGFAIKTKTKIKKKKTKKKKKKKKKNY

SEQ ID NO: 203081 - protein, 115 aa, Zea mays
  Clone ID: MRT4577_116798C.1.pep
HSPGAGSSASRLPSTPGTGPASRLCTGQTQERADARQGRCTAQTRRGHGSTRTPHILKSGQIPPISTPRCQGTKLDPRRRRCDRQPFPVAAADHRCVIYIYQLRYDDGLVMYVYK

SEQ ID NO: 203082 - protein, 73 aa, Zea mays
  unsure (1)..(73): unsure at all Xaa locations
  Clone ID: MRT4577_116799C.1.pep
MAAKIFWLLMLLGSSASAATATIFPQCLQASIAFLLSPYLLPAVSSVFENPIFXPFRVQPAIATCNLPLITLV

SEQ ID NO: 203083 - protein, 44 aa, Zea mays
  Clone ID: MRT4577_11679C.1.pep
FGTRLAFPISSSTDSLPASHISCTQSASGTAATPVYSQVPPLYT

SEQ ID NO: 203084 - protein, 64 aa, Zea mays
  Clone ID: MRT4577_1167C.1.pep
LIQVPSIPLTMWYLALHESYHSVFCCQSRNLFVARSPWRSMTFFNRSPEPKGERHSFPPVGKQL

SEQ ID NO: 203085 - protein, 66 aa, Zea mays
  unsure (1)..(66): unsure at all Xaa locations
  Clone ID: MRT4577_116800C.1.pep
PRVYIGCMKSGQGFFCLNQKGVQXNWGKLGEGKSTFRHAFGEMLVISRAIAQFIYINKSALRTYAH

SEQ ID NO: 203086 - protein, 73 aa, Zea mays
  Clone ID: MRT4577_116801C.1.pep
WWHSTNWGNWANLVGWQAQLPLPFNHLPEMCYSHFITTPEAQKFFPSTSTCHLQGYGNGGRWCLNNTSRRQRI

SEQ ID NO: 203087 - protein, 65 aa, Zea mays
  Clone ID: MRT4577_116802C.1.pep
FNSSDLNYYVNPARIGAQKFLAKNGQLCRGRHLLYILGARLAYTKAKLGGGLTIDTIPRACTCAY

SEQ ID NO: 203088 - protein, 70 aa, Zea mays
  Clone ID: MRT4577_116803C.1.pep
EPSFGWPFVNLSSNFRCLLIFSLFKLQQTCRVSNKSLPKAPYTLKCLLPSLPVRTCQGPRGLQQGAQVKG

SEQ ID NO: 203089 - protein, 74 aa, Zea mays
  Clone ID: MRT4577_116804C.1.pep
FSQYAVLPRPFSIKTSNENFAGGLNADEKLTRSLNYQLERCLFQICYQGGLGQIRGPGKCPRGEKSTFKHLGYF

SEQ ID NO: 203090 - protein, 82 aa, Zea mays
  Clone ID: MRT4577_116805C.1.pep
TRGQKLRQSPSTKHQQDNSYGPTFGLELGISIPCNAVVLRIVCGGAHAVLVHSVRKYIVTCVRYKYKLCTCVDEVSIACVVL

SEQ ID NO: 203091 - protein, 36 aa, Zea mays
  Clone ID: MRT4577_116806C.1.pep
PALASYQLLNLIGRVLLLAMSFFLVRFRPFECTRAK

SEQ ID NO: 203092 - protein, 494 aa, Zea mays
  Clone ID: MRT4577_116807C.1.pep
MQVIYHAFSSSAYGARPTEQDPLIDMELLPLLTWLLLAHAMAYLAWMAAARRRQSRCYLLDYVCHKPREDRKLSTEAAGAVIQRNARLGLTDYRFLLRVIVRSGIGEETYAPRNILEGREDSPTLRDAVDEMDAFFDEAIAELFARTDVAPRDVDVLVFNVSMLSPAPSLSSRIARRYGLREDVAAYNLTGMGCSAGLIALDLARNALRTRPRALALVVSSESIAPNWYSGTDKSMMLANCLFRSGGSAVLVTNDPARRGRAKMELSCLVRANIGASDDAHTCAQQREDAEGRVGISLSKALPKAAVRAFAVNLRRLAPRVLPVAELARFAARLLARRLFPHLQQHSSSGKHKGDTAAPPKINFKAGVDHFCLHPGGTAVIEAVKQSLGLEDEDVEAARMTLHRWGNTSASSLWYVLSYMEAKRRLKVGDRVLMVTFGSGFKCNSCVWEVTGDMADDRGAWADCIHAYPPERLANPYMDNFGWINNVDGDTLMF

SEQ ID NO: 203093 - protein, 471 aa, Zea mays
  Clone ID: MRT4577_116808C.1.pep
MELLPLLTWLLLAHALACLAWTAAARRRQSRCYLLDYVCHKPSDDRKLSTETAGNVIQRNARLGLTDYRFLLRVIVRSGIGEETYAPRNILEGREDSPTLQDAVDEMDAFFDEAIAELFARTGLAPRDVDVLVFNVSMLSPAPSLSSRIVRRYGLREDVAAYNLTGMGCSAGLIALDLARNALRTRPRALALVVSSESIAPNWYSGTDKTMMLANCLFRSGGSAVLVTNDPARRGQAKMELSCLVRANIGASDDAHACALQREDGEGRVGISLSKALPKAAVRAFAVNLRRLAPRVLPVGELARFATRLLARRLFTSPHLRQQHLSGGKQKGDAAAAPKINFKAGVDHFCLHPGGTAVIEAVKKSLDLEDEDVEPARMTLHRWGNTSASSLWYVLSYMEAKGRLKVGDRVLMVTFGSGFKCNSCVWEVTGDMADKGAWADCIDAYPPEKLANPYLDKFGWINDVDGDTLML

SEQ ID NO: 203094 - protein, 63 aa, Zea mays
  Clone ID: MRT4577_116809C.1.pep
EVRFGIYLTLASALRLCLVGDSVAVRPSWLEWPRKPDEDDGRRAATRARAVTHAMVRRSVAYR

SEQ ID NO: 203095 - protein, 56 aa, Zea mays
  Clone ID: MRT4577_11680C.1.pep
IHEGSLPGQVFCSTNKTGMDKNLNVKQKHTNQPLIPHIKKYSLRRFKNKLLGNTYL

SEQ ID NO: 203096 - protein, 274 aa, Zea mays
  unsure (1)..(274): unsure at all Xaa locations
  Clone ID: MRT4577_116810C.1.pep
MANKRQRDARKRFREANPDLFPXKPPLLPTEPXKSKKKKNKSMFKKANKGGTGRFKHPLRVPGMRPGERCFICKSTDHVAKACPEKALWDKKKICLLCRERGHSLKNCPDKSEGNLMKFCYNCGESGHSLSKCPKPIENGGTNFASCFICNQQGHLSKNCPENKHGIYPKGGCCKVCGEVTHLARHCPNKGRQDLISSRXMMSTWKSTVRNVLRXHGGDDLEDDFVNEEEPKPAKSKKAKQSGSRPATGTGNDVKSASAKTKAKQAPKVVKFFG

SEQ ID NO: 203097 - protein, 74 aa, Zea mays
  unsure (1)..(74): unsure at all Xaa locations
  Clone ID: MRT4577_116811C.1.pep
IPCTPVDNTLNLNRTKNASALPTKLKRYPGKKKPPPPPTVLXRXXKKKKYSPLWLDCQTLVYMIPPRKRKQAAC

SEQ ID NO: 203098 - protein, 80 aa, Zea mays
  Clone ID: MRT4577_116812C.1.pep
LAWQPIFFFRRLAFLVEPARDRSFLPTGWPFLFGRLGTLLVRGSFPPGWCVVVYRARLVGFIRPASSTASFSLAFPVPFF

SEQ ID NO: 203099 - protein, 158 aa, Zea mays
  Clone ID: MRT4577_116813C.1.pep
RYRHLPSTHAVRPRRPANQPLYIIIAQGENSRLHIPSLSEEHASKVIVLADSPVTAAPAGVEVAVLRQIDLESILQLLAQRGLCSVLVDFREATESFASLLNDFQEDKLVQKVVVEILPFWFASEGLSNLAFGGSQSFPLKNLEHREVNGGVLMEGYV

SEQ ID NO: 203100 - protein, 91 aa, Zea mays
  Clone ID: MRT4577_116814C.1.pep
MATATASVAPPSRRVRAVPPLRVYHVLKAPDLDIQGMEGVVKQYVCVWKGKRVTANFPFKVEFELAVEGQPKPVRFFAHLREDEFEFVDGE

SEQ ID NO: 203101 - protein, 45 aa, Zea mays
  Clone ID: MRT4577_116815C.1.pep
HSFEKKKKMRYKKKRKKKKNENEYAKSVVRSPCIGPHTYYLARSK

SEQ ID NO: 203102 - protein, 72 aa, Zea mays
  Clone ID: MRT4577_116816C.1.pep
LLLMRAINLRLNRGSTQRPKAHGLKRMETYRQIDRLTTNRQTGPIDQHTGSTNYRTVAQPAWQIVDSALTGL

SEQ ID NO: 203103 - protein, 108 aa, Zea mays
  Clone ID: MRT4577_116817C.1.pep
QTKSPTEVREPKNPPGHSLFQFTFQGKKGEKFYQRFFLLRANRVFKIKKGGAPLTRNGGLGQKIKRVGGPFNQHPALKNKGPVFSKNREGFPPERKKKICTQVRPAAR

SEQ ID NO: 203104 - protein, 57 aa, Zea mays
  Clone ID: MRT4577_116818C.1.pep
PGLPPGGIGFLFRPNPIHVAIQLTGHLHPTRYPSLGHVLPLSPGTERTQAHKSAQRF

SEQ ID NO: 203105 - protein, 214 aa, Zea mays
  unsure (1)..(214): unsure at all Xaa locations
  Clone ID: MRT4577_116819C.1.pep
DSGASYHTTLTAGMLSRSHPLHSSHPTSIVAGNGSTLPITSVGASFSPDXHLNDVLVAPHITHNLVSVRRFTTDNYCSIEFDPSGFSEKDLATRTXLARCDSTGPLYTLRSXHRRVSTSRPGLRHXTTCHRRLGHPGPAVMTKLSSSLDSTRSRKHFEGLCHACQLGRHTRLPFPTSSSWAEQAFDLIHCDLCTSLVIGLSGYKYYLVILDDYS

SEQ ID NO: 203106 - protein, 109 aa, Zea mays
  Clone ID: MRT4577_11681C.1.pep
ELPRSVWCNESLGENKLVPYLRAQWLEIEGGVDWRQQGRDAAVGKGADGGGDDARERRRGLWRRAVALSYGVRRGGGRDFKAGWVGWVGRRGEEEKRRYGTVAEEIINR

SEQ ID NO: 203107 - protein, 119 aa, Zea mays
  Clone ID: MRT4577_116820C.1.pep
AGMGIISPRGLVILWITTAYPGASAPIPTASVWERVTFTPCWVIYEQDLHVVDMDVVCSVVATPSHFIRVDDMQRTRIWFVRLGAVAEVAAPHDRMSRFSTAAIPLQLLLELPPQLDLW

SEQ ID NO: 203108 - protein, 258 aa, Zea mays
  unsure (1)..(258): unsure at all Xaa locations
  Clone ID: MRT4577_116821C.1.pep
MALSLRAAASLAAPPAHLRPRRRATSMVRATVSPPPALDSRRRPQNVSGEFFVDHRCIDCATCRWMAPEVFKRVDDQSAVAAQPTSEEIRTKALQALLSCPTGSIHTDKPTEDILQVQNTFPLPINDDLPGVYLCGYHSENSYGATSYLIVHPEGNIMVDSPRYTPKLANQLEKLGGARYMFLTHIDDVADHRKWAERLKCERXIHXRDVEDITADVEWKLTGNGPWDIGTDFELIHTQGIPKGSVCLLYKPLKALFY

SEQ ID NO: 203109 - protein, 121 aa, Zea mays
  unsure (1)..(121): unsure at all Xaa locations
  Clone ID: MRT4577_116822C.1.pep
MAPEGSKVDGKCYDSKMQELLSTAETDEXIXTSYDEVIERSDDMGLQENFVRGIYAYGSEKPSALHKRGIGAFCKGVDVIQQAQSGTGKTASXCAGILQKLDYGLAVCQDLGLAPSRELVQ

SEQ ID NO: 203110 - protein, 92 aa, Zea mays
  Clone ID: MRT4577_116823C.1.pep
LASSGPQSAQHPADRVRVGRAHHAVSESTGAAEEAPRRAPVATAPGRHRAESGNRGGVKQSALHPVMDLRLGTLRPARARPLEWIKWARESK

SEQ ID NO: 203111 - protein, 56 aa, Zea mays
  Clone ID: MRT4577_116824C.1.pep
GEFPKKNNLYLKVKGPAESSITRKILENQIMGPLTVNQPSDGKGFVHLGQPQGVRP

SEQ ID NO: 203112 - protein, 58 aa, Zea mays
  Clone ID: MRT4577_116825C.1.pep
PTNNIMISINAYELELKSLGTHPILLILIFTPYTLTSQSSPHITNTYPYKFNYKPYPV

SEQ ID NO: 203113 - protein, 118 aa, Zea mays
  Clone ID: MRT4577_116826C.1.pep
PITLEHLLHTTPLHHRRVPYTLGSLNPLRTSLQLNHLTPKPSTQRLNTSTPLPPILHSVTPHTPTPNPSPTLILSTISTPSLTTTHISLPIHTLTFIPSSTSSSGYSAPCMLTYRQAT

SEQ ID NO: 203114 - protein, 155 aa, Zea mays
  Clone ID: MRT4577_116828C.1.pep
MGKDKKDQGSSRRSDDKRKHEPSPPSEDFGDSEYLEEEFSSETEGSPKIAAEVWMYIRSVERAELEGSNESEVSSDEENSSDSSEEGSGGDGDDEGNDRGGNGSGGGGDDGDSDGDKGSCDSKGSNDGRSSGDGRSGDGSRSGSSSKASGKAPLA

SEQ ID NO: 203115 - protein, 240 aa, Zea mays
  Clone ID: MRT4577_116829C.1.pep
MRPAATAVAATAAALRAAFLAPPAAAFRLLPPRRVFLLPLHRLSSSSSPVAPPCAASSDSQPPPLPAFMDAQFESFRAQLDGSSALRDRIRAVVSEVESASRAASAALLLIHQPVPLSDVLGKAKAQVEVIKGLYSQLAEILKECPGQYYRYHGDWKSETQSVVSMLAFTHWLETGGLLTHAEAQEKLGLGSGEFGLDVEDYLTGLCFMSNDFPRYVVNRVTAGDYDCPRKVLSFLTDLH

SEQ ID NO: 203116 - protein, 120 aa, Zea mays
  Clone ID: MRT4577_11682C.1.pep
MPRFPKDFIAVRKASPQGHRYRAGPVSVQDFSNSPVDHPGLTVGSSWGRSSAMFTRAISISSVLIGFDCTQGRPLHRRASSRRGRWSCRSCLRPSCGCGIPGSGQRRGVLCRRFSDVARI

SEQ ID NO: 203117 - protein, 101 aa, Zea mays
  Clone ID: MRT4577_116830C.1.pep
QEEAYVWFGSVFPLACDVVNARFTFEALTATTANRLHYPAYDRFLKEMDKSFKFFQDLPTPTGVEFAEDEFILHMEGTAGTQRVVRHIGTTSWPGRVTLTN

SEQ ID NO: 203118 - protein, 347 aa, Zea mays
  Clone ID: MRT4577_116831C.1.pep
IGYLEAGREIPQTAKRNRISAGAARSHRPPSSLAEPTPSPFGPQLATTTMASSKRRFGAAGGADKKDLFHVVHKVPAGDSPYVVAKHLQLVEKQPDVAIVWFWKAINSGDRVDSALKDMAMVMKQQDRSEEAIEAIRSFRHLCSKQAQESLDNLLIDLYKKCGKVEEQIELLKQKLKSIYLGEAFNGKATKKARSHGKKFQVSIQQETSRILGNLGWAYMQQNNFEAAELVYRKAQAIEPDANRACNLGLCLIKQGRHDEARQALEDVRLRRIYGSEDGKVVARAEQLLRELNPLQCVSSPFQVGLSVHEGIMGEPDLVVMNEWTPFRSRRLPVFEEIATFRDQMAC

SEQ ID NO: 203119 - protein, 94 aa, Zea mays
  unsure (1)..(94): unsure at all Xaa locations
  Clone ID: MRT4577_116832C.1.pep
QGRHDEXARQALEDVXXRRIYGSEDGKVVARAEQFLRELNPLQCVSSPFQVGLSVHEGIMGKPDLVVMNEWTPFRSRRLPVFEEIATFRDQMAC

SEQ ID NO: 203120 - protein, 121 aa, Zea mays
  Clone ID: MRT4577_116833C.1.pep
SQQRLQCVLTRSRATISTLFSSYFCRPSSSIHLFPNDLHPLTTTAAADNAPPATASVPATTSSPCAPPPALTASLSPRTKALPSTHIQTSLPNSSPAPSTPDSSYQPCPHSIDPSSICMLS

SEQ ID NO: 203121 - protein, 145 aa, Zea mays
  unsure (1)..(145): unsure at all Xaa locations
  Clone ID: MRT4577_116834C.1.pep
MICNLRLSYQLKIYHIYLKLFQGHGNLNYHSDRLKKAYFYWVTREQGSFEWFRDIMKEVSVLDSKQGVIEMYNYLTSVYQEGDKRSMLISAIQALHFARHGIDIISKTXWVFYCGPDDLGRQLEKLCHKVNTKTFTRFVFHKEHF

SEQ ID NO: 203122 - protein, 59 aa, Zea mays
  unsure (1)..(59): unsure at all Xaa locations
  Clone ID: MRT4577_116835C.1.pep
PRVRHASAQRXRSVGGRVGEGVVWGVKSLGNLGKGFGGVNVYHIEIDNRLCRLIKIRAS

SEQ ID NO: 203123 - protein, 68 aa, Zea mays
  Clone ID: MRT4577_116836C.1.pep
WCENASNSSRIWPTVTGCLLEKQTQSINSCLIRLSLGNQTPVRTEQTGTTTHYYLAKRHRLTPCTGLK

SEQ ID NO: 203124 - protein, 79 aa, Zea mays
  Clone ID: MRT4577_116837C.1.pep
DSSTLDKKSGLVILCRFIFEHYTILFRNIIIGCVCMLVLFFLIYFFILQLNISRICGLNSGRFSGFCRHRVLSTCSIAR

SEQ ID NO: 203125 - protein, 40 aa, Zea mays
  Clone ID: MRT4577_116838C.1.pep
TCPQIKHEQPHQISHDLIAGCYAITIHKSPPYISRGKKTR

SEQ ID NO: 203126 - protein, 50 aa, Zea mays
  Clone ID: MRT4577_116839C.1.pep
GCGKMGLLPNPSPTGSVKGLSTLHNDNFDNTAVPLSKKIDSSFTAINLDI

SEQ ID NO: 203127 - protein, 203 aa, Zea mays
  Clone ID: MRT4577_11683C.1.pep
MSLPRRRHLVLLACLLVFLVFAASASTSSAEVAPSVAVDFVRRSCRSTEYPRVCESTLVPCAAGVGRSPRLLARAALVVGADRARNCSSYIRGGGGGAMKDCAELARDAEERLRQSAAEMERMGRAGTPRFAWSLSNVQTWASAALTDTSTCLDSLAQQSRGGKDSDDAVRVKRRVVAVAQATSNALGLVNRLQPAPHRRRLL

SEQ ID NO: 203128 - protein, 143 aa, Zea mays
  Clone ID: MRT4577_116840C.1.pep
ARTTLLTMIQQERDGIRMDSSLRDVMHGICCSEAKSIMQNAFLDEIYGYYSVRSSEWIKHYSLPDYLAKVEESMEMETKRLAYYLEISSGDSYPLCLQAVNAPLMETYVSYVTEKQIAGQLMLETYKIVEEELLGRCSSLTLG

SEQ ID NO: 203129 - protein, 219 aa, Zea mays
  Clone ID: MRT4577_116841C.1.pep
MNNHLSFEEGWKVLEQGIVKCSKILECTSTRPTVNEYMNYYDCAYRMAVQKQHYCPEMYNGFKMMLAECVRTMVLPHLMHKQNDSFFRELVKMWSNYCIMIRCVIGFFSYLDRCYVKQYKLPSLSNTAATSFFDPVFSYFNDEARTALLTMIQQERDGIRMDSSLRDVMHGICCSEAKSIMQNAFLDEIYGYYSVRSSEWIKHYSLPDYLAKVNIFIIL

SEQ ID NO: 203130 - protein, 55 aa, Zea mays
  Clone ID: MRT4577_116842C.1.pep
RPANTWHQHQSSCTKLQIPLPRPSCYLRCGLRMSCPLSILTRRRPLGLLLLLGLL

SEQ ID NO: 203131 - protein, 46 aa, Zea mays
  Clone ID: MRT4577_116843C.1.pep
FFFKKRLCALSFLIYNLPFLKFGWRNGYWTWGPNQDFPVTTHLHGP

SEQ ID NO: 203132 - protein, 103 aa, Zea mays
  Clone ID: MRT4577_116844C.1.pep
IRIRDGGIPKFQLINARRQSCQPQPRLSGTQRISPSLNLWATSPNVMLFTYNVVCSEHIRCLLLYMILRTLNWTPSLVTSHVKPGLIFPAAQVSISGCGMGLC

SEQ ID NO: 203133 - protein, 78 aa, Zea mays
  unsure (1)..(78): unsure at all Xaa locations
  Clone ID: MRT4577_116845C.1.pep
TLEITDDVLSSYKNQGGFDLLGRTVDQIRTTEQVDAAKSACCDLNLDGLIIIGGVTSXSDAAQLAEFFAEHDCQTKVI

SEQ ID NO: 203134 - protein, 96 aa, Zea mays
  unsure (1)..(96): unsure at all Xaa locations
  Clone ID: MRT4577_116846C.1.pep
GSGAAWPPGRSCTRQADLMDGRGRLCCRPPSTWLFLDSVSAPPSFVLWLLSSLAALPGVGLWSTVRIVLCIAGMARAAKSGPRLGRLETACARAXS

SEQ ID NO: 203135 - protein, 126 aa, Zea mays
  Clone ID: MRT4577_116847C.1.pep
RRGFINSMEQSGGLNGSCPERELAGYSENREGREEKTTMDMNSACAKNSRNKRIAGYRERRRNYLYHYHPQAEFRAPLHSIGARPEEDGCLGRGSSRLCSGHGYGSSFTIAPLCSPNGREKERERE

SEQ ID NO: 203136 - protein, 64 aa, Zea mays
  Clone ID: MRT4577_116848C.1.pep
WSQKSVSPRFRACPSYMIAWELSGFYPLVKSGICEVPVKKLKRTCLGFGVCGSFVWIIGCRSDA

SEQ ID NO: 203137 - protein, 74 aa, Zea mays
  unsure (1)..(74): unsure at all Xaa locations
  Clone ID: MRT4577_116849C.1.pep
AGHNKSAKQLMQDYFVGQLDSDPSPKIHEMKVFIKXSPRDSXRRLMSYVVQYWWTPAPVIGKSAVVSILHAPRK

SEQ ID NO: 203138 - protein, 87 aa, Zea mays
  Clone ID: MRT4577_11684C.1.pep
KKLLVPTLFFWFGGFTEATDWGGVLLFPGPRGTSFVAEHNFQGKIFGRFKKKALEDYGGCKPRTTPWLTIKGAFNRPFNDGPKFCIS

SEQ ID NO: 203139 - protein, 214 aa, Zea mays
  unsure (1)..(214): unsure at all Xaa locations
  Clone ID: MRT4577_116850C.1.pep
MGCYPVFWRKKNSRSQVVQLDQDIPIAGNVKIYSSKELRKATGNFCPGSKLGQGSFGRVYLGKLNNGEKVAIKVLSSESRQGTKEFLNELSVISNITHHNLVKLHGCCIDGGQKMLVYNYVENNSLAQTLFGNSRSGIRFDWRTRVEICVGVADGLTYLHEEVRPPIVHRDIKASNILLDRNLRPKIADXGLAKFFPGHMTHISTRVAGTLGYL

SEQ ID NO: 203140 - protein, 151 aa, Zea mays
  Clone ID: MRT4577_116851C.1.pep
IQGANKRRRIESEYQRDLTRKPTLLQHICDLRSTRTHRRQRCTRSPHRCHGHPPPSHAVYPSPDEALTPHQTRLPRSTTCYFSDTAVSLLPGGAWTASSDTSRQNKPDLCPSGFLRGCVVCSLLLLMDEQLLTLLLRCLMLTQAHPELSAL

SEQ ID NO: 203141 - protein, 215 aa, Zea mays
  Clone ID: MRT4577_116852C.1.pep
RAGTTDPTRRSMEMTVNGRDTEHHHHLGLALGLGLGLSLGMSGTTSPVEPAAPQTAAAPSSKLGLGQQSWNGAGLFFPASSGEQRSHADDRRLAALACHEMPFLRGIDVNRAPTTGGARGSCGASEDEEPGASSPDSTLSSLSGKRGAPTRSAGGEQERTGAGSDDEDDSGAGGGGSRKKLRLSKDQSAVLEDSFKEHSTLKPKQKAALARQLGL

SEQ ID NO: 203142 - protein, 169 aa, Zea mays
  unsure (1)..(169): unsure at all Xaa locations
  Clone ID: MRT4577_116853C.1.pep
RRNPPPQPTGRGQRGSGARKGKAPQRPSAPPRGGGESKIHRGKQGXPERKTGKEGNPTNGGKPPHKGPPGVPFKVPGQKGGGKWERETNFPRNPQFPRLPRGREQGRNPQERPPGGGKPGPXRPPGQGQTFFGFFYFFFGSVFFFFPFFFFFFFFFFFFFFFFFLESRN

SEQ ID NO: 203143 - protein, 40 aa, Zea mays
  Clone ID: MRT4577_116854C.1.pep
RRKLSMGTKNAENRGVTVILLYHQNSLWGQFYGNIPVNQN

SEQ ID NO: 203144 - protein, 92 aa, Zea mays
  Clone ID: MRT4577_116855C.1.pep
MSSSMVPKNPPPPTGYDGEGGVEAAPVTSCLYLRPGAGALDRDAVLRRIRHRRRHSRLRDTLRPMVLQAQPAEPDGAEWRLPWPLDDAFSAP

SEQ ID NO: 203145 - protein, 74 aa, Zea mays
  Clone ID: MRT4577_116856C.1.pep
DQLYPELKASYITVYTTVGMSLLTEIPHLKSTCHPTVRFPRLLSMYDRFTPHYSIQHCDQHPMLSQNHRQWSPG

SEQ ID NO: 203146 - protein, 715 aa, Zea mays
  unsure (1)..(715): unsure at all Xaa locations
  Clone ID: MRT4577_116857C.1.pep
PRVRPRVRPRVRPRVRPRVRPRVRPRVRKYQKVDEQGSVAIRQPANTFWTDKICDNQNEDVNRGVLRQENFSHTAREGFKLVEPYGSNISCAQHVSSSATQQPAFELRNLEESWYKSPEELSQFKGTSPSNIYSLGVLLFELFCCSETWEMHCAAMSNLRQRILPPNFLSESPKEAGFCLWLLHPDPCSRPKAKEILGCDLINEGRDLSLLDKSPVSISEDDTESSLLLNFLSQLKEEKEMQAAKLSAELGSLQTDITEIDRRHSAGMRLSLEDSPVLPSSSALSGASVSXPFKVHCCXLLPASCKSSIYEERVMRNLVQLENAYYSMRSSLDTCETNVIKRPDNEALRARENFHQLHSDSDAKDEETDRLGCFFDGLCKYARHNRFEVRGILKNADILNSPNVICSLSFDRDEEYFAAAGVSKKIKIFEFDALLNDRVDIHYPLIEMPSKSKLSCVCWNNYIKNYLASTDYDGTVQLWDASSGQGFTQFTEHRKRTWSVSFSDVDPTKLASGSDDCCVKVWSINQKNCVDTIRNVANVCCVQFSPYSSRMLAFGSADYKIYCYDLRNTRIPWCTILGHGKAVSYVRFLDPYTLVSASTDNTLKIWDLNQTNCSGLSTDSCSLTLNGHTNEKNFVGLSVHDGYITCGSETNEVFSYYKTFPMPITSHRFGSIDPITGQVTNEDNQQFVSSVCWRGKSNMVVAANSSGSIKVLELV

SEQ ID NO: 203147 - protein, 175 aa, Zea mays
  unsure (1)..(175): unsure at all Xaa locations
  Clone ID: MRT4577_116858C.1.pep
CVQFSXYSSRMLAFGSADYKIYCYDLRNTRIPWCTILGHGKAVSYVRFLDPDTLVSASTDNTLKIWDLNQTNCSGLSTDSCRLTLNGHTNEKNFVGLSVHDGYITCGSETNEVFSYYKTFPMPITSHRFGSIDPITGQVTNEDNQQFVSSVCWRGKSNMVVAANSSGSIKVLELV

SEQ ID NO: 203148 - protein, 149 aa, Zea mays
  unsure (1)..(149): unsure at all Xaa locations
  Clone ID: MRT4577_116859C.1.pep
RTGQCCCLQFSPHSSRMLAFGSADYKIYCYDLRNTRIPWCTISGHGKAVSYVRFLDPETLISASTDNTLKIWDLNQTNCSGLSADSCSLTLNGHSNEKNFVGLSVHDGYITCGSETNEVXYSVYCIHFPWHAELVLVKISQELSFLLEL

SEQ ID NO: 203149 - protein, 69 aa, Zea mays
  Clone ID: MRT4577_11685C.1.pep
RSKAYLSICYRINSFEAWVSARQFSKSQQMFYVKCSVTERQEELWSRVQRIIVILLTYQEASSAASNCT

SEQ ID NO: 203150 - protein, 402 aa, Zea mays
  unsure (1)..(402): unsure at all Xaa locations
  Clone ID: MRT4577_116860C.1.pep
MGSLPVQFENADHAMSSLVQTCEANGTKRQEIRTMSVRENWHQRDSDSDARGEKKDSLGCFFDGLCKYARHHRFEVGGILKNADVLRNRNGHGSXRLDRDDQYFAAAGASKERKIFEFEPLSTDLLRNDLGLTGSDIIAEQTSIRWDSYIKNYLASTDYDGTVQLWDAGSGQGFTQFTEHRKRAWSVSFSQVDPTKLASGSDDCCVKVWSINQKNSIDTIRNVANVCCVQFSPYSSRMLAFGSADYKIYCYDLRNTRIPWCTISGHGKAVSYVRFLDPETLISASTDNTLKIWDLNQTNCSGLSADSCSLTLNGHSNEKNFVGLSVHDGYITCGSETNEVFSYYKDFPMPITSHRFGSIDPITGQVTNEDNQQFVSSVCWRGKSNMVVAANSSGSIKVLELV

SEQ ID NO: 203151 - protein, 82 aa, Zea mays
  Clone ID: MRT4577_116861C.1.pep
YLVPCSNFSIVIERGPAITRRGRITARCRPIRPSHMFAIRASSSRWLHSFILWPSLASPIHNPAHSLIWFLIRHWFHLLQST

SEQ ID NO: 203152 - protein, 47 aa, Zea mays
  Clone ID: MRT4577_116862C.1.pep
TVAYSKKQYRDLTKESFSRSYIQSSILMAKPSPAASISFSLPVFHTA

SEQ ID NO: 203153 - protein, 290 aa, Zea mays
  unsure (1)..(290): unsure at all Xaa locations
  Clone ID: MRT4577_116863C.1.pep
DVTVSLGPNGELRYPPXRRGTRAPMAXGIGELQCYDKYMLARLKRHAELSGQPLWGLSGPHDGPRYDESPETSAFFREPGGSWKSAYGEFFLSWYAGELLAHGDRVLAAASRAFGGKPVELSAKVPLMRGPSPADATAGLYGGYGPVAEMFARHRCAVIASGVEARPDAAAEGRLARVKAACAEHGARLAAESAPLSVARGGASAGSPGVVWLSAGRTRPCQFTYQRMGAEFFSPGHWPLFVQFVRALECPEEAHEDDLPVSAGGGERLTVPSASAPTSEATRTREVQTV

SEQ ID NO: 203154 - protein, 96 aa, Zea mays
  Clone ID: MRT4577_116864C.1.pep
LSSLLIEPTDLISHSSLKMRFAAFAVSALATCAFALPSASVPAVLHHERGLISDVLNLLNPTDLLSGLPAEGAAAFVGASLGLNAGLIDAKAKASL

SEQ ID NO: 203155 - protein, 134 aa, Zea mays
  Clone ID: MRT4577_116865C.1.pep
MAEDKKNTNPTLAGFYEAMERTNVEKITNEMLAGLSGDSSDSESFDVGSENEDAEDQSWRPSHVVFGKSTIRQGQIEAMKDKYFHDVSIVWARGEDTVPLDISNTPSWTNFFDISVSIGPLQCNLKALSPKELE

SEQ ID NO: 203156 - protein, 138 aa, Zea mays
  Clone ID: MRT4577_116866C.1.pep
CSCAPWPPVPATAQALIRCRWGKLPLERSMALGPVRRWFSGTHSLPCATLACCLPRAHWRAARSRTPTPSLPPPCRRRRGVASGMHGSGIAWNRFASTISTSATITRWTSSCCLPPLDHTTPSTFTSWSRFASASCRN

SEQ ID NO: 203157 - protein, 171 aa, Zea mays
  Clone ID: MRT4577_116867C.1.pep
KTTKREEENASTICNLDPRRTSLIGRSDTRQSVRDTNARVRCHGATAVSHAGRRSPLQLNLKEPDGSMAAAAEVYRRLLKAVQKHVGRGATKQRFLDFGAAEFRAPAGTEAGARARLRLAGDYAYLLTSVHHHKDLLLSYNIAVDRSDETKKILNKSAASVGLQLPDVYKP

SEQ ID NO: 203158 - protein, 61 aa, Zea mays
  Clone ID: MRT4577_116868C.1.pep
QLVQVYGRKHLNFHHPLFVLNEQCPRFINTLLSNARVTSIHHSIMSFTTFSHGCDISSVLG

SEQ ID NO: 203159 - protein, 334 aa, Zea mays
  unsure (1)..(334): unsure at all Xaa locations
  Clone ID: MRT4577_116869C.1.pep
MLACSSSKPHRPVKALGAQFSPALPSAASLQPQQHVHFTCPFLPPFPLPPRHLRSPPPAAPAMAMTEGLVPITRTYLARYYDKYPLPPLPDATTDLAARLRALSADLAAVAPIAPDEELLEQEAAGIPAHKIDENLWKNREQMEEILFLINTSHRPVALQQKSTPEDAEIVCTLDDIEAKLKDMLKNLEQFQLKNADNVFNTVMTYMPQDFRGTLIRQQRERSERNKQAEVDALVSAGGSIHDRYALLWKQQMERRVQLAQLGSATGVYKTLVRYLVGVPQVLLDFIRQINDDNGPMEEQRERYGPALYTLXQNWCLQFGCICMSLWHDMDKGK

SEQ ID NO: 203160 - protein, 107 aa, Zea mays
  Clone ID: MRT4577_11686C.1.pep
LSAQANDPKRKARSQDPGWQFGWWPDTTKKDFVQCVFCKKIVPSGIKRFKQHLASGFGDTMKCARVPEVVSKEMHTYLRRNMRVVITADGDEGVEEGEQIDVGPLPS

SEQ ID NO: 203161 - protein, 96 aa, Zea mays
  Clone ID: MRT4577_116870C.1.pep
VPGPPPRVPPPPPPPPPPPPPPPPPPPPPPPPPPPFLKQTGGEKPNPPGFQREILDLNGAQGPQKALFFLGLGGFFREKHLGARPFPHLGHFLPFF

SEQ ID NO: 203162 - protein, 81 aa, Zea mays
  unsure (1)..(81): unsure at all Xaa locations
  Clone ID: MRT4577_116871C.1.pep
ITXLRVFFFFFFFQNRKNGPPVLNFAKKLTKGPRPPGGCSIDGSPISLLFSTPCTRGRHGPQIRPGGPGPTGGDSPFGGGP

SEQ ID NO: 203163 - protein, 113 aa, Zea mays
  Clone ID: MRT4577_116872C.1.pep
AVSWWVLGSRFVSGFQGIHDQGLATKCSSFLGFRGFKTLGFFFVKVVPLVTPAQEKGDPWKKTFRGSKISTNFRCGLGAPPRHLPLGALFFLGFARTFISPLSPRPCGCLWLL

SEQ ID NO: 203164 - protein, 104 aa, Zea mays
  Clone ID: MRT4577_116873C.1.pep
DSSLRQCPHSLKQLARGVSCSGKRLSERQEDKGQDLAQDAPQAVSLSASASGEVRTSERKCLLRPAAPLCQLITALLVLPNQLSEVDRGRVLASEPGVLAVTVP

SEQ ID NO: 203165 - protein, 58 aa, Zea mays
  Clone ID: MRT4577_116874C.1.pep
TGRQSPSPTQGATSKHPCFLMTIKLTLKSNRLKNAHTKKQFTQSKIGFIECLNRLNSG

SEQ ID NO: 203166 - protein, 77 aa, Zea mays
  unsure (1)..(77): unsure at all Xaa locations
  Clone ID: MRT4577_116875C.1.pep
MRGLSRYLPFCGGGCCCGDXPAGQGAXADGLVWDVALKAHASGDYSIAVAQANEALEDQAQVVAAPAATLVGVFDGH

SEQ ID NO: 203167 - protein, 105 aa, Zea mays
  unsure (1)..(105): unsure at all Xaa locations
  Clone ID: MRT4577_116876C.1.pep
GDAGEGGNEDGHSGAAYGDGPRNAGXTAGADYGGRREGGDAGYEAGGGYGGRREGGGAGYGGGGGGWRDLCVAPSWLRPSYLPPAYVLPVRLLVTRVKCPVTLWN

SEQ ID NO: 203168 - protein, 155 aa, Zea mays
  Clone ID: MRT4577_116877C.1.pep
RPPQKKILAGFFSPPPPKKKFGNGGWKKTFPWERGLGRGCVNRFLRANLTEKWGFFSPGGPWKLRGGGMPPWFQDRGPQSPFFKEWWSPRAGGGGAKKKGGVPPQNFGNGVQNPQNERFGNPTPPLKILKKGGLIGGKKKGPFLKKKRGAPLGPP

SEQ ID NO: 203169 - protein, 83 aa, Zea mays
  unsure (1)..(83): unsure at all Xaa locations
  Clone ID: MRT4577_116878C.1.pep
MQISDSLTSMATRMFCRLVRLARFASATNASINTHCXRATRSIITQFLPXIVXMGRKNLAMLSYRLQCSFSQSMVRPPIYQWQ

SEQ ID NO: 203170 - protein, 41 aa, Zea mays
  Clone ID: MRT4577_116879C.1.pep
VEPLALGIRAFCHIALTHIRKLCSVKGIGTTSIQAMLSTRQ

SEQ ID NO: 203171 - protein, 78 aa, Zea mays
  Clone ID: MRT4577_11687C.1.pep
DGKCAIMVGIGSGVFDKRMRASSQSERRGRSCAFFNSSFGRLPKMTEGCAVGVPGLAPPGPCRIVPYPIQRASGGDNG

SEQ ID NO: 203172 - protein, 85 aa, Zea mays
  unsure (1)..(85): unsure at all Xaa locations
  Clone ID: MRT4577_116880C.1.pep
XMAFHSLLSVLHLLFHPLHTSVSIPSTTNAPLLHITISIPPSNQSSYIQLFFSFKLSLYYLNCTLPFYYYFYPHYLSYPYYSYYF

SEQ ID NO: 203173 - protein, 34 aa, Zea mays
  Clone ID: MRT4577_116881C.1.pep
TIHALSTILTTNANDELTCYGIPVSHADPYKFMK

SEQ ID NO: 203174 - protein, 82 aa, Zea mays
  Clone ID: MRT4577_116882C.1.pep
CNEYSFHDRNLYATGLRSHSQICVSRKFLQDTLGLRAYYMSYSLARMITRSREGIQPAINWPVEVSVSEIIIRQNYHYTHQR

SEQ ID NO: 203175 - protein, 174 aa, Zea mays
  unsure (1)..(174): unsure at all Xaa locations
  Clone ID: MRT4577_116883C.1.pep
KTAFEGVTRAPKSLKTPSPGFLGSNPQGPKGKXGGGVFPKKKTPPRGQPRPEGPPKKNPPPGFPLGGPXPKGGERQTPPTPPKKXFPAGKNYQLGNFLGAXPGGEGNPFFIFGPPPQGGGGGTRKNRGEFLPGGGKKKQDGPPPPGKEPPLPPQGGLPPXLKGGGAPPGKRGGP

SEQ ID NO: 203176 - protein, 226 aa, Zea mays
  Clone ID: MRT4577_116884C.1.pep
MAPPSSARRLPWSGTTDDTGGSELSLPRRRWQSVGLQVRRTRRKPTEGLFGFRRIMEAEFMGMFLPVFGSMLRRVVSEEVEKAMFRQFSAPPAPPRLLVDRNQHPRYQLMFLNGLRPVYTMTKLEPDDGKALKVAVVERLENGRTDIVRYGPLSSARVEVVALHGNFNAKDEESWSPEEFQKHIVSGREKSAQLLTGNLALKLSGGEAVLENATFTDNSSFTRTKM

SEQ ID NO: 203177 - protein, 90 aa, Zea mays
  Clone ID: MRT4577_116885C.1.pep
NKLFFFVFFFYFLLLFFFLFFYFILSSLERPILESSINMYYTYHMHWGGGIRPILTYIKIYWRGVYHPMKGKTLENPDLSQLKHIPITPA

SEQ ID NO: 203178 - protein, 267 aa, Zea mays
  Clone ID: MRT4577_116886C.1.pep
MGLGVYGSLCQGGDEDDDFDYDYGNVHYSQTGHIAEYVDVYSPLLYTPNLPKLSALQPQEIESVRSCSPVLPLEAPPAPPLSAPAAGVGAGGDPDDRGGDSSSSHSTDLSEEQELEGWVARPITRDAARGSHFHDALDTLLRQALDRRTWSIEYRCVVFQHNRGVYPDRWEATCLVRHPENSLRGAEICSEHYSISERDSAKATMQDVARRPLSSYCSVLSGVADGLNLKYYPRRPSGSTGGVVVSPVGEDNPRLSSTVNLAAVLNT

SEQ ID NO: 203179 - protein, 87 aa, Zea mays
  Clone ID: MRT4577_116887C.1.pep
IFFKKQGGPKTPHPSGEGESPPPPKKLFPKGAQKKKNFGRKGPPPPGALFKKIGKKLTPGFFNNPTLFWGGPPRGGPPFLGKKKGFF

SEQ ID NO: 203180 - protein, 108 aa, Zea mays
  Clone ID: MRT4577_116888C.1.pep
CVFFLSPFLLKQNQGMQKVRQPHQHRCQVATAGGGKNCKGPPASKEGRGWLLCKKVTWELQKLLKELSPGPAPMNRAHSGVSNAFLCNGTGAPLELPRESPEIAPLAS

SEQ ID NO: 203181 - protein, 263 aa, Zea mays
  unsure (1)..(263): unsure at all Xaa locations
  Clone ID: MRT4577_116889C.1.pep
MAAASSSSCGGAGCGARCSSSTSSSVEDAPEGILGRLSISGAAASCGKCGGGAVVVVAGGVGLCGECLRAQLFGKFKLAVTSNAMVRPTDSVLVAFSGGPASRVALQFIHEMRSKAIESWDASNSQALPVFNVGAAFVDESVLLSKPECEVEQATEDIKSLVSSLLPGDNAMHIASLDDVFSSESKDGKGRLRELVGMITDDTGREDLXLQCLRMLSLQKIALENGYTKIMLXSCASTIACHVLSATVKGQGYSLPADIHMLI

SEQ ID NO: 203182 - protein, 36 aa, Zea mays
  Clone ID: MRT4577_11688C.1.pep
LETNRPDSKICQYQETIKIGDLLLNRVQKLSRVINM

SEQ ID NO: 203183 - protein, 59 aa, Zea mays
  unsure (1)..(59): unsure at all Xaa locations
  Clone ID: MRT4577_116890C.1.pep
VLLHKVKGWENXMLLQILFLGLSNLLDPNASFAQMWEKMIVSPIVSTFASSKVVQRRKR

SEQ ID NO: 203184 - protein, 109 aa, Zea mays
  unsure (1)..(109): unsure at all Xaa locations
  Clone ID: MRT4577_116891C.1.pep
PPSRNRGPTGGGGEAKDPDAXAKAXXEHXXRTXDTNRAAPXGPEQETXKXTXEGQKXQGPTAXAGKXGTXPNQAGEHQNXTXDSQPXGPQGGKXXXXXGANRTGPEEHP

SEQ ID NO: 203185 - protein, 169 aa, Zea mays
  Clone ID: MRT4577_116892C.1.pep
MISWGCFSRPCSPEYGRLTSRIADLPVVSGCNATANRPSGRGRRFTACCASCAILAICRRMTFTFSADTPGSVSGRWCSGPVTWWSPGESNCSAGRHRRRYAEEEFLFMQVDHLLLVLIHSPLARCRVLSLWSCPEALSRDRPSERTHVGSFCTLVEAQYGHIPDRIVG

SEQ ID NO: 203186 - protein, 92 aa, Zea mays
  Clone ID: MRT4577_116893C.1.pep
KGQIFKNFLPLGAPIKHAFLAPPWPSFEGVFFEFSLPFAAALIVNSWGPPPSFAWRNYPFWPPVLKPWGREPLAFPTFFPSKCPLFPLGATL

SEQ ID NO: 203187 - protein, 508 aa, Zea mays
  Clone ID: MRT4577_116894C.1.pep
MAALASAARSRRRLLPYLYRLLHSASTTAVSPSPSTSRFLRHASPVPRTPDHSPYLRFPAARVSTLPSGLRVVTQAYPVATRIASVGVWVDAGSRFELPGTNGTAHFLEHMAFKGTRRRPNAQVLEVEIEDMGARLNAYTSREQTTFFADVQARHVPAALDVLSDILQHPRFPERAIQRERGVILREMEEVQGMMEEVIFDHLHAAAFQGHPLGDTILGPEENIRSISKKDLEQYISTHYTCPRMVVSAAGSVSHDEVVDQVKELFTEFSTDPTTADQLVQANPAIFTGSEVRVENAEFPLAHIAIAFKGSSWTDPSSIPLMVIQSILGSWNRSIGVGNCSGSSLARGISNANLAESLMAFNTNYRDTGIFGIYTIAPPDTLQDLSRLIMAEFRRLASQVSETEVARARNQLKSSLLLHIDGSTAVTENNGRQMLTYGRVMPFLELFARIDAVDCATVMETAKEYIIDKDIALAAVGQLTELPELSWFRSETCSDDDFTRRILFGNAK

SEQ ID NO: 203188 - protein, 49 aa, Zea mays
  Clone ID: MRT4577_116895C.1.pep
GERGVIAYGCPAVSGIMRSLLFQSWILGFLRRALVPLYNVATLVNGPCQ

SEQ ID NO: 203189 - protein, 35 aa, Zea mays
  Clone ID: MRT4577_116896C.1.pep
LNNSSYKRGVCTQYAYSWSHKIPKLYLFSTTNSAI

SEQ ID NO: 203190 - protein, 56 aa, Zea mays
  Clone ID: MRT4577_116897C.1.pep
SLWLQCLEDASLKNRMCHFLLGCAPDVFVNQKLFPGTIPLLECFIVARFCMWQVSQ

SEQ ID NO: 203191 - protein, 46 aa, Zea mays
  Clone ID: MRT4577_116898C.1.pep
NLGMTKGHNRSSQTTYGKSARLKGLIEFYRAKIKHSVWSLDKRPMA

SEQ ID NO: 203192 - protein, 54 aa, Zea mays
  Clone ID: MRT4577_116899C.1.pep
KNFCELRALLKPRAKPAVVKNVRNPPGPFNFPGLGKKMTYQPPKIQNQGRICWP

SEQ ID NO: 203193 - protein, 101 aa, Zea mays
  Clone ID: MRT4577_11689C.1.pep
INTKKCHHYSINLTCFYIFFFKKTPTNPNKILLSPIFLIPAAIINYCRQLYLFFNFSTFSTIHATPLFQPLNSSFRYFFIFIALFFFTIPILSLFSFFLPL

SEQ ID NO: 203194 - protein, 93 aa, Zea mays
  Clone ID: MRT4577_1168C.1.pep
MATRRAISSVLRTASRIRAASPSPCPRAPLHRPSPAGFLLNRAAASYSSSAAAQAAPVTPPPTSDKHTGTKITDDFTGAGAVGEVCQVIGAVV

SEQ ID NO: 203195 - protein, 109 aa, Zea mays
  Clone ID: MRT4577_116900C.1.pep
MPSEAGHRLYVKGRHLSYQRSRHTTRPATSLIKIEGVDDTNAANFYLGKKVAFVYRAQKEIRGTKIRVIWGKVTRPHGNSGVVRAKFTSPLPTKSFGASVRVMLYPSSI

SEQ ID NO: 203196 - protein, 107 aa, Zea mays
  Clone ID: MRT4577_116901C.1.pep
RRWSTSIDRAHFFCLPARADVFGSIAAPSSPGPETALVVPDARAVDCWDLYAGLSAAAAWWTWGVDEDKLLGWFPFVEEDFRCATGARSCEAEAEAAAFDHDIWSIW

SEQ ID NO: 203197 - protein, 55 aa, Zea mays
  Clone ID: MRT4577_116902C.1.pep
LFRQLIEKEFLPPTILLLAASYHVSRPCKVGVDIHGLVWVRLIYGWLTTWHLNDL

SEQ ID NO: 203198 - protein, 105 aa, Zea mays
  Clone ID: MRT4577_116903C.1.pep
NQARLPGPGDRDSVRDQWSWTNADMHTRHTIASSRLATSHTHPPAVVPRHYRRQRARPAQQERTGTGTGTGTGTGSVHQMLQMSWSNAAASASASQERAPAHRKS

SEQ ID NO: 203199 - protein, 182 aa, Zea mays
  unsure (1)..(182): unsure at all Xaa locations
  Clone ID: MRT4577_116904C.1.pep
MAAATLLQGPAAASPRLGAAASAPSASHGRRRLTFSFRCQSTSVDKQQERPPKPKQRNLLDNASNLLTNFLSGGNLGTMPVAEGAVTDLFGKPLFFSLYDWFLEGVLAEILKPIMGKGLIPADLDTWKQRRKVITPGFHALFIEAMVRTFTKCSERTISKLEELTESESREQNSTIXWDLEA

SEQ ID NO: 203200 - protein, 238 aa, Zea mays
  unsure (1)..(238): unsure at all Xaa locations
  Clone ID: MRT4577_116905C.1.pep
MAAATLLQGPAAASPRLGAAASAPSASHGRRRLTFSFRCQSTSVDKQQERPPKPKQRNLLDNASNLLTNFLSGGNLGTMPVAEGAVTDLFGKPLFFSLYDWFLEHGSVYKLAFGPKSFVVVSDPIVARHILRENAFCYDKGVLAEILKPIMGKGLIPADLDTWKQRRKVITPGFHALFIEAMVRTFTKCSERTISKLEELTESEGREQNSTIVDLEAEFSNLALDIIXGLGVXNFDFD

SEQ ID NO: 203201 - protein, 220 aa, Zea mays
  unsure (1)..(220): unsure at all Xaa locations
  Clone ID: MRT4577_116906C.1.pep
QRPRPRGQSPLSAVPLAAVLLLGLPDDPSKAXSYGAVLFIMGVFMSWNGPATNFPIFAEIVPEKSRTSIYALDRSFESVLSSFAPPIVGLLAERVYGYRPNDKGESVEQDRENAASLAKALYTSIAIPFIVCTAIYSFLYCSYPRDRERARMQSLIESELQQMEHEGSCLELEDGDGGVLPKVLGPANDGERATISVTYDHKEAPEAEKDTVSLLANRDS

SEQ ID NO: 203202 - protein, 32 aa, Zea mays
  Clone ID: MRT4577_116907C.1.pep
VRKNRFVILPNDFEKGFRTNVGEPVTDFDFYK

SEQ ID NO: 203203 - protein, 520 aa, Zea mays
  Clone ID: MRT4577_116908C.1.pep
MARPAAFVPPPPQYVPPEEPSAFARLYDVVDRAKAALVTITGGPTTVHGVVVISSGHGQRARRAVTEIITTAPASDPAPAAPQTGSPSFLNSVAVKVAAGVVGLVLGLCVLALWIRRWRRRRRRQQAQPLPLPPPMLYNPNPYYKGDQPPLPFVFMQQHHHHPTAPQTSGGTFSDAGSERPHSISIDGGSLSYDQLAAATGGFSPDNVIGQGGFGCVYRGRLQDGTEVAIKKLKTESKQGDREFRAEADIITRVHHRNLVSLVGYCISGNDRLLVYEFVPNKTLDTHLHGDKWPPLDWQQRWKIAVGSARGLAYLHDDCSPKIIHRDVKASNILLDHGFEPKVADFGLAKYQPGNHTHVSTRIMGTFGYIAPEFLSSGKLTDKADVFAFGVVLLELITGRLPVQSSESYMDSTLVGWAKPLISEAMEEGNFDILVDPDIGDDYDENKMMRMMECAAAAVRQSAHLRPSMVQILKHLQGQTHGEDLNSIFRTTYAEDTYSSIMESGLPRSDLFTKQPNNYR

SEQ ID NO: 203204 - protein, 273 aa, Zea mays
  Clone ID: MRT4577_116909C.1.pep
LGTSRPAPAPRSSDQTPTPPLSFLSPAAQALVLAISSHPLPTLAAFLASRRDELLRADITSLLKALELSGHWEWALALLRWAGKEGAADASALEMVVRALGREGQHDAVCALLDETPLPPGSRLDVRAYTTVLHALSRAGRYERALELFAELRRQGVAPTLVTYNVVLDVYGRMGRSWPRIVALLDEMRAAGVEPDDFTASTVIAACCRDGLVEEAVAFFEDLKARGHAPCVVTYNALLQVFGKAGNYTEALRVLGEMEQNGCQPDAVTYNEL

SEQ ID NO: 203205 - protein, 34 aa, Zea mays
  unsure (1)..(34): unsure at all Xaa locations
  Clone ID: MRT4577_11690C.1.pep
MQLHCLEKNGRQTTKKISYCAQHRSPNPDNXLII

SEQ ID NO: 203206 - protein, 58 aa, Zea mays
  Clone ID: MRT4577_116910C.1.pep
KMVMKQRKPLTIFFKCQQSECSLFSDICTDMLKSRNRDSHSLCLHHKSRCKGFICLFL

SEQ ID NO: 203207 - protein, 231 aa, Zea mays
  Clone ID: MRT4577_116911C.1.pep
LDRAREPVEAQLAPPPHAQPPQQQQAPAPAAGFQNHSLYPSILNGNGGGGLGAGAGGGTFGLGPTSQLHMDSAAAYATAAGGGSKYLRYSAYGVKSLSDEHSTLLSGGMDPSMMDNSWRLLPSQTNTFQATSYPVFGTLSGLDESTIASLPKTQREPLSFFGSDFVTAAKQENQTLRPFFDEWPKSRDSWPELGEDSSLGFSATQLSISIPMATSDFSNTSSRSPGGIPSR

SEQ ID NO: 203208 - protein, 36 aa, Zea mays
  Clone ID: MRT4577_116912C.1.pep
DPTRSERPHKPKSPSRRLPPLLLSGLYFLSKPTRFV

SEQ ID NO: 203209 - protein, 62 aa, Zea mays
  Clone ID: MRT4577_116913C.1.pep
PVMVNLSLFNQISNCSNNLQFVSYQKMSWIRRFRSISCFLTKGSWESTYYCISSSEGEQNKG

SEQ ID NO: 203210 - protein, 80 aa, Zea mays
  unsure (1)..(80): unsure at all Xaa locations
  Clone ID: MRT4577_116914C.1.pep
HLDLTNSSVYIYIXLCSLVELVVVVEVVGALLLSFQPCLSYCLSHLQPAPTYFLAFLSYLILHFVNHSRHLLYYQHLGSN

SEQ ID NO: 203211 - protein, 165 aa, Zea mays
  unsure (1)..(165): unsure at all Xaa locations
  Clone ID: MRT4577_116915C.1.pep
MAPKRGGRAPAPAKQKTDKVTNPIFENRPKQLGISGPLSTKKDLVLLVERPKAWRIQRQHSILKHTLRVPPALNPVTRNLDTSLDTNLFKMLLKYRPEDTGANNDRLLKRAQADNEGRTVDSNRPIEVKYRLNHVTYLVEQNKDXLVAMSHDVDPIELVAWLSSL

SEQ ID NO: 203212 - protein, 151 aa, Zea mays
  unsure (1)..(151): unsure at all Xaa locations
  Clone ID: MRT4577_116916C.1.pep
QRPPHQGRAGGGPPPERDERAETPGTSTSEKRARRRREQSTTPPGRRKPRRGTRRTSTGSAGAGSPPTAGPTRRTRQRRTGPGRPPQPQXQTQRRRPRSRPGRRPGKAGRRDSGRATPTPPAERRRRSRXRRPPTPRXRRRPAQQPQPRGP

SEQ ID NO: 203213 - protein, 60 aa, Zea mays
  Clone ID: MRT4577_116917C.1.pep
MAMVAYTSFAYHKPRIVEVCMKNRVCRDRERDGMEHKHPLKVFEITPSPRCLSVRCFLTN

SEQ ID NO: 203214 - protein, 62 aa, Zea mays
  unsure (1)..(62): unsure at all Xaa locations
  Clone ID: MRT4577_116918C.1.pep
DRRVRRVSSLAWFSSLLSXGTPCEIVLHHEIRAQKNYVSKLTGHKSEVCGLKWSYDNRQLAF

SEQ ID NO: 203215 - protein, 491 aa, Zea mays
  unsure (1)..(491): unsure at all Xaa locations
  Clone ID: MRT4577_116919C.1.pep
RLYYLDKMHNTGAPFYKNGSLRKMYFNKNIIRALSMADKRKPRQGGEPFGVCPFRSSSETCYVSKSPTTCQIEFPMRPETFDEDPNQHDRLPNIIIQLPLMQDLMANKIQMLPVHQRQKFQATLIDYDLEVGKIFASIKQCLNTIGTKQSNLAATFGELIDEVLRADESVTPNXQTVVGGTVENDSGPVFDKTPIGSVSXHQVSSYLNXCARALRAYLCSRFIELDRNIIDFGEHRANCCDIQQSFADGACLDNVFMQCVIECVRDDWSKHIPPLNAHQLILDVNVGAILNFEEQEQHSKSPRPFDPSVLESYLLKTLPSFKQLDDYKSIMVPMLRSGHWTLYVVNLQIGRIHVLDSNPYGPEMGGTIWKNYHCIPMDLGDRKVSWAMLMMSRLNLAIQNARPRSALPAFLKYPIELMNNCPTMKLGSNDCGFFVMRYMQNYDYMVGAMNAVIDPDNSEDIRSLVLHYLIFHRLNRNSFVVSHLDRFKFSQ

SEQ ID NO: 203216 - protein, 95 aa, Zea mays
  Clone ID: MRT4577_11691C.1.pep
PILPPKMGWSGGKKGKNYPPVPFFKVNPPKLFKTRPKRDKFKPPGLAFGPSYQPAPSPKGKPPPPLGCGSMDSVPPPRLCFKFILRKKWGFLGLP

SEQ ID NO: 203217 - protein, 78 aa, Zea mays
  Clone ID: MRT4577_116920C.1.pep
CVRVRVALAAVGLGVLVGTVRRLGRTSTLRIGLDGLAGVVVAWRSLAVASLARLSGASAVVLVVAAAIAVVLVVLRSR

SEQ ID NO: 203218 - protein, 104 aa, Zea mays
  Clone ID: MRT4577_116921C.1.pep
PASAHASAHTAAHALLYTVSSTRSKKPERLFYGSAGRIHSSDYGLRKHTSTQTRAVMLLLNHLDQATYLQAWVCADHTTLHIQGISTQQGTTKAPDGTTLKGTS

SEQ ID NO: 203219 - protein, 239 aa, Zea mays
  unsure (1)..(239): unsure at all Xaa locations
  Clone ID: MRT4577_116922C.1.pep
MADRRSNGGSPPSWSFASQSSHYHLAAMRGSYAPQSLWRPSPMPVRGAALSSTPHVVASAPAEKNFAADFLLGGVSSAVSKTVAAPIERVKMLLQNQDELIRTGRLSEPYRGIGDCFGRTVRDEGFLSLWRGNNTNVIRYFPTQALNFAFKDYFKGLFNFNKDRDGYWRWFAGNIASGSAAGATSLLFVYSLDYARTRLTSDYRAAAKGGERQFTGLVDVYRKTLRXDGVVGLYRGFNV

SEQ ID NO: 203220 - protein, 42 aa, Zea mays
  Clone ID: MRT4577_116923C.1.pep
VRTKNQIRSCDGMISAMRLNAGALIVSTIYSPFIRSKILYNI

SEQ ID NO: 203221 - protein, 110 aa, Zea mays
  unsure (1)..(110): unsure at all Xaa locations
  Clone ID: MRT4577_116924C.1.pep
PCPXXXQPRRAQXXPQPHPXPXQQPXPSPXQXQGTXGXGSTPXPGQXXEGXRXQXSPTATPDXXXQXQXXRQQXXQQXRQGEPQHRDQAXXGXXPQXXPQQQPQSGQXAG

SEQ ID NO: 203222 - protein, 49 aa, Zea mays
  Clone ID: MRT4577_116925C.1.pep
CSTGPGGPGRRHAFVHASAYASSISCYVLIGGDLVGAAIKIPTISLSVS

SEQ ID NO: 203223 - protein, 178 aa, Zea mays
  unsure (1)..(178): unsure at all Xaa locations
  Clone ID: MRT4577_116926C.1.pep
MGEERAAPKPGPAAATAVELTGFVMGAEEAERAAAAAGVATVQDLLPLLVPSAMERARAPISRFRVGAVGLGASGRVYAGVNLEFRGLPLCHSVHAEQFLVANAAAAGEPALRAVAVSHMPCGHCRQFLQEMRGAAAVQILVTSDAAEXRAPEWRALASLLPGPFGPXDLLPQDVALP

SEQ ID NO: 203224 - protein, 97 aa, Zea mays
  Clone ID: MRT4577_116927C.1.pep
CLECSESNPNHKVLTPTSNRNTRILSNCEGGPEALLAIGDHSPAARLLAPWTGAWGPGGSRGQRQRQKPEEDLRGQGTTQMPNYTPKLQACPSAITC

SEQ ID NO: 203225 - protein, 115 aa, Zea mays
  unsure (1)..(115): unsure at all Xaa locations
  Clone ID: MRT4577_116928C.1.pep
DCEEIHFLSSDDAGTDKTXPYHAVTGQKNGFLNINNRPCMDVEAASCKTEXDGHDRCYXTALXMYDGRDAAYIGPXTXSCVVTTLNRTDSHVIAISHDRFASFPTLDGNTEGYLR

SEQ ID NO: 203226 - protein, 172 aa, Zea mays
  Clone ID: MRT4577_116929C.1.pep
VAALEVGVALPHEPAPGGQVRDPHAVAVRGGQLQRDVRVRPGLQDRPRPDEHRVHALHAVVAHAGGVRAFDELDLSRGIADVRRHCGGRGHGEEEEDGELGHGIPIPRVRSTYPPVLVSGTGTLLLKVFRAFPGSMAWVTYFSAVSPGMSLVEKQWLVHWAHTSSLQRLVLG

SEQ ID NO: 203227 - protein, 70 aa, Zea mays
  unsure (1)..(70): unsure at all Xaa locations
  Clone ID: MRT4577_11692C.1.pep
RTNESKKRSDTXFQCSSLDCSCFSGWAGFLWAGLITPCRIRDAPNACLFPWASTLVACAWELFLIPVGLL

SEQ ID NO: 203228 - protein, 48 aa, Zea mays
  Clone ID: MRT4577_116930C.1.pep
WYCCRMNYIAATHHLICTYQPINQHYYNSKLQTNSPHQSPKFIQHHFQ

SEQ ID NO: 203229 - protein, 187 aa, Zea mays
  Clone ID: MRT4577_116931C.1.pep
MAKLAVLLLLLAVAASATVPAHGRDTPTEIKLIKGTDASGVGDDSMECVYTVFIRTGSILKAGTDANVTLELAAADGNGVGISNLPAWGGLMGQGYSYFERSNLDIFSGRGPCMEKAPCWMRLATDGTGDHHGWYCNYVEVTTTGPHKGCGQQLFTVEQWLATDAPPFKLEAVRDYCSGDAKGASAA

SEQ ID NO: 203230 - protein, 105 aa, Zea mays
  unsure (1)..(105): unsure at all Xaa locations
  Clone ID: MRT4577_116933C.1.pep
SHVIATNVRMLGMGTDQPDSRESSRIAPRYAXDRRPXAAFAMDAFFASAWNDSFQEACHNGIRIIAQPGRSMNDEDAVACCNKYCVSLGLYGIRHFMHYPSCPMA

SEQ ID NO: 203231 - protein, 83 aa, Zea mays
  Clone ID: MRT4577_116934C.1.pep
QESDRALVGCVSIRLRNACVCINLEMTDPAIRMWPPSTSSQSKHGNRTLVNSKGLLIIHAVSCHWTRRSVWDAQARCPTIRHM

SEQ ID NO: 203232 - protein, 76 aa, Zea mays
  Clone ID: MRT4577_116935C.1.pep
QHPCTMSVTANLLCIGYQYVLRSLHSFCGGSPAPSGGPTVNGACLADLGSEGSRPGGAPAVCGCCRPVTVPFPSCR

SEQ ID NO: 203233 - protein, 61 aa, Zea mays
  Clone ID: MRT4577_116936C.1.pep
KAQEHCMIPKKPREHEAIIASTSCATMTIIAYKIQGKSVSFLLGIIQKCIPTSFPGVANVV

SEQ ID NO: 203234 - protein, 120 aa, Zea mays
  unsure (1)..(120): unsure at all Xaa locations
  Clone ID: MRT4577_116937C.1.pep
YAGCGLTTYAATYTIFPQCXQAPIASLIPPYLLSIIAXVCENPILNPYKIQPEIKASTIPLTPLYFKKPRALXLXHPWVQSISTHYLQKIMLPLINHSHLSTLSTYYEHPSFSCIQKTVY

SEQ ID NO: 203235 - protein, 140 aa, Zea mays
  Clone ID: MRT4577_116938C.1.pep
GYGKTPKTRPFFGFWPFGGLWAPGFFLRFPLIRGIPEFPPFRYLIRRAAAERPSPPGLLFRKGEGAQWPNRLSPSFGGFLNSAGPPVFPVGKRAGGPRPFFFFCSFFGPPGLSRFCFRPPMCGWNVWGKKNFPPPPPMPM

SEQ ID NO: 203236 - protein, 96 aa, Zea mays
  Clone ID: MRT4577_116939C.1.pep
PPLEFFFFFFFFFFFFFFFFFFFFFFEKKPRFYSFLNRENLLPPPTPLGFGAPKLPPKGGGKKETKTFFFAPTPPNKTWKPYPFSPLNGPPQNSPV

SEQ ID NO: 203237 - protein, 109 aa, Zea mays
  unsure (1)..(109): unsure at all Xaa locations
  Clone ID: MRT4577_11693C.1.pep
KRKAYREGGLEQNMGLARNRAGAMQDPKLXNLTEHDLLEMTWFPVANEARRELEEGSALKAYDLAAAXIMGMGFAVYKAGVMXWVDXLGAKYVTDKLVAYSKDYGEFFK

SEQ ID NO: 203238 - protein, 49 aa, Zea mays
  Clone ID: MRT4577_116940C.1.pep
VLVNSQKPVTCVVNFLGSPGVGVAFTSVENPPIFLGSENKARSISVKSL

SEQ ID NO: 203239 - protein, 115 aa, Zea mays
  Clone ID: MRT4577_116941C.1.pep
NPTEKDLKIQMPRNIKWGGAGTDTRGGREVHLKARKGGTRTGQTRRENQKTRGRGGSQNEAETLVPGTGETALEALEETEPGAPRPGLGPKPGGPTRGRGRGGVKKFPHNGHVLE

SEQ ID NO: 203240 - protein, 350 aa, Zea mays
  unsure (1)..(350): unsure at all Xaa locations
  Clone ID: MRT4577_116942C.1.pep
MPSRIAACFRCAAAPSSGAGAGAAGPSLATSIYETHLGLVALSWSRTSLGLSLRAVLRLSATPPPGSSSSASGAGYLDDDADEEILAFRVSPWLFWRRRGSRRFRAGDRLVDLAWDLSRARFPVSGSPEPSSGFFVAVVVCGEMVLAAGDLTDLAYRRTRARRPSGPRPVLLSRREHVSLRDGERVLHVRRLRWKFRGSERVDLGGGDGVQVSWDLHNWLFXTRAAPHGGXTHAHAVFVFRFELASGGEESEADLGKNPSPSKDARRNTGVWXATSRGGGNGTGARRAAXERRKGRGRRLAKESSSSSASVASSTASWASGSTVMDWASPEEVEMQRGDGFSLLIYAWKS

SEQ ID NO: 203241 - protein, 158 aa, Zea mays
  Clone ID: MRT4577_116943C.1.pep
GSRFPPESTLGAARRPGLLGPPHWLFRPREPGSAEASTHAHAHAHAVFVFRFDVSSGGEDLGKDPCPDNATGRNTDVVWGGYLARWRQRDWSETGSNAERRKGRGRRLAKESSSSSASVASSTASWASGSTVMDWGSPEEAEMQRGDGLTLLIYAWKS

SEQ ID NO: 203242 - protein, 406 aa, Zea mays
  unsure (1)..(406): unsure at all Xaa locations
  Clone ID: MRT4577_116944C.1.pep
MPSRIAACFRCAAAPSSGAGAGAAGPSLATSIYETHLGLVALSWSRTSLGLSLRAVLRLSATPPPGSSSSASGAGYLDDDADEEILAFRVSPWLFWRRRGSRRFRAGDRLVDLAWDLSRARFPVSGSPEPSSGFFVAVVVCGEMVLAAGDLTDLAYRRTRARRPSGPRPVLLSRREHVSLRDAGAGRGRSHTTWVNVQGKEREISVDLVARGRGRDKATAGKGKEKDRADVGMSVSVDGERVLHVRRLRWKFRGSERVDLGGGDGVQVSWDLHNWLFXTRAAPHGGXTHAHAVFVFRFELASGGEESEADLGKNPSPSKAARRNTGVWXATSRGGGNGTGARRAAXERRKGRGRRLAKESSSSSASVASSTASWASGSTVMDWASPEEVEMQRGDGFSLLIYAWKS

SEQ ID NO: 203243 - protein, 149 aa, Zea mays
  unsure (1)..(149): unsure at all Xaa locations
  Clone ID: MRT4577_116945C.1.pep
AETVPEKARTTVXYALDLCFDSVFASFCXPSFGVLAERVFXGYKPXPAGRVFDYKPVSSDTSVDTDRENAAALAKAVYTEIAVPMAICCLTYTFLYCTYPRDRERARKDLLMASDDHLGGEANDNESSAVHTLVDEESSVSSLNQRLIS

SEQ ID NO: 203244 - protein, 111 aa, Zea mays
  Clone ID: MRT4577_116946C.1.pep
MHTLPTMDKAGPPLLDAGSRTAITVQLASGKKGDDAEGMMCRGDIDNKSIPPTRHVEDPHVQPANKGNFITKDEEAVDTTGRPSPRRTPRDPMIDTSLTYVIIYGVDPPIT

SEQ ID NO: 203245 - protein, 80 aa, Zea mays
  Clone ID: MRT4577_116947C.1.pep
PWAFFLIPRRSLGGILVKNGGFFPPVRNVFLKAFCWTPLSQFPFPWFFLDVQTFGGLITIKPVYEYKETPYQYNNTPLEL

SEQ ID NO: 203246 - protein, 106 aa, Zea mays
  unsure (1)..(106): unsure at all Xaa locations
  Clone ID: MRT4577_116948C.1.pep
YPMGRMEKLWGKDFLEFVPERWLSEGGEFFPVXPARFPVFPPGPRVCLGKEMAFVQIKTVPPAVLRRFRLDVVAPVANKEAPPGFEIPAPIKIKRGLLVRLSHREN

SEQ ID NO: 203247 - protein, 70 aa, Zea mays
  unsure (1)..(70): unsure at all Xaa locations
  Clone ID: MRT4577_116949C.1.pep
YVAVMEGVLFKLSRYDEXTLXSDILSFTEKAXAAQCDDDPKPGMDQAVACIMNDRQTQDNHRDKVDRYIR

SEQ ID NO: 203248 - protein, 117 aa, Zea mays
  unsure (1)..(117): unsure at all Xaa locations
  Clone ID: MRT4577_11694C.1.pep
TAVTTPLSIFYVAPMVCCXRHGVYFNSMRYLYYXXKVDTDLVXTALXRGQFKAAIYSLFFTKXRXEINDRINEFKIASAKGIFIFIYFYXTASSLTYLTDLFDLIKSFLAHYDLSIW

SEQ ID NO: 203249 - protein, 71 aa, Zea mays
  Clone ID: MRT4577_116950C.1.pep
TPGDRQKTKIYVIPLPSPDPQPMLISLQDFHFSVVQPAFLFFQELLVHKWLSFITKTSLRGLDDSQSPPFW

SEQ ID NO: 203250 - protein, 483 aa, Zea mays
  Clone ID: MRT4577_116951C.1.pep
MERPPGKTVLPQGKASGRLPYPKGARAVGERQRQFIHCAKGTVELTSSKGQRFEVEVAVTTTIRLATILVDEKFLGDNIQVVRDFPDAFPEELPGMPPEREVEFVIDLLPGTAPISKRPYRMSVEELKELKKQLTELQEAGYICPSSSPWGAPVLFVKKKDGSQGMCVDYRFLNGISVDPAKVKKLVAWSVPTTVTEIRSFLGLAGYYWRFIEGFSKIAKPMTSLLEKGREFKWDERRLNLGIVAHTERVTIDVEPILEQEIRRRTNRYQASLKMSPFEALYGRKCRTPLYWNQTGERQLFGPEIIQEAEEQVQQIRENLRTAQSRQKSYADTRRRLLEFKEGDYVYLKVSPLRGMRRFKVKGKLSPRFIGPFLILKRVGEVAYQLELPNHLSDVHDVFHVSQLKKCLRVPEEQLPMEDLSVQEDLTYAEYPIKILDTLTRVMRSKVIKMCKVQWSHHGEDEATWEREEELRIDFPHLFSSSS

SEQ ID NO: 203251 - protein, 117 aa, Zea mays
  Clone ID: MRT4577_116952C.1.pep
MASSFAVATVPSLAAPAAKKRSGGVTYVEGMNAYSGLKGLNKVNMLGVRKTADYSFAKVVASLSPAGRKRRGGAFGAQMNAAAEIFRIAATMNGLVLVGVAVGFVLLRVEAAVEESE

SEQ ID NO: 203252 - protein, 102 aa, Zea mays
  Clone ID: MRT4577_116953C.1.pep
PVSFKTQSDTTLPPTQQNSKPKVQRQPALDCTAGEQNYPRPTLTYRSKSKENYGHGTHAHAPDRAVNCLWNEGSMHAKIDYCLRCDPNRKLSNGPLDRLEKC

SEQ ID NO: 203253 - protein, 117 aa, Zea mays; identical to SEQ ID NO: 203251
  Clone ID: MRT4577_116954C.1.pep

SEQ ID NO: 203254 - protein, 109 aa, Zea mays
  unsure (1)..(109): unsure at all Xaa locations
  Clone ID: MRT4577_116955C.1.pep
AYKLAPSGFEWXWGRNXKXDNGSNPHGYLPIHYKNVQMLLSDNFLSFYXDNTPWNFNFMXVKHDPQMKYNMKLGMPQDIYHEDHRPTHFLEFSNIEGEVAEADREDTFT

SEQ ID NO: 203255 - protein, 120 aa, Zea mays
  Clone ID: MRT4577_116956C.1.pep
GGYRGRLTGLVFPRVLGVGPNKPWGFRWSIKEGLPWFWGGQGKNPGAHRRRGQLAPVFPAGGPKPPGGAPGFPNVRLEGVVGAPPVLNGPVVCFLPAPRCLSAGGPNEKGKKREAPPFPP

SEQ ID NO: 203256 - protein, 37 aa, Zea mays
  Clone ID: MRT4577_116957C.1.pep
NFSHLKFIFKQGFGEFFYILIKKILFQLNNFRVSPLN

SEQ ID NO: 203257 - protein, 153 aa, Zea mays
  unsure (1)..(153): unsure at all Xaa locations
  Clone ID: MRT4577_116958C.1.pep
ALLLHPLHRSACSASSTAHEQCRVKRIVWHGRVDLLNYXQTCGRLIFISDDGDQNSHLWTPGDSYRCQINCKXRLSLXTDVEIDIKRVTKKYIXLIKDMDEASVKTKGINSSWGKKXLVXQRRKDALSYFDRLKDLLPRIMRGGAIRQQLVKF

SEQ ID NO: 203258 - protein, 70 aa, Zea mays
  Clone ID: MRT4577_116959C.1.pep
WFRRISSRLRGLKLSSLALSHRACTVRSLQRYCYKQADIHRQLTRNPLYDAPILHAPSALRPHFLLPYAR

SEQ ID NO: 203259 - protein, 92 aa, Zea mays
  unsure (1)..(92): unsure at all Xaa locations
  Clone ID: MRT4577_11695C.1.pep
ERLIAAKDPMAYKSRRLTIQSIIDVHDEPLSQGNRPVCGGPEARARGEWREAGGEAXXXAAVXESPSLSAGAARKMKKQRRLCAFAGTPRVR

SEQ ID NO: 203260 - protein, 80 aa, Zea mays
  Clone ID: MRT4577_116960C.1.pep
HCSGCHLPPGDHQGDPVQEYVLKEPMMLLPDSSGLERMLPPGLKFTLGFKIFSPFPFIIISFKMILYEHRCLFLCSKYII

SEQ ID NO: 203261 - protein, 127 aa, Zea mays
  unsure (1)..(127): unsure at all Xaa locations
  Clone ID: MRT4577_116961C.1.pep
LXSLLLPPLTRGDLANLCPYSQLRTLXPFNRLCLLAPAADLPGHRLLPFCHLATAYCQRGRGLAFDHLAALNPSAYFQLPTLLPFGLLATTRPVPFLPLHLVLAFYQPLVAYPATLLXLLLLPASVQ

SEQ ID NO: 203262 - protein, 66 aa, Zea mays
  Clone ID: MRT4577_116962C.1.pep
LAVFSTHRERSYGIGGERGRDRGRSKGGQRMKLGRLPCKRERRRTGLRAADPIQLINELTGLIDLP

SEQ ID NO: 203263 - protein, 73 aa, Zea mays
  Clone ID: MRT4577_116963C.1.pep
KKSPFIFVAQGHFLKKKGFFFLGGGDPRTPPKKRGLRVFFFYKTFGGPLHYGAGVGVLRNKNMRPHGLFFVQV

SEQ ID NO: 203264 - protein, 345 aa, Zea mays
  Clone ID: MRT4577_116964C.1.pep
VLEKKTSRRAHQSQLSFGEHFEKVTYNDLAQATRDFSESNLIGRGSYGTVYSGKLKESKTEVAVKVFDLEMQGAERSFLAECEALRSIQHRNLLPIITACSTVDTAGNVFKALIYELMPNGNLDKWIHHKGDEAVPKHRLSLTQRIAVVVNVADALDYLHHDCGRPTVHCDLKPSNILLDDDMNALLADFGIARLYADPQLTFAGSISSIGIKGTIGYIPPEYGGGGHVSTSGDVYSFGIVLLEILTGKRPTDPMFTGGLDIISFVENSFPDQIFQVIDPHLVEDRQKINQPNEVANNEMYQCLVALLQVALSCTRSLPSERSNMKQVASKLQAIKAAQLGGKSK

SEQ ID NO: 203265 - protein, 88 aa, Zea mays
  Clone ID: MRT4577_116965C.1.pep
NNLVSYHELVRATQRFSDNNLLGTGSFGKVFKGQLDNGLVVAIKVLDMHHEKAIGSFDAECRVLRMARHRNLIRILNTCSSLDFRALV

SEQ ID NO: 203266 - protein, 629 aa, Zea mays
  unsure (1)..(629): unsure at all Xaa locations
  Clone ID: MRT4577_116966C.1.pep
TCTCWNNFTGTIEDWIPKLTSLQLLDLNDNNFDGTIPSSISNLKKLTLLDFSNNKFTGTIPPSIGNIESLVNLSLSNNNFKGRIPAEFGDLKQLVFLDVSSNKLSGEIPQSLGQCQNLATIEMDQNILTGNIPTSFSNLYSLSLLNLSHNSFSGRLPDYLNDLKLLNKIDLSYNNFQGEIPKASIFDNATVVSLDGNPGLCGGTMDLHMPSCPTVSRRATIISYLIKILIPIFGFMSLLLLVYFLVLEKKTSRRAHQSQLSFGEHFEKVTYNDLAQATRDFSESNLIGRGSYGTVYSGKLKESKTEVAVKVFDLEMQGAERSFLAECEALRSIQHRNLLPIITACSTVDTAGNVFKALIYELMPNGNLDKWIHHKGDEAVPKRRLSLTQRIAVVVSVADALDYLHHDCGRPTVHCDLKPSNILLDDDMNALLADFGIARLYADPQLTFAGSISSIGIKGTIGYIPPXIYIYMVSQPSPVSLQNIINLHLFMTYINQSTLYIFFYSEYGGGGHVSTSGDVYSFGIVLLEILTGKRPTDPMFTGGLDIISFVENSFPDQIFQVIDPHLVEDRQKINQPNEVANNEMYQCLVALLQVALSCTRSLPSERSNMKQVASKLQAIKAAQLGGKSK

SEQ ID NO: 203267 - protein, 50 aa, Zea mays
  Clone ID: MRT4577_116967C.1.pep
ACYRKPSKGLLLGLGRRSSPKVHLNISPCLNKLSRLKRMERALNQDEAGQ

SEQ ID NO: 203268 - protein, 185 aa, Zea mays
  Clone ID: MRT4577_116968C.1.pep
FFFFFFLFFFLLIQLNSSDYRELESRKEKQHEVRDGRRMPKPLYKGLEDPREGSREYMGGSKLDKQDELRNLIPPAFLVTVSLCSVPLATWAVWAIWAHIPNTCARGGDTDARVITLIALRHQGGEPLRRTTFAPLVLCCVRGSARAPRHHGLHRQCEGSPGLRLHLCPAFTDDQLGSRRSHSMV

SEQ ID NO: 203269 - protein, 54 aa, Zea mays
  Clone ID: MRT4577_116969C.1.pep
SPCARREQNKDRSVLGCRKSVSPPRSMRAGQRAMKDPRIPLNQKLFFARRATVE

SEQ ID NO: 203270 - protein, 80 aa, Zea mays
  unsure (1)..(80): unsure at all Xaa locations
  Clone ID: MRT4577_11696C.1.pep
DAHXGFDSVRELTRRALGLSYANSYRLIVLARLVRARSDGGVLGVFMILGGLLRAADDIMIVPRPTHKQAHKQAHKSAQR

SEQ ID NO: 203271 - protein, 106 aa, Zea mays
  Clone ID: MRT4577_116970C.1.pep
SGDSTGSSPHNCLCHWLLDWKPPPPPPLSSLCISPTYSPDCNATEAPPPFSRQPRLSMIENVSTSNTMKRFFGNTVWHELVKQLNPSELRVSTLVLHSTQFQSTNP

SEQ ID NO: 203272 - protein, 92 aa, Zea mays
  Clone ID: MRT4577_116971C.1.pep
CIMLCRWGTCLWVAQVLLLAVSCARLLPGQRCLFLWLVFSVSLSVLVSVVRRWSFASGSKLRMVESWLAPVLLSYPVFPMCDNFLISGAVLD

SEQ ID NO: 203273 - protein, 74 aa, Zea mays
  unsure (1)..(74): unsure at all Xaa locations
  Clone ID: MRT4577_116972C.1.pep
VRPSSFCFPAPPPPLLVPGXCLPCPGSCPCRCPWCPXPPPRGSSSFRXPSCRXSASWVVSGFGARRSPPGRCVL

SEQ ID NO: 203274 - protein, 129 aa, Zea mays
  unsure (1)..(129): unsure at all Xaa locations
  Clone ID: MRT4577_116973C.1.pep
LPPGSRSPASSVKTGDSKGLVGNSISGMNLAVSRTWARSILKARAAAVYGPSRSSIWYYXSYDDIXEPQDRXDLYCSEAPSSXNPLRRKRFEIMVLPINERGMLCKILLLGVVSLLVYRLVLVPSNLLT

SEQ ID NO: 203275 - protein, 44 aa, Zea mays
  Clone ID: MRT4577_116974C.1.pep
LLNRTRGDNCKSVLDDVCSDSDRFAISPQRVRPRVRPRVPPSVR

SEQ ID NO: 203276 - protein, 72 aa, Zea mays
  unsure (1)..(72): unsure at all Xaa locations
  Clone ID: MRT4577_116975C.1.pep
VHSNIYTYHFYVSFXHCXIVFLHMEPGKXNVTIYHTKFSPFSVLFSVKSVKSLYNSYEIPAFHRGLKMLYVE

SEQ ID NO: 203277 - protein, 137 aa, Zea mays
  Clone ID: MRT4577_116977C.1.pep
THSNHPWTLQGSLLSNDRPIVLVTMVRKGGAIPPRDHLLDGGFFSRDPGANTGKDSAVRLLSPPVPSFLLVSGGTPATASFLRGSAAAAPRSGPPKNIDCPVYANLSDGCPDGNAEDEGFMDARVLPWLPVTGLVGA

SEQ ID NO: 203278 - protein, 53 aa, Zea mays
  Clone ID: MRT4577_116978C.1.pep
KELLRLDPAEEGGYVLLSNLHAAGGHWNHSDKVRQIMERKGLRKLAGASNFGS

SEQ ID NO: 203279 - protein, 80 aa, Zea mays
  Clone ID: MRT4577_116979C.1.pep
QLDIYPTLIIIHLGRRGYPYHEPTYTHTLIAHDMMSRRQEHRLDAVRYNPGLTLVMTVATHGRKDMARRTYPYMKEHGIA

SEQ ID NO: 203280 - protein, 221 aa, Zea mays
  Clone ID: MRT4577_11697C.1.pep
AGCCRFPEVVRLFHEFSVVHHVSNRATFSRFSGLRLEGDFAEIPSLLLENWCYESISLKMMSGFHQDITKSISSEACQSLKRRRDLFAGLKMKQEILLCLVDQIIHSSENVDIDDLIKDLHPKVMLGIPLLEGTSPASSFPRIAFGYDAVCYSYIWSEVFAADLFVSKFKDDLLNQHAGLRFRNKVLAPGGSKDPLEIITDYLGREPSLQPFIQSRTRNSL

SEQ ID NO: 203281 - protein, 56 aa, Zea mays
  unsure (1)..(56): unsure at all Xaa locations
  Clone ID: MRT4577_116980C.1.pep
VARGSFFMRQRFCDVFCSMKACLCIPLRLWRNPPRSVKVPLVNYPXXGKTKRERPL

SEQ ID NO: 203282 - protein, 85 aa, Zea mays
  Clone ID: MRT4577_116981C.1.pep
GGGQISDSIVFHISLLHLREKMQPVACKTTCDHLYGLFFINPNIALEITVRRQLTGLGKLPICRFRKSKNDKLDSPKEKAGKPEY

SEQ ID NO: 203283 - protein, 84 aa, Zea mays
  unsure (1)..(84): unsure at all Xaa locations
  Clone ID: MRT4577_116982C.1.pep
RPLGGPKGPARAGPSPPQGSLSXTWAPPLVEDPLPNNNWGGEAPPFSSWAAPGSPPVPRGTPGGFFPPPFXFAQTQGGAPPPGF

SEQ ID NO: 203284 - protein, 221 aa, Zea mays
  unsure (1)..(221): unsure at all Xaa locations
  Clone ID: MRT4577_116983C.1.pep
MLAVFSGQVVEVPAELVAAGSRTPSPKTKASQLVGRFLAASEPAVSVQLGDHGHLAYSHTNQALLRPRSFAAKDEVFCLFEGVLDNLGRLSQQHGLSSKGANEVLLVIEAYKTLRDRXPYPASFMLAQLTGSYAFVLFDKSTNSLLVASDPEGRVPLFWGITADGCVAFSDDIDMLKGSCGKSLAPFPQGCFYSNALGGLKCYENPTFKVVEGSTVLTALH

SEQ ID NO: 203285 - protein, 149 aa, Zea mays
  unsure (1)..(149): unsure at all Xaa locations
  Clone ID: MRT4577_116984C.1.pep
PPSGKRTLSGGRPPRVPPPRLSGKLALAPPFWGGGAGKLIRNPPVVSKAAQDGLELSGTGSIKKXVPSFFSPPENIFALTGIGFSPETALWGSVNPIXIIDKVPVLPFFFXKIGKLVARLFIYNNFLFKPKKKKFLKNIKSSGFRILGQ

SEQ ID NO: 203286 - protein, 152 aa, Zea mays
  unsure (1)..(152): unsure at all Xaa locations
  Clone ID: MRT4577_116985C.1.pep
MLAVFSGQVVEVPAELVAAGSRTPSPKTKASQLVGRFLAASEPAVSVQLGDHGHLAYSHTNQALLXPQDPEGRVPLFWGITADGCVAFSDDIDMLKGSCGKSLAPFPQGCFYSNALGGLKCYENPKHKVTAVPADEEEICGAXSRWWKGLLS

SEQ ID NO: 203287 - protein, 76 aa, Zea mays
  Clone ID: MRT4577_116986C.1.pep
LLRPRSNTINNIASYAYPELNLPPVLPFHPTDDDLVAHYLYARSMSRHPPVSIIVEVYLYRFDPCDLPKRSLFGLR

SEQ ID NO: 203288 - protein, 194 aa, Zea mays
  unsure (1)..(194): unsure at all Xaa locations
  Clone ID: MRT4577_116987C.1.pep
MLAVFSGQVVEVPAELVAAGSRTPSPKTKASQLVGRFLAASEPAVSVQLGDHGHLAYSHTNQALLXPQDPEGRVPLFWGITADGCVAFSDDIDMLKGSCGKSLAPFPQGCFYSNALGGLKCYENPKHKVTAVPADEEEICGAXSRWWKGLXLXRRCTDRSSAGGGDATMMQNFVHAWWVCNIVWLATSHAHANR

SEQ ID NO: 203289 - protein, 88 aa, Zea mays
  unsure (1)..(88): unsure at all Xaa locations
  Clone ID: MRT4577_116988C.1.pep
MLAVFSGHVVEVPAELVASGNRTPSPKTKASQLVGRFLAASEPVVSVQLGDHXHLAYSHTNQALLRPRSFAANDEVFCLFEGVLDNLG

SEQ ID NO: 203290 - protein, 47 aa, Zea mays
  Clone ID: MRT4577_116989C.1.pep
SALYTINFTNFRTHKNPGVTMRLLHLTLLHLALVDSATTTHTIGVRN

SEQ ID NO: 203291 - protein, 62 aa, Zea mays
  Clone ID: MRT4577_11698C.1.pep
LQHLQDQARPKTPASPLRLITDESFASVQSQGPPRRFTLTGGRIRRHGHHLFCQGHYLRSLP

SEQ ID NO: 203292 - protein, 145 aa, Zea mays
  Clone ID: MRT4577_116990C.1.pep
TTDACASSDARGDGDLTLPSFSERLGTAAAASQCAAEPSSPVQDPVTHLYTSTTSLNDEGPKYDLELSKKDHRKHGFWGLVAQKAKVMLDENGTPRPQAKTSESLWSYDRVQGSLGGRLDIRGKIKDVLQQEGLAVVADSTTPGT

SEQ ID NO: 203293 - protein, 427 aa, Zea mays
  unsure (1)..(427): unsure at all Xaa locations
  Clone ID: MRT4577_116991C.1.pep
MAKPRRGRSASRSSSGSSSRSLSHSVSSGSVSSRSRSRSRSFSSSSSQSRSRSPPQAKRSSPGARKGRSPSPPPKKGSPSKKVRSPSPPLKKASPPRKVSPPAESAVLCIDHLSRNVNEAHLKEIFGNFGEVVNVELSMDRMVNLPRGYGYIEFKKRADAEKALLHMDGGQIDGNIVKLRFTLQPRQRAASPMKAPPPPPKRDALQIEKGVSSAEKDAQQRPKESSPRRKPASPLRKRSPNRRAESPRRPPDPSPRRRPDSPPIRRRPDPSPVRRGDTPRRRPPSPVRRRSPSPPPRRHRSPMRLSPRRGRGSPSPRRRSPGPLRRRSPPPRRLRSPPRRPPPPRRFSRSPPRRPLRSQXSISPRRGRGPPLRRGRSDSSYSRSPTPXQEKGPRRVSRSRSPRKPPRGRSVSSDSRSSSSPSPRRGR

SEQ ID NO: 203294 - protein, 150 aa, Zea mays
  Clone ID: MRT4577_116992C.1.pep
MLAVFSGHEVEVPAELVLAGIRTPSPKTKAPHLVGRFLVASESVVSVQLGDHGHLAYSHTNQALLRPRSFAAKDEVFFLFHALLDNLRRLIQQHGLSSKGANEALLVIEDYKTLRDRASYPVSFMLAQLTGSYAFDLFDKSTNSLFVASD

SEQ ID NO: 203295 - protein, 256 aa, Zea mays
  unsure (1)..(256): unsure at all Xaa locations
  Clone ID: MRT4577_116993C.1.pep
MAKPRRGRSASRSTSGSSSRSPSHSVSSGSVSSRSRSFSSSSSQSRSRSPPPAKRSSPGARKGRSPSPPPKKGSPSKKVRSPSPPPKKASPPRKASPPAESVVLCIDHLSRNVNEAHLKEIFGNFGEVVNVELSMDRMVNLPRGYGYIEFKKRADAEKALLYMDGGQIDGNVVKLRFTLQPRQRAVSPMKAPPPPPKRDVAQIEKGLSSAEKDAQQRPRESSPRRKPASPPRKRSPNRRAESPRRPPDPSPXRRPD

SEQ ID NO: 203296 - protein, 184 aa, Zea mays
  unsure (1)..(184): unsure at all Xaa locations
  Clone ID: MRT4577_116994C.1.pep
TPVLLSPSLCLKNPAPTRPPDAHCSPSPPRLLTSFSPHLPLLPSSQVAFLELQLLELRLSTPAWVAAARNGEELVAAGSRTPSPKTKASQLVGRFLAASEPAVSVQLGDHGHLAYSHTNQALLRPRSFAFYYFAPPPAEGVLDNLGRLSQQHXKSKGANEALLVIEAYKTLRDRAPYPASSMLA

SEQ ID NO: 203297 - protein, 55 aa, Zea mays
  Clone ID: MRT4577_116995C.1.pep
AQWETLVEISKERADQRRREIVVDMQNKIENIGRCLKLDVDYGISEVSDEYWVAT

SEQ ID NO: 203298 - protein, 189 aa, Zea mays
  unsure (1)..(189): unsure at all Xaa locations
  Clone ID: MRT4577_116996C.1.pep
KASPPAESVVLCIDHLSRNVNEAHLKEIFGNFGEVVNVELSMDRMVNLPRGYGYIEFKKRADAEKALLYMDGXHSTLCVFCLFLLKSKCQQVLKICXGQIDGNVVKLRFTLQPRQRAVSPMKAPPPPPKRDVAQIEKGLSSAEKDAQQRPRESSPRRKPASPPRKRSXNRRAESPQRPPDXITXRRPDS

SEQ ID NO: 203299 - protein, 284 aa, Zea mays
  unsure (1)..(284): unsure at all Xaa locations
  Clone ID: MRT4577_116997C.1.pep
WLLVDATALLFYYCLLFLXASEPAVSVQLGDHGHLAYSHTNQALLRPRSFAAKDEVFCLFEGVLDNLGRLSQQHGLSSKGANEVLLVIEAYKTLRDRAPYPVSFMLAQLTGSYASVLFDKSTNSLLVASDPEGRVPLFWGITADGCVAFSDDIDMLKGSCGKSLAPFPQGCFYSNALGGLKCYENPKHKVTAVPADEEEICGAXSRWWKALXLXRRCTDRSSAGGGDAMMMQNFVXRWWXWCNIVAANKSCSCKPMNLSLYHRSRLLASPDSRHGYIYIAGANK

SEQ ID NO: 203300 - protein, 233 aa, Zea mays
  unsure (1)..(233): unsure at all Xaa locations
  Clone ID: MRT4577_116998C.1.pep
MLAVFSGQVVEVPAELVAAGSRTPSPKTKASQLVGRFLAASEPAVSVQLGDHGHLAYSHTNQALLRPRSFAAKDEVFCLFEGVLDNLGRLSQQHGLSSKGANEVLLVIEAYKTLRDRAPYPASFMLAQLTGSYAFVLFDKSTNSLLVASDPEGRVPLFWGITADGCVAFSDDIDMLKGSCGKSLAPFPQGCFYSNALGGLKCYENPKHKVTAVPADEEEICGAXSRWWKGLLS

SEQ ID NO: 203301 - protein, 211 aa, Zea mays
  unsure (1)..(211): unsure at all Xaa locations
  Clone ID: MRT4577_116999C.1.pep
MMAVFIGQVVEVPAELVASGNRTPSPKTKASQLVGRFLAESKPSVSVQLCDHGHLNYFHTNQALLRPKSSAAKDEVFCLFEGVLDNLGRLSQQHGLSSKGANEVLLVTGSYAFVLFDKSTNSLLVASDPEGRVPLFWGITADGCVAFSDDIDMLKGSCGRSLAPFPQGCFYSNALGGLKCYENPKHKVTAVPADEEEICGAXSRWWKGLLS

SEQ ID NO: 203302 - protein, 110 aa, Zea mays
  Clone ID: MRT4577_11699C.1.pep
MSAVAVSSSLNPDAPLFIPAALLQVEDFSPQWWDLITTTAWFRDHWSRERAHLDEMAEQIDAAGLLPDDEDLFYGDAPRGFREKPRNAEKPTKYAGSPKSNAPRVIHQPR

SEQ ID NO: 203303 - protein, 93 aa, Zea mays
  Clone ID: MRT4577_1169C.1.pep
VTRSHSTIHKPFTAAARHTHATADPTQQRPRHTRDSTPTPESGPLTAVGASNPCTRLPTLWQVRRWFVYQLLAAPSPVNHLVLASLVIDHELA

SEQ ID NO: 203304 - protein, 118 aa, Zea mays
  Clone ID: MRT4577_116C.1.pep
MESGAMVLGVVRPEESPDRNGGGPRDDLGPSQMQVDGPVVLNQSAELVSDDSMAVDDVPVQQPSGQPVEATQQSPATLIDTIMEVQKQLKRKRASNSPVIDAADKDALVAGCRQELEG

SEQ ID NO: 203305 - protein, 49 aa, Zea mays
  unsure (1)..(49): unsure at all Xaa locations
  Clone ID: MRT4577_117000C.1.pep
HFPGTCGVIFGALEGESSESTPALPLXDWRANRAALMTIXQHTAALTRV

SEQ ID NO: 203306 - protein, 54 aa, Zea mays
  unsure (1)..(54): unsure at all Xaa locations
  Clone ID: MRT4577_117001C.1.pep
TFXAILNACRYSSXXFIGDFRCHCCCSSLYRCQCFYKNSSCVSRKCNNCQCVNL

SEQ ID NO: 203307 - protein, 102 aa, Zea mays
  unsure (1)..(102): unsure at all Xaa locations
  Clone ID: MRT4577_117002C.1.pep
MLRTISTDRXSGSDNAPRRYIATLAALHLAPTTXGYHNPHRYLPGTGALHDIRNAQTSTHLWLRKLPSQRPLXEVXQNCKTDLSLQRPAALATHEASECYLS

SEQ ID NO: 203308 - protein, 83 aa, Zea mays
  Clone ID: MRT4577_117003C.1.pep
MPSNVKDGSFGRRKLFPALLTARTIIIVRRLAIHHIEDDNQKMDAATTSAKETLLNNYDTIPLRKYDSWSSINNMLVTLYHLQ

SEQ ID NO: 203309 - protein, 71 aa, Zea mays
  Clone ID: MRT4577_117004C.1.pep
RNVKGSFKQMGIIYVQVLDLLGRESHAKAVELQSVGILNNKLPLDASVNYRGRCGSLELEEHAVFDKTLGS

SEQ ID NO: 203310 - protein, 38 aa, Zea mays
  Clone ID: MRT4577_117005C.1.pep
NYLTASVQTEANSCQNLTKQVPKPCIERLLRTGDLVTQ

SEQ ID NO: 203311 - protein, 120 aa, Zea mays
  unsure (1)..(120): unsure at all Xaa locations
  Clone ID: MRT4577_117006C.1.pep
VIFCGATDENSSDLNRQSFSLHFVSREQQGSLYRKKKKKKKKKKKKKKKKKKKKKGGPKKKRSAKYHMFVKXITCNIFFVINEMRTLQSLNRRFSLKKKKKKKKKKKKNKKLENKELEMD

SEQ ID NO: 203312 - protein, 122 aa, Zea mays
  Clone ID: MRT4577_117007C.1.pep
ETKADSVFFTLDMLDKFLALALPEGATKDHPFTCPMGPQAPPLESVPLPPMLVSVAENDLIRDTNLEYCDALRAAGKEVEVLINRGMSHSFYLNKYAVDMDPATGERTRELIDAIKSFISRH

SEQ ID NO: 203313 - protein, 46 aa, Zea mays
  Clone ID: MRT4577_117008C.1.pep
HYCSVVYLASGDGQFGYVMYGLLSVTHWPSMVMRYASSSDTEFINE

SEQ ID NO: 203314 - protein, 115 aa, Zea mays
  Clone ID: MRT4577_117009C.1.pep
MKTRSQTSPKPLKTVAMAPRPSSTKRKPRPKPAGKGDPRAPKKPPTAFFYFMEDFRKIYKQEKPSVKSMQEIGKACGEKWNTMTFEEKVKYYDIATEKRAEFEKAMIEYNKKKES

SEQ ID NO: 203315 - protein, 45 aa, Zea mays
  Clone ID: MRT4577_11700C.1.pep
LEPTDATRATAPANRSMYSLLKYLHCIYIDIMWGTVYYLVYIRRT

SEQ ID NO: 203316 - protein, 91 aa, Zea mays
  Clone ID: MRT4577_117010C.1.pep
PPKVPPFLEDPRIRRITGVKPKELLIWVPLPHMFVDRGAPPKIPFKTPPGLGRTYPVSPFVKKGPGYKGPGAKPKDYAPAPTPPGKVSPPK

SEQ ID NO: 203317 - protein, 98 aa, Zea mays
  Clone ID: MRT4577_117011C.1.pep
SCNLRGSLPATEANTGRDINSGTSRWPTGRTPASLPHGPVSQTTGRSCLTGRRLNRASALGGKALKTAKKGFSKALDELKAVESGGLISGEVLRPVDN

SEQ ID NO: 203318 - protein, 39 aa, Zea mays
  Clone ID: MRT4577_117012C.1.pep
SAAPLFFFWDVQKDNGLKNLKTGAKYLRSLSTYFTKADY

SEQ ID NO: 203319 - protein, 61 aa, Zea mays
  Clone ID: MRT4577_117013C.1.pep
LSLKRWSSGSLVPFPTTTSMLSYRPNPSICFSTLTVSSIVVRFTNSTTIHDAHVQAVQCIL

SEQ ID NO: 203320 - protein, 62 aa, Zea mays
  Clone ID: MRT4577_117014C.1.pep
SRSHLCNSTSSVLLDLCLPAWPMSSWLSCVMGLVPTEHNAWAYTTRAKKASNFVQKTMSLNR

SEQ ID NO: 203321 - protein, 51 aa, Zea mays
  Clone ID: MRT4577_117015C.1.pep
FTRSNCSFNFIIVVNVFNQGDLSVGYHLAPYAFLEELGDRRDAWHAMRDSA

SEQ ID NO: 203322 - protein, 53 aa, Zea mays
  Clone ID: MRT4577_117016C.1.pep
SIKCVIWLSCSKKHRGTRRAHKIRALGHHGLLDRGATPKDGGRRLQRTQRLSH

SEQ ID NO: 203323 - protein, 64 aa, Zea mays
  Clone ID: MRT4577_117017C.1.pep
CATSTCVIKTATFSLGFISIIGVSRVITYENCSYSGSRGLLVVSDGSVLPRFHCVCVRVRARVR

SEQ ID NO: 203324 - protein, 45 aa, Zea mays
  Clone ID: MRT4577_117018C.1.pep
NGMGGITKTGDCYTVCTFLGVCWGEILMQHIYNSSLIGGSNSSFL

SEQ ID NO: 203325 - protein, 192 aa, Zea mays
  Clone ID: MRT4577_117019C.1.pep
MASDGAVATPAKVTPKKANLLDPHSIKHLLDETVAEVVKGKGYVENTRLGNWKLLIGTAVIAIALLAQFYPKKFPQNREFLLGCIALYVVMNVVLLILSYTKEKDAIIFTHPPAGSFNNTGLVISSKLPRFSDMYNLSIASADPESISAHKPVHFTKSVTKWFTKEGVLVEGLFWKDVERLIDDYNNERKSK

SEQ ID NO: 203326 - protein, 46 aa, Zea mays
  unsure (1)..(46): unsure at all Xaa locations
  Clone ID: MRT4577_117020C.1.pep
NFRLPXKKPQRRVXIPVIRETHTTTSQMHXPTNSHNTITIPPTTSP

SEQ ID NO: 203327 - protein, 105 aa, Zea mays
  Clone ID: MRT4577_117021C.1.pep
NGDGGGEESAPGPPPRAGGPPCSGGSDHPRGRAAPVVKNFQKVEPSKVTPSAHFQKDLGLDSLDTVEIVMAFEEEFSFEIPDNEAEKIDSIKTAVDFIASHPQAK

SEQ ID NO: 203328 - protein, 71 aa, Zea mays
  Clone ID: MRT4577_117022C.1.pep
NLIPIPFRLTRVIELSPGFTQSLRIGLSMCKCSSHGTCVLFGVRSSHLNIRYSDQDMQGRALGSGSSTESK

SEQ ID NO: 203329 - protein, 128 aa, Zea mays
  unsure (1)..(128): unsure at all Xaa locations
  Clone ID: MRT4577_117023C.1.pep
MAMAAARRALLAHLRVPVXSTLQRRQXTIPAAGRLLSSTTERKGSFLDKGEVADRVVSVVKNFQKVEPSKVTPSAHFQKDLGLDSLDTVEIVMAFEEEFSFEIPDNEAEKIDSIKTAVDFIASHPQAK

SEQ ID NO: 203330 - protein, 179 aa, Zea mays
  unsure (1)..(179): unsure at all Xaa locations
  Clone ID: MRT4577_117024C.1.pep
HLPLQQPAAPSSRNSRRPPPTSTXPSPWEAPGPPPSASGRAPSACRRRPSPXGPQPAHXRSPGLGAAPWQRGRGGPSMAARVHVALARARPRRRGQRPGAPVAPSSAXPPSPSPGSLAANPLPWPAVAPVAXPPSCTQTLCPRPSCAPPPLCAAPSPTSTPPRAAPSWPSCAACAPPPP

SEQ ID NO: 203331 - protein, 58 aa, Zea mays
  Clone ID: MRT4577_117025C.1.pep
LLKMPNYVSSPSRIARRPPINSWTRAIYTCSGDHIILTGDGRLRPLTKLSPLEAAHTL

SEQ ID NO: 203332 - protein, 157 aa, Zea mays
  Clone ID: MRT4577_117026C.1.pep
IDHHPRLTPILMRTIRWVPLAGLQEAVLDLFRSSTSGEAGTAFGQEAWCALPSGLLLCCFLFLLGMARRTPNEVLLYIQRNEYMNYAGSLRGRRVLVPAGVRFFRLVARVGWTAYEVASRSIVLLIAAHGGSSGGLFPPSAGGCSPLCSSSFLWPPT

SEQ ID NO: 203333 - protein, 78 aa, Zea mays
  unsure (1)..(78): unsure at all Xaa locations
  Clone ID: MRT4577_117027C.1.pep
GLIHGSAHASVYRVFPSAFLFTSRFPEVCLSSLECWPLSILLFCTMLVRPWLAXIKMGAHSPLVVCGLICKDGXEWFV

SEQ ID NO: 203334 - protein, 197 aa, Zea mays
  Clone ID: MRT4577_117028C.1.pep
IHIDIFEMKHIVFLGVGANKQKSAGWTNSHYATVVWMHKDAEETIKSGTLRKKKKEEFPEHKFQFRYRKIDHHPRLTPFLMRTIRWVPLAGLQEAVLDLFRSSTSGEAGTAFGQEAWCALPSGLLLCCFLFLLGMARRTPNESTRREFARSPGSGPRGRAVLPSCRPGWLDGLRSSFQEHRSADRCSWRIFRRPLPP

SEQ ID NO: 203335 - protein, 210 aa, Zea mays
  unsure (1)..(210): unsure at all Xaa locations
  Clone ID: MRT4577_117029C.1.pep
KVSNHERRXALLRASRHALMRGVTTVVDVGSYFPGASAEKTWQDFXYSVIPSLALHGQELEGFTCLVFIYDLICTPGILTQVLIXTEIYKWAHSMEXMILRVCLFFPMPTWSRVSDLISEHGRSLSQWIHLGGVKAFLDGSLGSSSALFHEPYEGDPDNYGLQMTDLDSLLNRTLESDKSGLQVAIHAIGDKANDILLDMVDKIVDLNGA

SEQ ID NO: 203336 - protein, 139 aa, Zea mays
  unsure (1)..(139): unsure at all Xaa locations
  Clone ID: MRT4577_11702C.1.pep
MGDWVPRGRPEYTPPSSQDTVTEARLRRRRLCDPLKVANMSTVLQRPTPGTVQRFSRKKTAVAVFYTKPSCGLIKVNGVPXIELIKTEMLRLKGFEPILLAGRSKFKDIVLSILVRGVGXTSQIYPIRQDVAKELVAYY

SEQ ID NO: 203337 - protein, 62 aa, Zea mays
  Clone ID: MRT4577_117030C.1.pep
KTNSLHTLASHSYYKQNKATHGRPKQLATPLLIVQRSTCKLLASRIRSMQILLGKEMSYMKD

SEQ ID NO: 203338 - protein, 246 aa, Zea mays
  unsure (1)..(246): unsure at all Xaa locations
  Clone ID: MRT4577_117031C.1.pep
LVPTRLVSKRLVSEALPNFQWVADLKGALIVTVLAEFLDQCESLSNIVLHHGVQDKHTWRFNTSGSFASSAYRAMFFGSVDFEPARRVWNTWAPGKCRFFIWLVEHNRCWTADRLAMRGLSHPERYPLCDQASETINHLLVVCXFAKQFWFEFLTLANLQELSPQQVDLSFENWWKNSCSRVAVHLKNCLNSMVILGVWIIWKHRNKCVFDKCRPSVISAVRMAKEGLVYWSMADAKALSSLQVGG

SEQ ID NO: 203339 - protein, 232 aa, Zea mays
  unsure (1)..(232): unsure at all Xaa locations
  Clone ID: MRT4577_117032C.1.pep
MGGGGGSQGKKKKGHTDVIWTQKRVLDRVSLGKPFYWEIRDEHGLFYALDLGGGGGRVLLFQLGGKEKRVVKQQYEEVSIPPHLMGGTSMELFDFIAAALAKFVGXEGEXFQLPEGRQRELGFTFSFPGNQTSISSGTLIKWTKGFSINGTGGEDVVSELSRAMERQGLDMKATALVNDTGGTLXAGGRYMDTDVXAAVILGTGTNAAYVEHANAIPKWTGLLPKSGKRGLI

SEQ ID NO: 203340 - protein, 510 aa, Zea mays
  unsure (1)..(510): unsure at all Xaa locations
  Clone ID: MRT4577_117033C.1.pep
MVKAVVVGAAVVACAAVGVAVVLERRRRKRDADLLGSASGGGKRTVTDLIEEVASTPVVAKVANGGFGDGIAAVVASHLPGEVXAQRLVVLRQVDILPTGDEHGLFYALDLGGTNFRVLRVHLGGREKRVVKQQYEEVSIPPHLMVGTSIEXLFDFIAAALAKFVGTEGEDFQLPEGRQRELGFTFSFPVNQTSISSGTLIKWTKGFSINGTVGEDVVSELSRAMERQGLDMKATALVNDTVGTLAGGRYMDTDVVAAVILGTGTNAAYVEHANAIPKWTGLLPKSGNMVINTEWGSFKSNKLPLSEYDKAMDFESLNPGEQIYEKMISGMYLGEIVRRILLKLAHDASLFGDVVPTKLELPFILRTPDMSAMHHDSSHDLKTLGAKLKDIVGVADTSLEVRYITRHICDLVAERAARLAAAGVYSILKKIGRDKVPSGGGKMPRTVVALDGGLYEHYKKFSSCVEATLTDLLGEEASSSVVAKLANDGSGIGAALLAASHSQYQYGASD

SEQ ID NO: 203341 - protein, 459 aa, Zea mays
  Clone ID: MRT4577_117034C.1.pep
MIEEVERSLATPTALLRGIADAMVAEMERGLRGDIHAQLKMLISYVDNLPTGDEHGLFYALDLGGTNFRVLRVQLGGREKRVVKQQYEEVSIPPHLMVGTSIELFDFIAAALAKFVDTEGEDFHLPEGRQRELGFTFSFPVNQTSISSGTLIKWTKGFSINGTVGEDVVSELSRAMERQGLDMKVTALVNDTVGTLAGGRYMDNDVVAAVILGTGTNAAYVEHANAIPKWTGLLPKSGNMVINTEWGSFKSGKLPLSEYDKAMDFESLNPGEQIYEKMISGMYLGEIVRRILLKLAHDASLFGDVVPTKLEQPFILRTPDMSAMHHDSSHDLKTLGSKLKDIVGVADTSLEVRYITRHICDLVAERGARLAAAGIYSILKKIGRDKVPSSGSKMPRTVIALDGGLYEHYKKFSSCVEATLTDLLGEEASSSVVAKLANDGSGIGAALLAASHSQYGESD

SEQ ID NO: 203342 - protein, 61 aa, Zea mays
  Clone ID: MRT4577_117035C.1.pep
LIVVVKFVIEWVLALLDFGDPQIRIHGVDVVHQGAWYLRRRGRGLVVAVEARGKPLPIRAS

SEQ ID NO: 203343 - protein, 81 aa, Zea mays
  Clone ID: MRT4577_117036C.1.pep
GIDRDTASARASASREWWCAVIHIDSMPAYGALLVKPAVIYGYLNASNFMILLWPLNLQMTMARQMKKMLIGLRTSPDTCT

SEQ ID NO: 203344 - protein, 509 aa, Zea mays
  Clone ID: MRT4577_117037C.1.pep
MVKAVVVGAAVVACAAVGVAVVLERRRRKRDADLLGSAEAERRRRAAAVIEEVESSLATPTALLRGIADAMVAEMERGLRGDIHAQLKMLISYVDSLPTGDEHGLFYALDLGGTNFRVLRVQLGGKEKRVVKQQYEEVSIPPHLMVGTSMELFDFIAAALAKFVGTEGEDFQLPEGRQRELGFTFSFPANQTSISSGTLIKWTKGFSINGTVGEDVVSELSRAMERQGLDMKVTALVNDTVGTLAGGRYMDNDVVAAVILGTGTNAAYVEHANAIPKWTGLLPKSGNMVINTEWGSFKSNKLPLSEYDKAMDFESLNPGEQIYEKMISGMYLGEIVRRILLKLAHEASLFGDVVPPKLELPFILRTPDMAAMHHDSSHDLKTLGAKLKDIVGVADTSLEVRYITRHICDLVAERAARLAAAGVYSILKKIGRDKVPSGGGKMPRTVVALDGGLYEHYKKFSSCVEATLTDLLGEEASSSVVAKLANDGSGIGAALLAASHSQYQYGASD

SEQ ID NO: 203345 - protein, 39 aa, Zea mays
  Clone ID: MRT4577_117038C.1.pep
LLSLTIGRVYRYGEDAIEANRKRSSSTNIIPISINCCLA

SEQ ID NO: 203346 - protein, 117 aa, Zea mays
  unsure (1)..(117): unsure at all Xaa locations
  Clone ID: MRT4577_117039C.1.pep
ETAAPSAKYINLPRRLNHIHALVRLTGITAHAQCVKVESSAGPSAPTADVAEAHAPDAQDDDYYDVDLFGEETVYQKNAAXXRAVADKASGKKKESGKSSVLLDVNPWDDETDMAKL

SEQ ID NO: 203347 - protein, 49 aa, Zea mays
  Clone ID: MRT4577_11703C.1.pep
RVLNMHELPRRTEGCEGEVVLAVTNGRVACHIVSSSGMECRRLVARLEP

SEQ ID NO: 203348 - protein, 70 aa, Zea mays
  unsure (1)..(70): unsure at all Xaa locations
  Clone ID: MRT4577_117040C.1.pep
GRHKIFVLLLMXXLGAFLQVPCYPATQFFPPNAHQGVLXSFPFFLLFSSXHQRCACGGGGRTPXXFNPLQ

SEQ ID NO: 203349 - protein, 65 aa, Zea mays
  Clone ID: MRT4577_117041C.1.pep
KRTTISPRRHPRQEPQKAGNKERKKNQRGEKKKKKKKKQKKKKKKIKKKKKKKKKKACTCPGGRS

SEQ ID NO: 203350 - protein, 251 aa, Zea mays
  unsure (1)..(251): unsure at all Xaa locations
  Clone ID: MRT4577_117042C.1.pep
MERAAITTMPRKLVVLYPSPGMGHLVSMIELGKIIAARGLAVTIVVIDLPHNTGASATGPFLAGVSAANPTISFHRLPQVVLPPVKSNHPETLTFEVARVSNPHLRDFLAATSPAVLVADFFCNVARGVASELGIPFYFFFTSGAEVLALYLHLPVLHAQTTANFQDMGDELVHVPGIPSFPATDSMLPIMDRDDVAYTKFVSVCSDLCLSQGILVNTFRSLEPPGVEAIIAGXCSPSGLPTPSVYCIGPL

SEQ ID NO: 203351 - protein, 68 aa, Zea mays
  unsure (1)..(68): unsure at all Xaa locations
  Clone ID: MRT4577_117043C.1.pep
FIQRFNVSPSAFLSHHKLFPLILQSMPXNAGTLXQQQQLLPFNQLAFTSPPVFYQQPIIGGALFYTAH

SEQ ID NO: 203352 - protein, 46 aa, Zea mays
  Clone ID: MRT4577_117044C.1.pep
FTSFRVTKLQIIAMLLTSQILAIPWLDVFYKRRGTSAFPNVCLILN

SEQ ID NO: 203353 - protein, 79 aa, Zea mays
  Clone ID: MRT4577_117045C.1.pep
HSILCEPKIAMLSNPETEQQSDPVSIPQNISEVSFFNKHITAVACVLVIIYKRAALSCSEILSLGAPAENLQELLGDVA

SEQ ID NO: 203354 - protein, 92 aa, Zea mays
  unsure (1)..(92): unsure at all Xaa locations
  Clone ID: MRT4577_117046C.1.pep
SAXFCFALPSXSXSPGXPPXLXKKKVLGGXXXVTPPFGXRXXSSXSCXXSARALAXVXXXFLPXLLLLLLXLLLXQXXXLXXSLXLPTXSVX

SEQ ID NO: 203355 - protein, 134 aa, Zea mays
  Clone ID: MRT4577_117047C.1.pep
MGQNPPPGQVIFFFFGLPIIRLSKCPWPLSFSQWVAPKGVSFFYLGISNTLVGRTHISPFQVTSFLFSRLGKPKASLSFSFSRLASVTFKSHPVCFPPCGFLVLCPKFGPGFLLGGPKLILRPPLFHFYTLFPF

SEQ ID NO: 203356 - protein, 60 aa, Zea mays
  Clone ID: MRT4577_117048C.1.pep
SALAGHLFPVVTHEQGVYIPVYLWPPEWKCKNHRYICSCIQRGHVSQRVCVCGTIYTIVS

SEQ ID NO: 203357 - protein, 104 aa, Zea mays
  Clone ID: MRT4577_117049C.1.pep
IKNCVAQQQARQVNLISSCSQDNNINCKEDGGGEASALCIYSGSCPPPSMWCGRRGFRSLSMEGGVDDGMGFGHFLEWSEGSDGRGSNGPWDCVNSGGEAHARA

SEQ ID NO: 203358 - protein, 47 aa, Zea mays
  Clone ID: MRT4577_11704C.1.pep
QAYRGCIFWFLSCKRSCATSDYMQRPAVALRIPILTTTDDSASSYAC

SEQ ID NO: 203359 - protein, 78 aa, Zea mays
  Clone ID: MRT4577_117050C.1.pep
ILSKQINPPGRVKIKRLQPKNNQTIIYIRQDSQSVLTKTKKRSPHEKNQQNKPKNHIRYLIHTHKRPLHEKHKPHVTQ

SEQ ID NO: 203360 - protein, 70 aa, Zea mays
  Clone ID: MRT4577_117051C.1.pep
VSLVSVMPMWSAKAKYFLLHSFFIWVLQAATMDRRVCATWIQIPAGFILVFEILTLTELSSCYDACIRAG

SEQ ID NO: 203361 - protein, 41 aa, Zea mays
  Clone ID: MRT4577_117052C.1.pep
LAPLNMFWREGDLGVSLQEQHASIGYRATGIHGLMSAPKGL

SEQ ID NO: 203362 - protein, 1044 aa, Zea mays
  unsure (1)..(1044): unsure at all Xaa locations
  Clone ID: MRT4577_117053C.1.pep
MALSGMRGLSVFISDIRNCHNKEQERLRVDKELGNIRTRFKNEKGLSPYEKKKYVWKMLYIYMLGYDVDFGHMETVSLISAPKYPEKQVGYIVTSCLLNENNDFLRMVINTVRNDIIGRNETFQCLALTMVGNIGGKEFSESLAPDVQKLLISSSCLXLLTEXAALCLLRLYRKNPDVVNIDGWADRMAQLLDERDLGVLTSVMSLFVSLVSNNSEAYWNCLPKCVRILERLARNQDIPQEYTYYGIPSPWLQVKTMRALQYFPTIEDPNARRALFEVLQRILMGTDVVKNVNKNNASHAVLFEALALVMHLDAEKEMMSQCVALLGKFIAVREPNIRYLGLENMTRMLLVTDVQDIIRRHQAQIITSLKDPDISIRRRALDLLYGMCDVTNAKEXELLQYLDTAEFAMREELSLKAAILAEKFAPQLLWYVDVILQLIDKAGDFVSDDIWYRVVQFVTNNEDLQSYAATKAREYLDKPALHETMVKVSAYLLGEYGHLLARRPGCSPKELFAIINDKLPTVSASTVAILLSTYAKILMHTQPPDVGLQQQILTIFKKYESYIDVEIQQRAVEYFELSRKGPALADVLAEMPKFPERESALLKKAEDAEIDTAEQSAIKLRSQQQTSSALVVADHSPANGSAPPVNNLTLVKMPSQTVSDTQESGVSYEEAPKPPVEAPKENGTPVEVQNRDTNITEINNEIKAEPPSTSHSTSPGDLLLADLLGPLAIEGPPAVEQNPAQGLNANQSPAGDLALATLDDQSNSVQPIVNVEEKFHILCTKDSGVLYEDPYIQIGLKAEWRAHHGRLVLFLGNKNTSALTSVRALILPPSHLKMELSSVPDTIPPRAQVQVPLEVANLLASRDVAVLDFSYAFGTSLVDAKLRLPVVLNKFLQTITLTPEEFFSQWKALTVHSLKVQEVVKGVKPMPLSEMANLFMSLHLAVAPGLDNNPNNLVACTTFFSEATRAMLCLIRVETDPQDRTQLRLTVASGDQYLTFELKEFIKEHLVDIPRTQVAPPMAMVQPQLLTAAPATYNDPGTMLAGLL

SEQ ID NO: 203363 - protein, 93 aa, Zea mays
  Clone ID: MRT4577_117054C.1.pep
ISACVLIFSVCCVQAYVPGVLACSSHVEKGDKVAVSVAIEQPVKEDGWAVGPRTLRCYHCLQSDAHYEERKGLYIGQGTAAMSRSAIFRVPHG

SEQ ID NO: 203364 - protein, 137 aa, Zea mays
  Clone ID: MRT4577_117055C.1.pep
PHTVQTNAYNSTNAISCEVNSEDLIYDLSSQVETQAKDHDMGHDMSHTNTNAQTHDHKHEDDDEDGDEADDNDKDINQAITQTSNARTNVNDAHEDINGDIVDVITDGETYGDTTVRANFYLDCYCIWGAICGPMLQ

SEQ ID NO: 203365 - protein, 94 aa, Zea mays
  Clone ID: MRT4577_117056C.1.pep
GLDNNPNNLVACTTFFSEATRAMLCLIRVETDPQDRTQLRLTVASGDQYLTFELKEFIKEHLVDIPRTQVAPPRAAVQPQLPTTAPATYNDPVI

SEQ ID NO: 203366 - protein, 60 aa, Zea mays
  Clone ID: MRT4577_117057C.1.pep
MALSGMRGLSVFISDIRNCHNKEQERLRVDKELGNIRTRFKNEKVTRLLPFLLLVANTFA

SEQ ID NO: 203367 - protein, 147 aa, Zea mays
  Clone ID: MRT4577_117058C.1.pep
AFQSSAMAVDTTQPEYWLNWRFLLCALWVYSCMALAFFLIKKYEGASSPDSNGDDGGDREEALPRVRPGVVYLEDCWKTCLEGIHPGWLLAFRVVAFFVLASLLVVDIITDGWSIFLYYTQWTFLLVTLYFGVCSLPMELWLAVCFG

SEQ ID NO: 203368 - protein, 127 aa, Zea mays
  Clone ID: MRT4577_117059C.1.pep
FFLNRAKTPISQNLGKGFDGGKTFFGRRGGFPRGRGIFPLKPRFFKKKGFWETTGFKKNWGGPAPPGGRENPKKPPFFFFFPRGGKKNPPKEFLEATVCFFAKKNPLGFFTPPGGYGALFAPSGPVF

SEQ ID NO: 203369 - protein, 77 aa, Zea mays
  unsure (1)..(77): unsure at all Xaa locations
  Clone ID: MRT4577_11705C.1.pep
PTRPXELKTTAFFSFCLCFXSXFCTGVFFLSTTPILKYHQIGPLKLVFDPLVFCGKVSSDSFFCHRFGLYEIYVKDF

SEQ ID NO: 203370 - protein, 995 aa, Zea mays
  unsure (1)..(995): unsure at all Xaa locations
  Clone ID: MRT4577_117060C.1.pep
VDFGHMETVSLISAPKYPEKQVGYIVTSCLLNENNDFLRMVINTVRNDIIGRNETFQCLALTMXLKQIRCQKSGIPTKEVGNIGGKEFSESLAPDVQKLLISSSCRPVVRKKAALCLLRLYRKNPDVVNIDGWADRMAQLLDERDLGVLTSVTSLFVSLVSNNVEAYWNCLPKCVRILERLARNQDIPQEYTYYGIPSPWLQVKTMRALQYFPTIEDPNARRTLFEVLQRILMGTDVVKNVNKNNASHAVLFEALALVMHLDAEKEMMSQCVALLGKFIAVREPNIRYLGLENMTRMLLVTDVQDIIKRHQAQIITSLKDPDISIRRRALDLLYGMCDVTNAKEIVEELLQYLDTAEFAMREELSLKAAILAEKFAPQLLWYVDVILQLIDKAGDFVSDDIWYRVVQFVTNNEDLQSYAATKAREYLDKPALHETMVKVSAYLLGEYGHLLARRPGCSPKELFAIINDKLPTVSASTVAILLSTYAKILMHTQPPDVGLQQQILTIFKKYESYIDVEIQQRAVEYFELSRKGPALADVLAEMPKFPERESALLKKAEDAEIDTAEQSAIKLRSQQQTSSALVVADHPPANGSAPPVNNLTLVKMPSQTVSDTQESGVSYEEAPKPPVEAPKENGTPVEVQNRDTNITEINNEIKAEPPSTSHSTSPGDLLLADLLGPLAIEGPPAVEQNPAQGLNANQSPAGDLALATLDDQSNSVQPIVNVEEKFHILCTKDSGVLYEDPYIQIGLKAEWRAHHGRLVLFLGNKNTSALTSVRALILPPSHLKMELSSVPDTIPPRAQVQVPLEVANLLASRDVAVLDFSYAFGTSLVDAKLRLPVVLNKFLQTITLTPEEFFSQWKALTVHSLKVQEVVKGVKPMPLSEMANLFMSLHLAVAPGLDNNPNNLVACTTFFSEATRAMLCLIRVETDPQDRTQLRLTVASGDQYLTFELKEFIKEHLVDIPRTQVAPPRAAVQPQLPTTAPATYNDPGTMLAGLL

SEQ ID NO: 203371 - protein, 86 aa, Zea mays
  unsure (1)..(86): unsure at all Xaa locations
  Clone ID: MRT4577_117061C.1.pep
LSEVNAVVYLLQVIWQPFGLCHEASRGSFLLEGQMVPLFQQFGDNPGSLWQIQQLLPFGRLGLXTPAASFHGNSCGGALFSGASEV

SEQ ID NO: 203372 - protein, 325 aa, Zea mays
  unsure (1)..(325): unsure at all Xaa locations
  Clone ID: MRT4577_117062C.1.pep
XKDVYMAIRDCNRTWKIDVTSYQAHLHMAEALLQLGRLKEASEHAEVANGLLPPHCPLREQVDAFKQRVASAELEKNRADQNGSSKADTHGKLRSLSEILFRPDVGGSSQEGREDSDYDDEMELDYETSVSGDESRENDQGVFRGSLSYRFHQREDQTNVHTGENGSVESPRKDDYAFQSDVAIDMKQRYVAHCNVGTDIKQASFLGEQGEFIASGSDDGRWFIWEKRTGRLIKMLAGDGAVVNCIQSHPFDCAVATSGIDNTIKLWTPDANATSMVSGPELDVLSAIENNQQKLCRNRHFVLPSEFLERFQMREFSEGFECAQS

SEQ ID NO: 203373 - protein, 149 aa, Zea mays
  Clone ID: MRT4577_117063C.1.pep
IKQASFLGEQGEFIASGSDGGRWFIWEKRTGRLIKMLAGDGAVVNCIQSHPFDCAVATSGIDNTIKLWTPDANATSMVSGPELDVLSAIENNQQKLCRNRHFVLWKCMSFQKVSSVTRADLLSLELLSFFRKRVIVGRMISSKLQAAYV

SEQ ID NO: 203374 - protein, 125 aa, Zea mays
  Clone ID: MRT4577_117064C.1.pep
LPRTNTATTAIRSITAILKRPALFLKTTSPLLQDGWDSRQRQMPRPLEYLHHEEELAGFIYRGGSDISLNTDMLFDDTLITSALGHRHQGAFKQISCERCLQTGGFLNHLTRMINDRSRGVLGHP

SEQ ID NO: 203375 - protein, 139 aa, Zea mays
  Clone ID: MRT4577_117065C.1.pep
LIRSIRLVSVLVGFSPVRFKQERSSMAIHMNLLVVVHSMAISDFNHTCLNQRASKKTKQKSSPVELEPAHGHPPLKKTMALLMNDNKKTTQAVVLAVPQVLLLAPASAAMTCVQVGSALSLGIPCASATGRASALPSGC

SEQ ID NO: 203376 - protein, 73 aa, Zea mays
  Clone ID: MRT4577_117066C.1.pep
HHMGILLCSLSVHHLPIPSRHIHHVCLQELGHVIQLLSVVLLYQHQRVHLHIKQMPKRLQQVVNFVLNLYGDN

SEQ ID NO: 203377 - protein, 80 aa, Zea mays
  Clone ID: MRT4577_117067C.1.pep
THPALSDIMDRAPLLLSLLCACADRRRLRQCGGGEEDGRRVRAQGRTISPTEAPTGAPPSPSLCCRTRKVILLTACLSTT

SEQ ID NO: 203378 - protein, 105 aa, Zea mays
  Clone ID: MRT4577_117068C.1.pep
KGPKTFLFKGHMIPPPKGQFTCLTRGSRPRQDKLDPELAPFPNGLKIPPPHFPGGGLEKTRIKNPGAKFKGVFYKTQAAGKRGLKKKFAPPGPPPQGVGFFPPYQ

SEQ ID NO: 203379 - protein, 156 aa, Zea mays
  Clone ID: MRT4577_117069C.1.pep
MTGRRSSLVYGTAIAICVSILLGSLAMTAQAGRSSHQLLSKARSSSTTRALYIASNTSSGYHTEVQCFDEAADGGDERRKTAELLTLIFCTAKCYCHSDNADDICYCCQKPPTQVCYETIKDCQAHCPVCNPKCPAASGTAGGSQQLHAAAKNATL

SEQ ID NO: 203380 - protein, 52 aa, Zea mays
  Clone ID: MRT4577_11706C.1.pep
AYIVTMRNHLYRLVHGRSFRCDKHANKVKGPQPLLWQSIPTGMDLTRGRTRG

SEQ ID NO: 203381 - protein, 166 aa, Zea mays
  Clone ID: MRT4577_117070C.1.pep
MDAELLELQRQLEAAQSARSSVRLSERNVVELVRKLQERGIIDFDLLHTVSGKEYITSDHLKHEIKMEIKKRGRASLVDLSDTLGVDLYHVERQSQKVVSDDPTLMLINGEIMSQSYWDTVTEEINEKLQERSQIALAEIAAQLHIGSELVISILEPRLGTIVKGS

SEQ ID NO: 203382 - protein, 68 aa, Zea mays
  Clone ID: MRT4577_117071C.1.pep
HAFDDERDSIIGTPWRQHVRRIKERAATPRGRQAVDVLLTLSHGGGDNRTTPVLLEVKWFYFDGKAIS

SEQ ID NO: 203383 - protein, 51 aa, Zea mays
  Clone ID: MRT4577_117072C.1.pep
SLPALHSFGPYAGGHAPGEMEAGPCGRTFPPLSVFSAGPRHWLLIAGPASR

SEQ ID NO: 203384 - protein, 361 aa, Zea mays
  Clone ID: MRT4577_117073C.1.pep
MASVRRSAVALIASFLVVAAVGAQPMDPKNPISSDPNVIPVYMSPGSPPTYVSCYNSTHGQQGSEPTCSILARQCPRGCRDTCYVHCPSCKLVCLCELTGSECYDPRFVGGDGNKFLFHGRRDADFCLVSDANLHINAHFIGKRNDARAAAPARDFTWVQALGIRFGGHRLYLGVRRTAVWDDAEDRLAITFDGVPVALDAVAGASWSPAAAPALSVFRTGPANGVVVRLDGRFRAVANAVPVTAEDSRVHGYGLRPGDGSLAHLNVAFKFYALSADVHGVLGQTYRPGYVSAAGVDAGARVPVMGGAGRFQVYGGIFDTSCEVGRFAGEDHGPVGGVTVEEPTDALCGSGKASTGLVCKK

SEQ ID NO: 203385 - protein, 71 aa, Zea mays
  Clone ID: MRT4577_117074C.1.pep
HQLMVGLIRDIAKGVRQTGVQRHSIDCCRSCVPPVECNSIRIALTFFAFPETWMPGHKLKGLIDNRILWNR

SEQ ID NO: 203386 - protein, 673 aa, Zea mays
  Clone ID: MRT4577_117075C.1.pep
MLTKFETKSNWVKGFAFHSCGPLPRIRHAAPDTNHEREARPTSNRPRTTMAASRALLPSPQVSPASARVRLAAAVPSSLTLAARGGAGAGARLRVRCAILSSPAPVAPTESRPARRISPSAPDGALRPKPAVLVAEKLSEAGLAVLRQFADVECAYGMSPAELLAKAAQFDALIVRSGTKVTREVLEAGQGRLRVVGRAGVGIDNVDLQAATEVGCLVVNAPTANTIAAAEHGIALLASMARNVSQADAALKAGKWQRNKYVGVSLVGKTLAVMGFGKVGSEVARRAKGLGMHVIAHDPYAPADRARALGVELVSFDEAIARADFISLHMPLIPTTSKIFNDESFAKMKNGVRIINVARGGVIDEDALVRALDSGKVAQAALDVFTVEPPPKDSKLVLHENVTVTPHLGASTVEAQEGVAIEIAEAVVGALRGELAATAVNAPMVPAEILSELAPYVSLAEKLGRLAVQLVAGESGIKGVKVVYTTARGPDDLDTRLLRAMVTKGLVEPVSSTFVNLVNADYTAKQRGLRLTEERVAHDSPAAEAPLESVQVRLSHVQSKFAGAISDGGDDIVLEGRVKYGVPHLTLVGPYEVDVSLEGNLILCRQIDQPGMIGKVGNILGDTNVNINFMSVGRTFRGKQAIMAIGVDEEPDKDTLEKIGAIPAIEEFVFLEL

SEQ ID NO: 203387 - protein, 340 aa, Zea mays
  unsure (1)..(340): unsure at all Xaa locations
  Clone ID: MRT4577_117076C.1.pep
RDAWASTFAKMNEWXVRIINVGXGGVXLDEYAXLYRARDSRQSLLRRALDVFTVEPPPKDSKLELHENVTVTPHLGASTVEAHEGVAIEIAEAVVGALRGELAATAVNAPMVPAEILSELAPYVSLAEKLGRLAVQLVAGESGIKGVKVVYTTARGPDDLDTRLLRAMVTKGLVEPVSSTFVNLVNADYTAKQRGLRLTEERVAHDSPAAEAPLESVQVRLSHVQSKFAGAISDGGDDIVLEGRVKYGVPHLTLVGPYEVDVSLEGNLILCRQIDQPGMIGKVGNILGDTNVNINFMSVGRTFRGKQAIMAIGVDEEPDKDTLEKIGAIPAIEEFVFLEL

SEQ ID NO: 203388 - protein, 41 aa, Zea mays
  Clone ID: MRT4577_117077C.1.pep
FTAMDIPPPRGPLWILGDVFMGVYHTVFDYGKLRVGFAESA

SEQ ID NO: 203389 - protein, 302 aa, Zea mays
  Clone ID: MRT4577_117078C.1.pep
MLDIMENSSLCAETGTSQEGVGVKNPDECSLEEPQSMNLLPEPALYSPDDFVNEQENRSPSEIVELVKPSVLTFPYSPENTNDKEEKLSPQSVLDPIAEVTSPRHKTPKQDEFSMPTSRVLFKEVDAPSASPALWNGPQVAILDDRATRVSFIKAVLEASGLLSEENSQIWYTEEPLLDVSVLAEVGNSYCLTDDAVLLFDYVEEVLLEIRDKFFGTDPWVNSLKHNVRPAPVGRRLVREVAKGIDSLVGKEFPHTLEQVMMKDLDSGSWLDLGGDTGSVVVELWDGLLDDLLEELVFDLWL

SEQ ID NO: 203390 - protein, 72 aa, Zea mays
  Clone ID: MRT4577_117079C.1.pep
MAMETCFRAWTLHAPAGSKDRLLVGNLVLPSKRPLAPLTVGRVATRRPRHVCQSKNPVRRSPRVRTTTTATA

SEQ ID NO: 203391 - protein, 107 aa, Zea mays
  Clone ID: MRT4577_11707C.1.pep
MTTPRGTQRRAAAPAAAAGGEPYNILPIHDLLAEHPSLRFPEVRAAAAALRAVGGLRPPPFSQWRADQDLMDWLGAFFGFQRDNVRNQREHLVLLLANAQMRLSDSN

SEQ ID NO: 203392 - protein, 114 aa, Zea mays
  unsure (1)..(114): unsure at all Xaa locations
  Clone ID: MRT4577_117080C.1.pep
PXECSLEEPQSMNLLPEPALYSPDDFVNEQENHSPSEIVELVKPSVLTFPYSPENTNDKEEKLSPQSVLDPIAEVTSPRHKTPKQGNELKTKGFTSGALHSLNSNRTKLFCCCR

SEQ ID NO: 203393 - protein, 39 aa, Zea mays
  Clone ID: MRT4577_117081C.1.pep
ELSYFKSKVYDIMRTCMSLAWTSITESWLTFVYTTTRTT

SEQ ID NO: 203394 - protein, 68 aa, Zea mays
  Clone ID: MRT4577_117082C.1.pep
RRLVREVAKGIDSLVGKEFPHTLEQVMMKDLDSGSWLDLGGDTGSVVVELWDGLLDDLLEELVFDLWL

SEQ ID NO: 203395 - protein, 113 aa, Zea mays
  Clone ID: MRT4577_117084C.1.pep
SASTAHEHSTTAHEQQRTGRREKATRYEHMSNHEQKGALQHMSTRASEQQPTQHMSTTLAACRSLAGSRPLAACSPRWGPRRGRQSPVAGRRPPAPVVRSNLGYGVRVCGPGR

SEQ ID NO: 203396 - protein, 82 aa, Zea mays
  unsure (1)..(82): unsure at all Xaa locations
  Clone ID: MRT4577_117085C.1.pep
ERGAVSLCPYKLEPTPGAMIRNPKLAFHKGYEIAXIFRQSIVQAXEMASDDMFILQPXSGFSASPEGILGPSASNAPSKVSE

SEQ ID NO: 203397 - protein, 51 aa, Zea mays
  Clone ID: MRT4577_117086C.1.pep
TRTLTGFIIVCKRAIVLDEMKSTVFSAAVVSIGYALLGWDFAALSEANNHM

SEQ ID NO: 203398 - protein, 99 aa, Zea mays
  unsure (1)..(99): unsure at all Xaa locations
  Clone ID: MRT4577_117087C.1.pep
DSTGFYSAYLIFYIVVLTTNHKYEDHYIWESQTYISFTVTHDTSGHQLLMGTKITLFLKDYHLXYLYDRLLKDLFNNHSEFINYPISLYTEKTTYNEIS

SEQ ID NO: 203399 - protein, 76 aa, Zea mays
  Clone ID: MRT4577_117088C.1.pep
IPYPWKNVLIYGFVLGQRPLAGNPFFKNSPGPYFGTMSILFAARALKNLLCVEGPIQIKDGFKPNRPGDPSLPCSF

SEQ ID NO: 203400 - protein, 47 aa, Zea mays
  Clone ID: MRT4577_117089C.1.pep
ITLKNQENPEELPPRLLQPIMTDRKIQRVYYHDQPAREADTTGSLIT

SEQ ID NO: 203401 - protein, 45 aa, Zea mays
  Clone ID: MRT4577_11708C.1.pep
FAKVFLFYQVTMIKSAGRLHTTQQLLKPLAEANPLAGGTLPHLQL

SEQ ID NO: 203402 - protein, 29 aa, Zea mays
  Clone ID: MRT4577_117090C.1.pep
HHQLIQCTSITPWCIKPPLPATHQRHPRI

SEQ ID NO: 203403 - protein, 74 aa, Zea mays
  unsure (1)..(74): unsure at all Xaa locations
  Clone ID: MRT4577_117091C.1.pep
MDAYCDLHTDDGLRALVAHLAGKAYVSGDSITNDDIKVXAQLRHKPGAELANAVRWYQHRSEAVXTKIPGRLLV

SEQ ID NO: 203404 - protein, 186 aa, Zea mays
  Clone ID: MRT4577_117092C.1.pep
SQCSSLSISAFFEPPHSLTSTGQTSQSLSKHGASPQPSVIEFSSESDEIQEESPVPSPPPRRSLSKRGRGSSRMEGEGSSMPTQPARGRRQKVGTNRPRRSTSSSGYAPCQEEDEAFDDFVDLPPSDAIYITGLHMHPANVTRGPNEPPVDFSLKEVDTLQRLRFTNPSLTPCHPGVQDPRFWNLF

SEQ ID NO: 203405 - protein, 65 aa, Zea mays
  Clone ID: MRT4577_117093C.1.pep
CFCYLKAVAMNTCLARVLHRCAVVHVAGITIHCFVSTSLTMLPKLLNHSLLCGALEQSHLCQLVL

SEQ ID NO: 203406 - protein, 108 aa, Zea mays
  Clone ID: MRT4577_117094C.1.pep
KKKRFSQGSCSLTQHPRSHQREAFSGRRLRLLVLTLAVFSVVSLTCESSYRRVWWGCFRQRSCCRLSPPPSWSSTFRKLRIPWVKMYFCSLAHRRAGLAPRRPGTGKP

SEQ ID NO: 203407 - protein, 309 aa, Zea mays
  Clone ID: MRT4577_117095C.1.pep
LVGFPRKQGKNNEEGNNSDKGEEDEEEEATRKNRLGLTKKGMDDDEEGGKDLDFDLDDEIEKGDDWEHEETFTDDDEAVDIDPEERADLAPEIPAPPEIKQDDEENEEEGGLSKSGKELKKLLGRAAGLNESDADEDEEDEDQEDDSSPVLAPKQKDQVKDEPVDSSPSKPAPSGHARGTPPASKSKQKRKSGVDDAKTSSGAASKKAKVELDAKASGLKEEASSLAKPASKTSAASKSGTSVSPVTEDEIRSVLLAVAPVTTQDLVSRFKSRLRGAEDKNAFAEILKKISKIQKTNGHNYVVLRDDKK

SEQ ID NO: 203408 - protein, 522 aa, Zea mays
  Clone ID: MRT4577_117096C.1.pep
MEEEQSSGGWGEEATNKAPLLEPRAASDHQHRSNGTSAGDGAGAGKAEAEGWSALPLRRRVWEENKRLWVVAGPSIFTRFSSFGVTVISQAFIGHIGATELAAYALVSTVLMRFSNGILLGMASALETLCGQSYGARQYHMLGIYLQRSWIILFACAVALLPVYLFTEPLLVALGQDPAIAAVAGTISRWYIPVMFSYVWSFTLQMYLQAQSKNAVITYLAMLNLGLHLLLSWLATARLRLGLAGVMGSMVVAMWIPVLGQLAFVFFGGCPRTWTGFSSAAFADLAAIVRLSLSSGVMLCLELWYNTILVLLTGYMKNAEVALDALSICLNINGWEMMISIGFLAATGVRVANELGAGSARRAKFAIYNVVATSSIIGSVLFVLFLLFRGGLAYIFTDSQAVADAVAGLSPLLAFSILLNSVQPVLSGVAVGAGWQSVVAYVNITSYYLIGIPLGAVLGYALGLHVKGIWIGMLLGTLVQTVVLLFITLKTDWEKQVEVAQERLKRWYMEENRRLQGSRRNP

SEQ ID NO: 203409 - protein, 38 aa, Zea mays
  Clone ID: MRT4577_117097C.1.pep
VGNSFHELIFLNNLWLSMNHMSKLCWGQLLIEPSLHEM

SEQ ID NO: 203410 - protein, 90 aa, Zea mays
  Clone ID: MRT4577_117098C.1.pep
MGWASRWLRGLLGGGKKAGEHKPEREKKRWGFGKSFREKDPVRPPAPPVQRAATPRRTYAASDDGGDEQNKRAIAVGAATAAAVHDAVAF

SEQ ID NO: 203411 - protein, 104 aa, Zea mays
  Clone ID: MRT4577_117099C.1.pep
RPIKKINFFFPLPCSHRGASAAKYPHRSLLLGVDPLCRPVGFPLNFPLPMSPAREGWARLVQVDSKLEGTERGAVGFLRFVILKPHAVGRLLLSLRRMRRVEGR

SEQ ID NO: 203412 - protein, 65 aa, Zea mays
  Clone ID: MRT4577_11709C.1.pep
FESVDQAHGLSCTSYCTSIRSPGRLYRHHGWFLISGMVILAIGPAPKVLKQHSATLEICGNSLEL

SEQ ID NO: 203413 - protein, 99 aa, Zea mays
  Clone ID: MRT4577_1170C.1.pep
EGRIRQVLHNVAKIKCHGVAGLQQFSEVVRLHNEVVSEVQGLAVGPIVLVRERAVRVAVKYPPIAADKGVVLCKAAHSSPPAMQSPPWRRSGSPAGHGP

SEQ ID NO: 203414 - protein, 84 aa, Zea mays
  Clone ID: MRT4577_117100C.1.pep
FIFFLKNRNSLEKYRYQTGTNCIIFSTHFPSGTCTGELHFYLGSRRLVTKEQWPLPLEKKKKKKKKKKKKKKKNKKKKKKYLII

SEQ ID NO: 203415 - protein, 48 aa, Zea mays
  Clone ID: MRT4577_117101C.1.pep
STALLLCCSSQKMLLCCSPVLLCCCPSEENTEKPAHSSNEAPSKEVIH

SEQ ID NO: 203416 - protein, 82 aa, Zea mays
  unsure (1)..(82): unsure at all Xaa locations
  Clone ID: MRT4577_117103C.1.pep
SRLIFLWKFFSXNIFFKNPHLLVFRPPLGGVGAPIIHAPACCHCPFLPHNSPKARPRPRFLIISLHAEESSSLLSLLKVSSS

SEQ ID NO: 203417 - protein, 76 aa, Zea mays
  unsure (1)..(76): unsure at all Xaa locations
  Clone ID: MRT4577_117104C.1.pep
HDPFEXLVQXGVAELVKLATXRGXRKARLNFKVGICGEHGAEPSLVALFDKAGLDCVSCSTFRVSIARIGAAQVLV

SEQ ID NO: 203418 - protein, 53 aa, Zea mays
  Clone ID: MRT4577_117105C.1.pep
GDSRRRFSVLSRPPGAAYVRERRPALRLDSRAAGPPPDTSAPPRFFPPSGSTP

SEQ ID NO: 203419 - protein, 50 aa, Zea mays
  Clone ID: MRT4577_117106C.1.pep
MGKGKKVDRLSSLPDDILVNILDRLNVREAARTSILSRRWTRLCAKLSRL

SEQ ID NO: 203420 - protein, 62 aa, Zea mays
  Clone ID: MRT4577_117107C.1.pep
CRRGGRGSARSSGSSRTSCPTWTRYNYYVSSSSMASQFAKVFLRVMHRLILRDRGGVVRPLR

SEQ ID NO: 203421 - protein, 72 aa, Zea mays
  Clone ID: MRT4577_117108C.1.pep
RTSFFFFCFFFFILCLFLFLHFISLVTNIFSLLMLQALSHVLVKRQFSLPGDTPPIANLGTPYLPSMVGPVL

SEQ ID NO: 203422 - protein, 57 aa, Zea mays
  Clone ID: MRT4577_117109C.1.pep
KAPSLKKKSPPAQPPVVLGVAPKKKPAPDFVKPPAKSGKPPHPWGWGTTSKCPPCNC

SEQ ID NO: 203423 - protein, 58 aa, Zea mays
  Clone ID: MRT4577_11710C.1.pep
NEGQGVVIRWQVKLSFECWKKGYVCLVWLGVENFFIYKRVFFFFFFFLFNFFFYFFFF

SEQ ID NO: 203424 - protein, 46 aa, Zea mays
  Clone ID: MRT4577_117110C.1.pep
GRTRGPVYRIQAHCTACIAMSYMCYIVTLNVINWIAGLQREILIKS

SEQ ID NO: 203425 - protein, 64 aa, Zea mays
  Clone ID: MRT4577_117111C.1.pep
VLFGVCVKKKKTKFFSLLSPSACLAPVFGLMNVCQHACWLTRLGLLYPNINWSPMICFDPIYIS

SEQ ID NO: 203426 - protein, 117 aa, Zea mays
  unsure (1)..(117): unsure at all Xaa locations
  Clone ID: MRT4577_117112C.1.pep
KKKKKKKKKKNKINKDEIKXVWVEVEKKXGDEFYNVVRWXETVXEIVXXRLSGKADGANLPGGSDHAAAAPADEAEDDDDLDLFGDETDEDKKASDECAADVKAVSKKKESCKSSVL

SEQ ID NO: 203427 - protein, 188 aa, Zea mays
  Clone ID: MRT4577_117113C.1.pep
QDKTLGPPGVNPGWPPPRWVVPWNGPQNKFFWPCPGFPFNNQGKVVRGPGPFFLGLVSPPVDDGKVLFVPWVGTPFRAGEDPWWKALGLFGTNGGQGFPIRPMYAPLPFYKEISLRLFSVGGVSTKSPAFCLPLNKPPVLNKNSRLSSLFIKPFFPFLKKKKKKKKKKKKKKKKKKKKKKKKKKKKAA

SEQ ID NO: 203428 - protein, 83 aa, Zea mays
  Clone ID: MRT4577_117114C.1.pep
IRHEGPRMQTRPNPHRWSQARWPLVLAAQRGGGRAVGGGGAYAHRRHLAAPPYMPLRLRLAYLHRSPHHGRQRQCPRHGRYHQ

SEQ ID NO: 203429 - protein, 241 aa, Zea mays
  unsure (1)..(241): unsure at all Xaa locations
  Clone ID: MRT4577_117115C.1.pep
MQRTHTTESMRVPFSNISTLNMNKAPRPGIERAPTSTNLTRPMPIQRLEGKVVMITGGGGKVGVESAGRLLIEGCNVALIDIEQTALEAAVPVLKAAIPTGVPIESRLLTIVADATKEADVEACAKKVVQRFSKLDAALLNCCQRGASKSIFDVTEDDFDRIMTINAKSAFLGVKYAATAMQTTSGSGSIIIRSSIAGLRGFPNLISYSASKFALRGIALTAXXNSXPLGIRVNTIHTSII

SEQ ID NO: 203430 - protein, 60 aa, Zea mays
  Clone ID: MRT4577_117116C.1.pep
KKKKKKKKKGGKKKKKKKKKKKKKKKKKKKRGRRFKRGRGFFSGVPAFLHPFFLGALHFF

SEQ ID NO: 203431 - protein, 74 aa, Zea mays
  unsure (1)..(74): unsure at all Xaa locations
  Clone ID: MRT4577_117117C.1.pep
SVPRFGFQYFLPAAKXGINQQIELAILRADRMGVKVLSLAALNKVSFSSSIYLASSLYCYNLGHVQPKHCCTVV

SEQ ID NO: 203432 - protein, 100 aa, Zea mays
  Clone ID: MRT4577_117118C.1.pep
TKKLIFSPFFVKQKQLKELAHYKVFDRLSQKTKQTLRPFPLNIINPTKIPFFRPLRGGGSEKRKFPGHKQIQFAGEKNPKYFISLFQAHFKGLVYKTKHP

SEQ ID NO: 203433 - protein, 158 aa, Zea mays
  unsure (1)..(158): unsure at all Xaa locations
  Clone ID: MRT4577_117119C.1.pep
MAGKGHGPAIGIELGTTYSRVGAWQHDRVPIIANDQGDRTTPSYVAYTDFQRLIGNAAXKTRLGMNPINTSFDAKRLIGRRFNDALCQRDIKLRPFKAITRPGEKSMIVRQHKGEEKQFAPEEISSMALIKMREIAEAYLGSTIKTAVVTDPAYFNDS

SEQ ID NO: 203434 - protein, 207 aa, Zea mays
  Clone ID: MRT4577_11711C.1.pep
LGTSRPAGNRSPPNPSARHSPWQPPPGSLHSFSLFSPPLALLWPTPLACAGRQALASAHPLLARSSPTQPLLSPRPLFLPIPDLPQSEQTGCRLLMASGWLLPQSERRINYLSTSWIIELLCRGSRRRKNAKHVVSSVVTQAPNFDGYQWRKYGQKWISKAKHSRLQLSTFILYQGHSLLVLSMVLAFVLLVDHLAPRPPLRQAHHS

SEQ ID NO: 203435 - protein, 88 aa, Zea mays
  Clone ID: MRT4577_117120C.1.pep
MGLQTINFIYSITHKNPIDTIMVLLVALALLALASSAISTHTIGGCGCQRPPPVRLWSPVRLRPPVHLRPPVHLPPSVHLRSPVHLSA

SEQ ID NO: 203436 - protein, 112 aa, Zea mays
  Clone ID: MRT4577_117121C.1.pep
RGGLVPLSFPLAPPWGCPPSSSGAAAPPFLVSSLGPLGGEVPPPPLVRVPSDFGWPGFSPARPICPSLPSFRRCLSLLVFPFCRARPMFPGWASKLPFLLPGGLSQGNPSHD

SEQ ID NO: 203437 - protein, 87 aa, Zea mays
  Clone ID: MRT4577_117122C.1.pep
KTPFLLTIPFGFQRPVFWKKTIKLKNAQLIGIPNISPSISKGYRKPGPPVNTFVYTHLSPELNPTSPPGMDNCFPTRFNHLKGLPFK

SEQ ID NO: 203438 - protein, 93 aa, Zea mays
  unsure (1)..(93): unsure at all Xaa locations
  Clone ID: MRT4577_117123C.1.pep
SIFTSNISFFPPKTXPMGRVTLNNPQPTIPKKAWMHTEPSRYEHTTSXLIYDGNTIALXCQENIFLTTTKVPITDIKQKYTKITFTPTQPDLK

SEQ ID NO: 203439 - protein, 71 aa, Zea mays
  Clone ID: MRT4577_117124C.1.pep
QSYLWKILTVYASVNRLLGKLSDKTLGARMEIQMSVLFPLHYINYIIPGHFTKHCHHNLAITIPGTSMACQ

SEQ ID NO: 203440 - protein, 34 aa, Zea mays
  Clone ID: MRT4577_117125C.1.pep
LATVALCWAPEPRIQAARTMPRSAGNRPVRTSMT

SEQ ID NO: 203441 - protein, 50 aa, Zea mays
  Clone ID: MRT4577_117126C.1.pep
LRALHSSSWRQCWQPIPWGTTSNATTRSFTCHHPCGICMGSNPNPARAAT

SEQ ID NO: 203442 - protein, 82 aa, Zea mays
  Clone ID: MRT4577_117127C.1.pep
RKLSCLIRRSLPLISHRKGQHLIGLLLRLASLACPSTKVNAIKYHTSVLEMLPFEETQQREKNSRRIPNPCSTCSICCSFND

SEQ ID NO: 203443 - protein, 69 aa, Zea mays
  Clone ID: MRT4577_117129C.1.pep
CFSRWSSCPLQFLFQDPLHCPVLSFVTLYVKSASYTICTSGLDPFYASLKFGAAPLMVAPWRSNTCVFQ

SEQ ID NO: 203444 - protein, 112 aa, Zea mays
  Clone ID: MRT4577_11712C.1.pep
SPSPPPSSHRAKQRPCKSHTFSYHAVTRDPRGCTPGRRSERNKKTLSRQHLRGRCPGLQCHPLLLLLQRRRPAQRAAAPWRRGVAGAGREQGSSAIGRAIGVGGGDRGGLGR

SEQ ID NO: 203445 - protein, 43 aa, Zea mays
  Clone ID: MRT4577_117131C.1.pep
KVIGPSNKRGLSIFSTSYGCRRPIVKSESKDFNFLNVGQEGIL

SEQ ID NO: 203446 - protein, 117 aa, Zea mays
  Clone ID: MRT4577_117132C.1.pep
GHWPPSPPHAVSSTAPLPGRRPRKLAGRPCSSFRVGALSPPARLDKVRSGRHFPMAARISPSELGLPSRRSPTHCSKSGRRSCSFPRRRTASRAMRWKMVWWLMFLLAGRVRLVCII

SEQ ID NO: 203447 - protein, 225 aa, Zea mays
  unsure (1)..(225): unsure at all Xaa locations
  Clone ID: MRT4577_117133C.1.pep
MAAAHLLAALSSSTALRPPLRLRSPQHPPHIRFNCTGRRPFPVVRAAETDAKNAKANAKAPNKAPAADGSSFNQLLGIKGAKQESDIWKIRLQLTKPVTWPPLVWGVLCGAAASGNFHWTVEDVAKSIVCMIMSGPCLTGYTQXTFKFSLSAFIYTFRDAAWETISTNKYVSQTFLLXTLNDWYDRDIDAINEPYRPIPSGAISENEVITQIWVLLLGGLGLGAL

SEQ ID NO: 203448 - protein, 175 aa, Zea mays
  unsure (1)..(175): unsure at all Xaa locations
  Clone ID: MRT4577_117134C.1.pep
LSSSSRLPTHPRCALGPGSGPTNNESLSRAQRHSRRSQWQPPSQTIEPHRCCRPWNGADCRRVEPLVEWNWQXSSSSAAGCGDLEVHDANDAPGNRSYLMNKARAFLELFFAMWFVMGNVWVFDARLGSLQRAPRLYALCVSLLAWNTVVYSLTFLSAASALRHTGQNEEVPAAC

SEQ ID NO: 203449 - protein, 113 aa, Zea mays
  Clone ID: MRT4577_117135C.1.pep
PALFGKGPFGPLVTGIWGCLNPFGLTNFFFLPLLSTVFFWSRPFLQGVWGPNFSPVFFRWTPVFGVVIIVWVPSLNQKVVSALPSYLVFFFLGSVFRLILPSPPLKKIKNKEN

SEQ ID NO: 203450 - protein, 82 aa, Zea mays
  Clone ID: MRT4577_117136C.1.pep
PRASLATRELEGIHGEENFLNSKGFPLLSYPLVIKPGMIGDKQAYLCHFLAAPLSHENIRKHAYITLQLYQCEVMDRRRGSP

SEQ ID NO: 203451 - protein, 94 aa, Zea mays
  Clone ID: MRT4577_117137C.1.pep
PTRHVRCACFTVCEAETLRTLAGHGCSYDGMSAVSCQGRVSIRWCRRRCMPFLQERGRGIQNVVVLEVSQGAAGIGCIRPRCTSRGRKNIEAQL

SEQ ID NO: 203452 - protein, 75 aa, Zea mays
  Clone ID: MRT4577_117138C.1.pep
KTSLCRGVQRKAWFLGGGHSKLSKGGPLTLFGEKNAHPRGGGKKKQPLPNLEKGGQWGAGAGGDFFLGALGPLFL

SEQ ID NO: 203453 - protein, 80 aa, Zea mays
  Clone ID: MRT4577_117139C.1.pep
VTPQFTSIHMDWVNIRIPKLALVIEAQHAFQLSSAQLMPFCSRAISILQRQLLKLELFFQTSPFLSLCDCTSIVLNYVYL

SEQ ID NO: 203454 - protein, 61 aa, Zea mays
  Clone ID: MRT4577_11713C.1.pep
VPVRNSRVDPGALWHPKTSGPGSRVCRVWENPHGVIRKDGLMWYSQCFPRTAKAIGFIKGR

SEQ ID NO: 203455 - protein, 67 aa, Zea mays
  Clone ID: MRT4577_117140C.1.pep
VLSMRKVCVLMSAINDLDLRSNAMQHSSISFLPPDGSRRLTRPRPAACHRNSIGWRGAADLTCSYFY

SEQ ID NO: 203456 - protein, 97 aa, Zea mays
  Clone ID: MRT4577_117141C.1.pep
CLLLPCVRVLMEIASAVWHTHVFYDVIWKICCNRHHGADRLQRVVGGFSRCLSDCSIRSDPLSVQLHQWQVIFSSDQCGSWWHTCSLCHGCTTFLFD

SEQ ID NO: 203457 - protein, 79 aa, Zea mays
  Clone ID: MRT4577_117142C.1.pep
MDPKVAPVKNVDAKVKVLDVAKVVMFEAGKEKSKVIRTSVAVHQITILNIAKDTKLSRFNTTVINILDQYHILKYPLNT

SEQ ID NO: 203458 - protein, 181 aa, Zea mays
  unsure (1)..(181): unsure at all Xaa locations
  Clone ID: MRT4577_117143C.1.pep
TRAGMQIFVKTLTGKTITLEGESSYTIDNVKGKIHDKEGIPPDQQRLIFAGEQLEDGRTLADYNIQKEITLHLGLRLMGGMQIFVNTLTGKTITLEVESSDTIDNVKAKIHDKEGIPPDHQRVIFAGKHVEDGRTLGDYNIQRESTLHRGLRLRGGMQIFVKTLTWKTITLGXESSDTTRQ

SEQ ID NO: 203459 - protein, 46 aa, Zea mays
  Clone ID: MRT4577_117144C.1.pep
NRSFGEYYSFLPKLGLDPPEVGTNFKFGGPKGEGEASVLFFAQGGG

SEQ ID NO: 203460 - protein, 107 aa, Zea mays
  Clone ID: MRT4577_117145C.1.pep
GVQIFVKTVTGKTITLDVEASDTRDNVKAKIQDKEGIPPDQQRLIFAGKQLDDGRTLADYNIHKESTLHLVLRLKGGMQIFAKTLTGKTITLEVESSDTIDNVNAKI

SEQ ID NO: 203461 - protein, 178 aa, Zea mays
  unsure (1)..(178): unsure at all Xaa locations
  Clone ID: MRT4577_117146C.1.pep
MKRLRGXWRTVVKTLTGKTITLEVESSDTIDNVKAKIQDKEGIPPDQQRLIFAGKQLEDGRTLADYNIQKESTLHLVLRLRGGMQIFVKTLTGKTITLEVESSDTIDNVKAKIQDKEGIPPDQQRLIFAGKHLEDGRTLADYNIHKESTLHLVLRLMGGMHIFGKTFTGMTMTLEVES

SEQ ID NO: 203462 - protein, 494 aa, Zea mays
  Clone ID: MRT4577_117147C.1.pep
LFNTLINFTCLLFHYPVSERSGKSVVELPPELCIVVMSPMSAITLRSFTFIPSIMYRIQCMLLSMNLKMQLGPSMQQFDIPALKILEALTTKNCQEEFSQESLETLGDSFLKYITTQHFFVKYKHQHEGMLTKMKKNVISNAALCQLACSNNLVGYIRSEAFNPKTWIVPGVGYDICDRSLRKLKSKRIADSVEALIGAYLSTAGEQAAYIFLKSLGMDIEFHKMPIERVITIKAEEFINVKSLELLLDYSFNDPSLLMEALTHGSYQIAGTTPCYQRLEFLGDAVLDHIFTDYFYHQYPECTPELLTDLRSASVNNSCYAHAAVKAGLHKHVLHSSSALHKRMADYLDKFEQSFSGPSHGWEAGISLPKVLGDVVESIAGAIYIDAKHDKGVVWRSMKRILEPLVTPDTLQNDPVKELQEFCDSKGYTLEYTVTRDNGVSSVVAEVRTEGTTYKATRTGFSKLDAKKLAASSVLRDLKAADTKQYSANGISCT

SEQ ID NO: 203463 - protein, 284 aa, Zea mays
  unsure (1)..(284): unsure at all Xaa locations
  Clone ID: MRT4577_117148C.1.pep
MTETPNVRTAHAGAVFSHTVDTVNAXIHDKGGIPLDQQRLIFAGKQLEDGRTLADYNIQKESTLHLVLRLRGGMQIFVKTLTGKTITLEVESSDTIDNVKAKIHDKEGIPPDQQRLIFAGKQLEDGRTLADYNIQKESTLHLVLRLRGGMQIFVKTLTGKTITLEVESSDTIDNVKAKIQDKEGIPPDQQRLIFAGKQLEDGRTLADYNIQKESTLHLVLRLRGGMQIFVKTLTGKTITLEVESSDTIDNVKAKIQDKEGIPTNQQGLIFIGXQLEDGRTLADY

SEQ ID NO: 203464 - protein, 465 aa, Zea mays
  unsure (1)..(465): unsure at all Xaa locations
  Clone ID: MRT4577_117149C.1.pep
GLASTSSERGDKTEKAEDVANPSDKVLPSAASTTLNAPLHFTSVASTSSLSNGLSYSPPKLTTPPPTDKPAISSAVSTSIFAVSSSSPAISSSPAFTGFSFSSSAPVGLSLVTSAKSDGTTAENKAASTLSFGIGGTKAEVKSVAPDASSKASSELFISPVSSSIASFSSSPATSTPTFTAVAPSSDAAGISVAAPSSTSTAPGLQSASTPSFTFPSSGNNLFGFSSPAQSTGLSTSSLAGSTSQPPAASTLFGSKPTQSDGTIQQTSQSSKPQSGSPFPVMTPGVGASSSGPGTLSFGLGASSTGSGTASFGVGASSSAPGTLSTFGAAAHSSGPGVFSFGAGTSSSGPSTASFGAATSTSGTGFGNSPFGTGATFANPFSSSSSTGFTFSSPSSSAGASTAASTSVFASTSTASSASAFSNPFGSSSSPPSTFTFGQSGSSGNTFAXSAASSNVPISTITFLI

SEQ ID NO: 203465 - protein, 187 aa, Zea mays
  Clone ID: MRT4577_11714C.1.pep
RHEQATTGCPRRHPGRRPAPPRPPALPRLHQVQTLSSQLNLACPIVWLRRQLARTNSRAGFRISRLLNPTEQNVKDTEKRGGGGGSDLAFERGLCRSEERPSQRHRRPPRLCRSARIRGDRGWEGIEDVERAATAWGSSWPEEDARTPGPACLHTQVASAREEQGEERRGRRSGGFLAAAARESGER

SEQ ID NO: 203466 - protein, 37 aa, Zea mays
  Clone ID: MRT4577_117150C.1.pep
RDAKRRILSTLLMTKSVKVAHGWRSQDASLRRGHRHA

SEQ ID NO: 203467 - protein, 107 aa, Zea mays
  unsure (1)..(107): unsure at all Xaa locations
  Clone ID: MRT4577_117151C.1.pep
RGAPPRRDTARTQPQRARGDAQXQPAPRSGAPRTASPRSWPRRPRPPPPRTXRRRRGPANDRAGAACRRGWTPGCTASLRLAACLSLSSCSDFVPSILPPAGIPAAT

SEQ ID NO: 203468 - protein, 83 aa, Zea mays
  unsure (1)..(83): unsure at all Xaa locations
  Clone ID: MRT4577_117152C.1.pep
KNPPPPPKIWGGXPQNTPPPSPPGXGPFKGGQGXPXPPPLGGPQSPGXGKISKGAPSLPPLEXGEPPPFPWGGPPPPHLPGGG

SEQ ID NO: 203469 - protein, 71 aa, Zea mays
  unsure (1)..(71): unsure at all Xaa locations
  Clone ID: MRT4577_117153C.1.pep
AHPIGKPIIGVHQDLLDTMWVDHQVHCKGRFWXXGFFLNICLFLLSHTRRGGDHTRGLATLGDTHVYILAG

SEQ ID NO: 203470 - protein, 169 aa, Zea mays
  unsure (1)..(169): unsure at all Xaa locations
  Clone ID: MRT4577_117154C.1.pep
LVAGRRGGPLVVRXVRLGFLRALAGVVALPAPXPVRGFGVRAAFAARVPAGXGRVXRXLLXGXLLGLLPVRARRGAGVALXVXRVPLXGVVXGXXRVRLARPXGRLRRRRXLGXPGPAAARPGRRXRRCRLRRRRXLXSARASXXXGEAAPXXCRFXLLLEASSFLPVG

SEQ ID NO: 203471 - protein, 98 aa, Zea mays
  Clone ID: MRT4577_117155C.1.pep
YALHGTIFPRLSGPLNGRTPEQFNTCIEREQGRARTEHLLFHKALPQDCRGKKLPSRLNIGPKHVPRLATLAQSSTVRASRQCRLICYFYSALPQVTV

SEQ ID NO: 203472 - protein, 65 aa, Zea mays
  Clone ID: MRT4577_117156C.1.pep
RIFVFSTPSFRHPKPTSSRSRPLLTYRSILHVPHLALPALDLVIIARLSSHMFITYDGGSCEVYD

SEQ ID NO: 203473 - protein, 89 aa, Zea mays
  Clone ID: MRT4577_117157C.1.pep
SCSCYPCTMYTQGSRLRILTCILQNSAAGRHMPMAHATIRSRNLHGGSMSLSGTETTKLVATQCTLFAMAALAEHRIPRSFRWQLTTNL

SEQ ID NO: 203474 - protein, 313 aa, Zea mays
  unsure (1)..(313): unsure at all Xaa locations
  Clone ID: MRT4577_117158C.1.pep
FETSAMIITFVLLGKYLEVLAKGKTSDAIKKLVELVPSTAVLVLKDKEGKHVGEREIDARLVQPGDVLKVLPGSKIPADGVVVWGTSHVNESMITGESAPVPKEVSSVVIGGTINLHGILHIQATKVGSGTVLSQIISLVETAQMSKAPIQKFADYVASIFVPIVITLSIVTFSAWFLCGWLDAYPNSWVAENSNCFVFSLMFAISVVVIACPCALGLATPTAVMVATGIGANHGVLVKGGDALERAQNVNYVVFDKTGTLTQGKAVVTAAKVFSGMDLXDFLTLVASAEASSEHPLAKAIVDYALHXHFFGK

SEQ ID NO: 203475 - protein, 39 aa, Zea mays
  Clone ID: MRT4577_117159C.1.pep
FTISILLGRTGNSDLSYIFFFLFNFIILGFWFLQSYLSA

SEQ ID NO: 203476 - protein, 207 aa, Zea mays
  Clone ID: MRT4577_11715C.1.pep
NSNGQKKKKKSGRSRCLLGSVVALVVALGVAILVLWLIFRPDNLRAYADSAALSRFDLGSGGGGGGDLLQYNLTVDIRVRNPNRFGIRYDYAEAQAFYDGDRFGFDPLQPFYLGRRSDARVTATFSGSAVMDDGGDALRTYRRESGEGFYYVTVKVYSDLSFRVRVVRRHDFKSKITCVLRLPVPAAGGNANSTAMTTLGTRCDVDF

SEQ ID NO: 203477 - protein, 76 aa, Zea mays
  unsure (1)..(76): unsure at all Xaa locations
  Clone ID: MRT4577_117160C.1.pep
MCHGSVRDPGDAENAHXLAAMDGASYRMRLFRAELLHYGSQAVAISLCDGVLHVASAVPMTYPIGDPDVELLAAAA

SEQ ID NO: 203478 - protein, 98 aa, Zea mays
  unsure (1)..(98): unsure at all Xaa locations
  Clone ID: MRT4577_117162C.1.pep
RPSDAGLLKXEAEILQLXLSYLTPLSLRCAVELGIPTAIYRHVGAASAAELVTALSLPSTKLPILRRLLRLLTASGVFTVYKQSTYDERYRISPVSYL

SEQ ID NO: 203479 - protein, 67 aa, Zea mays
  Clone ID: MRT4577_117163C.1.pep
DAWGSYDPSLERVLAPVFPLGGATFLPRSHFRARWRAPSTDHTVSSPVTASHHMDALARPTPSTTRS

SEQ ID NO: 203480 - protein, 78 aa, Zea mays
  unsure (1)..(78): unsure at all Xaa locations
  Clone ID: MRT4577_117164C.1.pep
GEGIRRVALVLLGEGSITFVFPSSGNSHRGNSEGHEQGGASGTXGGGEGRRNRGGGAGNALGANVEGKRCHPCRRKRR

SEQ ID NO: 203481 - protein, 50 aa, Zea mays
  Clone ID: MRT4577_117165C.1.pep
LSSLSLPKLDDYYQSSKSSSMLSTSALIKFAYPSFTSIPHILVYHIQSYI

SEQ ID NO: 203482 - protein, 132 aa, Zea mays
  Clone ID: MRT4577_117166C.1.pep
LHRKWDRLLAPQTRPCFSTKWWKELVDSGAARNDGMKKQRSESTDPTIEPGEPSHLYFITNVASTIHHNSASAIVNFENATPIAAPRRGCWRGGGVVGGRIAAVDDLLCWSWTEDILDRPPFTTPMHPHDKR

SEQ ID NO: 203483 - protein, 100 aa, Zea mays
  Clone ID: MRT4577_117167C.1.pep
PTTPLVKAHAPWRHRRIKKKQRQQKKNIPKKKKTPRKQKNNLNKATQFNTNTHIHHNLHLTKSTYASKTTAPNQTTATAATPARTPRNTYPSRLPKTPAD

SEQ ID NO: 203484 - protein, 103 aa, Zea mays
  Clone ID: MRT4577_117168C.1.pep
PSVPLHAVCRRINPAGSDLGAVRVRLGGAGRTGVGGCPPGRPAVSAERRAGISVAVWARHQRPGPQELGIGLGMCRGDSREGHRGATSPLILPKFHKSYYFFS

SEQ ID NO: 203485 - protein, 75 aa, Zea mays
  Clone ID: MRT4577_117169C.1.pep
LGDTIEGGREKKKKKKKKKKKKKKKKKKKKKKKNNNKKKKKKKKKKKKTPTTAPKRGGFFFSSRDFFGFWKFWGA

SEQ ID NO: 203486 - protein, 215 aa, Zea mays
  Clone ID: MRT4577_11716C.1.pep
LEVFRNNSDGTTEGSLFQIMNNTCTSFGSRLLRNWLTRPLCNRHLICARHDAVSEIFESMGPQHSVNNLQDGGDRSCTASVLSDLCIVLSSVLALLGRSPDIQRGISRIFHCKATAKEFVGVIQSILTSGKQLQKLVLEDIGIVSSPHKSVHSPLLRRLINTASSSTILNSAVKLLSCLNKDAADQGDMLNLFIASVDQFPEVAEGHVNVKMAEH

SEQ ID NO: 203487 - protein, 121 aa, Zea mays
  unsure (1)..(121): unsure at all Xaa locations
  Clone ID: MRT4577_117170C.1.pep
XSTXLTXLQXXHTINXQXTHKPKLXNXXKTXXIXIXXSXXXXSFSFXXXXXXXTPXTXXXXSLSSPHFXXXLQXXTXXXSXSXXXQXPTXXXXTSXXXXSTTXXXXXXXSSSPLPXHHXFF

SEQ ID NO: 203488 - protein, 46 aa, Zea mays
  Clone ID: MRT4577_117171C.1.pep
GHFIAVGLQRFSYLISYPTFYSKLYSIGNVVYGVKTVFCTLLYIQS

SEQ ID NO: 203489 - protein, 148 aa, Zea mays
  Clone ID: MRT4577_117172C.1.pep
GRVDEQKRSIMVSKLSCFLEGIGVCEQLMGIPIPLAYTRLTSRFLVLWHLTLPIILWEECKWIVVPATFISAASLFCIEEVGVLIEEPFPMLALDALCKQLHDGIKDVMEMQNSVHSRLVAKTATDHRGSRRENNGWPSSKREGAKID

SEQ ID NO: 203490 - protein, 97 aa, Zea mays
  Clone ID: MRT4577_117173C.1.pep
AGNGTALTSPSTLPRPVRVRPNRIHPPEIDYKLCLPSVSGGAPGYYEQPPIRGVGLRPITSHPLPVDWSMLPACTVEPISMIWTMAVQREGGARGRH

SEQ ID NO: 203491 - protein, 169 aa, Zea mays
  unsure (1)..(169): unsure at all Xaa locations
  Clone ID: MRT4577_117174C.1.pep
PPSVHLINIFVPLAQFAEHTARASPPSDGRLDGQCWRRDERGGGGGARGGGPVLRVARPHPLLVGLLHLCLGRRRRRPPAPPPQLRCAXAAALDLWTSQPAPVHERRRRLLHLMGLTGDPSLAGFEIARSASGEAAGPPPASPVSVVQVRRGRPGLRREAGARGRAVCA

SEQ ID NO: 203492 - protein, 63 aa, Zea mays
  Clone ID: MRT4577_117175C.1.pep
LSNSNEPYLVGTVHTLQYPLAADLALCRGPSAHNIPPLQNSLSTSYSPEDLIHTKLALDDSQY

SEQ ID NO: 203493 - protein, 57 aa, Zea mays
  Clone ID: MRT4577_117176C.1.pep
LERSVRVDRCLCCFLFNNAAARHRMLCSVCMPYCAMFAVEQISAQPPYLLYGTRKTW

SEQ ID NO: 203494 - protein, 51 aa, Zea mays
  Clone ID: MRT4577_117177C.1.pep
QANHGLSVKHRIELTHVRSSPKNIYDMVHRADFYLFYGVGHSCNLSVIIFL

SEQ ID NO: 203495 - protein, 120 aa, Zea mays
  Clone ID: MRT4577_117178C.1.pep
MADYVYGPGRNHLFVPGPVNIPDQVIRAMSRQNEDYRSPAVPALTKTLLEDVKQIFKTTTGTPLLLPTTGTGAWESALTNTLSPGDKIVSFLIGQISLLWIDQQQRLNFNVDVVESDWGY

SEQ ID NO: 203496 - protein, 71 aa, Zea mays
  Clone ID: MRT4577_117179C.1.pep
RVGGPNPLFLTPPFPRDQQKKFSNLTKKKGEARDLQKIHPSSGPQNTWSRLFYRSFKHKLWAHLGGHLLHG

SEQ ID NO: 203497 - protein, 100 aa, Zea mays
  Clone ID: MRT4577_11717C.1.pep
PRPRIPGSAPGAENGAYPSENGKAPGLRGDLGPSSRWVGEGLENQGSGGAAETCSPGLKIRGGKAGPPFPVESHAPPPGWKFPGPQPLVLLLGPRGGPHL

SEQ ID NO: 203498 - protein, 50 aa, Zea mays
  Clone ID: MRT4577_117180C.1.pep
KRRGVAHIKTLYFKLWFYHNLKYRGMPFGIGKIMVFKYRVFRCILKHLLV

SEQ ID NO: 203499 - protein, 85 aa, Zea mays
  unsure (1)..(85): unsure at all Xaa locations
  Clone ID: MRT4577_117181C.1.pep
GITLYRXFSSTGCWPECGAEWPGCWLCHWHCRRCWCPGHCPAASTVRGHDPDPHLCGGAWPLRSHRGPNPLHKVVFFHHQSQDRM

SEQ ID NO: 203500 - protein, 106 aa, Zea mays
  Clone ID: MRT4577_117182C.1.pep
RGRPGRGYILRHLACSSVVDGVDEDSSQEPECIRKAIFLPPRSMLLMSGEGRYAWHHYIPHHKIDAVDGQVIKRNSRRVSFTFRKVRMGPCDCEYKQFCDAHSKRC

SEQ ID NO: 203501 - protein, 33 aa, Zea mays
  Clone ID: MRT4577_117183C.1.pep
CADRLLAHGVALAPTSLKPLVWLTHTSASSTAS

SEQ ID NO: 203502 - protein, 128 aa, Zea mays
  Clone ID: MRT4577_117184C.1.pep
MGRTTMLLMALALALTAVALATPPALRRSRFLADKTPPPLSYYDCVRKPPSVCLEPGSPGNTCCKGTCTNTLSSVEHCGNCNRKCKYGDTCCDGKCVDLLKDKKNCGECSNQCANSVKCEFGMCDYAG

SEQ ID NO: 203503 - protein, 126 aa, Zea mays
  unsure (1)..(126): unsure at all Xaa locations
  Clone ID: MRT4577_117185C.1.pep
MLAIAYSSMGGVAGHYANVCPMRNPNTSARGNSQGXGLGFXGLGQADTDSRQQXGYSIARVNQINVEATKDGPNIVIGTFFINFVPATILFDSRXLHSFISAXYVHANNLPYLALHRPMTVITPKG

SEQ ID NO: 203504 - protein, 109 aa, Zea mays
  Clone ID: MRT4577_117186C.1.pep
APPGFPFLVSGCFFFGICEGIPFSPGNRFSPFFPQVGSGVGSPYYGPPFCWISPLGCSGPGPRVWGRGVNKRGAHKFLFLQPDDSFLVPRFRVVCKPNPQPGFYIKGGG

SEQ ID NO: 203505 - protein, 85 aa, Zea mays
  unsure (1)..(85): unsure at all Xaa locations
  Clone ID: MRT4577_117187C.1.pep
NEAIYDICRRSLGIERPTYTNLNRLVYQVISSLTASLRFDGWDILVEEAGAHXCMSLILAPYKRMHFMXISSYAPVISAEKAYHE

SEQ ID NO: 203506 - protein, 27 aa, Zea mays
  Clone ID: MRT4577_117188C.1.pep
HVLQQRPVGALTTEAHAAHATFFIYTS

SEQ ID NO: 203507 - protein, 79 aa, Zea mays
  Clone ID: MRT4577_117189C.1.pep
DLAQETRGFIPWFGQVQNLHTTRCGVPTDEGCTQPLSSDPMIDLNTTVFFFLYSFPLVRNLHNLESLTLTIRIKVKALE

SEQ ID NO: 203508 - protein, 213 aa, Zea mays
  Clone ID: MRT4577_11718C.1.pep
ASVRAYGSSGVVARWPSPYTVASGALLLASLFAPLLPSLRWLALAAACAGAPPMVLRALAAGLALDINALMLVAVAGAAALGDYAEAGAIVFLFTTAEWLETLACTKASAGMSSLMSMVPPTVVLAQTGEVVGVRDVGVGAVVAVRAGEVVPVDGVVVDGQSEVDESSLTGESFPVPKQPQAEVWAGTMNLDGYIAVRTTALADNSTVARMQR

SEQ ID NO: 203509 - protein, 108 aa, Zea mays
  unsure (1)..(108): unsure at all Xaa locations
  Clone ID: MRT4577_117190C.1.pep
MHVEQLPDCAPNVDGRAVETSSARENFDAAEFKKTDGSEEELTEDQIDAFIMSEQITALEGNNAPIDNKYTPQVXMEFKTRGDAEHFLFFYGFLAGFKPAITHTFRTS

SEQ ID NO: 203510 - protein, 174 aa, Zea mays
  unsure (1)..(174): unsure at all Xaa locations
  Clone ID: MRT4577_117191C.1.pep
QDPCYVTFHDEEWGVPVHNDXMQTENFFVHLCYLSSVKXIKHSKDIWPWSFNRRLFELLVLSGALAELTWPEILKKRQLFREIFMEFDPAAVSKINEKKLVAPGCVAHSLLSEQKLRAVLENARQILKVCSAYSIHHQFGWHFCWYGFCLLQVCAIRCRSLTNLDPLIGTAGVF

SEQ ID NO: 203511 - protein, 1491 aa, Zea mays
  unsure (1)..(1491): unsure at all Xaa locations
  Clone ID: MRT4577_117192C.1.pep
MSGTAVVHAARQHTTAQTSRTPSRAALGALSAARELLRHPPSSTASPGAMKQWRDDVDRLLGMAHSTLTRSRSWSSRRQHEASSSVRSPSVRGAQTNDLRAELNRRRAGEDAWISLERARERRQNIEGRNLDQDFAVVAPQAPTGTWSQAGVPLAGVGCATLADHLRATSWPPKFWPHLLEKYDGTSNLSEFLQVYVTAITAAGGNIAVMATYFHVVLSGSARTWLMNLAPGSIYSWEELCARFVANFASAYQQHGVEAHLHAVRQEPGETLRTFISRFTKVRGTIPRISDASIITAFRQGVRDKKMLKKLAMHDVETVPTLFTLADKCARAAXAVHGTRPRRPGLPSRVSSPRTAKRXKNHNYDRPQFPAPIVAAATRGRGERNKRPWPLGGNSGSCPVHPNANHSASECREIIKLTKRVMAAXNENSGINHPRGTSRTSSLEIPTPGXDSDHRNKLYVMYDGSWELTSRRNVKSLRREVLSATPGVPKAAPHQRWRSTTISFGAPDCPDNMAGASILPLITAPVIANMRLHHVLIDGGAGLNAISHAPFKQLQIPGSRLGPSHPFSGVGPQSVYPLRSITLPVTFGTEENFRTENVVFDVADVNLPFNAIIGRPTLYRFMDIAHYGYLVLKIPSPTGVLTMQGDRAAALAAVEKLLAQTTEGGILQXLQXNADVFAWEPSQMPGIPREVIEHCLKINPDARPVSQKPRRQSFERHGFIRKEVRKLLDTGFIEEMSREDRKHTAFVTVDGLYCYVVMSYGLKNALPTFVRAMSKTFGDLIRDKVEVYVDDIVVKTKRGSTLVEDLTLVFDKLRATRTKLNPDKCVFGISAGKLLGFLVSYRGIEANPEKIGAIEAMRPSARVKDAEQAFQELKQHFVSLPILVAPEPEEPLYLYIAAAAEAVSMVLVVERPAPESQEREDSGPATRVRTIQSPVYYISEVLHKAKTRKLRHYFQAHRIVVVTSFPLRAILHNSNATGNIAKWATELAEFQLDFQPCHAIKSQVLADFIVEWTPPSSVPEGLGPDSDPTPVEPRGPIFTETHWTLYFDRSTRQQVGGAGVILTDPSGDQVKYMVHLEFKATNNMAEYEALIFGLSAALSLGIRQLLVKGDSQLIIKQVRRECSCNEPRLTAYLLHVRKLVKDFTALELQHVPRADNSVADDLSMKASTWAPVPEGVFERRPLRPTAQPAELGEGGETSTSKLAVLVETQYPPKTSGPDAWISEIRDYLKENILPKDHVSAECIVRLAKRYAVVEGDLYRRGANGIHMRCITQEEGRELLTEIHGGESGSHSSSRTLVGKAFRHGFYWPTALQDAAEMVKSCKACXLQMIPPSWPFAVWGXDILGPFPRAIGGYRYLFIAIDKFTKWPEATSVVNITQGATVAFLKSIVCRFEVPNRIITDNGTQFTSRIFQEYCEGIGTQLCFASMAHPRSNGQAERANAEILRGLKTRTYDCLKKHGVNCVSELPFVLWGNRTTPSRATRETPFFLVYGA

SEQ ID NO: 203512 - protein, 72 aa, Zea mays
  unsure (1)..(72): unsure at all Xaa locations
  Clone ID: MRT4577_117193C.1.pep
NAYGSPNLGQGGRLDYSALSXDLNVTPAGSLVVECIARSRLLRSRGTLGLSSVRHGCRSHHARTRHRSRGGA

SEQ ID NO: 203513 - protein, 120 aa, Zea mays
  Clone ID: MRT4577_117194C.1.pep
LLFYRAPSLFFFFFYFFILRGKKQSKGGKRIKANPPCIGQELDNLYSRPTPIKVTGTAQNPPLESIFLPKHHPSHGKKKDFLGTDDTTQVSHKGHNGLPDCFSNLTRDLSNIALLHFPQG

SEQ ID NO: 203514 - protein, 65 aa, Zea mays
  unsure (1)..(65): unsure at all Xaa locations
  Clone ID: MRT4577_117195C.1.pep
KGGRGPMGLXCFRFMGKCXRRATSRWAQXRRWERRESAIGGGACNNAASLTRKGRGGGGSPVSDL

SEQ ID NO: 203515 - protein, 198 aa, Zea mays
  unsure (1)..(198): unsure at all Xaa locations
  Clone ID: MRT4577_117196C.1.pep
SGFSVAMPKVPAFVADMRRVRDLNPSAFCGMDSKMGVLMRYVRAASADLGKEEDSLDXDVTYYRSYNEGTPRMHADVFDELEQMALRKYGALPHWGKNRNFAFDGVIARYPAAARFLEVKDRYDPDGIFSSEWSDQVLGIRGSPNVVGPGCAIEGLCVCSDDLHCAPEQGYFCRPGKVYTDARVCALERRRTRLVDEL

SEQ ID NO: 203516 - protein, 159 aa, Zea mays
  unsure (1)..(159): unsure at all Xaa locations
  Clone ID: MRT4577_117197C.1.pep
HPKAPKLKTFLTITKETPGKKTQAGARAIGGIKVLPYWRKPKKSAQQEKPPFKGQPILKPPPGXKPRKKLTGKPRAPRGGKKKAPPYGVTTTTPKPGGNRGGGGDIFRPGGQRVQGGGTQAAPPGPGPGTGKGEPQHGIPWGPPPGGGGGGVLKKGGGK

SEQ ID NO: 203517 - protein, 161 aa, Zea mays
  unsure (1)..(161): unsure at all Xaa locations
  Clone ID: MRT4577_117198C.1.pep
RPPVLVESPFTIGGGGGGVSPSVWWGCENPLLQPFRIQQAFSAGIFPLSPLLLQQSSPLLQQLRGGGXLSLNIXAHHLHQLVLANLAAYSHHPLFLLFSQLAALNSASYLLLPRPFILLAAGCAQHFLPFCQLAAFISPAYLPPPLLLPFSQLALVSPAAC

SEQ ID NO: 203518 - protein, 53 aa, Zea mays
  Clone ID: MRT4577_117199C.1.pep
RSSEFGSSGDFQGTFYNTLDSIMDPGDVRKGLGDNGTCTKTKHMDPCGASLVP

SEQ ID NO: 203519 - protein, 136 aa, Zea mays
  unsure (1)..(136): unsure at all Xaa locations
  Clone ID: MRT4577_11719C.1.pep
LTSADKPVYQTXRWYRATCMHITRSPDDRTASYKRGTCEVPIRSDWRPCLRTVSGSRIQTWTHWRWAMLGAPGIMTTDALGLINLERGAGEDYASPDRRPRTLTRPGATGNTADPTDDPPPTTTIRPAPPHHGTGP

SEQ ID NO: 203520 - protein, 55 aa, Zea mays
  Clone ID: MRT4577_1171C.1.pep
SCELRYQIRELKRMLRTAASGIINASGFHYLLTQEASKEKTSQAHRQTRHQSPPS

SEQ ID NO: 203521 - protein, 36 aa, Zea mays
  Clone ID: MRT4577_117200C.1.pep
EQLLHDEFYIGLGCQPCTGEGYHALPHALMILLASC

SEQ ID NO: 203522 - protein, 59 aa, Zea mays
  Clone ID: MRT4577_117201C.1.pep
KMLEFIVVIIFESLLNGYVEREGHGLVVLDIAPAGLRLPLLELHSSILILGVPPVKLNE

SEQ ID NO: 203523 - protein, 78 aa, Zea mays
  Clone ID: MRT4577_117202C.1.pep
HQFMEKDNQCDKQEGDSSLWVVSFQKESSSSLWVESFVEIGVCGRASSRWIGRPKKKKKKKKQKKKKKKKSTLRCYHC

SEQ ID NO: 203524 - protein, 62 aa, Zea mays
  Clone ID: MRT4577_117203C.1.pep
NSCGNVLKIHNMVSSHTSNLAACLFIEFHSFCWSSTTFTFNINSCCAYLLGSVMNRKTELEL

SEQ ID NO: 203525 - protein, 45 aa, Zea mays
  Clone ID: MRT4577_117204C.1.pep
EGILGEVLASTSMTNIATMQGRMNTTCFGGDCASVGGSQCTLYSH

SEQ ID NO: 203526 - protein, 102 aa, Zea mays
  unsure (1)..(102): unsure at all Xaa locations
  Clone ID: MRT4577_117205C.1.pep
AAAARSSXGSSAAXPCSSSXXXXXXXXXXGXCXXXXXAGSXLSPATKHEHSSSGTTTATNDGATLLLSIAATWVPRSTETETQNTDVLAYLRCVCSLSEVRX

SEQ ID NO: 203527 - protein, 101 aa, Zea mays
  Clone ID: MRT4577_117206C.1.pep
DIDGMSYEELLALGERIGTVKTGLSDDALSTCLNRSLYMPTAPGSHEDCETKCSICQEEYLSGEDVGKMACKHYYHLSCIEHWLRQKNRCPICKSVALKTK

SEQ ID NO: 203528 - protein, 57 aa, Zea mays
  Clone ID: MRT4577_117207C.1.pep
TYHRMSYVRLTLIIYQISPILLTRICRYGSLRSAIAAKDAVLSVVLLHWLHSPTRTF

SEQ ID NO: 203529 - protein, 67 aa, Zea mays
  Clone ID: MRT4577_117208C.1.pep
KSYELRFAVSSSFSMLQGLRPGHPPYMYALCPATWVCPNIRSFRSSSASVLRQSPDSVVVMMIITSS

SEQ ID NO: 203530 - protein, 49 aa, Zea mays
  Clone ID: MRT4577_117209C.1.pep
TLPTPPHYSRWLVRTRFFRLLLSISLSRIRTIYLIIIGTGHYGRKTLDS

SEQ ID NO: 203531 - protein, 80 aa, Zea mays
  Clone ID: MRT4577_11720C.1.pep
PTVSLFFFYIPQPVGGDSTNPWLSGQLACTYAILILSDDGLFFTDQIIVTIFMAVNINVDYYLDGALRQTSLKAQRQEPH

SEQ ID NO: 203532 - protein, 105 aa, Zea mays
  Clone ID: MRT4577_117210C.1.pep
VHMIWNLIRVGAAQADVMVPAVAAATPTVRVSSSTATSVLKLASAVVAAVLGVAVDAVPVLDLRLLILYGRMGLLVRGGGEQGNGEQERSPEEPVGADNGSSRRY

SEQ ID NO: 203533 - protein, 363 aa, Zea mays
  Clone ID: MRT4577_117211C.1.pep
MVCWYDLAEVVALTESIGKPLAEVLKELGKRVPDSLVKTRIEDDGFTIKFYFACGQVKSYERAIISVEQLNAILRQASKTKEKEDLRKIDNWQYISCVTLWVRFLCCHYKDYNLHPLFSQVLQLLFDCLELREVSQKEQTQRTKINFSSLLKVPKNLLKPRDFQEECILSAIQILSAHFAQWSYHVSFLEVATIPLVLLKRLHEQTTVESLRHPIKCLIDQVTENKDFIERKREVVSFSPNDKASVDSFLQSIASHLLFNIWPAEFAEKHITVECRRRSPHRMSDRDAVAPAGGGDRKAAKLGSWSSMSSNYGNKKRKSSSSSFGRRSTSTCEERQGVFRMLMSWNQESRFSNKIKTTTSKER

SEQ ID NO: 203534 - protein, 73 aa, Zea mays
  Clone ID: MRT4577_117212C.1.pep
MWVRVLYPKAEDLNKLSALHMNINTAKGLHDLLKTNLFPKVTIKMLVVGAGYLNLTKDVNTLLNEMHIHNPTS

SEQ ID NO: 203535 - protein, 675 aa, Zea mays
  unsure (1)..(675): unsure at all Xaa locations
  Clone ID: MRT4577_117213C.1.pep
MAKKLGKKARKFARKNLQSAAKRNRKIRNQFKHRRGPRGGGSAGREDGDEHVLQRVLDPTMVTDDAAATLIHGLEFPEDDAELDADLSDSDGYLSEDPGCPYYSDSEDEKAAKDCIMEEGLDRQNDDMNRDIKKQKKKLKKLLDKDPEFANFLEKWQSELESSRSKGDSDEEGMDSMDDDDDSNDGNLPNAKVLTRKTISEWCQLVSKEPKAPALRNLLNAFRDACRYGVHSDGPLMQRFQSARVFYQIIMFVLSESDNIFRALLEIQDDVNKGKIMNLRNSKKWLTVDPLIKSYLSSSLDLLSQLTDNKILAFVLTRLRVSVVLFSAYPSTSSRLVKILFRLWASGDRSLSLSAFLMIREVASLLPDCLDHCLTKSYNTYLASTNLVNDRNTKHIYFLMDCLVELYSLDVQKSYERAIISVEQLNAILRQASKTKEKEDLRKIDNWQYISCVNLWVRFLCCHYKDYNLHPLFSQVLQVIRGVAHLFPGTRYLPLRLKLVQMLNELSTCSQMFYPIPSLLFDCLELREVSQKEQTQRTKINFSSLLKVPKNLLKSRDFQEECILSAIQILSAHFAQWSYHVSFPEVATIPLVLLKRLHEQTTVESLRRPIKRLIDQVTENKDFIERKREVVSFSPNDKASVDSFLQEEGQQXTASFTRFYASVAENRQPKWRKTL

SEQ ID NO: 203536 - protein, 315 aa, Zea mays
  unsure (1)..(315): unsure at all Xaa locations
  Clone ID: MRT4577_117214C.1.pep
SEFVSIGNCLDHCLTKSYNTYLASTNLVNDRNTKHIYFLMDCLXELYSLDVQKSYERAIISVEQLNAILRQASKTKEKEDLRKIDNWQYISCVTLWVRFLCCHYKDYNLHPLFSQVLQVIRGVAHLFPGTRYLPLRLKLVQMLNELSTCSQMFYPIPXLLFDCLELREVSQKEQTQRTKINFSSLLKVPKNLLKPRDFQEECILSAIQILSAHFAQWSYHVSFLEVATIPLVLLKRLHEQTTVESLRHPIKCLIDQVTENKDFIERKREVVSFSPNDKASVDSFLQEEKVSRTASFTRFYASVAENRQPKWRKTL

SEQ ID NO: 203537 - protein, 131 aa, Zea mays
  unsure (1)..(131): unsure at all Xaa locations
  Clone ID: MRT4577_117215C.1.pep
NPPHAFLAAEDPRSSAPERPXVPSPRIRSFASDRLFSSLDDASASAAASAAETDYVTEPDAQEESGQEETEGEVDERGDRSIVIPPVPRAKLSEDEPKDVASCAHGXLDEELQSQQDGKXGVRPGPCTAGF

SEQ ID NO: 203538 - protein, 59 aa, Zea mays
  Clone ID: MRT4577_117216C.1.pep
RVRFVSVNLRCSKVSSTMNASLPMVMGGEMVKVISWYDKEWGYSQRVVDLADIWANQWK

SEQ ID NO: 203539 - protein, 204 aa, Zea mays
  unsure (1)..(204): unsure at all Xaa locations
  Clone ID: MRT4577_117217C.1.pep
MDTARKKIRKEKGXLEPSEYEDSVAQDFFDLENGSQQLKRDLKDLYINNAIQMDVTGSMEADCQSIVRHTRHALSGFREDAMTGLRLEQHDITKFEQGSDVVILLLTRRXVNGTSQKGYRLVSAPRIMTLTAVHDGILDDVVYPAEIXVWKRVRYRLDGSKIIKMFXDPKERHNTVYKVKTCTAVYRRLCGKDVIFEYPMTEDA

SEQ ID NO: 203540 - protein, 88 aa, Zea mays
  Clone ID: MRT4577_117218C.1.pep
KKQKKTNYKKKQKKKTKQREGEKYKYMIRRHLSGTHSRLSALLRGGGAVRRRRVRTLRDLLRPCQCQRAIGCRLPGVWRQRLCQRSDC

SEQ ID NO: 203541 - protein, 41 aa, Zea mays
  Clone ID: MRT4577_117219C.1.pep
FSYRSISALMLWSARFYLRSEYTIDIAILPYSKLQDHGRVG

SEQ ID NO: 203542 - protein, 62 aa, Zea mays
  Clone ID: MRT4577_11721C.1.pep
SCLWALRAACSWSPRSRRSHSYGCIALVPRGHCAKLHSVPALPYLAVKRPSVYASAPIANGP

SEQ ID NO: 203543 - protein, 193 aa, Zea mays
  unsure (1)..(193): unsure at all Xaa locations
  Clone ID: MRT4577_117220C.1.pep
MLQTRYVSDPEFVIIPIEQYKPHDRIRVFITKVEKTTKGPHIYVSRTHAGLLKRLFEMEVPEIYDGTVEIRSVAREAGDRSKISVYAENTDVDPVGSCVGPKGQRVQRIVDELKGEKIDIVRWSNDPVEYVANALSPSQVVKVLVDEEEKATTVVVPDHQLSLAIGKRGQNARLAAKLTGWKIDIXSESDAKH

SEQ ID NO: 203544 - protein, 43 aa, Zea mays
  Clone ID: MRT4577_117221C.1.pep
VERGARARREKGSTTLMHVTRDFVVNSSSRSKSPQAGVSGSQE

SEQ ID NO: 203545 - protein, 62 aa, Zea mays
  unsure (1)..(62): unsure at all Xaa locations
  Clone ID: MRT4577_117222C.1.pep
IFILNHNAYGGGFFLFDXMRQDEGDYLVHGKQFRQTSLQPEQTTTRLNLERWEKKQDCTSLK

SEQ ID NO: 203546 - protein, 53 aa, Zea mays
  Clone ID: MRT4577_117223C.1.pep
LIHNSHTLQLMLHHSMTRLPYTSRGTHNIVSVINTPLCQRAIYKLDQHHYAQP

SEQ ID NO: 203547 - protein, 82 aa, Zea mays
  Clone ID: MRT4577_117224C.1.pep
GGECGLLGRAYFRTSKKHSSYVQMMGLFILEYKLHSLVLNPVLVAPDDGESSSPLFLFYQLCCNAGYVSEKTMYMLSWSRST

SEQ ID NO: 203548 - protein, 282 aa, Zea mays
  Clone ID: MRT4577_117225C.1.pep
MGRPGYITVPILSVLAAIGYVYYTTVFLAIPAWLGLSTATGLANAAAFTALAAACVATYAVAVSRDPGRVPASFVPDVEDAGSPIHEIKRKGGDLRYCQKCSHYKPPRAHHCRACKRCVLRMDHHCIWINNCVGHENYKIFLVFVLYAVIASFYSMVLIIGGAVHLPKDEQPSSDSSRTSIVVCGVLLCPLALALMVLLGWHVYLILHNKTTIEYHEGVRATWLAEKAGNVYHHPYNLGIYENLVSVLGPNMLCWLCPISRNIGNGVRFRTSYDTPLSTSAM

SEQ ID NO: 203549 - protein, 100 aa, Zea mays
  Clone ID: MRT4577_117226C.1.pep
WRSPAWLGLSSATGLANAAVFSALAAACVATYAVAVSRDPGRVPASFVPDVEDAGSPIHEIKRKVHSTHGPCLPPSDRLGHEPLQISRAPPPRAVKFRST

SEQ ID NO: 203550 - protein, 68 aa, Zea mays
  Clone ID: MRT4577_117227C.1.pep
IGKVLESGFCPKRAPQKPAEASPQTFLAKEGYLKPLVLGPLRAPEKGGRAPRDEPFKGPIWGLKYFKG

SEQ ID NO: 203551 - protein, 285 aa, Zea mays
  unsure (1)..(285): unsure at all Xaa locations
  Clone ID: MRT4577_117228C.1.pep
MGRPGYITVPILSVLAAIGYVYYTTVFLAIPAWLGLSSATGLANAAVFSALAAACVATYAVAVSRDPGRVPASFVPDVEDAGSPIHEIKRKXLQGGDLRYCQKCSHYKPPRAHHCRACKRCVLRMDHHCIWINNCVGHENYKIFLVFVMYAVIASFYSMVLIIGGAVHLPKDEQPSSDSSRTSIVVCGVLLCPLALALMVLLGWHVYLILHNKTTIEYHEGVRATWLAEKAGNVYHHPYNLGIYENLVSVLGPNMLCWLCPISRNIGNGVRFRTSYDTPLSTSAM

SEQ ID NO: 203552 - protein, 67 aa, Zea mays
  Clone ID: MRT4577_117229C.1.pep
NQNRTTHWVAGDAQHIDFKTQQGQKPPNGGETRIHATKVNRQQLRRETMTRGLQIADKGNVIGEPQF

SEQ ID NO: 203553 - protein, 219 aa, Zea mays
  unsure (1)..(219): unsure at all Xaa locations
  Clone ID: MRT4577_11722C.1.pep
MELGMTMEVAKIIELVVSKSHQAGSSRERAMAMDPVLKVAXGXAAFAVFWVLAVFPAVPFLPIXRTAGSLLGAMLMVLLGVMSADDAYAAVDLPILGLLFGTMVVSVYLERADMFRHLGRLLXSWRSPGRAGTLLVXXCAVSALASALFTNDTXCCVVLTEFILKIARQNNLPPAPSLVXLASSANTGSAATPIGNPQNLVIAVQSGIXSFGGFVFGIL

SEQ ID NO: 203554 - protein, 34 aa, Zea mays
  Clone ID: MRT4577_117230C.1.pep
FIDCASSYQFSLCLNGPLPQTKLHNHLLYAKHYT

SEQ ID NO: 203555 - protein, 51 aa, Zea mays
  Clone ID: MRT4577_117231C.1.pep
LTILFIFLTCKFVHGFFFNYCSTGLRTFTNIAGGKGPKAELAAPSVLFSSS

SEQ ID NO: 203556 - protein, 204 aa, Zea mays
  unsure (1)..(204): unsure at all Xaa locations
  Clone ID: MRT4577_117232C.1.pep
VRRLLCSARPVPIQTPTNPSVSDHRHHQQQLWNFAQRTTALPFGRGAFTLXQRTPLLTEVLVFPKLVLAGRLPAQQNATVNLDLSSRSVSEFKSWAEFHNGVAAGLRLAPFQEKMLRTWIQYNRPSEPNXTHAGLLLAFGLHEHLRVLTVTDAYGYLSQEHDITTXGLLLXGLAASHRGTXMDPAISKGKWKNVPPTDSYTDLS

SEQ ID NO: 203557 - protein, 115 aa, Zea mays
  Clone ID: MRT4577_117233C.1.pep
ILYCTSNTWHEGPRLRVKLMSCTACVLDEKIYVSGRCKDGDSMTFQVFDTNTQTWDPLSVPCTETQHDFHYKISRFDGKLHLVSYKSVDAHNFNEGRWDLVTPSIEHNKCLYDCY

SEQ ID NO: 203558 - protein, 232 aa, Zea mays
  unsure (1)..(232): unsure at all Xaa locations
  Clone ID: MRT4577_117234C.1.pep
TFHREITMRFGRCPYCRTMVYQNPQAVVFFCSKCRTPIRGKNPSSTEGIDQALSRLEILSVDNASVFSDELDACQDIVAPPRSSSPAPHGGFGSMWRGHPATNGAPASAGCDDSVVDSDEQDRIRLFSRRTRRTSGSDSSVLRXYADGSGFGDGGRVXSPRNACERQRHRRRRSLLGSQAFETSTGHDPYGVAPSLLRDPSFHNELVNALDNLPRLVAAIEPSSSSSGRRAS

SEQ ID NO: 203559 - protein, 318 aa, Zea mays
  Clone ID: MRT4577_117235C.1.pep
MEASATGAADPHFPIYISSDEEDGHAYFIESYSPEEVQIQQTILLSLYTSRAQTAAACSASSSYPTGASSTPKAGTSSTPKETPIDHKRKRKLKLEDDTNDSKMKRSTRNRFNCAICFEMVLAAEKFVVSHCPHAFCNSCIGRYVAGKVADNVAVIGCPDPACETGFIEMDLCRDIIPPELFDRWSVVLCEELLGDDKFYCPFKDCSALLLNDDSAKIRETECPHCHRLFCARCHVPWHDGIECKEFRKLGDDEKGENDLMLKKLADKEKWQRCPKCRMYVSRKSGCLLINCRCKQYFCYHCAAPMDRETHYCENCKH

SEQ ID NO: 203560 - protein, 54 aa, Zea mays
  Clone ID: MRT4577_117236C.1.pep
NVHLSIPMICFLTKKILNPKGYTSELLVEFQSHILKQLCCPNLYILRRIHLILY

SEQ ID NO: 203561 - protein, 144 aa, Zea mays
  Clone ID: MRT4577_117237C.1.pep
QGANTAFFFFGVNVRSTLPVKRKKGGPPLFSTNPYGCSPGGGEDKFVIKSPLLAWVNPLHVLGAFHSPGGGIEPPLNSGSPLGQLFFLLLDKKPILRFFAKDPLKKIALERIVRPSQENALFYLLPNLPPFKKCSPPPEYGTLQ

SEQ ID NO: 203562 - protein, 69 aa, Zea mays
  Clone ID: MRT4577_117238C.1.pep
LVCLGPTTVVPYGTWAEELVPGAVYRATGGCIQQSNWRVVLVRSYQSLEAHTTHGIHDTEPAGGVTLLE

SEQ ID NO: 203563 - protein, 144 aa, Zea mays
  unsure (1)..(144): unsure at all Xaa locations
  Clone ID: MRT4577_117239C.1.pep
IASHGSSGLHYNYYAPHEXAAVSAGTGTGTGTGTGTGAGTAEAGGVAVLAPXARATPRTSRPSSPAAPAAMTCSTGGGAPTAPPPRPPSQPRPRPAPPPRSPPPAPAPPTAEAATTTTTTPGSSTSTSVSSTPIRRLPTPRQGC

SEQ ID NO: 203564 - protein, 88 aa, Zea mays
  Clone ID: MRT4577_11723C.1.pep
SSFLLQAISFLGGASTIELGPSSCTDMFTSTRGGSNVSTLLVDTYNSASLAACSASSALLAFSLAACALVLGDGSASGSACAPVAACG

SEQ ID NO: 203565 - protein, 151 aa, Zea mays
  Clone ID: MRT4577_117240C.1.pep
LTASIYHSHLSTAPFAPTAHRHLFREFSLPANMGCFTRKTHAAAQPGVNTTTGNAPHDIYSMQTRPTFGQWIKHTWLDLLTMAILGAIGLGVYMARPVPSRSFAVTFSDGEIVYPDFGYPLRKELVPIWLAAFLAVLVPVLGFLIMQIRVR

SEQ ID NO: 203566 - protein, 136 aa, Zea mays
  Clone ID: MRT4577_117241C.1.pep
KLQIKENLKGKKKRKIARTRAPEQEFLLLLPLSPQQFPPPFPPRQAKGVKDLIPPNLGTPWGDSPPPPLTGPLSRRRPPALAPRLIGWTGARGESFFVLDARPLHKSVGSNGRGPRFWQRHKRTGAWPCPFPIKRG

SEQ ID NO: 203567 - protein, 34 aa, Zea mays
  Clone ID: MRT4577_117242C.1.pep
MGAAPVLVLLLVAAAALPRRASAATDAGDGNASS

SEQ ID NO: 203568 - protein, 50 aa, Zea mays
  Clone ID: MRT4577_117243C.1.pep
HKHRISGSILTHTIFRVVGTPTQSVIYRVGHGGHSDYCADFINGGSLPLL

SEQ ID NO: 203569 - protein, 355 aa, Zea mays
  unsure (1)..(355): unsure at all Xaa locations
  Clone ID: MRT4577_117244C.1.pep
LVHARAWPLHFTTPCLTLRHNVSRPAPSRPPPLAAGPHTKRSWECRRRRWSGLFRSSSSSXVVLLVRSPAGAAADGGGNATTDSCPLDLGYVRTFPWDPLPCAGGAPNVTACCQTLLSLFGIGLAERLRGTGHFRLPSAAASTACIESFTDLISAAPASLSGSSLVAECFPDPSQFAITSSYCAGVSTATEFVAAVGNDSAQALNSSCGPDLASPATCALCYSAGVAATAHLTSAAANDSKSGSCFYLTVLYAAGISNSAGPTYPPTAACALGLGLLSPAPTPSKSSHAAVYAATIPIAFVLLASLFGFFLWRXERVPIARRRRTIRSXARRGPGDRRSHPRPXNTGSVFFDIAD

SEQ ID NO: 203570 - protein, 62 aa, Zea mays
  Clone ID: MRT4577_117245C.1.pep
RRVLSRRGQLLLFRKRRRRRAVKSRSTCSSSSSRKSQRCCSPVTPANLVDSDSPRTVRCYPC

SEQ ID NO: 203571 - protein, 83 aa, Zea mays
  Clone ID: MRT4577_117246C.1.pep
DLGLGLGLGLGDISGPSPSGLLAGLESHLIDKKHGRVVVCGAAFSPQDVAIKIRKRTNRRVEILDVSEASPAAPEGGPGHMPS

SEQ ID NO: 203572 - protein, 234 aa, Zea mays
  Clone ID: MRT4577_117247C.1.pep
TRKTWFDDKPNDGTAAHVISRGGPVERGQIDEEGIREGEDLHRGLKARQISMIAIGGSIGTGLVIGSGSGLAKGGPVGLLIAYVIMGAMCFGVMCSLGEMATYLPHKKGFGGYASRFVDPSMGFALGWNYLMKYLVVTPNNITAGAIVVRYWTDKVPIGAWITIYIGGCFLVNLLGIEVFGEVEFWASFIKIIVLAGLILLGIIIDLGGAVVDRIGFRYWRGQPFSHYIFQNDT

SEQ ID NO: 203573 - protein, 230 aa, Zea mays
  Clone ID: MRT4577_117248C.1.pep
TGSSSWPSSGSNYPLWRKSSMALFKSKVLTLALFAALSLTAKPTVSWPLPSTSTLLTQIPSAEIEEPELREPEEDDTPELMEDPQGQSNPFLAPELDELVDNKISEDVWQQMLGELPCSVTTEDCINQLQNVAVQNSRLLADLQEKIDEAQNAVDEARRKNLDSIAIGNFSPFIQTFLYSTLGPVSNGVEPPVNNPFRLILGNTLSAFLGQGLGALFNWSDYAANDSQQQ

SEQ ID NO: 203574 - protein, 216 aa, Zea mays
  unsure (1)..(216): unsure at all Xaa locations
  Clone ID: MRT4577_117249C.1.pep
MRKGAELLVLLVASSLCLSAAIAAQETCPADIDAKCGDATSDGWEGEFFPGITKIRYEGPTSKKPLSYKWYNAEEVILGKKMKDWLRFSVAFWHTFRGTGGDPFGAATKNWPWEDGTNSLAMAKRRMKAHFEFMEKLGVERRCFHDRDIAPDXQTLAETNANFDEIVEMATELQSATNIEPLWXGTAXLFVHPRYMHEAATTPDGPAYGYATAQRK

SEQ ID NO: 203575 - protein, 528 aa, Zea mays
  unsure (1)..(528): unsure at all Xaa locations
  Clone ID: MRT4577_11724C.1.pep
MAMDPVLKVALGSAAFAVFWXVLAVFPXVPFLPIGRTAGSLLGAMLMVLLGVMSADDAYAAVDLPILGLLFGTMVVSVYLERAXDMFRHLGRLLSWRSQGGRDLLVRTCAVSALASALFTNDTCCVVLTEFILKIARQNNLPPRPFLLALASSANIGSAATPIGNPQNLVIAVQSGISFGGFVFGILPATLVGSVVNAAILLALYWNQLXRMQARRRSPGGGRRAXTEVVEEEDVTSHRFSPATMSHXSSDAPSPSRCRPATTTRXQDPVKPPNGVHHRRKAAVNGDCDGDGDRYYSSFSSTSSSTEEASAKQPEDDEEEVEEEWQSRVWKVCVYVITLGMLVALLLGLNMSWSAITAALALIVLDFKDARPCLEKVSYPLLLFFCGMFITVDGFNKTGIPSAFWDFMEPYARIDTPTGTAVLALVILLLSNVASNVPTVLLLGARVAASAAAISPAAETNAWLILAWTSTVAGNLSLLGSAANLIVCEQARRSQQYGYTLSFFSHLQFGFPATLVVTGIGLLLIRTY

SEQ ID NO: 203576 - protein, 88 aa, Zea mays
  Clone ID: MRT4577_117250C.1.pep
HLDYQDYHNGYCPVRLWQGITTLHRTYKLVTVATQGATSPFELTTVPPTPWLIAANERMSSSRLIVREVQPFISLCVIHTSPNSYRIV

SEQ ID NO: 203577 - protein, 31 aa, Zea mays
  Clone ID: MRT4577_117251C.1.pep
CLIKKKKKKKKKKKKKKKKKKKKKKKKKKKK

SEQ ID NO: 203578 - protein, 318 aa, Zea mays
  unsure (1)..(318): unsure at all Xaa locations
  Clone ID: MRT4577_117252C.1.pep
TILCNIDYTSSQVPFRITATGWVQEFNNTARIVKKIKLTGTPCKIFKKTALIKGMFTSDLEVARFEGAAIRTVSGIRGQVKKVMXIPCLDSLSRLNVTVKRKHXIVSCSLQAAKIEPGDMLKRKGENTEGIARCTFEDRILMSDIVFLRAWVNVEVPTYSNPVTTALQPREQTWQGMRTTAELRKAHNIPTPHNKDSVYKPIERKPRKFNPVEIPAKLQQLLPFKSKPKDTAKQKKAPVENRVPVIMQPSEKKTHAAIQQLRLIKHEKAKKKKIKEQQKKKAYEAEKAKTELLTKKRQREERRVRYREEDKQKKRARR

SEQ ID NO: 203579 - protein, 148 aa, Zea mays
  Clone ID: MRT4577_117253C.1.pep
LVFPGSDGEAGGFINVELGKSHALLMGPTGSGKTLLAKTLPRSANAPSVTADATTSTPRGYVGEAVSSMLYNLLTEVDFNVQAAQHGMAHIDQDDMSTHEAERLNISIDTSGEGVQQALLKMLECTIGTTPEKGARKHPCRVNLQIDT

SEQ ID NO: 203580 - protein, 46 aa, Zea mays
  Clone ID: MRT4577_117254C.1.pep
FWEPKQINLRGRRQYRSWANPGKIQDWHPWLLTKTAVVRGQIQKPS

SEQ ID NO: 203581 - protein, 245 aa, Zea mays
  Clone ID: MRT4577_117255C.1.pep
MPCQQLMATAVVELIKVKSIYKTTLKSKSSINEVNQVAQLRIIIKPKSCNGVGLLCTAQQIETEKLLAQLVETKMNIRLDMACAFLYKKVQWITETPLTGPNSIIGRAVVVHAAPDDLVKEQLFLKFPSKPTPHPPSSSAHRALFAACDDHRSLQSLRRRFISERKTTEINQVATQENEISQNGRPTSKTCSALPEPILAYWSVNSDHVHREAVGTTSLRDGRFEDPVSVAEEATFCNVALNITI

SEQ ID NO: 203582 - protein, 77 aa, Zea mays
  Clone ID: MRT4577_117256C.1.pep
DPRVRQFFLACAPNADFEECLSADGESQGLERLPGALSAHTRPGMILKSGNRITAPSKVEKQEPTDDESNYDTEYED

SEQ ID NO: 203583 - protein, 30 aa, Zea mays
  Clone ID: MRT4577_117257C.1.pep
FHITEHVLTEPHLNGPGAPYIVPAYLKKLK

SEQ ID NO: 203584 - protein, 83 aa, Zea mays
  Clone ID: MRT4577_117258C.1.pep
LGNDGLNLSRTHNSILHAPKPGGPVLDLGGGGRQQEGAHIRSWLNKVGGIMGMNPPKGGAHGKGKAYQRGWLELTIAFKGGKN

SEQ ID NO: 203585 - protein, 89 aa, Zea mays
  Clone ID: MRT4577_117259C.1.pep
KPKCSSQATVRPKVSQRPVYEVVLLALKHHHGSEPIRKHTTEVRRINWALCAGGLLSRSSDIQWTSNLNNLKPVYNHSYKKKCFTFCLI

SEQ ID NO: 203586 - protein, 134 aa, Zea mays
  unsure (1)..(134): unsure at all Xaa locations
  Clone ID: MRT4577_11725C.1.pep
AGSQICIKGGLDYLGNPSLIHAQSILAICACHVVLMGAIEGYRVLGGPXLGEVDDPLYPGGRLDPFGATXDPEALADLKAKELNIGRLDMSCMFGYYGQAIVTGKGPVENLSDHLDHRVDNNQWAYATNFXPGK

SEQ ID NO: 203587 - protein, 92 aa, Zea mays
  unsure (1)..(92): unsure at all Xaa locations
  Clone ID: MRT4577_117260C.1.pep
RKSLGKLLDIYEQRLGEEGXLAGGNLTHDRLFHLPNADRLGGEPQSARLMQSYMNVSKQWYNGYRRDSWVRELELQHLSPDEAPLLCRSIVH

SEQ ID NO: 203588 - protein, 136 aa, Zea mays
  Clone ID: MRT4577_117261C.1.pep
LNFFFFFFFLGLFIEVLGGNKNNVVLDYLHLRSGKRPQNIGQKGQKGHNTQKNPVKGKPPFKGEKGQKTNNGTRKLPHYKGAPTKGGPAKVPQEGRAPTQGGGPIKEEATKKGATHINPYTSFMGGGEPPPGEKGN

SEQ ID NO: 203589 - protein, 80 aa, Zea mays
  Clone ID: MRT4577_117262C.1.pep
ANPVAYLQKLFPFNQLIMSNFVGDLQKRQQLFNPLAVANPLVAAFQKKQQLLPNNRFSLINPVLARQQPTVGGAILLDKK

SEQ ID NO: 203590 - protein, 80 aa, Zea mays
  Clone ID: MRT4577_117263C.1.pep
QTSTADSDLKEDGISSRKSSGSAVGGKGIAPASPMLGNASNPNKADIPERKISSTVSSSNTASGGMTRRNTYVCSERTTA

SEQ ID NO: 203591 - protein, 85 aa, Zea mays
  Clone ID: MRT4577_117264C.1.pep
SCLHLRTTPFSAEGVGAGASSPYSSDTNPDTDSRSGIVFAIVGRPVRLSSLRHVLPPQSTAPPTVAAASRPTLVDAGTGQVGHAH

SEQ ID NO: 203592 - protein, 106 aa, Zea mays
  Clone ID: MRT4577_117265C.1.pep
SSTVPSLRTAVQALLRATVKTDTDRSYIYGGHGGYDVDDSSPVYHCLRAYHSPSMHPSQRDGAGHQLRRWRSSCRIRRGVIPDASRGRDPPGEEGRHLRHPRRRPV

SEQ ID NO: 203593 - protein, 211 aa, Zea mays
  Clone ID: MRT4577_117266C.1.pep
HYIRVTGTPHGWNVAFYFFQLVKGVILFAVMPAVGTVTDTLPTHLVLILRSPPTPVIPLQVTANIAAAVIGETGPFMQGWVTWNQILLFVDVVCCCAVLFPVVWSIRSLRETSKTDGKAARNLSKLTLFRQFYVVVIGYLYFTRIVVYALKAVASYKYRWVSILAEEMATLAFYLFMFYTFRPAEKSHYFSLDDDEEEAAEMVLREEEFEL

SEQ ID NO: 203594 - protein, 115 aa, Zea mays
  unsure (1)..(115): unsure at all Xaa locations
  Clone ID: MRT4577_117267C.1.pep
FTNSDILETTYPAXAXILLVYXIXNPPIPINTDFLGKTYKSCAVTTLFTSCSDLTPTTIFKALXLRQIHVYNDVHGLLTFDPNIYANAIPMPYLTIDHAHQLYYFITHFLHTLPI

SEQ ID NO: 203595 - protein, 39 aa, Zea mays
  Clone ID: MRT4577_117268C.1.pep
CVDRSSGCDLFICLYNQVFPLMCLSKKKKEKRKKKSLGS

SEQ ID NO: 203596 - protein, 79 aa, Zea mays
  Clone ID: MRT4577_117269C.1.pep
PRVRPRVRPRVRPNCMLIVSVGSCKVRWLSDNLHLSDDLNHAEPGFSSASSLSSFNNYVYLLIAFPFIFRYHALVSCSK

SEQ ID NO: 203597 - protein, 81 aa, Zea mays
  Clone ID: MRT4577_11726C.1.pep
FFYGLVIEVRKVWRSGIYHQIRVRSRICIAGVFCCSSCIRTVYCKFSRPPWMTYLLLVAITRYLLLIIICALIYLNPTPFC

SEQ ID NO: 203598 - protein, 38 aa, Zea mays
  Clone ID: MRT4577_117270C.1.pep
IPGHTYICLMKFGTGGNALKRPESFYKSHMSLLLLKKK

SEQ ID NO: 203599 - protein, 42 aa, Zea mays
  unsure (1)..(42): unsure at all Xaa locations
  Clone ID: MRT4577_117271C.1.pep
YLAPNRAVSALSDSIVFQWQLTTARPAARPSICSLSPHPXTX

SEQ ID NO: 203600 - protein, 81 aa, Zea mays
  unsure (1)..(81): unsure at all Xaa locations
  Clone ID: MRT4577_117272C.1.pep
KYAFRHMLVIECEPPFKIKGLXFFRVQDVPQFVKDEVXNKXLFEWTQVYIYDEAHKQRVNDIFEPTHPLDGEAVLHPEWFQ

SEQ ID NO: 203601 - protein, 67 aa, Zea mays
  unsure (1)..(67): unsure at all Xaa locations
  Clone ID: MRT4577_117273C.1.pep
YVYWGDSIMQQSXETNYGADVVIGTPWSAIDLLKRGSLKLGEIRFVVLDDAHQMLXVGFASRCLKQF

SEQ ID NO: 203602 - protein, 178 aa, Zea mays
  unsure (1)..(178): unsure at all Xaa locations
  Clone ID: MRT4577_117274C.1.pep
VLAQDQGEKENPMRELRIRKLCLNICVGESGDRLTRAAKVLEQLTGQTPVFSKARYTVRSFGIRRNEKIAVHCTVRGAKAEEILEKGLKVREYELRKNNFSDTGNFGFGIQEHIDLGIKYDPSIGIYGLDFYVVLGRPGFSIADKKRRTGCIGAXKHRISKEEAMRWFQQKYDGIIFL

SEQ ID NO: 203603 - protein, 36 aa, Zea mays
  Clone ID: MRT4577_117275C.1.pep
TYMLRDCIVHAKLLGKPCQHVPQTTGATTGSHALTS

SEQ ID NO: 203604 - protein, 91 aa, Zea mays
  unsure (1)..(91): unsure at all Xaa locations
  Clone ID: MRT4577_117276C.1.pep
MGSSSSKVDNEEPVRRSKDRRRLMKQLVRRRPELAAAHIAYLHALRNTGATLRQFVELESALSQQPPVGLAXPPSPTPQSLPQPQPPPPPE

SEQ ID NO: 203605 - protein, 126 aa, Zea mays
  Clone ID: MRT4577_117277C.1.pep
SGTRKEGSSQAEEKSMPAKGEEGKMEVIASCESYPLPRSRPSLFPPFPNPPSLAAWRAAVNMGVTGRGAPGNWGDWGTRERERERESGGGQRRQAAPGRSSRGWREQGKRKRRRGLGVPAGLEVPN

SEQ ID NO: 203606 - protein, 173 aa, Zea mays
  unsure (1)..(173): unsure at all Xaa locations
  Clone ID: MRT4577_117278C.1.pep
TELLVKTPAQSRTSIVYKFATDDILREQYRDPWNEVRIGKLLEDLDALAGTIAVKHCSDEDSTTRPLLVVTASVDKMELKKPIRVDTDLKIAGAVTYVGRSSIDIQIEVTQVDXSDGDNQSDPIALTANFTFVARDSKTGKSAPVNRLSPETEREKQLFXESEARDKMQKKGR

SEQ ID NO: 203607 - protein, 553 aa, Zea mays
  unsure (1)..(553): unsure at all Xaa locations
  Clone ID: MRT4577_117279C.1.pep
MTTRLTATLLLSRTLVRRVTSRTPTPLGPFGLEPSAGIPISWSRRASSTASGDRGQEPPPAMDSPIKVVSHLGGGRGGGGGEGEGEGEGGAAAIDAGKSARRPLSLWPGMYHSPVTNALWEARSSIFERMMDAGNGASSAEQRPQTELLVKTPAQSRTSIVYKFATDDILREQYRDPWNEVRIGKLLEDLDALAGTIAVKHCSDEDSTTRPLLVVTASVDKMELKKPIRVDTDLKIAGAVTYVGRSSIDIQIEVTQVDKGIIGSVEGRPSSSLXNRNDAYGRXFSAFLYLTHFKCGYIAADADNQSDPIALTANFTFVARDSKTGKSAPGDRLSPETEREKQLFGESEARDKMRKRKREEQKGGLENGIHRLRAEAERLDVLLAEGRVFSDLPALADRDSILLKDTRLENSLVCQPQQRNLHGRIFGGFLMHRAFELAFSTAYAFVGQRPCFLEVDHVDFLKPVDVGDFLRFKSCVLYTQLDNPEQPLVNVEVVAHVTRPELRKSEVSNTFHFTFTVCSDTLKNGLKIRNVVPSTEEEARRILERMEAEGLCN

SEQ ID NO: 203608 - protein, 65 aa, Zea mays
  Clone ID: MRT4577_11727C.1.pep
RWIFWFSHQQCRSCNMCGSTTPCIMACDPRAKMVSVAALAESPRSLSSFYIFPAIVGTLLCYVSC

SEQ ID NO: 203609 - protein, 155 aa, Zea mays
  unsure (1)..(155): unsure at all Xaa locations
  Clone ID: MRT4577_117280C.1.pep
ILPGKTQVFEETKRRKKKKGLKNRKGGGKKRGQKNAHGGPPGNRRTDPPGGAAXEKGGGPEEGGIRAKGGPRAKGGSDGKSTPQPKRGANGKKPGGPKRGGTNRKSGGANGRNEAGKTGGAAGPKKRPKTREKRGRKKGPKGGGLTPWKRATRER

SEQ ID NO: 203610 - protein, 74 aa, Zea mays
  Clone ID: MRT4577_117281C.1.pep
MATVIMGLGLQYARLLSPTVPTILMLQTGGQRDHLRQWPTLPTLLGGQYHQLEYTSAIRQTSLATWLAAPRGAT

SEQ ID NO: 203611 - protein, 79 aa, Zea mays
  Clone ID: MRT4577_117282C.1.pep
PMEHIPFVLLARVWLPPARISHLQLDAGFVPACFDIPSILLPTTHHRRCPPLYCLLVVIPIIKFFGSCRWPPTNKKLYF

SEQ ID NO: 203612 - protein, 128 aa, Zea mays
  Clone ID: MRT4577_117283C.1.pep
CFFFFFIFLWGFFFWGVFYWKSIYSPGKLRGWPEPETGQNILGLPSLVSLPGGAQYNFIYAGAGLHCTELDERLVGGFGLGFLGFHPKENPTRTRAPFQGPTPVCTGHRRVFFGPVPARPVSFGAGRG

SEQ ID NO: 203613 - protein, 75 aa, Zea mays
  Clone ID: MRT4577_117284C.1.pep
LFFILPSCGANKFNATAREREHGTQEMRGLYRDIRMRLTGPGIDDGTDLGFRAAQSREEHSLECPRVQVRVGGRV

SEQ ID NO: 203614 - protein, 84 aa, Zea mays
  Clone ID: MRT4577_117285C.1.pep
GFGGQRGHLCTGVFSPHFILLLNTKIRSSPAYSRKKGERGEALMTHSHTHTKDSYNRFLIHTLFLDNDIIHTHNFEDPSDVFII

SEQ ID NO: 203615 - protein, 128 aa, Zea mays
  Clone ID: MRT4577_117286C.1.pep
KQFFFFSPPKKLPRGVFLFGQVIFFNRMVFFFFWAPNFAHWVFYGRFPLRWCSPSPGDGLVFFRLLFKICPLPPQKKKKVGAPLPLSLTVFFLFLGPPSFFVPALSFYPLVPLYFAFPYFFCPPPSFS

SEQ ID NO: 203616 - protein, 234 aa, Zea mays
  unsure (1)..(234): unsure at all Xaa locations
  Clone ID: MRT4577_117287C.1.pep
LMFAAEFRLPRSLPTKXKKKRVQALIDQLGLRNAGNXTIIGDEGHRGVSGGERRRVSIGVDIIHDXXIVLFLDEPTSGLDSTSAFMVVKVLQRIAQSGSVVVMSIHQPSYRILGLLDRLLFLSRGQTVYYGPPGALPSFFNDFGKPIPGNENPTEFALDLIRELETMPDGATDLVEHNKKWQXARPPRRSTTTGTARSRXSLKEAISASISRGKLVSGATDGSVSVHSAGESAP

SEQ ID NO: 203617 - protein, 176 aa, Zea mays
  Clone ID: MRT4577_117288C.1.pep
RPGVTRSRTSSPAPAPQRAHPRPAPPARLLLPSSVLSSGRAAPPLQCPAPRHSVLTASHPARRAAQRSALDRPARHCSSQHGHTGAPEQRGSSCVRALEVLENISEDASDGEKKNTSLSDYERTCLMDQLLLFIGEGRNDDGFRDWNGPGHLATKMGKTDRHIWFKSVDRLGEPAL

SEQ ID NO: 203618 - protein, 34 aa, Zea mays
  Clone ID: MRT4577_117289C.1.pep
LSPWGHRSLFHLLKEVFCTIICTICWKQPNSPEV

SEQ ID NO: 203619 - protein, 35 aa, Zea mays
  Clone ID: MRT4577_11728C.1.pep
KRLPVALNAVLAHVHAEGQGVQHEARWLACEAHQS

SEQ ID NO: 203620 - protein, 100 aa, Zea mays
  Clone ID: MRT4577_117290C.1.pep
ASAMLRILIRAIERSLQWNLLSSPCASGNHWFSQPRIHQDHLIHLATLRTSSMNRGIKQVLWVNLYQVHDRIYDKALEAAQEGSRRAWLRVTLARLPMIL

SEQ ID NO: 203621 - protein, 85 aa, Zea mays
  Clone ID: MRT4577_117291C.1.pep
AMAAGGTEQELERARRDPPSKQEQKHRELAGIMATVFKDELNLHHEGGRPNPSAVLLGSGERRQRPYLGAGGWRRNGGSGCGCGC

SEQ ID NO: 203622 - protein, 111 aa, Zea mays
  unsure (1)..(111): unsure at all Xaa locations
  Clone ID: MRT4577_117292C.1.pep
PPGPIGNGYAPGVGCPPPPLAVKFGGPLPKIPRRFGKELXKEPKFLKNGDAGMGKIIPPQPLGGGAFSGDPPPGGFAGRAIKQPGAVGVFQRVGKKGPPGAKGAKGGAQKK

SEQ ID NO: 203623 - protein, 115 aa, Zea mays
  unsure (1)..(115): unsure at all Xaa locations
  Clone ID: MRT4577_117293C.1.pep
MLSYCFNYXDELIYNAAYIATLATGILADDDRTGTIGQRLSTINARNXENNRLPLRELLFCCPVALTNIRQVILXEETLNQKTDDXKTFVDASMSEGXLPGIKSLQDLPLEPVDY

SEQ ID NO: 203624 - protein, 42 aa, Zea mays
  Clone ID: MRT4577_117294C.1.pep
HEARLCTKKKKKKKKKKKKKKKKKKKKKKKKKKKKKKKKKKF

SEQ ID NO: 203625 - protein, 81 aa, Zea mays
  Clone ID: MRT4577_117295C.1.pep
MSAKAVRTLKTDDEGCTYTREILHKVYGHTTHLVANGASDTVPDPPPLSGRTARYKGRTVGRSSMLLEGPACIIRSQFTLY

SEQ ID NO: 203626 - protein, 101 aa, Zea mays
  Clone ID: MRT4577_117296C.1.pep
MSESFQKAVEDSKKLTSKPNTDDLLRLYGLYKVANGEDFSAATAPGMFDLKGKAKYNAWKKAAEEEKLTPDAAQAKYVELVEELKEKCGYDANKVPEAVGN

SEQ ID NO: 203627 - protein, 44 aa, Zea mays
  Clone ID: MRT4577_117297C.1.pep
TFFPPPVVVKQALLTKGPGGSNKAKAPVNPRYGGSKTLRALKGK

SEQ ID NO: 203628 - protein, 101 aa, Zea mays
  Clone ID: MRT4577_117298C.1.pep
PLFGRFLFSALTPFFLSSSRACLVQLRIPFSAPFSSPIFCVFPSPLDSRLFVFLPPFLVPVCPFRPFLVPVSHLSFGRFLRRFPVPPRNFLCPTSEAGPAL

SEQ ID NO: 203629 - protein, 66 aa, Zea mays
  unsure (1)..(66): unsure at all Xaa locations
  Clone ID: MRT4577_117299C.1.pep
LFCSNIVSPKLDTYQXGFWIFLQKLLTVECIPFLLAGMEELNANYLXQLNQRYLEKATILWCTPVP

SEQ ID NO: 203630 - protein, 81 aa, Zea mays
  unsure (1)..(81): unsure at all Xaa locations
  Clone ID: MRT4577_11729C.1.pep
TGPTTPAGLIGAXVEHALALLAAVSVVANIXGGHVXNLAVTLGAFVGGNITLLRGLLYWVEQXLGSIVASLLIRFSTGGQV

SEQ ID NO: 203631 - protein, 195 aa, Zea mays
  Clone ID: MRT4577_1172C.1.pep
REQEITELKSAVRDLKTQLRPPSMQTRRLLLDPAIHEEFTRLKNLVEEKEKKIKELQDNVAAVNFTPSSKLGKMLMAKCRTLQEENEEIGTMASEGKIHELGMKIAVLKSQNNELRNQFDVLYKHMDGVTNDVERSNELVSILQEELEAKDLELTRLKEVLAQKGATQDAPVETSDDAGNGQEADSDTLQVKAES

SEQ ID NO: 203632 - protein, 88 aa, Zea mays
  unsure (1)..(88): unsure at all Xaa locations
  Clone ID: MRT4577_117300C.1.pep
EKWKSMPDEKKNPYVXKAPELKAQPENGKASGENNVAKKKAKADAKDGEQEVDQPAKKRIRRKALDEDEDYAGAQEDEDEQTELDDDM

SEQ ID NO: 203633 - protein, 353 aa, Zea mays
  Clone ID: MRT4577_117301C.1.pep
IIHGEGSWEVTLYQKLDITMDDVLRGLTSANMIGTGSSGAVYKVDTPNGYTLAVKKMWSSDEVTSAAFRSEIAALGSIRHRNIVRLLGWAANGGTRLLFYSYLPNGSLSGLLHGGRAAKGSPADEWGARYEIALGVAHAVAYLHHDCVPAILHGDVKSMNVLLGASYEPYLADFGLARVLAAASSMLDTGKQPRIAGSYGYMAPEYASMQRISEKSDVYSFGVVLLEILTGRHPLDPTLSGGAHLVQWLREHVQAKRDASELLDARLRARAGEADVHEMRQVLSVATLCVSRRADDRPAMKDVVALLKEIRRPAAVDDAKQRPPTAAAPVSPVSAHSRGQSSSCSFAVSEYSA

SEQ ID NO: 203634 - protein, 62 aa, Zea mays
  Clone ID: MRT4577_117302C.1.pep
LFSLVMEHVGHICFLNSIRASSYRALRMPCFVKLTALRVCIVGLLADGLILLFKQLHSFDLF

SEQ ID NO: 203635 - protein, 163 aa, Zea mays
  unsure (1)..(163): unsure at all Xaa locations
  Clone ID: MRT4577_117303C.1.pep
FESSDFDHYAVEECAADRSFTSAHLERPSRSLQQQRSCTKSEKPIDVLRRVCGNDKCADCGAPEPDWASLNLGVLVCIECSGVHRNLGVHISKVRSLTLDVKVWEPSVISLFQSLGNTLANSVCEELLHSRSAFQXLSTSDKPMMFFITKPCQSDSLSVTEKF

SEQ ID NO: 203636 - protein, 149 aa, Zea mays
  Clone ID: MRT4577_117304C.1.pep
RARVNPQKCPQDPSSLALLLQYLLLLEEISLADKPPLDPRPVVPTLLIRREGSARLLLALHLQNVAFPDNSADTVLWEEITITVFMFNYHMSRRQRQVRAIAISEHRASAAPRLEHPASVQAQPQSCLWQCQTPASPLTDSGTPSSYIV

SEQ ID NO: 203637 - protein, 104 aa, Zea mays
  Clone ID: MRT4577_117305C.1.pep
SQPGPWEPWEHRDKHMAMECRVTQGQASCGDLYCDHAELIAVCAPPPPHVPEGNSWAGDWHPGRNCKSMLGGVSLLCVQVFSTWILNYFKKCTEFGLKTNHQNG

SEQ ID NO: 203638 - protein, 77 aa, Zea mays
  Clone ID: MRT4577_117306C.1.pep
KAPGFLRVGQTPNFSQGGFGVLPKKKPPFKGEIFFYPPLISFKFFPNFKGLGVFFLGAPPRPLKKLIGAPPFSPFFG

SEQ ID NO: 203639 - protein, 73 aa, Zea mays
  Clone ID: MRT4577_117307C.1.pep
DVNPVGPHETIAHGHPEQRMIQEAMPLKTTIILYWAQLQVNAVCSLSQSSEMLRSMLFLGSVLTEMPSKSKSN

SEQ ID NO: 203640 - protein, 310 aa, Zea mays
  Clone ID: MRT4577_117308C.1.pep
MPDIQLGCHTIRSHGTKVATLHMYDWIILLCLAVLDGLLNIIEPFHRFVGRDMMTDLSYPLKGNTIPFWAVPLIAIVLPLVIFAVIYFKKKNVYDLHHGILGILYSVLITAVITDAIKDGVGRPRPDFFWRCFPDGKPNFNNITTDVICHGEKSVIKEGHKSFPSGHSSWSFAGLGFLAWYLAGKLKAFDRKGHIAKLCLVFLPLLVASLVAVSRVDDYWHHWQDVFAGGIIGLTVASFCYLQFFPYPFDNDALWPHAYFQQLAETHSNGNANSINIRPTEFEDEPDDHGDIVLRDTSPILESMESGRRP

SEQ ID NO: 203641 - protein, 311 aa, Zea mays
  unsure (1)..(311): unsure at all Xaa locations
  Clone ID: MRT4577_117309C.1.pep
MPDIQLGCHTIRSHGTKVATLHMYDWIILLCLAVLDGLLNIIEPFHRFVGRDMMTDLSYPLKGNTIPFWAVPLIAIVLPLVIFAVIYFKKKNVYDLHHGILGIXLYSVLITAVITDAIKDGVGRPRPDFFWRCFPDGKPNFNNITTDVICHGEKSVIKEGHKSFPSGHSSWSFAGLGFLAWYLAGKLKAFDRKGHIAKLCLVFLPLLVASLVAVSRVDDYWHHWQDVFAGGIIGLTVASFCYLQFFPYPFDNDALWPHAYFQQLAETHSNGNANSINIRPTEFEDEPDDHGDIVLRDTSPILESMESGRRP

SEQ ID NO: 203642 - protein, 194 aa, Zea mays
  unsure (1)..(194): unsure at all Xaa locations
  Clone ID: MRT4577_11730C.1.pep
MFRSSPLLSLALGTLSAVGAQELPAVLTADIIQGLGNNTLFTRWRPTYHFSGPAGWLNDPCGMMYDPTTKTYHLHYQWHPNHVNWGNISWGHATSKDMITWTDVGXGKMTKLSLSALDPTLTPXSSYYGLGIFSGSGQPYNLHGEQDGTLINFYTSVQHLPTNWAIPYIPGTEKQSIAISKDGGXTWEQYAGNP

SEQ ID NO: 203643 - protein, 137 aa, Zea mays
  unsure (1)..(137): unsure at all Xaa locations
  Clone ID: MRT4577_117311C.1.pep
TRXVXKKKKKKKKKKKKKKKKRKEKKKRKKKKKRKKNKKKRLVVVVNVSSPILRGAGFSRVLFLWLPVDSPHHWPGLRAPPPFWSGGWSLPKCPCLGAPSRFSPLGVWRKGPALSGFVKRGGPGGYARRARGLGHNA

SEQ ID NO: 203644 - protein, 101 aa, Zea mays
  Clone ID: MRT4577_117312C.1.pep
RYGIYRRQVSPLASRPFWPLAPRSASRSLGAAASTFGGSGLVYRGTPGAEPPPDHCASGRGREARAGDAVRGEARHGRQLASALWFFFSFVSFVLYLTLQD

SEQ ID NO: 203645 - protein, 103 aa, Zea mays
  unsure (1)..(103): unsure at all Xaa locations
  Clone ID: MRT4577_117313C.1.pep
DQSVCGDVSYGRGYIATLNXGRAYDIKNCQNSAVQEFNSVLADHIVMICKLNNECFMDLLWYCLHDVNRMLNYQCCTTGCADNILHTNNGVHGVETGLVLNWF

SEQ ID NO: 203646 - protein, 131 aa, Zea mays
  unsure (1)..(131): unsure at all Xaa locations
  Clone ID: MRT4577_117314C.1.pep
MLSFPLEPGKSLGFFTIRMPIAEGIADIQYEVKNISAKIKYHETHILSSDIYIDLLENGILLWFEPNSQRLRKIEIKEPRKTXLSYAGNEFCSPDVXPTFAIIYKRFGPFTPGNYDPNNHLYALHYPGVSF

SEQ ID NO: 203647 - protein, 56 aa, Zea mays
  Clone ID: MRT4577_117315C.1.pep
RLLYRPLFPFLPTLPLFFFFARYFWSELLMPFGLQDFPPRTVFIMIFITDGVSIFA

SEQ ID NO: 203648 - protein, 82 aa, Zea mays
  Clone ID: MRT4577_117316C.1.pep
GPKAHGSERRIRGRVGALASRHRRGGRRAQVPGEVFLEEGDLMAYLRHGGPARRRVLRAHDPEVDQLGHERLSNALVSHGGR

SEQ ID NO: 203649 - protein, 380 aa, Zea mays
  unsure (1)..(380): unsure at all Xaa locations
  Clone ID: MRT4577_117317C.1.pep
MEVALGTAKYLLGHVLNNLPDDWMKSYVSSAELGTNLNMIKEKMRYARALLDVAKGRDDVVAGNPNLLEQLEILGKKADEAEDAVDELHYFMIQDKHDGTRDAAPELGGGLAAQAHHARHAARHTAGNWLSCFSGCCPRPRDDAAATDAMSGDGGHVGKLSFNRVAMSNKIKLLIEELQSNSTPVSDLLKIVSDTSNPQDSSSSTKRSPTSSQSXQDKLFGRDAIFQKTIEDIIIAKDSXNPWSVLPIFGLGGNGKTTFTQHLYNHTEFEKHFTVRVWICVSTNFDVLRLTKEILSCLPATENAGDKIANDTTNFDLLQKSIAERLKSKRFLIVLDDIWECSNNEEWEKLVAPFKKNDTTGNVILVTTRXQKIADLVKKE

SEQ ID NO: 203650 - protein, 55 aa, Zea mays
  Clone ID: MRT4577_117318C.1.pep
TIKGPEAFDYYLYSRTDLKRILCPTAYCICIKGLRTIAAPATWAKMTIAFTPFTT

SEQ ID NO: 203651 - protein, 95 aa, Zea mays
  Clone ID: MRT4577_117319C.1.pep
MGWHLGKTKWLKGNMGGGGGPFLGGGPGLHFGGPFFPKLFTKQLKGKCWLGGAPHFKNQAGFLLKTPLFFFGGAFFSQSGCLPNWVGGKPGKQKY

SEQ ID NO: 203652 - protein, 190 aa, Zea mays
  Clone ID: MRT4577_11731C.1.pep
MKGTRAKKGIIAKLSVSWAPDVYDPPITSDSHTVRGHHRSSMKSNYKYKSSKSSSRSTTGSKKDKKHSRHSSSSGGGSKRDRKHSSHSTSSASSSRAVTSGSQYRNTYCGDGISSSRTVTCVPESAKVSPLVLAENAAPQEPVPVLKTLEPIKCATSCSKEKPFALLSRQFSPARYKGMFSFWSQNQLAS

SEQ ID NO: 203653 - protein, 52 aa, Zea mays
  Clone ID: MRT4577_117320C.1.pep
ALKQSRSIEAFQKNSLNRSCQAVSLMFISTSCDIWVHTYSSVTVMLARDKNT

SEQ ID NO: 203654 - protein, 65 aa, Zea mays
  Clone ID: MRT4577_117321C.1.pep
VYVRVQGMVMDLDRLGFLVLGHSVLRAELLPSRCLCVCHRERVMGDVKNRKVKIPPDGDIDRGRR

SEQ ID NO: 203655 - protein, 61 aa, Zea mays
  unsure (1)..(61): unsure at all Xaa locations
  Clone ID: MRT4577_117322C.1.pep
LVECCLMLKICLYLCTSSFTRRFHCTASPKYKPSKQERSSXSPFPHNKSNSXCYIYAKFVV

SEQ ID NO: 203656 - protein, 80 aa, Zea mays
  Clone ID: MRT4577_117323C.1.pep
GRRRTTRILDSKRRGPTRTCTTTPVPLASLGEDTPLPRRGTLVPLRPRRKTRWTISPPQGPHRYSSDCVMRDLRSRLYLG

SEQ ID NO: 203657 - protein, 52 aa, Zea mays
  Clone ID: MRT4577_117324C.1.pep
ITHSFNTCNSTKAPIRSLGRDSVVNFNESQPLLTRTIEQSVTRLIQTIGVFY

SEQ ID NO: 203658 - protein, 44 aa, Zea mays
  Clone ID: MRT4577_117325C.1.pep
LYLLQSALQPGRHHKAAAPCPSYPGSRWERHLHAYTLTLYHAVT

SEQ ID NO: 203659 - protein, 81 aa, Zea mays
  Clone ID: MRT4577_117326C.1.pep
FMGFGLFLNLVWKIGFACCLWEFISVGFFFVWSLVWYVRVFCFWFWVGFCVEIFNDNVFFLGTGFYFVMARFYLIGFLEIL

SEQ ID NO: 203660 - protein, 62 aa, Zea mays
  Clone ID: MRT4577_117327C.1.pep
LPHRASVRIHAQRRHLAGRRSPSSMAEQTEKAFLKQPKVFLSSKKSGKGKKPGKGGNRFWKS

SEQ ID NO: 203661 - protein, 549 aa, Zea mays
  unsure (1)..(549): unsure at all Xaa locations
  Clone ID: MRT4577_117328C.1.pep
MSPIMALQASSSSPSAFRAVPATANASCRRQFQVRAQVAGGSSSSSIGADGGKMMVSKEPAAAATSSGPWKIDFSGEKPPTPLLDTVNYPLHMKNLSILELEQLAAELRAEVVHTVSKTGGHLSSSLGVVELSVALHHVFDTPEDKIIWDVGHQAYPHKILTGRRSRMHTIRQTSGLAGFPKRDESAHDAFGVGHSSTSISAALGMAVARDLLGRKNHVISVIGDGAMTAGQAYEAMNNSGYLDANMIVVLNDNKQVSLPTATLDGPSKPVGALSRALTKLQSSTKFRRLREAAKSVTKQIGGPTHEVAAKVDEYARGMISASGSSLFEELGLYYIGPVDGHCVEDLVTIFEKVKSMPAPGPVLIHIVTEKGKGYPPAEAAADRMHGVVKFEPATGRQLKSKSPTLSYTQYFAESLIXXXXXXXXVVAIHAAMGGGTGLNYFQKRFPERCFDVGIAEQHAVTXXXXXXXXXXKPFCAIYSSFLQRGYDQVVHDVDLQRLPVRFALYQSWLVGTDGPTHCGAFDVAYMACLPNMVVMAPADEAELMHMVA

SEQ ID NO: 203662 - protein, 46 aa, Zea mays
  Clone ID: MRT4577_117329C.1.pep
CLFLFYIYCTHAYFFSHWDPMQIELPGKKIIFSLKATYRGNLGLSY

SEQ ID NO: 203663 - protein, 91 aa, Zea mays
  unsure (1)..(91): unsure at all Xaa locations
  Clone ID: MRT4577_11732C.1.pep
GINSTSVKVTRALPKLTSGPQKETKFVLFGXKGKVQLLRDSKGSIXMAAPELQKNPFYYPQVAVLSDHIFKNVEYYALRVIFNKFQSVKSF

SEQ ID NO: 203664 - protein, 49 aa, Zea mays
  Clone ID: MRT4577_117330C.1.pep
FYQMGKCGYIIYGLNPEHPGQPPYRTQKGENATHFNVHMVPNSTLQQGR

SEQ ID NO: 203665 - protein, 131 aa, Zea mays
  unsure (1)..(131): unsure at all Xaa locations
  Clone ID: MRT4577_117331C.1.pep
RRIPTIYAHHLRKNVVGHSLWHTKKDSIVAAAQFEIHSDPTDADQNMEMIVRVHEHQPGTLASLCKDNNATALADYCRDMRCLMNNVXQDNVWXAAHNDMILLPTDGETVTTMPVHLNMAWEHRVKHVKEY

SEQ ID NO: 203666 - protein, 47 aa, Zea mays
  unsure (1)..(47): unsure at all Xaa locations
  Clone ID: MRT4577_117332C.1.pep
GAPPFFFFFSGLVKLFSLHRNPKYRIRPGPLISLLLVXSIIRSRTDG

SEQ ID NO: 203667 - protein, 50 aa, Zea mays
  Clone ID: MRT4577_117333C.1.pep
TCSYSSHHNSSLIHKCEHCHNFVLTHTNTNNIAAISVALHRSIDKGHNAI

SEQ ID NO: 203668 - protein, 54 aa, Zea mays
  Clone ID: MRT4577_117334C.1.pep
DISVFFACMLSVGIYIDTSSLDTISSQWILKVSLDILKCDSGDARKEFYPGRIS

SEQ ID NO: 203669 - protein, 103 aa, Zea mays
  unsure (1)..(103): unsure at all Xaa locations
  Clone ID: MRT4577_117335C.1.pep
GSLIQYXAKEVGWVLSLGLSFHKRDCLESLGINMKECPPMTDRAYRALRSXNCKKGLGKSVAXILASHTRAAIEVLXQSDKLAHQCLFKIKDXIALFEXPWMA

SEQ ID NO: 203670 - protein, 136 aa, Zea mays
  unsure (1)..(136): unsure at all Xaa locations
  Clone ID: MRT4577_117336C.1.pep
GRAGSSPFYDSSPPLPKPQFNPRFQIRVPTPELSSMREALEEAKENAVVVAVAKEKALVSNNGNSGGGGGNDKVPRQSEEETAREIQVVREAYRRETATPAXAYVIPEEPPTMVEXWYIYDFCSYFLCCCGTHGNI

SEQ ID NO: 203671 - protein, 135 aa, Zea mays
  Clone ID: MRT4577_117337C.1.pep
GVPVWLLVFDLYNGKDPPPFFVLPGSFPQWRLLGVPRLWGGLFSVGFGNSAPVVPCPFCTPPFYTAVACLVFLTPPSPYLVPSLPGFFFFPVRGFLSSVPGGVFLPRPLVLAYRSCFLRFWLFVSFSGLFPPSSF

SEQ ID NO: 203672 - protein, 178 aa, Zea mays
  unsure (1)..(178): unsure at all Xaa locations
  Clone ID: MRT4577_117338C.1.pep
SSHGTHQATPPFSSSPRCSMALLAARTAIFPFPMGAASLQGCEPVPNPAARPCQSLCAARSFLVLGLLLSSPGRSALLALLRRTPSLYVPSKLPGPCASLSRPPASNSSILVIEEQSPRSASSPRLFASCAQHAIVFVFLVSQRALALAILCSTSLTSFALPVILAATRREALMWXCA

SEQ ID NO: 203673 - protein, 53 aa, Zea mays
  Clone ID: MRT4577_117339C.1.pep
VRRLRQEPRLGQRIGRLRQERQRGAGVEDYAVSPSSGRLDGADGDTIQVHGVE

SEQ ID NO: 203674 - protein, 78 aa, Zea mays
  Clone ID: MRT4577_11733C.1.pep
HSGSYSLCQRKLAHTLNGARAEVNRRSFNGRMSRVSVVRGKCHLFRRSSRAALLAMLRPRRCPQEEQGCAEREYAILM

SEQ ID NO: 203675 - protein, 92 aa, Zea mays
  Clone ID: MRT4577_117340C.1.pep
GWVCTNGGIGYHREGKRGGPQHHPFVAVYRVHSLFNPMLFGYFATENISHVKLVDAISIRNLGCGANVQRMISQVQLIGALYLVRNQCMTSI

SEQ ID NO: 203676 - protein, 183 aa, Zea mays
  unsure (1)..(183): unsure at all Xaa locations
  Clone ID: MRT4577_117341C.1.pep
KGMLXFHDEADAFCXEPSSPDMSEAQRSALNALLFRTGDQSRDIVLVLATNRPGDLDAAITDRIDEVIEFPLPGEEERFQLLKLYLNQYILKEEGKGSSWSALFKKQQRKIQVNGISDDLLREAARKIDGFSGREIAKLVASVQAAVYGRPDCILDPQLFSEVVDYKVTEHHQRIKLASEGMV

SEQ ID NO: 203677 - protein, 91 aa, Zea mays
  Clone ID: MRT4577_117342C.1.pep
CLARVSLFVLGLILNIKSKDAAANGPDLEKSVLVLVLILHCIETIGLDIVGGSIHKGIEVQVMPGELHLVILLVVKTGLSFSSDMMTAYIW

SEQ ID NO: 203678 - protein, 193 aa, Zea mays
  unsure (1)..(193): unsure at all Xaa locations
  Clone ID: MRT4577_117343C.1.pep
QATRTIWEPPRSAAIRRPWSAWPERCGRSTTHRSXQVFELMRSALNALLFRTGDQSRDIVLVLATNRPGDLDAAITDRIDEVIEFPLPGEEERFQLLKLYLNQYILKEEGKGSSWSALFKKQQRKIQVNGISDDLLREAARKIDGFSGREIAKLVASVQAAVYGRPDCILDPQLFSEVVDYKVTEHHQRIKLA

SEQ ID NO: 203679 - protein, 600 aa, Zea mays
  unsure (1)..(600): unsure at all Xaa locations
  Clone ID: MRT4577_117344C.1.pep
MLRRLRLRSPVSAVAGAAAAMASLTNVAYADGLFRRQSPPSXQATRKIWEPPRSAATXTLERMARALREINNSPLAKQVFGLMRKQEETRLTELEAEKVQYAIYEKLRDMERMEKKAEDYRNSLQQEAQVKAQALRFEDELARKRMQTEHAAQRQQDAELVKMQEASALRREEARRATEQKILEEMIQTEKEKAEIDQEVNRAKALAEAEARVHEEKQSEEVTKRMMLERMKGEKEKWLAAINTTFSHIEGGFKALLTDRSKLIMGIGGVTALAAGVYTTREGARVTWSYINRILGQPSLIRESSMPKFPLPMSRLLKQNLGSAFADPXFINVKVPPXMSRVLNXLVSISANTKSHGAPFRNMLFYGPPGTGKTLVAREMARKSGLDYAMMTGGDVAPLGSEAVTKIHQIFDWAKKSKKGMLVFIDEADAFLCERNSTHMSEAQRSALNALLFRTGDQSRDIVLVLATNRPGDLDAAITDRIDEVIEFPLPGEEERFQLLKLYLHQYILKEEGKGSWGALFKKQQRKIQVNGISDDLLREAARRIDGFSGREIAKLVASVQAAVYGRPGCTLDPQLFSEVVDYKVTEHHQRIMLASEGMA

SEQ ID NO: 203680 - protein, 102 aa, Zea mays
  unsure (1)..(102): unsure at all Xaa locations
  Clone ID: MRT4577_117345C.1.pep
MRSDARLDSVVFQLTPTRTRFDLVLIANGRKEKFASGLLKPFVAHLKAAQDQIAKGGYXAATTLEPSSGFDVPWFTRGTVERFVRFVSTPXFFERVRTLECG

SEQ ID NO: 203681 - protein, 43 aa, Zea mays
  Clone ID: MRT4577_117346C.1.pep
MGCNTNCRVPGLFGSYAAAKADCLDELAVVTTHDTSTTIYRLW

SEQ ID NO: 203682 - protein, 129 aa, Zea mays
  unsure (1)..(129): unsure at all Xaa locations
  Clone ID: MRT4577_117347C.1.pep
MGNPRVFFDMTVGGAPAARIVMELYANQVPKTAGNFRAPCTGXEKGVSXPGKPLHYKGCTLHRVISRFMCQGGXDXTRGYGTGGEDIYGERFPDEKGRRKHTRPGVRXIAHAGPNTTRAQFFICSGETP

SEQ ID NO: 203683 - protein, 105 aa, Zea mays
  Clone ID: MRT4577_117348C.1.pep
KKKTIPLLLEKTFYTNLGLQKVTKIRWGKIPWGGLNLFYNYLMPMREVFLKNSWHLWTKKAHGVGKNIRETMFLRALFFVFLFPGKFYFCFKTQMNFRLSLGGPP

SEQ ID NO: 203684 - protein, 89 aa, Zea mays
  unsure (1)..(89): unsure at all Xaa locations
  Clone ID: MRT4577_117349C.1.pep
MSQLLDKAKNFVSEKVNDMAKPXGXVTDVDFKRVSKDNVEYLAKVSVRNPYSTSIPICEINYSFKSASREIASGKIPDPGSLKAKDTTM

SEQ ID NO: 203685 - protein, 82 aa, Zea mays
  Clone ID: MRT4577_11734C.1.pep
EAKTFVRQVDRAAVFHNARTQCCDGARIELGAEVGIITRRIHTLCPVSVETLLTAHYIMRGSGHKENGDKNVAYSYNNLTLQ

SEQ ID NO: 203686 - protein, 167 aa, Zea mays
  Clone ID: MRT4577_117350C.1.pep
ENRKTPLEKEKKAGKNRKNESTQSRREGAKKRPKGQTPLPGGRGSEKNTKQNGVAPWKRGKGANTKNVREATQGAPQGQKIKPRGRKRREMGQDKNFPRETREGPEKGKKWAPRKATTQERATRVLRNPPLFTRTAPGKKVFLFFFFFFFFFFFFFFFFFFFFFFFF

SEQ ID NO: 203687 - protein, 104 aa, Zea mays
  Clone ID: MRT4577_117351C.1.pep
RECNTSGAHHTFTTVILISKVAHPHVFLSSVMGEVGVSHTVLFNMAWNMINEGVRSSLWLQFKPPHIAAAVCITFAAKLRSTYDISTPIQNLLAGIQDKSIQCS

SEQ ID NO: 203688 - protein, 192 aa, Zea mays
  unsure (1)..(192): unsure at all Xaa locations
  Clone ID: MRT4577_117352C.1.pep
MGRLVVAAAVAVWAFPIAALVNSVVPEPYMDEIFHISQAQQYCRGDFWTWDPMITTPPGLNXGERKATAYAILVALYPVHWFFTFLYYTDVASLAAVLAVYLFCLKKQFWISTMFGVFSILFRQTNVIWIIFFAANGAITYVKDLYPKDNASHENSEPIHQSKKASARDNKTSVQSLRRRRINSPINKVIVL

SEQ ID NO: 203689 - protein, 70 aa, Zea mays
  Clone ID: MRT4577_117353C.1.pep
GAFVRLPGSSLRVTIDPDFGSFGAYSKTTVFFPITKWAARLPPPMWIDNTVCLYAPCEKGVRRYHKSVSG

SEQ ID NO: 203690 - protein, 504 aa, Zea mays
  unsure (1)..(504): unsure at all Xaa locations
  Clone ID: MRT4577_117354C.1.pep
MGRLVVAAAVAVWAFPIAALVNSVVPEPYMDEIFHISQAQQYCRGDFWTWDPMITTPPGLYYVSLAYIASFFPVAWMFRVAKTFDVLCSTAALRSTNVILAMVCAVLIHDLLLCIRPGIGERKATAYAILVALYPVHWFFTFLYYTDVASLAAVLAVYLFCLKKQFWISTMFGVFSILFRQTNVIWIIFFAANGAITYVKDLYPKDNASHENSEPIHQSKKASARDNKTSVQSLRRRRINSPINKVIVCESANPYNSLTEEVCDISLKLWNSKCEILIAFAPFVVVMAAFVAFIIWNGGIVLGAKEAHVVSPHFAQFLYFGLVSAAALLPWHFTPNRVLDLFHLSGKNKTCGSLAVLMGLGLSFVAVHFFXIAHPYLLADNRHYTFYIWRKVIQVNWMMKYMLIPLYVYSWLSIINILGKSQTRIWVLSFVLSVALVLVPAPLVEFRYYTIPFVILVLHSPSIGNGKLLAMGSLYAAVDLSTLVMFLFRPFRWEHEPGTQRFMW

SEQ ID NO: 203691 - protein, 141 aa, Zea mays
  Clone ID: MRT4577_117355C.1.pep
MAKVHPDRHPNVLPPSPAEEKEEEATSLTVWRKSLLFNCRGYTVFDGRGDLAYRVDSYDDAGADAGAVLMDPAGRPAFTVARRSRLLGLLSGQQRLIYAGEDTRRPAVYAVVRRRGKATARVTPCAAAGAAYEVEGSYARR

SEQ ID NO: 203692 - protein, 113 aa, Zea mays
  Clone ID: MRT4577_117356C.1.pep
KEGRHSRDYLCDSPHHCRPHPALHRRTGAIPGITSAAAPTIIALIRSPPSSPPPAPAILLLRASLRCPSPAPAIPAYLDPGFAQVASQGPHHARSGSMVGASLTCVVAGSFVT

SEQ ID NO: 203693 - protein, 72 aa, Zea mays
  Clone ID: MRT4577_117357C.1.pep
KVLRMVRPICHVLMAAFNMVPHLAAFLISTARRLLILCLPYLNTTGTLADSCCGPLKDAVQNDLKCLCDLYV

SEQ ID NO: 203694 - protein, 206 aa, Zea mays
  Clone ID: MRT4577_117358C.1.pep
MAKVHPDRHPDVPPSSPAAEEEEEEATSLTVWRKSLLFNCRGYTVFDGRGDLAYRVDSYDDAGADAEAVLMDPAGRPAFTVARRSRLLGLLSGQQRLIYAGEDTRRPVYAVVRRGGKATARVTPCAAAGAAYEVEGSYARRRCVVYDAERRVVVAEVRPKEAVGTDVFRLVVRPGFDVSLAMAVVVALDQLFGGRPSLLRSWSTTM

SEQ ID NO: 203695 - protein, 106 aa, Zea mays
  unsure (1)..(106): unsure at all Xaa locations
  Clone ID: MRT4577_117359C.1.pep
LGNLLAVTXTSMKRMLAYSSIGQIGYVIIGIIVGDSNDGYASMITYMLFYISMNLGTFACIVLFGLRTGTDNIRDYAGLYTKDPLLALSIALFLLFLGGPYWPLVL

SEQ ID NO: 203696 - protein, 36 aa, Zea mays
  Clone ID: MRT4577_11735C.1.pep
STKATSGIIDCISISRCMVLCTTTSTGAYTVHGGSI

SEQ ID NO: 203697 - protein, 34 aa, Zea mays
  Clone ID: MRT4577_117360C.1.pep
MNSWSVEIIDILIDCPSYLGKCVRNSLGVRGRVA

SEQ ID NO: 203698 - protein, 93 aa, Zea mays
  Clone ID: MRT4577_117361C.1.pep
SPTGTPYVSPQCQSFRHQFFHQLRQVDPQPRFQAFFGLVLQSILQQQPQNGQVPGLFAAQITHHLTAILGLQQPTPCPYVSAGGVPPLKNFLL

SEQ ID NO: 203699 - protein, 83 aa, Zea mays
  Clone ID: MRT4577_117362C.1.pep
LKTPAPAPAYLLTSGCTPFLQAVLQLLQPSSFPALLVAGIRLSSSRILRADARLPVVPPPRPTRLQQLPLTPSSPAAPPQEAH

SEQ ID NO: 203700 - protein, 65 aa, Zea mays
  Clone ID: MRT4577_117363C.1.pep
TVVCCWLADLGPSVLVPGRLITSASAFLVTCATSTTLPRMPARVPASTARDERPSRQVSSSVSAA

SEQ ID NO: 203701 - protein, 167 aa, Zea mays
  Clone ID: MRT4577_117364C.1.pep
AGVAEPSPALALGEMLSAPMDTEIDLQPSACQNPFASTSGQDQSSSPLAEPPSYYAQSPMLPMAQLHEHAHRTAAGVDMNSDTTTGDTSQDDTTSETGGSHVPAKVNDVFWERFLTDAAEGKSEAIEAKEDVKTAVDRCCPRLQDNVDQITEQMGQLDSASYAPENY

SEQ ID NO: 203702 - protein, 44 aa, Zea mays
  Clone ID: MRT4577_117365C.1.pep
NTFRDPKSTYKVQGPKWHPLISLNVTGVKSVFLVITCSFKFGFI

SEQ ID NO: 203703 - protein, 49 aa, Zea mays
  Clone ID: MRT4577_117366C.1.pep
GPSQSNVCNTTVSRFQISDPIKNLCCSMDASVRVDVLNRPPAAPICVIM

SEQ ID NO: 203704 - protein, 214 aa, Zea mays
  Clone ID: MRT4577_117367C.1.pep
PTRPPTRPKKSYMPSQRKQRKFCNCPVEMAKKSYKDACFWCPQAYANDMDSSEEDELDDNLNDIFGLNDDGITSSVSASRDQLKYNLISCKQMVGIFVTVWAKKELMQHIGHLRTSCVGRGIRGYLGNKGCISVSMTLYQTSFCFICSHLASGEKEGDELRRNLDVLEILRLTQFRRICRRAGRRIPEKILDHERVIWLGDLNYRISLCYEDTK

SEQ ID NO: 203705 - protein, 75 aa, Zea mays
  unsure (1)..(75): unsure at all Xaa locations
  Clone ID: MRT4577_117368C.1.pep
SPTRSVISFFDLDQNIQGCMLSDYKVVDELQXYMTSAFEHMNAMFNSQDCDLRMXACTLGANRVDRAILLIGWEA

SEQ ID NO: 203706 - protein, 78 aa, Zea mays
  Clone ID: MRT4577_117369C.1.pep
CPSLTTTPPFPKKTTRDTGALFHGTAVVPANLPAKNVRPVTDSAHTVLPGKPPHVRFSHSNNPIGYQHTNAHPSSTEQ

SEQ ID NO: 203707 - protein, 224 aa, Zea mays
  Clone ID: MRT4577_11736C.1.pep
MMDAAAMPPFQQARPAKRSYDDMAAVAEAANAPSANTRPASQNQDHILAERKRREKLSQRFIALSKIVPGLKKMDKASVLGDAIKYVKQLQDQVKGLEDDARRRPVEAAVLVKKSQLSADDDEGSSCDDNSVGAEASATLLPEIEARLSGRTVLVRVHCDNRKGVLIAALSEVERLGLSVMNTNVLPFTASSLDITIMAMAGDDFCLSAKDIVKKLNQAFKSPF

SEQ ID NO: 203708 - protein, 87 aa, Zea mays
  Clone ID: MRT4577_117370C.1.pep
GEAWTITLPDRHLLRQGSTRLSYPMAGWMAKSTRKPYPPRRYLEEQFGTRWYHHDFPCESVEQEIDKWIYVIQNKLDATSWVEHTER

SEQ ID NO: 203709 - protein, 193 aa, Zea mays
  unsure (1)..(193): unsure at all Xaa locations
  Clone ID: MRT4577_117371C.1.pep
MPQDLKKLMPQAKTYRTGPYTCEAPNAQKVDGETVPRRNNAAKDGLILKPHEDVSTLYDILRHSAAKFGNAKAVGARRIVNVHEETKKIKKMVDGKEQEVDKKWQYFELSPYKYKSFIEFEQMALSVGSGLKSLGFEPQDRLHLFAATSMQWLASAHGALSQSMGIVTAYDTLXXEEGLKHSMLQTKQGHGYR

SEQ ID NO: 203710 - protein, 110 aa, Zea mays
  unsure (1)..(110): unsure at all Xaa locations
  Clone ID: MRT4577_117372C.1.pep
HPSVPNPPTKPLGALFFLIRNXRPGVSEFGWGNAFPELKDAFGSDDPRLQRKALNLIQYLLNNSKATRSVATKLGFPKLMIHLGSSDDSLGREAVLGGLLDLPRTRTFVN

SEQ ID NO: 203711 - protein, 73 aa, Zea mays
  Clone ID: MRT4577_117373C.1.pep
ATGGGFKAAKPAVARNGLQTTLDHMEVAGSFPYLSNPSKGGGFLPVVRTPSPLEVLVWVKQSMEGSPNGGNCL

SEQ ID NO: 203712 - protein, 86 aa, Zea mays
  Clone ID: MRT4577_117374C.1.pep
PPPPGLGVPPEGQGGTFSPPLISVVKPLGNVSCNKCVNKKTILSPATLECLKMCCCSVGPATMAPKTVNVNGSPLTKAKKCGLFPF

SEQ ID NO: 203713 - protein, 92 aa, Zea mays
  Clone ID: MRT4577_117375C.1.pep
SSESVRGIYTCTPQGIWKNEEDGEKMPRCLPVCGKPVNPVTQKQRIIGGLKANPGNFPWRAFTNIHGRGGGALLGDRWILTAAHTIYPKEHN

SEQ ID NO: 203714 - protein, 131 aa, Zea mays
  unsure (1)..(131): unsure at all Xaa locations
  Clone ID: MRT4577_117376C.1.pep
MVSLGGGLLACVFPGPSACLRATHRRGRSHQADPVVFMRSRSXAFSGMGVAPNIGGAWVGLHMKKTFRIVIFQISLNQGQVHGETTGAPTRXLDDFVASLPYNGCPYALYDCDFPPPENVPEIIIFFIARS

SEQ ID NO: 203715 - protein, 119 aa, Zea mays
  Clone ID: MRT4577_117377C.1.pep
QILQTEATTLSAQLTLLQRDSAGIATQNNELKFRLQAMEQQAQLRDALNEALTAEVQRLKLATAELGDSCSSSNLAQQIQISVQDQMFQLHQQQATPIPFYQLQQAQQNGAGKKHEPTE

SEQ ID NO: 203716 - protein, 37 aa, Zea mays
  Clone ID: MRT4577_117378C.1.pep
YVATNFGLTTLPNPTTLLGQALTSLTTVDRTGNGAFW

SEQ ID NO: 203717 - protein, 84 aa, Zea mays
  unsure (1)..(84): unsure at all Xaa locations
  Clone ID: MRT4577_117379C.1.pep
VDPLVRVRVHVGGEEMLHCDXQTMLLEEDEKDKREEEERRDRRXHRKHERRXRRXQRLKGKDTHKEKILCPGRKQDCQHFLRAA

SEQ ID NO: 203718 - protein, 84 aa, Zea mays
  Clone ID: MRT4577_11737C.1.pep
MMAEAARAPAAAAAAARPASQNQDHILAERKRREKLSQRFIALSKIVPGLKKMDKASVLGDAIKYVKQLQDQVKGLEDDARKRP

SEQ ID NO: 203719 - protein, 99 aa, Zea mays
  Clone ID: MRT4577_117380C.1.pep
IDYKDAKLSQVKYHSLNMKLQNYLKRLKNITNQQCLNNYCGLTVLAQNTMTTLRRSKPGNICCRQLTTSLSTNLRSTTEQECAHTLMHYFCMDSVHERW

SEQ ID NO: 203720 - protein, 45 aa, Zea mays
  Clone ID: MRT4577_117381C.1.pep
NQLQISNYSQSTLIKIFLTVVTLLAPKFVKNQKIHCSNHGFYFKK

SEQ ID NO: 203721 - protein, 74 aa, Zea mays
  Clone ID: MRT4577_117383C.1.pep
PTRPTRSIEPFKYTSNYTHYIPTNSNIVQYIIPAQDYSPFYERYTCYHYSTLSVILLMSQLLCLIKDINTYDQQ

SEQ ID NO: 203722 - protein, 249 aa, Zea mays
  unsure (1)..(249): unsure at all Xaa locations
  Clone ID: MRT4577_117384C.1.pep
GYLEAGRVPYPWLTSTLSLAAGSAIMLASWATRIAEAPQTDLDFWKALTPVAIAHTIGHVAATVSMAKVAVSFTHIIKSGEPAFSVLVSRFFLGEHFPAPVYFSLLPIIGGCALAAVTELNFNMVGXMKGKSVSGMNYYACLSIMSLVILLPFAVAMEGPKVWAAGWQTAVAEIGPNFVWWVAAQSVFYHLYNQVSYMSLDEISPLTFSIGNTMKRISVIVASIIIFQTPVQPINALGARIGILGTFIY

SEQ ID NO: 203723 - protein, 60 aa, Zea mays
  Clone ID: MRT4577_117385C.1.pep
CSGMRFVYILFSTLIMCLDVCRNFLDRCVESIIMLSEFGFFVAQKIMIGTSFGKKKDPIL

SEQ ID NO: 203724 - protein, 391 aa, Zea mays
  Clone ID: MRT4577_117386C.1.pep
MLASAATVKPSTAAAAATCKAAFKPLHLPPLPAAAGLRPLSLSVSARPLYRQEHVLASVAVAAAGRNERATSPAPPSATADGARPLEVAAPAETGRRAKIGVYFATWWALNVIFNIYNKKVLNAFPYPWLTSTLSLAAGSAIMLASWATRIAEAPQTDLDFWKALTPVAIAHTIGHVAATVSMAKVAVSFTHIIKSGEPAFSVLVSRFFLGEHFPAPVYFSLLPIIGGCALAAVTELNFNMVGFMGAMISNLAFVVRTIFSKKGMKGKSVSGMNYYACLSIMSLVILLPFAVAMEGPKVWAAGWQTAVAEIGPNFVWWVAAQSVFYHLYNQVSYMSLDEISPLTFSIGNTMKRISVIVASIIIFQTPVQPINALGAAIAILGTFIYSQAKQ

SEQ ID NO: 203725 - protein, 296 aa, Zea mays
  unsure (1)..(296): unsure at all Xaa locations
  Clone ID: MRT4577_117387C.1.pep
METSAATPTRPPHQAATSPSPSPSSSLRLWRPAAQRNMRNQWSHLSAAKEQWLAAVADGRAHASALVNVHLSCRNMPAMDLGVLKDMPGIRDKANSKLALREEQYSGMLLSAYKEMVRQLSYLVEASHSMRCFSKAAPNCSITQFSDRQDNLNDSGDGGGAPVFKWFSVLXFESLAQELVQLFVSEQKLKRLLLLEFLSIALKEGVELQTSLNWGDELYDGESNKLQSIGLQSGDAYSPPENWCAERLGSQRPGNLSLHEVLQVYLTTWHANMNINRSRIGEILSLLXEEMRIKLS

SEQ ID NO: 203726 - protein, 337 aa, Zea mays
  unsure (1)..(337): unsure at all Xaa locations
  Clone ID: MRT4577_117388C.1.pep
PPNCPHAQPRSRQSQTLPPSAVLRPPGSQPLFETRSSFAALASFSRIKVEPGGRPVNRATQNPSNQWIPPQQPRPGRPTRXAASPSPSPSSSLRLWRSAAQRNMRNQWSHLSAAKEQWLAAVADGRAHASALVNAHLSCRNMPTMDLGVLKDMPGIRDKANSKLALREEQYSGMLLSSYKEMVRQLSYLVEASHSMRRFSKAAPNCPITQFSDRQDNLNDSGDGGGAPVFKWFSVLEFESLAQELVQMFVSEQKLKRLLLLEFLSIALXEGVELQTSLNWGDELYDERLGSQRPGNLPLHEVLQVYLTTWHANMNIXTXEIDEIFELVEEEMKIKLS

SEQ ID NO: 203727 - protein, 117 aa, Zea mays
  unsure (1)..(117): unsure at all Xaa locations
  Clone ID: MRT4577_117389C.1.pep
ESEYREAFXKFTEMTSKYTQEMQAIDGLLKERNEIHASYTNNPPLKRSSSRNKAKSPSKVAKTGTEKHHQKEKKVKDHCMEGCGSDSDNSSEKKSKERFPRKKWLNLPFKLDRRKTC

SEQ ID NO: 203728 - protein, 68 aa, Zea mays
  Clone ID: MRT4577_11738C.1.pep
YNPGAVNGAVHVVRPRLVVDRLTMVIPKGSNGVGIRLGPPFCQDRLLGPQGGQEKCRSWGFRGLPPIQ

SEQ ID NO: 203729 - protein, 73 aa, Zea mays
  Clone ID: MRT4577_117390C.1.pep
GRQVHRHGPGGRLRVSGFHHLLLFLQHAPHHLGEHEVRFFKDIKGQEQRKDLDMQGSGAVHCQYATRRQYVML

SEQ ID NO: 203730 - protein, 331 aa, Zea mays
  unsure (1)..(331): unsure at all Xaa locations
  Clone ID: MRT4577_117392C.1.pep
IEQHKTLQINGDLCSNPTSPSPSPSSSLRLWRPAAQRNMRNQWSHLSAAKEQWLAAVADGRAHASALVNVHLSCRNMPAMDLGVLKDMPGIRDKANSKLALREEQYSGMLLSAYKEMGMVXSPSIQMVLRIRXGGLIISCFYGLSHHYDLSSVGCDNDLLTHLYLRLLRALYILTFEDADQYXDSTHIHVYMFXPHDKNILCFXITSESLAQELVQMFVSEQKLKRLLLLEFLSIALKEGVELQTSLNWGDELYDGESNKLQSIGLQSGDAYSPPENWCAERLGSQRPGNLPLHEVLQVYLTTWHANMNINRSRIGEIFELVEEEMKIKLS

SEQ ID NO: 203731 - protein, 119 aa, Zea mays
  Clone ID: MRT4577_117393C.1.pep
SPASSESEDNGCRGPLRRRALPFPELPRRAHEVRGRRRRPATPSSTCELPDLRLRLGRQRFFRAPGVVVVVGGGHLHLSRRRSGAPAIHRADALHATGGTHSAPQDLRGFSLHRCRTRT

SEQ ID NO: 203732 - protein, 93 aa, Zea mays
  Clone ID: MRT4577_117394C.1.pep
FEGFCVALFTGLPPCSTLIRLKLAKAAKIDLVSNRGWLPAGWRRCVRDGGAEGDNVTGSTPPSLGFPQWRLCSSRVHRSRRVVLPYWCDRVHA

SEQ ID NO: 203733 - protein, 150 aa, Zea mays
  Clone ID: MRT4577_117395C.1.pep
MAPKAEKKPAAKNPGEEEPAAEKAPAGKKPKGEKGAPVGKSAAKEGGGGKRGKKKGKKRGETYKIYFFKGLKQGHPDFGISSKAMSIMNSFINDIFKKFVAEAAKFARYNKKPTITSREIQTSGRLVLPGELAKHAVSEGTKAVTKFTSA

SEQ ID NO: 203734 - protein, 93 aa, Zea mays; identical to SEQ ID NO: 203732
  Clone ID: MRT4577_117396C.1.pep

SEQ ID NO: 203735 - protein, 56 aa, Zea mays
  Clone ID: MRT4577_117397C.1.pep
PRLPRFFLVAITALHAAAVAAAPETRRRGSRGVQSDAADADADESTRRPDGDGSGD

SEQ ID NO: 203736 - protein, 107 aa, Zea mays
  unsure (1)..(107): unsure at all Xaa locations
  Clone ID: MRT4577_117398C.1.pep
RFRFILLGYPSRKKKWKRKINQFTIHQDSISSVFICLSRSLQSLPMILEYSTGLLVTHNFFKKFNVGLHWNHIGKSVGPTYVIEMRFLSYQDQXXXXXXXXXXXXXX

SEQ ID NO: 203737 - protein, 296 aa, Zea mays
  Clone ID: MRT4577_117399C.1.pep
METSAATPTRPPHQAATSPSPSPSSSLRLWRPAAQRNMRNQWSHLSAAKEQWLAAVADGRAHASALVNVHLSCRNMPTMDLGVLKDMPGIRDKANSKLALREEQYSGMLLSAYKEMVRQLSYLVEASHSMRRFSKAAPNCPITQFSDRQDNLNDSGDGGGAPVFKWFSVLEFESLAQELVQMFVSEQKLKRLLLLEFLSIALKEGVELQTSLNWGDELYDGESNKLQSIGLQSGDAYSPPENWCAERLGSQRPGNLPLHEVLQVYLTTWHANMNINRSRIDEIFELVEEEMKIKLS

SEQ ID NO: 203738 - protein, 132 aa, Zea mays
  unsure (1)..(132): unsure at all Xaa locations
  Clone ID: MRT4577_11739C.1.pep
MRPAPSVSRPRPTSTSTTSPAAPPPAAAKLASSPWHSTVPYLFGGLAAMLGLITLALLILACSYRKLNDYLSTGDASPSPSRPEATDGNGFKSPAATAPASPATFADLVXGXMAGEKIXTXLXGPRRTGKDR

SEQ ID NO: 203739 - protein, 45 aa, Zea mays
  Clone ID: MRT4577_1173C.1.pep
QPRSELGLGPGPRASLQQWPLALTSLAEERSDATYRFAKCTDSSN

SEQ ID NO: 203740 - protein, 277 aa, Zea mays
  unsure (1)..(277): unsure at all Xaa locations
  Clone ID: MRT4577_117400C.1.pep
METSAATPTRPPHPAATSPSPSPSSSLRLWRPAAQRNMRNQWSHLSAAKEQWLAAVADGRAHASALVNVHLSCRNMPAMDLGVLKDMPGIRDKANSKLALREVVTPWPPIQCKICFTXDLVGHYAAXLILLLAWFRSNXGMLLSAYKEMVRQLSYLVEASHSMRCFSKAAPNCSITQFSDRQDNLNDSGDGGGAPVFKWFSVLEFGGLIISCFYGLSHHYDLTSVGCDNDLLTHLYLRLLRALYILTFEDADQYLRQYKHSCLHVLNPHDKNILCFL

SEQ ID NO: 203741 - protein, 58 aa, Zea mays
  unsure (1)..(58): unsure at all Xaa locations
  Clone ID: MRT4577_117401C.1.pep
MAANLKWAPVLALVVVVAAMVXTTSVGNIAVYWGQNGNDCSLADACNYGLYAYVNIAF

SEQ ID NO: 203742 - protein, 97 aa, Zea mays
  Clone ID: MRT4577_117402C.1.pep
RSKCCCQKLRRGGGPFFCQPFGLGPELTNTLFLGYPIFVTFFPPTFGNFCLPKHLGWEILIALPPPNKISKNASPFFGIRGGGHLSCNRSFKIGGVY

SEQ ID NO: 203743 - protein, 53 aa, Zea mays
  Clone ID: MRT4577_117403C.1.pep
SSFLGLNQIRPLRPCMFMGWSQHGSPCVFVLSSWGTVLCAVIGRDGRVSPRDP

SEQ ID NO: 203744 - protein, 162 aa, Zea mays
  Clone ID: MRT4577_117404C.1.pep
GTPAGTGPEFPGRPTRPNVARIMKNAIPQTGKIAKDAKECVQECVSEFISFITSEASERCHQEKRKTINGEDILFAMSTLGFDSYVEPLKLYLQKFREAMKGEKGIGGAVSATDGLSEELTEEAFTNQLPAGLITADGQQQNVMVYTTSYQQISGVQQIQFS

SEQ ID NO: 203745 - protein, 189 aa, Zea mays
  Clone ID: MRT4577_117405C.1.pep
EIPGVGKVHGGFMKALGLQKNAGWPAQLTEPTTTRPYAYYAVRERLRAVLAANPRARFVVAGHSLGGALAVLFPTVLALHGEGSLLGRLAGVYTYGQPRVGDAQLGRFMEEHLDRPRRYFRFVYSNDVVPRVPYDDAALLFKHFGLCLYFDSFYRAAAIAEEPNKNFFSPLFLAPMYANAAWVLFRGFL

SEQ ID NO: 203746 - protein, 151 aa, Zea mays
  Clone ID: MRT4577_117406C.1.pep
TQTCVHRSRRTCRITSPIPRRPLALSRLPRHATRLPLVLGPRAATAGGTPRARGHGVPGPGHHDEPRLRLARGSRAALARKHAARRRDDGARRAAQGRAGVGGRSGGGGRAGARKAGGAGGGGHHGGGRGAPAHRLRPPRAHLRGELAGLP

SEQ ID NO: 203747 - protein, 127 aa, Zea mays
  Clone ID: MRT4577_117407C.1.pep
PLLLPCLLFAPLLSLNFFPTLTIDPEAASRVLLPLPADTWVAPHLPLLPLLAGRNTCSWLLGPLTICLAPSIMQVIRTPLVYPLATSSPILRKRSDNPDAVKRSSYNDKRVCPPCNYEEDDDDTIRN

SEQ ID NO: 203748 - protein, 78 aa, Zea mays
  Clone ID: MRT4577_117408C.1.pep
GLTSSASYQYHNTTTRRGGGPAASMGDGDRERDPDQETRNQMMQILFGDQSDDEDDSDDDDIGDMVYDDDGHEPETTP

SEQ ID NO: 203749 - protein, 90 aa, Zea mays
  Clone ID: MRT4577_117409C.1.pep
LFFFLDPPFSILWVFVGSSCPHFFLVVSRGKALFFPKLPRAWGVFFCLAPIFFGVWCLWALFFLSRLPPHNFFFPVCPAPVKPFTSFSHG

SEQ ID NO: 203750 - protein, 114 aa, Zea mays
  Clone ID: MRT4577_11740C.1.pep
YSKYVLSRTFMARTILIRHLTMFFSYVCVVTLSVCAGLVSLACVCRARSCRRLLTNRGAHDPLGQAGGVGIQVRGHVLDGEHVVIVDRADSADIASCRCACYDALEEHADLVAE

SEQ ID NO: 203751 - protein, 49 aa, Zea mays
  Clone ID: MRT4577_117410C.1.pep
EKCPITDNGTCTNLLAVFTLEDYPNTFFSLRMSPLPNETQERIPQSGIP

SEQ ID NO: 203752 - protein, 91 aa, Zea mays
  Clone ID: MRT4577_117411C.1.pep
SYMENTQMLIIEADRLDRKRWVEAIYDLHRMLNADQLIDARLLEYAYMLDLACDMNAAGISDMLRLHSMLQRRSCMHNTYATSGAGIYDDL

SEQ ID NO: 203753 - protein, 36 aa, Zea mays
  unsure (1)..(36): unsure at all Xaa locations
  Clone ID: MRT4577_117412C.1.pep
RXRXSXGAGDLNRXGXAAXVSFGRGVXFLVFRESES

SEQ ID NO: 203754 - protein, 152 aa, Zea mays
  Clone ID: MRT4577_117413C.1.pep
ISNQYTNEEEIKRKRKKRKRVVVLAVSIMAIIANRYQRRRPRHIIDANEVQERNVECRKQMLCNMYQGSNVYCYDSLRLTKRSFSDLSAILREKSGLQDTLNVSVEEKLTIFLLIVGHNTKMRLIRSTYGWSLEPISRHFIEVLIGILSLSH

SEQ ID NO: 203755 - protein, 50 aa, Zea mays
  Clone ID: MRT4577_117414C.1.pep
GNPLCFSKRGTSLFGEPGTCQEESFQPRGVGTLLGPGAPPFSTKGVFFFP

SEQ ID NO: 203756 - protein, 112 aa, Zea mays
  Clone ID: MRT4577_117415C.1.pep
QYQLSTNIINLRHYTIIYTLYTSLSAHIARNLDHIAIIVQTSHRQQDHLAIHAHDIPHYTGYVINTNTNHEHHDPALHILDMKYHLILHDTHYPVKAGLEAYHTSHRDHHNL

SEQ ID NO: 203757 - protein, 129 aa, Zea mays
  Clone ID: MRT4577_117416C.1.pep
APRSNRGPKKTFFWPYYKNSGPKVPKGAPQQDPFFPGPPGIWANTPPTPGGEKIISLDKKTLKIHIGPQKTLKSLWRPKGKIGFVIGTPKGFGIGILRGLMGGMGSLRGGHILVRGGRNYSRKGFKGWG

SEQ ID NO: 203758 - protein, 62 aa, Zea mays
  Clone ID: MRT4577_117417C.1.pep
QHILMQDTDTDTDTDMIKKTTDSLYNPWTNRIHNISNAKYCKPLVQNILQLSRVMIVSRLQY

SEQ ID NO: 203759 - protein, 86 aa, Zea mays
  Clone ID: MRT4577_117418C.1.pep
ISHPKKKKPGGLLFYLTDISPPIVSRPAPCCCWRTRRFYTLEGLPLFLPPLDFCKSGPPFKKKQDSVFFAWKLFCGGLKKIFSARG

SEQ ID NO: 203760 - protein, 200 aa, Zea mays
  Clone ID: MRT4577_117419C.1.pep
RNELYAREPSIMRYIKIAAMLPNRTIRDVALRCCWATGKERRKKPDGFYTGKKMRDVKPIQDKMVASVPIANFHMTPTTNVIPFSVSTQHPNQQSQVPKEAPVVDSATQRLLEENNQLLNQISANNETFKTVENTDLFLRTSNNIKTILSRMSETPGIMSQMPPLPLSINEDHINSLIQLNRLVASYGTTSISHHTKQEP

SEQ ID NO: 203761 - protein, 176 aa, Zea mays
  Clone ID: MRT4577_11741C.1.pep
LFEPSELTSWSFYRAGIAEFVATFLFLYITILTVMGVSRSDSKCKTVGIQGIAWASGGMIFALVYCTAGISGGHINPAVTFGLFLGRKLSLTRTIFYIVMQCLGAICGAGVVKGFEGKKLYGDSGGGVNYVHSGYTKGDGLGAEIVGTLILVYTVFSATDAKRSARDSHVPILAPL

SEQ ID NO: 203762 - protein, 70 aa, Zea mays
  unsure (1)..(70): unsure at all Xaa locations
  Clone ID: MRT4577_117420C.1.pep
DSQRCAAYVLHRACYVQPRTITVSRRDSLTELLLGPHPEYVSRRASVHDTVAXARLCMLDEQLSDAXVGD

SEQ ID NO: 203763 - protein, 313 aa, Zea mays
  Clone ID: MRT4577_117421C.1.pep
MAADSSMGFHQGITASLYNHHMLSFQSNSDVGIGGGDDATGGMVMAPGSVSGGSGNAGLFLSPNTGVVGNAPGVAPLMNSSGDAFRGTGTPKYKYVTGSPSDWSDREVDILNEGLVRYAREPSIMRYIKIAAMLPNRTIRDVALRCCWATGKERRKKPDGFYTGKKMRDVKPIQDKMVASVPIANFHMTPTTNVSPFSVSMQHPNQQSQVPKEAPIVDSATQRLLEENNQLLNQISANIKTFKTVENTDLFLRTSNNIKTILSRMSETPGIMGQMPPLPLSINEDHINSLIQLNRLVASYGTTSISHHTKQEP

SEQ ID NO: 203764 - protein, 145 aa, Zea mays
  Clone ID: MRT4577_117422C.1.pep
MTPTTNVIPFSVSTQHPNQQSQVPKEAPVVVSATQRLLEENNQLLNQISANNETFKTVENTDLFLRTSNNIKTILSRMSETPGIMSQMPPLPLSINAWYHESDAPIAFIHKRRPYKFSYSTEQTSFMALASYDGKCLLCHICNPE

SEQ ID NO: 203765 - protein, 86 aa, Zea mays
  Clone ID: MRT4577_117423C.1.pep
FNICTMCTNFLCAPDMSSYSAAHIVCRNDKPHSELTKWRHPRSFWLGASGKKRSMNAYQQIVCVNGNITPFVSSLLSSHLSTSHSH

SEQ ID NO: 203766 - protein, 48 aa, Zea mays
  Clone ID: MRT4577_117424C.1.pep
FVWGQLNFLILKKKKKKKKKKKKKKKKKNKKKKKKKTKKKKKKKKKAC

SEQ ID NO: 203767 - protein, 145 aa, Zea mays
  unsure (1)..(145): unsure at all Xaa locations
  Clone ID: MRT4577_117425C.1.pep
TSCFSXXRSAKRAPGGXDGRRGLRQXGAAXCAFMLLFXPPLVLRTYXXFLGPVGTXXPXGXPLPPPRVLXPPLGGYPPRLXESXSLSVVLGPCGMVXGAXWWSAWCLITTRHEENNYGPRSWDGLMEASSKLVGGIAQPGPGRHR

SEQ ID NO: 203768 - protein, 43 aa, Zea mays
  Clone ID: MRT4577_117426C.1.pep
LNYLRPNIKHGGFSDEEDMIILSLYISIGSRWSIIAAQLPGRT

SEQ ID NO: 203769 - protein, 122 aa, Zea mays
  unsure (1)..(122): unsure at all Xaa locations
  Clone ID: MRT4577_117427C.1.pep
MGQEKPHINMGGIGHVDSGKSTTTGHLIYKLGGIDTRVIERLEKEAAEMNKRAFKHARPLXDKLNAERERGITXDIPLRKFETTKCYCTDIDAXGHRDFIKNMITGSSQADWAVLITDYTTG

SEQ ID NO: 203770 - protein, 115 aa, Zea mays
  unsure (1)..(115): unsure at all Xaa locations
  Clone ID: MRT4577_117428C.1.pep
MAAKISGPGMLFGLSARAATATIITQCSQAPIAQLVATDLSPSVSTLYENASLQPYRNQQAFAAGILPLXPLPISNHKTYYSNLPLVHSLAHNIRAQQLQQLVLXNLAAYSKNNR

SEQ ID NO: 203771 - protein, 606 aa, Zea mays
  unsure (1)..(606): unsure at all Xaa locations
  Clone ID: MRT4577_117429C.1.pep
RPTCNLVIHRRTNQKYTVQGLTPLPASQMTFVDAESGQTRRLVDYYAQKHGKVIEYQMLPCLDLSKSKDKPNHVPIELCTLLEGQRFPKANLNQNSERILKGSALIRASDRRKEIQNLVNASDGPCRGEIAQQFGISLDVRMTEVTGRILPPPNLKLGASNGQTSKLSIDHGCQWNLVKKRLVEGRVLQCWGIVDFSAEPSGSXPVRSPSXTRMFVEKIVRKCCELGIRMNPNPCFVHITRMAVLFDPHGLHEELNKAKQAAVSKKQRLQLLFCPMSEQHSGYKTLKLICDTQLGILTQCLLSDRANNRKGQDQYMTNLALKINGKLGGSNVQLFDSLPRVGGGVPFMFIGADVNHPSPGNVESPSIAAVVASVNSGVNKYVTRIRAQPHRCEVIQQLGEICRELIGVFEKQNRVKPQKIIYFRXDGVSDGQFDMVLNEELADLEKAIKVNGYAPPITVVVAKKRHHTRLFPRDEQQPQTKTGNVPPGTVVDTGVVDPSAYDFYLCSHTGILGTSRPTHYYTLVDEHGFGSDDLQKLIYNLCFVFARCTKPVSLATPVYYADLAAYRGRLYYEAAMMASQAQRGGSFDVTNFPRLHKDVEDNMFFI

SEQ ID NO: 203772 - protein, 84 aa, Zea mays
  Clone ID: MRT4577_11742C.1.pep
ARCTIIYIHTYLSIFSLHHITITFLQSRSMSNPASSSFLLLLLSATLLSTFFRSDPYPVQDFFFSVSPCCHNNSSSSSITYSFF

SEQ ID NO: 203773 - protein, 402 aa, Zea mays
  Clone ID: MRT4577_117430C.1.pep
MPLTRVAADAFGVLTIGLLALLAALGLFCIFQSVYFRCQIRRGPSFLPLGYFNGPWVTRVALVLITIWWGVGEVARLSFLKQKLFSSLTWQRNICDAYILSNLGFAEPGIFFAFAFLLHGSLQKKELGTLNQRWNWKSMAYTLVFCVPVFSVQAVLVFVVGPRLVRDSNHDLGRRKIAKYFVRTHTPVGDTSVCTYPLLGTIFLGLVDAFLMSYVSYVGSRALSLVINKSLRRRVYLLMLSVLCFLPTRVLLLGFSVLPRPGDAAFEGIVFLSFLTMLSCTAVGILLLVYYPVADSLALRDVGQRDMAAEMVPYDDYYCYEGASLVANRSFRELERNSDTSTKPGSISFRTMIREDQLQQDGAADEIGFSSRSGAHIGSPSPAGSSPSAAMPMLPVKEIPRY

SEQ ID NO: 203774 - protein, 697 aa, Zea mays
  Clone ID: MRT4577_117431C.1.pep
GSWARAGRRTTTAWWTSTFYSPSSSIDIGHGVVAMKGTQQTLKYTQQGLNLCVDYSVMPFYKAGPVMDLVHKIVGYLDYRTTLNKRQMENLVDELKGRRVTVIHRRTNQKYTVQGLTPLPASQMTFVDAESGQTKCLVEYYAQKHGIVIEYQMLPCLDLSKSKDKPNHVPIELCTLLEGQRFPKANLDKNSGRILKGKALIPASNRRKEILDLVNASDGPCRGEIAQRFGISLDLRMTEVTGRILPPPNLKLGASNGQTSKFSIDQNCQWNLVKKRLVEGRDLQCWGIVDFSAEPSDPQQEPLNGRMFIEKIVRKCCELGIRMNSNPCFVHKSKMAVLSDPHGLQEELNKAKQAAVSKKQRLQLLFCPMSEQHPGYKTLSLVRSAGSSLESQCFLSDRANNRKGQDQYMTNLALKINGKLGGSNVQLFDSLPRVGGGVPFMFIGADVNHPSPGNVESPSIAAVVASVNSGVNKYVTRIRAQPHRCEVIQQLGEICLELIGVFEKQNRVKPQKIIYFRDGVSDGQFDMVLNEELADLEKAIKVNGYAPTITVVVAKKRHHTRLFPRDEQQPQTKNGNVPPGTVVDTGVVDPSAYDFYLCSHTGILGTSRPTHYYSLVDEHGFRSDDLQKLIYNLCFVFARCTKPVSLATPVYYADLAAYRGRLYYEAAMMPSHSSAGTFGVTNFPRLHKDVENNMFFI

SEQ ID NO: 203775 - protein, 70 aa, Zea mays
  Clone ID: MRT4577_117432C.1.pep
VLCRITLHLYPHRVSSGRVLIYFLLRLIFSDLGVDEDDDRRLVRAFCRALGTSTRGLLLHIFLGFFWSRE

SEQ ID NO: 203776 - protein, 50 aa, Zea mays
  unsure (1)..(50): unsure at all Xaa locations
  Clone ID: MRT4577_117433C.1.pep
MRECISIHIGQAGXIQVGNASXEQYCLEHGIHADGQMRGDKTIVEDEPKG

SEQ ID NO: 203777 - protein, 83 aa, Zea mays
  Clone ID: MRT4577_117434C.1.pep
CLESSRQWCSVQSVQVLGCACMSSETLYIRSVNQKPYKSWERFRARIRACITRRTQCGHRYRNKYIHASSSGQDGEAPLVFQR

SEQ ID NO: 203778 - protein, 223 aa, Zea mays
  Clone ID: MRT4577_117435C.1.pep
MGMLSRPEEVPALLRLKLAAGRIRRQIPPQEHWAFAYDMLQRVSRSFALVIQQLGPELRNAVCVFYLVLRALDTVEDDTAIPNEVKLPILRDFYRHIYNPDWLFSCGANDYRVLMDNFRQVSTAFLELGEGYQKAIEEITRRMGEGMAKFICTEVETIDDYDEYCHYVAGLVGYGLSRLFHATGTEDLAPDHLSNSMGLFLQKTNIIRDYLEDINEIPRCRMF

SEQ ID NO: 203779 - protein, 172 aa, Zea mays
  unsure (1)..(172): unsure at all Xaa locations
  Clone ID: MRT4577_117436C.1.pep
RPSHARVSMRMVMHNVQYHIQYVMXPATDEHPDLELGRHQLAHRARRXSNGNTDRITRRLGDEHLDHALGTIXAAHKNRDEKGYESIDEHMVQLDLEGDPLGAALIMRKMITMPINMMHHRMHKDLYKHLVEDFHGLGQYIGRDYADIYEYIVKRLKLQTLQSTLYSEVCRD

SEQ ID NO: 203780 - protein, 107 aa, Zea mays
  Clone ID: MRT4577_117437C.1.pep
VVFFFFRGTRKKSTSSPQLGEQLSLHLSTKPQPGICEPYPALLAFPYSSYHTRGLYVASCTTPPSSGTTTFFSRLLRTNPRLPLWRLTSPQNSRRTTPWRLLWSRWS

SEQ ID NO: 203781 - protein, 28 aa, Zea mays
  Clone ID: MRT4577_117438C.1.pep
RCGPPPMNKAMAAHLDDLGYTKEMQFQF

SEQ ID NO: 203782 - protein, 82 aa, Zea mays
  Clone ID: MRT4577_117439C.1.pep
QVCSAHPPLCSLCYLPAAKRSCPPYSFCSFLQSFYPSYSHKGAFPSPPLYPLLYLPASCTRWSPHSSQKNTLCARFRASARA

SEQ ID NO: 203783 - protein, 147 aa, Zea mays
  Clone ID: MRT4577_11743C.1.pep
EECADKFLQFITNQGLLVAISNENEIQVWNLEFRQLFYSSQWDVNITAFAVIERTFMMYLGDENGLLSVLKYDVDDGKLQIMPYNVHIHSLIERSGVSLQDPQPIVGILIQPDTFGTRLLIAYERGLLVLWDVSEDRAVSVRGYGDS

SEQ ID NO: 203784 - protein, 59 aa, Zea mays
  Clone ID: MRT4577_117440C.1.pep
THPGASPPSLYPLGSNIHFVKLFYIKLAPPILLHNISSAPISTEKRLSHPSPRVHERVG

SEQ ID NO: 203785 - protein, 98 aa, Zea mays
  unsure (1)..(98): unsure at all Xaa locations
  Clone ID: MRT4577_117441C.1.pep
PVTLAGLLEXXFSEAPPRMRSLATSLSWASLALGYYLSSVLVSVVNXXXXXXXXXXXLQGASLNHYRLERFYWVMCVLSSINYLFFLFLAVRYKYIKG

SEQ ID NO: 203786 - protein, 48 aa, Zea mays
  Clone ID: MRT4577_117442C.1.pep
GHVGVGCSLYRTRRARPMPRPRQSRRPYATFGFCDHPMRADHICSQTK

SEQ ID NO: 203787 - protein, 95 aa, Zea mays
  Clone ID: MRT4577_117443C.1.pep
VILEPFLRVGVSPLTAHKVEYLSELGAGRGTSVTPSIMSRRSQPCRRSSPPSSSCRAASVVTRHILLNAEMLQRAGETPPPSRRRCPGEPSLRAI

SEQ ID NO: 203788 - protein, 41 aa, Zea mays
  Clone ID: MRT4577_117444C.1.pep
NLILEFCGVLILERSKIKGTRKNIFLTTQNYSMRWGEGTRS

SEQ ID NO: 203789 - protein, 112 aa, Zea mays
  Clone ID: MRT4577_117445C.1.pep
TTQRICMELWFADSVGEKRERSEDRRGRDFVRRDWGHDDDEDFQQTRRHGTRRHRSLSGWARSSRCRGGPGDCISSSGRNRPSTPFRRRGLVIGPTVRWIPKVKTKSVSFAD

SEQ ID NO: 203790 - protein, 65 aa, Zea mays
  unsure (1)..(65): unsure at all Xaa locations
  Clone ID: MRT4577_117446C.1.pep
QCSIVMSDSASSDGTVCTFTSSMHESLMLSDDFCDTPLXLCASQELSDTHALTSASLNLYHDLST

SEQ ID NO: 203791 - protein, 82 aa, Zea mays
  Clone ID: MRT4577_117447C.1.pep
SYAKHNFALHCCSHDTNSRLLSFYKTIRGRLDKTCISHARITHVTLMPWISRPNNYYSMAVGHSYQSTHLIGRAPGILTFVL

SEQ ID NO: 203792 - protein, 73 aa, Zea mays
  Clone ID: MRT4577_117448C.1.pep
VAPASLSFMMRQAVKSLLLLGSFKSCAVKSYESSISKLFGATKVVARTPSLPLDDAMVLALQPGSNTHRSLTE

SEQ ID NO: 203793 - protein, 110 aa, Zea mays
  Clone ID: MRT4577_117449C.1.pep
RLQLAPMAEETNIKKEEEEFSTGPLSVLMMSVKNNTQVLINCRNNKKLLGRVRAFDRHCNMVLENVREMWTEVPKTGKGKKKALPVNKDRFISKMFLRGDSVIIVLRNPK

SEQ ID NO: 203794 - protein, 52 aa, Zea mays
  Clone ID: MRT4577_11744C.1.pep
MSSCSSAGAVPIDHLVLFKAQSEAVASITAAAITSSLQALTTLVPQLLYIHS

SEQ ID NO: 203795 - protein, 93 aa, Zea mays
  Clone ID: MRT4577_117450C.1.pep
RIQAIVHELHELGLLKDHSLEGRYFQNYSYGGVIQDDHIPFLRRGVPVLHLIPSPFPEVWHTMDDNEENLDESTIDNLHEILQVFVLEYLHCN

SEQ ID NO: 203796 - protein, 110 aa, Zea mays; identical to SEQ ID NO: 203793
  Clone ID: MRT4577_117451C.1.pep

SEQ ID NO: 203797 - protein, 62 aa, Zea mays
  Clone ID: MRT4577_117452C.1.pep
GHLMFITSHFGCLSGLSLCLYPPSPFVHEACLPSPGWWIYVLPFGVTLRCLVFLMKVTGYWP

SEQ ID NO: 203798 - protein, 115 aa, Zea mays
  Clone ID: MRT4577_117453C.1.pep
LHVRGTDHSVDSSEHTHRTVEPITLERTSAAALLLRSVTSLTLGRAVARLKMHNMIMRHERMGIDHVDAEALSKSNIDLMLKNKLWKIDTDISLRPMLCIKQNPMTSLAVRLRRP

SEQ ID NO: 203799 - protein, 56 aa, Zea mays
  Clone ID: MRT4577_117454C.1.pep
VVIKKKKAEKKKKKKKKKKKKKKKKKKKKKKKKKKKKGRPFKRTKLNYPCIPTKNF

SEQ ID NO: 203800 - protein, 108 aa, Zea mays
  unsure (1)..(108): unsure at all Xaa locations
  Clone ID: MRT4577_117455C.1.pep
MFQPLRQQYSHKKISMMEVHSVAQXLKMMIQLERPPTPNTSLYKPALIQQQKQLLAAQGLNPMAMMMAQNMPAMGGLYQYQLPSYRTYPCGVSXAIPPQSYPPRKFSL

SEQ ID NO: 203801 - protein, 72 aa, Zea mays
  Clone ID: MRT4577_117456C.1.pep
PLASSFGFGGDNPNCGSTFCSAKCSHQELLANAHELGHESFHMKNSLLIQGASCARSARPSDRFHISDQHLT

SEQ ID NO: 203802 - protein, 121 aa, Zea mays
  Clone ID: MRT4577_117457C.1.pep
TSHEHAAASSIRLILRYLFLTWDLRFQVPTCSSDDTCPHMNRSVIEAGRGGAWVWRDSHFRPRSGHPRREHCMPRRINEPMPRLASRGSALTSHGMRLSATGPCTPNASGARNHGGTPFPL

SEQ ID NO: 203803 - protein, 286 aa, Zea mays
  unsure (1)..(286): unsure at all Xaa locations
  Clone ID: MRT4577_117458C.1.pep
ETGTSVLFETYRAAPRPLGNAVAYLNSAFLAQRDQFASDIATILLAAGSSICIQASSKRLTVMMEDFLQMPPCDHKTLLLSICIPRWTPIGGLFSGDKTMAGTESKTGTSVLFETYRAVPRPLGNAVAYLNSAFLAQVSSDGTSSRLILREIWLAFGAYGSQHAIRARNVEKLLVGKPITTSVLLEACRRLKETIVPKEGTRHAAYRSSLAVAFLFTFLYPVTEGTLKTVKEVHLNGYATFGTNGNPNCGPDAHVDVSLKKVIDVNSGSCTNERILEYSNXIIGIK

SEQ ID NO: 203804 - protein, 160 aa, Zea mays
  unsure (1)..(160): unsure at all Xaa locations
  Clone ID: MRT4577_117459C.1.pep
FFNIKVVDQILLVLAWFILGDTRRIGIPRPNLGPMELKQLSGKTPVLDVGTIAKIKSGDIKVFPGIXSFQEDGVEFIDGRIESFDVVIFATGYKSNVPYWLKENEFFXSRKDGFPCRPNEWKGKNGLYAAGFSRRGLLGVSMDATKIANDIIQSYNNIIL

SEQ ID NO: 203805 - protein, 62 aa, Zea mays
  Clone ID: MRT4577_11745C.1.pep
LTFTMSHTVDLYWHPLSPPARVAAVLLAANGVNVNYHVIDLLKGEQKADSFKEVSAKQQVQP

SEQ ID NO: 203806 - protein, 82 aa, Zea mays
  Clone ID: MRT4577_117460C.1.pep
DLPTPTTHHSGTISKDGRHSNQLLSILYDHCSTTLADAYTPFHQQNPTVEGADPPAEGPSAICHQIRYRTRLHCHDRVQNAR

SEQ ID NO: 203807 - protein, 42 aa, Zea mays
  Clone ID: MRT4577_117461C.1.pep
RPRVRRPLGLTTGNLRDLVSLEQWDSLNKSYMSSIKVVIQVN

SEQ ID NO: 203808 - protein, 77 aa, Zea mays
  Clone ID: MRT4577_117462C.1.pep
NGNNGTKEPQRGQRKQKKIEASRQTQRKQHGEQDKPNPGPQRPPPQKQQQKTKRDGPDGRAPNKKKQHQRKKSLTGS

SEQ ID NO: 203809 - protein, 149 aa, Zea mays
  Clone ID: MRT4577_117463C.1.pep
MAWRRVLTQIARHRPAKAIYNELVASSPLGVLRSDITSGARIRHLQERNQSSYIGSLARRVRDLESPSGTSLLKEIYRSDPERVIQIFESQPSLHSNPAALSEYVKALVRVDRLDESALLKTLQRGVASSTRGEESFSSIPALIGAGQV

SEQ ID NO: 203810 - protein, 704 aa, Zea mays
  Clone ID: MRT4577_117464C.1.pep
MAWRRVLTQIARHRPTKAIYNELVASSPLGAFQSDITAGARIKNLQERNQSSYIGSLARRVRDLESPSQTSLLKEIYRSDPERVIQIFESHPSLHSNPAALSEYVKALVRVDRLDESALLKTLQRGVVSLTRGEESFSSIPALIGAGQLTKDGALGTANAPIHMVTAETGQFKDQLWRTFRSIALTFLLISGIGALIEDRGISKGLGLNEEVQPSIESTTKFSDVKGVDEAKSELEEIVHYLRDPKRFTRLGGKLPKGVLLVGPPGTGKTMLARAIAGEAGVPFFSCSGSEFEEMFVGVGARRVRDLFAAAKKRSPCIIFIDEIDAIGGSRNPKDQQYMKMTLNQLLVELDGFKQNQGIIVIAATNFPESLDKALIRPGRFDRHIVVPNPDVEGRRQILESHMSKILKGDDVDLMIIARGTPGFSGADLANLVNVAALKAAMDGAKSVTMNDLEYAKDRIMMGSERKSAVISDECRKLTAYHEGGHALVAIHTEGAHPVHKATIVPRGVALGMVAQLPDKDQTSVSRKQMLAKLDVCMGGRVAEELIFGDTEVTSGASSDFQQATAMARAMVTKYGMSKHVGLVSYNYEDDGKSVSSETRLVIEQEVKNFLENAYNNAKTILTKHNKELHALANALLEHETLTGAQITNILAQVRNKQQQEHTVEAPQRAPASPASPAAAAAAAAAAAAQQAAAKAKGVAGMGS

SEQ ID NO: 203811 - protein, 144 aa, Zea mays
  Clone ID: MRT4577_117465C.1.pep
APHGAGVASPPRSNWIGWSSGVVSHGSAHSDRRGLPSLGSVEKQGTTLGFPSDHIGAHSFPHFASFLSHLWSLPSTVHSNFRGGCFASPIRPLVAEEERPLPGRAAAVPRMDPKGRNPSWGHWGQKDVPQGSHTWGRIRISARD

SEQ ID NO: 203812 - protein, 267 aa, Zea mays
  Clone ID: MRT4577_117466C.1.pep
LSVIDNVKKDVQFLPISGLVGTNMKTRMDKSICSWWDGPCLFEVLDRIVVPLRDPKGSVRMPIIDKYKDMGTVVMGKIESGTIREGDSLLVMPNKSHVKVIGLNLDESKVRRAGPAENVRVKLSGVEEEDVMAGFVLSSVANPVGAVSEFIAQLQILELLDNAIFTAGYKAVLHIHSVVEECEIVELIEEIGMKKKKEDPKKKKPKRKPLFVKNGAIVVCRIQVNNLICIEKFSDFPQLGRFTLRTEGKTVAVGKVVDIPPAGSPTF

SEQ ID NO: 203813 - protein, 156 aa, Zea mays
  Clone ID: MRT4577_117467C.1.pep
SSGNNAEYFFFFFFFFFFFFFFFFFFFFFSFFFWTEHKRLLNYTNSGPPNQARGGGERNKKKSFFTSAGPKSGKGKPGEKKAEQPRCFYWEEEEKKRERERSGTTGIFTWVRTAQHWAGALASSVLPQQGLLDEPERASADHVVVDGPRRGGPAAP

SEQ ID NO: 203814 - protein, 53 aa, Zea mays
  Clone ID: MRT4577_117468C.1.pep
GAIVVCRIQVNNLICIEKFSDFPQLGRFTLRTEGKTVAVGKVVDVPPAGSPTF

SEQ ID NO: 203815 - protein, 53 aa, Zea mays
  Clone ID: MRT4577_117469C.1.pep
TYRPTSTSVGTDSTCYELPSLALLFCVILIAACIKQPDYAELYYMTAAVTECN

SEQ ID NO: 203816 - protein, 111 aa, Zea mays
  unsure (1)..(111): unsure at all Xaa locations
  Clone ID: MRT4577_11746C.1.pep
RQSSRRRCFCWRWWPRRRWRAQTTVTTATTSATAARAGTATAAAAEXGRRSTPLAGLTQCVTSCGSGVTSCMLDCYQPLVDLDPVELPVCLLKCTNDAMVCATGCPVTGNV

SEQ ID NO: 203817 - protein, 160 aa, Zea mays
  Clone ID: MRT4577_117470C.1.pep
NYKCVLLFFIFYFNFIYQGTSSILRYIKGPSSAAALTIPDSPSSAAALAIPDSSFVPEDPSLDNDVFVEPIHEEECQPSTSEKEDDNNTHSASAFSAKKCRANEEKRISKKLPGVQVSCSFSFGGYHQTFLFGYSQAVGEWKILFSFWLAWFPCNAAPMS

SEQ ID NO: 203818 - protein, 57 aa, Zea mays
  Clone ID: MRT4577_117471C.1.pep
KYGSWDGFPPSESANRALAMGLLLGSYPRPSIPSPPPSCPQLMELGSFAENKPLYDP

SEQ ID NO: 203819 - protein, 54 aa, Zea mays
  unsure (1)..(54): unsure at all Xaa locations
  Clone ID: MRT4577_117472C.1.pep
QIILKQTNRVEVEGEVLLLRLEXRXXLEHHGSYQAVLSVLDYERLQLLTCAGGG

SEQ ID NO: 203820 - protein, 138 aa, Zea mays
  Clone ID: MRT4577_117473C.1.pep
KKSPPFLGGGTRAGKNNHGQGEQQAQRGKKQPTPTHKPGGWQTWPGGGSGKKTRAKFKAPGLKLNKTPLTGPNSGGWAWDRFKRWLLTIFHFPPFFGRRGQKLKKLGALPQKIQIWAFGKGQPLDSALIQTGGAQIFF

SEQ ID NO: 203821 - protein, 89 aa, Zea mays
  Clone ID: MRT4577_117474C.1.pep
GSIPQLLAIFQCVCTRLRVPSGTRGSRRVARRGRFSCLLGLIGLNLLVLLDGATQEENQSSYFCRIPAGGASANARERRIGGGGLDTRF

SEQ ID NO: 203822 - protein, 111 aa, Zea mays
  unsure (1)..(111): unsure at all Xaa locations
  Clone ID: MRT4577_117475C.1.pep
PAGFXTRRGRAAVSHXPXPAXEEGGRLGRRXPPPTHTRRPGRKAARRQRXNGNGAGDEHPPAAEARQAEDQQPHWRQKQHNHXKGXDETXQSRGPGXPSHQLSNGLDDAGR

SEQ ID NO: 203823 - protein, 258 aa, Zea mays
  Clone ID: MRT4577_117476C.1.pep
MAGDDGRAPSGLRVVMFPFPFWSHINQMLQLGKLLRARGLGVTMLHTDFNAPDPALHPDITFVSIRESLPAEVVANPDMVEQMMQLNAVCEAPFQAALAGELLARGTTTGGPREVACVVVDGQWYKMLGAATRVAVPALVLRADGAATFLSMLATPRLRADGYLPIKEERLDEVVPGLEPLRVRDLIRVDGSDDETVLRFITRNAEAVQASSSGVVLNTFEGIEGAALAKIRRELSGRPVFAVGPLHLASPDPAAAAA

SEQ ID NO: 203824 - protein, 44 aa, Zea mays
  Clone ID: MRT4577_117477C.1.pep
CRRRWRRRREGRSIQRWRFLRVLLSYLFSFDLFFSFLVFKNNSY

SEQ ID NO: 203825 - protein, 179 aa, Zea mays
  unsure (1)..(179): unsure at all Xaa locations
  Clone ID: MRT4577_117478C.1.pep
QPNTERTETIYDNYNLSRTLEGLEQSVHEDIIVLSKELHEAEDAENSRHMEPTRPPTRPPTRPLLTLRARQANYRDEFLRKESLARQQQYQHASMXLCQQFHXGEQHGYNPTAAGTPPVAAGGAYGEAHRGYASGQYESFSDRPDYPEFHDGGRGRGRSSEQRAQYPGGRAYNSGGRRF

SEQ ID NO: 203826 - protein, 294 aa, Zea mays
  unsure (1)..(294): unsure at all Xaa locations
  Clone ID: MRT4577_117479C.1.pep
MQDRMRRQGQYGEADINSMVAAQLHHYQAQQRVQKHPENSYTGRDPAQASAEHQYTPPKARQSQWDRGGPNAPSQVPSYAYNEAQGAGGAQSFYDGQRSDTKVGLEKQPSKESREQPRTERTETRYENYNLPRTFEGLEQSFHEDIILLSKELQEAEDAENSRHMERLKDINTQYQEKLLALRARQANYRDEFLRKESLARQQQYQHASMXLRQQFHXGEQHGYNPTAAGTPPVAAGGAYGEAHRGYASGQYESFSDRPDYPEFHDGGRGRGRSSEQRAQYPGGRAYNSGGRRF

SEQ ID NO: 203827 - protein, 81 aa, Zea mays
  Clone ID: MRT4577_11747C.1.pep
PIHLPHSVYVCKFIRNPIYSQRKCFQSPPRHTPSSAGLRTLCPMTGPHPSRVRHAAHSKNEHIRILCLTRTRARTRGSTQK

SEQ ID NO: 203828 - protein, 123 aa, Zea mays
  unsure (1)..(123): unsure at all Xaa locations
  Clone ID: MRT4577_117480C.1.pep
EEVIIPNGEGVNVEXFLGWRARFEXELPFXXXKIIPDPXFKPLKEKKIXGRQYFESXRHXVKXXXKVXDEDEEEEEDIEXDDDFEXDEEEMXEXYXXXKLEGYFSPKKVFWGSLRNPNVVICS

SEQ ID NO: 203829 - protein, 259 aa, Zea mays
  unsure (1)..(259): unsure at all Xaa locations
  Clone ID: MRT4577_117481C.1.pep
LEAGRAGPPRRPFPPGFQGPGLPPPCTAQHSTAPRISPLPHQXPPPPTXSPRRPPPARPHLAGHPPPLXILYPTPRIRXPPPAAHPRNSRSPIPRAPSRRRPPDRNGPLSSVRSKDPREPSSAFARARSAAAMAIRITVSYSGYVAQNLAASFGLRCTVAAGASAALGPGCRFLQDALSHPFCLFASSRRADPHHDAEDHNHPKPRSKALAPAAAARGGGHSLLLPRSCSGKAAPPVDDPPRLVGRGAAVGVRVWDGID

SEQ ID NO: 203830 - protein, 175 aa, Zea mays
  unsure (1)..(175): unsure at all Xaa locations
  Clone ID: MRT4577_117482C.1.pep
MVNVLDVLETIKSSCATPKKPVEAPKMQIEAKPSEDEAAKSQTEAKAGPSEPAKEKSLETGEETKKETIKQILXEKTLSSAPEASSRESDYIMRHASGKRLSEEEKREAHHYAPKLKYPKXXALIFNGSGEEDFLYCLPEXKEISVCREIGRSFGFPTLEDGLSVXYXKMNLPTA

SEQ ID NO: 203831 - protein, 52 aa, Zea mays
  Clone ID: MRT4577_117483C.1.pep
WFPLWLPRVEEVSLSRTAVEASELLSGSPVMALWGKLQLECDIYLIWSSALV

SEQ ID NO: 203832 - protein, 150 aa, Zea mays
  Clone ID: MRT4577_117484C.1.pep
GGCFYFFFFCFVFFFFFFFFFFFFFFFLGLVFWGKTPALPKKGPRALIHWGGGARMKTSSLWGLFGVPEPEPSLGGLASNGRGLYWARAFGPPRGSISEDVPFSGLGVNPMAPPGNAWGDHLVIFCWLIKLRRGLPPFNWVALKGRTTDP

SEQ ID NO: 203833 - protein, 92 aa, Zea mays
  Clone ID: MRT4577_117485C.1.pep
VNSPEDTILIQSVLEAVEGVNNVEWDTVEQTIEVAYDPDITGPRLLIQCIQDTAQPPKCFNVTLHSPPKQREAERNHEIRNYRNHFLWSCLF

SEQ ID NO: 203834 - protein, 191 aa, Zea mays
  unsure (1)..(191): unsure at all Xaa locations
  Clone ID: MRT4577_117486C.1.pep
TRSFIIRPSEHIIIVLSSVAPKILWVLALLHLIGSATDASIIAQCSVSPXSVISQRTGRVAAMGSDHRSEQAYGLPLVVDESTVQHPICQQQHQSXAHVTMQTIXAHQQQQLLPLLNQLLMQNAAXYLQQXLLALNPLAAGYINANHAQQQLQQGLPALSQLAMANPAAYLQQDQLLLSMPLAVVNAHYIP

SEQ ID NO: 203835 - protein, 63 aa, Zea mays
  unsure (1)..(63): unsure at all Xaa locations
  Clone ID: MRT4577_117487C.1.pep
PSVLKKNFIQARFDKKFNQAQFFXIINEKPQVFQEYESGKAIPNQKIFSKFERALGTKVGGKK

SEQ ID NO: 203836 - protein, 56 aa, Zea mays
  Clone ID: MRT4577_117488C.1.pep
VLDPLVLLQLLMPLHFILPFVGSLCAQLVEIKSFLSLSDTHKNESLFSMFSLGAAD

SEQ ID NO: 203837 - protein, 312 aa, Zea mays
  Clone ID: MRT4577_117489C.1.pep
MASKYVARVPSPWWAPQRRLVGSWVSVCSVKCGALGGRAVVCAAVSFRPCIDIHKGKVKQIVGSTLRDSSNDGMELVTNFESDKSPAEFAKSYKEDELLGGHVIMLGSDPSSQAAALEALHAYPGGLQVGGGINLENAMSYLNEGASHVIVTSYVFSDGKMNTERLTKLVELVGKQRLVLDLSCRKKDGRYTIVTDRWQKFSDVFVDEPALEYLAAFADEFLVHGVDVEGKRLGIDEELVELLGHHSPIPVTYAGGVSTMDDLERIKKAGKSRVDVTVGSALDIFGGDLPYKDVVLWHKKQSMVGQVSRNMW

SEQ ID NO: 203838 - protein, 70 aa, Zea mays
  Clone ID: MRT4577_11748C.1.pep
NGAIQRFSRSAVVKSRAHGTTIRHPAHGTLITPRCVCYLASQKSAAPSGPTPPDAKFCPYFCLFFFPRNR

SEQ ID NO: 203839 - protein, 69 aa, Zea mays
  Clone ID: MRT4577_117491C.1.pep
MDAIDSVVDPLRDFAKDSVRLVKRCHKPDRKEFTKVAARTAIGFVVMGFVGFFVKLIFIPINNIIVGSG

SEQ ID NO: 203840 - protein, 93 aa, Zea mays
  unsure (1)..(93): unsure at all Xaa locations
  Clone ID: MRT4577_117492C.1.pep
YTRVCPMACSFLNYFILHPDDHNACHVVHYYSARSITCCELMXEPEWQLFIAQRRGTHLAKEVYLRWNLSVLALTFACRESSLAESSCTELGS

SEQ ID NO: 203841 - protein, 187 aa, Zea mays
  Clone ID: MRT4577_117493C.1.pep
AALGGAFRDNVRWLLKQWRCVPGSVSAWRALLSDERTGALVPVIAVEELAASSPLPLCDLCRCAGWSHHWVSKRKYHFIIPAVVDWDRPFRADGLLGHSEHLLHGLIHSNGFGHLLTLRGRVGGSTFLSGCQIMDIWDQLCTALRVRAVSVVDLTQKYSVDLRLLLGVAQSKTWFTRWGYCLAKGCF

SEQ ID NO: 203842 - protein, 115 aa, Zea mays
  unsure (1)..(115): unsure at all Xaa locations
  Clone ID: MRT4577_117494C.1.pep
VLALFIDPLVAGAXFVHAYFDRSDLWTYRGVLLTIISTVQMWRTLLRRGRHYITYCGSYCLMRHTLKARTCTAVSVMWHPVLEKLVKGAQAGIEDHSLRMNHAHRHSSDRLRPPP

SEQ ID NO: 203843 - protein, 55 aa, Zea mays
  unsure (1)..(55): unsure at all Xaa locations
  Clone ID: MRT4577_117495C.1.pep
MRVVRATIALVTSDPRTQTGGCSHGQQYSHEQQHHPEXHHPQKQQHLPSLEHGMQ

SEQ ID NO: 203844 - protein, 65 aa, Zea mays
  Clone ID: MRT4577_117496C.1.pep
GVVAWVALINCFPVCQLTWSFRRSVQDLFGSAERKIFLGVRGGCSPKWPSFCPHEGKVVKKKLRD

SEQ ID NO: 203845 - protein, 61 aa, Zea mays
  unsure (1)..(61): unsure at all Xaa locations
  Clone ID: MRT4577_117497C.1.pep
KNRSRPTLAKERSQILIKASEGFGTTGYRRGVATRRGKTRAFXPPLAASCRTLLPAGGGAN

SEQ ID NO: 203846 - protein, 155 aa, Zea mays
  unsure (1)..(155): unsure at all Xaa locations
  Clone ID: MRT4577_117498C.1.pep
RPLADAXRIKIKKALRGVKVEVTHRGNVRRKYRISGLTTQPTHELIFPIDEQMNMKSVVEYFKEMYGFTIQHPHLPCLQVGNQKKANYLPMEACKIVEGQRYTKRLNEKQITSLLKVTCQRPREQEMDILQTVHQNXYEQDPYAKEFXGINISEK

SEQ ID NO: 203847 - protein, 89 aa, Zea mays
  Clone ID: MRT4577_117499C.1.pep
DQSLRSCTRGRQQALVEPGVEKMKSSTLVAILVLQALLVSAAVAKGPAWSTTKKQCWCGECTSWSGVWTCDYLLTKCAGTCKNCVPVFP

SEQ ID NO: 203848 - protein, 194 aa, Zea mays
  Clone ID: MRT4577_11749C.1.pep
MNVARLNMSHGDHQSHLEVINLVKEYNAQNTDGNVIAIMLDTKGPEVRSGDVPEPIMLRTESSIYNPTTSPSVIASAQGLQNEEFSPSQLSKMFGSHATMMANTLRTPIIVFTQTGSMAVLLSHYRPSSTIFAFTNEERVKLRLALYQGVIPIHMEFSDDAEETFSRAISSLLKAQYVKKGDYVTLVQSGVTSI

SEQ ID NO: 203849 - protein, 38 aa, Zea mays
  Clone ID: MRT4577_1174C.1.pep
CQRPHLSCSAHPSNVSMRQSNELEPIPSAYAEWMSLRV

SEQ ID NO: 203850 - protein, 93 aa, Zea mays
  Clone ID: MRT4577_117500C.1.pep
MPAGHGLRSRTRDLFARPFRKKGYIPLTTYLRTYKIGDYVDVKVNGAVHKGMPHKFYHGRTGRVWNVTKRAIGVEVNKQVDNADPFFCRGTYD

SEQ ID NO: 203851 - protein, 136 aa, Zea mays
  unsure (1)..(136): unsure at all Xaa locations
  Clone ID: MRT4577_117501C.1.pep
MPDVHGLRSRTRDLFARPFRKKGYIPLTTYLRTYKXVGDYVXVKVEXGADHXGMPYKFYHGRTGRGWNVTKRGISGEGNEEVNGRIIKKSIHVREEHEQTSRCTQQFRLRKAKNDQVKADGKKRXEVIETKREPLG

SEQ ID NO: 203852 - protein, 164 aa, Zea mays
  Clone ID: MRT4577_117502C.1.pep
MPAGHGLRSRTRDLFARPFREKGYIPLTTYLRTYKIGDYVDVKVNGAVHKGMPHKFYHGRTGRVWNVTKRAIGVEINKQVNGRIIRKRIHVRVEHVQPSRCTEEFRLRKVKNDQLKADAKERGEVISTKRQPLGPKPGFMVEGTTIETVTPIPYDVVNDLKGGY

SEQ ID NO: 203853 - protein, 54 aa, Zea mays
  Clone ID: MRT4577_117503C.1.pep
MLFFSYFKELVGKEVTVELKNDLAIRGTLHSVDQYLNIKLENTRVVDQDKYPHM

SEQ ID NO: 203854 - protein, 164 aa, Zea mays
  Clone ID: MRT4577_117504C.1.pep
MPAGHGLRSRTRDLFARPFRKKGYIPLTTYLRTYKIGDYVDVKVNGAVHKGMPHKFYHGRTGRVWNVTKRAIGVEINKQVNGRIIRKRIHVRVEHVQPSRCTEEFRLRKVKNDQLKADAKERGEVISTKRQPLGPKPGFMVEGTTIETVTPIPYDVVNDLKGGY

SEQ ID NO: 203855 - protein, 35 aa, Zea mays
  Clone ID: MRT4577_117505C.1.pep
KKKKGRRLKISLLSVLRPIVFYRHLIQLLAVLTTF

SEQ ID NO: 203856 - protein, 164 aa, Zea mays; identical to SEQ ID NO: 203854
  Clone ID: MRT4577_117506C.1.pep

SEQ ID NO: 203857 - protein, 72 aa, Zea mays
  Clone ID: MRT4577_117507C.1.pep
LIKAAGACFHISKQATTARLLGRSLGDDARGFSTGLSTDPLWLAGHCPRLLQDSLSNQAAHSWHYGSDLHLA

SEQ ID NO: 203858 - protein, 90 aa, Zea mays
  Clone ID: MRT4577_117508C.1.pep
MPAGHGLRSRTRDLFARPFRKKGYIPLTTYLRTYKIGDYVDVKVNGAVHKGMPHKFYHGRTGRVWNVTKRAIGVEINKQVYHTDPFSLAR

SEQ ID NO: 203859 - protein, 56 aa, Zea mays
  Clone ID: MRT4577_117509C.1.pep
FKILVSIVVYCTTSILFYLTPTNVQMNCKTSNKKNGGSIMQMFFFLQIYDMLHHFL

SEQ ID NO: 203860 - protein, 121 aa, Zea mays
  Clone ID: MRT4577_11750C.1.pep
AIANSRRKTKIVCTIGPSTNTREMIWKLAETGMNVARLNMSHGDHQSHQKVIDLVKEYNAQNTDGNVIAIMLDTKGPEVRSGDVPEPLSSVVYTICVYKRGTSEATAGTLPGGHPYSHAVL

SEQ ID NO: 203861 - protein, 165 aa, Zea mays
  unsure (1)..(165): unsure at all Xaa locations
  Clone ID: MRT4577_117510C.1.pep
MPAGHGLRSRTRDLFARPFRKKGYIPLTTYLRTYKIGDYVDVKVNGAVHKGMPHKFYHGRTGRVWNVTKRAIGVEVNKQVNGRIIRKRIHVRVEHVQPSRCTEEFRLRKAKNDQLKADAKKRGEVISTKRQPLGPKPGXFMVEGTTIETVTPIPYDVVNDLKGGY

SEQ ID NO: 203862 - protein, 111 aa, Zea mays
  Clone ID: MRT4577_117511C.1.pep
MFSPASTCIESFLLRQGQCGLNISWSLEAVSFPLLPPLALALILAFSLPAPSEDRALCAHHMHSCAWRPAGARAGTRVVPPWPSLLCSAPLPCPSSPRKHVLVTLVLQWSV

SEQ ID NO: 203863 - protein, 113 aa, Zea mays
  Clone ID: MRT4577_117512C.1.pep
GECIPKPHHRIHHYNKKTNRDRKTKPQPPEPRATTPQDKTRKRKKPKQPHARGTKKGDGMPKTHTYTVTDPNKSKGKGKRERAQAPGPFHPRLPSPLKQENWYLCWGLAPARA

SEQ ID NO: 203864 - protein, 117 aa, Zea mays
  unsure (1)..(117): unsure at all Xaa locations
  Clone ID: MRT4577_117513C.1.pep
GKWAPSSCALLVKEVFFRDFVGRHGIPCCRVPAQRFSRGCYVCGGINNGCALECSQLFFGLGFFFSCGFGAGLCIESQKGNYDGGXSIVAGFFFEHPELWEKHLLPGKYKFLATPQL

SEQ ID NO: 203865 - protein, 151 aa, Zea mays
  unsure (1)..(151): unsure at all Xaa locations
  Clone ID: MRT4577_117514C.1.pep
SKVLEMGLENVXWTLXVLHVFASMCGDXRATKAVAILLMTPILLVVLFLESTDTFLCLAXSYMQSNKPTSLPXCAHCLFNEDAADMDGSISXLMDELDLCSLQWINRTCSNEYITRMQAHIGSGGLDTRCXETCNIFEQRKLSVDTHSYPA

SEQ ID NO: 203866 - protein, 66 aa, Zea mays
  unsure (1)..(66): unsure at all Xaa locations
  Clone ID: MRT4577_117515C.1.pep
MTPGSSAAGSGVVPPRNSRLLQHHERADKGIGDGTESYGTDDANDIYIEIWTGTTIGPXHNTPHHG

SEQ ID NO: 203867 - protein, 104 aa, Zea mays
  unsure (1)..(104): unsure at all Xaa locations
  Clone ID: MRT4577_117516C.1.pep
MGRRIMKSGRRTTMQPRAALLLLVLVLGVSLRGCIXXGXGGGGGLTRGSFPKGFVFGTAAAAYXGKISDFSNADVAVDQYHRFEEDVQLMADMGMDAYRFSIAW

SEQ ID NO: 203868 - protein, 86 aa, Zea mays
  Clone ID: MRT4577_117517C.1.pep
LECSVYTIMALAIHPIINAQAPLLREHVTLYRPLILALLFYAYLYIPISALLLPNTFYTIFSLNVLNYFDFVSINNFYKFITLYQS

SEQ ID NO: 203869 - protein, 92 aa, Zea mays
  Clone ID: MRT4577_117518C.1.pep
KLAEKLSVWQSAAAFDGQKLPKAETNMALGFFVLLEEKQLAFLLGGGPYYLSLVSHLGCAAEAGFLSFYGGGYPTFDASGQGLFCLGSWVAV

SEQ ID NO: 203870 - protein, 45 aa, Zea mays
  Clone ID: MRT4577_117519C.1.pep
STVDLSSFCVRSMPYRYVDVYEFRSIIPYVHVHLRSGTVALAASA

SEQ ID NO: 203871 - protein, 559 aa, Zea mays
  Clone ID: MRT4577_11751C.1.pep
MYCVWQLDSKRCNSQLMLVISVVAAGSLLNRGQLITSVVTKCGDKVLYVVTILPFLMQMYSEASSEIPSQAAIANSRRKTKIVCTIGPSTNTREMIWKLAETGMNVARLNMSHGDHQSHQKVINLVKEYNAQNTDGNVIAIMLDTKGPEVRSGDVPEPIMLSEGQEFNFTIKRGVSTEDTVSVNYDDFINDVEAGDILLVDGGMMSLAVKSKTADTVKCEVVDGGELKSRRHLNVRGKSATLPSITEKDWEDIKFGVENGVDFYAVSFVKDAKVIHELKDYLKGVNADIHVIPKIESADSIPNLQSIIAASDGAMVARGDLGAELPIEDVPLLQAEIVQTCRNMEKPVIVATNMLESMIDHPTPTRAEVSDIAIAVREGADAIMLSGETAHGKYPLKAVKVMHTVALRTESSIYNPTTSPSVIASAQGLQNEEFSPSQLSKMFGSHATMMANTLRTPIIVFTQTGSMAVLLSHYRPSSTIFAFTNEERVKLRLALYQGVIPIHMEFSDDAEETFSRAISSLLKAQYVKKGDYVTLVQSGVTSIWREESTHNIQVRRAQV

SEQ ID NO: 203872 - protein, 81 aa, Zea mays
  Clone ID: MRT4577_117520C.1.pep
MALGFFVLLEEKQLAFLLGGGELEHVAFVMSQKRLGPYYLSLVSHLGCAAEAGFLSFYGGGYTTFDASGQGLFCLGSWVAV

SEQ ID NO: 203873 - protein, 223 aa, Zea mays
  unsure (1)..(223): unsure at all Xaa locations
  Clone ID: MRT4577_117521C.1.pep
MGRRIMKSGRRTTMQPRPALLLLVLVLGVSLRGCIAQGGGGGGGLTRGSFPKGFVFGTAAAAYQYEGAVKTDGRGQTIWDTFAHTFGKISDFSNADVAVDQYHRFEEDVQLMADMGMDAYRFSIAWSRILPNGTGQVNQAGIDHYNKVINALLSKGIQPYVTLYHWDLPQXLEDRYNGWLDRQIVNDFAAYAETCFQAXGGRVXHWITLNEPXTXAVQGYDAG

SEQ ID NO: 203874 - protein, 458 aa, Zea mays
  unsure (1)..(458): unsure at all Xaa locations
  Clone ID: MRT4577_117522C.1.pep
MGNQDATIDAILGMNWLTKYQASLSCDKRTVKLVSLSGEEVLVELVLSRPRKGSCHQVTAHIEKIEPLEAINVVSEFPDVFPEELRGMAPERKVDFAIELIPGIAPISKRAYPVSGPELVALKKQIDELLEKGYIRPSTSPWAARVLFVEKKDGTKRMCIDYRSLNEVTVKNKYPLPRIEDLFDKLRGAGVFSKIDLRSSYXSSGSDPRIYRRQHLLPSMDYMSSLSCHLVWRMCQLTSXYLMNSFSKIARPMIALLAKKVEFKWTPAMQESFETLKKKLTTTLVLILPDVHMPFLVYYDASYTRLGCVLMQEGKVVAYSSCELKIHEKNYPTHDLELAAVVHALKTWRHYLYGQKCDIYTYHKSLKYIFTQSELNMRQRRWLELIKDYELEIHYHPDKANVVTDALSRKSQVNMLAAHPMPYELAKEFDRLSLGFLNNTQGVTVELEPTLEGDIRKG

SEQ ID NO: 203875 - protein, 97 aa, Zea mays
  unsure (1)..(97): unsure at all Xaa locations
  Clone ID: MRT4577_117523C.1.pep
KTYAVSTLDFNPCKYSTGCVNXYLFSRTDSTYHYKLHTTKKVNAFHTDYMVTPLHRYINDPNAHAIINNQATLHITAITNNSYFDPSHYALHCHYKH

SEQ ID NO: 203876 - protein, 41 aa, Zea mays
  Clone ID: MRT4577_117524C.1.pep
IPPRLGVLVKPPWSHTRVLSVVQPKAQVLLNIKGAVGAVVV

SEQ ID NO: 203877 - protein, 144 aa, Zea mays
  Clone ID: MRT4577_117525C.1.pep
AIPTCFFFKAWGAPNTKLVWKPGKSRPVEKGPSFFGRVPKLQPFQNSNTYKGDRPSQIYNFQVFQPPPKNQLRLATPFTNQGVPQTQGGRTWVGATTYKGGGPSPKRLQGPGKQTNLLWKFAPHFLGNGGGIIWGWGTPRNLGN

SEQ ID NO: 203878 - protein, 105 aa, Zea mays
  Clone ID: MRT4577_117526C.1.pep
AHKKINGVGCINTALNSGHATPCVGQKEAQFPRMAKPKQWTKTGNKKQNWDPNNNKPQNLTNLTFQLTQEGRLRSLVEPYPCVFFLGGNLRIKTFTFLIRFRKGV

SEQ ID NO: 203879 - protein, 206 aa, Zea mays
  Clone ID: MRT4577_117527C.1.pep
LPQCQPHPVEVDTQVQNHSPAVSSALAVSDRPLSPLVLQQDVLSQDPISSRSVVSLPLQQTFNLQRGGQFCLNECPSVHECPGSGQLIECHKDLSQIGSQQVIASIGDLGVGAASEGLPPRVSPIAATSPSMLLRPKPIQVYFCRRREARRVEEATLGDSPSQLQASDVHASPSLAALSPSRVSEFLSRISKEDDAVLKNPTPNPL

SEQ ID NO: 203880 - protein, 119 aa, Zea mays
  Clone ID: MRT4577_117528C.1.pep
ILIELLQKIWGGGGGGGPPATDRATPAYGDPPYARLCRARAQPRASGYSRGLSQGASGPENTGVSTTRVRNGAWGSAPPASPQLTLRTPKNLLHDRQDPRKGVGETGGRQKHINCGRNN

SEQ ID NO: 203881 - protein, 102 aa, Zea mays
  Clone ID: MRT4577_117529C.1.pep
EGANPQERRRNFLAGSPKTRLPPSYKILRSRRRPGPLRLKGREILKKGGQIALNGGGSLNEKKREILAPRGEKKKKRETDPPRGGFCCFRAQRKEPQPCGGK

SEQ ID NO: 203882 - protein, 110 aa, Zea mays
  unsure (1)..(110): unsure at all Xaa locations
  Clone ID: MRT4577_11752C.1.pep
RTRGRAQDQTHAHDLVTGAGEGSHKIEGDQHTTLYRKGRGHHYELKMHGPGSICTGISQQFRMMRFTAGELQKKXSNVGWSNCMNQGLMTPFPDVNAKPGDVIAIIKTTV

SEQ ID NO: 203883 - protein, 81 aa, Zea mays
  Clone ID: MRT4577_117530C.1.pep
RKQPQSHMGKPACSRFLESSTRLFNCTLWWLHLFCSRVLLIDLSLQFPSTAGGGGRGRRAASGAEVLGRVWNSSVDWDLEN

SEQ ID NO: 203884 - protein, 85 aa, Zea mays
  Clone ID: MRT4577_117531C.1.pep
ELTMRRPPFVFFCEPTNVHCPKAVLAYIVHGKLKEQKCKAYQRLCHMYGLCEGLAPSLLTPAPTMDSRVLHDLDCNAGWRYAHCY

SEQ ID NO: 203885 - protein, 45 aa, Zea mays
  Clone ID: MRT4577_117532C.1.pep
SESKTKPYPAEASRTIMELAKVGTLCTLTQEGLPLGTGVRFAVDP

SEQ ID NO: 203886 - protein, 75 aa, Zea mays
  Clone ID: MRT4577_117533C.1.pep
YEEELVATDTVPRVLLNPSHSSVLYIAARDVVKHVLCYFACCCFGYNHEEGRHDQIDLCCFVDQTPMSLMLLTTL

SEQ ID NO: 203887 - protein, 175 aa, Zea mays
  Clone ID: MRT4577_117534C.1.pep
MSSDGGGSQMGVAGALGLSVTSSVAIVICNKYLMSTLEFYFATTLTSWHLLVTFCTLHIAQRLRFFEPKPIDAQTVISFGFLNGISIGLLNLCLGFNSVGFYQMTKLAIIPFTMLLETIFLSKKFSQSIKASLMVLLLGVGIASVTDLQLNLLGSIIAVLTIAATCVWQILTNQI

SEQ ID NO: 203888 - protein, 86 aa, Zea mays
  unsure (1)..(86): unsure at all Xaa locations
  Clone ID: MRT4577_117535C.1.pep
QKYFFVKFPIRCEASPFVLKTIXFSKARLSIIXIIFIKGYQERVINFPGKEMHQLFSTQTLSPNASYKVIKILKRQGDDKCTGACL

SEQ ID NO: 203889 - protein, 93 aa, Zea mays
  Clone ID: MRT4577_117536C.1.pep
AGPGNGEGCMHVSSDLTNHRRPKEYRFQAMVNNKSSSAEVKPIDNASAPGSQITVQSAADQLHLHVRGPVLLPVRHSRSGSNDGGRDRIGGGC

SEQ ID NO: 203890 - protein, 57 aa, Zea mays
  Clone ID: MRT4577_117537C.1.pep
PVFEVVRPFHMLHSMLLFPSLPRFKVKTHVTSDPTHHSLPLYPVSHLALRFLGHGPK

SEQ ID NO: 203891 - protein, 896 aa, Zea mays
  unsure (1)..(896): unsure at all Xaa locations
  Clone ID: MRT4577_117538C.1.pep
MSQDKKVVTETKLSLSEEKNLGFIESIAKTNTEKITREILEGLSEDTGDSDSYDVESGGEDSEDRPWRPSHAVFGKSTIKQSHLDNMRGRYFRDVSIVRADNGDKTSPTPKENEVVIFRSFFKAGLRFPLSSFVVEVLKIFQIFLHQITPEAIIRMGIFVWAVRSQGLEPSAKSFCSMHELLYETKPWGKEQYHNNFGCYSFVARSGSSCPVPTFQKRWPGDWMKEWFYVKNDLKVQEDIKEIIMRPIWQRFGLRKPKVEIDEAAEECRKAFGIVCSFIRTRDLVQEHVAYRIWPLVVNWEMPKEAISNPHEGGLVRLKYTFRFGDQFIEPDDDWLKCVKATSDELLGPYSKAEDNALFAAFGSQKKRRLNKVFDAIGFMYPDYRYPSRGQKRKSVTSGKDDASAAPSEPAPKRKKVKVLTHRPRFIEPAIVPEFGGETSSATEAKEPTATQKTKEPKAINIEEAEVERTKILEVISPSAEVTVPKAQKDLTTTPKRXDGQCTRCTGENKDFKLYSREKTAEASKTRIETKQTEVEAAKSHAETKAGPSEPTKKKSLETGXKKKRKEKLQNRFCLNKLPLLLPKHLPKFSIILYDMLREKDNKEISVCREMSRSFGFPTLEDGLSVLSKDELADSLAYNSLKGLFLSNALRAQKTVEDEGCTITLNNLRSEVIELRNEGLEKDKILNSLVNKIKEDEATSKAQAETQKCEIEDLRKQLAEAKLKCAIAEADRDASXLEKLLXKTVVELRSSKEKCYEKFIECMGKIKTSFANVGVYSSEDNFVRGDPEGPIDWINNKAEAFEEILSGRGDVCAFSGARGIAAILEKSGCDHVKALAQTEATLSIDDTKDPSAEASLVGGKFFTDIWENGGRGMCNTQNCIKGLYGDILILCVIFAS

SEQ ID NO: 203892 - protein, 91 aa, Zea mays
  Clone ID: MRT4577_117539C.1.pep
RYWEAFFKRNHINDTIAVRYCCNLLEYADNAEQHMSYECRYQVRLVYLIMMNPSIRYLCREYEFENVQCFLVRWMYWWIPLLLIALIVGSV

SEQ ID NO: 203893 - protein, 73 aa, Zea mays
  Clone ID: MRT4577_11753C.1.pep
RYCFWLLFCCPEAHIYETNKKKTHPLVVTTKKRRGPCLCDHDAKKGAYCDTSQNLRGGYQKIKRGGALKNICA

SEQ ID NO: 203894 - protein, 299 aa, Zea mays
  unsure (1)..(299): unsure at all Xaa locations
  Clone ID: MRT4577_117540C.1.pep
MAAAPSSLASSHLSPIAAVSTPAVPHQLRIGCSRRRAQRIVAMAGSGKFFVGGNWKCNGTKDSISKLVSELNAATLETDVDVVVAPPFIYIDQVKNSLTGRIEVSAQNVWIGKGGAYTGEISAEQLVDIGCQWVILGHSERRHIIGENDEFIGKKAAYALSXKNVKVIACIGELLEEREAGKTFDVCFRQMKAFADSISNWADVVIAYEPVWAIGTGKVATPEQAQEVHAAVRNWLKTNISPDVASSTRIIYGGSVNAANCAELAKKEDIDGFLVGGASLKGPDFATIINSVTAKKVAA

SEQ ID NO: 203895 - protein, 145 aa, Zea mays
  unsure (1)..(145): unsure at all Xaa locations
  Clone ID: MRT4577_117541C.1.pep
MPSKLDPSHVVEVFVRVTGGEVVAASSLAPKIGPLGLSPXKIGEDIAKVTAXWSGXLRVTVKLTVQNRLAKVSVGPSVVVLVIKALKEPERDRKKVMNIKHXGNIGLDDVVEIAMTMRNRSMANELAGTRQEILRTCVSVGCTVD

SEQ ID NO: 203896 - protein, 52 aa, Zea mays
  Clone ID: MRT4577_117542C.1.pep
NHATLMTLPDHLMLPAGFGCSSPPDFEATAGLLLYDATVLPHRLPKVLSLNK

SEQ ID NO: 203897 - protein, 68 aa, Zea mays
  Clone ID: MRT4577_117543C.1.pep
ARTRPQFRPTRNSHTSSHSSSSFWFLASYPQYCVYLKGNVPIHTSHTFSLINTIHISNILLIFIYDYI

SEQ ID NO: 203898 - protein, 118 aa, Zea mays
  Clone ID: MRT4577_117544C.1.pep
DPLGSLSFQDILEHRLERMYQPPLHCRYSSDLLKATEHGRCADFPYHHPPRSCSYFSTSWTPSWRRRSTGPGSGAPPPRPRQADHRCPCSARTRRRASSPTRTAASLRRHGCRCHGNA

SEQ ID NO: 203899 - protein, 123 aa, Zea mays
  Clone ID: MRT4577_117545C.1.pep
ATKGLIGAVLPQGSVGPSTVAVLANGLHFKGTWAQPFDPSRTFEAPFHLPGGGTVRAPFMMTRRTYEYDQHYVAVFSGFRALKLPYSCSKSGSNQWHQAAYFYMLLLLPDDDAAGHGLRDVYD

SEQ ID NO: 203900 - protein, 123 aa, Zea mays
  unsure (1)..(123): unsure at all Xaa locations
  Clone ID: MRT4577_117546C.1.pep
HLWGGENLGRTQIFCLTGNRRFATGINREKARTMWPYQXDGQLEGXWDPPFSGLXSAGGGGFTPNGTLTLVMALTPQPLIFFPYYSRLGRGFFPLRXIKGGFPLGIQIRGLGALPPKKPPYGG

SEQ ID NO: 203901 - protein, 91 aa, Zea mays
  unsure (1)..(91): unsure at all Xaa locations
  Clone ID: MRT4577_117547C.1.pep
MVCGATYKIVSRSCRAVLQVTMSRVCRFLNKGRYAHPRYHGXAPLYFDAGLEYLPCDVLELSCYPAWDNXKTRFIMRHVLLAIQNDEELGK

SEQ ID NO: 203902 - protein, 121 aa, Zea mays
  unsure (1)..(121): unsure at all Xaa locations
  Clone ID: MRT4577_117548C.1.pep
VKAAPGAGPRGGSPPPDQLGGGKGHPXPHGRKYNPPEAPGENQGGPKRDKTERPEEEKKEQGAPGKPGPPXNGKTGQPPGTSGQPTGRGGPNXYGPPAMGPSVAGGPPXPPEGGRRRSPKG

SEQ ID NO: 203903 - protein, 35 aa, Zea mays
  Clone ID: MRT4577_117549C.1.pep
SLRQRHWYIQSTCATTGEGLYEGLDWLSSNIASKS

SEQ ID NO: 203904 - protein, 569 aa, Zea mays
  Clone ID: MRT4577_11754C.1.pep
MAAAAEIGGFAAARVAVATLRPAAHPAPAAAAAPQPRRAVAAQSLRTTATEALTADLAGTTNGAVHARMNSKATSEITSQAVTANSRRKTKIVCTIGPSTNTREMIWKLAETGMNVARLNMSHGDHQSHQKVIDLVKEYNAQNTDGNVIAIMLDTKGPEVRSGDVPEPIMLKEGQEFNFTIKRGVSTEDTVSVNYDDFINDVEAGDILLVDGGMMSLAVKSKTADTVKCKVVDGGELKSRRHLNVRGKSATLPSITEKDWEDIKFGVENGVDFYAVSFVKDAKVIHELKDYLKSANADIHVIPKIESADSIPNLQSIIAASDGAMVARGDLGAELPIEDVPLLQAEIVQTCRSMEKPVIVATNMLESMIDHPTPTRAEVSDIAIAVREGADAIMLSGETAHGKYPLKAVKVMHTVALRTESSLYNPTTSPSLVASAQGLQNEDFSPSQLSKMFGSHATMMANTLRTPIIVFTQTGSMAVLLSHYRPSSTLFAFTNEERVKQRLALYQGVIPIHMQFSDDAEETFSRAISSLLKAQYVKKGDYVTLVQSGVTSIWREESTHHIQVRKVQV

SEQ ID NO: 203905 - protein, 181 aa, Zea mays
  Clone ID: MRT4577_117550C.1.pep
MGLTFTKLFSRLFAKKEMRILMVGLDAAGKTTILYKLKLGEIVTTIPTIGFNVETVEYKNISFTVWDVGGQDKIRPLWRHYFQNTQGLIFVVDSNDRDRVVEARDELHRMLNEDELRDAVLLVFANKQDLPNAMNAAEITDKLGLHSLRQRHWYIQSTCATTGEGLYEGLDWLSSNIANKS

SEQ ID NO: 203906 - protein, 64 aa, Zea mays
  Clone ID: MRT4577_117551C.1.pep
PPVPDQNVVIMVEASKGRVEIFILINHGTTLCYLIMHMVSEKHIQLNIDRVIHLPEGYINFHLH

SEQ ID NO: 203907 - protein, 198 aa, Zea mays
  Clone ID: MRT4577_117552C.1.pep
MGLTFTKLFSRLFAKKEMRILMVGLDAAGKTTILYKLKLGEIVTTIPTIGFNVETVEYKNISFTVWDVGGQDKIRPLWRHYFQNTQGLIFVVDSNDRDRVVEARDELHRMLNEVNSHALENPFPGMELCVLCSQLWRCYLLQDELRDAVLLVFANKQDLPNAMNAAEITDKLGLHSLRQRHWYHTLSTDFFFPRYIAL

SEQ ID NO: 203908 - protein, 49 aa, Zea mays
  Clone ID: MRT4577_117553C.1.pep
AKYFGLAHASLDEHISRWFGLDQSKYQWALNDYYERTGQEIDLSNVGTR

SEQ ID NO: 203909 - protein, 126 aa, Zea mays
  unsure (1)..(126): unsure at all Xaa locations
  Clone ID: MRT4577_117554C.1.pep
FSFGLPAXXGCXCPPLVLPCARXCVPCCCLXGLAGCWXFRGXXWXRXVFVLALXCLXVGXWLLXXFLXXGLXXAVXFXALPGRPGXAAFXRXAGPXCHGSRXPRXGPLCLNRESCXGSFSXFLGPL

SEQ ID NO: 203910 - protein, 181 aa, Zea mays
  Clone ID: MRT4577_117555C.1.pep
MGLTFTKLFSRLFAKKEMRILMVGLDAAGKTTILYKLKLGEIVTTIPTIGFNVETVEYKNISFTVWDVGGQDKIRPLWRHYFQNTQGLIFVVDSNDRDRVVEARDELHRMLNEDELRDAVLLVFANKQDLPNAMNAAEITDKLGLHSLRQRHWYIQSTCATTGEGLYEGLDWLSSNIATKS

SEQ ID NO: 203911 - protein, 176 aa, Zea mays
  unsure (1)..(176): unsure at all Xaa locations
  Clone ID: MRT4577_117556C.1.pep
TTHVSTTQQSTAATKPXAGXXGXXDXDKTXXDXDSDNXXXDSXGXTEPXERXXPTXPXNTXRDTXXGEXHAHGRTXDDXAEAXXAAPXXAGXPAAXKAAXAXGXDRRXXSDANAXXXDTXXAHHGXXGXXXQNNTNPSHPDADADGRXRNGPNHDXHGXGXGTXPPNXGKGQXXDR

SEQ ID NO: 203912 - protein, 165 aa, Zea mays
  unsure (1)..(165): unsure at all Xaa locations
  Clone ID: MRT4577_117557C.1.pep
MHCWPCWRGYVPLPRQPXRPPDSPYARALSSPNHPLPPTYPSHPPTPPPNTXPPPPHTPTKPPXPPPPPHPPAPPPPPPXPLPLPPSSPYPPPPTPSPPLLPXPPPPPRPAPXPPPPPPPPYFSSLPPPPFPPPXPPPLPPPPPPPXPPFSTHPPPPPPLPPPPP

SEQ ID NO: 203913 - protein, 77 aa, Zea mays
  Clone ID: MRT4577_117558C.1.pep
LNNKFPNTVMCADIISISSHNSVKLTDRSQYAEPLPLANCFVSNLEDSDILPHPFIERPNLIYEFDQPGFNIHEIDA

SEQ ID NO: 203914 - protein, 60 aa, Zea mays
  Clone ID: MRT4577_117559C.1.pep
SCSTVRFRANTAGSADRGARSPNTASSLSCSRSPRSLLKRRRAADIVCHGSNRSTIPPPP

SEQ ID NO: 203915 - protein, 96 aa, Zea mays
  unsure (1)..(96): unsure at all Xaa locations
  Clone ID: MRT4577_11755C.1.pep
LGIPLARXERDVXVTHPIVCAWHAPCVARQVWPRPGRARRGLQHGRGGHPLPIPVFGRSPSNHFVCRAFFPCNFSFVALHCTPRSFNNALLLGCAT

SEQ ID NO: 203916 - protein, 73 aa, Zea mays
  Clone ID: MRT4577_117560C.1.pep
IHAERQHRLVLDRLTGQLVCTVRSVHEVAAGDITPRTVHDVAPLDVLRLHAPPADQDLQQHHAEAVHVANAWA

SEQ ID NO: 203917 - protein, 42 aa, Zea mays
  Clone ID: MRT4577_117561C.1.pep
TYFPATKFYPKIEGLVFIWSFQIIYSLFVQSKYFPVVSWLLE

SEQ ID NO: 203918 - protein, 80 aa, Zea mays
  Clone ID: MRT4577_117562C.1.pep
TSIHTYTHIKNPFYLKDLIPKTALYNNIYLTPTMVQHHVSMSLPMNALASYHPLLIYLVARPYHTLLFLGNANLTPPSYH

SEQ ID NO: 203919 - protein, 38 aa, Zea mays
  Clone ID: MRT4577_117563C.1.pep
VLVLLFGWGLLHNLLLRLSLRMVNVLNSYFGTPTPYRQ

SEQ ID NO: 203920 - protein, 74 aa, Zea mays
  Clone ID: MRT4577_117565C.1.pep
QLGVLFDNISKCTSDGNKLGLPRYLDLCVIFRRIIFRHLKLLLLTRGTSRENKTDAIFVSDHYPTRHSRMRKPT

SEQ ID NO: 203921 - protein, 115 aa, Zea mays
  Clone ID: MRT4577_117566C.1.pep
RLRPGPETLDHVLDFCRYKTRTHGLGYSCASGTVYTYTVLAYSTQGHRHTDGSRTYRWLNQKLARARDLIMHGYRFNIFYHVVCPLLARALAELYLTLKGQGLPFNSLRHSSMGS

SEQ ID NO: 203922 - protein, 54 aa, Zea mays
  Clone ID: MRT4577_117567C.1.pep
QFTCHTEYKRRSCQPFASSDTITCKVSWSPIRSQNSKLRIKRLFSLLAKTSELN

SEQ ID NO: 203923 - protein, 40 aa, Zea mays
  Clone ID: MRT4577_117568C.1.pep
VRFMSRPMWVSFYHQKMSIQALCSAQNDERNFKKTQLNLI

SEQ ID NO: 203924 - protein, 43 aa, Zea mays
  Clone ID: MRT4577_117569C.1.pep
LCHTEKEMTLCTLACRIEQLTLSSQLHTGHTPNLGALALSYIQ

SEQ ID NO: 203925 - protein, 60 aa, Zea mays
  unsure (1)..(60): unsure at all Xaa locations
  Clone ID: MRT4577_11756C.1.pep
PRQQIRRPQHKDTRWRPPHLPXPDSRPPRAPPAPPLPPLRPSPPPPPPPPPPPPPPPPPH

SEQ ID NO: 203926 - protein, 59 aa, Zea mays
  unsure (1)..(59): unsure at all Xaa locations
  Clone ID: MRT4577_117570C.1.pep
LLRLCRHQFRLIEFLDLSHIGFVRHGSVGQAKRGARVRAKSVCAVASSEFELRKAXPTA

SEQ ID NO: 203927 - protein, 143 aa, Zea mays
  Clone ID: MRT4577_117571C.1.pep
FLDSNKKKKKKKKKKKKKKKKKKKKKKKKKKKKKFLKKILKKKKKKKKFFPCRGGLSKGQFLHFSFTLGGVGPSFWGAHFPFLGVVLHFMGRVFTPLCLEKPWGSPFYSLWRTSPFPRLAFWRRAPPRSPFPPFAPLDGHLAP

SEQ ID NO: 203928 - protein, 232 aa, Zea mays
  unsure (1)..(232): unsure at all Xaa locations
  Clone ID: MRT4577_117572C.1.pep
MASALTSSSSSKVAALAALFMVLVMHAEAGSWLPAKATWYGAPDGAGPDDNGGACGFKHTNQYPYMSMTSCGNEPLFKDGKGCGACYQIRCLNSSHDACSGRAKRVVITDMNYYPVSKYHFDLSGTAFGAMARTGLNDKLRHAGIIDIQFRRVPCNYKGLNVNFRVQVGSNPNYFAVLVQYAGKDGAVVQLDLMETNKDTGKPTGVWTPMHVSWGAVWRLDTKRPLRXSSSS

SEQ ID NO: 203929 - protein, 114 aa, Zea mays
  unsure (1)..(114): unsure at all Xaa locations
  Clone ID: MRT4577_117573C.1.pep
MVVVLLTRLADWRHTLPPGADEVQCGCARQTTPEGSTEPGWAKGADRLMCDELAAWSNASEYNPEIAXSQRLATLXTEANQXERXFVGNTKXHANGEYNKQLDLQLCYYTNDKT

SEQ ID NO: 203930 - protein, 61 aa, Zea mays
  Clone ID: MRT4577_117574C.1.pep
NPKAGFGGHRQAPVLSEVFRCRSLIAANIRVAAGLFFRVRKRRASSTSNSPSEHCARVPRN

SEQ ID NO: 203931 - protein, 99 aa, Zea mays
  Clone ID: MRT4577_117575C.1.pep
GAAAVVRVPYSLIPDPPHVRRRHHRFPSPVIPRPALPASPVPFPTCMSRIVVIWLQRLSSCGVSIWRRLRLELQNHKKLTPSGCACCRTVWLYLVRAEI

SEQ ID NO: 203932 - protein, 106 aa, Zea mays
  Clone ID: MRT4577_117576C.1.pep
VGGAKVALGAQGIFGAFPLPRGFYHPWGKIPVLNNFFDQVVSPKDQVHILGSFGFFPVNLSVFSLFQRGFFGTLGGRPSLKWPPSKVFSPSFFFSKGARAPFSFGG

SEQ ID NO: 203933 - protein, 54 aa, Zea mays
  Clone ID: MRT4577_117577C.1.pep
KKEDPMPRTIHNLNAPRSGNYIFSPKERGGYKADNRTHLFLRRVTGAGAAEDNT

SEQ ID NO: 203934 - protein, 61 aa, Zea mays
  Clone ID: MRT4577_117578C.1.pep
GLFFTGCPPPNFRGFNKARSTVRQILGYGFFLGPEKSTYHGPKDGLISWGPFELCFPWGPP

SEQ ID NO: 203935 - protein, 77 aa, Zea mays
  Clone ID: MRT4577_117579C.1.pep
PGLFCKGHPPPRSPVGQVFLGPPPQPRLGYLKGWAVSNFVFPRNGFHPPELQKNPPHFLPFLPVTPIFPVLGLFRGA

SEQ ID NO: 203936 - protein, 68 aa, Zea mays
  Clone ID: MRT4577_11757C.1.pep
LFVHNMSTKLRPNCPLLMPLLGDSTRYNACSNSFKSKFFCVVYLFTNKIPVSVVPLFQPIKGDQIRSC

SEQ ID NO: 203937 - protein, 45 aa, Zea mays
  Clone ID: MRT4577_117580C.1.pep
HKLALISLCELVAQLAFVSITSSPSSTFFSVSLSIITSHPISQIQ

SEQ ID NO: 203938 - protein, 87 aa, Zea mays
  unsure (1)..(87): unsure at all Xaa locations
  Clone ID: MRT4577_117581C.1.pep
IGHVDFCKGTTTGHLIYKLGGIDKRVIQRFEKEAAXINKRSFKYPWVLDKLKAXRERGITIDIALWKVETTKFYWTVIDSPGHRDFI

SEQ ID NO: 203939 - protein, 45 aa, Zea mays
  Clone ID: MRT4577_117582C.1.pep
RNGQLRGTFSDSVYRLEGGGPMSTLSTGDMSRFKTLLGRTANEQI

SEQ ID NO: 203940 - protein, 182 aa, Zea mays
  Clone ID: MRT4577_117583C.1.pep
MKLPLSAGSPDAAPELAKPSLPATWLILHALFCATSMAVGFRFSRLVVFLLFLPTPPMNPSAHLVSLVTPPVMLASSNTTATITTTTTTTTTVTTTTTLAESEAGANAHHQVHHGPVFVGRHAIRVRKWPHPNPGELLKAHSILAAVQEAQRRSRNRMADPLRPVIAVTPTTTSALQAPSLT

SEQ ID NO: 203941 - protein, 218 aa, Zea mays
  Clone ID: MRT4577_117584C.1.pep
GHGPRQRTARKNPRRDRPDQTGHWFVHMRARLRSHAPAAAHFPLWVATRLAHLTCQSSERSERGGHLAWPLDTAADGVTRLLAPATMRCYGHNVVQCSLHCLRTPVCSHHCPTRHEENTATASFVWFRGGYARLQSAKTLSATLRSYSEFEEEHEQQRGVPCTVHLSITRAQLVVGIATSQQRFSAWSASHLFIDDTIYYRNIHMCIKTPSNRSITAP

SEQ ID NO: 203942 - protein, 117 aa, Zea mays
  Clone ID: MRT4577_117585C.1.pep
FPFNQVGALNFAAYLQQQFPFSQLVAAPPQQFFPFNQLAALNFAAYLQQQQLLPFSQLVDVSPAAFLTQQQLLPFYRHAMPNGGPLLQRQQLGPFNHLVLTNPPVFPPHPTMGGAPF

SEQ ID NO: 203943 - protein, 120 aa, Zea mays
  Clone ID: MRT4577_117586C.1.pep
WVLLLVLLRPLLSKFVMLLVFIFTFYLILNCWYARRLTLSLGLSFNSTSAHSSVLMSLPPSTIVIPRCIHTKDFITTSPINDYNGEEFVFYSTRKYRAKKLNNRVPHQPKWLIVATRENV

SEQ ID NO: 203944 - protein, 202 aa, Zea mays
  Clone ID: MRT4577_117587C.1.pep
MRMRARAASASAPAAVVVLLLLLLLVGVCAGAVYKVGDLDAWGVPPPSKPDVYKRWAKSIHFALGDSIWFLYPPSQDSVLQLAPAAFASCDLSRPVARLADGNSLFNLTAPGRAYYASGAPGHCRRGQKLWVDVPLPNGTYLQPSATDLAALAPTPAADPPAGFASAAAAAPQGGNASPAPRAAAAAGSVVALSFALQILLL

SEQ ID NO: 203945 - protein, 97 aa, Zea mays
  Clone ID: MRT4577_117588C.1.pep
KRLTLSLGLSFNSASAHSSVLMSLPPSTTVTHRCMHTKDVITTSTINDYNSEELVFYSTREYHTNQNGSLLPPNRMYSLLCLALRDSIALRASYALK

SEQ ID NO: 203946 - protein, 53 aa, Zea mays
  Clone ID: MRT4577_117589C.1.pep
AQRTCGSCYWSPITVANGAEMIGLVHHALLPLRSPAQVTPRTDGYEKGPARSY

SEQ ID NO: 203947 - protein, 74 aa, Zea mays
  Clone ID: MRT4577_11758C.1.pep
AGSTAVASQASLPAFRSSPKTVREAVMPPRLGPSGRRIVSAGLRGSSERLGKGPSRQIHGVSPHGVSMRSVVVY

SEQ ID NO: 203948 - protein, 131 aa, Zea mays
  Clone ID: MRT4577_117590C.1.pep
WVLLLVLLRPFLSKFVMLLVFMFTFYLILNCWYARRLTLSLGLSFNSASAHSSVLMSLPPSTTVTHRCMHTKDVITTSTINDYNSEELVFYSTREYHTNQNGSLLPPNRMYSLLCLALRDSIALRASYALK

SEQ ID NO: 203949 - protein, 113 aa, Zea mays
  Clone ID: MRT4577_117591C.1.pep
KFKSCGVGGGYSQYCLDKNLRCRRKLLKKLTLSLGLTFNSTSAHSSVLMSLPPITLVGARCIHTKDFITTSPINDYNGEEFVFYSTTKYRAKKLNNRVPHQPKWLIVATRENV

SEQ ID NO: 203950 - protein, 131 aa, Zea mays
  Clone ID: MRT4577_117592C.1.pep
VSSEFGSREQLLASLEQMRGSSGPSNTEGTTSRAADLVAPTMAPTAEATVDAEAEEAAVELDDGEETSGADASTEEAGTQAGPRRAIRYRRSLTLKPSKPFDQRRVIEPKGTKAWKEVSWDGTGHRTPIFT

SEQ ID NO: 203951 - protein, 86 aa, Zea mays
  Clone ID: MRT4577_117593C.1.pep
KRLTLSLGLSFNSTFAHSSVLMSLPPSTIVIPRCIHTKDFITTSPINDYNGEEFVFYSTRKYRAKKLNNRVSQQPKWLIVATRENV

SEQ ID NO: 203952 - protein, 104 aa, Zea mays
  Clone ID: MRT4577_117594C.1.pep
PWHYHWRAKTPRGILFFGPLWPPGKPLSPTVKRVYQRTCPPKGKPVCSKKKNGFWGAEKNPCWGKKRQRGGEPSSGQGALFSPKGWQKRGSPNRKNRNLSPPWG

SEQ ID NO: 203953 - protein, 132 aa, Zea mays
  Clone ID: MRT4577_117595C.1.pep
GEKSVFFPVGVRLFNAHTTPGEIGKAVGPHKGVELWDVSKNLAGRNPPGSLVLVPPPPGCPPPWFFVRVFVPPLFPRWCSGFTASAPPVPAASLLYPRVPLSLPLFLLTGLGAGPLHPGLAFSRPPGFFLNH

SEQ ID NO: 203954 - protein, 79 aa, Zea mays
  Clone ID: MRT4577_117596C.1.pep
SWGLQDSIRSITAWMVTVLRSTSTCVVVLNLVRVQQGETRNGAKEGKTEVLCTPDDLSNRSSNANMQCSRQAAHDLELV

SEQ ID NO: 203955 - protein, 63 aa, Zea mays
  Clone ID: MRT4577_117597C.1.pep
DKSLCPTGVIDNYQGALLRLPGHPQNKPFLGYKVQTTKPQTLGNLALLLGGPGFYTKDHLTNI

SEQ ID NO: 203956 - protein, 103 aa, Zea mays
  unsure (1)..(103): unsure at all Xaa locations
  Clone ID: MRT4577_117598C.1.pep
ENEKSHDHXXPVSNSPPAPLDLPHRCPRTCPTPPLDAPDPFFLARLTGRPRIACPFTLFPANARYFSTTHRLEGFQDPEVDGHLRRHYRHEEADRGPPNPNHH

SEQ ID NO: 203957 - protein, 91 aa, Zea mays
  Clone ID: MRT4577_117599C.1.pep
TPFARLRGRDKPHMKNDPRRPRHLVMQRKHGHALPLHLQPCWLRLQLQARYFKEVFGQRITWHEGTTTLIKNLHRHLYSMGLWLTTAICWG

SEQ ID NO: 203958 - protein, 96 aa, Zea mays
  unsure (1)..(96): unsure at all Xaa locations
  Clone ID: MRT4577_11759C.1.pep
QPGFKKRLPQIFQVKAPPPLFFFKFPPPFGGGKSPGFGLFFKNPEFPQKFEPQNPLLRNXFSSKVXKSPPPIKKRKNRAQKIPGVKKTQAGCPQKK

SEQ ID NO: 203959 - protein, 59 aa, Zea mays
  Clone ID: MRT4577_1175C.1.pep
KCPPLFYKKVFGGNQAFFESFLRIIWCFFKVGGLGFINPQPLGGFPNGHKLIYSVGFPS

SEQ ID NO: 203960 - protein, 120 aa, Zea mays
  unsure (1)..(120): unsure at all Xaa locations
  Clone ID: MRT4577_117600C.1.pep
GGAASEGEEETDAEADPSGVRAPPPGVPAGLRQVCKRLGKSRSASSAVAAAPSPAAAAAXGPAGAGXQAQRRDDSLLQVQDGIQSAIAHCKRSFNASKEPRSMTATTGGEARAGGAGEGA

SEQ ID NO: 203961 - protein, 99 aa, Zea mays
  Clone ID: MRT4577_117601C.1.pep
GCEITFSVLIGDNINQGEKKKRPPEGGHTPQTQKEGAKPTPPGNGGKQGRGNRGEPPRRKQEPTPGAAGSKHQRPNPYTQGPRHHKKHQTPQSKTTGGR

SEQ ID NO: 203962 - protein, 75 aa, Zea mays
  Clone ID: MRT4577_117602C.1.pep
NHRRGMFQRTRGDLTTRCNYKYNLVTAHLAEPPYRLGTCYLKIKRKKSYLLNTYFFLGLPSVSKFLYLCLVHFLN

SEQ ID NO: 203963 - protein, 89 aa, Zea mays
  unsure (1)..(89): unsure at all Xaa locations
  Clone ID: MRT4577_117603C.1.pep
RTRGRTRDDRVIQCSEKPXIASFEYMKVLTSFLNFDIVSTAVYSYMASMXCYVFKIDDALDLLKSRNALLHDXSSDIISNALYEHHVHA

SEQ ID NO: 203964 - protein, 171 aa, Zea mays
  unsure (1)..(171): unsure at all Xaa locations
  Clone ID: MRT4577_117604C.1.pep
NYTTTLASVTARALFASLRPSSSSAFLGHSSRLGLTSTXXXXILCGGGGXNXXXLXFLPSPXYLXXXXXXNNSFXXXXXXXDPXNXXWYLHAELVNGRWAMLGVAVMLIPDVLTIAWLINSPHLYDSGKSDYFASSSTLFVIYFILFHYVXEIRRWQDIKNPGSVNHDPIF

SEQ ID NO: 203965 - protein, 59 aa, Zea mays
  Clone ID: MRT4577_117605C.1.pep
PRLGPTITIVDLLAGHSDKTSALHAIKCNARCCGATMHVPYSRKSDDKSSLYPADWAYH

SEQ ID NO: 203966 - protein, 100 aa, Zea mays
  Clone ID: MRT4577_117606C.1.pep
EGADAKAKEEKAGKLAKKRIIDERRARRSTEQDGRSKQDWRRQPWEEREVDEQHITMNDFEEAAKTEQPTMRREGITTDPGDTREDDGGHDSKRKEHDRG

SEQ ID NO: 203967 - protein, 59 aa, Zea mays
  Clone ID: MRT4577_117607C.1.pep
LALLLVSTASSPQILLIHNVHNHMIIIHYYIIDTINNHSITYYTSLHNSLLFKLYHYTI

SEQ ID NO: 203968 - protein, 57 aa, Zea mays
  Clone ID: MRT4577_117608C.1.pep
PTRTTASIPTSTLATCYSTNAEPNLQDHDTTTMRPCFSRLLDKQLHYQPMTDSLLPS

SEQ ID NO: 203969 - protein, 59 aa, Zea mays
  Clone ID: MRT4577_117609C.1.pep
IIGTFSLQEAIIKKPYKHIQILTHLLNYNYTMYQTAIYMQSDLMHNISINIYNTGCKFQ

SEQ ID NO: 203970 - protein, 41 aa, Zea mays
  Clone ID: MRT4577_11760C.1.pep
LPLKLLKFKPFPNAANNRKPLLARKILKAVIKPTTEVPIRC

SEQ ID NO: 203971 - protein, 87 aa, Zea mays
  Clone ID: MRT4577_117610C.1.pep
DIDGDAVRTYKNQHDFMRKKSIHYFGISCQVLQSLHGTHNTAHACGVKARLPQAVFFERISSNCRCKLILLLFKSCWSSICQYRKNL

SEQ ID NO: 203972 - protein, 108 aa, Zea mays
  Clone ID: MRT4577_117611C.1.pep
LNIPPLQEMGRDSLISFLLPDDENRTRDVHLHCTAARKRFTGPFQFEVRTFSEVEGASRGRIDVGWNSRRRRGGLRPPPLSLCSLSLSTPVKHGPRSQQQRPGPRYPM

SEQ ID NO: 203973 - protein, 429 aa, Zea mays
  Clone ID: MRT4577_117612C.1.pep
MVGPKPNRMCKSKSAIATSSPSPSMAAAAAASTPRHRRSPRTTATTSFPAASSYSTSSSTTVSSSAASLAALRDSLPELPLLFTFQDLAAATANFSSAHRLAPAAPSSSSNSFRCALRGHPAAVFRRPLRRDARDVAARLAVLGHCHHAAIARLLGAAASPDRTTLFLAYELVPDASPLSVLLRNPKNPSFTPLATWHSRLQLAADVCDALYYVHLQADTVHNRLSASSVLVCGDGPLPRAKIAHFGAADLAGELPVEHKDDDGGSKGSGSGSHRRTSSRGRRIEGTRGYMAPELVAGGPPSRRSDVFALGVVLLELVSGQEPVRYEIVNRGTGEYERTSLIDTAAAAVAEGGGEGMRRWVDRRLRDSFPVEAAESLTALALRCVSKDPLARPDMSLVAAKVSKLFLEAQEWAAKFNVPTDISISIAPR

SEQ ID NO: 203974 - protein, 70 aa, Zea mays
  Clone ID: MRT4577_117613C.1.pep
SLHPLNPHYRGGFFERAGGYLHQTCSHRPQRIALLHLLTSYPNLSHYLNQAATHVYLPSLILCITHTYSL

SEQ ID NO: 203975 - protein, 85 aa, Zea mays
  unsure (1)..(85): unsure at all Xaa locations
  Clone ID: MRT4577_117614C.1.pep
NHKADISTLVCALHPHDIAKVNGVAAYLRHCNTPAHVLHFTGPSXLPNFLKSLNHDVIPAGVPRKPAMTLDDLFNINTCIDKTLV

SEQ ID NO: 203976 - protein, 37 aa, Zea mays
  Clone ID: MRT4577_117615C.1.pep
TCIWIRSLTRRPDGEGRILSASVSSRPKPVQSCFVPN

SEQ ID NO: 203977 - protein, 366 aa, Zea mays
  unsure (1)..(366): unsure at all Xaa locations
  Clone ID: MRT4577_117616C.1.pep
MKASIKFRDDDRPLLRAKVPIGVLGLPFLSGLAAGGDAKDLRFDLSTAFSSGPALRLSYRPNEPLQPFALSVRTGLGPLGSPARAPFALAAEFNLTSSNPPAFSLLFKPRIGDFAVASSVRSPPTPPPTSTPPPLAIKMVDLTTNGDDHDCEXTVTASPLTGXCIGGERXAVTGTDGGGGGVGALLSGMRLTTRSMLPLWSKASLRFQWGLRVPPEIKATLADNGYGRKAGSLAISKLPLLVMNKITIEHTPKVPSQSETDKKRKKDTPPAAKDEELSFMKRQLDKLNVENTMLRRAVEDLRAEIGAGKGDDRKLPTAVPPQQHSLVSKPDRHFHINAKELVDSGTKPASNEASEELKKVLEGRRK

SEQ ID NO: 203978 - protein, 73 aa, Zea mays
  Clone ID: MRT4577_117617C.1.pep
IGVYVDVYEFGAVLLGMPHLFFLGRTGRVWFVSLRAIGVVIFLLEYGRIIWLRIHVREVHEQPSRCSVEFRLM

SEQ ID NO: 203979 - protein, 170 aa, Zea mays
  unsure (1)..(170): unsure at all Xaa locations
  Clone ID: MRT4577_117618C.1.pep
GASTPQPPAANLQTKSAPTAAPVPTNNQTTKSSKGNVVNTSSVXSKGQFMCSASDLFDFLTDETKIPMWSRNPAQMKPEVGAEMSLFGGNVTGEVISVDRPKEVVTTWRAPTWPAGHFGKLKISLTEGSDSTKLELHLTGVPVGTEEETERNLDIFYLRSLKQIGLGTIL

SEQ ID NO: 203980 - protein, 85 aa, Zea mays
  Clone ID: MRT4577_117619C.1.pep
QEQFPNFCQIPAGKGVQCEVIAASPAHYYCFFLLWSDDTIVQTFDSKESDTNPLVLLAEWTWILLCGLVHTVLKLRYIAHLKQRL

SEQ ID NO: 203981 - protein, 93 aa, Zea mays
  Clone ID: MRT4577_11761C.1.pep
WHRPLAPGCPPEGVVLGIKAIQVFGQPTFVPSCVLFSQSQMLLPTRSCSKLFWASGNKYHPPFLVSRWLKPWPCSPTQLANGLICAWLPKQLY

SEQ ID NO: 203982 - protein, 43 aa, Zea mays
  Clone ID: MRT4577_117620C.1.pep
ANLFIHEQLYHQYPHQAQSTYLSTQFSKINNFSHTLQILNTNN

SEQ ID NO: 203983 - protein, 97 aa, Zea mays
  Clone ID: MRT4577_117621C.1.pep
ADLGSSFLSARFISVALTFRGLLSANRKGIRGTGPKRSELGFRMILYITSGHFTMTCRAIKGLTITLFTSRCGRNKLIYPLYQVCYRPVRTRTSTST

SEQ ID NO: 203984 - protein, 65 aa, Zea mays
  Clone ID: MRT4577_117622C.1.pep
PRGENFGPLKGPPPFFFLGKIFFFCLYAFFNLDFFKTGSLLFFLCYYFFFFFFFFFLNSLLAKSA

SEQ ID NO: 203985 - protein, 90 aa, Zea mays
  Clone ID: MRT4577_117623C.1.pep
PRKQAFDYSRKKTPEPTTKTQKGNPPAPNNQRNAPKPLKPQPQPDQAPGGAGPTHATEGRPGPRGETKEKGPNRGKTGAAKKPHTPHRRA

SEQ ID NO: 203986 - protein, 58 aa, Zea mays
  Clone ID: MRT4577_117624C.1.pep
MVRLTTYGSGDNQTCPKGWSEKHRRLRGEHTPDELEMEDGDEIDAMLHQTGGSVPSTT

SEQ ID NO: 203987 - protein, 71 aa, Zea mays
  Clone ID: MRT4577_117625C.1.pep
WLDQWQTDIFLCTRCPPRIGGVSRQRISGEGEQSLQLNLPVQSVLRRWKLKNSSTYIFIYSPPPNIKTPTY

SEQ ID NO: 203988 - protein, 119 aa, Zea mays
  Clone ID: MRT4577_117626C.1.pep
KLRKTLEDYPQINYHMINHDGSTDWTNSDPTEPIAVTWGVFPGCEIAQPTVVDPLSFRVWKDEAYDAWLNNWANIYPDGSASRELLHKIHDEYVLVTLVDNDFVKPTVIFELLEKMLNS

SEQ ID NO: 203989 - protein, 107 aa, Zea mays
  unsure (1)..(107): unsure at all Xaa locations
  Clone ID: MRT4577_117627C.1.pep
MDSGITRSGCGPGAATVQTCGSVPTFGTGSGEVLDFDAHHRFTIYITDSDGELQHIPACSINISEYTPREDPMLWRRFYRNMLMHKEHHWSGMDXQFRCLITAPSGD

SEQ ID NO: 203990 - protein, 33 aa, Zea mays
  Clone ID: MRT4577_117628C.1.pep
KAPTISNFTRVLTRFTNSNRALNKGQTNSYANP

SEQ ID NO: 203991 - protein, 169 aa, Zea mays
  unsure (1)..(169): unsure at all Xaa locations
  Clone ID: MRT4577_117629C.1.pep
MSNNNAMPATMLSVSLVVSSMSGCCKGTASDTXDVRCAFSSPSVSGAXGRPWPXCYYVFKEPMITPTRCSCYLSQDKRSADCTHCYELTVAKTLLCRDWILRLYYHHVCTLRPXNCCDFGYCTMDYIXYCHRGDTQDTRPIHCTAXSYVESDPPRLPXLDVFHXYPRPK

SEQ ID NO: 203992 - protein, 77 aa, Zea mays
  Clone ID: MRT4577_11762C.1.pep
FFFFFFFFFFFFFFFFFFFFFFQAKSLFHFLKMHPPSLGGKFLFFHHPLGNLILVASFLHPNQKTPPAPSKLLEKKK

SEQ ID NO: 203993 - protein, 91 aa, Zea mays
  Clone ID: MRT4577_117630C.1.pep
HKKKNGTLITLLYNLQNTLGQPCFTLHFTLVPPYLFHPTSFLTNIQVLSFPASHIDRHMGKACAAFIVINSLTSNGHHTHLNLIQPLCILQ

SEQ ID NO: 203994 - protein, 97 aa, Zea mays
  Clone ID: MRT4577_117631C.1.pep
DGGTLVNSSIHDFQWEQELQLEITGFIIGDYVRGLKDELERKLYEQSSIVNSLRKKSQDTVAQCASIREDLIAISNMLLPSEEEHHIPLCRHESLGN

SEQ ID NO: 203995 - protein, 97 aa, Zea mays
  unsure (1)..(97): unsure at all Xaa locations
  Clone ID: MRT4577_117632C.1.pep
ANPIIHDLKDLRAXQSPGTTDEIAADPIHHLEIFXHIIDIMDPEHPYSLEQMNVVTEDLIELNYLRNHVMITFTATMEQWXXTSIIGLRIRVKLRLS

SEQ ID NO: 203996 - protein, 171 aa, Zea mays
  unsure (1)..(171): unsure at all Xaa locations
  Clone ID: MRT4577_117633C.1.pep
GKTNLSHDGLNPAHVPCWRVNNPTLCEFCFATVGRADIEGSKSDVAANAWPPQASYPCGNFSDTSGXATPGIEKKRTPKDRXATLSRFVFVXNLRIERAFALLLRVRFLSSLSSXLGHLRYVFTDVPPQPNSPPESFLDLGQKKTERSRSKRKKKRKRKKKKNKRGGKPPF

SEQ ID NO: 203997 - protein, 68 aa, Zea mays
  Clone ID: MRT4577_117634C.1.pep
VFPREDAHLTFREAPDAMVISHSFWSQTLRYSSRLGKNGCYDRCGNWRGANRSSAMGQKVTTKKAICN

SEQ ID NO: 203998 - protein, 169 aa, Zea mays
  unsure (1)..(169): unsure at all Xaa locations
  Clone ID: MRT4577_117635C.1.pep
MLPLLLISTLPAFTLLLAAPATKACCKLARELALLALLLATELLRHATAAAAAXGSRERERGARMPSASSKPAPALASAPSAEAETTAAAAAAAAGLPLLDLPELALDRVLEELSPSSLAAMACVCSALRDRCSADALGGPYLRIKWGRVLGAAARKEXWDAEPGRHRQ

SEQ ID NO: 203999 - protein, 123 aa, Zea mays
  Clone ID: MRT4577_117636C.1.pep
HPITDSSISIGYKGSLNDQEREQHYHNDPMSPRPSTIYDCYQKTSLPEKATLIRRAHQLRGRVDLLRPSHQVHRHLHELHARLHGQRRHQVHMPRLPSLKLQLQDPLHTHAINHGHNRWTLLP

SEQ ID NO: 204000 - protein, 68 aa, Zea mays
  unsure (1)..(68): unsure at all Xaa locations
  Clone ID: MRT4577_117637C.1.pep
GGQNTRGGXTKGFHGNKLKTDHWPHKVFPGNFQAKGLPKNLQPFGQHKGDIVVDTTKLRHQKIQDLLI

SEQ ID NO: 204001 - protein, 81 aa, Zea mays
  Clone ID: MRT4577_117638C.1.pep
KLGTGYAWWGSRTSPPTFKLGEISTRDTTRTASSRDTYCWPSDNDDSRSYWPGHHFHGGALQHQPGLLKNKTGGVLGGTHK

SEQ ID NO: 204002 - protein, 63 aa, Zea mays
  Clone ID: MRT4577_117639C.1.pep
HGRSWPQKQVGGLIGRTSVMSVSQLGVVPAPTPNHRCRNEPCGMYHLLYFHWCMSIGEIEHVD

SEQ ID NO: 204003 - protein, 70 aa, Zea mays
  Clone ID: MRT4577_11763C.1.pep
AKFIGAGAATVGVAGSGAGIGTVFGSLIIGYARNPSLKQQLFSYAILGFALSEAMGLFCLMVAFLILFAM

SEQ ID NO: 204004 - protein, 97 aa, Zea mays
  Clone ID: MRT4577_117640C.1.pep
KTPPKGLLVPHLNRVPQWEGKITPEGPKTPKIFFYFLREKGKFPPKKSFVFLGNTPTAPPQKKKKKKKKKKKKKGRPPFFFFFFFSPSVTLIAEPLT

SEQ ID NO: 204005 - protein, 70 aa, Zea mays
  Clone ID: MRT4577_117641C.1.pep
PTRFVPRCPQVMLLRAVTDLRGAPWYLCKTPSSEVTYSTISSDRTALSLLENNDQILEPNRTAYEDPEHS

SEQ ID NO: 204006 - protein, 57 aa, Zea mays
  Clone ID: MRT4577_117642C.1.pep
MSPVDGEYHCFVGGLAWATSNKSLENAFASYGKILDSKVITNRKTGRSRGFGFVTFS

SEQ ID NO: 204007 - protein, 79 aa, Zea mays
  unsure (1)..(79): unsure at all Xaa locations
  Clone ID: MRT4577_117643C.1.pep
ISTCTSRMLVCCVVGAPGSGGGFCRSDRWGWGMRMGGYSTVGTAPCVVRERESRRVVLEREGKAACAYRATVHGLXPRT

SEQ ID NO: 204008 - protein, 147 aa, Zea mays
  unsure (1)..(147): unsure at all Xaa locations
  Clone ID: MRT4577_117644C.1.pep
GPQLEQPIRRRHRGFALLCLSAALLAAATLLPGAAVAEGVTPSEARRLRDEVKDMFYHAFDGYMKYAFPLDELRPLSCQXIDSLDTLALLGDKEKFGAAVEWVGKNVHFDINKTVXVFETNIRXLGGLLSAHLXARDFAPGLRFQSS

SEQ ID NO: 204009 - protein, 651 aa, Zea mays
  unsure (1)..(651): unsure at all Xaa locations
  Clone ID: MRT4577_117645C.1.pep
MQPIRRRHRGFALLCLSAALLAAATLLPGAAVAEGVTPSEARRLRDEVKDMFYHAFDGYMKYAFPLDELRPLSCQGEDSLGGYALTLIDSLDTLALLGDKEKFGAAVEWVGKNVHFDINKTVSVFETNIRILGGLLSAHLIASDYATGMRIQSYDDQLLHLAADLAQRLLPAFDTPTGIPFGSVNLLYGVDENESKITSTAGGGTLTLEFGILSRLTNNTVFERVTKKSVRGIWSRRSKLNLVGAHINVFTGEWTQKDAGIGTSIDSFYEYLLKAYLLFGDEEYLYIFQEAYKAAMHYLHHDPWYVEVNMNSGATVWPLFNSLQAFWPGLQVLAGDVDPAIRTHAAFFSVWKKYGFTPEGFNLATSTVQNGQRSYPLRPELIESTYWLFKATRDYRYLDVGRDILASLQYGARCPCGYCHISDVETHKQDDHMESFFLAETVKYLWLLFDLAAGPDNIVENGPYKYIFSTEGHLLPVTPEIALEDEHCSYFGAFCNGGADHGYGASASSTKHRNGNYTQLDDXSNPFQXHYSMPMXFTPGYIKGVCPGLTHAQKFGISYSDEEDNFIEQTSESLDHHGESAIESSVQDQSSSIILISHPVASQQDEAFESESGSQDHANIVVTSDSDSDSTSRDNTVGSPGMNSEELMDDI

SEQ ID NO: 204010 - protein, 84 aa, Zea mays
  Clone ID: MRT4577_117646C.1.pep
VPAEVLFLNHWTERQNVGLCHQYVLVEEGNICRLLLPHDLCLDPAGLRNFPQAYRYEGPGLATLPSNGPTYQPLKSLRNATLSG

SEQ ID NO: 204011 - protein, 40 aa, Zea mays
  Clone ID: MRT4577_117647C.1.pep
SRTPQSWDLDLRVIRTDLQCIGSSPLKRALRQVKKKKKEN

SEQ ID NO: 204012 - protein, 209 aa, Zea mays
  unsure (1)..(209): unsure at all Xaa locations
  Clone ID: MRT4577_117648C.1.pep
MTEVNQRGQPPHPPPQPPPPHPPPPQPPPPPQPPPPPESSAEPMMAPAASPPTAPTASPAAPDPSPLRPGLPPXPAPGSRTRPAQGSRTRPREAAGSPGRSSMRCCCCSAGAASWRPARTRTPRWPPRPPSRPPRGARSPRDRAGRRRRRAAWPQQRRPLAPRARREGSPAPWLCPPCGWLWGARSAHGEGEVGRRVMETGGRRGVEGS

SEQ ID NO: 204013 - protein, 90 aa, Zea mays
  unsure (1)..(90): unsure at all Xaa locations
  Clone ID: MRT4577_117649C.1.pep
MSCENGPFFALLSLLLHATNSIIVPXLIFAPNDGTTYYRLPVTPLSFXHTNLLASNLQLPLAESVFHQRISHFQQQQLIHLNLRTISPKQ

SEQ ID NO: 204014 - protein, 91 aa, Zea mays
  Clone ID: MRT4577_11764C.1.pep
LSRTAGPRATSLCERGMPAIYIVVVIRAAAGGGVVIQPGCVTQAVPPMLPVTRSKPSSRELDTPEPCRQCVAPRRAGRSPRAIELRRARVC

SEQ ID NO: 204015 - protein, 65 aa, Zea mays
  Clone ID: MRT4577_117650C.1.pep
QKERSGLPVLFYSWGGLMMAHSSVLAPIEDGFGVCRFFLSLLLAEIVVMFSNAQKPYMGEGYGDS

SEQ ID NO: 204016 - protein, 106 aa, Zea mays
  unsure (1)..(106): unsure at all Xaa locations
  Clone ID: MRT4577_117651C.1.pep
MARALGARTPYVGRCGRRAKAPVASLDFDLQAVSDNTIHGRYSPLAFXQPGAMTKRVNQRSLXSAXVELLSRHAHYEGXTNLAYDRIKPHHVQYGELNNATLCEIC

SEQ ID NO: 204017 - protein, 86 aa, Zea mays
  Clone ID: MRT4577_117652C.1.pep
GFYHDTLCSQHDADLLGIYLSVTLVNQFLSPQMNVTDVKSPTIPVASSMPTCFSVLMEPRGFDRQRALGVRHFAERLQLVQHARCT

SEQ ID NO: 204018 - protein, 71 aa, Zea mays
  Clone ID: MRT4577_117653C.1.pep
IGNFIRPVQPHLETRDLSSRPKFSTVSYQKSCTSVQKLLHMNLSCERKSETAGSYRVSPVPAGCKDPEIEP

SEQ ID NO: 204019 - protein, 137 aa, Zea mays
  unsure (1)..(137): unsure at all Xaa locations
  Clone ID: MRT4577_117654C.1.pep
RQRQVHVGITWKVLPQLETLEHLQGNSFAIVSWCCDALKKIFSSVGATSRATSHTSEDXPRGCLXLEKELGELESIINTHSDYCTMVGSHGMASVLEKASCNHIKIVRETSFGMAVKDIKTPSKSVLNTTKIFLFEL

SEQ ID NO: 204020 - protein, 124 aa, Zea mays
  unsure (1)..(124): unsure at all Xaa locations
  Clone ID: MRT4577_117655C.1.pep
MAEMLALPLPLRAPAPPPPPRPTXFPTPSSPIANLTHRPPPLLASSPRTPSSAPPAPLQPHPPAXTAPRPPARHLPRRTAVAPASVPVPPRPPXRSSPCSPTRRNTLPRATSSRRSRRPISPPS

SEQ ID NO: 204021 - protein, 128 aa, Zea mays
  unsure (1)..(128): unsure at all Xaa locations
  Clone ID: MRT4577_117656C.1.pep
EKDLQKLRDARIQQDMLDREASILRAKTQAALAEGISWGMTDDAIEESAEDDADEITWQTYKGXLTDRQEKTRSKIVKRMEKIANMKKEIDAIRVKDISQGGLTQGQQTQIARNEQRMSQIMEELDNL

SEQ ID NO: 204022 - protein, 209 aa, Zea mays
  unsure (1)..(209): unsure at all Xaa locations
  Clone ID: MRT4577_117657C.1.pep
PSVVRXKPRRRPGQPSFSSTLLDAICDSLDEQAGGHGATAAPTRGSAKKQQQAPLHYYYYYKPSLAASNRAARADDCLSGRGYFSSSEVECSLRRLRPIRTSGGAGPASVAPEEKQQLAPPGAAMRARKPFATPASDSGNCRRPASPGARLASLLSAIFSGKRQHPAPADDEPACSTAPSSVRPCLAKTLPSARARVTRRQSRSRTVRF

SEQ ID NO: 204023 - protein, 397 aa, Zea mays
  unsure (1)..(397): unsure at all Xaa locations
  Clone ID: MRT4577_117658C.1.pep
AASKLPLYAFKLTPAKGSQEDAASTKLLVDILLSEWEDRMTRGLFRYDVTACETKVIPGNLGFVAQLNEGRHLKKRPTEFRVDRVLQPFDPAKFNFTKVGQEXAGFQFEXSGGDDSYFLNNAPIIAVDRAPNVIAINVSPIEYGHVLLIPRVLDRLPQRIDPESFLLALQMAAEGGSPYFRLGYNSLGAFATINHLHFQAYYLSVPFPVEKAATHKIPLSEDTKKNGVTVSKLINYPVRGLVFEGGNTLDDLATVVSNACIWLQDNNVPYNVLISDCGKRVFLFPQCYAEKQALGEVSQELLDTQVNPAVWEISGHMVLKRRMDYEEASETSAWKLLAEVSLSEERFEEVKAYIFSAAGLVQYDEEEEEASDGEGPTAYVPVKVTPLPVAEGCLVLP

SEQ ID NO: 204024 - protein, 311 aa, Zea mays
  unsure (1)..(311): unsure at all Xaa locations
  Clone ID: MRT4577_117659C.1.pep
MFFLQWFLQVSPIEYGHVLLIPRVLDRLPQRIDPESFLLALQMAAEGGSPYFRLGYNSLGAFATINHLHFQXKLLMVSKFTSHHKIPTKQEHIQYCADSVVVTFVLKMLLSTELYYLFFFXAYYLSVPFPVEKAATHKIPLSEDTKKNGVTVSKLINYPVRGLVFEGGNTLDDLATVVSNACIWLQDNNVPYNVLISDCGKRVFLFPQXISECCRSSGLNWWWNLFMMFXKTSICSIMQCYAEKQALGEVSQELLDTQVNPAVWEISGHMVLKRRMDYEEAPENSAWKLXLAEVSLSEERFEEVKAYIFSA

SEQ ID NO: 204025 - protein, 113 aa, Zea mays
  Clone ID: MRT4577_11765C.1.pep
DHISPAGSIPRDSPAGKYLLERGVQPKDFNSYGSRRGNDEVMARGTFANIRIVNRLLNGEVGPKTIHVPTNEKLFVFDAAMVSSSPSYVSTNILFSIILRQKRHSIRLVSQLS

SEQ ID NO: 204026 - protein, 143 aa, Zea mays
  Clone ID: MRT4577_117660C.1.pep
AADTSRRRVTTSRTGRRGSPAPKRPLARWVALASIRGLSSFSSSREQEPREATTPGGPESVAHKVREEDSEYYRMHKPYATHCCGLTIGKAGTADAAMSTLNPSNGKPEWDGADGVEEGGGGSTITWNSGAPPMAENADERGR

SEQ ID NO: 204027 - protein, 71 aa, Zea mays
  unsure (1)..(71): unsure at all Xaa locations
  Clone ID: MRT4577_117661C.1.pep
MMRERQRREKLSQSYADLHALVAARSRGDKNSIVQAAAVYIHELRGARNQLQRPDEELKARILXHDAGQQC

SEQ ID NO: 204028 - protein, 196 aa, Zea mays
  Clone ID: MRT4577_117662C.1.pep
MATSAPAANADGAAPGGVDGRSGFCEVTRTFRSLRPPVPLPPTDSPLSFPEFAFSLLASSPTPAHPALLDAATGEAVSFPAFLSQVRALAGALRSVVRLGRGDVAFVLAPTRLDVPVLYFALLSFGAVVSPANPALTADEVARLVALSGASVAFAVSSTAAKLPAGLPAVLLDSDHFRSFLQKQSDGRGEEGLAAD

SEQ ID NO: 204029 - protein, 299 aa, Zea mays
  Clone ID: MRT4577_117663C.1.pep
MQMDSYNYNYASFFHDEAPSFYPHVAVPPSPELPIGLIASPGEPEPPFAPPMPASFQDYTGAVGVGVGVRAPFGGASVHGQAIDALGGGDGQREQSMAMAEDGEEPAPRRRQPAGGPAAAAVESSRGFRHMMRERQRREKLSQSYADLHALVAARSRGDKNSIVQAAAVYIHELRGARDQLQRRNEELKARILGHDAGQQCVKVQFEVDEPASAIDSMIGALRRLKGMDVRARGIRSSLSGRRLWTEMNVETTMAADEVERGVEEALLQEVERKQQQQLGAGSAAPGFPGPSSHVQNVF

SEQ ID NO: 204030 - protein, 92 aa, Zea mays
  Clone ID: MRT4577_117664C.1.pep
QLGEVLAQLSGCGWEDPKSTLEIQNHLVSAAEPRLRMTAAIVDGHYARLQASYPVNCWFGDFEFELEVGLLLTALFELVQLSWAGLGLIHPR

SEQ ID NO: 204031 - protein, 67 aa, Zea mays
  Clone ID: MRT4577_117665C.1.pep
EHPSFALRKRVSYDLTIKDGTGMGSDSSKSYKLELEVHLPVDLLLQGCPQLFNQERNHIIHIGTGLQ

SEQ ID NO: 204032 - protein, 60 aa, Zea mays
  Clone ID: MRT4577_117666C.1.pep
IGCATQPSVKTTEGAGTFFFFFLRLNQEPGRIIFNEMDAQPNQALRRRKELEHFFFFFLD

SEQ ID NO: 204033 - protein, 37 aa, Zea mays
  Clone ID: MRT4577_117667C.1.pep
LSVSKRVEAQNNLSPLKKLHSLPLILTWVHMSKLGVC

SEQ ID NO: 204034 - protein, 56 aa, Zea mays
  Clone ID: MRT4577_117668C.1.pep
SARARWTNLFFVATQFFLFGLHNDTINLGPGITAGAAIEPTGTNGTPRDHTDSDMG

SEQ ID NO: 204035 - protein, 33 aa, Zea mays
  Clone ID: MRT4577_117669C.1.pep
IYVSYVYQTCIGILVSYNIPSTAIPSHEKRHKR

SEQ ID NO: 204036 - protein, 75 aa, Zea mays
  Clone ID: MRT4577_11766C.1.pep
TQKDSVSKTSMDPASRGTVHIYSQHRQAAKMVCDQRPLGTTHDREAEIYLSTSLLGLEHVADQVDDTVAVAPLVG

SEQ ID NO: 204037 - protein, 68 aa, Zea mays
  unsure (1)..(68): unsure at all Xaa locations
  Clone ID: MRT4577_117670C.1.pep
MVRTRRRLVLLLLLLALTVLSPLALYTSRLSVALNSIXSAGFPWRNHESGNSELLERTCRHCLLRGAD

SEQ ID NO: 204038 - protein, 488 aa, Zea mays
  unsure (1)..(488): unsure at all Xaa locations
  Clone ID: MRT4577_117671C.1.pep
MPKQTPAKVVAENSQSARTDGKTKTTVLPDMRIRNIKDQLIKAKVYLGLGSIRASSQYLKDLRQRIREVQKVLGDASKDSDLPKNAHEKVKALEQMLIKGKQMQDDCSIIVKKLRAMLHSAEEQLHAHKKQTVFLTQLAAKTLPKGLHCLPLRLANEYFSLDPVRQQFPNQQNLINPKLYHYALFSDNILATAVVVNSTVLNAKHPSDHVIHIVTDKLNYAPMRMWFLSNPPGKATIEVQNIEEFTWLNDSYSPVLKHLGSQSMIDYYFGTNRANSDSNLKYRNPKYLSILNHLRFYLPEIYPKLDKMVFLDDDIVVKKDLAGLWSINMKGKVNGAVETCGESFHRYDRYLNFSNPIITKSFDPHACVWAFGMNVFDLAEWRRQNITEIYHSWQKLNEDRSLWKLGTXLPPGLVTFWNKTFPLSRSWHVLGLGYNPHVNSRDIEHAAVIHYNGNMKPWLEIGLPKFRSYWSKYLDYDQSFLRECNINP

SEQ ID NO: 204039 - protein, 50 aa, Zea mays
  Clone ID: MRT4577_117672C.1.pep
IVRWIPCALCSAVKTHPNSSSIRHRLMILALCSLLDSTLEKNQEISIAAL

SEQ ID NO: 204040 - protein, 59 aa, Zea mays
  Clone ID: MRT4577_117673C.1.pep
KGAGTIGQTNLHIFVLATEGIIAFYVYERTNYLVSPLHISESSYLWLDSYFHAISSCTS

SEQ ID NO: 204041 - protein, 71 aa, Zea mays
  Clone ID: MRT4577_117674C.1.pep
MAFNQAFRAQQQHPQQLMAQQHESQPEKEHAMDPPPEAIFQDYKALNKLKDKVALATGGDYGIGRALCLCF

SEQ ID NO: 204042 - protein, 76 aa, Zea mays
  Clone ID: MRT4577_117675C.1.pep
TNILPQTFHNAHSQAPTGMDSNQLAGKIPLARKLSLLLRNSSKQTLRPSFTLVSGTTNRRTLTHMQTPGRKKILTL

SEQ ID NO: 204043 - protein, 68 aa, Zea mays
  Clone ID: MRT4577_117676C.1.pep
LPLRAPDLFSPPMLALLDGVPPQPMRSAPHALDRESMILPLPSYICDAGAHKYGVSPPCPSLFISVPS

SEQ ID NO: 204044 - protein, 35 aa, Zea mays
  Clone ID: MRT4577_117677C.1.pep
QTTIIPRTSSISYSSIEEGPTFCTLPASPPYSKAT

SEQ ID NO: 204045 - protein, 93 aa, Zea mays
  Clone ID: MRT4577_117678C.1.pep
MQLYLQLASPCLATTIPVSGNLPVTSEAMASMAYIAACAAALAIFVALLRWAYRWSHPKSRGMLPPGSMGIPLLGETMQFFAPNPTYDVSPFV

SEQ ID NO: 204046 - protein, 48 aa, Zea mays
  Clone ID: MRT4577_117679C.1.pep
LTASVLRGRPCSDTSDTYGDPGHLWQTVRALILHVGVRRIFFGKTKSP

SEQ ID NO: 204047 - protein, 73 aa, Zea mays
  Clone ID: MRT4577_11767C.1.pep
FSHHDRNVFELVPRLPKLSIIPDLLATLAVKINGDHKAASIQHFLFFSHSATTAAYKGYHNGPTQSPRTQYVG

SEQ ID NO: 204048 - protein, 88 aa, Zea mays
  unsure (1)..(88): unsure at all Xaa locations
  Clone ID: MRT4577_117680C.1.pep
LPPXPAPVSPVSTHVSAEAEXLPCRSEKSARXSRLPXGDSFGXPNPQGVAAGGGRRAGVRPRSAXTSNVRGKGXTKSLLRSSPASSXC

SEQ ID NO: 204049 - protein, 80 aa, Zea mays
  Clone ID: MRT4577_117681C.1.pep
SQLVSSAVIIRLNSTCRRCSLIMCTRDGPSSCLALARISSSRSISICNTRKDQRTENSSCINREVPFQAANSVQRVMYQV

SEQ ID NO: 204050 - protein, 67 aa, Zea mays
  Clone ID: MRT4577_117682C.1.pep
NTSFVGFFFKFWGGCFLLLWGQQNNLGGNFPPLFPSQFFQPLEEERVFFWPHSTRGFVEYFKLGAHC

SEQ ID NO: 204051 - protein, 43 aa, Zea mays
  Clone ID: MRT4577_117683C.1.pep
LLDLYIHISYGMIHQTKHIICPHLPLVVETTLYIGRPEGVSSY

SEQ ID NO: 204052 - protein, 106 aa, Zea mays
  unsure (1)..(106): unsure at all Xaa locations
  Clone ID: MRT4577_117684C.1.pep
HAKVLLVARLRLHVKQLKVIVPSSDQCNIPHVVRSENQMINNSEEGCVXLVSSEGNXTKYTMRLPADKALVDLIKGRSESGKVLVVPEQYVNGQXQICACKHVDPK

SEQ ID NO: 204053 - protein, 68 aa, Zea mays
  Clone ID: MRT4577_117685C.1.pep
KQKLEISKSIRYQLPHLIDEIGSPAKKCVKIKMCITCESNSFDLKYICQSMENSKLTLAYRIPTYLII

SEQ ID NO: 204054 - protein, 89 aa, Zea mays
  Clone ID: MRT4577_117686C.1.pep
SSHFLNRDCILGWRGRHCLTNFHGQQGIGRKRLENISGTFYTIFICPKQKKKKKTREKKKKKKEKKKKKKKKKKDEKKNKNNKKRRPPL

SEQ ID NO: 204055 - protein, 33 aa, Zea mays
  Clone ID: MRT4577_117687C.1.pep
KSSQGFLRRILFVCSKARLPPNMSAHQLPSRLL

SEQ ID NO: 204056 - protein, 81 aa, Zea mays
  Clone ID: MRT4577_117688C.1.pep
MNSMESCVPPGFRFHPTDEELVGYYLRKKVAAQKIDLHVIRDIDLYRIEPWDLQGHCGIGYEEQNEWYFFSYKDRKYPTGT

SEQ ID NO: 204057 - protein, 185 aa, Zea mays
  Clone ID: MRT4577_117689C.1.pep
QIFLTLDLVFSSIALVSAALMGASLERQFSTPLAVTSLSSFWGRQWNLMAVDLLRESVYAPVRARWGRDVGVLAAFLMSGLLHEFLYWYLTLQRPRGEMLLFFMFHAAFQHAERRARAAGLWRPPRAAAYLLVTAFMVVTISEMFFAPFVRAGTDVRLTEETTAMVELIWGTRKYLSHPFRVASS

SEQ ID NO: 204058 - protein, 44 aa, Zea mays
  Clone ID: MRT4577_11768C.1.pep
KIEQGNKLYLAQVMDGLQIMWGRLGLLIKCTCTTQVLMLGIGVA

SEQ ID NO: 204059 - protein, 185 aa, Zea mays
  Clone ID: MRT4577_117690C.1.pep
MATLAVASPFKTLNPSPPDHSRTRTRTRRRLPSSILHLPLPAAPSASTTMPRPSEIPWSKDICNSVRLIGTVGTDVELRQLPSGSAVARGRLAVWKSATETTWVTLQFWDDMAIVASEHVKKGDRIFVAGRLVSDTVDEGPEKRHVYYKLAVQQLNFIESQPVRLYESDASQDAPEEPKVSRLQA

SEQ ID NO: 204060 - protein, 45 aa, Zea mays
  Clone ID: MRT4577_117691C.1.pep
INGAPLSKPKKKKKKKKKKKKKKKKKKKKKKKKKKKKKKKQQTHT

SEQ ID NO: 204061 - protein, 98 aa, Zea mays
  Clone ID: MRT4577_117692C.1.pep
GTRGRQELIIADDPYGMHPAAVRARRTYLPTGPCPLLLFTTYYWGGSAGALYSLLLFTGTTFVETHPLKGRTNLPFPLKIIFHASCYFCPLFYFFLSL

SEQ ID NO: 204062 - protein, 83 aa, Zea mays
  unsure (1)..(83): unsure at all Xaa locations
  Clone ID: MRT4577_117693C.1.pep
RNRYSSTTQWYFYCIRKIFTCNINSSSRTNRNNNLNNQNASNKIMGKSIAXTSLSSSAKKSRIPSIDTFICAHASTDAWADAW

SEQ ID NO: 204063 - protein, 56 aa, Zea mays
  Clone ID: MRT4577_117694C.1.pep
TLPQGRRYGTTLRNLAACWIGRLHYHDRLNQPVMGSLYWMVLAPLSLVGTIGVGPG

SEQ ID NO: 204064 - protein, 109 aa, Zea mays
  Clone ID: MRT4577_117695C.1.pep
GTTLELKPTSKTAKDGACAARALYKVERGAAGGQEHKKGQISSSEGGKQPCAAHGKAEGGTESPVKDASSDPWHHRAPPPCQERGRSTTPTTSKLKRKVFGGCSGPKCV

SEQ ID NO: 204065 - protein, 137 aa, Zea mays
  Clone ID: MRT4577_117696C.1.pep
RAKRQCSADNLLSLERQPPFFPPSSTSVVCVSSHQETHTRQRDNPFQYTNRTAGHSLCVPTMGQQEEVAAVQKPPAAAVVFTWEPVVTVTAKRPEGGVGDTTAVITPPGSPTTKAARRLAVPPPPGRAAARSLSSRA

SEQ ID NO: 204066 - protein, 108 aa, Zea mays
  unsure (1)..(108): unsure at all Xaa locations
  Clone ID: MRT4577_117697C.1.pep
FLLFNWLVGMPPVVCFRQXILPFIXLAGSSWVSFFFQQQLVPFFLPFVGGSPPLFFLQPMXLPFVLLGLTNPPPSYHQPLVGGALFLLVCWLSFIKFFFWCMWAPPHK

SEQ ID NO: 204067 - protein, 84 aa, Zea mays
  Clone ID: MRT4577_117698C.1.pep
PPKHPRGEINRTNYQRGGPPNPAPQGRLNRKQTLGATTFSPPTLGAPKDQKERKRAWEDPFMAPRTPNKRIGKPPMNPGADHWQ

SEQ ID NO: 204068 - protein, 62 aa, Zea mays
  Clone ID: MRT4577_117699C.1.pep
VRSLIAAMIGAKRGAQFLRLVLIQQRQAPIQLLDELQARPRAHRRFSLLFHFLLHHLLLFHS

SEQ ID NO: 204069 - protein, 113 aa, Zea mays
  Clone ID: MRT4577_11769C.1.pep
MAPREHHQPQEEEEEDTAGVVKLISAEGFEFVVDKKAAMVSNTLRNMLTSPGGFSETRQGEVRFPEIPTNILEKICQYFYWSLHYSSGKETAEFLIEPEITLELMMAANYLDT

SEQ ID NO: 204070 - protein, 121 aa, Zea mays
  Clone ID: MRT4577_1176C.1.pep
PAPLKASGCSYVASTPEVARFRPRRGGLLGDRPSEASRPPGGRPYPRPDQDPVRVSRPAVCRTNPPWGSRVRTRMERPPRPQVLDRPNRCGRCCPSTAIGALAHAKWPPRAVPDRRPRQRT

SEQ ID NO: 204071 - protein, 90 aa, Zea mays
  unsure (1)..(90): unsure at all Xaa locations
  Clone ID: MRT4577_117700C.1.pep
LGELLLFISLKMIWGKGGHEISFFIDSDGEIMDGSVFGLCKVVMLLVGCQGCSCRCGCLSFPWWTFVFNRVIGAVPFLCXLGXLDGCGMV

SEQ ID NO: 204072 - protein, 113 aa, Zea mays
  Clone ID: MRT4577_117701C.1.pep
RRPSGTGLRARGGARTSLSLPRTPSPRCSVPLAHERQVWGWLNSWHGGDELSTTTTAYSLEAHSYPVCYRSPPADGGISFTVHRCHERAGRWFQELLLFPTADRKLQRSTAQH

SEQ ID NO: 204073 - protein, 92 aa, Zea mays
  Clone ID: MRT4577_117702C.1.pep
ELGSEVDITEGDRKPDYTAYVAMIPQCIKEEDTPSDNDSGICMSPESYLGSPQHSPSTTGSPNRSLPSPGVLCGSARPKPYDPPGEKMVAAK

SEQ ID NO: 204074 - protein, 505 aa, Zea mays
  Clone ID: MRT4577_117703C.1.pep
MASSISAAAKASAAFAHKKELAAPAPHRAGSSRRTKPCRVRAVASPARTPRAPSSTGSVKTAMTMTEKILARASERAALEPGENVWVDIDVLMTHDVCGPGTIGIFKKEFGEDAKVWDREKVVIIPDHYIFTSDERANRNVDILRDFCLEQNIKYFYDIKDLSDFRANPDYKGVCHIALAQEGHCRPGEVLLGTDSHTCNAGAFGQFATGIGNTDAGFVMGTGKALLKVPPTIRFVLDGEMPPYLLAKDLILQIIGEISVSGATYKSMEFVGSTVESLTMEERMTLCNMVVEAGGKNGVVPADETTFKYLEGRTSVDYQPVYSDAEARFFSDYRFDVSKLEPVVAKPHSPDNRALARECKDVKIDRVYIGSCTGGKTEDFLAAAKVFLASGKKVKVPTFLVPATQKVWMDVYSLPVPGSGGKTCAQIFEEAGCDTPASPNCGACLGGPRDTYARMNEPTVCVSTTNRNFPGRMGHKEGQIYLASPYTAAASALTGYVTDPRDFLM

SEQ ID NO: 204075 - protein, 83 aa, Zea mays
  Clone ID: MRT4577_117704C.1.pep
SKKGGGGGVSKRGRGGDRPKGTGFFLPGRARAPFRGPLPGRRFHRVQTFLRAPGISEGSPGYPGFLWAGHVFPGPASCSLYKG

SEQ ID NO: 204076 - protein, 504 aa, Zea mays
  Clone ID: MRT4577_117705C.1.pep
MASSVSAAAKAAAAFAHKVQKELAAPAQRRAGLTRRTKPCSVRAVASPARALSSTGSVKSAMTMTEKILARASERAALEPGENVWVDVDVLMTHDVCGPGAFDIFKKEFGEDARVWDREKLVVIPDHYIFTSDGRAKRNVDILRDFCAEQNIKYFYDIKDLSDFRANPDYKGVCHIALAQEAHCRPGEVLLGTDSHTCNAGAFGQFATGIGNTDAGFVLGTGKALLKVPPTIRFILDGEMPPYLLAKDLILQIIGEISVSGATYKSMEFVGSTVESLTMEERMTLCNMVIEAGGKNGVVPADETTFKYLEGKTSVDYEPVYSDAQARFFSDYRFDVSKLEPVVAKPHSPDNRAPARECKDVKIDRVYIGSCTGGKTEDFLAAAKVFLASGKKVKVPTFLVPATQKVWLDIYSLPVPGSGGKTCSQIFEEAGCDTPASPNCGACLGGPRDTYARMNEPTVCVSTTNRNFPGRMGHKEGQIYLASPYTAAASALTGYVTDPRDFLM

SEQ ID NO: 204077 - protein, 217 aa, Zea mays
  Clone ID: MRT4577_117706C.1.pep
MGRTLVLVCTIAVAAAIAAVHVSEQEHKDAFSRFSHQFERNYTSHESSHRYGIFKKMHQRVHDHNARFAANEVTWDMQIDQFSDWTPEEFQNFFAGYVQPNGTTSAEIAAQRTKRQPAWIDWSQKGAVGPVKSQGGCGSCWAFAAVATLEGCHMMANKGYASLSEQQLQDCMFDRVCSPGGGGPDQAIDWVHNHGGIASEGAYPCTRVHGNCHDADI

SEQ ID NO: 204078 - protein, 134 aa, Zea mays
  unsure (1)..(134): unsure at all Xaa locations
  Clone ID: MRT4577_117707C.1.pep
PSSAHTRRIRSQDPLRHRNRVTARAAGDPDPPTRPSPARSHVAVGADAGERNLLSVAYKNVIGARRASWRIISSIEQKEEGRGNEAHAASIRAYRSKIEAELARICDGILALLDSHLVPSAXGAEXKXFYLTMK

SEQ ID NO: 204079 - protein, 181 aa, Zea mays
  Clone ID: MRT4577_117708C.1.pep
MSPSEPTREESVYMAKLAEQAERYEEMVEFMERVARYAESKVFYLKMKGDYHRYLAEFKSGAERKDAAESTMNAYKAAQDIALADLAPTHPIRLGLALNFSVFYYEILNSPDRACNLAKQAFDEAISELDSLGEESYKDSTLIMQLLRDNLTLWTSDTNEDGGDEIKEAAAAPKESAPEGQ

SEQ ID NO: 204080 - protein, 55 aa, Zea mays
  Clone ID: MRT4577_11770C.1.pep
GFFFLTSAQLPASVKSSFTTNPIHITCRAEPQYIEYVPMVYNQDTDYAAVMTQAL

SEQ ID NO: 204081 - protein, 50 aa, Zea mays
  Clone ID: MRT4577_117711C.1.pep
KKSPVKGLTEKIPKRYWTKRSRVYRVTVPLMRFYFWTTGYQHVNSRPQTN

SEQ ID NO: 204082 - protein, 129 aa, Zea mays
  unsure (1)..(129): unsure at all Xaa locations
  Clone ID: MRT4577_117712C.1.pep
MGDPPPQNDIWGTGEGHKRNGQKGKREWAGGKEPGTPPGGGGNPKXPGPGKPTPGPGELPPKPGEGGGTPPPGGGNQRPIPTNRRGKEKKPGGGPKXRRPGPXGGGGKKNPPPVPQKTGPEHKKKKPGG

SEQ ID NO: 204083 - protein, 45 aa, Zea mays
  Clone ID: MRT4577_117713C.1.pep
AVSDVSSSTLRAYWSANNQASRPPTEIFRDNTSRYVYVISGRLDG

SEQ ID NO: 204084 - protein, 71 aa, Zea mays
  unsure (1)..(71): unsure at all Xaa locations
  Clone ID: MRT4577_117714C.1.pep
HASDLMIIYISADSRANFFLMKTPPAVFIDKERKLCVKCYGPCSNVYTSCLTLYFPWDVRRXCKEESWLLG

SEQ ID NO: 204085 - protein, 94 aa, Zea mays
  Clone ID: MRT4577_117715C.1.pep
RRSPAPSSSPPRRPPWRSPRRLQLRSSPAASSTTRPSSEPPSGPSTPPFLTTTFSEPVGAPRGRGRNYWARESHGCAHTDARALFLVRRTFSPV

SEQ ID NO: 204086 - protein, 146 aa, Zea mays
  Clone ID: MRT4577_117716C.1.pep
PIFELALPEIAQKITRLENEDTLLDSSGETRSRHIQPRWKQVLLAVMGPEQHQRPVDGIAARSCRRCPIGGGPNSTCNRWMGSPHRPSPLLPHLWSTSWPGMPPMATNQLTLSFHGEFHSRQMDSHSVQDVLLLLGGRELSSLGGA

SEQ ID NO: 204087 - protein, 262 aa, Zea mays
  unsure (1)..(262): unsure at all Xaa locations
  Clone ID: MRT4577_117717C.1.pep
VPSGSAGLSGLMPTFLSGLNLSKLDLSYNSFQGVIPTTSLFDNSTVVSLDGNPRLCGGAMDLHMPPCHVASRRARRASLLIEILIPIFGFMSLVLLVHILLLEKRQSRRLXGSKQSFEEXYGSVYRGKLKEMEVAVKVFDLEMRGAERSFLSECEALRSIQHRNLIPIITACSIVGTFKALIFEFMSNGNLDTWLRHKGDEEATRCLGLTQRINIVVNIADALDYLTMGCGRPTVHCDLKPSXILLDDDMNALLGXDFGIAS

SEQ ID NO: 204088 - protein, 139 aa, Zea mays
  Clone ID: MRT4577_117718C.1.pep
MSNNKIVPLTIIKGAGHEHIPIPEGECAIIADFHSVKSQSSHSTPYLTTGFYRVVPGPTRYGEYDYEETKYVLKGQIDITDEATGKTHHLVAGDWAFFHVGSKAQFSTKTEGVAFYAVTRPMNDGHPNLVGREESTSKL

SEQ ID NO: 204089 - protein, 44 aa, Zea mays
  Clone ID: MRT4577_117719C.1.pep
FSKRACVIDNTIAIINECGYVLLRLGRYVRVLLAPIRPVLLKCQ

SEQ ID NO: 204090 - protein, 125 aa, Zea mays
  unsure (1)..(125): unsure at all Xaa locations
  Clone ID: MRT4577_11771C.1.pep
PPTHALKRIATLYIADVVHTDSGKATTTGHXLNYKVVCIDKRVIKRXHKEADNMNKRSFKYAWMLYKLKAERERGITIDIALWKLETTKYYCTVIDAPGHRDFIKNMITGTSQADWCCLIIDSTT

SEQ ID NO: 204091 - protein, 93 aa, Zea mays
  Clone ID: MRT4577_117720C.1.pep
NLRMVSASSFPDEDSCIRTDHAAYARAKSISGCLSTWELKCCRHTRTSVSVHSLCHAALGSTLFVVSMALCVSLYDRITFFPGENTTCVWSSY

SEQ ID NO: 204092 - protein, 66 aa, Zea mays
  unsure (1)..(66): unsure at all Xaa locations
  Clone ID: MRT4577_117721C.1.pep
HPAMGFKAVISPPIWISRPILHFLMAVLGCLPRPRTFTSSTAFALEAPLIGMAFSTRHVCALGFXV

SEQ ID NO: 204093 - protein, 105 aa, Zea mays
  Clone ID: MRT4577_117722C.1.pep
VTCTATEATAPATPWTLSSARAPFLATTLTWTRRCSPCPTPTAADGPEDYSRYRNPSQAAPCSCTAYRRPNPPLRRVFCCDIGAQMRQRPHVLLHAGAQDLRRKP

SEQ ID NO: 204094 - protein, 64 aa, Zea mays
  unsure (1)..(64): unsure at all Xaa locations
  Clone ID: MRT4577_117723C.1.pep
ATXPLSGLAIQWCPVQPVPDRIGHFTSVPYARSCSDRRLPAAIWGALPPASVEEAIDREDTEVT

SEQ ID NO: 204095 - protein, 50 aa, Zea mays
  Clone ID: MRT4577_117724C.1.pep
IAKGWEYNEACLASRSFLAWDSVYKVCLGSVWPTRGLVGQRGVHLVSWGT

SEQ ID NO: 204096 - protein, 87 aa, Zea mays
  Clone ID: MRT4577_117725C.1.pep
RPPRAGIPPYRGRARRGPLRSMNLERLSTQEDTSVGKGHLRSNQIDPRYPKNSWKECMPIITSAIYIGTRGNHRDRASQTRTTLKRP

SEQ ID NO: 204097 - protein, 45 aa, Zea mays
  Clone ID: MRT4577_117726C.1.pep
DNRFSEKAKSLIIPSSRENHCYLSIWPSRLFCAFIDILMGSKCTY

SEQ ID NO: 204098 - protein, 87 aa, Zea mays
  Clone ID: MRT4577_117727C.1.pep
ARLGRAGPGSRVGSPPEDSSPLPAAEPPLRSLHLIPLLGSRKEKTVSSSLSLAQYFTPSSTRNLHPNAQLGCLDEALNQSPLARTRG

SEQ ID NO: 204099 - protein, 140 aa, Zea mays
  Clone ID: MRT4577_117728C.1.pep
QRGLPGPPLLKNSQKYQISGGYIPTKRGLSVFGPQKNTGGVIFQPLQLQESKLALSPSQWEGFATIKPPQPGGPVTQILKRTSEGLKANPGALGGPPPPPKLLETRPEEPHQLSVLWGPVGEAYIQTTPFDEPPSPTLLS

SEQ ID NO: 204100 - protein, 69 aa, Zea mays
  Clone ID: MRT4577_117729C.1.pep
GGHVDRATGGAWHNAEDDGVGGDNITRNNGRIRKKRRRSSLPPYGGAPALDESREENMKMAINDLVDQY

SEQ ID NO: 204101 - protein, 47 aa, Zea mays
  Clone ID: MRT4577_11772C.1.pep
CRVPSLVGGLGAFGGGLIVAAALNVPPVGWPRSALPGAWDARVFGRS

SEQ ID NO: 204102 - protein, 71 aa, Zea mays
  unsure (1)..(71): unsure at all Xaa locations
  Clone ID: MRT4577_117730C.1.pep
PLFRRHFHPKKTNLPSSDTLVNDKMYNHLYRPRSAQVLRVRHCHDGKSLPVLPXDVEHRPCGRARPRRTGP

SEQ ID NO: 204103 - protein, 67 aa, Zea mays
  Clone ID: MRT4577_117731C.1.pep
PLDKLFSELIWFDPADRPIPVSLCCEKEVKRLIIINAVTRLRDGYDAKSSLDCEKDTSVQSDGGALI

SEQ ID NO: 204104 - protein, 110 aa, Zea mays
  Clone ID: MRT4577_117734C.1.pep
CVWGTGRLQVCGTRRPPRAQGAVPVQAPWAAAAPGSSRDPSLTYLVNNASAATLAIKHLQGQCKKSYRKEIDRSRRAVSCCSLEMHGDGGVGLNQGWNRTRGRTRGRTRG

SEQ ID NO: 204105 - protein, 171 aa, Zea mays
  unsure (1)..(171): unsure at all Xaa locations
  Clone ID: MRT4577_117735C.1.pep
VSDRSLACVLVLVQGVTKQIGGSVHELAAKVDEYARGMISGPGSSLFEELGLYYIGPVDGHNIDDLITILNDVKSTKTTGPVLIHVVTEKGRGYPYAERAADKYHGXAPHELAYVPLFACCTAQIVPRPESVRHLGSVVXACVRAGVAKFDPATGKQFKSPAKTLSYTNYF

SEQ ID NO: 204106 - protein, 283 aa, Zea mays
  Clone ID: MRT4577_117736C.1.pep
MDTCHQSIETADGKKDYSDPAPAPFVNAGELGKWSLYRAVIAEFVATLLFVYVTLATVIGHKREAESQPCGSVGVLGIAWSFGGMIFVLVYCIAGISGGHINPAVTFGLLLARKLSLVRAALYVVAQCLGAMCGAGLVKAFHGAHWYLRYGGGANELAAGYSKGAGLGAEIVGTFVLVYTVFSATDPKRKVRDSHVPVLAPLPIGFAVFMVHLATIPVTGTGINPARSLGPAVVYNQRKAWEDHWIFWVGPLIGAAAAMLYHQLVLRAGAAKAFASFRNNQHF

SEQ ID NO: 204107 - protein, 62 aa, Zea mays
  Clone ID: MRT4577_117737C.1.pep
VSYAKRSCHVRHSPFRFSCQQRSGATLRVDHRRTTRPRCVGRNRSLLQLTTNPMKTRTSPNK

SEQ ID NO: 204108 - protein, 95 aa, Zea mays
  Clone ID: MRT4577_117738C.1.pep
SLLWRHTGLCALPWECAGTLGGRPSPRDESSASGARGSSCRSTGREPCRASSQTATRPSALLREDTSHLKIILVPEISSPRQVVPLITSFYPVMF

SEQ ID NO: 204109 - protein, 147 aa, Zea mays
  unsure (1)..(147): unsure at all Xaa locations
  Clone ID: MRT4577_117739C.1.pep
PVDQRSRAGTRPPCVRSMSEYLMGEEVPDADIAVVRVTIFSXPNATYXVDVFDSSEDFIYLMHTLADFEAATKLLTLAKVTFCYDALHGGAGAYAKHIFDEKLDADXAXLTNCDPEHDFGSGHADPNLTYAQDSVELIRLGKSFSNV

SEQ ID NO: 204110 - protein, 71 aa, Zea mays
  Clone ID: MRT4577_11773C.1.pep
HSPALGIGYQYMWMNRWKQEHYPLENLYSSRDDVSGDLIKAREERVYHRTSSTDLRERRALNILSQQTKAL

SEQ ID NO: 204111 - protein, 79 aa, Zea mays
  Clone ID: MRT4577_117740C.1.pep
SYGLRDSRRTGPRAQPRCYDHSDESPNQRPYAKTEKDFRATIAYGNPPQSKPGTTDPALKVGTITVPHLNKPYAEGDRD

SEQ ID NO: 204112 - protein, 49 aa, Zea mays
  Clone ID: MRT4577_117741C.1.pep
WVSVVAVFFGVVSLIIVGFVLVVVVSVLIFRPFLLASRSVSLKIVCVND

SEQ ID NO: 204113 - protein, 55 aa, Zea mays
  Clone ID: MRT4577_117742C.1.pep
TYIPTTSSEVTYEDHRPQWENRASMSVIWNTDGHVIREVLRSVTFLVIGDRSLCY

SEQ ID NO: 204114 - protein, 184 aa, Zea mays
  Clone ID: MRT4577_117743C.1.pep
MVTDAAAMAVVKAARPVFRGAHDGVAFAANAAFLAAGYSLCAVGPAALTDPLPAVDEEVGIDGWNTMDNCYAFLYSKEEEGKKKRILVKCLVIDDFLAIDALDLEAQHKEPCNVQINVKDFFSEEQPKNYKDMYKNFAGFINTLNSSLLVELDGKNAAAAAAQNVMSSSSINSSENVLRDTRTT

SEQ ID NO: 204115 - protein, 463 aa, Zea mays
  Clone ID: MRT4577_117744C.1.pep
GAAGLVPDGLGSSRDWQGPPQTREPAWKPPPPPVVSPRSGSGGRKAGRRPKRVAVAATGMVADVIGKEYTRPAANSVVSMPNAWKGRDGESDGSGSGGRKDSVEEAEQFLCSMLGDNSELGMGVVRDVLGQYGYDVEKALDALLDISGVSSVENMETNHQSARRNDTCHLDMFSGNGLSVENLTAGNRRSLRQLTDEISNTGLQSELGHEFLWGEPQISYAEAVKEAPRSSTLPSRSTVMKAGPQQVLDSLFKIPETRTYEPSSMDWKKVVKKLQTINYTAASNNHERPKDGGGYRELRGVAARHYDKMKEYYQKAAFAYSKGDRSYASYLAEEGKHYRELGRIEDEKASRNIFEARNKHITNTVTIDLHGQHVQHAMNLLKIHMMICICIPSVLLRVITGCGSEGTGKGKIKRSVIELAEKEHIEWREENSGTVALRLGGPREYRFLEHESDSDLVGNFNID

SEQ ID NO: 204116 - protein, 107 aa, Zea mays
  Clone ID: MRT4577_117745C.1.pep
KRGAVAATGMVADVIGKEYTRPAANSVVSMPNAWKGRDGESDGSGSGGRKDSVEEAEQFLCSMLGDNSELGMGVVRDVLGQYGYDVEKEQLAALCSEWIYCWFVQLC

SEQ ID NO: 204117 - protein, 174 aa, Zea mays
  unsure (1)..(174): unsure at all Xaa locations
  Clone ID: MRT4577_117746C.1.pep
MALLKAARVADVPTLDVVVPDHLAAAAARVLDAEAASMVKKQRGAGRRFAVIGHRGKGMNALASPDRRMQEVKENSVRSFNEAARFAVDYVEFDVQVTKDVCPVIFHDNFIITEEHGKISEKRVTDLQLEXFLQYGPQNKQGKNGKPLLREMNXDGRVLNCNAQTDDPLCPLQE

SEQ ID NO: 204118 - protein, 101 aa, Zea mays
  Clone ID: MRT4577_117747C.1.pep
YVYCTTPPTNTTSLLLQLLQIAHHSPHLTTAGDLPPAPQQHLLVRLVAEDQQAALLPPRRMNHVRADHQLHADHTHIHLPPMHSLTSTLPRAGFPSMKCCT

SEQ ID NO: 204119 - protein, 48 aa, Zea mays
  Clone ID: MRT4577_117748C.1.pep
KLGIRLEPNTAVPPFCHSTHHPRSRAETNSYAHTGTMTPPPLRTLIPA

SEQ ID NO: 204120 - protein, 211 aa, Zea mays
  unsure (1)..(211): unsure at all Xaa locations
  Clone ID: MRT4577_117749C.1.pep
MALPYLEAVLCFMTLNYIFETYLNIRQHRALKLPTLPKSLAKVISHEKFEQARAYSLDKSNFNFVREAITIVCDIVILYYKVLPWFWTKSGVLVTNVGLNAENEIIHTLAFLAGVMVWSQITDLPFSLYSTFVIEARHGFNKQTFWLFIWDMIKGILLSVVLAPPIVAAIIVIVQNGGPYLAIYLWXFMFALALLMMTIYPIMIAPLFNKF

SEQ ID NO: 204121 - protein, 163 aa, Zea mays
  Clone ID: MRT4577_11774C.1.pep
FQSKGCFINVGNFSTVIHGFSRQGDLESALSLLDDMYLTNRHPDVVTYTVVVDALGRKGKMKEATALVEKMLNRGLLPTPVTYRTVIHRYCEKGAVEDLLNLLDKMLTKQGFSSAYNQVIEKLCAFGKLSEAYNLLSKVLRSALKRDAQTCHILMDSLLTEDS

SEQ ID NO: 204122 - protein, 82 aa, Zea mays
  Clone ID: MRT4577_117750C.1.pep
GGGACGVGWGSRGWRGWGRRCRASARQRPPSPPATALCLAPVSRALSGAATLTRGRKGGVGRRGKGRDASLALSNPRPGRLR

SEQ ID NO: 204123 - protein, 82 aa, Zea mays
  Clone ID: MRT4577_117751C.1.pep
MKSIKHDRITSLYGVGVHPFSAYSVSHNNLRPETEEGELSPNGDFKEEHFCVFEDEAVDGTSKQNEGSTSRSPQGRPKNYLK

SEQ ID NO: 204124 - protein, 105 aa, Zea mays
  unsure (1)..(105): unsure at all Xaa locations
  Clone ID: MRT4577_117752C.1.pep
MEPMNVDNGGRVXXLDAQIEQMMQGRPLGEREXKALCEMAKEILMEESTVRXVKSSVTICGDIHGQFHELAELFRIGGKRPDTQYLIMGEYVDRGYYFGETGTMV

SEQ ID NO: 204125 - protein, 100 aa, Zea mays
  Clone ID: MRT4577_117753C.1.pep
LPREPGGGSGAPARAQLLDDALGVSVSEAVSGPGRAANPWSTRVGHSVDRRRLGGSSSAMLLRDEEAMTREGGTGRSPPWQPRQPQPGATHHYSIISVSS

SEQ ID NO: 204126 - protein, 172 aa, Zea mays
  unsure (1)..(172): unsure at all Xaa locations
  Clone ID: MRT4577_117754C.1.pep
MRHGRVLLCILHLLSRLWTSPFYHLFIYNKSAGLIYYRDYGGRGRMGTTDSXKRRSLCASMHAISQQLGATSGCAAIDVLQAHNFDLHCCQSLTGTKAFVLCQTGAPNMEMLLKAIYQLHTDSVMKNPVYEMEMPILSELFDHNLAQVIQKDRVALLGRRNMKAGTHHTMYV

SEQ ID NO: 204127 - protein, 170 aa, Zea mays
  unsure (1)..(170): unsure at all Xaa locations
  Clone ID: MRT4577_117755C.1.pep
RKFSFLHCSKILKDKXKWMDRRKEIGGAKKXSSNKXTKGXAKSSPASVAAAIAIDAPLGGVDHEEPSGRPDGKKKEKHKLRQRSTMEAVDYLIAKKKESDIQKELKKEERCNKAFALQEERLKLEKEKFAFQRQLEEDRIIDLDLSNMNYKQQQYYEDRQNEILARRLNV

SEQ ID NO: 204128 - protein, 56 aa, Zea mays
  Clone ID: MRT4577_117756C.1.pep
HEILHMPTTCMFWARNKTRYHYPVHTETTCMSNEQTKKSSKVYIVYILILYNSNEP

SEQ ID NO: 204129 - protein, 72 aa, Zea mays
  unsure (1)..(72): unsure at all Xaa locations
  Clone ID: MRT4577_117757C.1.pep
IFLTLQPPLFFCMFFVCNLVFFFFFFLFFFFFFFFFFXCCPYIIHIITAANIRLRYITLNEKLYYLPFSLSR

SEQ ID NO: 204130 - protein, 125 aa, Zea mays
  Clone ID: MRT4577_117758C.1.pep
MTSLSRELVFLILQFLDEEKFKETVHKLEQESGFSRPGGGLHCSPVTTSSEESPDPKPYCLAGCNGHQPSPATPRALVALYNLHHPPVSWRRLHFAPLLRRAVHTVGLRPTGSRLPSDHRPKKPQ

SEQ ID NO: 204131 - protein, 105 aa, Zea mays
  Clone ID: MRT4577_117759C.1.pep
IFSFFYFFSLFLSFHIFSTKTSNSKRTTLNPPCKNPNGPHQPGGGGGKQIPYPQGQKQRGAEPNHVFFNGHPPNKTLSKLAPQGPTPPWGKKHSGGPTAPPGGEK

SEQ ID NO: 204132 - protein, 46 aa, Zea mays
  Clone ID: MRT4577_11775C.1.pep
NQLQSNRVPFISIQRHKQHTRGHSEPNYTTYPAFPTLLKKRVLTGC

SEQ ID NO: 204133 - protein, 59 aa, Zea mays
  unsure (1)..(59): unsure at all Xaa locations
  Clone ID: MRT4577_117760C.1.pep
MEGNEDDVRPGAHKVSEPQAIGTEAQGAVARDAGKDYRXPPPAPVFEPGELESRSFPRA

SEQ ID NO: 204134 - protein, 42 aa, Zea mays
  Clone ID: MRT4577_117761C.1.pep
MSYNKQVKVFLGAFMYVNVLEFFFFWPCLSMLFFLFFKKDSI

SEQ ID NO: 204135 - protein, 47 aa, Zea mays
  Clone ID: MRT4577_117762C.1.pep
NDQRRSSDSVALMHMTGSLYLFCASVILRAVRSLIALYDRAVGIHAS

SEQ ID NO: 204136 - protein, 455 aa, Zea mays
  Clone ID: MRT4577_117763C.1.pep
MASPDAEQPAPTELERWRDLDMLLSRPGNLVEATFDPSPGLRDLLGSLVEVLVVGAGGLGCELLKDLALSGFKKLHVIDMDTIDVSNLNRQFLFRVQDVGKSKAEVAAKRVMERVNGVNIVPHFCRIEDKEIEFYSQFHIIVLGLDSIEARSYINSVACGFLDYDSSDNPLQETVKPMVDGGTEGFKGHARVIIPGTTPCFECNIWLFPPQVKFPLCTLAETPRTAAHCIEYAHLIKWDEVHPGKPFDGDDAEHMQWIYSEALKRAELFGISGVTYSLTQGVVKNIIPAIASTNAIISAACALEALKLISGCSKSVSNYLTYNGLEGTHIKVTEFVRDKDCLVCGPGTLVELDTSSTLSDFIKMLEEHPKLRMSKASVTHEGNNLYMQSPEVLEQMTRPNLSIPMFELLKEVPYTTVHATGMAENNGKKVSSLRKLRVAFKGIEDASKMDTTVSS

SEQ ID NO: 204137 - protein, 90 aa, Zea mays
  Clone ID: MRT4577_117764C.1.pep
AVMTDPRCARDGGGSPRPRHGGGHPSRVTPRWPPRRVNDDISRRPHAASDLRGAPGVGSLETRATVTTCSNHCLCMGLLAGYILGLFHQL

SEQ ID NO: 204138 - protein, 194 aa, Zea mays
  Clone ID: MRT4577_117765C.1.pep
MASPDAEQPAPTELERWRDLDMLLSRPGNLVEATFDPSPGLRDLLGSLVEVLVVGAGGLGCELLKDLALSGFKKLHVIDMDTIDVSNLNRQFLFRVQDVGKSKAEVAAKRVMERVNGVNIVPHFCRIEDKEIEFYSQFHIIVLGLDSIEARSYINSVACGFLDYDSSDNPLQETVKPMVDGGTEGFKGHARVII

SEQ ID NO: 204139 - protein, 133 aa, Zea mays
  unsure (1)..(133): unsure at all Xaa locations
  Clone ID: MRT4577_117766C.1.pep
RTNAIISAACVLEALKLIWXCSKSVSNYLTYNGLEGTHIKVTEFVRDKDCLVCGPGTLVELDTSSTLSDXMTGASLDXYSSTSSFIKMLEEHPKLRMSKASVTHEGNNLYMQSPEVLEQMTRPNLSIPMFDLF

SEQ ID NO: 204140 - protein, 70 aa, Zea mays
  Clone ID: MRT4577_117767C.1.pep
RLHLLHRFVIRLWIVFQRYAMAAAYDEYRCSERRSRLGHRRPLANNAFSPYRERLESKIMLDRQTQRSLR

SEQ ID NO: 204141 - protein, 83 aa, Zea mays
  Clone ID: MRT4577_117768C.1.pep
MGDDSDGEAEEYLFKVVIIGDSAVGKSNLLSRYARNEFNLHSKATIGVEFQTQSMDIDGKEVKAQIWDTAGQERFRAVTSAYY

SEQ ID NO: 204142 - protein, 173 aa, Zea mays
  unsure (1)..(173): unsure at all Xaa locations
  Clone ID: MRT4577_117769C.1.pep
MTTHKIKTRHQDVQHDVAMHNYDTELTTSSSDHTIKIIGDIVTSLHKLVTLSVHHDPVXITDELDPRFTSMLESRGYDRLKNVXNEGIKTDEWALVLTFXDDESSENSIIXHTHELRLCLXCGSSNANISSLTARSDGRWDTTRIDQAHAGXVTSVSCPPAKEPEALISAPAS

SEQ ID NO: 204143 - protein, 94 aa, Zea mays
  Clone ID: MRT4577_11776C.1.pep
FRMEGVCTMLFGKANPRPTDVSCDVTQFLSHPTVSVDEWFLNPSLRVLSLPSVPLLLFHFFRLLISILSIYCAPLLLEVKIQSCYSQRPVTGSK

SEQ ID NO: 204144 - protein, 43 aa, Zea mays
  Clone ID: MRT4577_117770C.1.pep
LIAVLHVLLCPYPDSDYLSSAQSLSFSQLSPKFFNFGFLSFSL

SEQ ID NO: 204145 - protein, 106 aa, Zea mays
  Clone ID: MRT4577_117771C.1.pep
RFFGTPKKKRATRRLRFIECEWRSLPPHQKPQETPGPPIKGGLSPPKKGLFPSIWARGDMDPWKGAVKPLTGPPGWGKLDFSPDKGPGSHFLYRIGKGRPFLFSTE

SEQ ID NO: 204146 - protein, 119 aa, Zea mays
  Clone ID: MRT4577_117772C.1.pep
PRTVSRTPPAQGRGGGGRGIQMVAGCCPFFFPHTFVHSIIYRYKRGGLKIGAGARDRQDPSCLGPGPPGPWGGLWAGRGAIINRGRAVFRVLGLGPLPAAFIGRLVGTLCRFPWSCLPI

SEQ ID NO: 204147 - protein, 40 aa, Zea mays
  Clone ID: MRT4577_117773C.1.pep
MIMLFLRKETAAGHIKPFFTHLTLATVVVNIHSNNTIFAF

SEQ ID NO: 204148 - protein, 84 aa, Zea mays
  Clone ID: MRT4577_117775C.1.pep
AERAAARFLHRAPDTTSCSHRHLLLTTPPTSRSSHSLPHAYWPSSSPESSSRPRSPTNVALRLPLKHCVPRCKSIRSISNYASV

SEQ ID NO: 204149 - protein, 85 aa, Zea mays
  unsure (1)..(85): unsure at all Xaa locations
  Clone ID: MRT4577_117776C.1.pep
AKSRCRSKPPILTLFPVQAITLQXQHNTCKYHVFSRNVLNTECSWGVLNSRKPLRTVLNRHMLPKTGILIKDESNAGQLQPAKSR

SEQ ID NO: 204150 - protein, 242 aa, Zea mays
  unsure (1)..(242): unsure at all Xaa locations
  Clone ID: MRT4577_117778C.1.pep
MAVTPDYKFEGWMGLDKEAAKGNMVWQEFQPKPFEETDVDIEITHSGICGSDIHTISSGWGEAKYPVCVGHEIVGKAVRVGXPKSIIGITLRDRVGVGAQNSSCLKPDCEECSAGIEQHCQGNVGTYNSQYPDGSKSYGGYATYHRAPSHFVFKIPDAIPSTEAAPMLCGGVTLYAPLSREGCGPGKKVGIIGVGGLGHFGILFAKALGADHVVGISRRTXKRDDVLALGADSYIATRDEPD

SEQ ID NO: 204151 - protein, 74 aa, Zea mays
  Clone ID: MRT4577_117779C.1.pep
ASILLFSQTGNLKNKRAGWEQAKCFYQHQFSLWGANRQIGGRNCQEQDITHKWTPFWVSANPGVQTQTRHAPQI

SEQ ID NO: 204152 - protein, 84 aa, Zea mays
  Clone ID: MRT4577_11777C.1.pep
KARVPGRFCCGGLSGFQLVESFYRHRWCYALFCFFLFFLSVLFFNVFWAVALFVLIFFALGLLIYLCFFLLLLICYLCGRRFSF

SEQ ID NO: 204153 - protein, 70 aa, Zea mays
  unsure (1)..(70): unsure at all Xaa locations
  Clone ID: MRT4577_117780C.1.pep
MKLVPEAPAFTASESSXTCTQTGGCSXGQQQSHEQQHNPQQHHPTKQQHEPPPQQHQQXQQHXQQQGHTQ

SEQ ID NO: 204154 - protein, 112 aa, Zea mays
  unsure (1)..(112): unsure at all Xaa locations
  Clone ID: MRT4577_117781C.1.pep
ARKEKGVLSHSIXHLQGRFLQPRSQRPNACYNREPRAAHHAVWRLLHYSPFFFPTLLFLVRRTKPPELKTELYTCXGSWQAVASPEASHSNSATCSSSRSCNQLTTTLLILF

SEQ ID NO: 204155 - protein, 60 aa, Zea mays
  Clone ID: MRT4577_117782C.1.pep
PNNRELYIHRIGRSARLELKGVAINVVRKDDIRILSEIAQWCWGQFDQKPVYGSFLSTTR

SEQ ID NO: 204156 - protein, 81 aa, Zea mays
  unsure (1)..(81): unsure at all Xaa locations
  Clone ID: MRT4577_117783C.1.pep
SPNSSPLAFLTNTKLTXTVSYNSFINNNXNNSFQISPTKNNHTSSYNFNNSFHSNNPLKPTLINNYNTYNNYLIHYHSLTH

SEQ ID NO: 204157 - protein, 723 aa, Zea mays
  Clone ID: MRT4577_117784C.1.pep
MAGKEDENEKPSLVAAGGKQDRTAATTESLPQRTNLEWGKAACSEDDIQKCVAAGAFHPGELVEWRAPVKDETPTLSTMEDQFVILSLTHIICGLRVDASDFLVSVLEYYRLEWSHLTPNSITALSIFAHLCEAYVEAPPTVEVFTHFYSLYHNRKGETTTLGAVYFRLRDRMKKNYPLYYLRSSQFMWVSLWFYAKVPKSCRLTFRGDILKEENNWNWKDLLPLSCEQMKQVGQIMKLSNQGLTGADIIHDYLKRRISPLRRRMHLTCNYSGLSDPTRDSDKDLSVEDIESKLSYLLDLKRMGVKQPTGRLVRASTNDQANQPLDLLNVCSTHEAKKEAQPQVCASLRRYTRQSAGPRKVAVPPPLKIDPPPTQGPAPEEILDATTNIATAVSPNLGVEQKSIEHPTVAEERKIAELVKPTFSVIGAKRKASAPRSRSKRRAKYSLLSVVTKTRMSSLDTGSIKGTSRTKEAVLALNSRSIGLARCPPASLAEGTGNGGLFMLAKVVDHTKVVEDSMSNILLNQQVGDSSRKEVDPAQSITEIVQDQEAIEVSAAIPVPNKEEINSGVIWERMQKVQSEYVSLSMTASSELLEQAKKLVMENKRLKDVQIMLSQQVEDLEDGRRLLTERMKKAEQETFKIIEENMKLKGENKGQKQMIEELSKQNESTLGALVHKCTLLDRYKEESAQLIREKEELQSRVSRVNDLVKLVSSTLCQEKDSAS

SEQ ID NO: 204158 - protein, 77 aa, Zea mays
  Clone ID: MRT4577_117785C.1.pep
IIHLKRVFNNFGGRGAGPLIGGLKMQKKKQICLKTKGLGVQNIFYWARPPGHGFSPYQKPFHVWFPGFPKRPKPPFF

SEQ ID NO: 204159 - protein, 79 aa, Zea mays
  unsure (1)..(79): unsure at all Xaa locations
  Clone ID: MRT4577_117786C.1.pep
YVHFQFSSAGQKQMIEELSKQNESTLGALVHKCTLLDRYKEESAQLIREKEELQSRVSRVNDLVKLVSSTLCQEKDSAX

SEQ ID NO: 204160 - protein, 110 aa, Zea mays
  Clone ID: MRT4577_117787C.1.pep
NNLNFCLITKGKTKSLKTPHFPIPRSFFISKEYSFPKGQIKVLSSKFPLLNQKFKFPKGVNPMKNLSCILHSNNHILNLCTFPYWITYPKKKKNLEIFPDPPGPNPGFLS

SEQ ID NO: 204161 - protein, 37 aa, Zea mays
  Clone ID: MRT4577_117788C.1.pep
VLREVRTKVECVVAERVIVEVWERVTEKVKVVVDVKE

SEQ ID NO: 204162 - protein, 106 aa, Zea mays
  Clone ID: MRT4577_117789C.1.pep
IPCVTIFGLKMRYLVVYLPPIVSLHIDVVCAEFLCLKLFLQCLHVSLKALWATVPFMVCTFGWCLTHKNRLYCFSNSRQHQSCVFVVCSVVVNFQKKATKPLANPG

SEQ ID NO: 204163 - protein, 50 aa, Zea mays
  Clone ID: MRT4577_11778C.1.pep
EIIEQGMELCCIIHILLWYTPSLFKKTSKGKARIKKKKNTLCPEISVVLS

SEQ ID NO: 204164 - protein, 251 aa, Zea mays
  Clone ID: MRT4577_117790C.1.pep
EEELLEIQGTQLLSTTVGVKEYVQSEFDSVQAEIISTNKDLFPGSITFDDFLWAFGMLRSRVFPELRGDKLALIPFADLVNHSPNITSEGSSWEIKGKGLFGRELMFSLRTPVNVKSGQQIYIQYDLDKSNAELALDYGFVESNPSRDSFTVTLEISESDPFYGDKLDIAEANGLGETAYFDDEELSGRENLQPRLAIAIGVRAGEKKVLQHIDGIFKQREEELDGLEYYQERRLKDLGLVSDNGEIIFWE

SEQ ID NO: 204165 - protein, 95 aa, Zea mays
  Clone ID: MRT4577_117791C.1.pep
AGTQLLSTTVGVKEYVHSEFDSVQAEIISTNKDLFPGSITFDDFLWAFGMLRSRVFPELRGDKLALIPFADLVICNTYWRFPDSNPTCYDSSYCC

SEQ ID NO: 204166 - protein, 62 aa, Zea mays
  Clone ID: MRT4577_117792C.1.pep
YDIYASYAPVNDPLLDNCFVPPSFFAPTHFDPPVTDVLTIYTLVPGKAVVLSVDLSAASFPE

SEQ ID NO: 204167 - protein, 411 aa, Zea mays
  unsure (1)..(411): unsure at all Xaa locations
  Clone ID: MRT4577_117793C.1.pep
HASADAWGLFDAMKEAGMQPNQYTYNVLMSGHCQRDDVNSAVVLYQELLKSGLNPNAVIFTTLIDGFCKAKRFSEAKGMFLEMPRFGVAPTVPVYNSLMDGAFRSGNAQEALALYQEMTDILIPHCQDSMAVQGGPKLNSXSASKRNASAPPMQSNRRXKGAAAYNALIDEYCRIRNLEEALATCTRMTEVGIEPNVVSYSSLIDGHSKRGKMQIAMAIYTEMVAKGIEPNVVTYTALIHGHAKNGGIDAAFRLHKEMIENGISPNAITVSVLVDGLCRENRVQEAVRFVMEYSGLKCSDIHSVFSNFTIEEECLIPNSVIYMTLIYGLYLDGQHCEAGKLFSYMRKSGMIPDSFTYTLLIRGQCMLGYVLNAMMLYADMMKIGVKPTRYKIECPEIWSWAPLNDLQTVVS

SEQ ID NO: 204168 - protein, 66 aa, Zea mays
  Clone ID: MRT4577_117794C.1.pep
CKMKGRCERDSSMLVCPAGDSSLSIKPCPRVALRLPTDLPSVHYPTLRFFAELPPCIVVVIVEPNR

SEQ ID NO: 204169 - protein, 52 aa, Zea mays
  Clone ID: MRT4577_117795C.1.pep
CPAPWELHIRDLCRKYTIRLRHFHEYAQSVAPALVSGGEERSARGRGPPHVQ

SEQ ID NO: 204170 - protein, 108 aa, Zea mays
  Clone ID: MRT4577_117796C.1.pep
NLPTTRHNDQEGVVPLTRYKLWKNNTTPLQLQTSDLKGTARSYLLTQAPVAKAFYLTYLNPIVTTGILTRWPRTPFMAITPKLPAPGTDHPCRVTDSFLDAAGRTATA

SEQ ID NO: 204171 - protein, 68 aa, Zea mays
  unsure (1)..(68): unsure at all Xaa locations
  Clone ID: MRT4577_117797C.1.pep
RRCFIGNIDLARDENEHMAKLDEQAXKVXELVETMVKVAKTVYVXDLSDEQRKLLTDVYQNAIGALTT

SEQ ID NO: 204172 - protein, 161 aa, Zea mays
  unsure (1)..(161): unsure at all Xaa locations
  Clone ID: MRT4577_117798C.1.pep
MAVFSYLHTDDGLKYREAHLAXGKSYVSGXDSIIKXDIKVSPRXAIKPVVEITNADHCDETDSADVCSRDADKVAEVNADXISAPACXAPANEAEDDDRARSMXAEETDEDXNAAEERDGVAKASSKKKEGGTASALMDAPPCYDETEMKKLKDAERNVHM

SEQ ID NO: 204173 - protein, 72 aa, Zea mays
  Clone ID: MRT4577_117799C.1.pep
TKCIIFLLNINWQRLNIRTTSPSAQAQQALWNMETNYTRTRFILKAYFIGEEGLLSLEACYSSCVHDTDAKY

SEQ ID NO: 204174 - protein, 97 aa, Zea mays
  Clone ID: MRT4577_11779C.1.pep
VPSHEHQASPMRNTICGLHTRLAGSRMRNDDNFMVLPFRRTPRAPNGMDIVTVGAAQTRRAAMGVISWASSPWKKTRRQEEAPAGTTADAQHAGPGQ

SEQ ID NO: 204175 - protein, 73 aa, Zea mays
  Clone ID: MRT4577_1177C.1.pep
VSIMCARGYGRSVSLPPTLKLDYGMKGGHEENGEGSSPTENRHVKCAPDVYHPPVTSVNHSLTKSYQRQAKHR

SEQ ID NO: 204176 - protein, 146 aa, Zea mays
  unsure (1)..(146): unsure at all Xaa locations
  Clone ID: MRT4577_117800C.1.pep
MAPAIAAKPLLSDLVAQSRQVPSSHIRAVGDRPDLANVDHESGAGIPLIDLKHLDGPGRRGVVEAIGAACENDGFFMVTNHGIPEAVVEGMLRVAREXFHLPESERLKCYSDDPKKAIRLSTSFNVRTEKVSNWSDFLRLHCYPLE

SEQ ID NO: 204177 - protein, 59 aa, Zea mays
  unsure (1)..(59): unsure at all Xaa locations
  Clone ID: MRT4577_117801C.1.pep
NYHNPKHHHPKTKXIHLXNXKLNSLTXPLTXQLIIYFSPKLSLHHPTSSXXPHINTKFT

SEQ ID NO: 204178 - protein, 133 aa, Zea mays
  Clone ID: MRT4577_117802C.1.pep
AYACTHKPVLFQPFRIQHGEQDQLGTCSIDCGCIRGGAAVFTHETSQACSPQSSLLSYNSTVSDMRQARTGFSGVRTSRQDGEPDRAGQEGRAAADCSWIWTASVPANVRRFHLLQRTPTCNKEGAGISLAYV

SEQ ID NO: 204179 - protein, 104 aa, Zea mays
  Clone ID: MRT4577_117803C.1.pep
AAGMLERKPLVDVARVDELPGIIKHLVRQETEYSYWHIHSRGSVHCEVQTMIKRGAMITVLNGHKGHNLQWVHAGAAQADPGPYRDRAHRCHTCAGDLQPSACA

SEQ ID NO: 204180 - protein, 157 aa, Zea mays
  unsure (1)..(157): unsure at all Xaa locations
  Clone ID: MRT4577_117804C.1.pep
LKWRKDAGWTAPAELAGPTTPFYLTVVCPGKEPEFVGDVSCGNTGAMGGLDQIITKNATLTNEKGTGPWPIRAMKFXSAFLVGLVLVNARVPFTLPSLXERLKRFTKVHPIGFLAKEEICEHIXVELGSLNLRIXLEELQEGLIGGAXILVSHPAVS

SEQ ID NO: 204181 - protein, 44 aa, Zea mays
  unsure (1)..(44): unsure at all Xaa locations
  Clone ID: MRT4577_117805C.1.pep
HAYATQNSNSDRANQTRAGITTTGRRKSFCFGTTKAIIXVPATF

SEQ ID NO: 204182 - protein, 46 aa, Zea mays
  Clone ID: MRT4577_117806C.1.pep
WFLYYSEKTLTSFLSVEYINEVSDHLYIPGHLDYILCQVLASYTGV

SEQ ID NO: 204183 - protein, 86 aa, Zea mays
  Clone ID: MRT4577_117807C.1.pep
FSEYVHVPDYLQLVVRRGLSVGCARPRRRISLTTLDCCVELKPWRRLLVWAPCVTASGARFGDAVQCLVGVAQDISPPQANTKKKR

SEQ ID NO: 204184 - protein, 73 aa, Zea mays
  Clone ID: MRT4577_117808C.1.pep
SPPFTSCRHHSGECRREPPPPHYLIPGSVRLHLVLCQFPLDPICWQPASVSHQPQPDFVDGPPTVGQLEKVEA

SEQ ID NO: 204185 - protein, 84 aa, Zea mays
  Clone ID: MRT4577_117809C.1.pep
PLNFIGGLGLPKPKKFLFFRRALFFFCQGKLKFYWGSPVFFIWCNTYHQGFFGIGGNFPFFCGPIFFPTAGELNFYGEIGPVCF

SEQ ID NO: 204186 - protein, 74 aa, Zea mays
  Clone ID: MRT4577_11780C.1.pep
RALLPVPTYTTPPPQRPRKPPHATPHRRVEPPTRLHGLTNKSRPPRLRSSCTPDVYDGGGGRGMKREGGSTGGC

SEQ ID NO: 204187 - protein, 56 aa, Zea mays
  Clone ID: MRT4577_117810C.1.pep
ENWCARGRIWVVQRRHGSSKGSSGSAQRHQVVPWTSLSSSLSVDRYFNSSSFLLPL

SEQ ID NO: 204188 - protein, 45 aa, Zea mays
  Clone ID: MRT4577_117811C.1.pep
GTRKRPSPDARSCRGQLNPEGRMGRFQRANTRVLTQRPLFQGQDP

SEQ ID NO: 204189 - protein, 311 aa, Zea mays
  Clone ID: MRT4577_117812C.1.pep
MGSMRRSSVRLLIGFLLIRLNWCSAVGDKGAGKVGVAFPVVVSTWPFREAVRAAWKVVSTGEGWGSAVDAVVAGCSACEDLRCDGTVGPGGSPDENGETTLDALVMNGATMEIGAVAAMRYVKDGIKAAKLVMEHSEHTLLVGEKATAFAISMGLPGPTNLSSPESIEKWEKWKQNHCQPNFWKNVDPVGKCGPYHPINLASVEVEGSVKNEVVGSQGGLCQGYFESDNLLEPIKSNLKVVNRHNHDTISMAVIDKMGHIAVGTSTNGATFKIPGRVGDGPIPGSSSYGDDEVGACGATGDGDIMMRFLPW

SEQ ID NO: 204190 - protein, 383 aa, Zea mays
  Clone ID: MRT4577_117813C.1.pep
MGSMRRSSVRLLIGFLLIRLNWCSAVGDKGAEKVGVAFPVVVSTWPFREAVRAAWKVVSTGEGWGSAVDAVVAGCSACEDLRCDGTVGPGGSPDENGETTLDALVMNGATMEIGAVAAMRYVKDGIKAAKLVMEHSEHTLLVGEKATAFAISMGLPGPTNLSSPESIEKWEKWKQNHCQPNFWKNVDPVGKCGPYHPINLASVEVEGSVKNEVVGSQGGLCQGYFESDNLLEPIKSNLKVVNRHNHDTISMAVIDKMGHIAVGTSTNGATFKIPGRVGDGPIPGSSSYGDDEVGACGATGDGDIMMRFLPCYQVVESMRQGMDPRDAATDAISRIARKYPDFIGAVFAVNKEGVHAGACHGWTFQYSVRNSSMQDVEVITVYP

SEQ ID NO: 204191 - protein, 60 aa, Zea mays
  Clone ID: MRT4577_117814C.1.pep
YIYRRGLPYSSIKKLFKDSSTNKRGIGTYTKRPKTHKRLGNINMLPQKPGGLTWHKGSNL

SEQ ID NO: 204192 - protein, 37 aa, Zea mays
  unsure (1)..(37): unsure at all Xaa locations
  Clone ID: MRT4577_117815C.1.pep
CVXIDLXXFFRLXVFXDVFXXKIVAPPYLSLLPLLKK

SEQ ID NO: 204193 - protein, 50 aa, Zea mays
  Clone ID: MRT4577_117816C.1.pep
RLKAVNTPFNGFHIYVSGAFFNNNRMNSIVVPVRKRTPENLSKPNPKRGG

SEQ ID NO: 204194 - protein, 105 aa, Zea mays
  unsure (1)..(105): unsure at all Xaa locations
  Clone ID: MRT4577_117817C.1.pep
EPRGCTXGADTDKWHKNTMGEIVRNGATDLFQNHHASYCDVPPVTLLGRGRSPLNDVQVLGKMIDRYIKHDQILQPLPTLRKRIPRLPLNILLINMALTDFLRKR

SEQ ID NO: 204195 - protein, 87 aa, Zea mays
  unsure (1)..(87): unsure at all Xaa locations
  Clone ID: MRT4577_117818C.1.pep
LCTSLWTTLTTLLITMFILIFIGMVTAIYNAFNYXCQLFGTLFFKLWLTFHVIAHLYALLKGLNRTPTMTPAIAIVWSIILSLILLL

SEQ ID NO: 204196 - protein, 167 aa, Zea mays
  unsure (1)..(167): unsure at all Xaa locations
  Clone ID: MRT4577_117819C.1.pep
FLVPXQITFIEFRLKRAFGTQCGKVVSAIRDTIRELFHEYCGLSNNLGGDTSTREVELDEFDSDSLEDWDEHLNAQTRNQQLRELDNYLEDGIVPRKDDFDILNWWMSNSTKYPTLSIMARDVLAVPASAVNFEAALSGKVNVIHKQWSTLNIKTIEALVCTRDWVK

SEQ ID NO: 204197 - protein, 239 aa, Zea mays
  unsure (1)..(239): unsure at all Xaa locations
  Clone ID: MRT4577_11781C.1.pep
GYLEAGRASERRVSKKHSDSKDSETSDDKSDQSGSERETSYGHRSHKKDKRAGKKKPSVVVIRNINVTSKRHGSSDSESQTGSDVVSEDSDDSHAKSRKKKKKKRPSKKKDARKMVFESADEYSKNGMSYGQDGDQGSWNVFQSFLLRADEKRDNDADLFASEKKAPPARMKESTSVDVDSILLVEQNSAGANEHNTTGFSLENERIRPQQMLAGDELMMYGEGESMSFGCDDXXEIEA

SEQ ID NO: 204198 - protein, 71 aa, Zea mays
  Clone ID: MRT4577_117820C.1.pep
LFCELNHMPRGVTRICVPEKTCTNVAQGCGSYTFNQSSGVNWLQANGDQLYNLTTNTVAVGVGGDRYTQHS

SEQ ID NO: 204199 - protein, 408 aa, Zea mays
  unsure (1)..(408): unsure at all Xaa locations
  Clone ID: MRT4577_117821C.1.pep
MIQLKEACVLDSDIGPFNVIQEPIRDWNLDQKIXSTPSSRIGSSEGTSKLMDLLIQRKCLPIRGKLYNIACVNDVLNGIVSKGQPVLYHVGNILEKFIQAQMSSSLTRQQLLEVVAHMGLKCPQEDAKWWHIIYFRLEVLLHFKKAFPSEDLLSAEDNKTFESVCRILRAFYRAVEVICGPVCPTANMYFNELWKVRTVLQEEASTDRAALANMVLEMLEAFNEYWKNSYVWLSIPVVLDPRFKITFIEFRLKRAFGTNAEKHVSAIRDTIRELFHEYCGLSDNLGADTSTREAHDVELYGFDSDSLEDWDEHLNAQTRNQQLTELDNYLEDGLVPRKDDFDILNWWMSNCTKYPTLSVMARDVLAIPASADNFEAALSGEANVIHKQWSTLSIKTIEALVCTRDWGK

SEQ ID NO: 204200 - protein, 85 aa, Zea mays
  Clone ID: MRT4577_117822C.1.pep
PLGFDIRLGHAVVNQTYVECLRDQPIRYSQHGGAALVLMRATGEVSPDTKAKKNQAGSPLFAVRARGILVARKPAVGLISHVAAG

SEQ ID NO: 204201 - protein, 87 aa, Zea mays
  Clone ID: MRT4577_117823C.1.pep
ANVEVEARQAAQCGKDAAGATACAAGAAACAVGDTAGAAADTAGVPADSAQLQLHRAAGAVQQAAEQVAQTVQGAAAAVKDKVSGGH

SEQ ID NO: 204202 - protein, 145 aa, Zea mays
  Clone ID: MRT4577_117824C.1.pep
FCAPGGGMVSCVFSALQSSGRVASFRLFAAPCVPSVTWLLCPRTIFSPPGTCHRFFRLIFSAPFTFLLTSSCLFSVLPPCSPIACCCPSCCSRRPSRPPSSLRPTLSPSYNFLCPPHLCMCGGSSLAGSSFRWPLCHCSLRQFFG

SEQ ID NO: 204203 - protein, 153 aa, Zea mays
  unsure (1)..(153): unsure at all Xaa locations
  Clone ID: MRT4577_117825C.1.pep
RSYRSFRSAMANXLATRSQMRSAFLPIALNQIRLACVERYTLNKPTHQDQETSPAPEHNYGRYDSDPVGVHRSIDNTYNSMRRLNXAIEILDSAAXMRDENLGTEHPHIADDKRRLGALWKEAPRPTNTQATCLKNLVATDPDVDTNTNAAAR

SEQ ID NO: 204204 - protein, 206 aa, Zea mays
  Clone ID: MRT4577_117826C.1.pep
MRCSHGASVVWLPPHHKAPHPFHLFHPMVRSRTTTNHPTNSPSFSCALLFSLLYVLGSLLFERGKLSQPLARARARAKGMAAAVSFSRVRALPTWSSSVSGDDHHAYSVLATSSVSARPRSGARPLRSPAQMMGNVNDGKGLFAPLVVVARNIIGRKRFNQLRGKAIALHSQVINEFCKTIGADSKQRQGLIRLAKKNGEKLGFLA

SEQ ID NO: 204205 - protein, 49 aa, Zea mays
  Clone ID: MRT4577_117827C.1.pep
ETGVIHSLLGCGLQYNRSVQITRRRRLLTRRPPTGTNPSAGAACDEEAP

SEQ ID NO: 204206 - protein, 421 aa, Zea mays
  Clone ID: MRT4577_117828C.1.pep
MAPTSSSSDTALTLALENQTRSLLAELDKRFTALDSTWEARVAALEPVHSIKGSYGSTDPDALHDLDANTIFLNTGEGPDSDADNFFINIGEGPVGPVVGDTVVGALGDVGVVLDPVVEEVPVDAPTKCLMRVINRGDYYNPDASSAVDMAVVLLADAGCKLLVPPHHPLALPSPHSSRLASHASSPLAGTPPHPRPPPRASLRASPPSRPIRLRGSARCFSRPPLTRRATLARSSPSLHSTAHSSTYREELLDSTDNMTEQWLSVVESWYGTSYQSSLGHTPFAVLYSYEPKHFGITADVVVHVHVLTTWLRERELMTKMIKLHLTRGQDRMKRHVDTHCAECYFVVGDSVLIQLVQHCMVTRGGELITQVKVLWSDMDEELATRDDAEAFALHSQGHQLGGQPGFQGRGNVSNSKEDGR

SEQ ID NO: 204207 - protein, 115 aa, Zea mays
  unsure (1)..(115): unsure at all Xaa locations
  Clone ID: MRT4577_117829C.1.pep
RKFMTNRLLSLIQFELEVMHGGFANVCKVEQKDRLAKMYEAHDSNTIAXLKLLTNFCGCKSTELHLIYYYLQSAKKIKPKYXMITNGIATNVEKIRTHMIVRMIKTKMILGVIMT

SEQ ID NO: 204208 - protein, 157 aa, Zea mays
  unsure (1)..(157): unsure at all Xaa locations
  Clone ID: MRT4577_11782C.1.pep
GRPRVSFSAHSLTARGTGGASSLLSGACAGSGLPAVXRPIPVSLVEVTDPRGLGAGTMGAYCIMCGGVLXYPLAGFHLXPIKEDMSYGAMSRTYMTGTITYSVTYFVIMGICSAALSCLYDLSLHPPWRIGILWRPFSPCTFPWVCGLLFSAFRRAG

SEQ ID NO: 204209 - protein, 56 aa, Zea mays
  Clone ID: MRT4577_117830C.1.pep
RVLNNKGEQAVLWLFSLKNKKKRIEKFIYSIHQKQRLPYHPTRPTENYLILGGGLF

SEQ ID NO: 204210 - protein, 62 aa, Zea mays
  Clone ID: MRT4577_117831C.1.pep
HRKQKPPTTARCEPFFFTDCADYLTCPIIKNKQIPLVNRVVSIRNLLEKKFPNDEDNCRLKK

SEQ ID NO: 204211 - protein, 58 aa, Zea mays
  Clone ID: MRT4577_117832C.1.pep
PPKPTEPQTRHHQERHGKAKSQLNQGQRTLGPTDVPSHQQLCPKSLCYYSGNYIIAKA

SEQ ID NO: 204212 - protein, 108 aa, Zea mays
  Clone ID: MRT4577_117833C.1.pep
CLHHLEHMLPAVVIPGVGRLRLLRHSLYGEHLILLPQTRKEGARQRLRHGHRHLGLVGPSRYAQRDSVTGRLWSLPNHDPGCIDQVHPDYGRHGGLAGRRLLRERVRV

SEQ ID NO: 204213 - protein, 51 aa, Zea mays
  Clone ID: MRT4577_117834C.1.pep
RSSKPFLSVRRHRQHGRPLPPPSRCLRWLTAPPYPRTLLRLQRAWEASVGL

SEQ ID NO: 204214 - protein, 105 aa, Zea mays
  unsure (1)..(105): unsure at all Xaa locations
  Clone ID: MRT4577_117835C.1.pep
VSVMRAALEXYHKGWGTSVIVGVAAPGQEIATRPLQLVNGGVXKGTAFGGFKSRTQVPCLVXKCINKSIKVDEYITPTMSLGGMTDAFRLMYXGGCLRCVLATQI

SEQ ID NO: 204215 - protein, 99 aa, Zea mays
  Clone ID: MRT4577_117836C.1.pep
GYSRALVRSALPLVRPQTVPARRPCARRPRIGAAQFATGASPPYTMAVRRCMYSTQARTRIRIVAKTVTFAVSIERIFIYLTASELIAAQMTKGSIHPP

SEQ ID NO: 204216 - protein, 36 aa, Zea mays
  Clone ID: MRT4577_117837C.1.pep
KFGNSRNLFGVWPLPLCKQIFYCMTAEQKAKKGPLL

SEQ ID NO: 204217 - protein, 63 aa, Zea mays
  Clone ID: MRT4577_117838C.1.pep
RQDATFCPRNGLNSQGGVSFESNNYPGHYIRHRNFELWLDKFSGFTESTIFRNDATFIQRDVP

SEQ ID NO: 204218 - protein, 155 aa, Zea mays
  Clone ID: MRT4577_117839C.1.pep
RQIKRNGGSSILAGGSAEWRTTSPGYSSENVVIAAVSFVSEKNRTGTTLALTSSDRLLSSPSTQRQDLVWHLAALAEFNSVQSNFPTPIDRYARHSGVPSPRFLLRLTRAGTSGRPRRIGLVVAVSGLDWTKSPSLELRLSTHVSSHAQKRGRRR

SEQ ID NO: 204219 - protein, 100 aa, Zea mays
  Clone ID: MRT4577_11783C.1.pep
MGFVKVVKNKAYFKRYQVRFRRRREGKTDYYARKRLVIQDKNKYNTPKYRMIVRVTNRDIICQIAYARIEGDMIVCAAYAHELPKYGVKVGLTNYAAAYC

SEQ ID NO: 204220 - protein, 452 aa, Zea mays
  Clone ID: MRT4577_117840C.1.pep
IFLWGVQKTLAGENPFSPPRVRCYPPDSFAVSNGGRVGGTPNKNPGPKQVWEPMDARKKTGNGNSATGAADGSDQVECSNNISECEKLEAVCDSLVEICSEISAETCKSDTDQPWRQGEKNQSACSDESKCVDKPNCSKDTGRTTNLTTSDSSSCLSEGDRDSSMTSLSVQNVESSSASDSEESSDRNNSSPGDIPAKNVSRTLLEMCAGNGFREYQPKGLNPPNGNQFGFMVAPSQEQMLYQQKVHAPPYSSPFMGFHNHPLAVPTNGYLPYTQPGHFYPASMTPVGYGVAGDQCVDFSMQYRNNIHPYSGPEFGFLPSQPVHKTSVNFHAVPVTPLTPLCSRGMPVATNQERQQSPALFPKLKQAVLVPETVCAGDNTFKQKGDDVDSTPFSLFQFNLPIAPPTLATSKERSGELAPAQIARVQPCSREETNVKEYNIFSGCDGVMFQLN

SEQ ID NO: 204221 - protein, 76 aa, Zea mays
  Clone ID: MRT4577_117841C.1.pep
QRRVRGVVSAACGWWSSTICDKRAQHVVVENFAIIGTAYDGLQTFGTVIVAIKRVVLYSKKKKKKKKKSTLRCYHC

SEQ ID NO: 204222 - protein, 264 aa, Zea mays
  unsure (1)..(264): unsure at all Xaa locations
  Clone ID: MRT4577_117842C.1.pep
MARPARKALIGAPSAARSRGLRRHAFPRSAVALFLALLVALSLAVLYRAAVSRSLGTSWSWGWDSLALPSFATSQEEEGAEGDDLDSELLKLERVLKKASMRDNTVILTTLNAAWASPGSLIDLFIDSFRSGVRTNLLLKHLVIVAFDWKAYEECVKIHPYCFALGTDGVDFSEEKRFLTSGYLEMMWRRLDFLRLVLEKGYNFIFSDADIMWFRNPFPHFYPDVDFQIACDHYVRNATDLRNIANGGFSYVKXNERSIEFYSF

SEQ ID NO: 204223 - protein, 85 aa, Zea mays
  Clone ID: MRT4577_117843C.1.pep
RCYPSVKLMQTSVILVLVLSRRSGEDEKCMRLHPMYSLSRLYIGLRRLHYDVPCIPSLRRSYYTLEKKQELRLSYVLKIILFVWH

SEQ ID NO: 204224 - protein, 78 aa, Zea mays
  unsure (1)..(78): unsure at all Xaa locations
  Clone ID: MRT4577_117844C.1.pep
XLXIXVRLLPICLTIXIXCSGYSQMTTTFIHHXIXINISILSXXVAXTSMGXFXVFFLLTWVLLYSKVIVPVLRGFST

SEQ ID NO: 204225 - protein, 83 aa, Zea mays
  Clone ID: MRT4577_117845C.1.pep
CPTFFSLLCSVYLLNLCYLGPVKFSRPTDVRRFYHLLMGSTRVEGLYITNLLVDLCYADVLWARVCKKPELWQDWTKNNQNIY

SEQ ID NO: 204226 - protein, 111 aa, Zea mays
  Clone ID: MRT4577_117846C.1.pep
NAHHCHVLQSLPVEIWMHVQHHAADKCAAFSLQFTYHIVMLSDAWEMRVILVNLAVWRGLAGRSDGSGAAGGVGDETWGPVPGVGGAGGVSSGEPCAMSRGKGAVERTLLD

SEQ ID NO: 204227 - protein, 90 aa, Zea mays
  Clone ID: MRT4577_117847C.1.pep
KKEKKLTHCDLLNNNDPFNYQELFIPELNKKADRNMYRFGQKKMGKLQPHLRRRKDRMKSLSMNGRQIVLPTGRGSEGDVSNSGEAMTSR

SEQ ID NO: 204228 - protein, 48 aa, Zea mays
  Clone ID: MRT4577_117848C.1.pep
AEEAPINRQKITASQRGPGIHVEARVERARRQLASRTCELRLGGEVKV

SEQ ID NO: 204229 - protein, 164 aa, Zea mays
  Clone ID: MRT4577_117849C.1.pep
VGPKALILNRPQNGPRVGTGAQKKAFSPSFSGGQKMGGLGEKGPKKTFFPAQKTDYLFLGAKGQKQHPLFSKGKAKQNTHQRVPKTQNEGKRLLRERRLFCPPQHQDKKKRNVLRVCKKKGFFGYLTPQKKGGPRHIWAPKKMGALKTKRLFFKFVKTKIPLFF

SEQ ID NO: 204230 - protein, 45 aa, Zea mays
  Clone ID: MRT4577_11784C.1.pep
GCPTCHEYKLGGLHQKRKKRTAALLESHLEYARRHPQTYIFYRSP

SEQ ID NO: 204231 - protein, 87 aa, Zea mays
  Clone ID: MRT4577_117850C.1.pep
LPLVFRPKGGMQIFVKTLLGKTKTLGVERWGPLANVKGKIQGKEGIPPGQKGLIFSGKQLEDGRPLAGFNIQKEGPPPPGVRFRGGQ

SEQ ID NO: 204232 - protein, 156 aa, Zea mays
  Clone ID: MRT4577_117851C.1.pep
SYDSESGMRNDVAHGVGVSSFSYEKAKMYIIERLNDQGEESYQIVQKSESFERLISLPENGTFSPIDFPQEEKISIAHEATKPLNLHTVEQEDGSASPYSTRQYEETESADTSNLGTETLIEPTIDHGSYPQNEGAISQELVREGVKIMQDTMDNS

SEQ ID NO: 204233 - protein, 143 aa, Zea mays
  Clone ID: MRT4577_117852C.1.pep
AAWAGLQFGSYATRPRSMMTWNRYKYSHLSFGSEDDSVSSFQLFLCGFAAGTFSKAACHPLDVVKKRFQIEGLKRHPRYGAPIESSTYKGMYHALKEIVAKEGFGGLYKGLFPSLVKSAPAGAVTFVAYEYISDWIGSKAGVE

SEQ ID NO: 204234 - protein, 41 aa, Zea mays
  Clone ID: MRT4577_117853C.1.pep
FFWPNWWVTENFLLVLTTLLGYLLHQNACACSKIQVSKISI

SEQ ID NO: 204235 - protein, 334 aa, Zea mays
  unsure (1)..(334): unsure at all Xaa locations
  Clone ID: MRT4577_117854C.1.pep
MGSGEEPSQMRRALVDSLAGAISGGISRTVTSPLDVIKIRFQVQLEPTTSWGILRRDIYGPSKYTGLLQATKDILREEGLPGFWRGNVPALLMYMPYTAIQFTVLHKLKTFASGSSKTEDHLHLSPYLSYVSGALAGCAATIGSYPFDLLRTILASQGEPKIYPNMRSAFVDIIKTRGVQGLYSGLSPTLVEIIPYAGLQFGSYDTFKRSMMTWNRYKYSHLNFGSEDDSVSSFQLFLCGFAAGTFSKAACHPLDVVKKRFQIEGLKRHPRYGARIESSTYKGMYHALKEIVAKEGFGGLYKGLFPSLVKSAPAGAVTFVAYEYISDWXESILM

SEQ ID NO: 204236 - protein, 133 aa, Zea mays
  Clone ID: MRT4577_117855C.1.pep
PRLASPPPPLGSGEEPSQMRRALVDSLAGAISGGISRTVTSPLDVIKIRFQVQLEPTTSWGILRRDVYGPSKYTGLLLEAGRDLSPAVIHLCLEEAAVPLDLAVHTRFGTWEPAKINWIIHACKVLSWVLANY

SEQ ID NO: 204237 - protein, 192 aa, Zea mays
  unsure (1)..(192): unsure at all Xaa locations
  Clone ID: MRT4577_117856C.1.pep
MVXASSSGXRSXSXVGVPSXLAPXSRSXXLAXXCANATTSXRVTMSXEWXPGQPRXAHLDXXSPGXXGFXXLGLATXPENFERVKEXXGYHFRXAXLSGPXILGPEXLGLGNLVKAQXLAAVPGGQATYLGAPVPLGTLPTXLXXEFXAIAFXXXQXTKEKXPEKKKYXGGAFDPLGFSKDXXKXEEYNSRR

SEQ ID NO: 204238 - protein, 96 aa, Zea mays
  unsure (1)..(96): unsure at all Xaa locations
  Clone ID: MRT4577_117857C.1.pep
TGILEXNKNIISFXEQMKXRATDYXXNCQLQLEXREPTTGTKSLGQNSTTHPDTPANEVESTQLSGARHVFRHKSACXCICCWVSAYSTREIHGDE

SEQ ID NO: 204239 - protein, 51 aa, Zea mays
  Clone ID: MRT4577_117858C.1.pep
WVCVLKSIIEISVNYNKLLVARKDMLASMAILNKTYKRVTLTYTKVISSGP

SEQ ID NO: 204240 - protein, 105 aa, Zea mays
  Clone ID: MRT4577_117859C.1.pep
MASGSGKAKASSWAAAMSVGTVEALKDQAGLCRWNYAFRQAAQQQKQRARRPAGASGSVGPGSAHAPPASAPSGCAAAARRRARQQQEEEELRTVMYLSNWGPNN

SEQ ID NO: 204241 - protein, 189 aa, Zea mays
  Clone ID: MRT4577_11785C.1.pep
MSKARVYTDVNVLRPKEYWDYEALTVQWGEQDNYEVVRKVGRGKYSEVFEGINVNNNEKCIIKILKPVKKKKIKREIKILQNLYGGPNIVKLLDIVRDQHSKTPSLIFEYVNNTDFKVLYPTLTDYDIRYYIYELLKALDYCHSQGVMRRDVKPHNVMIDHELRKLRLIGKAGQSFFMQTTNTNCLMRP

SEQ ID NO: 204242 - protein, 105 aa, Zea mays
  unsure (1)..(105): unsure at all Xaa locations
  Clone ID: MRT4577_117860C.1.pep
MASGSGKAKASSWAAAMSVGTVEALKDQAGLCRWNYAFRQAAQQQKQRARRPAAGASGSVGPRQRARAACFCSLGLRRGGEEESXQQQEEELRTVMYLSNWGPNN

SEQ ID NO: 204243 - protein, 80 aa, Zea mays
  Clone ID: MRT4577_117861C.1.pep
MALDMAYAPAMNAAKAEFEAVMMDPQHTIRITLYSKSVKNLEKVCGDLVKGAKGNDLNVNGPMQIPTNVLHMTTKKSPCC

SEQ ID NO: 204244 - protein, 212 aa, Zea mays
  Clone ID: MRT4577_117862C.1.pep
MAKSTPLLSFVYLLCIAHVTSISFDYNFSIPGVLTSANIKYMSNGSRGTDRIDLTKDAIWSTGRVAYGQPLQLWDDTAKVASFTSNFTFAIKPHNSTGDFIERHQILSWSFESTLTGVVVNVNNTDNKSAKTRKTSLIAEVMVSTGVVVVLLVVVVWLSYRRRCLKRQNGKQIQEAPEGTHIPIEGDMDDEFEKGTGPRRFTYQLSRATRGF

SEQ ID NO: 204245 - protein, 109 aa, Zea mays
  Clone ID: MRT4577_117863C.1.pep
MASGSGKAKASSWAAAMSVGTVEALKDQAGLCRWNYAFRQAAQQQQQQRARRPAGASGSVGPGSGSGSAHAPPASAPSGCAAAARRRARQQQEEELRTVMYLSNWGPNN

SEQ ID NO: 204246 - protein, 101 aa, Zea mays
  unsure (1)..(101): unsure at all Xaa locations
  Clone ID: MRT4577_117864C.1.pep
SKNSITRFETLCLYLFLFLWRGEFHCIGFFLTSKCSXIEKYXQRXXIPSHNYXFYIALPRXXXALSPPIPLPSARFPLYXXPAPPSFACPASLPXXSLPPY

SEQ ID NO: 204247 - protein, 284 aa, Zea mays
  unsure (1)..(284): unsure at all Xaa locations
  Clone ID: MRT4577_117865C.1.pep
MAKSTPLLSFVYLLCIAHVTSISFDYNFSIPGVLTSANIKYMSNGSRGTDRIDLTKDAIWSTGRVAYGQPLQLWDDTAKVASFTSNFTFAIKPHNSTNQADGMAFYVGPWPPKLPEDSNGGFLGLXSTTPSARTLTSRXIAVEFDAFRNDWDPNNTMNHIGVDVKSITSRAYTPLPDGSFNGTMSAWVRYDANVSTLSATLRFDDLPQLGLYNVSAIVDFKDAGLPPYAAVGFSGATGDFIERHQILSWSFESTLTGVVVNVNNTGKCLSLSLLSLAILLQKEN

SEQ ID NO: 204248 - protein, 120 aa, Zea mays
  Clone ID: MRT4577_117866C.1.pep
TRPRASCEHRCSSRALGCLDPSRGRLRPCPCPVPTPTQHFPIPPGSGTARCFVSHSHDTISTTGALAAKAPARVTSGAPPPPIARSAPRPPARRGIISGSSRRRGRHEMNLTCLSCFLTP

SEQ ID NO: 204249 - protein, 41 aa, Zea mays
  Clone ID: MRT4577_117867C.1.pep
GARYRAGHRAGSDGICWLLLLSLAAGTRSIEFASREPMDRP

SEQ ID NO: 204250 - protein, 89 aa, Zea mays
  unsure (1)..(89): unsure at all Xaa locations
  Clone ID: MRT4577_117868C.1.pep
XXSSKXXXTXXXSQMAXHSHVRDARSPRRPYXPAGARRXXXXRQXRRRHQXGTPPAASSCCSAXXXXXXLXKSSSXSVRSLVWMXCRXX

SEQ ID NO: 204251 - protein, 106 aa, Zea mays
  unsure (1)..(106): unsure at all Xaa locations
  Clone ID: MRT4577_117869C.1.pep
HASVHILRHLFLKLEYSITDSRGWPACPQKEPTSTLSXTLLLISXPHNRQGPYDLXFNKTHKATSHTPTVIHLSSLKAKISQHARNFTTTNTSADXARSIDLAHRY

SEQ ID NO: 204252 - protein, 109 aa, Zea mays
  Clone ID: MRT4577_117870C.1.pep
MAKAYTILVALSMVALLSCNDVEGEAYMMHEALSRKGLREDIKLGTNGAVNPSAISLSGQASSITTGVNSNTESSTSIEISGAAAASTSMTATTADTHRGYPITRDPKH

SEQ ID NO: 204253 - protein, 65 aa, Zea mays
  Clone ID: MRT4577_117871C.1.pep
GFSTQLAQGRDVAYLLQKFRNVAYDKINLKPILWHNTNRPRAFPLIQSRKKLGFFNKNKLLFPET

SEQ ID NO: 204254 - protein, 70 aa, Zea mays
  unsure (1)..(70): unsure at all Xaa locations
  Clone ID: MRT4577_117872C.1.pep
PRRANSTKKSFVRPSSXXRVGWSSCFILRRLILAAAVLLSVLAAACASSCTFCVPGWAXPHFPLLCCRLF

SEQ ID NO: 204255 - protein, 74 aa, Zea mays
  Clone ID: MRT4577_117873C.1.pep
GGPSAKMEALLNQDIPPGDIPLMRAASEGAPPKIKELLRPGARFNVKDVDGRRALARAPDETKGFILGFPPKKA

SEQ ID NO: 204256 - protein, 71 aa, Zea mays
  Clone ID: MRT4577_117874C.1.pep
SNQEGSTVLCLVCLKPTREWWGDFAIANQMQLNDGSPRMVQLDLMKWRTVSRLVTEYIRFKGGNKLVSLCN

SEQ ID NO: 204257 - protein, 72 aa, Zea mays
  Clone ID: MRT4577_117875C.1.pep
MSAAPPRRVVICCGGVVGACTAYFLATHAVFPTVQTLVERCAPACADSGKACCFLALDWCDSTPALSRLARA

SEQ ID NO: 204258 - protein, 47 aa, Zea mays
  Clone ID: MRT4577_117876C.1.pep
HPLPCPRCRARYGRLWWSVSSTVNSVNSHVHSLLFSTPRERNLGKSG

SEQ ID NO: 204259 - protein, 204 aa, Zea mays
  unsure (1)..(204): unsure at all Xaa locations
  Clone ID: MRT4577_117877C.1.pep
MLEEFLVRAGVVREDMMAAAPVPPAPGCPPPHLQPPMLFPHGNVFAPLVPPLQFGNGFVSGALSQQQGGVLEAPAVSPRPVTASGFGKMEGDDLSHLSPSPVSYVFXAGLRGRKPPAVEKVVERRQRRMIKNRELAARSRGRKQAYMMELEAEVAKLKELNDELQKXQVEMLEKQKNEVLERMRRQVGPTIKRICLRRTLAGLW

SEQ ID NO: 204260 - protein, 86 aa, Zea mays
  Clone ID: MRT4577_117878C.1.pep
KNSTYGGKTAIGHCIKKISCMSENLSNPCPIYTQQHRNLCENHNDKGQVLDLCFGVSHARGLFNPSLKFDPTKNQNQGLRSATQVI

SEQ ID NO: 204261 - protein, 55 aa, Zea mays
  Clone ID: MRT4577_117879C.1.pep
HPPAFHGLSFIWGYLYPREWAGAFNAATDTTLWPHILMRWHHIALSLSNDIATSP

SEQ ID NO: 204262 - protein, 85 aa, Zea mays
  Clone ID: MRT4577_11787C.1.pep
FLKTLIGRDIGVWMCDVKAPMSAGCTLYHAWRARDDPLHEQQHGSDQVSQFHHVPLMSGRKKATRRGDSCELTEGCAMLVERETK

SEQ ID NO: 204263 - protein, 118 aa, Zea mays
  unsure (1)..(118): unsure at all Xaa locations
  Clone ID: MRT4577_117880C.1.pep
LTANMHSDTVAIPMCEGAATAKSACNAPELTNIYIFASESIRKSLVIDKPTWSSDRCYRKQRLLPYYGXFDXHESTKHAMNDRTGVYTCYNIDSQSFHNFXWDLYXYYINECDTFALY

SEQ ID NO: 204264 - protein, 328 aa, Zea mays
  Clone ID: MRT4577_117881C.1.pep
MGNLHAKGAGTGAKGAGAANTSISNSGDSMSNAATPSPVEQATFKWVIDGFSSLLDKDQGWTYSNVFELMGVEWYLKLNPKYEVSNEECVSLRLELSQSSVKLDTIFEASFKFMIYDQLIGKHKVHLGNHSFQTASTSSAIAFMLPLKALRQSSRFIVNNSCVFGIGFIKVATIKVNTTLETLFVRKMNIFNEAKVYTWKIEDFSALKNPCHSPEFEIAGYTWIISLNPSYDGNSLSLFLKMKKTNDVPKGSGSLVEFALSIKDQENGKDRKYPGRCQFSSKHHRWGWKKFISLEDFKDSSKGYLIKGKCCIEAEVAISGSSKTEYSM

SEQ ID NO: 204265 - protein, 115 aa, Zea mays
  Clone ID: MRT4577_117882C.1.pep
IIHGGGVLPTKNRLWCWADNLLINTPPTRGWRSLGPILPTRSFFKLLKPPAKKRGNTTGGKHLFWEEYYNSRGFFWRRCPPHPWIITTPCGLLTTSPIFSWGAKKSEGRRLLGTF

SEQ ID NO: 204266 - protein, 108 aa, Zea mays
  unsure (1)..(108): unsure at all Xaa locations
  Clone ID: MRT4577_117883C.1.pep
HTPEPIQGERNRTKPRCPKQHGDRIASPTGTAARERTQSGNTNHNANTAHIDDASTGKANQGHRKKKGQKLQLQEATKGAADSTTTLTANDETAKHEIXDTAGQERNH

SEQ ID NO: 204267 - protein, 70 aa, Zea mays
  Clone ID: MRT4577_117884C.1.pep
WPSGGRSGYAQPILRVRQGWGGLADLQRQRLPGRKGRRGRKDQVRCQRALRRALLRTVERAGVACHSFLT

SEQ ID NO: 204268 - protein, 144 aa, Zea mays
  unsure (1)..(144): unsure at all Xaa locations
  Clone ID: MRT4577_117885C.1.pep
QTEKDFLKHPRDILKSHQSGKRNNPEKDDNRFWKSIGLAFWTPRXAINRTYIDKTCPFTETATIRRTIIAVTCHTAKMNRPIIDRKNYLHFASRYQTYDKKHSNIPAHISPCFRANEGDHVIIAQSRPLDQTATFNVHKVIPTG

SEQ ID NO: 204269 - protein, 554 aa, Zea mays
  Clone ID: MRT4577_117886C.1.pep
HASGVLDAVESTFQCGIPGVVVEQKLQETVSKSVELLPELWKQAGAYQEALASYRRALLSQWNLDDECCTRIQKRFAVFLLYGGVEAAPPSLASQTEGSFVPRNNLEEAILLLMILLKKWFLGKTHWDPSVMEHLTFALSLCGQTSIIAKHLEEVLPGIYPRTERWYSLALCYFAVSHNEAALNLLRKSLNKNESPNDIMALLLAAKICSSNNLLSSEGVEYAKRAVRDAESSDGHLKSVALHVLGSCLSRKSKVASSDHQRSVLQAEALKSLNEAISLDRHNPELLFELGIEYAEQRNMHAALKCAKEFIDVTGGSVSKGWRLLLLVLSAQQRYSEAEVVTDAALDETAKWEQGPLLRIRAKLKVAQALPMEAVEAYRTLLALVQAQRKAYGSVKNGTEDNEDKVREVEVWHGLANLYSSLSYWRDAEICLQKAKALKTYSATTLHVEGNKHELHEKIQDAVAAYFNAISMEVEHVPSKVSIGALLSKQGPKFLPVARCFLSDALRLEPTNRMAWFYLGEVHKQDGRLADAADCFQAASMLEDSDPVESFRSL

SEQ ID NO: 204270 - protein, 136 aa, Zea mays
  Clone ID: MRT4577_117887C.1.pep
MPWFPAVPPALAAADEARIVKKRAGLPRLLHKLFIKVLRLRPALAAEEYYGAYRMGMGVGAADEDCCYYYSYGGAGSSSWAGVLSSIPEEDYDDSSDEGTPDVAMPGPAVLRKAKSERFVVGPPDGAAVLHVEVLL

SEQ ID NO: 204271 - protein, 108 aa, Zea mays
  Clone ID: MRT4577_117888C.1.pep
LVRARFYASLKEPTARAIGSQRPISFFLLSRSYLPLAHAFIGSPFFCSPDELLIQHILYHPFHPRQCSELFFMSSVAMSGPRPGSALEPLYSTIFVHYLPSSVGLPPS

SEQ ID NO: 204272 - protein, 40 aa, Zea mays
  Clone ID: MRT4577_117889C.1.pep
DPLVHDMRLLPGFSFCLAWKAPGRKLTARSPTYPTNWLVP

SEQ ID NO: 204273 - protein, 111 aa, Zea mays
  unsure (1)..(111): unsure at all Xaa locations
  Clone ID: MRT4577_11788C.1.pep
IRLEKAHAANFFAGDAYLYFQGLFKPAPGSLEXNVQDFANFNIGHTCPQGGTTYTADXYQLRLGILQAGPMGHDLINKRALIWPASPGQMHPDLTXPMHVSACPDHKTTLP

SEQ ID NO: 204274 - protein, 45 aa, Zea mays
  Clone ID: MRT4577_117890C.1.pep
SSPPLSFSKKKKKKKKKKKKKKKKKKKKKKKKKKKKKKKKKKKKK

SEQ ID NO: 204275 - protein, 90 aa, Zea mays
  Clone ID: MRT4577_117891C.1.pep
RGPPPPFFEIGSPPSEKPMLFCWVVKYPPLGAGTWGPHRAFPPGGWISLGPPPRLLKTQVSPLFGGPPCPPGSCGESNVPVPCNGAPPPP

SEQ ID NO: 204276 - protein, 130 aa, Zea mays
  unsure (1)..(130): unsure at all Xaa locations
  Clone ID: MRT4577_117892C.1.pep
WLSLVSVHIYXRXLSXSVYXFXSQLNLNQTKLLFIIINYLPTVFXIVTXKEPHIIXNPTLQNLIQSRNISNISIYLHPKNNPKLVDQNYYEDEXNXHVHTFFPIFGGRYNSHXFWITCDNFEPSYHLIVR

SEQ ID NO: 204277 - protein, 621 aa, Zea mays
  Clone ID: MRT4577_117893C.1.pep
MKVAHNAYSMTNYEQNLDGDVCGQSNYASSKHMFGTVNNTRRSRRDGRSTDMFGSMPRTPQPNIRTCCKLRAPGDPCLLLLKFTGCVEDWTKEMRMQHLKRSHKKMHRSPRLKNKRSPKKSAKKPEKRAVSQRLVTHRTVHSTCPVEDLLFNIDRKKQRKRGCFACGEKGHFRDNCPNMAEPKKGRSKGKALTSVRTWDDSSSEDEPPRTRSHRSSSRSSRSSHKCLMAKGLLEKFETFANLNGELSTKIELLESSAPSIATDDGLIKKNEKLKAKLASSQEAIENLLEKMEILSIHNDELTTKLENIGSTLGASLVEIPEIIKKDASTSCFDLIDDSNPCNQVLVENIVVETCSDEVAKENEQLRQEAARLGKALYDKKGKAKQIRPPKDNTTTGVNKPMEVETVICRLCHKEGHKSFQCKAMTGDRQKQKLKQKPTSKISNTYIKKVDKKTATPYLIKKKKNGKVIAIKANKQANKEKGGKRIWVPKEIISTMKSTKKFTGCVEDWTKEMRMQHLKRSHKKMHRIPRLKNKRSPKKSAKKPEKRAVSQRLVTHRTVHSTCVPPPCIGGNEARGVSAGSSIVETAGSVREEPEAEHHLRVEKARGSLRSYSTVVLGPRVG

SEQ ID NO: 204278 - protein, 492 aa, Zea mays
  Clone ID: MRT4577_117894C.1.pep
MGMIRKINLMGVPLQVEDILFNIDRKKQRKRGCLACGEKGHFRDSCPTMAKPKKERSRGKALTSVRTWDDSSSEDEPPRTRSHWSSSRSSRSSHKCLMARGNKSIPSSSDENSSDDEGLLENFETFANLNSELSTKIELLESSVPSNTADDDLIKKNEKLKAKLASSQNTIENLLEKMEILSIHNDELTTKLENIGSTPGASLVKILEIIKKDASTSCFDLMDDTNPCNQVLVENIVIETCSDEVAKENEQLRQEVARLGKALYDKKGKAKQIQLPQYNTTAGVNKPMEGETVICRLCHKEGHKSFQCKTMTGDKPRQKLKQKPSSKISNTYIKKVDKKTATPYLIKKKKNGKVIAIKANKQANKGKGAKRIWVPKEIISTMKSTKKVWIPKGNSQDARITWTKGLRKATPQKKTLRTSRKHRTVRRHTGLSGVHTPDCLMHQGTAAQQLVPGGTQREDHRTVRCEDRTVRCGKPAAPTVTCSDKATARRTG

SEQ ID NO: 204279 - protein, 68 aa, Zea mays
  Clone ID: MRT4577_117895C.1.pep
VAYLWMFGDGNERNNHWRDASSLRGIIEGVGFESRASVVKGRRGYCTGEIHAAHGGFSRRGQEGVEGK

SEQ ID NO: 204280 - protein, 1754 aa, Zea mays
  unsure (1)..(1754): unsure at all Xaa locations
  Clone ID: MRT4577_117896C.1.pep
MDTHRPPHFDGTNFPYYSARMACYLEAVDLGVWRVTRDGMKPLKNPEKPTTSEEKEIHLNARAKNCLYESLSMDIFNQVFTLKTANEIWLKLHELHDGTSNVREQKHCLVLNEYNSFAMKDDELVRDMYSRLNLIINELNSIGINKLGDADIVRKIISLLPQRRYGSIITILHNMEDLGNMTPTIVIGKIATFEMSRKMCRGEEPTSSRPYAFACDERKGKKKAPTPSSSSEEEEEEEIDDDEDNQPCTSSSEDEETIRRVGKVMGMIRKINLMGVPLQVEDLLFNIDRKKQRKRGCFACGEKGHFRDNCPNMAKPKKERSKGKALTSVRTWDDSSSEDEPPRTRSHRSSSRSSQSSHKCLMARGNKSIPSSSDESSSDDEGEGKPSLDELAEAVEFFQDVCTKQKAQLKTLKNKLVSSQNDYKGLLEKFETFANLNSELSTKIELLESSAPSTATDDNLIKKNEKLKAKLASSQEAIENLLEKMEILSIHNNELTTKLENIGSTPAASLVEIPEIIKKDASTSCFDLIDDSNPCNQVVVENIVVETCSDEVAKENEQLKQEVARLGKALLCHMEGHKSFQCKVMTGDNQRQKLKQKPSSKISSTYIKKVNKKDATPYLIKKKKNGKVIAIKANKQGNKGKGAKRIWVPKEIISTMKSTKKVWIPKGKCKDFDIDACSEHLVSISKLNDELASLNAQLKTNKSNFDKLKFARDAYTIGRHPSIKDGLGYKREAKNLTSHKAPISAKEKGKAPMASSVQKNHAFMYHDRRQSRNAYRRCNSYDAFDSHDMFASSSSYVHDRNVGRRNVVHNMPRRNVVNVPRKVYASGGSSWIIDSGCTNHMTGEKKMFTSYVKNKDSQDSIIFGDGNQGKVKGLDVSVFRRSDGSLAFKGVLDGKLYLVDFAKEEAGLDACLIAKTSMGWLWHRRLAHVGMKNLHKLLKGEHVIGLTNVQFEKDRPCAACQAGKQVGGAHHSKNVMTTSRPLELLHMDLFGPVAYLSIGGSKYGLVLVDDFSRFTWVFFLQDKSETQGTLKRFLRRAQNEFELKVKKIRSDNGSEFKNLQVEEFLEEEGIKHEFSAPYTPQQNGVVERKNRTLIDMARTMLGEFKTPERFWSEAVNTACHAINRVYLHRLLKKTSYELLTGNKPNVSYFRVFGSRCYILVKKSRNSKFAPKAVEGFLLGYDSNTKAYRVFNKSSGLVEVSSDVXEEDVPTAAIXTMAIGEVRPQEQDEXDQPSSSTTVHPSTQDDEXRVEEALLDPDWVLAMQEELNNFKRNEVWTLVPRPKQNVVGTKWVFRNKQDEHGVVTRNKARLVAKGYAQVAGLDFEETFAPVARLESIRILLAYAAHHSFRLYQMDVKSAFLNGPIKEEVYVEQPPGFEDERYPDHVCKLSKALYGLKQAPRAWYECLRDFLIANAFKVGKADPTLFIKTCDGDLFVCQIYVDDIIFGSTNKKSCEEFSRVMTQKFEMSMMGELNYFLGFQVKQLKDGTFISQTKYTQDLLKRFGMKDAKPAKTPMGIDGHTDLNKGGKSVDQKAYRSMIGSLLYLCASRPDIMLSVCMCARFQSDPKECHLVAVKRILRYLVATPCFGLWYPKGSTFDLIGYSDSDYAGCKVDRKSTSGTCQFLGRSLVSWNSKKQTSVALSTAEAEYVAAGQCCAQLLWMRQTLRDFAYNLSKVPLLCDNESAIRMAENPVEHSRTKHIDIRHHFLRDHQQKGDIEVFHVSTENQLADIFTKPLDEKTFCRLRSELNVLDSRNLD

SEQ ID NO: 204281 - protein, 263 aa, Zea mays
  unsure (1)..(263): unsure at all Xaa locations
  Clone ID: MRT4577_117897C.1.pep
MESSSPAVVYESSVVTEDAGAPKLKKKKRKVKGGKASAGITDAEEIXMKIKMKKLVLMSTNLQHXSEDVDNEEPQKLKRGKKMEVKKSGKAKKKDKHASRKDNNNLERHVDVSTANADEIPLVDEDCSRGMKKWILEYKQKRPGLKALQEAIDEFIVAHEEQQEKEKKEREARAAEDGWTVVVHHKGRKKTTDTETGTAVGSVSLGAMQHKMAKMKPKEVDMNFYRFQKREAHLSELAMLQSKFEQDKKRIQELRAQRKFKPY

SEQ ID NO: 204282 - protein, 99 aa, Zea mays
  Clone ID: MRT4577_117898C.1.pep
ALAAATARSRCADCSFLVSVPNARTKQTARKSTGGRAPGKQLPTRAARKWARPTGGVKNPHRFRPGTVALREIRKSQKSTELLIRKFPSKRFVREIAQD

SEQ ID NO: 204283 - protein, 177 aa, Zea mays
  unsure (1)..(177): unsure at all Xaa locations
  Clone ID: MRT4577_117899C.1.pep
LDGIAGCNINVFPEEKDVLNNLISAICSIDPDILVGWEIQLGSLGFLAERAAYLGIGLLKRISRXDELNHPPKIPVDNSSQVLSETSSADDIIDDVSENDWSHTHASGIHVGGRIVLNLWRLMRAEVKLNNYSLEAVADEVLRPKIPLIPSRILNRWFATGPGRGRHRCIXYIXYRA

SEQ ID NO: 204284 - protein, 67 aa, Zea mays
  unsure (1)..(67): unsure at all Xaa locations
  Clone ID: MRT4577_1178C.1.pep
KAGVPRENSQRQGPTPNQXAPNAPVTVKKKKTRATGADPQPRPDSLEKKPQMPQREHLIYKENVCLL

SEQ ID NO: 204285 - protein, 1174 aa, Zea mays
  unsure (1)..(1174): unsure at all Xaa locations
  Clone ID: MRT4577_117900C.1.pep
MDTHRPPHFDGTNFPYYSARMACYLEAVDLGVWRVTRDGMKPLKNPEKPTTSEEKEIHLNARAKNCLYESLSMDIFNQVFTLKTANEIWLKLHELHDGTSNVREQKHCLVLNEYNSFAMKDDELVRDMYSRLNLIINELNSIGINKLGDADIVRKIISLLPQQRYGSIITILHNMEDLSNMTPTIVIGKIAAFEMSRKMSRGEEPTSSRPYAFACDERKGKKKAPTPSSSSEEEEEEESDDDEDNQPCTSSSEDEETIRRVGKVMGMIRKINLMGVPLQVEDLLFNIDRKKQRKRGCFACGEKGHFRDNCPNMAKPKKERSKGKALTSVRTWDDSSSEDEPPRTRSHRSSSRSSRSSHKCLMARGNKSIPSSSDESSSDDEGEGKPSLDELAEAVEFFQDVCTKQKAQLKTLKNKLVSSQNDYKGLLEKFETFANLNSELSTKIELLESSAPSTATDDSLIKKNEKLKAKLASSQEAIENLLEKMEILSIHNNELTTKLENIGSTPAASLVEIPEIIKKDASTSCFDLIDDSNPCNQVVVENIVVETCSDEVAKENEQLKQEVARLGKALYDKKGKAKQIQPPQDNTTAGVNKPMEGETVICRLCHKEGHKSFQCKAMTGDKQRQKLKQKPSSKISNTYIKKVNKKDATPYLIKKKKNGKVIAIKANKQANKGKGAKRIWVPKEIISTMKSTKKVWIPKGKCKDFDVNACDEHLISIAKLNDEVASLNAQLKTCKVEFDKLKFARDAYTVVPLLFMIEVGLGEIMLCLMRLGECAMDLLLFIMLAILLLYFHVYASGGSSWIIDSGCTNHMMGQKKMFTSYVKNKDSQDSIIFGDGNQGKVKGLGKIAITSEHSISNVFLVESLGYNLLSVSQLCNMGYNCLFTNVDVSVFRRSDGSLAFKGVLDDKLYLVDFSKENDDLDACLMAKTSMGWLWHHHLAYVGMKNLHKLLKGDLVLGLTDVCFEKDRPCAACQVGKQVGSTHHSKNVMTTSRPLELLHMDLFGPVAYLSIGGSKYGLVIVDDFSRFTWVFFLQDKSETQGTLKRFLRRAQNEFDLKVKKVRSDNGSEFKNLQVEEYLEEEGIKHEFSAFYTPQQNGVVERKNMTLIDMARTMLGEFKTPERFWSEAVNTACHATNRLYLHRLLKKTSYKLLTGNKPNVSYFRVFGRXYILVKKG

SEQ ID NO: 204286 - protein, 167 aa, Zea mays
  unsure (1)..(167): unsure at all Xaa locations
  Clone ID: MRT4577_117901C.1.pep
RRRPGGGRRGSWEAPAPVATEEAAEEAVELPAVDVVKAEDTATVFFFPXKMTMMGRGGGFFWXXPXGARIGCLQNYPAVVQSMALEQVNLSPRLAGAAPSPRLPIPSARPSPKIRLSPSLRYMGCPTPAGRRSSLQREQFMGLYTGPAVGLTLPRRKGKWSGSWHDT

SEQ ID NO: 204287 - protein, 131 aa, Zea mays
  unsure (1)..(131): unsure at all Xaa locations
  Clone ID: MRT4577_117902C.1.pep
PPPPSPCPPPPPHFFVHLSPPPPFPPKPPLFPLFPPXLPQXTPPLPPPHLLEFPPSPWFPPPAPGFPSNFTPVFLAWALNVYPNICSPFYPDPPILNRGPLIFPPPPWVGSRIRSXPVPPFCSPPPKFCFF

SEQ ID NO: 204288 - protein, 39 aa, Zea mays
  Clone ID: MRT4577_117903C.1.pep
FRCDKFAGRKTGCVQSSNSGLLRTLLDTTLHTHHAGAQQ

SEQ ID NO: 204289 - protein, 70 aa, Zea mays
  Clone ID: MRT4577_117904C.1.pep
KKKRAPAFPFNIPKNKVKILKFNWAQAPRQCNGARGTQSFPTGWDWGPLFGVLKSDQGFLGVKWAPPTSK

SEQ ID NO: 204290 - protein, 117 aa, Zea mays
  unsure (1)..(117): unsure at all Xaa locations
  Clone ID: MRT4577_117905C.1.pep
SPTSTLASSFWHQLIQRERFCLLMLAILCTVLSSASIFPLCSHASISCLLXPFPSPSXDLTLVYPILHPFXIXHALESSMFPLPPLSLHQPDALLPLFPLGHLGAHILMAHHLHNLV

SEQ ID NO: 204291 - protein, 101 aa, Zea mays
  Clone ID: MRT4577_117906C.1.pep
ENLKDASSFLAEWQNITKGFSEDRLLIAGTNSSDLQQILSLLESNKDLLLTSSYLSDSGSTGEHTKSLVTQYLNATGNRWCSWSLSQARLLTSFLPAQLLR

SEQ ID NO: 204292 - protein, 72 aa, Zea mays
  Clone ID: MRT4577_117907C.1.pep
FWGKMAILRNGGPEGPFISDLSGGLFSGQIKEGTPFRFVGLGKNIPLFRVEEKLGYSPVFSGAKFRGPVEAF

SEQ ID NO: 204293 - protein, 143 aa, Zea mays
  unsure (1)..(143): unsure at all Xaa locations
  Clone ID: MRT4577_117908C.1.pep
CVIVTLVHAYSNSRFLPFFQLGSVNCGSYVHLLHLPFSHVSVXYRQQFLPFTQLASTELSCLFQSXLIEPVKQLAGVSPAIFCXTDRMLLPFFQQVVSNLGTXIXVQHKLSLIHLSLANPAVLYHHPIFDGVPLFDLISVIVR

SEQ ID NO: 204294 - protein, 61 aa, Zea mays
  Clone ID: MRT4577_117909C.1.pep
LLSCISIRREIHMYNVAESYCYISIEAIAIGLSPCQFGSHKDLGPLLLLLVLNLSTLNEIP

SEQ ID NO: 204295 - protein, 433 aa, Zea mays
  unsure (1)..(433): unsure at all Xaa locations
  Clone ID: MRT4577_11790C.1.pep
MASAASGGGGSLKRMGPLRVQYYIVMGAVAAAVVLATLRYMPGPAVPATTARTSGGGVVRSAPAAAAVPVPVPAVEVETGEXSRRRGGGGGGRRXDGVVLFNFGDSNSDTGGVAAVMGIRIAPPEGRAYFHHPTGRLSDGRVILDFICESLGMPHLSPFMKPLGSNFSNGVNFAIAGSTAMPGVTTFSLDVQVDQFVFFKERCLDSIERGESAPIVEKAFPDAIYTMDIGHNDINGVLHLPYHTMLENLPPVIAEIKKAIERLHENGARKFWIHGTGALGCMPQKLSMPRDDDSDLDEHGCIASINNVCKKFNSLLSEALDELRLTLKSSTIVFVDMFAIKYDLVANHTKYGIEKPLMTCCGHGGPPYNYDPKESCMTSDKYLCKLGEKFISWDGVHFTDAANGIVASKVLSGEYNIPRVKLASLVPVPKSDD

SEQ ID NO: 204296 - protein, 52 aa, Zea mays
  Clone ID: MRT4577_117910C.1.pep
YIVLHLHTNEGLILRDVGATSFYQNFYTFVNGFIVATECCNRFSILLCSQGC

SEQ ID NO: 204297 - protein, 43 aa, Zea mays
  Clone ID: MRT4577_117911C.1.pep
GNKNQIITVLKTLMKHKRRNSACGVSRINKKINKLTLRRSKGA

SEQ ID NO: 204298 - protein, 56 aa, Zea mays
  Clone ID: MRT4577_117912C.1.pep
APRPPNVRGRVRPQTYAPLGLAPADLPGYDDRRGNTRSCLRRSAARAFFFFFPLTP

SEQ ID NO: 204299 - protein, 187 aa, Zea mays
  unsure (1)..(187): unsure at all Xaa locations
  Clone ID: MRT4577_117913C.1.pep
GIAPPRPASRPSFLPAVTTPCNCARVGWWCHGEHGVEGRRLWPACTFLFRYSGSILMGFSSIDRVSVLHAMQRGLRFFLFFLPAVRVGMLVWSMLFLGYRGRDGMLRPLFSFDLCDPSGNRFHAGLVAMCXEVFSCPVFSSLAGWILPRKVLPLMHLSPPQDIFIRRFRGSLWVLACLXSLVWLKGQ

SEQ ID NO: 204300 - protein, 83 aa, Zea mays
  unsure (1)..(83): unsure at all Xaa locations
  Clone ID: MRT4577_117914C.1.pep
MNPLCCIAPVSLEHAADQLHEHPQRILAGAPPVTPVPKQDVVVGVLHKWVNYGKGWWSRWFVLXDGVLCYYKVWGFGAGGVDL

SEQ ID NO: 204301 - protein, 285 aa, Zea mays
  Clone ID: MRT4577_117915C.1.pep
MANQPENGFEPVQLAMGQKYTMVLADNVDGGDDLDLIVTTMNGNVFSFSTPSPHHPLKEWRSSNQGRNNAAYRYNREGFYVKHDSRTFRDEEGKHFWVEFEIVDKYRLPYGNQAPYNVTVTLLVPGNYQGDRRIVVSEIYHQPGKQRMKLPTIRVRTTGTVLVEMVEKNGFYLSEKVRFHYGHPDVFDRIFHITRGGISKASCGINLSDDILAEPDQDDMNVRTSNTSYRLLKSFYRKRVNSLRVLRTKEIRRRFSSINYEGKKQERRPLFKHMPVTTRIVKKAI

SEQ ID NO: 204302 - protein, 163 aa, Zea mays
  unsure (1)..(163): unsure at all Xaa locations
  Clone ID: MRT4577_117916C.1.pep
CSSTIATGHAIDADGPTPDAAAAIAEMCXKTHRIRERTDAPDAADKNTAAIGTPXTLDPPALVTLMIFEASLGTVEFNVADNISPKTFLVFIAHATLPDWVSVMTIKTVEGAPPKMEKNVRMQITDIPGVLKLTPKPDYCPCVKISTDASIKQXMIPPTRSLT

SEQ ID NO: 204303 - protein, 118 aa, Zea mays
  Clone ID: MRT4577_117917C.1.pep
PWEGKNWSKHCQRSETPRSAANYCQKSIGLGFKTPREAIEGTYIDKKCPFTGTVAIRGRILAGTCHSAEMVRTIIARRNYLHYIKKYARFEKWHSSIPAHISPCFRVKEGDHVIIGQC

SEQ ID NO: 204304 - protein, 85 aa, Zea mays
  Clone ID: MRT4577_117918C.1.pep
YAEVMRLVKGMNFSEVVFDTAPTGHTLRLLNFPTIVERGLGRLMQIKNQISPFISQMCNMLGLGDMNADQLASKLEETLPVIRSV

SEQ ID NO: 204305 - protein, 69 aa, Zea mays
  Clone ID: MRT4577_117919C.1.pep
MPQRECNVRASWWRNRSQNGSYYMMLQFRSPVDKGLCSPLLLHPSGVCIPPSWTWLQCAKRRRTRSRAE

SEQ ID NO: 204306 - protein, 83 aa, Zea mays
  Clone ID: MRT4577_11791C.1.pep
FRQRPSKHISGLSVLSTVFRFSTCNPFNYSMQGSCPNIMLALAESVIASSCVTVMVIPITMAMLCTSRSSKIKLQRCNAPRAE

SEQ ID NO: 204307 - protein, 75 aa, Zea mays
  Clone ID: MRT4577_117920C.1.pep
PIYTAVSAILAITRHNFPCPIICYHIIVCSRWKMILDCDCSCVQSVAASHFWYFSLFHQRIFICLRVPSYHFDFT

SEQ ID NO: 204308 - protein, 100 aa, Zea mays
  Clone ID: MRT4577_117921C.1.pep
HGLSAAAGKRKNNGWSCKMCRPVQRMGSQQPWQWFNLPGKRGLKGPSPPAGDTESQQIDKIKSPVLCNRDKNCYELLHRYMILYHLHSKMTCLMLFVYSK

SEQ ID NO: 204309 - protein, 170 aa, Zea mays
  unsure (1)..(170): unsure at all Xaa locations
  Clone ID: MRT4577_117922C.1.pep
RPXRITQQSARITDGWHMARRDAVTKPRAAQACRVAVLLQCPGLQARLYKKSWSSPADTDGKVAKQGLLGMVFPWPXAAPGAKLFKGGGSEQRERERGPPPALFRGKNPPAPKGAKRGEKKKKKKTPPYKEKKGGGGKLGGQRGFFSPPPRALFLPATPFYKISPPPPGG

SEQ ID NO: 204310 - protein, 94 aa, Zea mays
  unsure (1)..(94): unsure at all Xaa locations
  Clone ID: MRT4577_117923C.1.pep
GPPGAGREPSPQRRTEGAFVIPYLRASKLVRCPTGAAASPPHSVDTLRESISIHIGQAGVQVGYAGWKLYCLQHGIQADGPMAGDETIXGGGDD

SEQ ID NO: 204311 - protein, 45 aa, Zea mays
  Clone ID: MRT4577_117924C.1.pep
IYFLYRMTLHHEQFRYYPAAVDPRSYPSGVDRVSTLCKETVNYFG

SEQ ID NO: 204312 - protein, 74 aa, Zea mays
  Clone ID: MRT4577_117925C.1.pep
MATAAPVSIEGFNCTANRTYPCQAYALYRAGFAGVPLDLAPHRCTCSSSAVSWSSTPTTYPRRPSWPSDTSPRA

SEQ ID NO: 204313 - protein, 87 aa, Zea mays
  Clone ID: MRT4577_117926C.1.pep
ALDQVLRPVSSLSSHSGLQRGASPRQQPMSGAAALTPICSSAAQTQDSLYALYLPYSVLLVDCLCGGDHRKLRKQSFSPFCGTPARP

SEQ ID NO: 204314 - protein, 144 aa, Zea mays
  Clone ID: MRT4577_117927C.1.pep
SARAESMRLYPPVPVNSLLAETDDVLPDGTAVRAGWFVAYNSYGMGRMESVWGDDAREYRPERWLNPSDGMFRPDSPFRFVAFHAGPRLCLGKEMAYIQMKSIVACVLEELDVAVDGAYRPRQVASLTLRMADGLPVTVKQRRD

SEQ ID NO: 204315 - protein, 35 aa, Zea mays
  Clone ID: MRT4577_117928C.1.pep
PFMPYLFLTQTLIGHTKVPKIGPLAVRLFPKLHET

SEQ ID NO: 204316 - protein, 64 aa, Zea mays
  unsure (1)..(64): unsure at all Xaa locations
  Clone ID: MRT4577_117929C.1.pep
SRVSWRLFSWQPPAWCCRGGQHNKXPPVTELLAQRQPLPGDRPRPQPWTPSASTSSAFFILPPP

SEQ ID NO: 204317 - protein, 164 aa, Zea mays
  Clone ID: MRT4577_11792C.1.pep
RTLGLALATEPPNDELMKRTPVGRKGNFISNTMWRNIMGQALYQFLVIWYLQSRGKRLFWIDEGAADADLVLNTVIFNCFVFCQVFNEVNSREMERVNVFRGILDNNVFVMVLGSTVVFQFVIVQCLGSFANTTPLSLAQWVACVAIGFVGMPIAVAVKMVPVE

SEQ ID NO: 204318 - protein, 184 aa, Zea mays
  unsure (1)..(184): unsure at all Xaa locations
  Clone ID: MRT4577_117930C.1.pep
MEDPVAAPSSSSAAPAASAAARISAAAAXHLPLPLXPALAPLQPSGTAAAVPEAASTCRRQLFTVELRPGESTIVSWKKLLKEAGHTATAPPVAPEPTFAAHAGPSGAAHPAENDPKDPMQPNRFNAVIEKIECLYMEKHSSDEQDLNDVPDEDQYDTEDSFIDDAELDGAKKSTRLSHAKAQV

SEQ ID NO: 204319 - protein, 76 aa, Zea mays
  Clone ID: MRT4577_117931C.1.pep
CLLIQKIIIKLLTEKTPSNYQALFNQISSNQYVHLSMLPTLVFKNTGDFKFSFHGENGTALFRVKSVLSRGLSYQY

SEQ ID NO: 204320 - protein, 86 aa, Zea mays
  Clone ID: MRT4577_117932C.1.pep
GNDQGMSVNHPFIRATHLIDITILLMFTANNYQMKICAGNQTCCHRAVLEHYSADMVKQKHITTSSSFISVVNTASSMGQVPPPHG

SEQ ID NO: 204321 - protein, 113 aa, Zea mays
  unsure (1)..(113): unsure at all Xaa locations
  Clone ID: MRT4577_117933C.1.pep
LVSLIDCMIMCXXXXXXXXXLVLTICGYQKXXPKYLTDLFSSGQELRVYTSYNXXXHEQYAVHXXXXXXXXXPLDPCNXXQIVYMLCSLNMEILKYLRISYVLDKYLGYLLFY

SEQ ID NO: 204322 - protein, 74 aa, Zea mays
  Clone ID: MRT4577_117934C.1.pep
ARIEDIFSCHGAVVQSAIYRFGGDTKRSDIFVVVVGEFQAPRQVDTTRGSENVLLRLRPGGILVPCHSREAIVF

SEQ ID NO: 204323 - protein, 250 aa, Zea mays
  Clone ID: MRT4577_117935C.1.pep
MGVQEDSRPSGALGGLYRVQFVGRSIYSDDEAVKTSIMDSSTCEPQEDNGSGRRLLIWRLWQQRPPCLKPIHCSLSCDKHVGETIANVVTSLPFIVLGLQTPRKNLNTTLYANSLIGVGIASSLYHTSRGDIRKYLRWADYTMIATSTLCLSRALRDENPKFLMAASTLLLPFQPLMVSAVHTGIMEVSFAKRASIDPELKTAHNLHKISSLLGGALFVADDVFPQTSYLHAAWHLAAALGVGTCNKLLE

SEQ ID NO: 204324 - protein, 109 aa, Zea mays
  Clone ID: MRT4577_117936C.1.pep
FVQAIVLCLFKFFGSKFIGPILTSERFRGRPGRVSQKDIVFLLILLCYNYFSSTVFYPTNCVANFNLHYIYLNSIVQCHSFAGSHMAYYLHAFLESFSYFGNLYYRNHN

SEQ ID NO: 204325 - protein, 136 aa, Zea mays; identical to SEQ ID NO: 199630
  Clone ID: MRT4577_117937C.1.pep

SEQ ID NO: 204326 - protein, 60 aa, Zea mays
  unsure (1)..(60): unsure at all Xaa locations
  Clone ID: MRT4577_117938C.1.pep
LFALGLSPXFXLXRXFLPGLGCXPXRPVSLSAPCGASGFGPVGFVSLPAVRGGCLSPPPR

SEQ ID NO: 204327 - protein, 57 aa, Zea mays
  Clone ID: MRT4577_117939C.1.pep
LLGMFGGLLRQDSGADGSRVPDPWDRERLGSRRDDTRRASQGRRRWRSNGGEFGSCW

SEQ ID NO: 204328 - protein, 110 aa, Zea mays
  Clone ID: MRT4577_11793C.1.pep
DHLDLLNASLLVIATSIYYQVLGTDGLNVYLNKYRIELDPQLEALVGRHSRKPWTKFINADNQHLVSHEAIDFLDKLLRYDHQDRLTAREAMTHPYFQQVRAAENSRTRA

SEQ ID NO: 204329 - protein, 154 aa, Zea mays
  Clone ID: MRT4577_117940C.1.pep
PRPSRFCVGGRVGGRVRSKRTIRSKSPRNSQEKPLSSSRLVEIDVGDMLGGHVDDMEADWTKPIVSISLGCKCIFLLGGKTRDEVPTAMFLRSGDIVLMAGEARERFHGVPRIFTESDQQEIPALISQLSSGDDVFILEYIKNSRININIRQVY

SEQ ID NO: 204330 - protein, 33 aa, Zea mays
  Clone ID: MRT4577_117941C.1.pep
CHHHSHANLPTYNNHTKYYITLILTIPSFTSCT

SEQ ID NO: 204331 - protein, 105 aa, Zea mays
  Clone ID: MRT4577_117942C.1.pep
LMVSIPKNKNKNKRFKTDVLFYSYTKYFLVLSVHQQGPYAYSEDKIPIIPPPYVVADLLYTFHGLATSSLGRHIYFFTQRRPSDSLGVGNSHLPLKGLGHVIQFI

SEQ ID NO: 204332 - protein, 46 aa, Zea mays
  Clone ID: MRT4577_117943C.1.pep
GSILASLSTFQQIWSSSTSLSSQAPPFSTANASRWTEQVPGICCIS

SEQ ID NO: 204333 - protein, 115 aa, Zea mays
  Clone ID: MRT4577_117944C.1.pep
RGLKTLNQIKKAPHLGAFGGNKYNFEPNKVTRPAFFSDFLNSGCQHRTKGGGPILNFEKQKDFHKKNKCLQHQSWSAKKKIFCPKKGQLGSAEDPHPKRHTLLNGKRPKVPTKPF

SEQ ID NO: 204334 - protein, 112 aa, Zea mays
  Clone ID: MRT4577_117945C.1.pep
MDAIRSDDIEKQDEVMLPGFRFHPTDEELVRFYLKRKIQQKSLPIELIRQLDIYKYDPWDLPKLASTGEKEWYFYCPRDRKYRNSTRPNRVTGAGFWKATGTDRPIYSSDGS

SEQ ID NO: 204335 - protein, 130 aa, Zea mays
  Clone ID: MRT4577_117946C.1.pep
QWIVVSTVGYLQPVHQGILQQPPARASTAWLWQRKSVLKSCAIFLTNVWKGSFRISSSVFSLIRCGCTRMGISWQDGSGEPSSSPRSGGGRLAGSIGGNLLDGSLTYRGLASNGKGTSHLCRLLGLSARG

SEQ ID NO: 204336 - protein, 101 aa, Zea mays
  Clone ID: MRT4577_117947C.1.pep
MRAVVQRVLSASVEVEGRIVSAIGPGLLVLVGVHEADTDSDANYMYNTLLLSFASHFLQLLVYTASHRLNYCLFRYDYIFIAHQNLQWGCVHRISVSSVLC

SEQ ID NO: 204337 - protein, 113 aa, Zea mays
  Clone ID: MRT4577_117948C.1.pep
TFSEMSAGGAFGGNRGLRPVPPEKGVFPLDHLHECDLEKKDYLACLKSTGFQSEKCRQFSKKYLECRMERNLMAKQDMSELGFRNVDKAYTSPDTNSQLESPRNEQKENKIAV

SEQ ID NO: 204338 - protein, 73 aa, Zea mays
  Clone ID: MRT4577_117949C.1.pep
VAPPRGSGVSPHVPAGPGPETLPAPVPIGPAGCDPWWRGPSHLARCAPSLRGQMKGQASIRTILDARRQIPFC

SEQ ID NO: 204339 - protein, 74 aa, Zea mays
  Clone ID: MRT4577_11794C.1.pep
IHSCTTDIKNMYSSSHLAYEKLTRSYMYSTTQLINKQTCTAVYPIPSTARGGLYNIFSLTNAKVTIQMRHRTTR

SEQ ID NO: 204340 - protein, 76 aa, Zea mays
  Clone ID: MRT4577_117950C.1.pep
LMLPFEIKRKSSFNLVCQTSYLLNWAHCSSVFSNIAVDKDWLAGDKDVAVARVRRRQPRQRLPATCQSLPEVAGPG

SEQ ID NO: 204341 - protein, 62 aa, Zea mays
  Clone ID: MRT4577_117951C.1.pep
KKKKIVDFIKKPVEKNTFPNTLHTFQKPLQSISLHKHPYFNTQHTTIYAPTYHTSSTYFFPT

SEQ ID NO: 204342 - protein, 51 aa, Zea mays
  Clone ID: MRT4577_117952C.1.pep
LNPTYMVIEQRRLGHTTFCKSLVDDEFHFQSLGGIQACFQVWGAAKLLIII

SEQ ID NO: 204343 - protein, 93 aa, Zea mays
  unsure (1)..(93): unsure at all Xaa locations
  Clone ID: MRT4577_117953C.1.pep
FDEITTNASVHSNKYCHXRCHHIKIQRTTTXLDSHNCKGLVNILXYSPSIVQGIHGSLTKLPSIIAAXTPESQFNVCYXLTPYFMPLTYILVT

SEQ ID NO: 204344 - protein, 32 aa, Zea mays
  Clone ID: MRT4577_117954C.1.pep
QQYGLNPHEVRGVLSIFPETLLQQYGLNPYQY

SEQ ID NO: 204345 - protein, 72 aa, Zea mays
  Clone ID: MRT4577_117955C.1.pep
PSIILAFFEHFTLSARLSILIKTAITQIMPMTTTIDTQIPRFPKLTLPLILFLLSLHTTYTFSKRSYIIHYT

SEQ ID NO: 204346 - protein, 81 aa, Zea mays
  Clone ID: MRT4577_117956C.1.pep
FLLFLNLHVGYWLHIKWVQSVWRQKNRTMGTDLQSCGKFHHSSSKTKTPQGRPGPQIVLRFLVNRGGGALGFNWQNLDNFA

SEQ ID NO: 204347 - protein, 66 aa, Zea mays
  Clone ID: MRT4577_117957C.1.pep
LFDVNLKHINYISSILLIPFYSYILYFFSLFFFTTFFFHIYHFSFHIIIHFHFTIIHPFLILITHF

SEQ ID NO: 204348 - protein, 61 aa, Zea mays
  Clone ID: MRT4577_117958C.1.pep
LLCTTGLKDFELQLRSLKSDSTFDLVCKVSSLFNHIETQDLFWYNECSKNSLCLLVGCSCP

SEQ ID NO: 204349 - protein, 133 aa, Zea mays
  Clone ID: MRT4577_117959C.1.pep
PGWFGGFFPNPIFFGGGGKNQEPKHLGVLAGENQAPPTPPGGKIEKRIMGRALAAVTFLKKKFPLGGWGFPQNFKKNVLFKSYPLTGGETPFGPPWDCKKRFPGPCFLPGGSFWARGGGPSLFGFFGGEPEKS

SEQ ID NO: 204350 - protein, 360 aa, Zea mays
  Clone ID: MRT4577_11795C.1.pep
HWRPRCGPGPAGPAHRDASASAFFAAAGNDVFGTRGVVGAHIGSCGEIDSNFAQPEWFSGLFDDASIPHEPVFPGATAGGAPPIMTSFALAAGALVLPDEMEDPLLFHSSASISVLLHGSSRSAGASATLPSFSSSSSSIASSESFFGSGSGRERGRSGTAQAGASPAPEWLLHFRGRGLHDRSRASASTSAAAGAGGSREDILVPTPMYSSGSAHSDPESIAESSPHPAPPMKKKKKAKKPAPPAPAASSDDNDGDADYEEGGELAEPQGGAVRRCTHCQIEKTPQWRAGPLGPKTLCNACGVRYKSGRLFPEYRPAASPTFVPSIHSNSHKRVVEMRQKAVRSGDPSCDLLHFIRRRD

SEQ ID NO: 204351 - protein, 84 aa, Zea mays
  Clone ID: MRT4577_117960C.1.pep
RARLVAGNSWTYKELQNVIERFQTTVDTWPYRKPVDNRALALRSRKENMSSILIEPLVVWKHHFRCLLSSDQHAATLHLTIHTY

SEQ ID NO: 204352 - protein, 102 aa, Zea mays
  unsure (1)..(102): unsure at all Xaa locations
  Clone ID: MRT4577_117961C.1.pep
GFVGLGAQKTPPGLGFFGFGRVGPFSRVFKRVWALRFGAFFRALPFLVNGPLRSLGLGAPPFLGCFLGGVVGSLRGVFPPPPPCFADLFXGAGGGGPFVPGA

SEQ ID NO: 204353 - protein, 52 aa, Zea mays
  Clone ID: MRT4577_117962C.1.pep
VRRMICEQRYVHATRATQRVESCTRSTADEHGPSILHWPSVLITHAVAKHGK

SEQ ID NO: 204354 - protein, 48 aa, Zea mays
  Clone ID: MRT4577_117963C.1.pep
VDKQLGANFFLLTLCQFLGSPFIICWSTLSWRCITSGLPKQHCELSGT

SEQ ID NO: 204355 - protein, 114 aa, Zea mays
  Clone ID: MRT4577_117964C.1.pep
MPLEAAMAKLTMPRATPGATRVSCGRHICCRSLPHLTQPPSPPRLGCAATARPLRERSHHLPVCLGSDAITRSKGSAAAAFPPTSGASSSIAHLGAPPPLAPGIATTRTPEGAI

SEQ ID NO: 204356 - protein, 85 aa, Zea mays
  unsure (1)..(85): unsure at all Xaa locations
  Clone ID: MRT4577_117965C.1.pep
RGLTNHSAXSLDGTHDHLAHVGVCRYLLKVAASLELNCTHCHWLPWAYSFKPSDRCRFELQSATAAVRIEIWLKLLKLAKVMYGF

SEQ ID NO: 204357 - protein, 80 aa, Zea mays
  Clone ID: MRT4577_117966C.1.pep
ELVAVEGRRVLVSGRGTVQGRASVRLEGEAGGGTRCCAEAAGRPAGVRSRGAPRSTPCQPCRPATRCTTLPAKALLGLSF

SEQ ID NO: 204358 - protein, 86 aa, Zea mays
  Clone ID: MRT4577_117967C.1.pep
MSSGRRGRISDDEINELISKLQALLPESSRRRNASRSSASKLLKETCAYIKSLHREVDDLSERLSGLMSTMDNDSPQAEIIRSLLR

SEQ ID NO: 204359 - protein, 281 aa, Zea mays
  Clone ID: MRT4577_117968C.1.pep
MAQELHETSSCSATTTSSCTTSCCSSTVTDSSSSPPSPAAANAAPATRKRQALEAEAEAEAGGEEEEEEEEGCAGNKAAPAKKRPRGSEGKHPTFRGVRMRAWGKWVSEIREPRKKSRIWLGTFPTAEMAARAHDVAALAIKGRAAHLNFPDLAGALPRAASAAPKDVQAAAALAAAFTSPSSEPGAGAHEEPAAKDGAAPEEAAADAQAPVPVALPPPAASRPGTPSSGVEDERQLFDLPDLLLDIRDGFGRFPPMWAPLTDVEEVVNAELRLEEPLLWE

SEQ ID NO: 204360 - protein, 74 aa, Zea mays
  unsure (1)..(74): unsure at all Xaa locations
  Clone ID: MRT4577_117969C.1.pep
HTPASHRDTGDLCTLLSCELQCLRCLVHGGHTHTPXRHRSTEPMDGEKKQELSEETKKERGKRRRKKKKRVERG

SEQ ID NO: 204361 - protein, 167 aa, Zea mays
  Clone ID: MRT4577_11796C.1.pep
MEEKESLSRKWAPQHDPVLVIENSGLQDAGISQIMPSDELPQVSGETEPSQSTNEGNTDPYKSQFTILEEHYAVSEEGNIKCILEQFDVTEITSRSGGEFRQRSASAADSHTNALVLENTHHGASEDAEQKDNCGDIRVSQVGAGSKRVVKLKIILRKLNPLVTWEN

SEQ ID NO: 204362 - protein, 142 aa, Zea mays
  Clone ID: MRT4577_117970C.1.pep
SSVSRSLILTFGFGRPFFKKSWSADSLHIFSAIHFADSPQRSSSVCKNSGRASPRTWGAEKENDRRDAAPAASARTHKVRSSGGGGGGAKSFMAPTISASSKAVAPAFTPRKKVLGERNNDAVPSSPVDLAHSSKPRAAHPL

SEQ ID NO: 204363 - protein, 132 aa, Zea mays
  Clone ID: MRT4577_117971C.1.pep
IFLKRENNEAPLAESQTTEASFHAPQTNNRGGPPCWSGKKTGPLSWPLQKIDGGKPPRGATLKTHWGSRPSPGQETGNPRFGPPFFKPPGGPRLLALITGLPPGSYPLITFTLCHGRARALKNITSIVFFIT

SEQ ID NO: 204364 - protein, 94 aa, Zea mays
  Clone ID: MRT4577_117972C.1.pep
FSFSGVVVTCVACFGWQPSGCHRVPSPSPPCFPAIHCAGSRLTKARWGNGSSHPCSGRSPATARGKRMHQPKREERPRPRGKLPHGGLILPVLL

SEQ ID NO: 204365 - protein, 227 aa, Zea mays
  unsure (1)..(227): unsure at all Xaa locations
  Clone ID: MRT4577_117973C.1.pep
MILDVLSLMGAYGAGTFRDKSSTVYFAVLVATVFLYIVVVKLLXVVRQALRLIRLRRFVPERXALKELKEKDQERLRKILMLLATFAASITYVAGLNAPGGFWDSTGGSHRPGDAILNDHHNLRMRVFLHCNTTAFVASLLITMLLIVDSKKLPARSFVLYVCIVVALVGLVGAYAAGSCRDTGTTAIVVSLAGVVLALACILLRTLPSESLSCWSCRTRKLMQLST

SEQ ID NO: 204366 - protein, 67 aa, Zea mays
  Clone ID: MRT4577_117974C.1.pep
RPPDPLHPRLRPGPRTDAPALSRGALGGPQGDLTGHLWGRNRPPLWSAQRCSQPRCLVHGQVRGCRI

SEQ ID NO: 204367 - protein, 378 aa, Zea mays
  unsure (1)..(378): unsure at all Xaa locations
  Clone ID: MRT4577_117975C.1.pep
MVFPSPSVQVYLDPHPPNWNNQQQQGQQPRANGGADAPLLPLGPAAATSAAPEQGGLPRSSSMANAAVAAHARPNSMAERARLARMPHPEPALKCPRCESTNTKFCYYNNYSLSQPRHFCKTCRRYWTRGGSLRNVPVGGGCRRNKRSSKSSSAGSSSSKXMSPSGRLLGGPSATPSTTPGTTGAIITPGLSSFSHHLPFLGSMHPSGPNLGLAFSAGLPLVGMQHLDTVDQFPVASGGGTTIGASLEQWRVRQQQQQFPFMTRGILDLSQPSTYQLGLEASRGGSGSDAVAFTLGQSTTSAATITARQEGSAMKMGDDSKGQDASLQKQYTAPLRHGSGSHXLGWECWWHWQQRWWYWQWRFKLANEHDSWIPFFVH

SEQ ID NO: 204368 - protein, 43 aa, Zea mays
  Clone ID: MRT4577_117976C.1.pep
NVGLLKRPPHLIYFTFYFMFRIDSTISVRTPHWLTSLLSLFFV

SEQ ID NO: 204369 - protein, 51 aa, Zea mays
  Clone ID: MRT4577_117977C.1.pep
PYPPVVLTQCDYTVGRVIQKPIGVPKRGPAVTHIDNLLKNSCPAKIRRYQT

SEQ ID NO: 204370 - protein, 101 aa, Zea mays
  Clone ID: MRT4577_117978C.1.pep
TDKVACIPGMQHGLAACHKYFTWHQVHSTRWNSHGRPDGGFLLKKGKNMRRFYQFKEFLDWLNFSLYALSKFFLHAFNNGCRKEILKKLMDFPKDLLYQLF

SEQ ID NO: 204371 - protein, 401 aa, Zea mays
  Clone ID: MRT4577_117979C.1.pep
MPPPPTAVSSCWRGTRRHRAKNLHPHPAAVSVKQPGSGVRFQQFSSLASAAAPALRVLRYQPASTLYESPSSTPPRQLQAMAMEKAASFLSSLLGGGGGEPAATVKSIFIYPIKSCRGLAVSQAPITSTGFRWDRQWVVVNAKGRAYTQRVEPKLALVQVELPPEAFAENWQPTPDDHLVIRAPGMDTLKIPLVTEHATIDDVSVWEWSGSAYDEGAEASEWFSTYFGKPSRLVRFKEASETRPTDPDYAQGYKIMFTDCFPFLIASQGSLDALNEILKEPVPMNRFRPNILVDGCHPYSEDLWKTIKINNLTFLGVKLCNRCKVPTINQEDGVPGTEPTETLQTFRSDQVLRPSHKNKRQVYFGQNLVCKESLSGEGKVIKVGDPVYVVQAFASSNEAPA

SEQ ID NO: 204372 - protein, 48 aa, Zea mays
  Clone ID: MRT4577_11797C.1.pep
MMFQPCSHAFRDVAKGTHTGFHLLVPYQLGYQLVVDLQQLDGCFVRLP

SEQ ID NO: 204373 - protein, 144 aa, Zea mays
  Clone ID: MRT4577_117980C.1.pep
EFASSSCGCQCQAARLRGFRWDRQWVVVNAKGRAYTQRVEPKLALVQVELPPEAFAENWQPTPDYHLVITAPGMDTLKIPIITEHTTIDDVSVWEWSGSAYDEGAEASEWFFTYFGKPSRLVRFKEAFETRPTDPDYAQGYQIM

SEQ ID NO: 204374 - protein, 149 aa, Zea mays
  unsure (1)..(149): unsure at all Xaa locations
  Clone ID: MRT4577_117981C.1.pep
VVAPXPPGFVRSPPAVVPGPPEFAPEPPGPPAVPSPGGGFLPPVVFPPPFATPLPGGTTGSEWCVAKPSVPGAIVQQAMDYACGSGADCDSILPSHPCFRPDTMLAHASYAFNSYWQRTKANGATCDFGGTAMLITKDPSYDGCHYILM

SEQ ID NO: 204375 - protein, 166 aa, Zea mays
  Clone ID: MRT4577_117982C.1.pep
MAMEKAASFLSSLLGGGGGEPAVTVKSIFIYPIKSCRGLAVSQAPITSTGFRWDRQWVVVNAKGRAYTQRVEPKLALVQVELPPEAFAENWQPTPDDHLVIRAPGMDTLKIPLATEHATIDDVSVWEWSGSAYDEGAEASEWFSTYFGKPSRLVRFKEASETRPTD

SEQ ID NO: 204376 - protein, 62 aa, Zea mays
  Clone ID: MRT4577_117983C.1.pep
YQVAMRIHTFSLKKKHIRFPGHTPSRKKKMASTFHPFQTDYGTRSTNNYTSNDSNYKRVFLF

SEQ ID NO: 204377 - protein, 72 aa, Zea mays
  Clone ID: MRT4577_117984C.1.pep
SSSSAVDIKKAYRKAALRQHGDKASGFLVRSENISDAVWRDITNEIRRDADYLFKIIGKAYAMLSDPTTRRE

SEQ ID NO: 204378 - protein, 239 aa, Zea mays
  Clone ID: MRT4577_117986C.1.pep
SSSRLHASFRASTRAAPLPHLFFKNSTQDKTEKMSSMSCYTLAEGGSIFPSGDELAGNQKTEQGNYWTQWNSRLSDDLNTTSLYSDEHENGIEQCFDDAEEHERSSQQERSSACPRVASSDCSTGPSEEHSEGPAPLELQHSKETNDIFLSQFSDDEMRMMDAPFQALDMFPGSMHRLLSYENMLSGVLTDSQNQETNPGHNEMDTMDTCGFPLFSHDLQNDPSSADGSLQTLLSASQD

SEQ ID NO: 204379 - protein, 145 aa, Zea mays
  unsure (1)..(145): unsure at all Xaa locations
  Clone ID: MRT4577_117987C.1.pep
QSLASDPRAKQSASVSSVPMARTKHTAMKSTGGKAPRKQLATKAARKSAPATDXVKKPHRFRPGTVSLREIRKYQKSTELLIRKLPFQHLVREIAHDSKTDLRFQSFGVASLHDACYAYLVHLFEDTNTCAIHAKPVTIMPKDIH

SEQ ID NO: 204380 - protein, 258 aa, Zea mays
  unsure (1)..(258): unsure at all Xaa locations
  Clone ID: MRT4577_117988C.1.pep
MDPSKLGELRSFVEACKKDPALLADPALAFFRDYLTSLGATLPASAAAAGKPAPKARSMDDIDDDDDEEEEEDDQDMRDPTPEPDELDEEIVESDLELDNDGVVHPDHDDAPQKMGDSSVEVTEESRDASQEAKGQAMEAMSEGKLEEAVEHLTKAILLNPTSAIMYGTRASVFIKMKKPAAAIRDANAALEINPDSAKGYKTRGMANAMLGKXEEAARDLHAASNIDYDDEINAVXQKVEPNAXQIVEHRRKYDRAE

SEQ ID NO: 204381 - protein, 86 aa, Zea mays
  Clone ID: MRT4577_117989C.1.pep
EEAMQSASKGKVQTIRQGYLSKRSSNLRGDWKRRFFVLDSRGMLYYYRKQNSRPSSGYSNQRTSIPSEHGSGLLSRWFSSHYHGGV

SEQ ID NO: 204382 - protein, 95 aa, Zea mays
  unsure (1)..(95): unsure at all Xaa locations
  Clone ID: MRT4577_11798C.1.pep
AIEADDAPTPDLEQPMHSMTALKLGIKKTXADDGLGKGTREAVTAIDNHAAYLCPHVKDXDQPYYVKLLKDRCAEHKAYLGTDAADKTIRQRCGL

SEQ ID NO: 204383 - protein, 77 aa, Zea mays
  Clone ID: MRT4577_117990C.1.pep
IQKHTGSAHVFVLVSLNVYLAGQSRDTVRTYIVMWCSTVHVTVLLLVYIMSSCCQIVHRQSQVFFNSAFALISISAT

SEQ ID NO: 204384 - protein, 56 aa, Zea mays
  Clone ID: MRT4577_117991C.1.pep
LSSTPAAECLRGYLLFAGRSIISVFAPTTYPTASTQCSPGGFRLFGIPSVGVANAV

SEQ ID NO: 204385 - protein, 102 aa, Zea mays
  unsure (1)..(102): unsure at all Xaa locations
  Clone ID: MRT4577_117992C.1.pep
GYMSIRRXMEINPENAIMDELRKRADADKNDKSVKDLVMLLFETSLLTSGFSLEDPNTFGTRIHRMLKLGLSIDEDDEAPENDTDMPPLEDDAGESKMEEVD

SEQ ID NO: 204386 - protein, 84 aa, Zea mays
  Clone ID: MRT4577_117993C.1.pep
NNPYKMCDDEVQALVIDNGSGMCKAGFAGDDAPRAVFPSIVGRPRHTGVMVGMGQKDSYVGDEAQSKRGILTLKYPIEHGIVTN

SEQ ID NO: 204387 - protein, 66 aa, Zea mays
  Clone ID: MRT4577_117994C.1.pep
WPALFYFFFFFFHFFFFYFFFFFAPEVVNLMIVVNMDVQESLHESTHEESHNGFQHVDVSGSPPGM

SEQ ID NO: 204388 - protein, 87 aa, Zea mays
  unsure (1)..(87): unsure at all Xaa locations
  Clone ID: MRT4577_117995C.1.pep
KKKRKNKKKEKKKKKKKKKKKKKKKKKKKKKKKNNIKKKKLKYNKNTKKXKKKNRXLYSIHWFESLHIFKTVENPSGYPKLISLDHI

SEQ ID NO: 204389 - protein, 56 aa, Zea mays
  Clone ID: MRT4577_117996C.1.pep
FLKYMSVRFPPRCAVLSLGWQGPVCACRYSLYSAHSIIVCCIWVTVHAVLPWIVSL

SEQ ID NO: 204390 - protein, 65 aa, Zea mays
  unsure (1)..(65): unsure at all Xaa locations
  Clone ID: MRT4577_117997C.1.pep
RGRGRNPSRXRRDHGRGHPKKGIXGLRVLHEAWDCGGQDGXXIRKGPEEQPSGGASGKKVICFMR

SEQ ID NO: 204391 - protein, 201 aa, Zea mays
  unsure (1)..(201): unsure at all Xaa locations
  Clone ID: MRT4577_117998C.1.pep
TRCVVYCVSFFPLLLHVHTVLLLVQVSKGQYHCDGCGICRSTPPRRFPVHTVRLAVQVSKGQYHCDGCGLCSTSGVENFFHCDKCGWCYSNVLKDSHHCVERAXSILQCGHTILECMKRAHHHFSCPVCSRSACDMSATWRKLDEEVAATPMPDIYQKHMVWILCNDCSATSSVRFHVLGHKCPACSSYNTRETRAACPRI

SEQ ID NO: 204392 - protein, 67 aa, Zea mays
  Clone ID: MRT4577_117999C.1.pep
KVIQTCHNHCIANAEKVPVFRCDSQAVPWTNDSQCMHQHLSTRCNISVHQGEANARTTSFNAAVTRV

SEQ ID NO: 204393 - protein, 53 aa, Zea mays
  Clone ID: MRT4577_11799C.1.pep
TSVAPYHGLNCIFNLSSPGLLQILSTSSNPNGFPACRYVRPTPTRNSRLSHTY

SEQ ID NO: 204394 - protein, 140 aa, Zea mays
  Clone ID: MRT4577_1179C.1.pep
KKKKKKKKKKKKKKKKKGPWDPARKKKGAYPGVREKNMESPGTGEFKGGPGTPFPLKGGVLPHFTGRGFKKRGLGEPGFNPPKWEKTGPPLFQIGVKKKRPLTDGPYQKMARLNGHWKWEGPLNWGKVNVKMLVKLQKFF

SEQ ID NO: 204395 - protein, 97 aa, Zea mays
  Clone ID: MRT4577_117C.1.pep
THCKKKLPPPRLPPPCLPHHPAPLIPPTARRLPPRFRQPPTLPLAPMRFLPPIRCRAPPPPCLRPRNRFSLRDGPSSNVRQKSARLGLAEAHPHAAL

SEQ ID NO: 204396 - protein, 56 aa, Zea mays
  Clone ID: MRT4577_118000C.1.pep
FLLQCRMPVGSTVNRRLSTPSMASFKRSALSGSEGWPLCCWFLFQALLHQRCGGVG

SEQ ID NO: 204397 - protein, 211 aa, Zea mays
  Clone ID: MRT4577_118001C.1.pep
DGFGGGAARVSCSLCSKEQDVQQNCSSCGACMGKYFCKVCKFFDDDVSKGQYHCDGCGICRTGGVENFFHCDKCGCCYSNVLKDSHHCVERAMHHNCPVCFEYLFDSTKDISVLQCGHTIHLECMNEMRAHHHFSCPVCSRSACDMSATWRKLDEEVAATPMPDIYQKHMVWILCNDCSATSSVRFHVLGHKCPACSSYNTRETRAACPRI

SEQ ID NO: 204398 - protein, 219 aa, Zea mays
  unsure (1)..(219): unsure at all Xaa locations
  Clone ID: MRT4577_118002C.1.pep
MQQRFHSRPYCPCCRPTGCCYSNVLKDSHHCVERAMHHNCPVCFEXEISVSTFQSLDLNVPISXLEKVSLCFFFQYLFDSTKDISVLQCGHTIHLECMNEMRAHHXKHIPSSFGAEKRXPDMTASSFSRSDLSVGPVWSFXFSCPVCSRSACDMSATWRKLDEEVAATPMPDIYQKHMVWILCNDCSATSSVRFHVLGHKCPACSSYNTRETRAVCPRI

SEQ ID NO: 204399 - protein, 149 aa, Zea mays
  Clone ID: MRT4577_118003C.1.pep
MDSEAVQHGLLPLSACPPTANSCAHYSRGCSVVAPCCGQAFGCRHCHNDAKNSLEVDPRDRHEIPRHEIKKVICSLCSKEQDVSCLPKRTPTTVFSGARIFWLYYCCSANCMETAHSHRQVQQNWLQLLHGQVLLKSMQLPMMMSQRAR

SEQ ID NO: 204400 - protein, 72 aa, Zea mays
  unsure (1)..(72): unsure at all Xaa locations
  Clone ID: MRT4577_118004C.1.pep
RVNPWSSVYFLVFCCPCVFGILVSLRCGARPVSFVNCRSRLLVGETSPPVLITPPVXGAGGRRRNELVGPVI

SEQ ID NO: 204401 - protein, 322 aa, Zea mays
  unsure (1)..(322): unsure at all Xaa locations
  Clone ID: MRT4577_118005C.1.pep
MDSEAVQHGCAHYSRGCSVVAPCCGQAFGCRHCHNDAKVRWFPSFRFRFGSGSADVLKQPCPVPRQNSLEVDPRDRHEIPRHEIKKVICSLCSKEQDVSCLPKRTPTTVFQEHASFGCTTTANCMETAHSHRQVQQNCSSCGACMGKYFCKVCKFFDDDVSVLESQTMNKEXTRCVVYCVSFFPLLLHVHTVLLLVQVSKGQYHCDGCGICRTGGVENFFHCDKCGXFCADFFLLRFCNHAMQQRFHSRPYWCPCCRPTGCCYSNVLKDSHHCVERAMHHNCPVCFEVRDLRFNGTFTLNVPICRSIQFDCMNEMRALCPTS

SEQ ID NO: 204402 - protein, 111 aa, Zea mays
  Clone ID: MRT4577_118006C.1.pep
FWVGGPVPDEGLTWLLGPGYPPLVDLRAAAVTVRFCHAALPDAISSGRIDLVTLPVDVRPAPPMEQVVKFAPPASDCSTRPIYLRRKEGVLRPSSMVSRWRQSMPRSSALV

SEQ ID NO: 204403 - protein, 85 aa, Zea mays
  Clone ID: MRT4577_118007C.1.pep
FSQEKKICKKKERIVPLLVHLLLGSCCTIYTMGRKQGAIFLFMLLSLIWLNPFRFLLMKLQSLFFWRFKYGFDGSFPIPLTRVHI

SEQ ID NO: 204404 - protein, 113 aa, Zea mays
  Clone ID: MRT4577_118008C.1.pep
VFCPGRECFHLMVGYPLRRDQVPGGPVRPGLGGPCFARVSVCFFVRIEPPRVPRPRGMSCFCVRFFFRVLRPGSPVLAPVLFVGVCVCGAVPRVGHRSLFCGHMFGWAWLGSR

SEQ ID NO: 204405 - protein, 122 aa, Zea mays
  unsure (1)..(122): unsure at all Xaa locations
  Clone ID: MRT4577_118009C.1.pep
KSPKWVLSKVDRMPSKQWPNGAKNNFKYKWEPNGQIRNFLHFPSIGXQRAAGGYGAISVVSPLLITVAFDQPPPESDHAVLIGDWYTKDHEVLGRQLDAGKSLGRPAGVLINRNGCTDQEAT

SEQ ID NO: 204406 - protein, 267 aa, Zea mays
  unsure (1)..(267): unsure at all Xaa locations
  Clone ID: MRT4577_11800C.1.pep
QRPPSVXIFYGNDSFYVLFRLHQIFYERILSAKTNCSTSDNNWKASRHINSPDQYSRFISALYNLLDGSSDHTKFEDDCRSIIGTQSYVLFTIDKLIYKIVKQLQALASDEMDNQLLQLYLYEKSRSPGSFFDLVYHENARALLHDDNIYRFECHSDPTELTIQLMEYGNEKPELTAVSFDPTFSPYLYNGYLSSIDDTKLVDDVFLRRNKRKQGRNDDSPTSLKIMDNVMFANGLECKISCESSKVSYVLDTEDVLFRTRKRRSSI

SEQ ID NO: 204407 - protein, 51 aa, Zea mays
  Clone ID: MRT4577_118010C.1.pep
AQYLPTLKGSQILHLIYPIKCPRILGYLILWDRGSIGSALNFTITVYYLHN

SEQ ID NO: 204408 - protein, 145 aa, Zea mays
  Clone ID: MRT4577_118011C.1.pep
GRLGSSRPAGTSRRPAGQAAGRWNAWTQRPAGRLDGRSHQPLPDRAKTHRAPRQVIGWSIWQMMPTSSPLPPLSPCVLPCPAVPAICVCIILPPSCAVPGFLMRRLRRDADVSTIPLNLCDYYFLSRLTYLRPFVLYRRCRARAY

SEQ ID NO: 204409 - protein, 180 aa, Zea mays
  unsure (1)..(180): unsure at all Xaa locations
  Clone ID: MRT4577_118012C.1.pep
QKNPXDLLKXXEXXDPANKXGRXTXRTRXGAENXRXKXXXXNXXXRKXGXXXTXXXXXXXGNTXKAGGGXKXXPXDXXXXEGRAXXDXXEQEGXHPGGXHXEXXGQNXTEXXXGXRXXTXXDXXDRXHTHXDPRXNAXQXREXAXNXAERXRKRRXRXGXNNSXPXPPRXXEAEEQRRKR

SEQ ID NO: 204410 - protein, 220 aa, Zea mays
  Clone ID: MRT4577_118013C.1.pep
MASSSLLLLAAVALFAASADAATFNVINRCKNTLWPAALPGGGARLDPGKTWTVQVPAGTAHARVWARTGCSFDGSGRGTCQTGDCGGALACTVSGRTPATLAEYTLNRNGPDYIDISLVDGFNVPMSFQCRGRGPSCKADINAQCPAALKVPGGCASACEKLGGDTYCCRGQYKDKCPPTDYSRFFKRLCPDAYSYAKDDQTSTFTCPQGSNYDVVLCP

SEQ ID NO: 204411 - protein, 679 aa, Zea mays
  Clone ID: MRT4577_118014C.1.pep
SLSGSLPDIKSPSLNNLDFSYNQLSGSFPSWATQNNLQLNLVANNFILGSSNNSILPSGLNCLQQDIPCFRGSPEYSSIAVDCGSNKSFRGLDNTFYEMDPTNIGAASYYVTGQTRWGVSNVGKFNEAPNGSYTIDSSEQFQNALDSQLFQTARMSPSSLRYYGIGLENGNYTVELQFAEFAYPESPTWQSTGRRVFDIYIQGGLKEKNFDIRKTAGGKSYVAVYKKYNATVSKNFLEIHLFWAGKGTCCIPTQGYYGPMISALSVTPNFTPTVRNGVPKKKSKAGAIVGIVIGASVLGLAALAGIFMLVQKRRRAAQQQEELYNMVGRPNIFSNAELKLATDNFSSQNILGEGGYGPVYKGKLPDERVIAVKQLSQTSHQGKSQFVTEVATISAVQHRNLVKLYGCCIDSSTPLLVYEYHENGSLDRALFGDSGTILDWPTRFEIILGIARGLTYLHEESSVRIVHRDIKASNVLLDTDLTPKISDFGLAKLFDEKKTHVSTKIAGTFGYLAPEYAMRGHLTEKADVFAFGVLAMETVAGRPNTDNSLEEHRIYLFEWAWELYERDQALGILDARIEESDGEEAVIRVINVALLCTQGSPHQRPPMSRVVKMLTGDIEVPEVVTKPSYITEWQRRGGNSSYVTSGYSGDTTGEFSVQRETTAPLTPSPAMTGVIDDGR

SEQ ID NO: 204412 - protein, 67 aa, Zea mays
  Clone ID: MRT4577_118015C.1.pep
RAGSEPGNTPMQAATQGRYTTSPPMNAPAAHQGEWTSNTTSTLILIIMLTKHTQDLIRNFLANHAST

SEQ ID NO: 204413 - protein, 56 aa, Zea mays
  Clone ID: MRT4577_118016C.1.pep
ELATPLLVAYILRLRGGGGGGGSMIGRSAALPDLPALLTARPRCHRPKGHQASDRI

SEQ ID NO: 204414 - protein, 78 aa, Zea mays
  Clone ID: MRT4577_118017C.1.pep
GREHSPGGGMRVSPFTGNPHRGGKFRSKMKKERQAPSTYVDQPTPCFMFSKNARTHAGDSETGPWLLGLIGPHSVELV

SEQ ID NO: 204415 - protein, 64 aa, Zea mays
  Clone ID: MRT4577_118018C.1.pep
EHPAIIAHRSHPDHLQAGVPPMAEVWHLLAQHHHARFEQCFYVLNCQIQPTPYLFFQLPAALAP

SEQ ID NO: 204416 - protein, 58 aa, Zea mays
  Clone ID: MRT4577_118019C.1.pep
IIILWHKYSTDCSFAIYVQKQICNFSSFLHCVWGVNTPSGILHWGSPPISLLSKSHKM

SEQ ID NO: 204417 - protein, 125 aa, Zea mays
  Clone ID: MRT4577_11801C.1.pep
CHDPPCHSGWLLTTHLTCVFGDKRLGWTAPFSRGVGQQLMTATEKHRHLPINGAIIGARHWLEQLPGSTTLASLAPPLMENHKDFLNASTKKPKNLIPESTVDISAALLEQIRGCLNALELIVNG

SEQ ID NO: 204418 - protein, 40 aa, Zea mays
  Clone ID: MRT4577_118020C.1.pep
KKIKKKKKKKNKKKKKKKKKKKKKKKKKKKKWKTKKQKKT

SEQ ID NO: 204419 - protein, 46 aa, Zea mays
  Clone ID: MRT4577_118021C.1.pep
KPVRTQRSVDYDNGTMVDKDCTPGTKMTSYLTISNEPTKNEEKWFI

SEQ ID NO: 204420 - protein, 137 aa, Zea mays
  Clone ID: MRT4577_118022C.1.pep
RKLESLEALKKTFKKLDHDVNIQDFLGSRVQTVEELSAELVSLQGQVAELQKRVSDWSDPEKVDNIDNIRAMEQSLKETINHIQIHKGNFGKQHLIGLQYAATQFQTDMQLPLGLPGESGPSSWFQNGGTDGQQAMM

SEQ ID NO: 204421 - protein, 201 aa, Zea mays
  unsure (1)..(201): unsure at all Xaa locations
  Clone ID: MRT4577_118023C.1.pep
MDPRRLPILLSLLLAFFSAVVASDEIHGCGGVVEASSGLAKSRKASDSKLDYSDITVELCTVDGLVKESTQCAPNGYYFIPVYDKGSFMVRVKGPKGWSWKPETVXNSLTESFLCFPPYFVFTKHXAFVLLLDDMFTXLQVPVIIDHNGCNGNADINFQFTGFMISGXVVGAVGGKSCSKRGXPAGVKXELMTDSDEXIAS

SEQ ID NO: 204422 - protein, 123 aa, Zea mays
  unsure (1)..(123): unsure at all Xaa locations
  Clone ID: MRT4577_118024C.1.pep
RTVFKPSNSSINNTRVRNQYLYSSXPNNXNNXKQIRLQNEXENYFNKXSXKHSTSNRLDKHAHNQHIKPKPKVPNGSKTHDTHVASKPKSAGPVDYNDYHHQDFNPPPMEPPTPTQNNIPLNI

SEQ ID NO: 204423 - protein, 107 aa, Zea mays
  Clone ID: MRT4577_118025C.1.pep
MAAAARASWMVAMSVGAVEALKDQAGLCRWNYAGVVGGGVDVEHEQLLREERRQEEHGDRRRRRRRVGLLFDCDRCPLQNLSSEDTVRLAAVGCHIKVNDCNTTTSV

SEQ ID NO: 204424 - protein, 148 aa, Zea mays
  Clone ID: MRT4577_118026C.1.pep
HNHNHGHGHNHALVHGHAHAHTHGHGHGHGPGHAHLHHHGRTPSTGHTSHVSSSRTHSHRHSKSPSYQKSPSLERAQQQKREQQTSDQARRRSQILALPAPQPQLSTFTSGSSCREGFAVSDTNGFHRPSSPSIQRQDKRSPSPAHED

SEQ ID NO: 204425 - protein, 81 aa, Zea mays
  Clone ID: MRT4577_118027C.1.pep
MAAAARASWMVAMSVGAVEALKDQAGLCRWNYAGVVGGGVDVEHEQLLREERCQEEHGERRRRRRRVARSSSSSRYMLELV

SEQ ID NO: 204426 - protein, 106 aa, Zea mays
  unsure (1)..(106): unsure at all Xaa locations
  Clone ID: MRT4577_118028C.1.pep
FLRANQTYVIAGLTKDDICGADVTKFDDKYFAREKKHKVKKTEGQLLETXKEASKSLTVFKKDDQNAVDIALIKAIEAVPELKTYLGARMFLMNGDMPYEMVILSF

SEQ ID NO: 204427 - protein, 912 aa, Zea mays
  Clone ID: MRT4577_118029C.1.pep
MTAGAGEPRRIVLLLDLDTFLPTSSSSTPAAASYLAEVLPAATSLLAACRSPASLSAGRLFFSSLSPILSSSLLPRPLPAAPTPLSFDLHPATLASLAPLRCLALRATPAHPRAPASSSVAKSLLQLEHDYSWDHDPPRRRRCRGFDPPPNLVALFTPVTEFDLFGDDASFVEKFRKVFGPVRDRLSAIGLQVCWVVVPSASVSASAAASEGIRRAVTELGWWFTTADAVALGSAVAPPALVWGGVGLGGGEGGRRGEVVLEIADVEGKPLVCKGCEVEVVGSSRLQQASGNAVSRIHVRSVCEAGNWERLMDGDVAVVRGFQREGSKADGEEAVDKEYFPHRILELVLGDEKDRLGVAKPIWQLILVFLSRRNYCAVVSVSDGDGNSVDGVLMPFSMNCALLHLEKNVMSAKASETPSCGASDETKVQSDKKRRSRLVGKLLEVTTWSTFCDMLRKRADGSMPVVDLEDLYFSRYGTTSKKLRFLKCWMKQVKQSRLSTLSSIHTEGEQRLPSKDDSEARVLVSEEDASASLVNFSLDEADCQKVDALVDVAGCSEVGIPVDEADCSKVDISVGEESSMFSSMEELEAFLGAVPHKIEQSLCSEDADLGSLAERLVDLSVHAMLVKHGKIAVRYFEHNEAEDGSSAKIASCTRHELQILLRMEMIKSELGSAIEEGSKQKMIKDICSLLQFIDINLQGDSFQSDGILEYAEKTIKSRYINSMEDVIKKIYREMEFDLFDDDDGVDYSDSLPSSSNQDDGRCRSQRGSDSASASALHLLQRDARSSRQREDDDRHDKLTARARERRDRQRRLSSFTSWVPDLRRVWALKHPGKEPCAWVPRSRSRSCAKRRRAACTDVVLETPVTSGKRHMSGSESDDARQVAARRSAALGAVSKTLFDDEVVETDVSSSST

SEQ ID NO: 204428 - protein, 57 aa, Zea mays
  Clone ID: MRT4577_11802C.1.pep
EVIGGGELKSRRHLDVRRGSGTLPSITDKDWDDIKFGVDTQCCYYAVSFVKDAQVAH

SEQ ID NO: 204429 - protein, 64 aa, Zea mays
  Clone ID: MRT4577_118030C.1.pep
SKTPYLLFMWVSHWGNLLTKGFFWGWWFTCPQQEKLRIQIFAIIHDIPWVPVNISWTPGSNHAS

SEQ ID NO: 204430 - protein, 246 aa, Zea mays
  unsure (1)..(246): unsure at all Xaa locations
  Clone ID: MRT4577_118031C.1.pep
PAGSGPKDGTYDYEAASSIFFPAQTIQNACGTQAIVSLLLNREEEIDIGKELREFKEFAGDFPPDLRGETLSNSDLIRETHNSFARSSPFIDETQRTATEDDDVFHFIAYTSINNKLYELDGLQPAPISHGPCTSSEFPQKIIPVLQRRIARYPATEIRFNLMACCRDLRIRAREIGDEEELEEQEDKRARWLWENSLRRHNFVGFVXELLKSXVRAKLDQGGDAYDKWVEGGQGKSXQRREGLRN

SEQ ID NO: 204431 - protein, 256 aa, Zea mays
  Clone ID: MRT4577_118032C.1.pep
MAPHRRGQGLARPYPYPAIPIGFLPTSRVHHQQTRGVGATRQCVAMASRDGATFQVYRAMPAPTPMSLASAAPAAAAADAAAPKKAGAGAGKDRHSKVNGRGRRVRMPIVCAARVFQLTRELGLKSDGQTIEWLLRQAEPSILAATGSGTTPAVFSCSSAPSTSAASAGAGAGAGVSLPLLGKRPREEHEPAVAVAVAPAPFWATLQARPVAAAWGLSPAQEAAAQAYASVAAQGHHLNLLSVLSGAARQSEEESR

SEQ ID NO: 204432 - protein, 135 aa, Zea mays
  unsure (1)..(135): unsure at all Xaa locations
  Clone ID: MRT4577_118033C.1.pep
GRVGRSRQGQRQPASAAAAGGQQTPRPTVPSPRRRGAPQGLSLRRPVGRAGLPLFQFAYRALLGHKGRNILSXSSLWVEEDRFKQRVWLEGARPEEEEIFQSTVVQRVGSSWDGYWLTESLIINDGDAFLGRLLM

SEQ ID NO: 204433 - protein, 81 aa, Zea mays
  Clone ID: MRT4577_118034C.1.pep
YGGSADRRRTEASRALQHYLDRSAPYTAWRCTCTLVGGAAYALRVYYMRSLYVVTYRLCMYLLNLMICLIYSMVEPELEAL

SEQ ID NO: 204434 - protein, 140 aa, Zea mays
  Clone ID: MRT4577_118035C.1.pep
RPLLQTRSRSRSRQGQRQPASAAAAGGQQTPRPTVPSPRRRGAPQGLSLRRPVGRAGLPLFQFEEVVEYQLESLKYNDQPRQDYGIEVMYRFAGFEPLRKVNLVWMTVWSRTGGLKPIPTGFTLAARLCYLLIAANTVPV

SEQ ID NO: 204435 - protein, 263 aa, Zea mays
  Clone ID: MRT4577_118036C.1.pep
PAEIPPFLGAFPWLRLLDLSYNRFAGGIPAALFDPCPRLRYVSLAHNHLTGPVPPAIANCSRLAGFDFSYNRLSGEFPDRACAPPEMSYISVRSNALSGDIAAKLASCGSIDLFDVGSNSFTGAAPFALLASVNITYFNVSSNAFDGEIPSIATCGTRFSYLDASGNRLTGPVPESVVNCRGLRVLDLGANALAGAVPPVIGTLRSLSVLRLAGNPRISGSIPAELGGIEMLVTLVAGPQPGYEALKHKRWQARPRKEHHQPQ

SEQ ID NO: 204436 - protein, 51 aa, Zea mays
  Clone ID: MRT4577_118037C.1.pep
KDAIDGDDARTAKRKGVQKFRRTIDQGLFVFHGLKAWNGSWPDCFSNLYKF

SEQ ID NO: 204437 - protein, 78 aa, Zea mays
  Clone ID: MRT4577_118038C.1.pep
ILLSTRNKKTWVVFISFIPFYTLEDSQERGKNGHGISNSTSSCANHGSIRWATKNTVVDHIHQSHAARTAMRTDSATN

SEQ ID NO: 204438 - protein, 194 aa, Zea mays
  unsure (1)..(194): unsure at all Xaa locations
  Clone ID: MRT4577_118039C.1.pep
LVYEFMPRGXXLXNHLFRRISATLPWGTRLKVAIGAAXGLAFLHAASTPVIYRDFKASNILLDSDFTAKLSDFGLAKMGPEGEDTHVTTRVMGTHGYAAPEYVQTGHLNVKSDVYSFGVVLLELLTXRRAMEHVRGRSAHADQQLKLVDWTRPYLSGGSRRLRCIMDQRLAGHYSVKGARARAQLAVQCTAQQP

SEQ ID NO: 204439 - protein, 103 aa, Zea mays
  Clone ID: MRT4577_11803C.1.pep
LGRGDMAAALLLALAFTFLSGQGACTAAGTIVTSVQEVDSKTQLTCFLNSSGIDIVGHRWMRGGKVLQEDTLPDLQMKYTVDADDRSGEYSCIFLPEPVGRGN

SEQ ID NO: 204440 - protein, 140 aa, Zea mays
  Clone ID: MRT4577_118040C.1.pep
AATDDYPQRWVVYNKSAGDDNYRRVRGCGCGNIGDDDYGRGTGGAWLRHVRSATMTTAVTAATTTAVTPAVDGYNKCGNDGYDSGYNRSGTTNDDEYGAWHRAATTCVEALWRRRRTPGGDQSAGYGQARPVVGAGVGPG

SEQ ID NO: 204441 - protein, 84 aa, Zea mays
  Clone ID: MRT4577_118041C.1.pep
SLSRATTVYKHNPVPDEADRTMIAHSSKMTPEIFVNQPRAEILLCLFSYMNNTCSSISSDHYALMACQATLMKCTMYHSISIHV

SEQ ID NO: 204442 - protein, 62 aa, Zea mays
  Clone ID: MRT4577_118042C.1.pep
SSIDSSLQTMHRTVVQVRVMVVSSHVFESQRSPHTDNDCAVYIRHQRTLCKVDMMYESCVID

SEQ ID NO: 204443 - protein, 65 aa, Zea mays
  Clone ID: MRT4577_118043C.1.pep
LRRILHYLPAQRCHPKKCHGKTQKTVLHGEPQATCVIIPQHPLLRDHGMTPTSLRETASSHACTP

SEQ ID NO: 204444 - protein, 83 aa, Zea mays
  Clone ID: MRT4577_118044C.1.pep
TLTLTFYNTQNYISFGLILNVHGTQKVIISYNLHISTNKHEPSIHIQIIKLYSERDNSNDNVNKIINHNIYINLITITITNHK

SEQ ID NO: 204445 - protein, 49 aa, Zea mays
  unsure (1)..(49): unsure at all Xaa locations
  Clone ID: MRT4577_118045C.1.pep
SPHQXRRIALVTYLGAYLTLKININKESLPSTLRAETYAPNDNLAHKAH

SEQ ID NO: 204446 - protein, 58 aa, Zea mays
  unsure (1)..(58): unsure at all Xaa locations
  Clone ID: MRT4577_118046C.1.pep
ASASPSVSAVLRSLPLSARAGPAKSAQSRTRMKFVAAYLLAXLAGNXSPSXEDXTXIL

SEQ ID NO: 204447 - protein, 52 aa, Zea mays
  Clone ID: MRT4577_118047C.1.pep
KGFYTFLHVDKEDVSMSDINRGLESLHLIQRSKIALPSVKKTPPYECFIRIE

SEQ ID NO: 204448 - protein, 81 aa, Zea mays
  Clone ID: MRT4577_118048C.1.pep
CTITPPYLPLSLAFYTTTLEIHLSLNLLQLQSLKNHLSLAKTNPVTVYPMIASEDFSHKITVTNNYFYGNTLILSNGTPSL

SEQ ID NO: 204449 - protein, 93 aa, Zea mays
  unsure (1)..(93): unsure at all Xaa locations
  Clone ID: MRT4577_118049C.1.pep
YPSRLLKNHLNYPLTPNETPFILQTLSISTNTNFYLTACDRLIELYGFTSLYNNTYTKSSLLTHQSFXNMHCNTNAALDYYVSVNNYSYVFTF

SEQ ID NO: 204450 - protein, 83 aa, Zea mays
  Clone ID: MRT4577_11804C.1.pep
NKPWVIIQKREGGGGKHNTTVPLGIYRKRPNGAIPTRPGFPTNEGDINNTMPCRGEGLPPENLPEGNKHFLAGGPMPNLFFFG

SEQ ID NO: 204451 - protein, 92 aa, Zea mays
  Clone ID: MRT4577_118050C.1.pep
PAPLPHASSRPTTPPGPPFAQPGSNGSSGGDTFGNWNWGSATRDKLGVKDSSAPPTRRGSMAHILNPSDTAERSDEDDDPRGDDDRKRKRMQ

SEQ ID NO: 204452 - protein, 170 aa, Zea mays
  unsure (1)..(170): unsure at all Xaa locations
  Clone ID: MRT4577_118051C.1.pep
PCGDQHATYKVAFTTFFFSTTATNTWGGLMLHALSASASNSTITPQCXSQAAINSLQSPYLTSMIAFACENPALQLYRIQQAITASNRPVPPLLQQSPALYMEPSSVQTITAHQLQXLVLPVNNHTTLANLFSYSXXQQFIPFNQLVTXNRAAYLHXQLLPFSQLPTAHF

SEQ ID NO: 204453 - protein, 78 aa, Zea mays
  Clone ID: MRT4577_118052C.1.pep
SARELINGRSFFETPKQEGDGRGLYTVEPRVESLTVKEDGKEGEPYDDEGLPRYLSEHLRRTGGDPGTEIGITRRETY

SEQ ID NO: 204454 - protein, 280 aa, Zea mays
  Clone ID: MRT4577_118053C.1.pep
MAAMANTSRLPTPCSLPTISIGAKSRRLAVAAVRCGPGGSRSHRRSLGVLLCRSSSTAGAQGSTRMEDYNTAMKRMMRNPYEYHHDLGMNYAVISESLIVGSQPQKPEDIDHLKNEERVAYILCLQQDKDIEYWGIDFQSIVNRCKELGIQHIRRPAVDFDPDSLRSQLPKAVSALEWATSQRKGRVYVHCTAGLGRAPAVAIAYMFWFENMDLNTAYQKLTSIRPCGPSKRAIRAATYDLAKNDPSKEPFENLPEHAFEGVADWERKLIHDRVRALHEA

SEQ ID NO: 204455 - protein, 71 aa, Zea mays
  Clone ID: MRT4577_118054C.1.pep
IIPDCGRRMPPKSKKSVKGLFKGLDLFQGSSSSSNRRRELLSAVHGDEVTYLVQINLFTYLQINLELYVPG

SEQ ID NO: 204456 - protein, 62 aa, Zea mays
  unsure (1)..(62): unsure at all Xaa locations
  Clone ID: MRT4577_118055C.1.pep
RRQPAWPDHASLSSPCGTWSTCSLVAALAEEAHSYLMQRIGSSRGTLAPQPPMCSMASYNSX

SEQ ID NO: 204457 - protein, 252 aa, Zea mays
  unsure (1)..(252): unsure at all Xaa locations
  Clone ID: MRT4577_118056C.1.pep
PAGFVRLSLASAVMLCLEMWYMMLLVVLTGHLDDAEIAVDSIAICMNINGWEGMLFIGLSAAISVRVSNELGSGRPRATKYAVAVVLAQSLALGLLAMALVLATRGQFPAIFTGDRQLQKAVSSIAYLLAVTMVLNSIQPVISGVAVGGGWQAVVAYINLGCYYAFGLPLGFIFGYLFRFXVKGIWAGMLCGTALQTAILSYIVWTTDEAEASLALERVRIWGGHRKLPTSDSETGGRGCLTKIRQKTLLLA

SEQ ID NO: 204458 - protein, 120 aa, Zea mays
  Clone ID: MRT4577_118057C.1.pep
NANSLLFFQKFLGRVSIFKNKPNGKKGEIKTPPQLKKMGKPKTPPKQIRDCFQVLENKTWDWGKKKIERGQKKWVWGPWALFKKNLVLNGKKAHKMPGPGNLKEGDFVGHIKSILCGVKL

SEQ ID NO: 204459 - protein, 92 aa, Zea mays
  unsure (1)..(92): unsure at all Xaa locations
  Clone ID: MRT4577_118058C.1.pep
FIFPFFFWLLLKERLSTRNVLRRKNMXLPSYDCILCTQCVEETVDHIFIKCDFAQQQDDSLAVLESFKRQLGVPLYSEITVLMCWSIWTASS

SEQ ID NO: 204460 - protein, 49 aa, Zea mays
  Clone ID: MRT4577_118059C.1.pep
FKNTVDLDMRNPIVCKHELKIRVLLSYEVINRWQSIKSMASFRAKSLTQ

SEQ ID NO: 204461 - protein, 308 aa, Zea mays
  Clone ID: MRT4577_11805C.1.pep
MPMLLPPPPLLLITQLLPPIPSAPSFGPLPSAPLAAPPLAPAMSSSSPPPRPDDDDGAQEVGAGDGRSLGYGEAEYWDARYVEEGGAPYDWYQRYDALRPFVRCFAPPASRILMVGCGSALMSEDMVTDGYVEIVNIDISSVVIEMMRKKYFDVPQLQYLRMDVRDMSMFPDESFDCAIDKGTLDSLMCGVDAPLSAAQMILEVDRLLKPGGTFILITYGDPSVRMPHLNQSACDWKVVLYILPRPVFTGKITRRVLDPVPLTERGRLPDGFVPEDPDSHYVYVCKKMQGLTGTGSPTVNHIERQGEE

SEQ ID NO: 204462 - protein, 40 aa, Zea mays
  Clone ID: MRT4577_118060C.1.pep
DDVFLSVPCILGQNGISDLVKVTLTSEEEARLKQSADTLW

SEQ ID NO: 204463 - protein, 75 aa, Zea mays
  Clone ID: MRT4577_118061C.1.pep
RGAQAAVFPAAVNVADFQGQQPIFSLSHNSNSEHLHLGSGSHEQQRGGRSDVNHPEEEEDDDDDDEPVSDSSPEE

SEQ ID NO: 204464 - protein, 102 aa, Zea mays
  Clone ID: MRT4577_118062C.1.pep
KGGIKWGQNFSLPPAPVLSLRANDPRPTNGAPEKFMFFFPRPPKKIGGFSKAGSKVAGGGLFKTPPKNGPGGECKTFPPDRKKKCSGGPPGPPRLWGAPPSL

SEQ ID NO: 204465 - protein, 45 aa, Zea mays
  unsure (1)..(45): unsure at all Xaa locations
  Clone ID: MRT4577_118063C.1.pep
GQPSRRPQVALGPAHHLPNHGVEACSAAVKQLPARPXVLRLRQID

SEQ ID NO: 204466 - protein, 164 aa, Zea mays
  unsure (1)..(164): unsure at all Xaa locations
  Clone ID: MRT4577_118064C.1.pep
MSFPRGQGREKELXPLSSTMVVTKYKDWRPKFLNNAXLKLGVSXCQPKAKIGDLFEKGDFFIKKQTGNVFKNAKREIGRGIGFPTCVSVNNTSWHFFPLTTNDAVLEENDMGKNEMGGHIDGCIGVGGHTHVIANGPVTGRAADVLAVANTATXVAMRVVRPVK

SEQ ID NO: 204467 - protein, 68 aa, Zea mays
  unsure (1)..(68): unsure at all Xaa locations
  Clone ID: MRT4577_118065C.1.pep
LTSLLYAPGTPCGEVSLGMLTMLRYTPWRAPHRHGAANGPDRVGRPAQPRDLAXGRRTSSPHSEPHPS

SEQ ID NO: 204468 - protein, 68 aa, Zea mays
  Clone ID: MRT4577_118066C.1.pep
MGRSPCCEKAHTNKGAWTKEEDQRLIAYIKAHGEGCWRSLPKACSCKSPSPAAAGFRFLRPLEEGQYI

SEQ ID NO: 204469 - protein, 233 aa, Zea mays
  unsure (1)..(233): unsure at all Xaa locations
  Clone ID: MRT4577_118067C.1.pep
MGRLSCGGGGGGGVQPKLRKGLWSPEEDEKLYNHIIRHGVGCWSTVPKLAGLQRCGKSCRLRWINYLRPDLKRGSFSQHEEELIIRLHKILGNXWSLIASHLPGRTDNEIKNYWNTHIKRKLLARGIDPKTHRPLGAGADAAAPPGVVAXPGAAAPXALVELAVKPAPAESSDDGSRSRGTSSGXDEAPAXERGCPDLNLDLSVGPPGPRTATAVAAASSGSGPPCSTSEASR

SEQ ID NO: 204470 - protein, 222 aa, Zea mays
  unsure (1)..(222): unsure at all Xaa locations
  Clone ID: MRT4577_118068C.1.pep
MYALRCTCTAPPVCPHPSALAYLFPLPPVIIATKPNQTRAQEELPRKLRGGARKQAHEGEPGMGRSPCCEKAHTNKGAWTKEEDQRLIAYIRAHGEGSWRSLPKAAGLLRCGKSCRLRWMNYLRPDLKRGNFTGDDDELIIKLHALLGNKWSLIAGQLPGRTDNEIKNYWNTHIKRKLLSRGIDPQTHRPLSGGAGSALTTTXSTAGFPSPGPRPGPGPRPR

SEQ ID NO: 204471 - protein, 217 aa, Zea mays
  Clone ID: MRT4577_118069C.1.pep
IRHEGTITDGNDVEDQEVHREKVGLSEGYPQKPGKLNCRFYMSTGRCSYGSSCHFNHPRLKAKLEVSSFPSEQRNHEAEFLELNRVGLPIREGARKCIYYMRNGTCRYGKKCCFNHPEQVLDVQHHTATGWDDTNLQSSPHSKKLPEHKTMDDISSGSEVLPPNILRMLLPPQNVPPSTKEKEIRIKKDPDWASASDDSDGCCSADSSNGPLCKQEH

SEQ ID NO: 204472 - protein, 151 aa, Zea mays
  Clone ID: MRT4577_11806C.1.pep
MSSSSPPPRPDDDDGAQEVGAGDGRSLGYGEAEYWDARYVEEGGAPYDWYQRYDALRPFVRCFAPPASRILMVGCGSALMSEDMVTDGYVEIVNIDISSVVIEMMRKKYFDVPQLQYLRMDVRDMSMFPDESFDCAIDKGTLDSLMVSRSR

SEQ ID NO: 204473 - protein, 55 aa, Zea mays
  Clone ID: MRT4577_118070C.1.pep
ASTPTSQQQQQQRTTTICLCYHLGVRSGEACSCKSPSPAAAGFRFLRPLEEGQYI

SEQ ID NO: 204474 - protein, 215 aa, Zea mays
  unsure (1)..(215): unsure at all Xaa locations
  Clone ID: MRT4577_118071C.1.pep
MGRSPCCEKGHTNKGAWTKEEDERLVAYIRSHGEGCWRSLPSAAGLLRCGKSCRLRWMNYLRPDLKRGNFTDDEDELIIRLHALLGNKXWSLIAGQLPGRTDNEIKNYWNTHIKRKLLARGIDPHAHHRPQALHHVAAAALVPAPAAKPKPKPAESSDDGGRSSCSCSGSGSSAGEPRCPDLNLDLSVGPPDAPTSPPPPCLCHRAWEACGCQAG

SEQ ID NO: 204475 - protein, 352 aa, Zea mays
  unsure (1)..(352): unsure at all Xaa locations
  Clone ID: MRT4577_118072C.1.pep
MYALRCTCTAPPVCPHPSALAYLFPLPPVIIATKPNQTRAQEELRKLRGGARKQAHEGEPGRQPAMGRSPCCEKAHTNKGAWTKEEDQRLIAYIRAHGEGSWRSLPKAAXASEAAGLLRCGKSCRLRWMNYLRPDLKRGNFTDDDDEVIIKLHALLGNKXHSVSVRRPPAGTIISLLLDSIIFPSSAGPSRXWSLIAGQLPGRTDNEIKNYWNTHIKRKLLTRGIDPQTHRPLSAAAALTAGFPSPARPPTVLFARPAPSEDGGHSSGGGSADAPRCPDLNLDLSVGPPCSPPKTPAATASTPTSQQQQRTTTICLCYHLGVRSGEACSCKSPSPAAAGFRFLRPLEEGQYI

SEQ ID NO: 204476 - protein, 66 aa, Zea mays
  unsure (1)..(66): unsure at all Xaa locations
  Clone ID: MRT4577_118073C.1.pep
LEAGRRRRSAASPGATVRRLPLPSSRVXFFFFFFFFFFFFFFFFFFFFFFFFFLKTPGGFPPLRKT

SEQ ID NO: 204477 - protein, 300 aa, Zea mays
  unsure (1)..(300): unsure at all Xaa locations
  Clone ID: MRT4577_118074C.1.pep
MGRSPCCEKAHTNKGAWTKEEDERLVAYVRAHGEGCWRSLPKAAGLLRCGKSCRLRWMNYLRPDLKRGNFTDDEDELIIRLHSLLGNKSVSVCRAAGVLLSSYYSISSRRRCSYSXDTVNTTIMLPAGRFDDRLTPQRTCSLLLPPXWSLIAGQLPGRTDNEIKNYWNTHIKRKLLARGIDPKTHRPLGAGADAAAPPGVVAHRAXAPRRRSPRRARREAGAGGVIRRRRPEQRQRQQRRRRQRGGAAVPRPQPRPVRGPAMLAAQDAGGHRVDAHVASAAADDDHMTVLPPRSPQRGGL

SEQ ID NO: 204478 - protein, 92 aa, Zea mays
  unsure (1)..(92): unsure at all Xaa locations
  Clone ID: MRT4577_118075C.1.pep
DPSNPLLSFCLFLARKVSLVRALLYIESHCLGAICGVRLVKGFQSAFYVRYGGGANELSACYSKATCLAAEXILSPVVAQYTHCYPSDPDSR

SEQ ID NO: 204479 - protein, 188 aa, Zea mays
  unsure (1)..(188): unsure at all Xaa locations
  Clone ID: MRT4577_118076C.1.pep
MGRSPCCEKAHTNKGAWTKEEDQRLIAYIRAHGEGSWRSLPKAAGLLRCGKSCRLRWMNYLRPDLKRGNFTGDDDELIIKLHALLGNKWSLIAGQLPGRTDNEIKNYWNTHIKRKLLSRGIDPQTHRPLSGGAGSALTTTXSTAGFPSPAPAFRPTPTPPPAVXVVPPNAIFARXAPVVDGHSSSGAS

SEQ ID NO: 204480 - protein, 53 aa, Zea mays
  Clone ID: MRT4577_118077C.1.pep
RGGEGGGVHGRRTIIRSTYIPLTRPPQNKLSILFPPLLLLFWLLQIHTSHTTR

SEQ ID NO: 204481 - protein, 64 aa, Zea mays
  Clone ID: MRT4577_118078C.1.pep
LIIKSYDSKSYLILKRCSLHQIKMVIWSAFEHPWRPVPVLRAGRILFLVFPRHGSPFLLTLSCS

SEQ ID NO: 204482 - protein, 91 aa, Zea mays
  unsure (1)..(91): unsure at all Xaa locations
  Clone ID: MRT4577_118079C.1.pep
GNHYICLCNSVLTANRTSESFLPICLPRYNAQAFLHAYVHFFDVSQILVKSFLNSSTVHNVKYXLLDGXDDTYVILLTTRSDAFHHLKDCR

SEQ ID NO: 204483 - protein, 73 aa, Zea mays
  Clone ID: MRT4577_11807C.1.pep
HTTPRCNLMLTGQGAVPPFHSGLTLLKGRAVRACLFYDIHASLKKKGIVMQIQLSWVQGFVLSSTLRSPTPVH

SEQ ID NO: 204484 - protein, 38 aa, Zea mays
  unsure (1)..(38): unsure at all Xaa locations
  Clone ID: MRT4577_118080C.1.pep
SXXKKKKKKKKKKKKKKKKKKKKKKKKKKKKKKKGGRF

SEQ ID NO: 204485 - protein, 96 aa, Zea mays
  Clone ID: MRT4577_118081C.1.pep
TSILTLVGEAPFLPIFTGKSVPFIARFLIVLKGKEIPLLVCIITHKMFETFIEDVGGFGPFNLGDVERWENPPYYCVVCEWTVVTPNELSVLGKKY

SEQ ID NO: 204486 - protein, 67 aa, Zea mays
  Clone ID: MRT4577_118082C.1.pep
GRWDVLQRATMAGTKLCAQAWTGGQHHLLSSSNNYSAQLVMHYGYTMAMGRFTCMMAWHETSQGRAD

SEQ ID NO: 204487 - protein, 128 aa, Zea mays
  unsure (1)..(128): unsure at all Xaa locations
  Clone ID: MRT4577_118083C.1.pep
TKKPPARTRNRRPKAGRTSSRSRNNEKKKTTQPKTEKKRGGXXKKAENPTPAETRGERDERAPGPAXEKAGERKQQTREKKXGQNTEAGGTTXXENGGTQKSARPAXXRKEAKHXNSXGNKDKTDXGK

SEQ ID NO: 204488 - protein, 840 aa, Zea mays
  unsure (1)..(840): unsure at all Xaa locations
  Clone ID: MRT4577_118084C.1.pep
MYVHVRVGMDVAAHHHHHQQLRXERHFIQSVSSSNANGTATDPSQDDMAIVHEPQPQPQPQPEPQPQPQPEPEEEAPQKRAKKCTSDVWQHFTKKEIEVEVDGKKYVQVWGHCNFPNCKAKYRAEGHHGTSGFRNHLRTSHSLVKGQLCLKSEKDHGKDINLIEPYKYDEVVSLKKLHLAIIMHEYPFNIVEHEYFVEFVKSLRPHFPIKSRVTARKYIMDLYLEEKEKLYGKLKDVQSRFSTTMDMWTSCQNKSYMCVTIHWIDDDWCLQKRIVGFFHVEGRHTGQRLSQTFTAIMVKWNIEKKLFALSLDNASANEVAVHDIIEDLQDTDSNLVCDGAFFHVRCACHILNLVAKDGLAVIAGTIEKIKAIVLAVKSSPLQWEELMKCASECDLDKSKGISYDVSTRWNSTYLMLRDALYYKPALIRLKTSDPRRYVCLNCCTCHHYKFSINQMSIIVGTMQFVLKPRSGRWHXTLFKCLKKFFDLTELLSGTQYSTANLFYKGFCEIKDLIDQWCVHEKFVIRRMAVAMSEKFEKYWKVSNIALAVACFLDPRYKKILIEFYMKKFHGDSYKVHVDDFVRVIRKLYQFYSSCSPSAPKTKTTTNDSMDDTLMENEDDEFQNYLHELKDYDQVESNELDKYMSEPLLKHSGQFDILSWWRGRVAEYPILTQIARDVLAIQVSTVASESAFSAGGRVVDPYRNRLGSEIVEALICTKDWVAASRKGEXHICYNEVPIYSYSTIILLILMHICVIQGATYFPTMIGDLEVLDSVIAAATNHENHMDEVFKDYYLLRAWAINLLLFTTVLMHGLFXLSPCFDACALLPSRVILPAWLALTDF

SEQ ID NO: 204489 - protein, 158 aa, Zea mays
  unsure (1)..(158): unsure at all Xaa locations
  Clone ID: MRT4577_118085C.1.pep
MGQSKAEFLEQFGGDYGYPDAPRGIDDLRAAEFKRLEGMVYLDHAGATLYSEAQMTDVARDLMSNVYGNPHSQNDSSMATIDTVTSVRHQVLKYFNASPRDYKCIFTSGATAALKLVGECFPWSRDSCYMYTMENHNSVLGIREYALXQGATASAXDV

SEQ ID NO: 204490 - protein, 86 aa, Zea mays
  Clone ID: MRT4577_118086C.1.pep
SMHLAHYLVIYRMMFISSSGLPSRSLLLASQCDKFLERLFLHQVLAVRKEHLVAQACIASVFRVQPALQSHGWCAHVHIVSCNAGP

SEQ ID NO: 204491 - protein, 476 aa, Zea mays
  unsure (1)..(476): unsure at all Xaa locations
  Clone ID: MRT4577_118087C.1.pep
MGTIVRGGRSGMMKQLNVGGKLFSLEASSLSLMSIGSPSPTPTFVDRDPALLFAVLAAIRSPSTAAPDFPARVLLDEANFYGLQAQLLAALSPPPLRGFSASLASTLCPSSEPFPTALAPHHDGSLCLAHGAGLVTYYSPALDHRATIRTHLHRITSLLQLPSSLAVLGSDSAPGLHVYDFLDGKHVASVQWSDPTDTRTSKAKVVAIAARPPADAADKNSPILATFECPHRENCIMAVDPVTLKPTQEIGRQSGSAAKSSAPGRVVHLQALGLVFASFVSSGAFGYSGYMRLWDIRSGNVVWETSEPGGAGRSSRFGDPFADADVDVKQQAIYKVCSKSGDLAVADLRCLGDDPWVYMSSGPRGSAGGYGSVLCCHRSQVFVSRKDGLEVWSRLEEHRHNTGELTEQSGVKERPKNXELMDRFYGSCYVDTEKDARRGMIQMIEGGGDRLFVTREEMQGVEVWETSHLAGSTSLS

SEQ ID NO: 204492 - protein, 64 aa, Zea mays
  Clone ID: MRT4577_118088C.1.pep
VNRPVHGVMKSVFGRPQSLSGIILGEGIGFAGMVDTLVLVGSHERVSQASKQARIDKLSSARYG

SEQ ID NO: 204493 - protein, 111 aa, Zea mays
  Clone ID: MRT4577_118089C.1.pep
HWVPRGRPGVVSSLAITHLAATLGRGFLRVSRIQLQRDVIKKRWRIWVTIQYSQKYFDEPYHYRHVSPPGRCCQAPPQKPPPVSQLVKLRPDRSSLSPRWYYPIHRPEAQH

SEQ ID NO: 204494 - protein, 78 aa, Zea mays
  Clone ID: MRT4577_11808C.1.pep
LVARPDRPGTDIAGPRVRFVSPCSSTGTAALRRRTRPSSGTPVSAAVASSAGASECQRTPRLLTRREACRWAWSPVTW

SEQ ID NO: 204495 - protein, 107 aa, Zea mays
  Clone ID: MRT4577_118090C.1.pep
FLVCHLYLYLKITKTKGRTVQRRLQRARGQHQEGVWRPWHEEQSDSPEAVAIYMSIRAGTGCTTHTCASLAPLRRALRPYGAFIVLWGLVHLVSIWTLRRDRTRAAC

SEQ ID NO: 204496 - protein, 188 aa, Zea mays
  Clone ID: MRT4577_118091C.1.pep
TTMIADSILSPAASKRRTCSVSSSPRFHRCRSSTHIGTYTHFTLANRRRSIKRQSKNEISLRVDGVVDGMRKTSNTRRRQKGCPRHDTPLEHLDKHLTCTATQGLQRKALKRGDSTSMAEGVDEVERRGAGRARLAQKQRGGRDGECRPSWRRATRKERKASGGELGRESRGGRPAHHGKEQGDGKTS

SEQ ID NO: 204497 - protein, 75 aa, Zea mays
  Clone ID: MRT4577_118092C.1.pep
PTRPIYCMVYCSFVLNLWNVCLNSGDSGQLVDSEGVTGEDPEQQSVGEGKCPLTHLCPTHFYNSLPAFTQFLFKD

SEQ ID NO: 204498 - protein, 50 aa, Zea mays
  Clone ID: MRT4577_118093C.1.pep
QDCQSVHASVASCRSTSRKSRTVMRLQATLASYERMAAKTDDTATTDGRA

SEQ ID NO: 204499 - protein, 122 aa, Zea mays
  Clone ID: MRT4577_118094C.1.pep
VRSRRRRWPRQRRSNAARRTGCCCAPSLACRRWGPTTVTDLVTRLGRRCGDACRRSAASQRSATSTARRSCALEKSARDSGERHSPAPLSSSTAQALAVAALSLARRRHGWKKRSEGGNRGI

SEQ ID NO: 204500 - protein, 90 aa, Zea mays
  Clone ID: MRT4577_118095C.1.pep
RCCRPPAVQLRAAGRRVPRLPPALLQGHLVERAAFHLLPRRRYAVFFDEEERGVPFPNGASGRRRERVEDAGGVRELARPERGVQAPDSN

SEQ ID NO: 204501 - protein, 110 aa, Zea mays
  unsure (1)..(110): unsure at all Xaa locations
  Clone ID: MRT4577_118096C.1.pep
WVPRRPSGAVSFLTFHSSCPRAASPARRPPPPPRAHPHRSPHPLPPTTRPPSAXRRRAPVRPPPRRRXPSPLPPRRQLGPVRSRDFIHIRRHTPXPAPAHHHAAIRPLPK

SEQ ID NO: 204502 - protein, 100 aa, Zea mays
  Clone ID: MRT4577_118097C.1.pep
PFAPPLSSNATNPARPQPGSAINKLINEVINIPFIIMRILPKLLALIYYTWVEHYYFGWSYKVGSMYFLSLSPRALYVAPVEVSTFKFSVLSRVILFSHK

SEQ ID NO: 204503 - protein, 83 aa, Zea mays
  Clone ID: MRT4577_118098C.1.pep
LEGSVLFLSHHGTYKVILIRKGIYSGGSEYVSCWCSETRSATTSVPDTANPMLVGVVKRSATSLPIFQFKFVKFPEKKKKKSG

SEQ ID NO: 204504 - protein, 75 aa, Zea mays
  Clone ID: MRT4577_118099C.1.pep
IPRVDSRVRGRWYHIEQTRNLTSSAGRLGLCHMKLCARASSSAWRALFPARGFAVGISGRRDGASVLLATGDACG

SEQ ID NO: 204505 - protein, 229 aa, Zea mays
  Clone ID: MRT4577_11809C.1.pep
RSFIGGSFGAASDRIWLIRFRLRISPTGEVFHRTSGARGATTMRGGFYGIANQAAQIGSAHARGFRGCCSLRHYTGCWGLLPHFVEHVKGELQRKRQRGRCSSAAYAMVRRGNARASARDELQVSLELGKSSAVGGEDGGRGGATVVGDAERRREQPGRHGGGSARARPAGSRTPWLGGMSCSPGKLFAGEPPARHHGKRSCMRETAGAGGAEREREGQMEKDLGWRLG

SEQ ID NO: 204506 - protein, 31 aa, Zea mays
  Clone ID: MRT4577_1180C.1.pep
LQSYYAINPLYHHGRMSVLMYNYPSWASRYI

SEQ ID NO: 204507 - protein, 127 aa, Zea mays
  Clone ID: MRT4577_118100C.1.pep
ILAPSRPGSPERPLLFNWDGEGGPLYRRPFLRGWGGFLIALGRRVFPLLDGPFAHPVCLVGFPPCGPPGFSLFFSGVFFVFNFSGISFFSWRIFFSWLVQGGVAFGSPSLGPPFLLVLPLGGAPGGV

SEQ ID NO: 204508 - protein, 82 aa, Zea mays
  Clone ID: MRT4577_118101C.1.pep
REEVPAHFILGEGCFRFKPFGPLGQRTPMSSVFPFGVVPSFCCKGAPPRGPFRPGLRMDFSCAMGPCFWVGAIPLVCLAFFR

SEQ ID NO: 204509 - protein, 82 aa, Zea mays
  Clone ID: MRT4577_118102C.1.pep
DFDFSQSRASHTDAKTSTKRSVRRYPLVENRWNATLGGSVGLSGSCIYKPRSPPESVLVVADSDSCMRVNLIFIIGYLIMSG

SEQ ID NO: 204510 - protein, 59 aa, Zea mays
  Clone ID: MRT4577_118103C.1.pep
TKYIILNKQSKRIHLVRSTFKSPHMRRIESPKLNSLPINLLHTLQRIHWPNPALSTFKL

SEQ ID NO: 204511 - protein, 66 aa, Zea mays
  Clone ID: MRT4577_118104C.1.pep
HQIQRSWPQLQSLWTTICLILFLFGVFFFYFFLCEKLHSCPLEMITIIIQAIMDVLVISSLSRSIW

SEQ ID NO: 204512 - protein, 133 aa, Zea mays
  Clone ID: MRT4577_118105C.1.pep
INLGINETVKLSESNGCKTEHFVGPSKINANNTISCGEGGEQSERILQDANGNGQPIHQSQYLGETSIGNATPAQQETSNGKASHAEQCFEGSSHQKEHANSLRNKRQLEEDKFQKMLAKSASSELRLSVWME

SEQ ID NO: 204513 - protein, 227 aa, Zea mays
  Clone ID: MRT4577_118106C.1.pep
CSRKGYTKWQINLTSKINPEVNETVKLSESNGCKTEHFVGPSKINANNTISCGEGGEQSERILQDANGNGQPIHQSQYLGETSIGNATPAQQVTSNGNATPAQQETSNGKASHAEQCFEGSSHQKEHANSSGNKRQLEEDKFQKMLAKSASSELRLSVWMDDVYNFMRSQKRRRLLSSDVTQDFDAMRKQLVSDSATIFRSKVPESLMENLIKRLRSYLEGKHSPHE

SEQ ID NO: 204514 - protein, 148 aa, Zea mays
  unsure (1)..(148): unsure at all Xaa locations
  Clone ID: MRT4577_118107C.1.pep
MAATPDERKQERPMRPATSPASVVADFAMGGAAAVVAKTGAAPVERVKLLLQNQAEMLRRGTLTRPYRGIADAFTRILREEGPAALWRGNQANVIRYFPTQARXFFSFSLAFNFAFRGYFKSFFGYDREKDGKWKWGISSPVLCWAGQ

SEQ ID NO: 204515 - protein, 73 aa, Zea mays
  unsure (1)..(73): unsure at all Xaa locations
  Clone ID: MRT4577_118108C.1.pep
PFQSYTLGIPELATMVALCVSLCIAHEYNPCNLTVTPSSFLTTASYPLPLPLPLFLLAXHNLLXPXHXTRGIP

SEQ ID NO: 204516 - protein, 48 aa, Zea mays
  Clone ID: MRT4577_118109C.1.pep
AAFFFFFFFFFFFFFFFFFFFFFFFFFWAKKNSIDTQTTDTGHTTNRF

SEQ ID NO: 204517 - protein, 64 aa, Zea mays
  Clone ID: MRT4577_11810C.1.pep
TRLSGRRRWTMRTSSCSNSSEREPAPPSPDHYHSNNSRLFICEDDKTLFNCFSNFIAYQLSDRV

SEQ ID NO: 204518 - protein, 115 aa, Zea mays
  Clone ID: MRT4577_118110C.1.pep
KIFPLIDRELYRDSDVITEYKNSKFFVIKSYTEDHVHRGIKYKVWASTSSGNMKLDSAYHAAKEKEEHCPIFLFFSFRPIHPPSRRLSTLFSESVKCKKRHICSCLLKVIIEMAI

SEQ ID NO: 204519 - protein, 232 aa, Zea mays
  unsure (1)..(232): unsure at all Xaa locations
  Clone ID: MRT4577_118111C.1.pep
VDVVXIFCFLNLXXTKYQPPPQLSQWLQQGPKPIYIGFGSMPLDDEKKXTAIILDALRETGQRGIISRGWGALGSFSEVPVDVFILEDCPHDWLFPRCAAVVHHGGAGTTAAGLIAGCPTTVVPFFGDQFFWGERVHARGVGPAPISIAELTVEALSNAIIFMLDPEVKSRTMELAIAIGNEDGVAAAVDAFHRHLPSELPLSPPAHVEEERTDFFQWFSRGLEKCCFPFSF

SEQ ID NO: 204520 - protein, 74 aa, Zea mays
  Clone ID: MRT4577_118112C.1.pep
AGGIHTGLAHTSRKLGKLLDPGAEEERYRGSTLEVRVLTDETGEWAVVGGTRACCYGERHLYQDAPRAWKPTGT

SEQ ID NO: 204521 - protein, 207 aa, Zea mays
  Clone ID: MRT4577_118113C.1.pep
DAPTSVKAKTAAPKITLHDPKWTDGSIPLDALPDKLSKIGKEAFERRDSAATAAASALQEALISESVIRNISKFSEICASARVSNPFPTVDLFLVVCEDALKWKTIAAESVVTNGAEEEELLEKKSTWHWVGAALATDLEVLKLLNGATGPFSRTRSSGTTNKPNASSVEPPRTASMSSKKQAHGASAKAQSKAAAVSPSSPPRCTT

SEQ ID NO: 204522 - protein, 71 aa, Zea mays
  Clone ID: MRT4577_118114C.1.pep
GRAWRPFVLTMSCCMGLACPRYHHYHPLPEGRWGAGFLRRCRPLALLSHADEASRSSAFSTSWARARMTPS

SEQ ID NO: 204523 - protein, 186 aa, Zea mays
  unsure (1)..(186): unsure at all Xaa locations
  Clone ID: MRT4577_118115C.1.pep
MARLLWALAVLLVLLLAAASVAVADDGETLLEIKKSFRDGGNALYDWSGDGASPGYCSWRGVLCDNVTFAVAALNLSGLNLEGEISAAIGSLQRLVSIDLKSNGLSGQIPDEIGDCSLLETLDLSSNNLEGDIPFPMSKLKHLENLILKNNKXXVGVIPSTLSQLPNLKILDLAQNKLSGEIPNLI

SEQ ID NO: 204524 - protein, 237 aa, Zea mays
  unsure (1)..(237): unsure at all Xaa locations
  Clone ID: MRT4577_118116C.1.pep
MAAPPARARADYDYLIKLLLIGDSXGGSELIGRISPWFRLGGFNSSGVGKSCLLLRFSDGSFTTSFITTIXSMTYYSYPLDSENSIDFKIRTVELDGKRIKLQIWDTAGQERFRTITTDIRNWIRNIEQHASDNVNKILVGNKADMDESKRAVPTSKGQALADEYGIKFFETSAKTNLNVEQVFFSIARDIKQRLSETDSKPEFLSLACSQDRTIKIKAEGEAEAAAAAQNSACCGS

SEQ ID NO: 204525 - protein, 148 aa, Zea mays
  unsure (1)..(148): unsure at all Xaa locations
  Clone ID: MRT4577_118117C.1.pep
AQDTRESKAATAPAKQASRTNRPTGPPPAHRRXTPSPAQPAPAAPQPHHTHPRRRPGRPPPHHTGPHSSRXTPRAAPPXPXRWXAPAPRRXTPTPTPTXRPAAAAPAPRRRAPRRAAWPARATKKRYPLPPAAHGRRRKRDRPPVASN

SEQ ID NO: 204526 - protein, 215 aa, Zea mays
  Clone ID: MRT4577_118118C.1.pep
MAAPPARARADYDYLIKLLLIGDSGVGKSCLLLRFSDGSFTTSFITTIGIDFKIRTVELDGKRIKLQIWDTAGQERFRTITTAYYRGAMGILLVYDVTDESSFNNIRNWIRNIEQHASDNVNKILVGNKADMDESKRAVPTSKGQALADEYGIKFFETSAKTNLNVEQVFFSIARDIKQRLSETDSKPEDRTIKIKAEGEAEAAAAAQNSACCGS

SEQ ID NO: 204527 - protein, 214 aa, Zea mays
  Clone ID: MRT4577_118119C.1.pep
MAAPPARARADYDYLIKLLLIGDSGVGKSCLLLRFSDGSFTTSFITTIGIDFKIRTVELDGKRIKLQIWDTAGQERFRTITTAYYRGAMGILLVYDVTDESSFNNIRNWIRNIEQHASDNVNKILVGNKADMDESKRAVPTSKGQALADEYGIKFFETSAKTNLNVEQVFFSIARDIKQRLSETDSKPEDRTIKIKAEGEADAAEAQKSACCGS

SEQ ID NO: 204528 - protein, 69 aa, Zea mays
  Clone ID: MRT4577_11811C.1.pep
RARFVRPPSIVTLHDYNCHTRLAHIRCPPSRHILHCQSLCFTSAYAMIIVPPEIKQKPYSRLRSPSLAG

SEQ ID NO: 204529 - protein, 215 aa, Zea mays; identical to SEQ ID NO: 204526
  Clone ID: MRT4577_118120C.1.pep

SEQ ID NO: 204530 - protein, 86 aa, Zea mays
  unsure (1)..(86): unsure at all Xaa locations
  Clone ID: MRT4577_118121C.1.pep
REVTGIDRVIRLQSCYYLCYDSVDCTLSVCMRENXERKLDVLAHXFKRSPTGAIADASSRTHSSDDMDFLGVEESPICYSIFYTSN

SEQ ID NO: 204531 - protein, 209 aa, Zea mays
  Clone ID: MRT4577_118122C.1.pep
SQSPSGRPISSSEEAHLISLHSPVTLQVRPFCPCNCALTLCVTSKSLIAILAPLDRTMPTPDDAVLSPAEHERATCPPDEPHTSTVHSDSSASNNVDPARRLPAHRLPTPPPHGTREQSPTETHSKPSSASIEEPNRDIPTPMTVTDDNAEDQRASQASPLSATAPAPIRYVPSHLTAPFSAHRFLPVTSFLAPSDPGVDSRGSQTSDR

SEQ ID NO: 204532 - protein, 47 aa, Zea mays
  unsure (1)..(47): unsure at all Xaa locations
  Clone ID: MRT4577_118123C.1.pep
SFVLLCHGSNHWCVSGVVLCSFIPPLEEYXGCCPLKTPRHHLRGLVS

SEQ ID NO: 204533 - protein, 44 aa, Zea mays
  Clone ID: MRT4577_118124C.1.pep
VQVPSVPIQQFPTEDWSAQPATEDWSAAPTAQATEWVGATTDWS

SEQ ID NO: 204534 - protein, 105 aa, Zea mays
  unsure (1)..(105): unsure at all Xaa locations
  Clone ID: MRT4577_118125C.1.pep
WEQKSRTVVVEQEEEIPGEXALEXKSLKAAEGESHKTKKTITENYXDWELANEPNPICMRNPXEGEITAHDQCYKKTFNAFLDPFAYTHFTTAGEVESHTVTYRP

SEQ ID NO: 204535 - protein, 77 aa, Zea mays
  Clone ID: MRT4577_118126C.1.pep
YGCNNTTDGVLLLLTILTWMYGIEHSALLLISSIPEHMLTIQLIREREKKKHVCLLLIYCYVKSGDEVNVSHQACTY

SEQ ID NO: 204536 - protein, 85 aa, Zea mays
  Clone ID: MRT4577_118127C.1.pep
INKITNKMTRYLSTRPTVYLEVTPAEKIPYDIITPARQLWVQVGFEVYGTLSGVYFTKYAVETAERLGIKGWIKIDKRGKVSGHI

SEQ ID NO: 204537 - protein, 311 aa, Zea mays
  Clone ID: MRT4577_118128C.1.pep
RCYIFSVDDLRFFDRAAIVTAGDISPSGQPDPWRLSTVHRVEELKSIVRMLPIWSAGIMLATASSHNYTFTIMQARTMDRHMGPHFQLPPATLSIFSNAAMLVTLAFYDRVFVPLARRVTGLPSGITYFQRMGIGLAISVLSVATAALVETKRRDAAARHGLLDSPAAVVPLSVFWLVPQFAVHGVGDAFSSVGHMEFLYDQAPESMRSSAAALFWLAASIGNYMGTVLVTAVQRATRGRGEWLQDNINRGRIDNYYWLVTCITLLNLGYYLVCFYFYTMKPLEVADDCDKDCELSSLQKNGSGGGATVMV

SEQ ID NO: 204538 - protein, 54 aa, Zea mays
  Clone ID: MRT4577_118129C.1.pep
IKHSTANLKCIMSGDIIGVAEIFTVEINAMVSTNGEYRLKWVPLLTLLLGLLYC

SEQ ID NO: 204539 - protein, 59 aa, Zea mays
  Clone ID: MRT4577_11812C.1.pep
PQATCQTQRLMIQDSRTATNTQAASLLSALYSLLHQAPQASQYAKGDSRSHHTSLVSAS

SEQ ID NO: 204540 - protein, 85 aa, Zea mays
  Clone ID: MRT4577_118130C.1.pep
MGSGDPAADPLSSFLRHPGAFSFSRRVAMARDATATSVPALRPWLVDLLPLLVVLLIAAHVLALGYWIYRLATDGSRQPARSKKH

SEQ ID NO: 204541 - protein, 109 aa, Zea mays
  Clone ID: MRT4577_118131C.1.pep
IGKIRQSTDRATGRATMQEAKTEGSTGRCICRSSPVFISVKQAGILALPLIIWTGTLSAFTWTWCVCGQEDDEDFDEGFAAPNAARSADGTTVGRRIGSRRRSLWRCLW

SEQ ID NO: 204542 - protein, 75 aa, Zea mays
  Clone ID: MRT4577_118132C.1.pep
CTCNRALESSNVLIELYILDIHVSACSLVPFLPDACKYTIAIHTTKIVSTACSYQSGGSAFYVSPDLRAPDGAPT

SEQ ID NO: 204543 - protein, 48 aa, Zea mays
  Clone ID: MRT4577_118133C.1.pep
QFMPSNMLASSYCERLLLCQSVLSKSLVCSCAKFSSRQIDGLLSMAVV

SEQ ID NO: 204544 - protein, 74 aa, Zea mays
  unsure (1)..(74): unsure at all Xaa locations
  Clone ID: MRT4577_118134C.1.pep
YLRSSHLSSHCSPLHVMSRHQISTRHFSLEGANSWGKWVCQGLXIFQXQSYPXXXNHXHLHXSXISFLLXSLXH

SEQ ID NO: 204545 - protein, 405 aa, Zea mays
  unsure (1)..(405): unsure at all Xaa locations
  Clone ID: MRT4577_118135C.1.pep
HAFAHASGDALKTYARRWLPAVAKSGYLVLEQTDISTAEWNSRLLVEKMVSLLPAERNAVSCSFFLKLLKAASVLGASPASKAELTRRVALQLEDASVSDLLIPSSCAGETLYDVDAVTAILEELALRQAAAAGVPEASPPHARGHRRSRSAESSEYEGARRSASAPASHGAMVRIGRLVDGFLMEVAKDPNLPLDKLIAIAEAVPDCARPEHDHLYRAVDTYLRVHPEIDKGSRKKLCRVLNCRKLSETASMHAARNELLPLRVVVQVLFFENARAAALSVRGANGRAAAGGVKALLAKTRREETDGEEKRLRGLAVAGAPGDDGNDWSVEGLKRAASRVSTLRMRLEEDADDEAFVHRXRGGGAGPXASARVRALCAIPAGKPRRMLSRLWPSSSSSAVTERR

SEQ ID NO: 204546 - protein, 241 aa, Zea mays
  unsure (1)..(241): unsure at all Xaa locations
  Clone ID: MRT4577_118136C.1.pep
MAPLSRAARLLRSAVGRLRLPPPARAFSSAAATETGAGNGREAVIAAAAVAMAGSGLGLWLKPPSLADSGEAPGGQISVTCAASTEAQEEKGRFLFADSFRRRVFFNYEKRIRLLSPPEKIFEYFASVRNPEGEVYMLPGDLMRAVVPVFPPSESTIVREGRLRGERSPGELHCAPSEFFMLLDTNSDGLISFAEYIFFVTLLSIPESHFTAXLKMFDXDHSGVIDREEFKKSMSLMRSFN

SEQ ID NO: 204547 - protein, 42 aa, Zea mays
  Clone ID: MRT4577_118137C.1.pep
CSDTQSSASFCVASLYRTLGVALARLSVNSSAHGLLVIGLPP

SEQ ID NO: 204548 - protein, 122 aa, Zea mays
  Clone ID: MRT4577_118138C.1.pep
GGAPPSFFLKKKKQRPHFFFPNFFLIFKKKGTIFYLKGAPPKKPSPTGEQGTKTQKLLPNPPEGKKGSFSQIPPPMKPFLGAHPLKMPLELKPKTPSPGLAPAMEPPLPLLKRGLKKKTTGF

SEQ ID NO: 204549 - protein, 63 aa, Zea mays
  Clone ID: MRT4577_118139C.1.pep
QTDVRLCFAATPHTRYFNKAFCYDTTTVDANIPRKHSAWPHIPEKNPMTWNSTLSRKMTSQKV

SEQ ID NO: 204550 - protein, 81 aa, Zea mays
  Clone ID: MRT4577_11813C.1.pep
PRARAEPSAPADPREAPGHAVGPLGLVLLGPQHRRRHLPRRRGDLEVLEDRAAAHDCRRCLVLVVAGGRRVAGTDKGKGSF

SEQ ID NO: 204551 - protein, 56 aa, Zea mays
  unsure (1)..(56): unsure at all Xaa locations
  Clone ID: MRT4577_118140C.1.pep
RYAXLHTPELSFAMTWIYPSRCHCLLIILNFPIGSKLHFFHLIGLQHKHLLPSSDT

SEQ ID NO: 204552 - protein, 109 aa, Zea mays
  unsure (1)..(109): unsure at all Xaa locations
  Clone ID: MRT4577_118141C.1.pep
DHKRHIRRIFTDDIVLVNKNRKLELXRETLESKXRVEXYRLGRIKIEYVTCILALLHIHEHEILVYISSEXSSVLKRNTFXYLASMPQGHEDIDEDDSYRIKAGRIKWH

SEQ ID NO: 204553 - protein, 119 aa, Zea mays
  Clone ID: MRT4577_118143C.1.pep
PSFASFFPRGPFCPGKPGRGFRKFFFFWPLRAPGGPQRASRGGVFCFFRGGMGPRGSRFKKIFFFPSIRPVCSPFPLFFPKGPPPPRFGGVFSKILWFSPPLVVRGFFSPPLPPGVFEK

SEQ ID NO: 204554 - protein, 115 aa, Zea mays
  unsure (1)..(115): unsure at all Xaa locations
  Clone ID: MRT4577_118144C.1.pep
AEDGYSGVEVRVTPMCIEIIIRATRAQNILXEKGRRIRELASVIQKRFNLSEGGVELYAEKLNNRGLCDIAQAESLRYKLLGELAVRRACYGVLLFVIESGTKGCEISFNWNMPS
